United States Patent Application Publication US 2018/0305689 A1 - sequence listing, part 172

SEQ ID NO: 2554375 - RNA, 19 nt, Artificial Sequence
  Description of Artificial Sequence: Synthetic oligonucleotide
  Antisense strand to SEQ ID NO: 2554374
uucuccacaggagagaagg

SEQ ID NO: 2554376 - RNA, 19 nt, Artificial Sequence
  Description of Artificial Sequence: Synthetic oligonucleotide
  Sense strand starting at position 2516 of SEQ ID NO: 1888754
agaguaagcacuuagugag

SEQ ID NO: 2554377 - RNA, 19 nt, Artificial Sequence
  Description of Artificial Sequence: Synthetic oligonucleotide
  Antisense strand to SEQ ID NO: 2554376
cucacuaagugcuuacucu

SEQ ID NO: 2554378 - RNA, 19 nt, Artificial Sequence
  Description of Artificial Sequence: Synthetic oligonucleotide
  Sense strand starting at position 2669 of SEQ ID NO: 1888754
uuucuuuaugaucagugga

SEQ ID NO: 2554379 - RNA, 19 nt, Artificial Sequence
  Description of Artificial Sequence: Synthetic oligonucleotide
  Antisense strand to SEQ ID NO: 2554378
uccacugaucauaaagaaa

SEQ ID NO: 2554380 - RNA, 19 nt, Artificial Sequence
  Description of Artificial Sequence: Synthetic oligonucleotide
  Sense strand starting at position 2671 of SEQ ID NO: 1888754
ucuuuaugaucaguggauc

SEQ ID NO: 2554381 - RNA, 19 nt, Artificial Sequence
  Description of Artificial Sequence: Synthetic oligonucleotide
  Antisense strand to SEQ ID NO: 2554380
gauccacugaucauaaaga

SEQ ID NO: 2554382 - RNA, 19 nt, Artificial Sequence
  Description of Artificial Sequence: Synthetic oligonucleotide
  Sense strand starting at position 2672 of SEQ ID NO: 1888754
cuuuaugaucaguggaucu

SEQ ID NO: 2554383 - RNA, 19 nt, Artificial Sequence
  Description of Artificial Sequence: Synthetic oligonucleotide
  Antisense strand to SEQ ID NO: 2554382
agauccacugaucauaaag

SEQ ID NO: 2554384 - RNA, 19 nt, Artificial Sequence
  Description of Artificial Sequence: Synthetic oligonucleotide
  Sense strand starting at position 2731 of SEQ ID NO: 1888754
cuacacagucuggaaaguu

SEQ ID NO: 2554385 - RNA, 19 nt, Artificial Sequence
  Description of Artificial Sequence: Synthetic oligonucleotide
  Antisense strand to SEQ ID NO: 2554384
aacuuuccagacuguguag

SEQ ID NO: 2554386 - RNA, 19 nt, Artificial Sequence
  Description of Artificial Sequence: Synthetic oligonucleotide
  Sense strand starting at position 2739 of SEQ ID NO: 1888754
ucuggaaaguuauuguuaa

SEQ ID NO: 2554387 - RNA, 19 nt, Artificial Sequence
  Description of Artificial Sequence: Synthetic oligonucleotide
  Antisense strand to SEQ ID NO: 2554386
uuaacaauaacuuuccaga

SEQ ID NO: 2554388 - RNA, 19 nt, Artificial Sequence
  Description of Artificial Sequence: Synthetic oligonucleotide
  Sense strand starting at position 2831 of SEQ ID NO: 1888754
gcgccucauccuuucucua

SEQ ID NO: 2554389 - RNA, 19 nt, Artificial Sequence
  Description of Artificial Sequence: Synthetic oligonucleotide
  Antisense strand to SEQ ID NO: 2554388
uagagaaaggaugaggcgc

SEQ ID NO: 2554390 - RNA, 19 nt, Artificial Sequence
  Description of Artificial Sequence: Synthetic oligonucleotide
  Sense strand starting at position 2926 of SEQ ID NO: 1888754
cuaggaagccugcaaauaa

SEQ ID NO: 2554391 - RNA, 19 nt, Artificial Sequence
  Description of Artificial Sequence: Synthetic oligonucleotide
  Antisense strand to SEQ ID NO: 2554390
uuauuugcaggcuuccuag

SEQ ID NO: 2554392 - RNA, 19 nt, Artificial Sequence
  Description of Artificial Sequence: Synthetic oligonucleotide
  Sense strand starting at position 2988 of SEQ ID NO: 1888754
uguaucgugguacaacuua

SEQ ID NO: 2554393 - RNA, 19 nt, Artificial Sequence
  Description of Artificial Sequence: Synthetic oligonucleotide
  Antisense strand to SEQ ID NO: 2554392
uaaguuguaccacgauaca

SEQ ID NO: 2554394 - RNA, 19 nt, Artificial Sequence
  Description of Artificial Sequence: Synthetic oligonucleotide
  Sense strand starting at position 2993 of SEQ ID NO: 1888754
cgugguacaacuuagcauu

SEQ ID NO: 2554395 - RNA, 19 nt, Artificial Sequence
  Description of Artificial Sequence: Synthetic oligonucleotide
  Antisense strand to SEQ ID NO: 2554394
aaugcuaaguuguaccacg

SEQ ID NO: 2554396 - RNA, 19 nt, Artificial Sequence
  Description of Artificial Sequence: Synthetic oligonucleotide
  Sense strand starting at position 3369 of SEQ ID NO: 1888754
ugggauuacggucgacuuu

SEQ ID NO: 2554397 - RNA, 19 nt, Artificial Sequence
  Description of Artificial Sequence: Synthetic oligonucleotide
  Antisense strand to SEQ ID NO: 2554396
aaagucgaccguaauccca

SEQ ID NO: 2554398 - RNA, 19 nt, Artificial Sequence
  Description of Artificial Sequence: Synthetic oligonucleotide
  Sense strand starting at position 3397 of SEQ ID NO: 1888754
auuguuauaccucgaaaua

SEQ ID NO: 2554399 - RNA, 19 nt, Artificial Sequence
  Description of Artificial Sequence: Synthetic oligonucleotide
  Antisense strand to SEQ ID NO: 2554398
uauuucgagguauaacaau

SEQ ID NO: 2554400 - RNA, 19 nt, Artificial Sequence
  Description of Artificial Sequence: Synthetic oligonucleotide
  Sense strand starting at position 3398 of SEQ ID NO: 1888754
uuguuauaccucgaaauaa

SEQ ID NO: 2554401 - RNA, 19 nt, Artificial Sequence
  Description of Artificial Sequence: Synthetic oligonucleotide
  Antisense strand to SEQ ID NO: 2554400
uuauuucgagguauaacaa

SEQ ID NO: 2554402 - RNA, 19 nt, Artificial Sequence
  Description of Artificial Sequence: Synthetic oligonucleotide
  Sense strand starting at position 3593 of SEQ ID NO: 1888754
ugucgucaucuguaagaac

SEQ ID NO: 2554403 - RNA, 19 nt, Artificial Sequence
  Description of Artificial Sequence: Synthetic oligonucleotide
  Antisense strand to SEQ ID NO: 2554402
guucuuacagaugacgaca

SEQ ID NO: 2554404 - RNA, 19 nt, Artificial Sequence
  Description of Artificial Sequence: Synthetic oligonucleotide
  Sense strand starting at position 3662 of SEQ ID NO: 1888754
acuagaauuucuuaggacu

SEQ ID NO: 2554405 - RNA, 19 nt, Artificial Sequence
  Description of Artificial Sequence: Synthetic oligonucleotide
  Antisense strand to SEQ ID NO: 2554404
aguccuaagaaauucuagu

SEQ ID NO: 2554406 - RNA, 19 nt, Artificial Sequence
  Description of Artificial Sequence: Synthetic oligonucleotide
  Sense strand starting at position 3665 of SEQ ID NO: 1888754
agaauuucuuaggacuuau

SEQ ID NO: 2554407 - RNA, 19 nt, Artificial Sequence
  Description of Artificial Sequence: Synthetic oligonucleotide
  Antisense strand to SEQ ID NO: 2554406
auaaguccuaagaaauucu

SEQ ID NO: 2554408 - RNA, 19 nt, Artificial Sequence
  Description of Artificial Sequence: Synthetic oligonucleotide
  Sense strand starting at position 3764 of SEQ ID NO: 1888754
auguucuuccauugauucu

SEQ ID NO: 2554409 - RNA, 19 nt, Artificial Sequence
  Description of Artificial Sequence: Synthetic oligonucleotide
  Antisense strand to SEQ ID NO: 2554408
agaaucaauggaagaacau

SEQ ID NO: 2554410 - RNA, 19 nt, Artificial Sequence
  Description of Artificial Sequence: Synthetic oligonucleotide
  Sense strand starting at position 3784 of SEQ ID NO: 1888754
cucuuuaaucaggguacuu

SEQ ID NO: 2554411 - RNA, 19 nt, Artificial Sequence
  Description of Artificial Sequence: Synthetic oligonucleotide
  Antisense strand to SEQ ID NO: 2554410
aaguacccugauuaaagag

SEQ ID NO: 2554412 - RNA, 19 nt, Artificial Sequence
  Description of Artificial Sequence: Synthetic oligonucleotide
  Sense strand starting at position 2086 of SEQ ID NO: 1888755
ccauauguagaucggcaua

SEQ ID NO: 2554413 - RNA, 19 nt, Artificial Sequence
  Description of Artificial Sequence: Synthetic oligonucleotide
  Antisense strand to SEQ ID NO: 2554412
uaugccgaucuacauaugg

SEQ ID NO: 2554414 - RNA, 19 nt, Artificial Sequence
  Description of Artificial Sequence: Synthetic oligonucleotide
  Sense strand starting at position 2100 of SEQ ID NO: 1888755
gcauauggcucuccucuua

SEQ ID NO: 2554415 - RNA, 19 nt, Artificial Sequence
  Description of Artificial Sequence: Synthetic oligonucleotide
  Antisense strand to SEQ ID NO: 2554414
uaagaggagagccauaugc

SEQ ID NO: 2554416 - RNA, 19 nt, Artificial Sequence
  Description of Artificial Sequence: Synthetic oligonucleotide
  Sense strand starting at position 2112 of SEQ ID NO: 1888755
ccucuuauugggcauggaa

SEQ ID NO: 2554417 - RNA, 19 nt, Artificial Sequence
  Description of Artificial Sequence: Synthetic oligonucleotide
  Antisense strand to SEQ ID NO: 2554416
uuccaugcccaauaagagg

SEQ ID NO: 2554418 - RNA, 19 nt, Artificial Sequence
  Description of Artificial Sequence: Synthetic oligonucleotide
  Sense strand starting at position 2300 of SEQ ID NO: 1888755
augaguaauuuguggaaag

SEQ ID NO: 2554419 - RNA, 19 nt, Artificial Sequence
  Description of Artificial Sequence: Synthetic oligonucleotide
  Antisense strand to SEQ ID NO: 2554418
cuuuccacaaauuacucau

SEQ ID NO: 2554420 - RNA, 19 nt, Artificial Sequence
  Description of Artificial Sequence: Synthetic oligonucleotide
  Sense strand starting at position 2301 of SEQ ID NO: 1888755
ugaguaauuuguggaaaga

SEQ ID NO: 2554421 - RNA, 19 nt, Artificial Sequence
  Description of Artificial Sequence: Synthetic oligonucleotide
  Antisense strand to SEQ ID NO: 2554420
ucuuuccacaaauuacuca

SEQ ID NO: 2554422 - RNA, 19 nt, Artificial Sequence
  Description of Artificial Sequence: Synthetic oligonucleotide
  Sense strand starting at position 2339 of SEQ ID NO: 1888755
gcuuaucaugcagauaaau

SEQ ID NO: 2554423 - RNA, 19 nt, Artificial Sequence
  Description of Artificial Sequence: Synthetic oligonucleotide
  Antisense strand to SEQ ID NO: 2554422
auuuaucugcaugauaagc

SEQ ID NO: 2554424 - RNA, 19 nt, Artificial Sequence
  Description of Artificial Sequence: Synthetic oligonucleotide
  Sense strand starting at position 2358 of SEQ ID NO: 1888755
ccucuauucucgucuauca

SEQ ID NO: 2554425 - RNA, 19 nt, Artificial Sequence
  Description of Artificial Sequence: Synthetic oligonucleotide
  Antisense strand to SEQ ID NO: 2554424
ugauagacgagaauagagg

SEQ ID NO: 2554426 - RNA, 19 nt, Artificial Sequence
  Description of Artificial Sequence: Synthetic oligonucleotide
  Sense strand starting at position 2367 of SEQ ID NO: 1888755
ucgucuaucaaaugaugga

SEQ ID NO: 2554427 - RNA, 19 nt, Artificial Sequence
  Description of Artificial Sequence: Synthetic oligonucleotide
  Antisense strand to SEQ ID NO: 2554426
uccaucauuugauagacga

SEQ ID NO: 2554428 - RNA, 19 nt, Artificial Sequence
  Description of Artificial Sequence: Synthetic oligonucleotide
  Sense strand starting at position 2368 of SEQ ID NO: 1888755
cgucuaucaaaugauggau

SEQ ID NO: 2554429 - RNA, 19 nt, Artificial Sequence
  Description of Artificial Sequence: Synthetic oligonucleotide
  Antisense strand to SEQ ID NO: 2554428
auccaucauuugauagacg

SEQ ID NO: 2554430 - RNA, 19 nt, Artificial Sequence
  Description of Artificial Sequence: Synthetic oligonucleotide
  Sense strand starting at position 2370 of SEQ ID NO: 1888755
ucuaucaaaugauggauuu

SEQ ID NO: 2554431 - RNA, 19 nt, Artificial Sequence
  Description of Artificial Sequence: Synthetic oligonucleotide
  Antisense strand to SEQ ID NO: 2554430
aaauccaucauuugauaga

SEQ ID NO: 2554432 - RNA, 19 nt, Artificial Sequence
  Description of Artificial Sequence: Synthetic oligonucleotide
  Sense strand starting at position 2391 of SEQ ID NO: 1888755
aguaauucucaccaacagu

SEQ ID NO: 2554433 - RNA, 19 nt, Artificial Sequence
  Description of Artificial Sequence: Synthetic oligonucleotide
  Antisense strand to SEQ ID NO: 2554432
acuguuggugagaauuacu

SEQ ID NO: 2554434 - RNA, 19 nt, Artificial Sequence
  Description of Artificial Sequence: Synthetic oligonucleotide
  Sense strand starting at position 2526 of SEQ ID NO: 1888755
ugaucagagcccugaguuu

SEQ ID NO: 2554435 - RNA, 19 nt, Artificial Sequence
  Description of Artificial Sequence: Synthetic oligonucleotide
  Antisense strand to SEQ ID NO: 2554434
aaacucagggcucugauca

SEQ ID NO: 2554436 - RNA, 19 nt, Artificial Sequence
  Description of Artificial Sequence: Synthetic oligonucleotide
  Sense strand starting at position 2562 of SEQ ID NO: 1888755
ugaucucuccucuguacuu

SEQ ID NO: 2554437 - RNA, 19 nt, Artificial Sequence
  Description of Artificial Sequence: Synthetic oligonucleotide
  Antisense strand to SEQ ID NO: 2554436
aaguacagaggagagauca

SEQ ID NO: 2554438 - RNA, 19 nt, Artificial Sequence
  Description of Artificial Sequence: Synthetic oligonucleotide
  Sense strand starting at position 2590 of SEQ ID NO: 1888755
caacaagauucugagguau

SEQ ID NO: 2554439 - RNA, 19 nt, Artificial Sequence
  Description of Artificial Sequence: Synthetic oligonucleotide
  Antisense strand to SEQ ID NO: 2554438
auaccucagaaucuuguug

SEQ ID NO: 2554440 - RNA, 19 nt, Artificial Sequence
  Description of Artificial Sequence: Synthetic oligonucleotide
  Sense strand starting at position 2592 of SEQ ID NO: 1888755
acaagauucugagguauuu

SEQ ID NO: 2554441 - RNA, 19 nt, Artificial Sequence
  Description of Artificial Sequence: Synthetic oligonucleotide
  Antisense strand to SEQ ID NO: 2554440
aaauaccucagaaucuugu

SEQ ID NO: 2554442 - RNA, 19 nt, Artificial Sequence
  Description of Artificial Sequence: Synthetic oligonucleotide
  Sense strand starting at position 2717 of SEQ ID NO: 1888755
ggagaacuauccuugcaga

SEQ ID NO: 2554443 - RNA, 19 nt, Artificial Sequence
  Description of Artificial Sequence: Synthetic oligonucleotide
  Antisense strand to SEQ ID NO: 2554442
ucugcaaggauaguucucc

SEQ ID NO: 2554444 - RNA, 19 nt, Artificial Sequence
  Description of Artificial Sequence: Synthetic oligonucleotide
  Sense strand starting at position 2969 of SEQ ID NO: 1888755
guagcugucauuuaauguu

SEQ ID NO: 2554445 - RNA, 19 nt, Artificial Sequence
  Description of Artificial Sequence: Synthetic oligonucleotide
  Antisense strand to SEQ ID NO: 2554444
aacauuaaaugacagcuac

SEQ ID NO: 2554446 - RNA, 19 nt, Artificial Sequence
  Description of Artificial Sequence: Synthetic oligonucleotide
  Sense strand starting at position 3001 of SEQ ID NO: 1888755
uuaguaggcuuccugaaca

SEQ ID NO: 2554447 - RNA, 19 nt, Artificial Sequence
  Description of Artificial Sequence: Synthetic oligonucleotide
  Antisense strand to SEQ ID NO: 2554446
uguucaggaagccuacuaa

SEQ ID NO: 2554448 - RNA, 19 nt, Artificial Sequence
  Description of Artificial Sequence: Synthetic oligonucleotide
  Sense strand starting at position 3028 of SEQ ID NO: 1888755
gcuggcacuauuuguugaa

SEQ ID NO: 2554449 - RNA, 19 nt, Artificial Sequence
  Description of Artificial Sequence: Synthetic oligonucleotide
  Antisense strand to SEQ ID NO: 2554448
uucaacaaauagugccagc

SEQ ID NO: 2554450 - RNA, 19 nt, Artificial Sequence
  Description of Artificial Sequence: Synthetic oligonucleotide
  Sense strand starting at position 3041 of SEQ ID NO: 1888755
guugaauugaagugucuuc

SEQ ID NO: 2554451 - RNA, 19 nt, Artificial Sequence
  Description of Artificial Sequence: Synthetic oligonucleotide
  Antisense strand to SEQ ID NO: 2554450
gaagacacuucaauucaac

SEQ ID NO: 2554452 - RNA, 19 nt, Artificial Sequence
  Description of Artificial Sequence: Synthetic oligonucleotide
  Sense strand starting at position 3068 of SEQ ID NO: 1888755
ugcuuucuagcucagucau

SEQ ID NO: 2554453 - RNA, 19 nt, Artificial Sequence
  Description of Artificial Sequence: Synthetic oligonucleotide
  Antisense strand to SEQ ID NO: 2554452
augacugagcuagaaagca

SEQ ID NO: 2554454 - RNA, 19 nt, Artificial Sequence
  Description of Artificial Sequence: Synthetic oligonucleotide
  Sense strand starting at position 3074 of SEQ ID NO: 1888755
cuagcucagucauugauuu

SEQ ID NO: 2554455 - RNA, 19 nt, Artificial Sequence
  Description of Artificial Sequence: Synthetic oligonucleotide
  Antisense strand to SEQ ID NO: 2554454
aaaucaaugacugagcuag

SEQ ID NO: 2554456 - RNA, 19 nt, Artificial Sequence
  Description of Artificial Sequence: Synthetic oligonucleotide
  Sense strand starting at position 3193 of SEQ ID NO: 1888755
guccaugugccugagguaa

SEQ ID NO: 2554457 - RNA, 19 nt, Artificial Sequence
  Description of Artificial Sequence: Synthetic oligonucleotide
  Antisense strand to SEQ ID NO: 2554456
uuaccucaggcacauggac

SEQ ID NO: 2554458 - RNA, 19 nt, Artificial Sequence
  Description of Artificial Sequence: Synthetic oligonucleotide
  Sense strand starting at position 3206 of SEQ ID NO: 1888755
agguaagagguuugacuua

SEQ ID NO: 2554459 - RNA, 19 nt, Artificial Sequence
  Description of Artificial Sequence: Synthetic oligonucleotide
  Antisense strand to SEQ ID NO: 2554458
uaagucaaaccucuuaccu

SEQ ID NO: 2554460 - RNA, 19 nt, Artificial Sequence
  Description of Artificial Sequence: Synthetic oligonucleotide
  Sense strand starting at position 3256 of SEQ ID NO: 1888755
ggcaucaucuaggugcuua

SEQ ID NO: 2554461 - RNA, 19 nt, Artificial Sequence
  Description of Artificial Sequence: Synthetic oligonucleotide
  Antisense strand to SEQ ID NO: 2554460
uaagcaccuagaugaugcc

SEQ ID NO: 2554462 - RNA, 19 nt, Artificial Sequence
  Description of Artificial Sequence: Synthetic oligonucleotide
  Sense strand starting at position 3261 of SEQ ID NO: 1888755
caucuaggugcuuauuaga

SEQ ID NO: 2554463 - RNA, 19 nt, Artificial Sequence
  Description of Artificial Sequence: Synthetic oligonucleotide
  Antisense strand to SEQ ID NO: 2554462
ucuaauaagcaccuagaug

SEQ ID NO: 2554464 - RNA, 19 nt, Artificial Sequence
  Description of Artificial Sequence: Synthetic oligonucleotide
  Sense strand starting at position 3349 of SEQ ID NO: 1888755
ggguaugcauguucaaguu

SEQ ID NO: 2554465 - RNA, 19 nt, Artificial Sequence
  Description of Artificial Sequence: Synthetic oligonucleotide
  Antisense strand to SEQ ID NO: 2554464
aacuugaacaugcauaccc

SEQ ID NO: 2554466 - RNA, 19 nt, Artificial Sequence
  Description of Artificial Sequence: Synthetic oligonucleotide
  Sense strand starting at position 3414 of SEQ ID NO: 1888755
gggugcuuagacgaaaugu

SEQ ID NO: 2554467 - RNA, 19 nt, Artificial Sequence
  Description of Artificial Sequence: Synthetic oligonucleotide
  Antisense strand to SEQ ID NO: 2554466
acauuucgucuaagcaccc

SEQ ID NO: 2554468 - RNA, 19 nt, Artificial Sequence
  Description of Artificial Sequence: Synthetic oligonucleotide
  Sense strand starting at position 3423 of SEQ ID NO: 1888755
gacgaaauguccucugccu

SEQ ID NO: 2554469 - RNA, 19 nt, Artificial Sequence
  Description of Artificial Sequence: Synthetic oligonucleotide
  Antisense strand to SEQ ID NO: 2554468
aggcagaggacauuucguc

SEQ ID NO: 2554470 - RNA, 19 nt, Artificial Sequence
  Description of Artificial Sequence: Synthetic oligonucleotide
  Sense strand starting at position 3456 of SEQ ID NO: 1888755
acagauguuucugucucca

SEQ ID NO: 2554471 - RNA, 19 nt, Artificial Sequence
  Description of Artificial Sequence: Synthetic oligonucleotide
  Antisense strand to SEQ ID NO: 2554470
uggagacagaaacaucugu

SEQ ID NO: 2554472 - RNA, 19 nt, Artificial Sequence
  Description of Artificial Sequence: Synthetic oligonucleotide
  Sense strand starting at position 3458 of SEQ ID NO: 1888755
agauguuucugucuccacu

SEQ ID NO: 2554473 - RNA, 19 nt, Artificial Sequence
  Description of Artificial Sequence: Synthetic oligonucleotide
  Antisense strand to SEQ ID NO: 2554472
aguggagacagaaacaucu

SEQ ID NO: 2554474 - RNA, 19 nt, Artificial Sequence
  Description of Artificial Sequence: Synthetic oligonucleotide
  Sense strand starting at position 3476 of SEQ ID NO: 1888755
ucagauagcgcuuagccua

SEQ ID NO: 2554475 - RNA, 19 nt, Artificial Sequence
  Description of Artificial Sequence: Synthetic oligonucleotide
  Antisense strand to SEQ ID NO: 2554474
uaggcuaagcgcuaucuga

SEQ ID NO: 2554476 - RNA, 19 nt, Artificial Sequence
  Description of Artificial Sequence: Synthetic oligonucleotide
  Sense strand starting at position 3510 of SEQ ID NO: 1888755
uaagucugccacuagugua

SEQ ID NO: 2554477 - RNA, 19 nt, Artificial Sequence
  Description of Artificial Sequence: Synthetic oligonucleotide
  Antisense strand to SEQ ID NO: 2554476
uacacuaguggcagacuua

SEQ ID NO: 2554478 - RNA, 19 nt, Artificial Sequence
  Description of Artificial Sequence: Synthetic oligonucleotide
  Sense strand starting at position 3600 of SEQ ID NO: 1888755
cugguuggcuucucuauaa

SEQ ID NO: 2554479 - RNA, 19 nt, Artificial Sequence
  Description of Artificial Sequence: Synthetic oligonucleotide
  Antisense strand to SEQ ID NO: 2554478
uuauagagaagccaaccag

SEQ ID NO: 2554480 - RNA, 19 nt, Artificial Sequence
  Description of Artificial Sequence: Synthetic oligonucleotide
  Sense strand starting at position 3624 of SEQ ID NO: 1888755
aggguagaguccucucacu

SEQ ID NO: 2554481 - RNA, 19 nt, Artificial Sequence
  Description of Artificial Sequence: Synthetic oligonucleotide
  Antisense strand to SEQ ID NO: 2554480
agugagaggacucuacccu

SEQ ID NO: 2554482 - RNA, 19 nt, Artificial Sequence
  Description of Artificial Sequence: Synthetic oligonucleotide
  Sense strand starting at position 3721 of SEQ ID NO: 1888755
aaccaagaguggcuuaaga

SEQ ID NO: 2554483 - RNA, 19 nt, Artificial Sequence
  Description of Artificial Sequence: Synthetic oligonucleotide
  Antisense strand to SEQ ID NO: 2554482
ucuuaagccacucuugguu

SEQ ID NO: 2554484 - RNA, 19 nt, Artificial Sequence
  Description of Artificial Sequence: Synthetic oligonucleotide
  Sense strand starting at position 3849 of SEQ ID NO: 1888755
agaucuaucuuccuagagu

SEQ ID NO: 2554485 - RNA, 19 nt, Artificial Sequence
  Description of Artificial Sequence: Synthetic oligonucleotide
  Antisense strand to SEQ ID NO: 2554484
acucuaggaagauagaucu

SEQ ID NO: 2554486 - RNA, 19 nt, Artificial Sequence
  Description of Artificial Sequence: Synthetic oligonucleotide
  Sense strand starting at position 3852 of SEQ ID NO: 1888755
ucuaucuuccuagagucuu

SEQ ID NO: 2554487 - RNA, 19 nt, Artificial Sequence
  Description of Artificial Sequence: Synthetic oligonucleotide
  Antisense strand to SEQ ID NO: 2554486
aagacucuaggaagauaga

SEQ ID NO: 2554488 - RNA, 19 nt, Artificial Sequence
  Description of Artificial Sequence: Synthetic oligonucleotide
  Sense strand starting at position 3863 of SEQ ID NO: 1888755
agagucuuaaauggagagu

SEQ ID NO: 2554489 - RNA, 19 nt, Artificial Sequence
  Description of Artificial Sequence: Synthetic oligonucleotide
  Antisense strand to SEQ ID NO: 2554488
acucuccauuuaagacucu

SEQ ID NO: 2554490 - RNA, 19 nt, Artificial Sequence
  Description of Artificial Sequence: Synthetic oligonucleotide
  Sense strand starting at position 3898 of SEQ ID NO: 1888755
uuguuugcucuccauguua

SEQ ID NO: 2554491 - RNA, 19 nt, Artificial Sequence
  Description of Artificial Sequence: Synthetic oligonucleotide
  Antisense strand to SEQ ID NO: 2554490
uaacauggagagcaaacaa

SEQ ID NO: 2554492 - RNA, 19 nt, Artificial Sequence
  Description of Artificial Sequence: Synthetic oligonucleotide
  Sense strand starting at position 107 of SEQ ID NO: 1888756
acaauuuaaucagggagag

SEQ ID NO: 2554493 - RNA, 19 nt, Artificial Sequence
  Description of Artificial Sequence: Synthetic oligonucleotide
  Antisense strand to SEQ ID NO: 2554492
cucucccugauuaaauugu

SEQ ID NO: 2554494 - RNA, 19 nt, Artificial Sequence
  Description of Artificial Sequence: Synthetic oligonucleotide
  Sense strand starting at position 161 of SEQ ID NO: 1888756
guagaaucaccugguuauc

SEQ ID NO: 2554495 - RNA, 19 nt, Artificial Sequence
  Description of Artificial Sequence: Synthetic oligonucleotide
  Antisense strand to SEQ ID NO: 2554494
gauaaccaggugauucuac

SEQ ID NO: 2554496 - RNA, 19 nt, Artificial Sequence
  Description of Artificial Sequence: Synthetic oligonucleotide
  Sense strand starting at position 201 of SEQ ID NO: 1888756
ugagcuuauguggauggua

SEQ ID NO: 2554497 - RNA, 19 nt, Artificial Sequence
  Description of Artificial Sequence: Synthetic oligonucleotide
  Antisense strand to SEQ ID NO: 2554496
uaccauccacauaagcuca

SEQ ID NO: 2554498 - RNA, 19 nt, Artificial Sequence
  Description of Artificial Sequence: Synthetic oligonucleotide
  Sense strand starting at position 203 of SEQ ID NO: 1888756
agcuuauguggaugguaga

SEQ ID NO: 2554499 - RNA, 19 nt, Artificial Sequence
  Description of Artificial Sequence: Synthetic oligonucleotide
  Antisense strand to SEQ ID NO: 2554498
ucuaccauccacauaagcu

SEQ ID NO: 2554500 - RNA, 19 nt, Artificial Sequence
  Description of Artificial Sequence: Synthetic oligonucleotide
  Sense strand starting at position 244 of SEQ ID NO: 1888756
guauuuacaguuuguguuu

SEQ ID NO: 2554501 - RNA, 19 nt, Artificial Sequence
  Description of Artificial Sequence: Synthetic oligonucleotide
  Antisense strand to SEQ ID NO: 2554500
aaacacaaacuguaaauac

SEQ ID NO: 2554502 - RNA, 19 nt, Artificial Sequence
  Description of Artificial Sequence: Synthetic oligonucleotide
  Sense strand starting at position 392 of SEQ ID NO: 1888756
uaugaaugguguuugcaga

SEQ ID NO: 2554503 - RNA, 19 nt, Artificial Sequence
  Description of Artificial Sequence: Synthetic oligonucleotide
  Antisense strand to SEQ ID NO: 2554502
ucugcaaacaccauucaua

SEQ ID NO: 2554504 - RNA, 19 nt, Artificial Sequence
  Description of Artificial Sequence: Synthetic oligonucleotide
  Sense strand starting at position 393 of SEQ ID NO: 1888756
augaaugguguuugcagaa

SEQ ID NO: 2554505 - RNA, 19 nt, Artificial Sequence
  Description of Artificial Sequence: Synthetic oligonucleotide
  Antisense strand to SEQ ID NO: 2554504
uucugcaaacaccauucau

SEQ ID NO: 2554506 - RNA, 19 nt, Artificial Sequence
  Description of Artificial Sequence: Synthetic oligonucleotide
  Sense strand starting at position 614 of SEQ ID NO: 1888756
uggugcuuggcagaaggua

SEQ ID NO: 2554507 - RNA, 19 nt, Artificial Sequence
  Description of Artificial Sequence: Synthetic oligonucleotide
  Antisense strand to SEQ ID NO: 2554506
uaccuucugccaagcacca

SEQ ID NO: 2554508 - RNA, 19 nt, Artificial Sequence
  Description of Artificial Sequence: Synthetic oligonucleotide
  Sense strand starting at position 822 of SEQ ID NO: 1888756
aucagucauuccucaggga

SEQ ID NO: 2554509 - RNA, 19 nt, Artificial Sequence
  Description of Artificial Sequence: Synthetic oligonucleotide
  Antisense strand to SEQ ID NO: 2554508
ucccugaggaaugacugau

SEQ ID NO: 2554510 - RNA, 19 nt, Artificial Sequence
  Description of Artificial Sequence: Synthetic oligonucleotide
  Sense strand starting at position 823 of SEQ ID NO: 1888756
ucagucauuccucagggau

SEQ ID NO: 2554511 - RNA, 19 nt, Artificial Sequence
  Description of Artificial Sequence: Synthetic oligonucleotide
  Antisense strand to SEQ ID NO: 2554510
aucccugaggaaugacuga

SEQ ID NO: 2554512 - RNA, 19 nt, Artificial Sequence
  Description of Artificial Sequence: Synthetic oligonucleotide
  Sense strand starting at position 881 of SEQ ID NO: 1888756
cuugaauagacuugaggug

SEQ ID NO: 2554513 - RNA, 19 nt, Artificial Sequence
  Description of Artificial Sequence: Synthetic oligonucleotide
  Antisense strand to SEQ ID NO: 2554512
caccucaagucuauucaag

SEQ ID NO: 2554514 - RNA, 19 nt, Artificial Sequence
  Description of Artificial Sequence: Synthetic oligonucleotide
  Sense strand starting at position 886 of SEQ ID NO: 1888756
auagacuugagguguuaaa

SEQ ID NO: 2554515 - RNA, 19 nt, Artificial Sequence
  Description of Artificial Sequence: Synthetic oligonucleotide
  Antisense strand to SEQ ID NO: 2554514
uuuaacaccucaagucuau

SEQ ID NO: 2554516 - RNA, 19 nt, Artificial Sequence
  Description of Artificial Sequence: Synthetic oligonucleotide
  Sense strand starting at position 997 of SEQ ID NO: 1888756
cuguaacuaucagucucaa

SEQ ID NO: 2554517 - RNA, 19 nt, Artificial Sequence
  Description of Artificial Sequence: Synthetic oligonucleotide
  Antisense strand to SEQ ID NO: 2554516
uugagacugauaguuacag

SEQ ID NO: 2554518 - RNA, 19 nt, Artificial Sequence
  Description of Artificial Sequence: Synthetic oligonucleotide
  Sense strand starting at position 1168 of SEQ ID NO: 1888756
cagcucuuaugggcuaaga

SEQ ID NO: 2554519 - RNA, 19 nt, Artificial Sequence
  Description of Artificial Sequence: Synthetic oligonucleotide
  Antisense strand to SEQ ID NO: 2554518
ucuuagcccauaagagcug

SEQ ID NO: 2554520 - RNA, 19 nt, Artificial Sequence
  Description of Artificial Sequence: Synthetic oligonucleotide
  Sense strand starting at position 1170 of SEQ ID NO: 1888756
gcucuuaugggcuaagaag

SEQ ID NO: 2554521 - RNA, 19 nt, Artificial Sequence
  Description of Artificial Sequence: Synthetic oligonucleotide
  Antisense strand to SEQ ID NO: 2554520
cuucuuagcccauaagagc

SEQ ID NO: 2554522 - RNA, 19 nt, Artificial Sequence
  Description of Artificial Sequence: Synthetic oligonucleotide
  Sense strand starting at position 1208 of SEQ ID NO: 1888756
ugcugaguccgagcuuguu

SEQ ID NO: 2554523 - RNA, 19 nt, Artificial Sequence
  Description of Artificial Sequence: Synthetic oligonucleotide
  Antisense strand to SEQ ID NO: 2554522
aacaagcucggacucagca

SEQ ID NO: 2554524 - RNA, 19 nt, Artificial Sequence
  Description of Artificial Sequence: Synthetic oligonucleotide
  Sense strand starting at position 1230 of SEQ ID NO: 1888756
uggguagucaggcaaggaa

SEQ ID NO: 2554525 - RNA, 19 nt, Artificial Sequence
  Description of Artificial Sequence: Synthetic oligonucleotide
  Antisense strand to SEQ ID NO: 2554524
uuccuugccugacuaccca

SEQ ID NO: 2554526 - RNA, 19 nt, Artificial Sequence
  Description of Artificial Sequence: Synthetic oligonucleotide
  Sense strand starting at position 1252 of SEQ ID NO: 1888756
agggcuagagucugaagau

SEQ ID NO: 2554527 - RNA, 19 nt, Artificial Sequence
  Description of Artificial Sequence: Synthetic oligonucleotide
  Antisense strand to SEQ ID NO: 2554526
aucuucagacucuagcccu

SEQ ID NO: 2554528 - RNA, 19 nt, Artificial Sequence
  Description of Artificial Sequence: Synthetic oligonucleotide
  Sense strand starting at position 1328 of SEQ ID NO: 1888756
cauguaggaguccaguaaa

SEQ ID NO: 2554529 - RNA, 19 nt, Artificial Sequence
  Description of Artificial Sequence: Synthetic oligonucleotide
  Antisense strand to SEQ ID NO: 2554528
uuuacuggacuccuacaug

SEQ ID NO: 2554530 - RNA, 19 nt, Artificial Sequence
  Description of Artificial Sequence: Synthetic oligonucleotide
  Sense strand starting at position 1331 of SEQ ID NO: 1888756
guaggaguccaguaaagac

SEQ ID NO: 2554531 - RNA, 19 nt, Artificial Sequence
  Description of Artificial Sequence: Synthetic oligonucleotide
  Antisense strand to SEQ ID NO: 2554530
gucuuuacuggacuccuac

SEQ ID NO: 2554532 - RNA, 19 nt, Artificial Sequence
  Description of Artificial Sequence: Synthetic oligonucleotide
  Sense strand starting at position 1391 of SEQ ID NO: 1888756
ccuaguuggccucagaaau

SEQ ID NO: 2554533 - RNA, 19 nt, Artificial Sequence
  Description of Artificial Sequence: Synthetic oligonucleotide
  Antisense strand to SEQ ID NO: 2554532
auuucugaggccaacuagg

SEQ ID NO: 2554534 - RNA, 19 nt, Artificial Sequence
  Description of Artificial Sequence: Synthetic oligonucleotide
  Sense strand starting at position 1435 of SEQ ID NO: 1888756
ucuguuugaagguagggau

SEQ ID NO: 2554535 - RNA, 19 nt, Artificial Sequence
  Description of Artificial Sequence: Synthetic oligonucleotide
  Antisense strand to SEQ ID NO: 2554534
aucccuaccuucaaacaga

SEQ ID NO: 2554536 - RNA, 19 nt, Artificial Sequence
  Description of Artificial Sequence: Synthetic oligonucleotide
  Sense strand starting at position 1476 of SEQ ID NO: 1888756
cugcauuucuggccucaaa

SEQ ID NO: 2554537 - RNA, 19 nt, Artificial Sequence
  Description of Artificial Sequence: Synthetic oligonucleotide
  Antisense strand to SEQ ID NO: 2554536
uuugaggccagaaaugcag

SEQ ID NO: 2554538 - RNA, 19 nt, Artificial Sequence
  Description of Artificial Sequence: Synthetic oligonucleotide
  Sense strand starting at position 1577 of SEQ ID NO: 1888756
ccagacugguuccugaauu

SEQ ID NO: 2554539 - RNA, 19 nt, Artificial Sequence
  Description of Artificial Sequence: Synthetic oligonucleotide
  Antisense strand to SEQ ID NO: 2554538
aauucaggaaccagucugg

SEQ ID NO: 2554540 - RNA, 19 nt, Artificial Sequence
  Description of Artificial Sequence: Synthetic oligonucleotide
  Sense strand starting at position 1667 of SEQ ID NO: 1888756
cuuaaauagagagguucga

SEQ ID NO: 2554541 - RNA, 19 nt, Artificial Sequence
  Description of Artificial Sequence: Synthetic oligonucleotide
  Antisense strand to SEQ ID NO: 2554540
ucgaaccucucuauuuaag

SEQ ID NO: 2554542 - RNA, 19 nt, Artificial Sequence
  Description of Artificial Sequence: Synthetic oligonucleotide
  Sense strand starting at position 1677 of SEQ ID NO: 1888756
gagguucgacucugcauuu

SEQ ID NO: 2554543 - RNA, 19 nt, Artificial Sequence
  Description of Artificial Sequence: Synthetic oligonucleotide
  Antisense strand to SEQ ID NO: 2554542
aaaugcagagucgaaccuc

SEQ ID NO: 2554544 - RNA, 19 nt, Artificial Sequence
  Description of Artificial Sequence: Synthetic oligonucleotide
  Sense strand starting at position 1746 of SEQ ID NO: 1888756
ccaaaucugagcggacaga

SEQ ID NO: 2554545 - RNA, 19 nt, Artificial Sequence
  Description of Artificial Sequence: Synthetic oligonucleotide
  Antisense strand to SEQ ID NO: 2554544
ucuguccgcucagauuugg

SEQ ID NO: 2554546 - RNA, 19 nt, Artificial Sequence
  Description of Artificial Sequence: Synthetic oligonucleotide
  Sense strand starting at position 1798 of SEQ ID NO: 1888756
ccuacaaauuggcuugaaa

SEQ ID NO: 2554547 - RNA, 19 nt, Artificial Sequence
  Description of Artificial Sequence: Synthetic oligonucleotide
  Antisense strand to SEQ ID NO: 2554546
uuucaagccaauuuguagg

SEQ ID NO: 2554548 - RNA, 19 nt, Artificial Sequence
  Description of Artificial Sequence: Synthetic oligonucleotide
  Sense strand starting at position 2059 of SEQ ID NO: 1888756
acaaucuggucagcucaaa

SEQ ID NO: 2554549 - RNA, 19 nt, Artificial Sequence
  Description of Artificial Sequence: Synthetic oligonucleotide
  Antisense strand to SEQ ID NO: 2554548
uuugagcugaccagauugu

SEQ ID NO: 2554550 - RNA, 19 nt, Artificial Sequence
  Description of Artificial Sequence: Synthetic oligonucleotide
  Sense strand starting at position 2533 of SEQ ID NO: 1888756
cgauuaucacgccaagaag

SEQ ID NO: 2554551 - RNA, 19 nt, Artificial Sequence
  Description of Artificial Sequence: Synthetic oligonucleotide
  Antisense strand to SEQ ID NO: 2554550
cuucuuggcgugauaaucg

SEQ ID NO: 2554552 - RNA, 19 nt, Artificial Sequence
  Description of Artificial Sequence: Synthetic oligonucleotide
  Sense strand starting at position 3322 of SEQ ID NO: 1888756
auacuuuacgagugaggug

SEQ ID NO: 2554553 - RNA, 19 nt, Artificial Sequence
  Description of Artificial Sequence: Synthetic oligonucleotide
  Antisense strand to SEQ ID NO: 2554552
caccucacucguaaaguau

SEQ ID NO: 2554554 - RNA, 19 nt, Artificial Sequence
  Description of Artificial Sequence: Synthetic oligonucleotide
  Sense strand starting at position 3351 of SEQ ID NO: 1888756
ggagcagguauguagcaua

SEQ ID NO: 2554555 - RNA, 19 nt, Artificial Sequence
  Description of Artificial Sequence: Synthetic oligonucleotide
  Antisense strand to SEQ ID NO: 2554554
uaugcuacauaccugcucc

SEQ ID NO: 2554556 - RNA, 19 nt, Artificial Sequence
  Description of Artificial Sequence: Synthetic oligonucleotide
  Sense strand starting at position 3362 of SEQ ID NO: 1888756
guagcauaggugaguuugu

SEQ ID NO: 2554557 - RNA, 19 nt, Artificial Sequence
  Description of Artificial Sequence: Synthetic oligonucleotide
  Antisense strand to SEQ ID NO: 2554556
acaaacucaccuaugcuac

SEQ ID NO: 2554558 - RNA, 19 nt, Artificial Sequence
  Description of Artificial Sequence: Synthetic oligonucleotide
  Sense strand starting at position 3386 of SEQ ID NO: 1888756
gcccaucuugugcagaaga

SEQ ID NO: 2554559 - RNA, 19 nt, Artificial Sequence
  Description of Artificial Sequence: Synthetic oligonucleotide
  Antisense strand to SEQ ID NO: 2554558
ucuucugcacaagaugggc

SEQ ID NO: 2554560 - RNA, 19 nt, Artificial Sequence
  Description of Artificial Sequence: Synthetic oligonucleotide
  Sense strand starting at position 3441 of SEQ ID NO: 1888756
ggcuuucuugccuccguaa

SEQ ID NO: 2554561 - RNA, 19 nt, Artificial Sequence
  Description of Artificial Sequence: Synthetic oligonucleotide
  Antisense strand to SEQ ID NO: 2554560
uuacggaggcaagaaagcc

SEQ ID NO: 2554562 - RNA, 19 nt, Artificial Sequence
  Description of Artificial Sequence: Synthetic oligonucleotide
  Sense strand starting at position 3598 of SEQ ID NO: 1888756
cagacauggcugugauaug

SEQ ID NO: 2554563 - RNA, 19 nt, Artificial Sequence
  Description of Artificial Sequence: Synthetic oligonucleotide
  Antisense strand to SEQ ID NO: 2554562
cauaucacagccaugucug

SEQ ID NO: 2554564 - RNA, 19 nt, Artificial Sequence
  Description of Artificial Sequence: Synthetic oligonucleotide
  Sense strand starting at position 3864 of SEQ ID NO: 1888756
ucuagaaccuuguugcaaa

SEQ ID NO: 2554565 - RNA, 19 nt, Artificial Sequence
  Description of Artificial Sequence: Synthetic oligonucleotide
  Antisense strand to SEQ ID NO: 2554564
uuugcaacaagguucuaga

SEQ ID NO: 2554566 - RNA, 19 nt, Artificial Sequence
  Description of Artificial Sequence: Synthetic oligonucleotide
  Sense strand starting at position 3890 of SEQ ID NO: 1888756
gagauuugguuagacuuag

SEQ ID NO: 2554567 - RNA, 19 nt, Artificial Sequence
  Description of Artificial Sequence: Synthetic oligonucleotide
  Antisense strand to SEQ ID NO: 2554566
cuaagucuaaccaaaucuc

SEQ ID NO: 2554568 - RNA, 19 nt, Artificial Sequence
  Description of Artificial Sequence: Synthetic oligonucleotide
  Sense strand starting at position 3894 of SEQ ID NO: 1888756
uuugguuagacuuagugua

SEQ ID NO: 2554569 - RNA, 19 nt, Artificial Sequence
  Description of Artificial Sequence: Synthetic oligonucleotide
  Antisense strand to SEQ ID NO: 2554568
uacacuaagucuaaccaaa

SEQ ID NO: 2554570 - RNA, 19 nt, Artificial Sequence
  Description of Artificial Sequence: Synthetic oligonucleotide
  Sense strand starting at position 3896 of SEQ ID NO: 1888756
ugguuagacuuaguguaau

SEQ ID NO: 2554571 - RNA, 19 nt, Artificial Sequence
  Description of Artificial Sequence: Synthetic oligonucleotide
  Antisense strand to SEQ ID NO: 2554570
auuacacuaagucuaacca

SEQ ID NO: 2554572 - RNA, 19 nt, Artificial Sequence
  Description of Artificial Sequence: Synthetic oligonucleotide
  Sense strand starting at position 248 of SEQ ID NO: 1888757
cgugcuucucuagauucca

SEQ ID NO: 2554573 - RNA, 19 nt, Artificial Sequence
  Description of Artificial Sequence: Synthetic oligonucleotide
  Antisense strand to SEQ ID NO: 2554572
uggaaucuagagaagcacg

SEQ ID NO: 2554574 - RNA, 19 nt, Artificial Sequence
  Description of Artificial Sequence: Synthetic oligonucleotide
  Sense strand starting at position 264 of SEQ ID NO: 1888757
ccacgcuggagcugaaaua

SEQ ID NO: 2554575 - RNA, 19 nt, Artificial Sequence
  Description of Artificial Sequence: Synthetic oligonucleotide
  Antisense strand to SEQ ID NO: 2554574
uauuucagcuccagcgugg

SEQ ID NO: 2554576 - RNA, 19 nt, Artificial Sequence
  Description of Artificial Sequence: Synthetic oligonucleotide
  Sense strand starting at position 589 of SEQ ID NO: 1888757
gcuagcuauccuggcugaa

SEQ ID NO: 2554577 - RNA, 19 nt, Artificial Sequence
  Description of Artificial Sequence: Synthetic oligonucleotide
  Antisense strand to SEQ ID NO: 2554576
uucagccaggauagcuagc

SEQ ID NO: 2554578 - RNA, 19 nt, Artificial Sequence
  Description of Artificial Sequence: Synthetic oligonucleotide
  Sense strand starting at position 591 of SEQ ID NO: 1888757
uagcuauccuggcugaaag

SEQ ID NO: 2554579 - RNA, 19 nt, Artificial Sequence
  Description of Artificial Sequence: Synthetic oligonucleotide
  Antisense strand to SEQ ID NO: 2554578
cuuucagccaggauagcua

SEQ ID NO: 2554580 - RNA, 19 nt, Artificial Sequence
  Description of Artificial Sequence: Synthetic oligonucleotide
  Sense strand starting at position 592 of SEQ ID NO: 1888757
agcuauccuggcugaaaga

SEQ ID NO: 2554581 - RNA, 19 nt, Artificial Sequence
  Description of Artificial Sequence: Synthetic oligonucleotide
  Antisense strand to SEQ ID NO: 2554580
ucuuucagccaggauagcu

SEQ ID NO: 2554582 - RNA, 19 nt, Artificial Sequence
  Description of Artificial Sequence: Synthetic oligonucleotide
  Sense strand starting at position 593 of SEQ ID NO: 1888757
gcuauccuggcugaaagaa

SEQ ID NO: 2554583 - RNA, 19 nt, Artificial Sequence
  Description of Artificial Sequence: Synthetic oligonucleotide
  Antisense strand to SEQ ID NO: 2554582
uucuuucagccaggauagc

SEQ ID NO: 2554584 - RNA, 19 nt, Artificial Sequence
  Description of Artificial Sequence: Synthetic oligonucleotide
  Sense strand starting at position 649 of SEQ ID NO: 1888757
ccgccauccuuggugacaa

SEQ ID NO: 2554585 - RNA, 19 nt, Artificial Sequence
  Description of Artificial Sequence: Synthetic oligonucleotide
  Antisense strand to SEQ ID NO: 2554584
uugucaccaaggauggcgg

SEQ ID NO: 2554586 - RNA, 19 nt, Artificial Sequence
  Description of Artificial Sequence: Synthetic oligonucleotide
  Sense strand starting at position 2081 of SEQ ID NO: 1888757
ggauaaagccugugcagga

SEQ ID NO: 2554587 - RNA, 19 nt, Artificial Sequence
  Description of Artificial Sequence: Synthetic oligonucleotide
  Antisense strand to SEQ ID NO: 2554586
uccugcacaggcuuuaucc

SEQ ID NO: 2554588 - RNA, 19 nt, Artificial Sequence
  Description of Artificial Sequence: Synthetic oligonucleotide
  Sense strand starting at position 2103 of SEQ ID NO: 1888757
guacaaauagugugauuag

SEQ ID NO: 2554589 - RNA, 19 nt, Artificial Sequence
  Description of Artificial Sequence: Synthetic oligonucleotide
  Antisense strand to SEQ ID NO: 2554588
cuaaucacacuauuuguac

SEQ ID NO: 2554590 - RNA, 19 nt, Artificial Sequence
  Description of Artificial Sequence: Synthetic oligonucleotide
  Sense strand starting at position 2106 of SEQ ID NO: 1888757
caaauagugugauuaggaa

SEQ ID NO: 2554591 - RNA, 19 nt, Artificial Sequence
  Description of Artificial Sequence: Synthetic oligonucleotide
  Antisense strand to SEQ ID NO: 2554590
uuccuaaucacacuauuug

SEQ ID NO: 2554592 - RNA, 19 nt, Artificial Sequence
  Description of Artificial Sequence: Synthetic oligonucleotide
  Sense strand starting at position 2110 of SEQ ID NO: 1888757
uagugugauuaggaaagga

SEQ ID NO: 2554593 - RNA, 19 nt, Artificial Sequence
  Description of Artificial Sequence: Synthetic oligonucleotide
  Antisense strand to SEQ ID NO: 2554592
uccuuuccuaaucacacua

SEQ ID NO: 2554594 - RNA, 19 nt, Artificial Sequence
  Description of Artificial Sequence: Synthetic oligonucleotide
  Sense strand starting at position 2207 of SEQ ID NO: 1888757
ggaccaaaucuugaugcuu

SEQ ID NO: 2554595 - RNA, 19 nt, Artificial Sequence
  Description of Artificial Sequence: Synthetic oligonucleotide
  Antisense strand to SEQ ID NO: 2554594
aagcaucaagauuuggucc

SEQ ID NO: 2554596 - RNA, 19 nt, Artificial Sequence
  Description of Artificial Sequence: Synthetic oligonucleotide
  Sense strand starting at position 2246 of SEQ ID NO: 1888757
caugauuggcgccaggaaa

SEQ ID NO: 2554597 - RNA, 19 nt, Artificial Sequence
  Description of Artificial Sequence: Synthetic oligonucleotide
  Antisense strand to SEQ ID NO: 2554596
uuuccuggcgccaaucaug

SEQ ID NO: 2554598 - RNA, 19 nt, Artificial Sequence
  Description of Artificial Sequence: Synthetic oligonucleotide
  Sense strand starting at position 2417 of SEQ ID NO: 1888757
cgugacacggucugacuua

SEQ ID NO: 2554599 - RNA, 19 nt, Artificial Sequence
  Description of Artificial Sequence: Synthetic oligonucleotide
  Antisense strand to SEQ ID NO: 2554598
uaagucagaccgugucacg

SEQ ID NO: 2554600 - RNA, 19 nt, Artificial Sequence
  Description of Artificial Sequence: Synthetic oligonucleotide
  Sense strand starting at position 2732 of SEQ ID NO: 1888757
ucaucauugcaaggaucuu

SEQ ID NO: 2554601 - RNA, 19 nt, Artificial Sequence
  Description of Artificial Sequence: Synthetic oligonucleotide
  Antisense strand to SEQ ID NO: 2554600
aagauccuugcaaugauga

SEQ ID NO: 2554602 - RNA, 19 nt, Artificial Sequence
  Description of Artificial Sequence: Synthetic oligonucleotide
  Sense strand starting at position 2741 of SEQ ID NO: 1888757
caaggaucuuaccuguugu

SEQ ID NO: 2554603 - RNA, 19 nt, Artificial Sequence
  Description of Artificial Sequence: Synthetic oligonucleotide
  Antisense strand to SEQ ID NO: 2554602
acaacagguaagauccuug

SEQ ID NO: 2554604 - RNA, 19 nt, Artificial Sequence
  Description of Artificial Sequence: Synthetic oligonucleotide
  Sense strand starting at position 2824 of SEQ ID NO: 1888757
acugauccguccuccauuu

SEQ ID NO: 2554605 - RNA, 19 nt, Artificial Sequence
  Description of Artificial Sequence: Synthetic oligonucleotide
  Antisense strand to SEQ ID NO: 2554604
aaauggaggacggaucagu

SEQ ID NO: 2554606 - RNA, 19 nt, Artificial Sequence
  Description of Artificial Sequence: Synthetic oligonucleotide
  Sense strand starting at position 2833 of SEQ ID NO: 1888757
uccuccauuucuguaaguu

SEQ ID NO: 2554607 - RNA, 19 nt, Artificial Sequence
  Description of Artificial Sequence: Synthetic oligonucleotide
  Antisense strand to SEQ ID NO: 2554606
aacuuacagaaauggagga

SEQ ID NO: 2554608 - RNA, 19 nt, Artificial Sequence
  Description of Artificial Sequence: Synthetic oligonucleotide
  Sense strand starting at position 3086 of SEQ ID NO: 1888757
uuaggaggcuuucucaaua

SEQ ID NO: 2554609 - RNA, 19 nt, Artificial Sequence
  Description of Artificial Sequence: Synthetic oligonucleotide
  Antisense strand to SEQ ID NO: 2554608
uauugagaaagccuccuaa

SEQ ID NO: 2554610 - RNA, 19 nt, Artificial Sequence
  Description of Artificial Sequence: Synthetic oligonucleotide
  Sense strand starting at position 3116 of SEQ ID NO: 1888757
agcugauggugguuuagau

SEQ ID NO: 2554611 - RNA, 19 nt, Artificial Sequence
  Description of Artificial Sequence: Synthetic oligonucleotide
  Antisense strand to SEQ ID NO: 2554610
aucuaaaccaccaucagcu

SEQ ID NO: 2554612 - RNA, 19 nt, Artificial Sequence
  Description of Artificial Sequence: Synthetic oligonucleotide
  Sense strand starting at position 3158 of SEQ ID NO: 1888757
guggaaggauuugauggaa

SEQ ID NO: 2554613 - RNA, 19 nt, Artificial Sequence
  Description of Artificial Sequence: Synthetic oligonucleotide
  Antisense strand to SEQ ID NO: 2554612
uuccaucaaauccuuccac

SEQ ID NO: 2554614 - RNA, 19 nt, Artificial Sequence
  Description of Artificial Sequence: Synthetic oligonucleotide
  Sense strand starting at position 3177 of SEQ ID NO: 1888757
caggguugcagagggaauu

SEQ ID NO: 2554615 - RNA, 19 nt, Artificial Sequence
  Description of Artificial Sequence: Synthetic oligonucleotide
  Antisense strand to SEQ ID NO: 2554614
aauucccucugcaacccug

SEQ ID NO: 2554616 - RNA, 19 nt, Artificial Sequence
  Description of Artificial Sequence: Synthetic oligonucleotide
  Sense strand starting at position 3189 of SEQ ID NO: 1888757
gggaauuggaguugaagua

SEQ ID NO: 2554617 - RNA, 19 nt, Artificial Sequence
  Description of Artificial Sequence: Synthetic oligonucleotide
  Antisense strand to SEQ ID NO: 2554616
uacuucaacuccaauuccc

SEQ ID NO: 2554618 - RNA, 19 nt, Artificial Sequence
  Description of Artificial Sequence: Synthetic oligonucleotide
  Sense strand starting at position 3245 of SEQ ID NO: 1888757
caauguaaaugggaagaaa

SEQ ID NO: 2554619 - RNA, 19 nt, Artificial Sequence
  Description of Artificial Sequence: Synthetic oligonucleotide
  Antisense strand to SEQ ID NO: 2554618
uuucuucccauuuacauug

SEQ ID NO: 2554620 - RNA, 19 nt, Artificial Sequence
  Description of Artificial Sequence: Synthetic oligonucleotide
  Sense strand starting at position 3306 of SEQ ID NO: 1888757
ucucuucucucuuugugau

SEQ ID NO: 2554621 - RNA, 19 nt, Artificial Sequence
  Description of Artificial Sequence: Synthetic oligonucleotide
  Antisense strand to SEQ ID NO: 2554620
aucacaaagagagaagaga

SEQ ID NO: 2554622 - RNA, 19 nt, Artificial Sequence
  Description of Artificial Sequence: Synthetic oligonucleotide
  Sense strand starting at position 3307 of SEQ ID NO: 1888757
cucuucucucuuugugauu

SEQ ID NO: 2554623 - RNA, 19 nt, Artificial Sequence
  Description of Artificial Sequence: Synthetic oligonucleotide
  Antisense strand to SEQ ID NO: 2554622
aaucacaaagagagaagag

SEQ ID NO: 2554624 - RNA, 19 nt, Artificial Sequence
  Description of Artificial Sequence: Synthetic oligonucleotide
  Sense strand starting at position 3308 of SEQ ID NO: 1888757
ucuucucucuuugugauuu

SEQ ID NO: 2554625 - RNA, 19 nt, Artificial Sequence
  Description of Artificial Sequence: Synthetic oligonucleotide
  Antisense strand to SEQ ID NO: 2554624
aaaucacaaagagagaaga

SEQ ID NO: 2554626 - RNA, 19 nt, Artificial Sequence
  Description of Artificial Sequence: Synthetic oligonucleotide
  Sense strand starting at position 3310 of SEQ ID NO: 1888757
uucucucuuugugauuuga

SEQ ID NO: 2554627 - RNA, 19 nt, Artificial Sequence
  Description of Artificial Sequence: Synthetic oligonucleotide
  Antisense strand to SEQ ID NO: 2554626
ucaaaucacaaagagagaa

SEQ ID NO: 2554628 - RNA, 19 nt, Artificial Sequence
  Description of Artificial Sequence: Synthetic oligonucleotide
  Sense strand starting at position 3336 of SEQ ID NO: 1888757
gagccuguuggucaacagu

SEQ ID NO: 2554629 - RNA, 19 nt, Artificial Sequence
  Description of Artificial Sequence: Synthetic oligonucleotide
  Antisense strand to SEQ ID NO: 2554628
acuguugaccaacaggcuc

SEQ ID NO: 2554630 - RNA, 19 nt, Artificial Sequence
  Description of Artificial Sequence: Synthetic oligonucleotide
  Sense strand starting at position 3339 of SEQ ID NO: 1888757
ccuguuggucaacaguuua

SEQ ID NO: 2554631 - RNA, 19 nt, Artificial Sequence
  Description of Artificial Sequence: Synthetic oligonucleotide
  Antisense strand to SEQ ID NO: 2554630
uaaacuguugaccaacagg

SEQ ID NO: 2554632 - RNA, 19 nt, Artificial Sequence
  Description of Artificial Sequence: Synthetic oligonucleotide
  Sense strand starting at position 3344 of SEQ ID NO: 1888757
uggucaacaguuuagggau

SEQ ID NO: 2554633 - RNA, 19 nt, Artificial Sequence
  Description of Artificial Sequence: Synthetic oligonucleotide
  Antisense strand to SEQ ID NO: 2554632
aucccuaaacuguugacca

SEQ ID NO: 2554634 - RNA, 19 nt, Artificial Sequence
  Description of Artificial Sequence: Synthetic oligonucleotide
  Sense strand starting at position 3398 of SEQ ID NO: 1888757
ggguuuacuaaaggaguca

SEQ ID NO: 2554635 - RNA, 19 nt, Artificial Sequence
  Description of Artificial Sequence: Synthetic oligonucleotide
  Antisense strand to SEQ ID NO: 2554634
ugacuccuuuaguaaaccc

SEQ ID NO: 2554636 - RNA, 19 nt, Artificial Sequence
  Description of Artificial Sequence: Synthetic oligonucleotide
  Sense strand starting at position 3438 of SEQ ID NO: 1888757
ggaauaagggcuggauuca

SEQ ID NO: 2554637 - RNA, 19 nt, Artificial Sequence
  Description of Artificial Sequence: Synthetic oligonucleotide
  Antisense strand to SEQ ID NO: 2554636
ugaauccagcccuuauucc

SEQ ID NO: 2554638 - RNA, 19 nt, Artificial Sequence
  Description of Artificial Sequence: Synthetic oligonucleotide
  Sense strand starting at position 3543 of SEQ ID NO: 1888757
guagggauggugugguaua

SEQ ID NO: 2554639 - RNA, 19 nt, Artificial Sequence
  Description of Artificial Sequence: Synthetic oligonucleotide
  Antisense strand to SEQ ID NO: 2554638
uauaccacaccaucccuac

SEQ ID NO: 2554640 - RNA, 19 nt, Artificial Sequence
  Description of Artificial Sequence: Synthetic oligonucleotide
  Sense strand starting at position 3550 of SEQ ID NO: 1888757
uggugugguauacacagau

SEQ ID NO: 2554641 - RNA, 19 nt, Artificial Sequence
  Description of Artificial Sequence: Synthetic oligonucleotide
  Antisense strand to SEQ ID NO: 2554640
aucuguguauaccacacca

SEQ ID NO: 2554642 - RNA, 19 nt, Artificial Sequence
  Description of Artificial Sequence: Synthetic oligonucleotide
  Sense strand starting at position 3572 of SEQ ID NO: 1888757
gcaaauagauccucaugau

SEQ ID NO: 2554643 - RNA, 19 nt, Artificial Sequence
  Description of Artificial Sequence: Synthetic oligonucleotide
  Antisense strand to SEQ ID NO: 2554642
aucaugaggaucuauuugc

SEQ ID NO: 2554644 - RNA, 19 nt, Artificial Sequence
  Description of Artificial Sequence: Synthetic oligonucleotide
  Sense strand starting at position 3622 of SEQ ID NO: 1888757
aguggucucccuuaccaga

SEQ ID NO: 2554645 - RNA, 19 nt, Artificial Sequence
  Description of Artificial Sequence: Synthetic oligonucleotide
  Antisense strand to SEQ ID NO: 2554644
ucugguaagggagaccacu

SEQ ID NO: 2554646 - RNA, 19 nt, Artificial Sequence
  Description of Artificial Sequence: Synthetic oligonucleotide
  Sense strand starting at position 3738 of SEQ ID NO: 1888757
gaaguuugguccuucuaga

SEQ ID NO: 2554647 - RNA, 19 nt, Artificial Sequence
  Description of Artificial Sequence: Synthetic oligonucleotide
  Antisense strand to SEQ ID NO: 2554646
ucuagaaggaccaaacuuc

SEQ ID NO: 2554648 - RNA, 19 nt, Artificial Sequence
  Description of Artificial Sequence: Synthetic oligonucleotide
  Sense strand starting at position 3957 of SEQ ID NO: 1888757
ggaaacuucuggcuauucu

SEQ ID NO: 2554649 - RNA, 19 nt, Artificial Sequence
  Description of Artificial Sequence: Synthetic oligonucleotide
  Antisense strand to SEQ ID NO: 2554648
agaauagccagaaguuucc

SEQ ID NO: 2554650 - RNA, 19 nt, Artificial Sequence
  Description of Artificial Sequence: Synthetic oligonucleotide
  Sense strand starting at position 3965 of SEQ ID NO: 1888757
cuggcuauucuuuggcauu

SEQ ID NO: 2554651 - RNA, 19 nt, Artificial Sequence
  Description of Artificial Sequence: Synthetic oligonucleotide
  Antisense strand to SEQ ID NO: 2554650
aaugccaaagaauagccag

SEQ ID NO: 2554652 - RNA, 19 nt, Artificial Sequence
  Description of Artificial Sequence: Synthetic oligonucleotide
  Sense strand starting at position 140 of SEQ ID NO: 1888758
gauagaucucaaggcugaa

SEQ ID NO: 2554653 - RNA, 19 nt, Artificial Sequence
  Description of Artificial Sequence: Synthetic oligonucleotide
  Antisense strand to SEQ ID NO: 2554652
uucagccuugagaucuauc

SEQ ID NO: 2554654 - RNA, 19 nt, Artificial Sequence
  Description of Artificial Sequence: Synthetic oligonucleotide
  Sense strand starting at position 340 of SEQ ID NO: 1888758
acugcuuaagcuuaggaau

SEQ ID NO: 2554655 - RNA, 19 nt, Artificial Sequence
  Description of Artificial Sequence: Synthetic oligonucleotide
  Antisense strand to SEQ ID NO: 2554654
auuccuaagcuuaagcagu

SEQ ID NO: 2554656 - RNA, 19 nt, Artificial Sequence
  Description of Artificial Sequence: Synthetic oligonucleotide
  Sense strand starting at position 365 of SEQ ID NO: 1888758
uaugguguuuccucauaag

SEQ ID NO: 2554657 - RNA, 19 nt, Artificial Sequence
  Description of Artificial Sequence: Synthetic oligonucleotide
  Antisense strand to SEQ ID NO: 2554656
cuuaugaggaaacaccaua

SEQ ID NO: 2554658 - RNA, 19 nt, Artificial Sequence
  Description of Artificial Sequence: Synthetic oligonucleotide
  Sense strand starting at position 371 of SEQ ID NO: 1888758
guuuccucauaaguaauua

SEQ ID NO: 2554659 - RNA, 19 nt, Artificial Sequence
  Description of Artificial Sequence: Synthetic oligonucleotide
  Antisense strand to SEQ ID NO: 2554658
uaauuacuuaugaggaaac

SEQ ID NO: 2554660 - RNA, 19 nt, Artificial Sequence
  Description of Artificial Sequence: Synthetic oligonucleotide
  Sense strand starting at position 389 of SEQ ID NO: 1888758
aagacauggugcuuguaaa

SEQ ID NO: 2554661 - RNA, 19 nt, Artificial Sequence
  Description of Artificial Sequence: Synthetic oligonucleotide
  Antisense strand to SEQ ID NO: 2554660
uuuacaagcaccaugucuu

SEQ ID NO: 2554662 - RNA, 19 nt, Artificial Sequence
  Description of Artificial Sequence: Synthetic oligonucleotide
  Sense strand starting at position 390 of SEQ ID NO: 1888758
agacauggugcuuguaaag

SEQ ID NO: 2554663 - RNA, 19 nt, Artificial Sequence
  Description of Artificial Sequence: Synthetic oligonucleotide
  Antisense strand to SEQ ID NO: 2554662
cuuuacaagcaccaugucu

SEQ ID NO: 2554664 - RNA, 19 nt, Artificial Sequence
  Description of Artificial Sequence: Synthetic oligonucleotide
  Sense strand starting at position 423 of SEQ ID NO: 1888758
ccaugugcugaucaagaac

SEQ ID NO: 2554665 - RNA, 19 nt, Artificial Sequence
  Description of Artificial Sequence: Synthetic oligonucleotide
  Antisense strand to SEQ ID NO: 2554664
guucuugaucagcacaugg

SEQ ID NO: 2554666 - RNA, 19 nt, Artificial Sequence
  Description of Artificial Sequence: Synthetic oligonucleotide
  Sense strand starting at position 608 of SEQ ID NO: 1888758
cucauuccuggguaacuga

SEQ ID NO: 2554667 - RNA, 19 nt, Artificial Sequence
  Description of Artificial Sequence: Synthetic oligonucleotide
  Antisense strand to SEQ ID NO: 2554666
ucaguuacccaggaaugag

SEQ ID NO: 2554668 - RNA, 19 nt, Artificial Sequence
  Description of Artificial Sequence: Synthetic oligonucleotide
  Sense strand starting at position 611 of SEQ ID NO: 1888758
auuccuggguaacugaaau

SEQ ID NO: 2554669 - RNA, 19 nt, Artificial Sequence
  Description of Artificial Sequence: Synthetic oligonucleotide
  Antisense strand to SEQ ID NO: 2554668
auuucaguuacccaggaau

SEQ ID NO: 2554670 - RNA, 19 nt, Artificial Sequence
  Description of Artificial Sequence: Synthetic oligonucleotide
  Sense strand starting at position 681 of SEQ ID NO: 1888758
ugagcuucuugauugacua

SEQ ID NO: 2554671 - RNA, 19 nt, Artificial Sequence
  Description of Artificial Sequence: Synthetic oligonucleotide
  Antisense strand to SEQ ID NO: 2554670
uagucaaucaagaagcuca

SEQ ID NO: 2554672 - RNA, 19 nt, Artificial Sequence
  Description of Artificial Sequence: Synthetic oligonucleotide
  Sense strand starting at position 707 of SEQ ID NO: 1888758
aaagaauguuagguucuca

SEQ ID NO: 2554673 - RNA, 19 nt, Artificial Sequence
  Description of Artificial Sequence: Synthetic oligonucleotide
  Antisense strand to SEQ ID NO: 2554672
ugagaaccuaacauucuuu

SEQ ID NO: 2554674 - RNA, 19 nt, Artificial Sequence
  Description of Artificial Sequence: Synthetic oligonucleotide
  Sense strand starting at position 812 of SEQ ID NO: 1888758
uuaguaugcugacuauaua

SEQ ID NO: 2554675 - RNA, 19 nt, Artificial Sequence
  Description of Artificial Sequence: Synthetic oligonucleotide
  Antisense strand to SEQ ID NO: 2554674
uauauagucagcauacuaa

SEQ ID NO: 2554676 - RNA, 19 nt, Artificial Sequence
  Description of Artificial Sequence: Synthetic oligonucleotide
  Sense strand starting at position 844 of SEQ ID NO: 1888758
acaugcuaacauuggaaca

SEQ ID NO: 2554677 - RNA, 19 nt, Artificial Sequence
  Description of Artificial Sequence: Synthetic oligonucleotide
  Antisense strand to SEQ ID NO: 2554676
uguuccaauguuagcaugu

SEQ ID NO: 2554678 - RNA, 19 nt, Artificial Sequence
  Description of Artificial Sequence: Synthetic oligonucleotide
  Sense strand starting at position 871 of SEQ ID NO: 1888758
gugcuuaugccucagaaca

SEQ ID NO: 2554679 - RNA, 19 nt, Artificial Sequence
  Description of Artificial Sequence: Synthetic oligonucleotide
  Antisense strand to SEQ ID NO: 2554678
uguucugaggcauaagcac

SEQ ID NO: 2554680 - RNA, 19 nt, Artificial Sequence
  Description of Artificial Sequence: Synthetic oligonucleotide
  Sense strand starting at position 993 of SEQ ID NO: 1888758
gaccaugauuaugcaugau

SEQ ID NO: 2554681 - RNA, 19 nt, Artificial Sequence
  Description of Artificial Sequence: Synthetic oligonucleotide
  Antisense strand to SEQ ID NO: 2554680
aucaugcauaaucaugguc

SEQ ID NO: 2554682 - RNA, 19 nt, Artificial Sequence
  Description of Artificial Sequence: Synthetic oligonucleotide
  Sense strand starting at position 996 of SEQ ID NO: 1888758
caugauuaugcaugauaug

SEQ ID NO: 2554683 - RNA, 19 nt, Artificial Sequence
  Description of Artificial Sequence: Synthetic oligonucleotide
  Antisense strand to SEQ ID NO: 2554682
cauaucaugcauaaucaug

SEQ ID NO: 2554684 - RNA, 19 nt, Artificial Sequence
  Description of Artificial Sequence: Synthetic oligonucleotide
  Sense strand starting at position 1005 of SEQ ID NO: 1888758
gcaugauaugcauaaugca

SEQ ID NO: 2554685 - RNA, 19 nt, Artificial Sequence
  Description of Artificial Sequence: Synthetic oligonucleotide
  Antisense strand to SEQ ID NO: 2554684
ugcauuaugcauaucaugc

SEQ ID NO: 2554686 - RNA, 19 nt, Artificial Sequence
  Description of Artificial Sequence: Synthetic oligonucleotide
  Sense strand starting at position 1243 of SEQ ID NO: 1888758
ugcauacaugaaugacaau

SEQ ID NO: 2554687 - RNA, 19 nt, Artificial Sequence
  Description of Artificial Sequence: Synthetic oligonucleotide
  Antisense strand to SEQ ID NO: 2554686
auugucauucauguaugca

SEQ ID NO: 2554688 - RNA, 19 nt, Artificial Sequence
  Description of Artificial Sequence: Synthetic oligonucleotide
  Sense strand starting at position 1345 of SEQ ID NO: 1888758
guuggcaccguuuagauuu

SEQ ID NO: 2554689 - RNA, 19 nt, Artificial Sequence
  Description of Artificial Sequence: Synthetic oligonucleotide
  Antisense strand to SEQ ID NO: 2554688
aaaucuaaacggugccaac

SEQ ID NO: 2554690 - RNA, 19 nt, Artificial Sequence
  Description of Artificial Sequence: Synthetic oligonucleotide
  Sense strand starting at position 1658 of SEQ ID NO: 1888758
cagccauguauggagaagu

SEQ ID NO: 2554691 - RNA, 19 nt, Artificial Sequence
  Description of Artificial Sequence: Synthetic oligonucleotide
  Antisense strand to SEQ ID NO: 2554690
acuucuccauacauggcug

SEQ ID NO: 2554692 - RNA, 19 nt, Artificial Sequence
  Description of Artificial Sequence: Synthetic oligonucleotide
  Sense strand starting at position 2445 of SEQ ID NO: 1888758
caggaaauauggcugacuu

SEQ ID NO: 2554693 - RNA, 19 nt, Artificial Sequence
  Description of Artificial Sequence: Synthetic oligonucleotide
  Antisense strand to SEQ ID NO: 2554692
aagucagccauauuuccug

SEQ ID NO: 2554694 - RNA, 19 nt, Artificial Sequence
  Description of Artificial Sequence: Synthetic oligonucleotide
  Sense strand starting at position 2446 of SEQ ID NO: 1888758
aggaaauauggcugacuug

SEQ ID NO: 2554695 - RNA, 19 nt, Artificial Sequence
  Description of Artificial Sequence: Synthetic oligonucleotide
  Antisense strand to SEQ ID NO: 2554694
caagucagccauauuuccu

SEQ ID NO: 2554696 - RNA, 19 nt, Artificial Sequence
  Description of Artificial Sequence: Synthetic oligonucleotide
  Sense strand starting at position 2449 of SEQ ID NO: 1888758
aaauauggcugacuugaga

SEQ ID NO: 2554697 - RNA, 19 nt, Artificial Sequence
  Description of Artificial Sequence: Synthetic oligonucleotide
  Antisense strand to SEQ ID NO: 2554696
ucucaagucagccauauuu

SEQ ID NO: 2554698 - RNA, 19 nt, Artificial Sequence
  Description of Artificial Sequence: Synthetic oligonucleotide
  Sense strand starting at position 2462 of SEQ ID NO: 1888758
uugagaaacucgcucauac

SEQ ID NO: 2554699 - RNA, 19 nt, Artificial Sequence
  Description of Artificial Sequence: Synthetic oligonucleotide
  Antisense strand to SEQ ID NO: 2554698
guaugagcgaguuucucaa

SEQ ID NO: 2554700 - RNA, 19 nt, Artificial Sequence
  Description of Artificial Sequence: Synthetic oligonucleotide
  Sense strand starting at position 2702 of SEQ ID NO: 1888758
caucuaagggcuuggagaa

SEQ ID NO: 2554701 - RNA, 19 nt, Artificial Sequence
  Description of Artificial Sequence: Synthetic oligonucleotide
  Antisense strand to SEQ ID NO: 2554700
uucuccaagcccuuagaug

SEQ ID NO: 2554702 - RNA, 19 nt, Artificial Sequence
  Description of Artificial Sequence: Synthetic oligonucleotide
  Sense strand starting at position 2849 of SEQ ID NO: 1888758
ucuagaugguucucaagac

SEQ ID NO: 2554703 - RNA, 19 nt, Artificial Sequence
  Description of Artificial Sequence: Synthetic oligonucleotide
  Antisense strand to SEQ ID NO: 2554702
gucuugagaaccaucuaga

SEQ ID NO: 2554704 - RNA, 19 nt, Artificial Sequence
  Description of Artificial Sequence: Synthetic oligonucleotide
  Sense strand starting at position 2994 of SEQ ID NO: 1888758
guucuuauaugacugucaa

SEQ ID NO: 2554705 - RNA, 19 nt, Artificial Sequence
  Description of Artificial Sequence: Synthetic oligonucleotide
  Antisense strand to SEQ ID NO: 2554704
uugacagucauauaagaac

SEQ ID NO: 2554706 - RNA, 19 nt, Artificial Sequence
  Description of Artificial Sequence: Synthetic oligonucleotide
  Sense strand starting at position 3083 of SEQ ID NO: 1888758
uaauuaagacauggugcuu

SEQ ID NO: 2554707 - RNA, 19 nt, Artificial Sequence
  Description of Artificial Sequence: Synthetic oligonucleotide
  Antisense strand to SEQ ID NO: 2554706
aagcaccaugucuuaauua

SEQ ID NO: 2554708 - RNA, 19 nt, Artificial Sequence
  Description of Artificial Sequence: Synthetic oligonucleotide
  Sense strand starting at position 3088 of SEQ ID NO: 1888758
aagacauggugcuugcaaa

SEQ ID NO: 2554709 - RNA, 19 nt, Artificial Sequence
  Description of Artificial Sequence: Synthetic oligonucleotide
  Antisense strand to SEQ ID NO: 2554708
uuugcaagcaccaugucuu

SEQ ID NO: 2554710 - RNA, 19 nt, Artificial Sequence
  Description of Artificial Sequence: Synthetic oligonucleotide
  Sense strand starting at position 3133 of SEQ ID NO: 1888758
ccaugugcugaccaagagu

SEQ ID NO: 2554711 - RNA, 19 nt, Artificial Sequence
  Description of Artificial Sequence: Synthetic oligonucleotide
  Antisense strand to SEQ ID NO: 2554710
acucuuggucagcacaugg

SEQ ID NO: 2554712 - RNA, 19 nt, Artificial Sequence
  Description of Artificial Sequence: Synthetic oligonucleotide
  Sense strand starting at position 3136 of SEQ ID NO: 1888758
ugugcugaccaagaguaaa

SEQ ID NO: 2554713 - RNA, 19 nt, Artificial Sequence
  Description of Artificial Sequence: Synthetic oligonucleotide
  Antisense strand to SEQ ID NO: 2554712
uuuacucuuggucagcaca

SEQ ID NO: 2554714 - RNA, 19 nt, Artificial Sequence
  Description of Artificial Sequence: Synthetic oligonucleotide
  Sense strand starting at position 3147 of SEQ ID NO: 1888758
agaguaaagcacugucaua

SEQ ID NO: 2554715 - RNA, 19 nt, Artificial Sequence
  Description of Artificial Sequence: Synthetic oligonucleotide
  Antisense strand to SEQ ID NO: 2554714
uaugacagugcuuuacucu

SEQ ID NO: 2554716 - RNA, 19 nt, Artificial Sequence
  Description of Artificial Sequence: Synthetic oligonucleotide
  Sense strand starting at position 3159 of SEQ ID NO: 1888758
ugucauaaacaguaccuau

SEQ ID NO: 2554717 - RNA, 19 nt, Artificial Sequence
  Description of Artificial Sequence: Synthetic oligonucleotide
  Antisense strand to SEQ ID NO: 2554716
auagguacuguuuaugaca

SEQ ID NO: 2554718 - RNA, 19 nt, Artificial Sequence
  Description of Artificial Sequence: Synthetic oligonucleotide
  Sense strand starting at position 3465 of SEQ ID NO: 1888758
ggaauagucacguacacau

SEQ ID NO: 2554719 - RNA, 19 nt, Artificial Sequence
  Description of Artificial Sequence: Synthetic oligonucleotide
  Antisense strand to SEQ ID NO: 2554718
auguguacgugacuauucc

SEQ ID NO: 2554720 - RNA, 19 nt, Artificial Sequence
  Description of Artificial Sequence: Synthetic oligonucleotide
  Sense strand starting at position 3577 of SEQ ID NO: 1888758
gagggaagacuuugaguuc

SEQ ID NO: 2554721 - RNA, 19 nt, Artificial Sequence
  Description of Artificial Sequence: Synthetic oligonucleotide
  Antisense strand to SEQ ID NO: 2554720
gaacucaaagucuucccuc

SEQ ID NO: 2554722 - RNA, 19 nt, Artificial Sequence
  Description of Artificial Sequence: Synthetic oligonucleotide
  Sense strand starting at position 3580 of SEQ ID NO: 1888758
ggaagacuuugaguucugu

SEQ ID NO: 2554723 - RNA, 19 nt, Artificial Sequence
  Description of Artificial Sequence: Synthetic oligonucleotide
  Antisense strand to SEQ ID NO: 2554722
acagaacucaaagucuucc

SEQ ID NO: 2554724 - RNA, 19 nt, Artificial Sequence
  Description of Artificial Sequence: Synthetic oligonucleotide
  Sense strand starting at position 3604 of SEQ ID NO: 1888758
guuccauaccugugaggau

SEQ ID NO: 2554725 - RNA, 19 nt, Artificial Sequence
  Description of Artificial Sequence: Synthetic oligonucleotide
  Antisense strand to SEQ ID NO: 2554724
auccucacagguauggaac

SEQ ID NO: 2554726 - RNA, 19 nt, Artificial Sequence
  Description of Artificial Sequence: Synthetic oligonucleotide
  Sense strand starting at position 3948 of SEQ ID NO: 1888758
ucgugucauacacaauagu

SEQ ID NO: 2554727 - RNA, 19 nt, Artificial Sequence
  Description of Artificial Sequence: Synthetic oligonucleotide
  Antisense strand to SEQ ID NO: 2554726
acuauuguguaugacacga

SEQ ID NO: 2554728 - RNA, 19 nt, Artificial Sequence
  Description of Artificial Sequence: Synthetic oligonucleotide
  Sense strand starting at position 3957 of SEQ ID NO: 1888758
acacaauaguaaguuuaca

SEQ ID NO: 2554729 - RNA, 19 nt, Artificial Sequence
  Description of Artificial Sequence: Synthetic oligonucleotide
  Antisense strand to SEQ ID NO: 2554728
uguaaacuuacuauugugu

SEQ ID NO: 2554730 - RNA, 19 nt, Artificial Sequence
  Description of Artificial Sequence: Synthetic oligonucleotide
  Sense strand starting at position 3982 of SEQ ID NO: 1888758
ugagguuuauuuguauguu

SEQ ID NO: 2554731 - RNA, 19 nt, Artificial Sequence
  Description of Artificial Sequence: Synthetic oligonucleotide
  Antisense strand to SEQ ID NO: 2554730
aacauacaaauaaaccuca

SEQ ID NO: 2554732 - RNA, 19 nt, Artificial Sequence
  Description of Artificial Sequence: Synthetic oligonucleotide
  Sense strand starting at position 80 of SEQ ID NO: 1888759
uuauuagugccagaaaucu

SEQ ID NO: 2554733 - RNA, 19 nt, Artificial Sequence
  Description of Artificial Sequence: Synthetic oligonucleotide
  Antisense strand to SEQ ID NO: 2554732
agauuucuggcacuaauaa

SEQ ID NO: 2554734 - RNA, 19 nt, Artificial Sequence
  Description of Artificial Sequence: Synthetic oligonucleotide
  Sense strand starting at position 128 of SEQ ID NO: 1888759
gaacgauucuacgcaaacu

SEQ ID NO: 2554735 - RNA, 19 nt, Artificial Sequence
  Description of Artificial Sequence: Synthetic oligonucleotide
  Antisense strand to SEQ ID NO: 2554734
aguuugcguagaaucguuc

SEQ ID NO: 2554736 - RNA, 19 nt, Artificial Sequence
  Description of Artificial Sequence: Synthetic oligonucleotide
  Sense strand starting at position 532 of SEQ ID NO: 1888759
acuguaguaaggugggaua

SEQ ID NO: 2554737 - RNA, 19 nt, Artificial Sequence
  Description of Artificial Sequence: Synthetic oligonucleotide
  Antisense strand to SEQ ID NO: 2554736
uaucccaccuuacuacagu

SEQ ID NO: 2554738 - RNA, 19 nt, Artificial Sequence
  Description of Artificial Sequence: Synthetic oligonucleotide
  Sense strand starting at position 534 of SEQ ID NO: 1888759
uguaguaaggugggauauu

SEQ ID NO: 2554739 - RNA, 19 nt, Artificial Sequence
  Description of Artificial Sequence: Synthetic oligonucleotide
  Antisense strand to SEQ ID NO: 2554738
aauaucccaccuuacuaca

SEQ ID NO: 2554740 - RNA, 19 nt, Artificial Sequence
  Description of Artificial Sequence: Synthetic oligonucleotide
  Sense strand starting at position 682 of SEQ ID NO: 1888759
uuaguugaucugcaauggu

SEQ ID NO: 2554741 - RNA, 19 nt, Artificial Sequence
  Description of Artificial Sequence: Synthetic oligonucleotide
  Antisense strand to SEQ ID NO: 2554740
accauugcagaucaacuaa

SEQ ID NO: 2554742 - RNA, 19 nt, Artificial Sequence
  Description of Artificial Sequence: Synthetic oligonucleotide
  Sense strand starting at position 690 of SEQ ID NO: 1888759
ucugcaaugguguaacuuu

SEQ ID NO: 2554743 - RNA, 19 nt, Artificial Sequence
  Description of Artificial Sequence: Synthetic oligonucleotide
  Antisense strand to SEQ ID NO: 2554742
aaaguuacaccauugcaga

SEQ ID NO: 2554744 - RNA, 19 nt, Artificial Sequence
  Description of Artificial Sequence: Synthetic oligonucleotide
  Sense strand starting at position 782 of SEQ ID NO: 1888759
aaggaaauguggucaaguu

SEQ ID NO: 2554745 - RNA, 19 nt, Artificial Sequence
  Description of Artificial Sequence: Synthetic oligonucleotide
  Antisense strand to SEQ ID NO: 2554744
aacuugaccacauuuccuu

SEQ ID NO: 2554746 - RNA, 19 nt, Artificial Sequence
  Description of Artificial Sequence: Synthetic oligonucleotide
  Sense strand starting at position 783 of SEQ ID NO: 1888759
aggaaauguggucaaguuc

SEQ ID NO: 2554747 - RNA, 19 nt, Artificial Sequence
  Description of Artificial Sequence: Synthetic oligonucleotide
  Antisense strand to SEQ ID NO: 2554746
gaacuugaccacauuuccu

SEQ ID NO: 2554748 - RNA, 19 nt, Artificial Sequence
  Description of Artificial Sequence: Synthetic oligonucleotide
  Sense strand starting at position 849 of SEQ ID NO: 1888759
guaauaauauacucucagu

SEQ ID NO: 2554749 - RNA, 19 nt, Artificial Sequence
  Description of Artificial Sequence: Synthetic oligonucleotide
  Antisense strand to SEQ ID NO: 2554748
acugagaguauauuauuac

SEQ ID NO: 2554750 - RNA, 19 nt, Artificial Sequence
  Description of Artificial Sequence: Synthetic oligonucleotide
  Sense strand starting at position 863 of SEQ ID NO: 1888759
ucaguuaauuaccugaagu

SEQ ID NO: 2554751 - RNA, 19 nt, Artificial Sequence
  Description of Artificial Sequence: Synthetic oligonucleotide
  Antisense strand to SEQ ID NO: 2554750
acuucagguaauuaacuga

SEQ ID NO: 2554752 - RNA, 19 nt, Artificial Sequence
  Description of Artificial Sequence: Synthetic oligonucleotide
  Sense strand starting at position 865 of SEQ ID NO: 1888759
aguuaauuaccugaaguuu

SEQ ID NO: 2554753 - RNA, 19 nt, Artificial Sequence
  Description of Artificial Sequence: Synthetic oligonucleotide
  Antisense strand to SEQ ID NO: 2554752
aaacuucagguaauuaacu

SEQ ID NO: 2554754 - RNA, 19 nt, Artificial Sequence
  Description of Artificial Sequence: Synthetic oligonucleotide
  Sense strand starting at position 1058 of SEQ ID NO: 1888759
auguuagggucuuccugaa

SEQ ID NO: 2554755 - RNA, 19 nt, Artificial Sequence
  Description of Artificial Sequence: Synthetic oligonucleotide
  Antisense strand to SEQ ID NO: 2554754
uucaggaagacccuaacau

SEQ ID NO: 2554756 - RNA, 19 nt, Artificial Sequence
  Description of Artificial Sequence: Synthetic oligonucleotide
  Sense strand starting at position 1062 of SEQ ID NO: 1888759
uagggucuuccugaaacuu

SEQ ID NO: 2554757 - RNA, 19 nt, Artificial Sequence
  Description of Artificial Sequence: Synthetic oligonucleotide
  Antisense strand to SEQ ID NO: 2554756
aaguuucaggaagacccua

SEQ ID NO: 2554758 - RNA, 19 nt, Artificial Sequence
  Description of Artificial Sequence: Synthetic oligonucleotide
  Sense strand starting at position 1373 of SEQ ID NO: 1888759
aagccaucgccgucacuua

SEQ ID NO: 2554759 - RNA, 19 nt, Artificial Sequence
  Description of Artificial Sequence: Synthetic oligonucleotide
  Antisense strand to SEQ ID NO: 2554758
uaagugacggcgauggcuu

SEQ ID NO: 2554760 - RNA, 19 nt, Artificial Sequence
  Description of Artificial Sequence: Synthetic oligonucleotide
  Sense strand starting at position 1498 of SEQ ID NO: 1888759
gcuggucucucauuucgau

SEQ ID NO: 2554761 - RNA, 19 nt, Artificial Sequence
  Description of Artificial Sequence: Synthetic oligonucleotide
  Antisense strand to SEQ ID NO: 2554760
aucgaaaugagagaccagc

SEQ ID NO: 2554762 - RNA, 19 nt, Artificial Sequence
  Description of Artificial Sequence: Synthetic oligonucleotide
  Sense strand starting at position 1712 of SEQ ID NO: 1888759
agccaaguaccuuguagaa

SEQ ID NO: 2554763 - RNA, 19 nt, Artificial Sequence
  Description of Artificial Sequence: Synthetic oligonucleotide
  Antisense strand to SEQ ID NO: 2554762
uucuacaagguacuuggcu

SEQ ID NO: 2554764 - RNA, 19 nt, Artificial Sequence
  Description of Artificial Sequence: Synthetic oligonucleotide
  Sense strand starting at position 2294 of SEQ ID NO: 1888759
cgcccauuucugcagaggu

SEQ ID NO: 2554765 - RNA, 19 nt, Artificial Sequence
  Description of Artificial Sequence: Synthetic oligonucleotide
  Antisense strand to SEQ ID NO: 2554764
accucugcagaaaugggcg

SEQ ID NO: 2554766 - RNA, 19 nt, Artificial Sequence
  Description of Artificial Sequence: Synthetic oligonucleotide
  Sense strand starting at position 2488 of SEQ ID NO: 1888759
ggugaaggauuagacagaa

SEQ ID NO: 2554767 - RNA, 19 nt, Artificial Sequence
  Description of Artificial Sequence: Synthetic oligonucleotide
  Antisense strand to SEQ ID NO: 2554766
uucugucuaauccuucacc

SEQ ID NO: 2554768 - RNA, 19 nt, Artificial Sequence
  Description of Artificial Sequence: Synthetic oligonucleotide
  Sense strand starting at position 2504 of SEQ ID NO: 1888759
gaagaagacuuugaacuag

SEQ ID NO: 2554769 - RNA, 19 nt, Artificial Sequence
  Description of Artificial Sequence: Synthetic oligonucleotide
  Antisense strand to SEQ ID NO: 2554768
cuaguucaaagucuucuuc

SEQ ID NO: 2554770 - RNA, 19 nt, Artificial Sequence
  Description of Artificial Sequence: Synthetic oligonucleotide
  Sense strand starting at position 2646 of SEQ ID NO: 1888759
cauggauugagucgggauc

SEQ ID NO: 2554771 - RNA, 19 nt, Artificial Sequence
  Description of Artificial Sequence: Synthetic oligonucleotide
  Antisense strand to SEQ ID NO: 2554770
gaucccgacucaauccaug

SEQ ID NO: 2554772 - RNA, 19 nt, Artificial Sequence
  Description of Artificial Sequence: Synthetic oligonucleotide
  Sense strand starting at position 2670 of SEQ ID NO: 1888759
augugagccuuuccucaga

SEQ ID NO: 2554773 - RNA, 19 nt, Artificial Sequence
  Description of Artificial Sequence: Synthetic oligonucleotide
  Antisense strand to SEQ ID NO: 2554772
ucugaggaaaggcucacau

SEQ ID NO: 2554774 - RNA, 19 nt, Artificial Sequence
  Description of Artificial Sequence: Synthetic oligonucleotide
  Sense strand starting at position 2986 of SEQ ID NO: 1888759
cugguauccaacugagaag

SEQ ID NO: 2554775 - RNA, 19 nt, Artificial Sequence
  Description of Artificial Sequence: Synthetic oligonucleotide
  Antisense strand to SEQ ID NO: 2554774
cuucucaguuggauaccag

SEQ ID NO: 2554776 - RNA, 19 nt, Artificial Sequence
  Description of Artificial Sequence: Synthetic oligonucleotide
  Sense strand starting at position 2998 of SEQ ID NO: 1888759
ugagaaguugacggagcau

SEQ ID NO: 2554777 - RNA, 19 nt, Artificial Sequence
  Description of Artificial Sequence: Synthetic oligonucleotide
  Antisense strand to SEQ ID NO: 2554776
augcuccgucaacuucuca

SEQ ID NO: 2554778 - RNA, 19 nt, Artificial Sequence
  Description of Artificial Sequence: Synthetic oligonucleotide
  Sense strand starting at position 3039 of SEQ ID NO: 1888759
cuaagugcuaacgagaaau

SEQ ID NO: 2554779 - RNA, 19 nt, Artificial Sequence
  Description of Artificial Sequence: Synthetic oligonucleotide
  Antisense strand to SEQ ID NO: 2554778
auuucucguuagcacuuag

SEQ ID NO: 2554780 - RNA, 19 nt, Artificial Sequence
  Description of Artificial Sequence: Synthetic oligonucleotide
  Sense strand starting at position 3049 of SEQ ID NO: 1888759
acgagaaaucggugagcaa

SEQ ID NO: 2554781 - RNA, 19 nt, Artificial Sequence
  Description of Artificial Sequence: Synthetic oligonucleotide
  Antisense strand to SEQ ID NO: 2554780
uugcucaccgauuucucgu

SEQ ID NO: 2554782 - RNA, 19 nt, Artificial Sequence
  Description of Artificial Sequence: Synthetic oligonucleotide
  Sense strand starting at position 3050 of SEQ ID NO: 1888759
cgagaaaucggugagcaaa

SEQ ID NO: 2554783 - RNA, 19 nt, Artificial Sequence
  Description of Artificial Sequence: Synthetic oligonucleotide
  Antisense strand to SEQ ID NO: 2554782
uuugcucaccgauuucucg

SEQ ID NO: 2554784 - RNA, 19 nt, Artificial Sequence
  Description of Artificial Sequence: Synthetic oligonucleotide
  Sense strand starting at position 3262 of SEQ ID NO: 1888759
uggaauauggcaggugaga

SEQ ID NO: 2554785 - RNA, 19 nt, Artificial Sequence
  Description of Artificial Sequence: Synthetic oligonucleotide
  Antisense strand to SEQ ID NO: 2554784
ucucaccugccauauucca

SEQ ID NO: 2554786 - RNA, 19 nt, Artificial Sequence
  Description of Artificial Sequence: Synthetic oligonucleotide
  Sense strand starting at position 3264 of SEQ ID NO: 1888759
gaauauggcaggugagagu

SEQ ID NO: 2554787 - RNA, 19 nt, Artificial Sequence
  Description of Artificial Sequence: Synthetic oligonucleotide
  Antisense strand to SEQ ID NO: 2554786
acucucaccugccauauuc

SEQ ID NO: 2554788 - RNA, 19 nt, Artificial Sequence
  Description of Artificial Sequence: Synthetic oligonucleotide
  Sense strand starting at position 3271 of SEQ ID NO: 1888759
gcaggugagaguuaacuaa

SEQ ID NO: 2554789 - RNA, 19 nt, Artificial Sequence
  Description of Artificial Sequence: Synthetic oligonucleotide
  Antisense strand to SEQ ID NO: 2554788
uuaguuaacucucaccugc

SEQ ID NO: 2554790 - RNA, 19 nt, Artificial Sequence
  Description of Artificial Sequence: Synthetic oligonucleotide
  Sense strand starting at position 3275 of SEQ ID NO: 1888759
gugagaguuaacuaauagc

SEQ ID NO: 2554791 - RNA, 19 nt, Artificial Sequence
  Description of Artificial Sequence: Synthetic oligonucleotide
  Antisense strand to SEQ ID NO: 2554790
gcuauuaguuaacucucac

SEQ ID NO: 2554792 - RNA, 19 nt, Artificial Sequence
  Description of Artificial Sequence: Synthetic oligonucleotide
  Sense strand starting at position 3374 of SEQ ID NO: 1888759
cuuuaaagcgguggaucua

SEQ ID NO: 2554793 - RNA, 19 nt, Artificial Sequence
  Description of Artificial Sequence: Synthetic oligonucleotide
  Antisense strand to SEQ ID NO: 2554792
uagauccaccgcuuuaaag

SEQ ID NO: 2554794 - RNA, 19 nt, Artificial Sequence
  Description of Artificial Sequence: Synthetic oligonucleotide
  Sense strand starting at position 3436 of SEQ ID NO: 1888759
ggacuagggucuuuggagu

SEQ ID NO: 2554795 - RNA, 19 nt, Artificial Sequence
  Description of Artificial Sequence: Synthetic oligonucleotide
  Antisense strand to SEQ ID NO: 2554794
acuccaaagacccuagucc

SEQ ID NO: 2554796 - RNA, 19 nt, Artificial Sequence
  Description of Artificial Sequence: Synthetic oligonucleotide
  Sense strand starting at position 3494 of SEQ ID NO: 1888759
aucucaucauaggcugaau

SEQ ID NO: 2554797 - RNA, 19 nt, Artificial Sequence
  Description of Artificial Sequence: Synthetic oligonucleotide
  Antisense strand to SEQ ID NO: 2554796
auucagccuaugaugagau

SEQ ID NO: 2554798 - RNA, 19 nt, Artificial Sequence
  Description of Artificial Sequence: Synthetic oligonucleotide
  Sense strand starting at position 3810 of SEQ ID NO: 1888759
gagaguuaacuuugcuccu

SEQ ID NO: 2554799 - RNA, 19 nt, Artificial Sequence
  Description of Artificial Sequence: Synthetic oligonucleotide
  Antisense strand to SEQ ID NO: 2554798
aggagcaaaguuaacucuc

SEQ ID NO: 2554800 - RNA, 19 nt, Artificial Sequence
  Description of Artificial Sequence: Synthetic oligonucleotide
  Sense strand starting at position 3842 of SEQ ID NO: 1888759
auugucauaucagucccua

SEQ ID NO: 2554801 - RNA, 19 nt, Artificial Sequence
  Description of Artificial Sequence: Synthetic oligonucleotide
  Antisense strand to SEQ ID NO: 2554800
uagggacugauaugacaau

SEQ ID NO: 2554802 - RNA, 19 nt, Artificial Sequence
  Description of Artificial Sequence: Synthetic oligonucleotide
  Sense strand starting at position 3857 of SEQ ID NO: 1888759
ccuacaggguccuuguuua

SEQ ID NO: 2554803 - RNA, 19 nt, Artificial Sequence
  Description of Artificial Sequence: Synthetic oligonucleotide
  Antisense strand to SEQ ID NO: 2554802
uaaacaaggacccuguagg

SEQ ID NO: 2554804 - RNA, 19 nt, Artificial Sequence
  Description of Artificial Sequence: Synthetic oligonucleotide
  Sense strand starting at position 3861 of SEQ ID NO: 1888759
caggguccuuguuuacauu

SEQ ID NO: 2554805 - RNA, 19 nt, Artificial Sequence
  Description of Artificial Sequence: Synthetic oligonucleotide
  Antisense strand to SEQ ID NO: 2554804
aauguaaacaaggacccug

SEQ ID NO: 2554806 - RNA, 19 nt, Artificial Sequence
  Description of Artificial Sequence: Synthetic oligonucleotide
  Sense strand starting at position 3862 of SEQ ID NO: 1888759
aggguccuuguuuacauua

SEQ ID NO: 2554807 - RNA, 19 nt, Artificial Sequence
  Description of Artificial Sequence: Synthetic oligonucleotide
  Antisense strand to SEQ ID NO: 2554806
uaauguaaacaaggacccu

SEQ ID NO: 2554808 - RNA, 19 nt, Artificial Sequence
  Description of Artificial Sequence: Synthetic oligonucleotide
  Sense strand starting at position 3949 of SEQ ID NO: 1888759
cugcaauauguucgauaga

SEQ ID NO: 2554809 - RNA, 19 nt, Artificial Sequence
  Description of Artificial Sequence: Synthetic oligonucleotide
  Antisense strand to SEQ ID NO: 2554808
ucuaucgaacauauugcag

SEQ ID NO: 2554810 - RNA, 19 nt, Artificial Sequence
  Description of Artificial Sequence: Synthetic oligonucleotide
  Sense strand starting at position 3965 of SEQ ID NO: 1888759
agagauccuugauaauuua

SEQ ID NO: 2554811 - RNA, 19 nt, Artificial Sequence
  Description of Artificial Sequence: Synthetic oligonucleotide
  Antisense strand to SEQ ID NO: 2554810
uaaauuaucaaggaucucu

SEQ ID NO: 2554812 - RNA, 19 nt, Artificial Sequence
  Description of Artificial Sequence: Synthetic oligonucleotide
  Sense strand starting at position 38 of SEQ ID NO: 1888760
guaugagguaaagguugaa

SEQ ID NO: 2554813 - RNA, 19 nt, Artificial Sequence
  Description of Artificial Sequence: Synthetic oligonucleotide
  Antisense strand to SEQ ID NO: 2554812
uucaaccuuuaccucauac

SEQ ID NO: 2554814 - RNA, 19 nt, Artificial Sequence
  Description of Artificial Sequence: Synthetic oligonucleotide
  Sense strand starting at position 413 of SEQ ID NO: 1888760
uuugauaaguacucacuga

SEQ ID NO: 2554815 - RNA, 19 nt, Artificial Sequence
  Description of Artificial Sequence: Synthetic oligonucleotide
  Antisense strand to SEQ ID NO: 2554814
ucagugaguacuuaucaaa

SEQ ID NO: 2554816 - RNA, 19 nt, Artificial Sequence
  Description of Artificial Sequence: Synthetic oligonucleotide
  Sense strand starting at position 439 of SEQ ID NO: 1888760
cuagacacucugcaguaua

SEQ ID NO: 2554817 - RNA, 19 nt, Artificial Sequence
  Description of Artificial Sequence: Synthetic oligonucleotide
  Antisense strand to SEQ ID NO: 2554816
uauacugcagagugucuag

SEQ ID NO: 2554818 - RNA, 19 nt, Artificial Sequence
  Description of Artificial Sequence: Synthetic oligonucleotide
  Sense strand starting at position 495 of SEQ ID NO: 1888760
aacuuacuguuagugagaa

SEQ ID NO: 2554819 - RNA, 19 nt, Artificial Sequence
  Description of Artificial Sequence: Synthetic oligonucleotide
  Antisense strand to SEQ ID NO: 2554818
uucucacuaacaguaaguu

SEQ ID NO: 2554820 - RNA, 19 nt, Artificial Sequence
  Description of Artificial Sequence: Synthetic oligonucleotide
  Sense strand starting at position 540 of SEQ ID NO: 1888760
aaguuuauuguagggauaa

SEQ ID NO: 2554821 - RNA, 19 nt, Artificial Sequence
  Description of Artificial Sequence: Synthetic oligonucleotide
  Antisense strand to SEQ ID NO: 2554820
uuaucccuacaauaaacuu

SEQ ID NO: 2554822 - RNA, 19 nt, Artificial Sequence
  Description of Artificial Sequence: Synthetic oligonucleotide
  Sense strand starting at position 656 of SEQ ID NO: 1888760
guaagagauagcuauguaa

SEQ ID NO: 2554823 - RNA, 19 nt, Artificial Sequence
  Description of Artificial Sequence: Synthetic oligonucleotide
  Antisense strand to SEQ ID NO: 2554822
uuacauagcuaucucuuac

SEQ ID NO: 2554824 - RNA, 19 nt, Artificial Sequence
  Description of Artificial Sequence: Synthetic oligonucleotide
  Sense strand starting at position 844 of SEQ ID NO: 1888760
ggagaaggaguuuggcuau

SEQ ID NO: 2554825 - RNA, 19 nt, Artificial Sequence
  Description of Artificial Sequence: Synthetic oligonucleotide
  Antisense strand to SEQ ID NO: 2554824
auagccaaacuccuucucc

SEQ ID NO: 2554826 - RNA, 19 nt, Artificial Sequence
  Description of Artificial Sequence: Synthetic oligonucleotide
  Sense strand starting at position 1076 of SEQ ID NO: 1888760
acagcaugcugauuaaaga

SEQ ID NO: 2554827 - RNA, 19 nt, Artificial Sequence
  Description of Artificial Sequence: Synthetic oligonucleotide
  Antisense strand to SEQ ID NO: 2554826
ucuuuaaucagcaugcugu

SEQ ID NO: 2554828 - RNA, 19 nt, Artificial Sequence
  Description of Artificial Sequence: Synthetic oligonucleotide
  Sense strand starting at position 1125 of SEQ ID NO: 1888760
uuguguagauuacuaacaa

SEQ ID NO: 2554829 - RNA, 19 nt, Artificial Sequence
  Description of Artificial Sequence: Synthetic oligonucleotide
  Antisense strand to SEQ ID NO: 2554828
uuguuaguaaucuacacaa

SEQ ID NO: 2554830 - RNA, 19 nt, Artificial Sequence
  Description of Artificial Sequence: Synthetic oligonucleotide
  Sense strand starting at position 1261 of SEQ ID NO: 1888760
agcauaugauuguuaaaga

SEQ ID NO: 2554831 - RNA, 19 nt, Artificial Sequence
  Description of Artificial Sequence: Synthetic oligonucleotide
  Antisense strand to SEQ ID NO: 2554830
ucuuuaacaaucauaugcu

SEQ ID NO: 2554832 - RNA, 19 nt, Artificial Sequence
  Description of Artificial Sequence: Synthetic oligonucleotide
  Sense strand starting at position 1325 of SEQ ID NO: 1888760
auagauagauuugagguua

SEQ ID NO: 2554833 - RNA, 19 nt, Artificial Sequence
  Description of Artificial Sequence: Synthetic oligonucleotide
  Antisense strand to SEQ ID NO: 2554832
uaaccucaaaucuaucuau

SEQ ID NO: 2554834 - RNA, 19 nt, Artificial Sequence
  Description of Artificial Sequence: Synthetic oligonucleotide
  Sense strand starting at position 1356 of SEQ ID NO: 1888760
gacuauugguauucuaaga

SEQ ID NO: 2554835 - RNA, 19 nt, Artificial Sequence
  Description of Artificial Sequence: Synthetic oligonucleotide
  Antisense strand to SEQ ID NO: 2554834
ucuuagaauaccaauaguc

SEQ ID NO: 2554836 - RNA, 19 nt, Artificial Sequence
  Description of Artificial Sequence: Synthetic oligonucleotide
  Sense strand starting at position 1398 of SEQ ID NO: 1888760
acaauauauggcugauaua

SEQ ID NO: 2554837 - RNA, 19 nt, Artificial Sequence
  Description of Artificial Sequence: Synthetic oligonucleotide
  Antisense strand to SEQ ID NO: 2554836
uauaucagccauauauugu

SEQ ID NO: 2554838 - RNA, 19 nt, Artificial Sequence
  Description of Artificial Sequence: Synthetic oligonucleotide
  Sense strand starting at position 1519 of SEQ ID NO: 1888760
uuucgagauguugaaaucu

SEQ ID NO: 2554839 - RNA, 19 nt, Artificial Sequence
  Description of Artificial Sequence: Synthetic oligonucleotide
  Antisense strand to SEQ ID NO: 2554838
agauuucaacaucucgaaa

SEQ ID NO: 2554840 - RNA, 19 nt, Artificial Sequence
  Description of Artificial Sequence: Synthetic oligonucleotide
  Sense strand starting at position 1527 of SEQ ID NO: 1888760
uguugaaaucuguggagaa

SEQ ID NO: 2554841 - RNA, 19 nt, Artificial Sequence
  Description of Artificial Sequence: Synthetic oligonucleotide
  Antisense strand to SEQ ID NO: 2554840
uucuccacagauuucaaca

SEQ ID NO: 2554842 - RNA, 19 nt, Artificial Sequence
  Description of Artificial Sequence: Synthetic oligonucleotide
  Sense strand starting at position 1572 of SEQ ID NO: 1888760
uauguuuaucucuagggua

SEQ ID NO: 2554843 - RNA, 19 nt, Artificial Sequence
  Description of Artificial Sequence: Synthetic oligonucleotide
  Antisense strand to SEQ ID NO: 2554842
uacccuagagauaaacaua

SEQ ID NO: 2554844 - RNA, 19 nt, Artificial Sequence
  Description of Artificial Sequence: Synthetic oligonucleotide
  Sense strand starting at position 1611 of SEQ ID NO: 1888760
uauagaugugcuuaaugaa

SEQ ID NO: 2554845 - RNA, 19 nt, Artificial Sequence
  Description of Artificial Sequence: Synthetic oligonucleotide
  Antisense strand to SEQ ID NO: 2554844
uucauuaagcacaucuaua

SEQ ID NO: 2554846 - RNA, 19 nt, Artificial Sequence
  Description of Artificial Sequence: Synthetic oligonucleotide
  Sense strand starting at position 1854 of SEQ ID NO: 1888760
ugaugagguucuuuaauau

SEQ ID NO: 2554847 - RNA, 19 nt, Artificial Sequence
  Description of Artificial Sequence: Synthetic oligonucleotide
  Antisense strand to SEQ ID NO: 2554846
auauuaaagaaccucauca

SEQ ID NO: 2554848 - RNA, 19 nt, Artificial Sequence
  Description of Artificial Sequence: Synthetic oligonucleotide
  Sense strand starting at position 1943 of SEQ ID NO: 1888760
ucauguuacugacugagaa

SEQ ID NO: 2554849 - RNA, 19 nt, Artificial Sequence
  Description of Artificial Sequence: Synthetic oligonucleotide
  Antisense strand to SEQ ID NO: 2554848
uucucagucaguaacauga

SEQ ID NO: 2554850 - RNA, 19 nt, Artificial Sequence
  Description of Artificial Sequence: Synthetic oligonucleotide
  Sense strand starting at position 1944 of SEQ ID NO: 1888760
cauguuacugacugagaag

SEQ ID NO: 2554851 - RNA, 19 nt, Artificial Sequence
  Description of Artificial Sequence: Synthetic oligonucleotide
  Antisense strand to SEQ ID NO: 2554850
cuucucagucaguaacaug

SEQ ID NO: 2554852 - RNA, 19 nt, Artificial Sequence
  Description of Artificial Sequence: Synthetic oligonucleotide
  Sense strand starting at position 2353 of SEQ ID NO: 1888760
cagucauaggccuaggaau

SEQ ID NO: 2554853 - RNA, 19 nt, Artificial Sequence
  Description of Artificial Sequence: Synthetic oligonucleotide
  Antisense strand to SEQ ID NO: 2554852
auuccuaggccuaugacug

SEQ ID NO: 2554854 - RNA, 19 nt, Artificial Sequence
  Description of Artificial Sequence: Synthetic oligonucleotide
  Sense strand starting at position 2379 of SEQ ID NO: 1888760
guaugaaagcaucaauagu

SEQ ID NO: 2554855 - RNA, 19 nt, Artificial Sequence
  Description of Artificial Sequence: Synthetic oligonucleotide
  Antisense strand to SEQ ID NO: 2554854
acuauugaugcuuucauac

SEQ ID NO: 2554856 - RNA, 19 nt, Artificial Sequence
  Description of Artificial Sequence: Synthetic oligonucleotide
  Sense strand starting at position 2387 of SEQ ID NO: 1888760
gcaucaauaguauagaugu

SEQ ID NO: 2554857 - RNA, 19 nt, Artificial Sequence
  Description of Artificial Sequence: Synthetic oligonucleotide
  Antisense strand to SEQ ID NO: 2554856
acaucuauacuauugaugc

SEQ ID NO: 2554858 - RNA, 19 nt, Artificial Sequence
  Description of Artificial Sequence: Synthetic oligonucleotide
  Sense strand starting at position 2549 of SEQ ID NO: 1888760
uuuacuaaacucugaugga

SEQ ID NO: 2554859 - RNA, 19 nt, Artificial Sequence
  Description of Artificial Sequence: Synthetic oligonucleotide
  Antisense strand to SEQ ID NO: 2554858
uccaucagaguuuaguaaa

SEQ ID NO: 2554860 - RNA, 19 nt, Artificial Sequence
  Description of Artificial Sequence: Synthetic oligonucleotide
  Sense strand starting at position 2556 of SEQ ID NO: 1888760
aacucugauggaugguuaa

SEQ ID NO: 2554861 - RNA, 19 nt, Artificial Sequence
  Description of Artificial Sequence: Synthetic oligonucleotide
  Antisense strand to SEQ ID NO: 2554860
uuaaccauccaucagaguu

SEQ ID NO: 2554862 - RNA, 19 nt, Artificial Sequence
  Description of Artificial Sequence: Synthetic oligonucleotide
  Sense strand starting at position 2633 of SEQ ID NO: 1888760
gcugcaaaucuauagagac

SEQ ID NO: 2554863 - RNA, 19 nt, Artificial Sequence
  Description of Artificial Sequence: Synthetic oligonucleotide
  Antisense strand to SEQ ID NO: 2554862
gucucuauagauuugcagc

SEQ ID NO: 2554864 - RNA, 19 nt, Artificial Sequence
  Description of Artificial Sequence: Synthetic oligonucleotide
  Sense strand starting at position 2828 of SEQ ID NO: 1888760
ugauauguggauuaugucu

SEQ ID NO: 2554865 - RNA, 19 nt, Artificial Sequence
  Description of Artificial Sequence: Synthetic oligonucleotide
  Antisense strand to SEQ ID NO: 2554864
agacauaauccacauauca

SEQ ID NO: 2554866 - RNA, 19 nt, Artificial Sequence
  Description of Artificial Sequence: Synthetic oligonucleotide
  Sense strand starting at position 2993 of SEQ ID NO: 1888760
aaaguaguauccuuagaug

SEQ ID NO: 2554867 - RNA, 19 nt, Artificial Sequence
  Description of Artificial Sequence: Synthetic oligonucleotide
  Antisense strand to SEQ ID NO: 2554866
caucuaaggauacuacuuu

SEQ ID NO: 2554868 - RNA, 19 nt, Artificial Sequence
  Description of Artificial Sequence: Synthetic oligonucleotide
  Sense strand starting at position 3069 of SEQ ID NO: 1888760
cuggcucuggacuaauaau

SEQ ID NO: 2554869 - RNA, 19 nt, Artificial Sequence
  Description of Artificial Sequence: Synthetic oligonucleotide
  Antisense strand to SEQ ID NO: 2554868
auuauuaguccagagccag

SEQ ID NO: 2554870 - RNA, 19 nt, Artificial Sequence
  Description of Artificial Sequence: Synthetic oligonucleotide
  Sense strand starting at position 3185 of SEQ ID NO: 1888760
auggcuaugcaauagacaa

SEQ ID NO: 2554871 - RNA, 19 nt, Artificial Sequence
  Description of Artificial Sequence: Synthetic oligonucleotide
  Antisense strand to SEQ ID NO: 2554870
uugucuauugcauagccau

SEQ ID NO: 2554872 - RNA, 19 nt, Artificial Sequence
  Description of Artificial Sequence: Synthetic oligonucleotide
  Sense strand starting at position 3227 of SEQ ID NO: 1888760
cuuugauaacuuggagggu

SEQ ID NO: 2554873 - RNA, 19 nt, Artificial Sequence
  Description of Artificial Sequence: Synthetic oligonucleotide
  Antisense strand to SEQ ID NO: 2554872
acccuccaaguuaucaaag

SEQ ID NO: 2554874 - RNA, 19 nt, Artificial Sequence
  Description of Artificial Sequence: Synthetic oligonucleotide
  Sense strand starting at position 3230 of SEQ ID NO: 1888760
ugauaacuuggaggguauu

SEQ ID NO: 2554875 - RNA, 19 nt, Artificial Sequence
  Description of Artificial Sequence: Synthetic oligonucleotide
  Antisense strand to SEQ ID NO: 2554874
aauacccuccaaguuauca

SEQ ID NO: 2554876 - RNA, 19 nt, Artificial Sequence
  Description of Artificial Sequence: Synthetic oligonucleotide
  Sense strand starting at position 3278 of SEQ ID NO: 1888760
uuacuuacaucacuaggua

SEQ ID NO: 2554877 - RNA, 19 nt, Artificial Sequence
  Description of Artificial Sequence: Synthetic oligonucleotide
  Antisense strand to SEQ ID NO: 2554876
uaccuagugauguaaguaa

SEQ ID NO: 2554878 - RNA, 19 nt, Artificial Sequence
  Description of Artificial Sequence: Synthetic oligonucleotide
  Sense strand starting at position 3282 of SEQ ID NO: 1888760
uuacaucacuagguaaaug

SEQ ID NO: 2554879 - RNA, 19 nt, Artificial Sequence
  Description of Artificial Sequence: Synthetic oligonucleotide
  Antisense strand to SEQ ID NO: 2554878
cauuuaccuagugauguaa

SEQ ID NO: 2554880 - RNA, 19 nt, Artificial Sequence
  Description of Artificial Sequence: Synthetic oligonucleotide
  Sense strand starting at position 3313 of SEQ ID NO: 1888760
aagggagaguugucuuuau

SEQ ID NO: 2554881 - RNA, 19 nt, Artificial Sequence
  Description of Artificial Sequence: Synthetic oligonucleotide
  Antisense strand to SEQ ID NO: 2554880
auaaagacaacucucccuu

SEQ ID NO: 2554882 - RNA, 19 nt, Artificial Sequence
  Description of Artificial Sequence: Synthetic oligonucleotide
  Sense strand starting at position 3524 of SEQ ID NO: 1888760
guaccauaucugcaugaaa

SEQ ID NO: 2554883 - RNA, 19 nt, Artificial Sequence
  Description of Artificial Sequence: Synthetic oligonucleotide
  Antisense strand to SEQ ID NO: 2554882
uuucaugcagauaugguac

SEQ ID NO: 2554884 - RNA, 19 nt, Artificial Sequence
  Description of Artificial Sequence: Synthetic oligonucleotide
  Sense strand starting at position 3527 of SEQ ID NO: 1888760
ccauaucugcaugaaaguu

SEQ ID NO: 2554885 - RNA, 19 nt, Artificial Sequence
  Description of Artificial Sequence: Synthetic oligonucleotide
  Antisense strand to SEQ ID NO: 2554884
aacuuucaugcagauaugg

SEQ ID NO: 2554886 - RNA, 19 nt, Artificial Sequence
  Description of Artificial Sequence: Synthetic oligonucleotide
  Sense strand starting at position 3633 of SEQ ID NO: 1888760
uggguuugagcacaucaau

SEQ ID NO: 2554887 - RNA, 19 nt, Artificial Sequence
  Description of Artificial Sequence: Synthetic oligonucleotide
  Antisense strand to SEQ ID NO: 2554886
auugaugugcucaaaccca

SEQ ID NO: 2554888 - RNA, 19 nt, Artificial Sequence
  Description of Artificial Sequence: Synthetic oligonucleotide
  Sense strand starting at position 3660 of SEQ ID NO: 1888760
auaggucuccaccaaagua

SEQ ID NO: 2554889 - RNA, 19 nt, Artificial Sequence
  Description of Artificial Sequence: Synthetic oligonucleotide
  Antisense strand to SEQ ID NO: 2554888
uacuuugguggagaccuau

SEQ ID NO: 2554890 - RNA, 19 nt, Artificial Sequence
  Description of Artificial Sequence: Synthetic oligonucleotide
  Sense strand starting at position 3951 of SEQ ID NO: 1888760
uggaaccauugaguuauau

SEQ ID NO: 2554891 - RNA, 19 nt, Artificial Sequence
  Description of Artificial Sequence: Synthetic oligonucleotide
  Antisense strand to SEQ ID NO: 2554890
auauaacucaaugguucca

SEQ ID NO: 2554892 - RNA, 19 nt, Artificial Sequence
  Description of Artificial Sequence: Synthetic oligonucleotide
  Sense strand starting at position 199 of SEQ ID NO: 1888761
aucggaugguccugagaua

SEQ ID NO: 2554893 - RNA, 19 nt, Artificial Sequence
  Description of Artificial Sequence: Synthetic oligonucleotide
  Antisense strand to SEQ ID NO: 2554892
uaucucaggaccauccgau

SEQ ID NO: 2554894 - RNA, 19 nt, Artificial Sequence
  Description of Artificial Sequence: Synthetic oligonucleotide
  Sense strand starting at position 200 of SEQ ID NO: 1888761
ucggaugguccugagauag

SEQ ID NO: 2554895 - RNA, 19 nt, Artificial Sequence
  Description of Artificial Sequence: Synthetic oligonucleotide
  Antisense strand to SEQ ID NO: 2554894
cuaucucaggaccauccga

SEQ ID NO: 2554896 - RNA, 19 nt, Artificial Sequence
  Description of Artificial Sequence: Synthetic oligonucleotide
  Sense strand starting at position 333 of SEQ ID NO: 1888761
ucacuucuccguggucuga

SEQ ID NO: 2554897 - RNA, 19 nt, Artificial Sequence
  Description of Artificial Sequence: Synthetic oligonucleotide
  Antisense strand to SEQ ID NO: 2554896
ucagaccacggagaaguga

SEQ ID NO: 2554898 - RNA, 19 nt, Artificial Sequence
  Description of Artificial Sequence: Synthetic oligonucleotide
  Sense strand starting at position 335 of SEQ ID NO: 1888761
acuucuccguggucugaga

SEQ ID NO: 2554899 - RNA, 19 nt, Artificial Sequence
  Description of Artificial Sequence: Synthetic oligonucleotide
  Antisense strand to SEQ ID NO: 2554898
ucucagaccacggagaagu

SEQ ID NO: 2554900 - RNA, 19 nt, Artificial Sequence
  Description of Artificial Sequence: Synthetic oligonucleotide
  Sense strand starting at position 337 of SEQ ID NO: 1888761
uucuccguggucugagaaa

SEQ ID NO: 2554901 - RNA, 19 nt, Artificial Sequence
  Description of Artificial Sequence: Synthetic oligonucleotide
  Antisense strand to SEQ ID NO: 2554900
uuucucagaccacggagaa

SEQ ID NO: 2554902 - RNA, 19 nt, Artificial Sequence
  Description of Artificial Sequence: Synthetic oligonucleotide
  Sense strand starting at position 346 of SEQ ID NO: 1888761
gucugagaaaucugcugag

SEQ ID NO: 2554903 - RNA, 19 nt, Artificial Sequence
  Description of Artificial Sequence: Synthetic oligonucleotide
  Antisense strand to SEQ ID NO: 2554902
cucagcagauuucucagac

SEQ ID NO: 2554904 - RNA, 19 nt, Artificial Sequence
  Description of Artificial Sequence: Synthetic oligonucleotide
  Sense strand starting at position 349 of SEQ ID NO: 1888761
ugagaaaucugcugaggca

SEQ ID NO: 2554905 - RNA, 19 nt, Artificial Sequence
  Description of Artificial Sequence: Synthetic oligonucleotide
  Antisense strand to SEQ ID NO: 2554904
ugccucagcagauuucuca

SEQ ID NO: 2554906 - RNA, 19 nt, Artificial Sequence
  Description of Artificial Sequence: Synthetic oligonucleotide
  Sense strand starting at position 749 of SEQ ID NO: 1888761
ccgccuggcucaguuagau

SEQ ID NO: 2554907 - RNA, 19 nt, Artificial Sequence
  Description of Artificial Sequence: Synthetic oligonucleotide
  Antisense strand to SEQ ID NO: 2554906
aucuaacugagccaggcgg

SEQ ID NO: 2554908 - RNA, 19 nt, Artificial Sequence
  Description of Artificial Sequence: Synthetic oligonucleotide
  Sense strand starting at position 755 of SEQ ID NO: 1888761
ggcucaguuagaugcagua

SEQ ID NO: 2554909 - RNA, 19 nt, Artificial Sequence
  Description of Artificial Sequence: Synthetic oligonucleotide
  Antisense strand to SEQ ID NO: 2554908
uacugcaucuaacugagcc

SEQ ID NO: 2554910 - RNA, 19 nt, Artificial Sequence
  Description of Artificial Sequence: Synthetic oligonucleotide
  Sense strand starting at position 797 of SEQ ID NO: 1888761
cggccugcuuggaguagau

SEQ ID NO: 2554911 - RNA, 19 nt, Artificial Sequence
  Description of Artificial Sequence: Synthetic oligonucleotide
  Antisense strand to SEQ ID NO: 2554910
aucuacuccaagcaggccg

SEQ ID NO: 2554912 - RNA, 19 nt, Artificial Sequence
  Description of Artificial Sequence: Synthetic oligonucleotide
  Sense strand starting at position 806 of SEQ ID NO: 1888761
uggaguagaucuugaggag

SEQ ID NO: 2554913 - RNA, 19 nt, Artificial Sequence
  Description of Artificial Sequence: Synthetic oligonucleotide
  Antisense strand to SEQ ID NO: 2554912
cuccucaagaucuacucca

SEQ ID NO: 2554914 - RNA, 19 nt, Artificial Sequence
  Description of Artificial Sequence: Synthetic oligonucleotide
  Sense strand starting at position 809 of SEQ ID NO: 1888761
aguagaucuugaggagcuu

SEQ ID NO: 2554915 - RNA, 19 nt, Artificial Sequence
  Description of Artificial Sequence: Synthetic oligonucleotide
  Antisense strand to SEQ ID NO: 2554914
aagcuccucaagaucuacu

SEQ ID NO: 2554916 - RNA, 19 nt, Artificial Sequence
  Description of Artificial Sequence: Synthetic oligonucleotide
  Sense strand starting at position 1481 of SEQ ID NO: 1888761
agaacacguuccuucggaa

SEQ ID NO: 2554917 - RNA, 19 nt, Artificial Sequence
  Description of Artificial Sequence: Synthetic oligonucleotide
  Antisense strand to SEQ ID NO: 2554916
uuccgaaggaacguguucu

SEQ ID NO: 2554918 - RNA, 19 nt, Artificial Sequence
  Description of Artificial Sequence: Synthetic oligonucleotide
  Sense strand starting at position 1502 of SEQ ID NO: 1888761
gcaggaaaggcucauccau

SEQ ID NO: 2554919 - RNA, 19 nt, Artificial Sequence
  Description of Artificial Sequence: Synthetic oligonucleotide
  Antisense strand to SEQ ID NO: 2554918
auggaugagccuuuccugc

SEQ ID NO: 2554920 - RNA, 19 nt, Artificial Sequence
  Description of Artificial Sequence: Synthetic oligonucleotide
  Sense strand starting at position 1646 of SEQ ID NO: 1888761
cgaagacauccagggcgau

SEQ ID NO: 2554921 - RNA, 19 nt, Artificial Sequence
  Description of Artificial Sequence: Synthetic oligonucleotide
  Antisense strand to SEQ ID NO: 2554920
aucgcccuggaugucuucg

SEQ ID NO: 2554922 - RNA, 19 nt, Artificial Sequence
  Description of Artificial Sequence: Synthetic oligonucleotide
  Sense strand starting at position 1658 of SEQ ID NO: 1888761
gggcgauguccggaagcuu

SEQ ID NO: 2554923 - RNA, 19 nt, Artificial Sequence
  Description of Artificial Sequence: Synthetic oligonucleotide
  Antisense strand to SEQ ID NO: 2554922
aagcuuccggacaucgccc

SEQ ID NO: 2554924 - RNA, 19 nt, Artificial Sequence
  Description of Artificial Sequence: Synthetic oligonucleotide
  Sense strand starting at position 1751 of SEQ ID NO: 1888761
ccgugucaucugccaggua

SEQ ID NO: 2554925 - RNA, 19 nt, Artificial Sequence
  Description of Artificial Sequence: Synthetic oligonucleotide
  Antisense strand to SEQ ID NO: 2554924
uaccuggcagaugacacgg

SEQ ID NO: 2554926 - RNA, 19 nt, Artificial Sequence
  Description of Artificial Sequence: Synthetic oligonucleotide
  Sense strand starting at position 2441 of SEQ ID NO: 1888761
aagggagucugacaaccua

SEQ ID NO: 2554927 - RNA, 19 nt, Artificial Sequence
  Description of Artificial Sequence: Synthetic oligonucleotide
  Antisense strand to SEQ ID NO: 2554926
uagguugucagacucccuu

SEQ ID NO: 2554928 - RNA, 19 nt, Artificial Sequence
  Description of Artificial Sequence: Synthetic oligonucleotide
  Sense strand starting at position 2472 of SEQ ID NO: 1888761
gcccuaguguuagagcaga

SEQ ID NO: 2554929 - RNA, 19 nt, Artificial Sequence
  Description of Artificial Sequence: Synthetic oligonucleotide
  Antisense strand to SEQ ID NO: 2554928
ucugcucuaacacuagggc

SEQ ID NO: 2554930 - RNA, 19 nt, Artificial Sequence
  Description of Artificial Sequence: Synthetic oligonucleotide
  Sense strand starting at position 2503 of SEQ ID NO: 1888761
ccugcuaugccaggcauua

SEQ ID NO: 2554931 - RNA, 19 nt, Artificial Sequence
  Description of Artificial Sequence: Synthetic oligonucleotide
  Antisense strand to SEQ ID NO: 2554930
uaaugccuggcauagcagg

SEQ ID NO: 2554932 - RNA, 19 nt, Artificial Sequence
  Description of Artificial Sequence: Synthetic oligonucleotide
  Sense strand starting at position 2514 of SEQ ID NO: 1888761
aggcauuaauccuuugguu

SEQ ID NO: 2554933 - RNA, 19 nt, Artificial Sequence
  Description of Artificial Sequence: Synthetic oligonucleotide
  Antisense strand to SEQ ID NO: 2554932
aaccaaaggauuaaugccu

SEQ ID NO: 2554934 - RNA, 19 nt, Artificial Sequence
  Description of Artificial Sequence: Synthetic oligonucleotide
  Sense strand starting at position 2516 of SEQ ID NO: 1888761
gcauuaauccuuugguugu

SEQ ID NO: 2554935 - RNA, 19 nt, Artificial Sequence
  Description of Artificial Sequence: Synthetic oligonucleotide
  Antisense strand to SEQ ID NO: 2554934
acaaccaaaggauuaaugc

SEQ ID NO: 2554936 - RNA, 19 nt, Artificial Sequence
  Description of Artificial Sequence: Synthetic oligonucleotide
  Sense strand starting at position 2520 of SEQ ID NO: 1888761
uaauccuuugguuguugaa

SEQ ID NO: 2554937 - RNA, 19 nt, Artificial Sequence
  Description of Artificial Sequence: Synthetic oligonucleotide
  Antisense strand to SEQ ID NO: 2554936
uucaacaaccaaaggauua

SEQ ID NO: 2554938 - RNA, 19 nt, Artificial Sequence
  Description of Artificial Sequence: Synthetic oligonucleotide
  Sense strand starting at position 2522 of SEQ ID NO: 1888761
auccuuugguuguugaauu

SEQ ID NO: 2554939 - RNA, 19 nt, Artificial Sequence
  Description of Artificial Sequence: Synthetic oligonucleotide
  Antisense strand to SEQ ID NO: 2554938
aauucaacaaccaaaggau

SEQ ID NO: 2554940 - RNA, 19 nt, Artificial Sequence
  Description of Artificial Sequence: Synthetic oligonucleotide
  Sense strand starting at position 2565 of SEQ ID NO: 1888761
aguucucaugaaggaauca

SEQ ID NO: 2554941 - RNA, 19 nt, Artificial Sequence
  Description of Artificial Sequence: Synthetic oligonucleotide
  Antisense strand to SEQ ID NO: 2554940
ugauuccuucaugagaacu

SEQ ID NO: 2554942 - RNA, 19 nt, Artificial Sequence
  Description of Artificial Sequence: Synthetic oligonucleotide
  Sense strand starting at position 2600 of SEQ ID NO: 1888761
agugaagaguguuaccaau

SEQ ID NO: 2554943 - RNA, 19 nt, Artificial Sequence
  Description of Artificial Sequence: Synthetic oligonucleotide
  Antisense strand to SEQ ID NO: 2554942
auugguaacacucuucacu

SEQ ID NO: 2554944 - RNA, 19 nt, Artificial Sequence
  Description of Artificial Sequence: Synthetic oligonucleotide
  Sense strand starting at position 2602 of SEQ ID NO: 1888761
ugaagaguguuaccaauca

SEQ ID NO: 2554945 - RNA, 19 nt, Artificial Sequence
  Description of Artificial Sequence: Synthetic oligonucleotide
  Antisense strand to SEQ ID NO: 2554944
ugauugguaacacucuuca

SEQ ID NO: 2554946 - RNA, 19 nt, Artificial Sequence
  Description of Artificial Sequence: Synthetic oligonucleotide
  Sense strand starting at position 2609 of SEQ ID NO: 1888761
uguuaccaaucaguauaga

SEQ ID NO: 2554947 - RNA, 19 nt, Artificial Sequence
  Description of Artificial Sequence: Synthetic oligonucleotide
  Antisense strand to SEQ ID NO: 2554946
ucuauacugauugguaaca

SEQ ID NO: 2554948 - RNA, 19 nt, Artificial Sequence
  Description of Artificial Sequence: Synthetic oligonucleotide
  Sense strand starting at position 2703 of SEQ ID NO: 1888761
ugccuaccuuauuagugua

SEQ ID NO: 2554949 - RNA, 19 nt, Artificial Sequence
  Description of Artificial Sequence: Synthetic oligonucleotide
  Antisense strand to SEQ ID NO: 2554948
uacacuaauaagguaggca

SEQ ID NO: 2554950 - RNA, 19 nt, Artificial Sequence
  Description of Artificial Sequence: Synthetic oligonucleotide
  Sense strand starting at position 2708 of SEQ ID NO: 1888761
accuuauuaguguaguuau

SEQ ID NO: 2554951 - RNA, 19 nt, Artificial Sequence
  Description of Artificial Sequence: Synthetic oligonucleotide
  Antisense strand to SEQ ID NO: 2554950
auaacuacacuaauaaggu

SEQ ID NO: 2554952 - RNA, 19 nt, Artificial Sequence
  Description of Artificial Sequence: Synthetic oligonucleotide
  Sense strand starting at position 2860 of SEQ ID NO: 1888761
uguggaguuuaccaagaua

SEQ ID NO: 2554953 - RNA, 19 nt, Artificial Sequence
  Description of Artificial Sequence: Synthetic oligonucleotide
  Antisense strand to SEQ ID NO: 2554952
uaucuugguaaacuccaca

SEQ ID NO: 2554954 - RNA, 19 nt, Artificial Sequence
  Description of Artificial Sequence: Synthetic oligonucleotide
  Sense strand starting at position 2899 of SEQ ID NO: 1888761
gggcauggucucuauauua

SEQ ID NO: 2554955 - RNA, 19 nt, Artificial Sequence
  Description of Artificial Sequence: Synthetic oligonucleotide
  Antisense strand to SEQ ID NO: 2554954
uaauauagagaccaugccc

SEQ ID NO: 2554956 - RNA, 19 nt, Artificial Sequence
  Description of Artificial Sequence: Synthetic oligonucleotide
  Sense strand starting at position 3017 of SEQ ID NO: 1888761
uugcaaucauggcugaaga

SEQ ID NO: 2554957 - RNA, 19 nt, Artificial Sequence
  Description of Artificial Sequence: Synthetic oligonucleotide
  Antisense strand to SEQ ID NO: 2554956
ucuucagccaugauugcaa

SEQ ID NO: 2554958 - RNA, 19 nt, Artificial Sequence
  Description of Artificial Sequence: Synthetic oligonucleotide
  Sense strand starting at position 3019 of SEQ ID NO: 1888761
gcaaucauggcugaagaca

SEQ ID NO: 2554959 - RNA, 19 nt, Artificial Sequence
  Description of Artificial Sequence: Synthetic oligonucleotide
  Antisense strand to SEQ ID NO: 2554958
ugucuucagccaugauugc

SEQ ID NO: 2554960 - RNA, 19 nt, Artificial Sequence
  Description of Artificial Sequence: Synthetic oligonucleotide
  Sense strand starting at position 3115 of SEQ ID NO: 1888761
cagaucucgugagaccuaa

SEQ ID NO: 2554961 - RNA, 19 nt, Artificial Sequence
  Description of Artificial Sequence: Synthetic oligonucleotide
  Antisense strand to SEQ ID NO: 2554960
uuaggucucacgagaucug

SEQ ID NO: 2554962 - RNA, 19 nt, Artificial Sequence
  Description of Artificial Sequence: Synthetic oligonucleotide
  Sense strand starting at position 3711 of SEQ ID NO: 1888761
ggccuugcugaggaaagua

SEQ ID NO: 2554963 - RNA, 19 nt, Artificial Sequence
  Description of Artificial Sequence: Synthetic oligonucleotide
  Antisense strand to SEQ ID NO: 2554962
uacuuuccucagcaaggcc

SEQ ID NO: 2554964 - RNA, 19 nt, Artificial Sequence
  Description of Artificial Sequence: Synthetic oligonucleotide
  Sense strand starting at position 3779 of SEQ ID NO: 1888761
cgaacacucccaugacaca

SEQ ID NO: 2554965 - RNA, 19 nt, Artificial Sequence
  Description of Artificial Sequence: Synthetic oligonucleotide
  Antisense strand to SEQ ID NO: 2554964
ugugucaugggaguguucg

SEQ ID NO: 2554966 - RNA, 19 nt, Artificial Sequence
  Description of Artificial Sequence: Synthetic oligonucleotide
  Sense strand starting at position 3853 of SEQ ID NO: 1888761
ccauaucagucucuaggga

SEQ ID NO: 2554967 - RNA, 19 nt, Artificial Sequence
  Description of Artificial Sequence: Synthetic oligonucleotide
  Antisense strand to SEQ ID NO: 2554966
ucccuagagacugauaugg

SEQ ID NO: 2554968 - RNA, 19 nt, Artificial Sequence
  Description of Artificial Sequence: Synthetic oligonucleotide
  Sense strand starting at position 3889 of SEQ ID NO: 1888761
aucucuauguccuggaaug

SEQ ID NO: 2554969 - RNA, 19 nt, Artificial Sequence
  Description of Artificial Sequence: Synthetic oligonucleotide
  Antisense strand to SEQ ID NO: 2554968
cauuccaggacauagagau

SEQ ID NO: 2554970 - RNA, 19 nt, Artificial Sequence
  Description of Artificial Sequence: Synthetic oligonucleotide
  Sense strand starting at position 3891 of SEQ ID NO: 1888761
cucuauguccuggaauggu

SEQ ID NO: 2554971 - RNA, 19 nt, Artificial Sequence
  Description of Artificial Sequence: Synthetic oligonucleotide
  Antisense strand to SEQ ID NO: 2554970
accauuccaggacauagag

SEQ ID NO: 2554972 - RNA, 19 nt, Artificial Sequence
  Description of Artificial Sequence: Synthetic oligonucleotide
  Sense strand starting at position 35 of SEQ ID NO: 1888762
auccuacuuguggauauau

SEQ ID NO: 2554973 - RNA, 19 nt, Artificial Sequence
  Description of Artificial Sequence: Synthetic oligonucleotide
  Antisense strand to SEQ ID NO: 2554972
auauauccacaaguaggau

SEQ ID NO: 2554974 - RNA, 19 nt, Artificial Sequence
  Description of Artificial Sequence: Synthetic oligonucleotide
  Sense strand starting at position 150 of SEQ ID NO: 1888762
agugucugccaucaacaga

SEQ ID NO: 2554975 - RNA, 19 nt, Artificial Sequence
  Description of Artificial Sequence: Synthetic oligonucleotide
  Antisense strand to SEQ ID NO: 2554974
ucuguugauggcagacacu

SEQ ID NO: 2554976 - RNA, 19 nt, Artificial Sequence
  Description of Artificial Sequence: Synthetic oligonucleotide
  Sense strand starting at position 397 of SEQ ID NO: 1888762
uggugaucacuagaggcua

SEQ ID NO: 2554977 - RNA, 19 nt, Artificial Sequence
  Description of Artificial Sequence: Synthetic oligonucleotide
  Antisense strand to SEQ ID NO: 2554976
uagccucuagugaucacca

SEQ ID NO: 2554978 - RNA, 19 nt, Artificial Sequence
  Description of Artificial Sequence: Synthetic oligonucleotide
  Sense strand starting at position 652 of SEQ ID NO: 1888762
agauauuuaucgucugucu

SEQ ID NO: 2554979 - RNA, 19 nt, Artificial Sequence
  Description of Artificial Sequence: Synthetic oligonucleotide
  Antisense strand to SEQ ID NO: 2554978
agacagacgauaaauaucu

SEQ ID NO: 2554980 - RNA, 19 nt, Artificial Sequence
  Description of Artificial Sequence: Synthetic oligonucleotide
  Sense strand starting at position 654 of SEQ ID NO: 1888762
auauuuaucgucugucuau

SEQ ID NO: 2554981 - RNA, 19 nt, Artificial Sequence
  Description of Artificial Sequence: Synthetic oligonucleotide
  Antisense strand to SEQ ID NO: 2554980
auagacagacgauaaauau

SEQ ID NO: 2554982 - RNA, 19 nt, Artificial Sequence
  Description of Artificial Sequence: Synthetic oligonucleotide
  Sense strand starting at position 1352 of SEQ ID NO: 1888762
gccagaagacuuggguuaa

SEQ ID NO: 2554983 - RNA, 19 nt, Artificial Sequence
  Description of Artificial Sequence: Synthetic oligonucleotide
  Antisense strand to SEQ ID NO: 2554982
uuaacccaagucuucuggc

SEQ ID NO: 2554984 - RNA, 19 nt, Artificial Sequence
  Description of Artificial Sequence: Synthetic oligonucleotide
  Sense strand starting at position 1363 of SEQ ID NO: 1888762
uggguuaaaucucucacau

SEQ ID NO: 2554985 - RNA, 19 nt, Artificial Sequence
  Description of Artificial Sequence: Synthetic oligonucleotide
  Antisense strand to SEQ ID NO: 2554984
augugagagauuuaaccca

SEQ ID NO: 2554986 - RNA, 19 nt, Artificial Sequence
  Description of Artificial Sequence: Synthetic oligonucleotide
  Sense strand starting at position 1399 of SEQ ID NO: 1888762
guaguaacuguggauaaau

SEQ ID NO: 2554987 - RNA, 19 nt, Artificial Sequence
  Description of Artificial Sequence: Synthetic oligonucleotide
  Antisense strand to SEQ ID NO: 2554986
auuuauccacaguuacuac

SEQ ID NO: 2554988 - RNA, 19 nt, Artificial Sequence
  Description of Artificial Sequence: Synthetic oligonucleotide
  Sense strand starting at position 1495 of SEQ ID NO: 1888762
augucugugaggugaacaa

SEQ ID NO: 2554989 - RNA, 19 nt, Artificial Sequence
  Description of Artificial Sequence: Synthetic oligonucleotide
  Antisense strand to SEQ ID NO: 2554988
uuguucaccucacagacau

SEQ ID NO: 2554990 - RNA, 19 nt, Artificial Sequence
  Description of Artificial Sequence: Synthetic oligonucleotide
  Sense strand starting at position 1576 of SEQ ID NO: 1888762
acccuuuaggucuaucuca

SEQ ID NO: 2554991 - RNA, 19 nt, Artificial Sequence
  Description of Artificial Sequence: Synthetic oligonucleotide
  Antisense strand to SEQ ID NO: 2554990
ugagauagaccuaaagggu

SEQ ID NO: 2554992 - RNA, 19 nt, Artificial Sequence
  Description of Artificial Sequence: Synthetic oligonucleotide
  Sense strand starting at position 1583 of SEQ ID NO: 1888762
aggucuaucucacuguaag

SEQ ID NO: 2554993 - RNA, 19 nt, Artificial Sequence
  Description of Artificial Sequence: Synthetic oligonucleotide
  Antisense strand to SEQ ID NO: 2554992
cuuacagugagauagaccu

SEQ ID NO: 2554994 - RNA, 19 nt, Artificial Sequence
  Description of Artificial Sequence: Synthetic oligonucleotide
  Sense strand starting at position 1661 of SEQ ID NO: 1888762
cuaggccuagaguauuaau

SEQ ID NO: 2554995 - RNA, 19 nt, Artificial Sequence
  Description of Artificial Sequence: Synthetic oligonucleotide
  Antisense strand to SEQ ID NO: 2554994
auuaauacucuaggccuag

SEQ ID NO: 2554996 - RNA, 19 nt, Artificial Sequence
  Description of Artificial Sequence: Synthetic oligonucleotide
  Sense strand starting at position 1767 of SEQ ID NO: 1888762
ugcaacuaauagguaauua

SEQ ID NO: 2554997 - RNA, 19 nt, Artificial Sequence
  Description of Artificial Sequence: Synthetic oligonucleotide
  Antisense strand to SEQ ID NO: 2554996
uaauuaccuauuaguugca

SEQ ID NO: 2554998 - RNA, 19 nt, Artificial Sequence
  Description of Artificial Sequence: Synthetic oligonucleotide
  Sense strand starting at position 1797 of SEQ ID NO: 1888762
uugacuccuugaucaguaa

SEQ ID NO: 2554999 - RNA, 19 nt, Artificial Sequence
  Description of Artificial Sequence: Synthetic oligonucleotide
  Antisense strand to SEQ ID NO: 2554998
uuacugaucaaggagucaa

SEQ ID NO: 2555000 - RNA, 19 nt, Artificial Sequence
  Description of Artificial Sequence: Synthetic oligonucleotide
  Sense strand starting at position 1798 of SEQ ID NO: 1888762
ugacuccuugaucaguaau

SEQ ID NO: 2555001 - RNA, 19 nt, Artificial Sequence
  Description of Artificial Sequence: Synthetic oligonucleotide
  Antisense strand to SEQ ID NO: 2555000
auuacugaucaaggaguca

SEQ ID NO: 2555002 - RNA, 19 nt, Artificial Sequence
  Description of Artificial Sequence: Synthetic oligonucleotide
  Sense strand starting at position 1801 of SEQ ID NO: 1888762
cuccuugaucaguaaugca

SEQ ID NO: 2555003 - RNA, 19 nt, Artificial Sequence
  Description of Artificial Sequence: Synthetic oligonucleotide
  Antisense strand to SEQ ID NO: 2555002
ugcauuacugaucaaggag

SEQ ID NO: 2555004 - RNA, 19 nt, Artificial Sequence
  Description of Artificial Sequence: Synthetic oligonucleotide
  Sense strand starting at position 1827 of SEQ ID NO: 1888762
ccuguacugggacaucuua

SEQ ID NO: 2555005 - RNA, 19 nt, Artificial Sequence
  Description of Artificial Sequence: Synthetic oligonucleotide
  Antisense strand to SEQ ID NO: 2555004
uaagaugucccaguacagg

SEQ ID NO: 2555006 - RNA, 19 nt, Artificial Sequence
  Description of Artificial Sequence: Synthetic oligonucleotide
  Sense strand starting at position 1864 of SEQ ID NO: 1888762
uuaggcuuucccuagauau

SEQ ID NO: 2555007 - RNA, 19 nt, Artificial Sequence
  Description of Artificial Sequence: Synthetic oligonucleotide
  Antisense strand to SEQ ID NO: 2555006
auaucuagggaaagccuaa

SEQ ID NO: 2555008 - RNA, 19 nt, Artificial Sequence
  Description of Artificial Sequence: Synthetic oligonucleotide
  Sense strand starting at position 2005 of SEQ ID NO: 1888762
uggagaaacagaugcagua

SEQ ID NO: 2555009 - RNA, 19 nt, Artificial Sequence
  Description of Artificial Sequence: Synthetic oligonucleotide
  Antisense strand to SEQ ID NO: 2555008
uacugcaucuguuucucca

SEQ ID NO: 2555010 - RNA, 19 nt, Artificial Sequence
  Description of Artificial Sequence: Synthetic oligonucleotide
  Sense strand starting at position 2244 of SEQ ID NO: 1888762
uccuucugaugcuuagaga

SEQ ID NO: 2555011 - RNA, 19 nt, Artificial Sequence
  Description of Artificial Sequence: Synthetic oligonucleotide
  Antisense strand to SEQ ID NO: 2555010
ucucuaagcaucagaagga

SEQ ID NO: 2555012 - RNA, 19 nt, Artificial Sequence
  Description of Artificial Sequence: Synthetic oligonucleotide
  Sense strand starting at position 2245 of SEQ ID NO: 1888762
ccuucugaugcuuagagaa

SEQ ID NO: 2555013 - RNA, 19 nt, Artificial Sequence
  Description of Artificial Sequence: Synthetic oligonucleotide
  Antisense strand to SEQ ID NO: 2555012
uucucuaagcaucagaagg

SEQ ID NO: 2555014 - RNA, 19 nt, Artificial Sequence
  Description of Artificial Sequence: Synthetic oligonucleotide
  Sense strand starting at position 2298 of SEQ ID NO: 1888762
gcaagugcuccauaaacau

SEQ ID NO: 2555015 - RNA, 19 nt, Artificial Sequence
  Description of Artificial Sequence: Synthetic oligonucleotide
  Antisense strand to SEQ ID NO: 2555014
auguuuauggagcacuugc

SEQ ID NO: 2555016 - RNA, 19 nt, Artificial Sequence
  Description of Artificial Sequence: Synthetic oligonucleotide
  Sense strand starting at position 2371 of SEQ ID NO: 1888762
gaaugaguggcuggugaaa

SEQ ID NO: 2555017 - RNA, 19 nt, Artificial Sequence
  Description of Artificial Sequence: Synthetic oligonucleotide
  Antisense strand to SEQ ID NO: 2555016
uuucaccagccacucauuc

SEQ ID NO: 2555018 - RNA, 19 nt, Artificial Sequence
  Description of Artificial Sequence: Synthetic oligonucleotide
  Sense strand starting at position 2446 of SEQ ID NO: 1888762
ccaugcaguggugaguaaa

SEQ ID NO: 2555019 - RNA, 19 nt, Artificial Sequence
  Description of Artificial Sequence: Synthetic oligonucleotide
  Antisense strand to SEQ ID NO: 2555018
uuuacucaccacugcaugg

SEQ ID NO: 2555020 - RNA, 19 nt, Artificial Sequence
  Description of Artificial Sequence: Synthetic oligonucleotide
  Sense strand starting at position 2459 of SEQ ID NO: 1888762
aguaaaguugccuaaagga

SEQ ID NO: 2555021 - RNA, 19 nt, Artificial Sequence
  Description of Artificial Sequence: Synthetic oligonucleotide
  Antisense strand to SEQ ID NO: 2555020
uccuuuaggcaacuuuacu

SEQ ID NO: 2555022 - RNA, 19 nt, Artificial Sequence
  Description of Artificial Sequence: Synthetic oligonucleotide
  Sense strand starting at position 2492 of SEQ ID NO: 1888762
ucauuaagucaccaaguuu

SEQ ID NO: 2555023 - RNA, 19 nt, Artificial Sequence
  Description of Artificial Sequence: Synthetic oligonucleotide
  Antisense strand to SEQ ID NO: 2555022
aaacuuggugacuuaauga

SEQ ID NO: 2555024 - RNA, 19 nt, Artificial Sequence
  Description of Artificial Sequence: Synthetic oligonucleotide
  Sense strand starting at position 2655 of SEQ ID NO: 1888762
uuucgaaagacagguaaua

SEQ ID NO: 2555025 - RNA, 19 nt, Artificial Sequence
  Description of Artificial Sequence: Synthetic oligonucleotide
  Antisense strand to SEQ ID NO: 2555024
uauuaccugucuuucgaaa

SEQ ID NO: 2555026 - RNA, 19 nt, Artificial Sequence
  Description of Artificial Sequence: Synthetic oligonucleotide
  Sense strand starting at position 2746 of SEQ ID NO: 1888762
gagguuuacaugcagugaa

SEQ ID NO: 2555027 - RNA, 19 nt, Artificial Sequence
  Description of Artificial Sequence: Synthetic oligonucleotide
  Antisense strand to SEQ ID NO: 2555026
uucacugcauguaaaccuc

SEQ ID NO: 2555028 - RNA, 19 nt, Artificial Sequence
  Description of Artificial Sequence: Synthetic oligonucleotide
  Sense strand starting at position 2771 of SEQ ID NO: 1888762
gcuccagaugugcaaauga

SEQ ID NO: 2555029 - RNA, 19 nt, Artificial Sequence
  Description of Artificial Sequence: Synthetic oligonucleotide
  Antisense strand to SEQ ID NO: 2555028
ucauuugcacaucuggagc

SEQ ID NO: 2555030 - RNA, 19 nt, Artificial Sequence
  Description of Artificial Sequence: Synthetic oligonucleotide
  Sense strand starting at position 2842 of SEQ ID NO: 1888762
ggccgaguccuucaggaau

SEQ ID NO: 2555031 - RNA, 19 nt, Artificial Sequence
  Description of Artificial Sequence: Synthetic oligonucleotide
  Antisense strand to SEQ ID NO: 2555030
auuccugaaggacucggcc

SEQ ID NO: 2555032 - RNA, 19 nt, Artificial Sequence
  Description of Artificial Sequence: Synthetic oligonucleotide
  Sense strand starting at position 3041 of SEQ ID NO: 1888762
gugccaggcgcuucuauau

SEQ ID NO: 2555033 - RNA, 19 nt, Artificial Sequence
  Description of Artificial Sequence: Synthetic oligonucleotide
  Antisense strand to SEQ ID NO: 2555032
auauagaagcgccuggcac

SEQ ID NO: 2555034 - RNA, 19 nt, Artificial Sequence
  Description of Artificial Sequence: Synthetic oligonucleotide
  Sense strand starting at position 3159 of SEQ ID NO: 1888762
uccaucucugcaugaggaa

SEQ ID NO: 2555035 - RNA, 19 nt, Artificial Sequence
  Description of Artificial Sequence: Synthetic oligonucleotide
  Antisense strand to SEQ ID NO: 2555034
uuccucaugcagagaugga

SEQ ID NO: 2555036 - RNA, 19 nt, Artificial Sequence
  Description of Artificial Sequence: Synthetic oligonucleotide
  Sense strand starting at position 3221 of SEQ ID NO: 1888762
gucugaauaauugaugguu

SEQ ID NO: 2555037 - RNA, 19 nt, Artificial Sequence
  Description of Artificial Sequence: Synthetic oligonucleotide
  Antisense strand to SEQ ID NO: 2555036
aaccaucaauuauucagac

SEQ ID NO: 2555038 - RNA, 19 nt, Artificial Sequence
  Description of Artificial Sequence: Synthetic oligonucleotide
  Sense strand starting at position 3322 of SEQ ID NO: 1888762
ccugcaaaucagggugaaa

SEQ ID NO: 2555039 - RNA, 19 nt, Artificial Sequence
  Description of Artificial Sequence: Synthetic oligonucleotide
  Antisense strand to SEQ ID NO: 2555038
uuucacccugauuugcagg

SEQ ID NO: 2555040 - RNA, 19 nt, Artificial Sequence
  Description of Artificial Sequence: Synthetic oligonucleotide
  Sense strand starting at position 3324 of SEQ ID NO: 1888762
ugcaaaucagggugaaaca

SEQ ID NO: 2555041 - RNA, 19 nt, Artificial Sequence
  Description of Artificial Sequence: Synthetic oligonucleotide
  Antisense strand to SEQ ID NO: 2555040
uguuucacccugauuugca

SEQ ID NO: 2555042 - RNA, 19 nt, Artificial Sequence
  Description of Artificial Sequence: Synthetic oligonucleotide
  Sense strand starting at position 3452 of SEQ ID NO: 1888762
cucaacauugcagaguaau

SEQ ID NO: 2555043 - RNA, 19 nt, Artificial Sequence
  Description of Artificial Sequence: Synthetic oligonucleotide
  Antisense strand to SEQ ID NO: 2555042
auuacucugcaauguugag

SEQ ID NO: 2555044 - RNA, 19 nt, Artificial Sequence
  Description of Artificial Sequence: Synthetic oligonucleotide
  Sense strand starting at position 3674 of SEQ ID NO: 1888762
augcaaaugccacagagua

SEQ ID NO: 2555045 - RNA, 19 nt, Artificial Sequence
  Description of Artificial Sequence: Synthetic oligonucleotide
  Antisense strand to SEQ ID NO: 2555044
uacucuguggcauuugcau

SEQ ID NO: 2555046 - RNA, 19 nt, Artificial Sequence
  Description of Artificial Sequence: Synthetic oligonucleotide
  Sense strand starting at position 3794 of SEQ ID NO: 1888762
cacugcacucgugaaauua

SEQ ID NO: 2555047 - RNA, 19 nt, Artificial Sequence
  Description of Artificial Sequence: Synthetic oligonucleotide
  Antisense strand to SEQ ID NO: 2555046
uaauuucacgagugcagug

SEQ ID NO: 2555048 - RNA, 19 nt, Artificial Sequence
  Description of Artificial Sequence: Synthetic oligonucleotide
  Sense strand starting at position 3944 of SEQ ID NO: 1888762
guuccaaggcuuuauuaag

SEQ ID NO: 2555049 - RNA, 19 nt, Artificial Sequence
  Description of Artificial Sequence: Synthetic oligonucleotide
  Antisense strand to SEQ ID NO: 2555048
cuuaauaaagccuuggaac

SEQ ID NO: 2555050 - RNA, 19 nt, Artificial Sequence
  Description of Artificial Sequence: Synthetic oligonucleotide
  Sense strand starting at position 3975 of SEQ ID NO: 1888762
aaauaaauccuguggguga

SEQ ID NO: 2555051 - RNA, 19 nt, Artificial Sequence
  Description of Artificial Sequence: Synthetic oligonucleotide
  Antisense strand to SEQ ID NO: 2555050
ucacccacaggauuuauuu

SEQ ID NO: 2555052 - RNA, 19 nt, Artificial Sequence
  Description of Artificial Sequence: Synthetic oligonucleotide
  Sense strand starting at position 1 of SEQ ID NO: 1888763
ccuucuaacuaugucugua

SEQ ID NO: 2555053 - RNA, 19 nt, Artificial Sequence
  Description of Artificial Sequence: Synthetic oligonucleotide
  Antisense strand to SEQ ID NO: 2555052
uacagacauaguuagaagg

SEQ ID NO: 2555054 - RNA, 19 nt, Artificial Sequence
  Description of Artificial Sequence: Synthetic oligonucleotide
  Sense strand starting at position 5 of SEQ ID NO: 1888763
cuaacuaugucuguaucua

SEQ ID NO: 2555055 - RNA, 19 nt, Artificial Sequence
  Description of Artificial Sequence: Synthetic oligonucleotide
  Antisense strand to SEQ ID NO: 2555054
uagauacagacauaguuag

SEQ ID NO: 2555056 - RNA, 19 nt, Artificial Sequence
  Description of Artificial Sequence: Synthetic oligonucleotide
  Sense strand starting at position 24 of SEQ ID NO: 1888763
agugcuaacuuacuaguuu

SEQ ID NO: 2555057 - RNA, 19 nt, Artificial Sequence
  Description of Artificial Sequence: Synthetic oligonucleotide
  Antisense strand to SEQ ID NO: 2555056
aaacuaguaaguuagcacu

SEQ ID NO: 2555058 - RNA, 19 nt, Artificial Sequence
  Description of Artificial Sequence: Synthetic oligonucleotide
  Sense strand starting at position 68 of SEQ ID NO: 1888763
gagucaugacaguacaucu

SEQ ID NO: 2555059 - RNA, 19 nt, Artificial Sequence
  Description of Artificial Sequence: Synthetic oligonucleotide
  Antisense strand to SEQ ID NO: 2555058
agauguacugucaugacuc

SEQ ID NO: 2555060 - RNA, 19 nt, Artificial Sequence
  Description of Artificial Sequence: Synthetic oligonucleotide
  Sense strand starting at position 217 of SEQ ID NO: 1888763
aucuuucuccacgacagua

SEQ ID NO: 2555061 - RNA, 19 nt, Artificial Sequence
  Description of Artificial Sequence: Synthetic oligonucleotide
  Antisense strand to SEQ ID NO: 2555060
uacugucguggagaaagau

SEQ ID NO: 2555062 - RNA, 19 nt, Artificial Sequence
  Description of Artificial Sequence: Synthetic oligonucleotide
  Sense strand starting at position 256 of SEQ ID NO: 1888763
guccaaauuccagguuuac

SEQ ID NO: 2555063 - RNA, 19 nt, Artificial Sequence
  Description of Artificial Sequence: Synthetic oligonucleotide
  Antisense strand to SEQ ID NO: 2555062
guaaaccuggaauuuggac

SEQ ID NO: 2555064 - RNA, 19 nt, Artificial Sequence
  Description of Artificial Sequence: Synthetic oligonucleotide
  Sense strand starting at position 316 of SEQ ID NO: 1888763
acgccuauguucucaggga

SEQ ID NO: 2555065 - RNA, 19 nt, Artificial Sequence
  Description of Artificial Sequence: Synthetic oligonucleotide
  Antisense strand to SEQ ID NO: 2555064
ucccugagaacauaggcgu

SEQ ID NO: 2555066 - RNA, 19 nt, Artificial Sequence
  Description of Artificial Sequence: Synthetic oligonucleotide
  Sense strand starting at position 320 of SEQ ID NO: 1888763
cuauguucucagggaagaa

SEQ ID NO: 2555067 - RNA, 19 nt, Artificial Sequence
  Description of Artificial Sequence: Synthetic oligonucleotide
  Antisense strand to SEQ ID NO: 2555066
uucuucccugagaacauag

SEQ ID NO: 2555068 - RNA, 19 nt, Artificial Sequence
  Description of Artificial Sequence: Synthetic oligonucleotide
  Sense strand starting at position 344 of SEQ ID NO: 1888763
agagcuuucggccaacauu

SEQ ID NO: 2555069 - RNA, 19 nt, Artificial Sequence
  Description of Artificial Sequence: Synthetic oligonucleotide
  Antisense strand to SEQ ID NO: 2555068
aauguuggccgaaagcucu

SEQ ID NO: 2555070 - RNA, 19 nt, Artificial Sequence
  Description of Artificial Sequence: Synthetic oligonucleotide
  Sense strand starting at position 613 of SEQ ID NO: 1888763
cuaagauucuggguuaauu

SEQ ID NO: 2555071 - RNA, 19 nt, Artificial Sequence
  Description of Artificial Sequence: Synthetic oligonucleotide
  Antisense strand to SEQ ID NO: 2555070
aauuaacccagaaucuuag

SEQ ID NO: 2555072 - RNA, 19 nt, Artificial Sequence
  Description of Artificial Sequence: Synthetic oligonucleotide
  Sense strand starting at position 622 of SEQ ID NO: 1888763
uggguuaauuucuagugga

SEQ ID NO: 2555073 - RNA, 19 nt, Artificial Sequence
  Description of Artificial Sequence: Synthetic oligonucleotide
  Antisense strand to SEQ ID NO: 2555072
uccacuagaaauuaaccca

SEQ ID NO: 2555074 - RNA, 19 nt, Artificial Sequence
  Description of Artificial Sequence: Synthetic oligonucleotide
  Sense strand starting at position 695 of SEQ ID NO: 1888763
aaagguaguucucugcaag

SEQ ID NO: 2555075 - RNA, 19 nt, Artificial Sequence
  Description of Artificial Sequence: Synthetic oligonucleotide
  Antisense strand to SEQ ID NO: 2555074
cuugcagagaacuaccuuu

SEQ ID NO: 2555076 - RNA, 19 nt, Artificial Sequence
  Description of Artificial Sequence: Synthetic oligonucleotide
  Sense strand starting at position 774 of SEQ ID NO: 1888763
ccuuaauuacccgaaugcu

SEQ ID NO: 2555077 - RNA, 19 nt, Artificial Sequence
  Description of Artificial Sequence: Synthetic oligonucleotide
  Antisense strand to SEQ ID NO: 2555076
agcauucggguaauuaagg

SEQ ID NO: 2555078 - RNA, 19 nt, Artificial Sequence
  Description of Artificial Sequence: Synthetic oligonucleotide
  Sense strand starting at position 868 of SEQ ID NO: 1888763
uccagauguugucucaaau

SEQ ID NO: 2555079 - RNA, 19 nt, Artificial Sequence
  Description of Artificial Sequence: Synthetic oligonucleotide
  Antisense strand to SEQ ID NO: 2555078
auuugagacaacaucugga

SEQ ID NO: 2555080 - RNA, 19 nt, Artificial Sequence
  Description of Artificial Sequence: Synthetic oligonucleotide
  Sense strand starting at position 933 of SEQ ID NO: 1888763
agcaacuuugcguuguuaa

SEQ ID NO: 2555081 - RNA, 19 nt, Artificial Sequence
  Description of Artificial Sequence: Synthetic oligonucleotide
  Antisense strand to SEQ ID NO: 2555080
uuaacaacgcaaaguugcu

SEQ ID NO: 2555082 - RNA, 19 nt, Artificial Sequence
  Description of Artificial Sequence: Synthetic oligonucleotide
  Sense strand starting at position 936 of SEQ ID NO: 1888763
aacuuugcguuguuaaaua

SEQ ID NO: 2555083 - RNA, 19 nt, Artificial Sequence
  Description of Artificial Sequence: Synthetic oligonucleotide
  Antisense strand to SEQ ID NO: 2555082
uauuuaacaacgcaaaguu

SEQ ID NO: 2555084 - RNA, 19 nt, Artificial Sequence
  Description of Artificial Sequence: Synthetic oligonucleotide
  Sense strand starting at position 1196 of SEQ ID NO: 1888763
guaugcaugccugaugcua

SEQ ID NO: 2555085 - RNA, 19 nt, Artificial Sequence
  Description of Artificial Sequence: Synthetic oligonucleotide
  Antisense strand to SEQ ID NO: 2555084
uagcaucaggcaugcauac

SEQ ID NO: 2555086 - RNA, 19 nt, Artificial Sequence
  Description of Artificial Sequence: Synthetic oligonucleotide
  Sense strand starting at position 1575 of SEQ ID NO: 1888763
ugacucuaguuagaggaaa

SEQ ID NO: 2555087 - RNA, 19 nt, Artificial Sequence
  Description of Artificial Sequence: Synthetic oligonucleotide
  Antisense strand to SEQ ID NO: 2555086
uuuccucuaacuagaguca

SEQ ID NO: 2555088 - RNA, 19 nt, Artificial Sequence
  Description of Artificial Sequence: Synthetic oligonucleotide
  Sense strand starting at position 1618 of SEQ ID NO: 1888763
ggaagcaaaugcucaacau

SEQ ID NO: 2555089 - RNA, 19 nt, Artificial Sequence
  Description of Artificial Sequence: Synthetic oligonucleotide
  Antisense strand to SEQ ID NO: 2555088
auguugagcauuugcuucc

SEQ ID NO: 2555090 - RNA, 19 nt, Artificial Sequence
  Description of Artificial Sequence: Synthetic oligonucleotide
  Sense strand starting at position 1652 of SEQ ID NO: 1888763
gggccuguaacguauucca

SEQ ID NO: 2555091 - RNA, 19 nt, Artificial Sequence
  Description of Artificial Sequence: Synthetic oligonucleotide
  Antisense strand to SEQ ID NO: 2555090
uggaauacguuacaggccc

SEQ ID NO: 2555092 - RNA, 19 nt, Artificial Sequence
  Description of Artificial Sequence: Synthetic oligonucleotide
  Sense strand starting at position 1655 of SEQ ID NO: 1888763
ccuguaacguauuccauuu

SEQ ID NO: 2555093 - RNA, 19 nt, Artificial Sequence
  Description of Artificial Sequence: Synthetic oligonucleotide
  Antisense strand to SEQ ID NO: 2555092
aaauggaauacguuacagg

SEQ ID NO: 2555094 - RNA, 19 nt, Artificial Sequence
  Description of Artificial Sequence: Synthetic oligonucleotide
  Sense strand starting at position 1771 of SEQ ID NO: 1888763
ccuuuaccuccugguugaa

SEQ ID NO: 2555095 - RNA, 19 nt, Artificial Sequence
  Description of Artificial Sequence: Synthetic oligonucleotide
  Antisense strand to SEQ ID NO: 2555094
uucaaccaggagguaaagg

SEQ ID NO: 2555096 - RNA, 19 nt, Artificial Sequence
  Description of Artificial Sequence: Synthetic oligonucleotide
  Sense strand starting at position 1773 of SEQ ID NO: 1888763
uuuaccuccugguugaauu

SEQ ID NO: 2555097 - RNA, 19 nt, Artificial Sequence
  Description of Artificial Sequence: Synthetic oligonucleotide
  Antisense strand to SEQ ID NO: 2555096
aauucaaccaggagguaaa

SEQ ID NO: 2555098 - RNA, 19 nt, Artificial Sequence
  Description of Artificial Sequence: Synthetic oligonucleotide
  Sense strand starting at position 2756 of SEQ ID NO: 1888763
ccagccugucuugggcaaa

SEQ ID NO: 2555099 - RNA, 19 nt, Artificial Sequence
  Description of Artificial Sequence: Synthetic oligonucleotide
  Antisense strand to SEQ ID NO: 2555098
uuugcccaagacaggcugg

SEQ ID NO: 2555100 - RNA, 19 nt, Artificial Sequence
  Description of Artificial Sequence: Synthetic oligonucleotide
  Sense strand starting at position 2917 of SEQ ID NO: 1888763
ccugguauugucuggacau

SEQ ID NO: 2555101 - RNA, 19 nt, Artificial Sequence
  Description of Artificial Sequence: Synthetic oligonucleotide
  Antisense strand to SEQ ID NO: 2555100
auguccagacaauaccagg

SEQ ID NO: 2555102 - RNA, 19 nt, Artificial Sequence
  Description of Artificial Sequence: Synthetic oligonucleotide
  Sense strand starting at position 2919 of SEQ ID NO: 1888763
ugguauugucuggacauua

SEQ ID NO: 2555103 - RNA, 19 nt, Artificial Sequence
  Description of Artificial Sequence: Synthetic oligonucleotide
  Antisense strand to SEQ ID NO: 2555102
uaauguccagacaauacca

SEQ ID NO: 2555104 - RNA, 19 nt, Artificial Sequence
  Description of Artificial Sequence: Synthetic oligonucleotide
  Sense strand starting at position 2981 of SEQ ID NO: 1888763
ucuugucuucuguaagaac

SEQ ID NO: 2555105 - RNA, 19 nt, Artificial Sequence
  Description of Artificial Sequence: Synthetic oligonucleotide
  Antisense strand to SEQ ID NO: 2555104
guucuuacagaagacaaga

SEQ ID NO: 2555106 - RNA, 19 nt, Artificial Sequence
  Description of Artificial Sequence: Synthetic oligonucleotide
  Sense strand starting at position 3058 of SEQ ID NO: 1888763
ccucuuugggugugaacua

SEQ ID NO: 2555107 - RNA, 19 nt, Artificial Sequence
  Description of Artificial Sequence: Synthetic oligonucleotide
  Antisense strand to SEQ ID NO: 2555106
uaguucacacccaaagagg

SEQ ID NO: 2555108 - RNA, 19 nt, Artificial Sequence
  Description of Artificial Sequence: Synthetic oligonucleotide
  Sense strand starting at position 3132 of SEQ ID NO: 1888763
gguucuuauugcuuucuaa

SEQ ID NO: 2555109 - RNA, 19 nt, Artificial Sequence
  Description of Artificial Sequence: Synthetic oligonucleotide
  Antisense strand to SEQ ID NO: 2555108
uuagaaagcaauaagaacc

SEQ ID NO: 2555110 - RNA, 19 nt, Artificial Sequence
  Description of Artificial Sequence: Synthetic oligonucleotide
  Sense strand starting at position 3279 of SEQ ID NO: 1888763
uggguuugcauuuguuaua

SEQ ID NO: 2555111 - RNA, 19 nt, Artificial Sequence
  Description of Artificial Sequence: Synthetic oligonucleotide
  Antisense strand to SEQ ID NO: 2555110
uauaacaaaugcaaaccca

SEQ ID NO: 2555112 - RNA, 19 nt, Artificial Sequence
  Description of Artificial Sequence: Synthetic oligonucleotide
  Sense strand starting at position 3280 of SEQ ID NO: 1888763
ggguuugcauuuguuauau

SEQ ID NO: 2555113 - RNA, 19 nt, Artificial Sequence
  Description of Artificial Sequence: Synthetic oligonucleotide
  Antisense strand to SEQ ID NO: 2555112
auauaacaaaugcaaaccc

SEQ ID NO: 2555114 - RNA, 19 nt, Artificial Sequence
  Description of Artificial Sequence: Synthetic oligonucleotide
  Sense strand starting at position 3292 of SEQ ID NO: 1888763
guuauauaauacgcccaaa

SEQ ID NO: 2555115 - RNA, 19 nt, Artificial Sequence
  Description of Artificial Sequence: Synthetic oligonucleotide
  Antisense strand to SEQ ID NO: 2555114
uuugggcguauuauauaac

SEQ ID NO: 2555116 - RNA, 19 nt, Artificial Sequence
  Description of Artificial Sequence: Synthetic oligonucleotide
  Sense strand starting at position 3347 of SEQ ID NO: 1888763
gagaaauaggcaugcauua

SEQ ID NO: 2555117 - RNA, 19 nt, Artificial Sequence
  Description of Artificial Sequence: Synthetic oligonucleotide
  Antisense strand to SEQ ID NO: 2555116
uaaugcaugccuauuucuc

SEQ ID NO: 2555118 - RNA, 19 nt, Artificial Sequence
  Description of Artificial Sequence: Synthetic oligonucleotide
  Sense strand starting at position 3380 of SEQ ID NO: 1888763
gccgaaaucucagugguac

SEQ ID NO: 2555119 - RNA, 19 nt, Artificial Sequence
  Description of Artificial Sequence: Synthetic oligonucleotide
  Antisense strand to SEQ ID NO: 2555118
guaccacugagauuucggc

SEQ ID NO: 2555120 - RNA, 19 nt, Artificial Sequence
  Description of Artificial Sequence: Synthetic oligonucleotide
  Sense strand starting at position 3381 of SEQ ID NO: 1888763
ccgaaaucucagugguaca

SEQ ID NO: 2555121 - RNA, 19 nt, Artificial Sequence
  Description of Artificial Sequence: Synthetic oligonucleotide
  Antisense strand to SEQ ID NO: 2555120
uguaccacugagauuucgg

SEQ ID NO: 2555122 - RNA, 19 nt, Artificial Sequence
  Description of Artificial Sequence: Synthetic oligonucleotide
  Sense strand starting at position 3382 of SEQ ID NO: 1888763
cgaaaucucagugguacaa

SEQ ID NO: 2555123 - RNA, 19 nt, Artificial Sequence
  Description of Artificial Sequence: Synthetic oligonucleotide
  Antisense strand to SEQ ID NO: 2555122
uuguaccacugagauuucg

SEQ ID NO: 2555124 - RNA, 19 nt, Artificial Sequence
  Description of Artificial Sequence: Synthetic oligonucleotide
  Sense strand starting at position 3495 of SEQ ID NO: 1888763
augcucuuaucucuguuau

SEQ ID NO: 2555125 - RNA, 19 nt, Artificial Sequence
  Description of Artificial Sequence: Synthetic oligonucleotide
  Antisense strand to SEQ ID NO: 2555124
auaacagagauaagagcau

SEQ ID NO: 2555126 - RNA, 19 nt, Artificial Sequence
  Description of Artificial Sequence: Synthetic oligonucleotide
  Sense strand starting at position 3676 of SEQ ID NO: 1888763
ccauuaguauugucuuagu

SEQ ID NO: 2555127 - RNA, 19 nt, Artificial Sequence
  Description of Artificial Sequence: Synthetic oligonucleotide
  Antisense strand to SEQ ID NO: 2555126
acuaagacaauacuaaugg

SEQ ID NO: 2555128 - RNA, 19 nt, Artificial Sequence
  Description of Artificial Sequence: Synthetic oligonucleotide
  Sense strand starting at position 3687 of SEQ ID NO: 1888763
gucuuaguccauuauguac

SEQ ID NO: 2555129 - RNA, 19 nt, Artificial Sequence
  Description of Artificial Sequence: Synthetic oligonucleotide
  Antisense strand to SEQ ID NO: 2555128
guacauaauggacuaagac

SEQ ID NO: 2555130 - RNA, 19 nt, Artificial Sequence
  Description of Artificial Sequence: Synthetic oligonucleotide
  Sense strand starting at position 3728 of SEQ ID NO: 1888763
cucggcaauuuauaaagaa

SEQ ID NO: 2555131 - RNA, 19 nt, Artificial Sequence
  Description of Artificial Sequence: Synthetic oligonucleotide
  Antisense strand to SEQ ID NO: 2555130
uucuuuauaaauugccgag

SEQ ID NO: 2555132 - RNA, 19 nt, Artificial Sequence
  Description of Artificial Sequence: Synthetic oligonucleotide
  Sense strand starting at position 102 of SEQ ID NO: 1888764
aguucuguucugcagaaca

SEQ ID NO: 2555133 - RNA, 19 nt, Artificial Sequence
  Description of Artificial Sequence: Synthetic oligonucleotide
  Antisense strand to SEQ ID NO: 2555132
uguucugcagaacagaacu

SEQ ID NO: 2555134 - RNA, 19 nt, Artificial Sequence
  Description of Artificial Sequence: Synthetic oligonucleotide
  Sense strand starting at position 104 of SEQ ID NO: 1888764
uucuguucugcagaacaaa

SEQ ID NO: 2555135 - RNA, 19 nt, Artificial Sequence
  Description of Artificial Sequence: Synthetic oligonucleotide
  Antisense strand to SEQ ID NO: 2555134
uuuguucugcagaacagaa

SEQ ID NO: 2555136 - RNA, 19 nt, Artificial Sequence
  Description of Artificial Sequence: Synthetic oligonucleotide
  Sense strand starting at position 305 of SEQ ID NO: 1888764
ugccucaucuaugugggaa

SEQ ID NO: 2555137 - RNA, 19 nt, Artificial Sequence
  Description of Artificial Sequence: Synthetic oligonucleotide
  Antisense strand to SEQ ID NO: 2555136
uucccacauagaugaggca

SEQ ID NO: 2555138 - RNA, 19 nt, Artificial Sequence
  Description of Artificial Sequence: Synthetic oligonucleotide
  Sense strand starting at position 308 of SEQ ID NO: 1888764
cucaucuaugugggaacaa

SEQ ID NO: 2555139 - RNA, 19 nt, Artificial Sequence
  Description of Artificial Sequence: Synthetic oligonucleotide
  Antisense strand to SEQ ID NO: 2555138
uuguucccacauagaugag

SEQ ID NO: 2555140 - RNA, 19 nt, Artificial Sequence
  Description of Artificial Sequence: Synthetic oligonucleotide
  Sense strand starting at position 420 of SEQ ID NO: 1888764
uuuggaugagcgcagacau

SEQ ID NO: 2555141 - RNA, 19 nt, Artificial Sequence
  Description of Artificial Sequence: Synthetic oligonucleotide
  Antisense strand to SEQ ID NO: 2555140
augucugcgcucauccaaa

SEQ ID NO: 2555142 - RNA, 19 nt, Artificial Sequence
  Description of Artificial Sequence: Synthetic oligonucleotide
  Sense strand starting at position 433 of SEQ ID NO: 1888764
agacaugcgcgaguuuguu

SEQ ID NO: 2555143 - RNA, 19 nt, Artificial Sequence
  Description of Artificial Sequence: Synthetic oligonucleotide
  Antisense strand to SEQ ID NO: 2555142
aacaaacucgcgcaugucu

SEQ ID NO: 2555144 - RNA, 19 nt, Artificial Sequence
  Description of Artificial Sequence: Synthetic oligonucleotide
  Sense strand starting at position 620 of SEQ ID NO: 1888764
ucaggucuuuaagcagaau

SEQ ID NO: 2555145 - RNA, 19 nt, Artificial Sequence
  Description of Artificial Sequence: Synthetic oligonucleotide
  Antisense strand to SEQ ID NO: 2555144
auucugcuuaaagaccuga

SEQ ID NO: 2555146 - RNA, 19 nt, Artificial Sequence
  Description of Artificial Sequence: Synthetic oligonucleotide
  Sense strand starting at position 623 of SEQ ID NO: 1888764
ggucuuuaagcagaauguu

SEQ ID NO: 2555147 - RNA, 19 nt, Artificial Sequence
  Description of Artificial Sequence: Synthetic oligonucleotide
  Antisense strand to SEQ ID NO: 2555146
aacauucugcuuaaagacc

SEQ ID NO: 2555148 - RNA, 19 nt, Artificial Sequence
  Description of Artificial Sequence: Synthetic oligonucleotide
  Sense strand starting at position 670 of SEQ ID NO: 1888764
ggagauaaugaacguuuga

SEQ ID NO: 2555149 - RNA, 19 nt, Artificial Sequence
  Description of Artificial Sequence: Synthetic oligonucleotide
  Antisense strand to SEQ ID NO: 2555148
ucaaacguucauuaucucc

SEQ ID NO: 2555150 - RNA, 19 nt, Artificial Sequence
  Description of Artificial Sequence: Synthetic oligonucleotide
  Sense strand starting at position 774 of SEQ ID NO: 1888764
gucaguuguccagcuggca

SEQ ID NO: 2555151 - RNA, 19 nt, Artificial Sequence
  Description of Artificial Sequence: Synthetic oligonucleotide
  Antisense strand to SEQ ID NO: 2555150
ugccagcuggacaacugac

SEQ ID NO: 2555152 - RNA, 19 nt, Artificial Sequence
  Description of Artificial Sequence: Synthetic oligonucleotide
  Sense strand starting at position 804 of SEQ ID NO: 1888764
cggugucagcauuaagaag

SEQ ID NO: 2555153 - RNA, 19 nt, Artificial Sequence
  Description of Artificial Sequence: Synthetic oligonucleotide
  Antisense strand to SEQ ID NO: 2555152
cuucuuaaugcugacaccg

SEQ ID NO: 2555154 - RNA, 19 nt, Artificial Sequence
  Description of Artificial Sequence: Synthetic oligonucleotide
  Sense strand starting at position 839 of SEQ ID NO: 1888764
cacgaugagaaacgaguua

SEQ ID NO: 2555155 - RNA, 19 nt, Artificial Sequence
  Description of Artificial Sequence: Synthetic oligonucleotide
  Antisense strand to SEQ ID NO: 2555154
uaacucguuucucaucgug

SEQ ID NO: 2555156 - RNA, 19 nt, Artificial Sequence
  Description of Artificial Sequence: Synthetic oligonucleotide
  Sense strand starting at position 885 of SEQ ID NO: 1888764
uccgaugacagcuacaaga

SEQ ID NO: 2555157 - RNA, 19 nt, Artificial Sequence
  Description of Artificial Sequence: Synthetic oligonucleotide
  Antisense strand to SEQ ID NO: 2555156
ucuuguagcugucaucgga

SEQ ID NO: 2555158 - RNA, 19 nt, Artificial Sequence
  Description of Artificial Sequence: Synthetic oligonucleotide
  Sense strand starting at position 1923 of SEQ ID NO: 1888764
ugcauaguucacggagaaa

SEQ ID NO: 2555159 - RNA, 19 nt, Artificial Sequence
  Description of Artificial Sequence: Synthetic oligonucleotide
  Antisense strand to SEQ ID NO: 2555158
uuucuccgugaacuaugca

SEQ ID NO: 2555160 - RNA, 19 nt, Artificial Sequence
  Description of Artificial Sequence: Synthetic oligonucleotide
  Sense strand starting at position 2052 of SEQ ID NO: 1888764
ggcuaaacggucuaaaugu

SEQ ID NO: 2555161 - RNA, 19 nt, Artificial Sequence
  Description of Artificial Sequence: Synthetic oligonucleotide
  Antisense strand to SEQ ID NO: 2555160
acauuuagaccguuuagcc

SEQ ID NO: 2555162 - RNA, 19 nt, Artificial Sequence
  Description of Artificial Sequence: Synthetic oligonucleotide
  Sense strand starting at position 2119 of SEQ ID NO: 1888764
ucucuuugacucgaagguu

SEQ ID NO: 2555163 - RNA, 19 nt, Artificial Sequence
  Description of Artificial Sequence: Synthetic oligonucleotide
  Antisense strand to SEQ ID NO: 2555162
aaccuucgagucaaagaga

SEQ ID NO: 2555164 - RNA, 19 nt, Artificial Sequence
  Description of Artificial Sequence: Synthetic oligonucleotide
  Sense strand starting at position 2469 of SEQ ID NO: 1888764
guggguaucaucuauguga

SEQ ID NO: 2555165 - RNA, 19 nt, Artificial Sequence
  Description of Artificial Sequence: Synthetic oligonucleotide
  Antisense strand to SEQ ID NO: 2555164
ucacauagaugauacccac

SEQ ID NO: 2555166 - RNA, 19 nt, Artificial Sequence
  Description of Artificial Sequence: Synthetic oligonucleotide
  Sense strand starting at position 2485 of SEQ ID NO: 1888764
ugacguuugcuagcaucuu

SEQ ID NO: 2555167 - RNA, 19 nt, Artificial Sequence
  Description of Artificial Sequence: Synthetic oligonucleotide
  Antisense strand to SEQ ID NO: 2555166
aagaugcuagcaaacguca

SEQ ID NO: 2555168 - RNA, 19 nt, Artificial Sequence
  Description of Artificial Sequence: Synthetic oligonucleotide
  Sense strand starting at position 2553 of SEQ ID NO: 1888764
augagcuaacaugguaaca

SEQ ID NO: 2555169 - RNA, 19 nt, Artificial Sequence
  Description of Artificial Sequence: Synthetic oligonucleotide
  Antisense strand to SEQ ID NO: 2555168
uguuaccauguuagcucau

SEQ ID NO: 2555170 - RNA, 19 nt, Artificial Sequence
  Description of Artificial Sequence: Synthetic oligonucleotide
  Sense strand starting at position 2616 of SEQ ID NO: 1888764
ucuugugugagauaauguc

SEQ ID NO: 2555171 - RNA, 19 nt, Artificial Sequence
  Description of Artificial Sequence: Synthetic oligonucleotide
  Antisense strand to SEQ ID NO: 2555170
gacauuaucucacacaaga

SEQ ID NO: 2555172 - RNA, 19 nt, Artificial Sequence
  Description of Artificial Sequence: Synthetic oligonucleotide
  Sense strand starting at position 2624 of SEQ ID NO: 1888764
gagauaaugucagugugaa

SEQ ID NO: 2555173 - RNA, 19 nt, Artificial Sequence
  Description of Artificial Sequence: Synthetic oligonucleotide
  Antisense strand to SEQ ID NO: 2555172
uucacacugacauuaucuc

SEQ ID NO: 2555174 - RNA, 19 nt, Artificial Sequence
  Description of Artificial Sequence: Synthetic oligonucleotide
  Sense strand starting at position 2625 of SEQ ID NO: 1888764
agauaaugucagugugaau

SEQ ID NO: 2555175 - RNA, 19 nt, Artificial Sequence
  Description of Artificial Sequence: Synthetic oligonucleotide
  Antisense strand to SEQ ID NO: 2555174
auucacacugacauuaucu

SEQ ID NO: 2555176 - RNA, 19 nt, Artificial Sequence
  Description of Artificial Sequence: Synthetic oligonucleotide
  Sense strand starting at position 2637 of SEQ ID NO: 1888764
ugugaauaauggguucagu

SEQ ID NO: 2555177 - RNA, 19 nt, Artificial Sequence
  Description of Artificial Sequence: Synthetic oligonucleotide
  Antisense strand to SEQ ID NO: 2555176
acugaacccauuauucaca

SEQ ID NO: 2555178 - RNA, 19 nt, Artificial Sequence
  Description of Artificial Sequence: Synthetic oligonucleotide
  Sense strand starting at position 3008 of SEQ ID NO: 1888764
ugaaaccuugaccgauaga

SEQ ID NO: 2555179 - RNA, 19 nt, Artificial Sequence
  Description of Artificial Sequence: Synthetic oligonucleotide
  Antisense strand to SEQ ID NO: 2555178
ucuaucggucaagguuuca

SEQ ID NO: 2555180 - RNA, 19 nt, Artificial Sequence
  Description of Artificial Sequence: Synthetic oligonucleotide
  Sense strand starting at position 3037 of SEQ ID NO: 1888764
aggaacucccuacgacauu

SEQ ID NO: 2555181 - RNA, 19 nt, Artificial Sequence
  Description of Artificial Sequence: Synthetic oligonucleotide
  Antisense strand to SEQ ID NO: 2555180
aaugucguagggaguuccu

SEQ ID NO: 2555182 - RNA, 19 nt, Artificial Sequence
  Description of Artificial Sequence: Synthetic oligonucleotide
  Sense strand starting at position 3048 of SEQ ID NO: 1888764
acgacauucuggguguaag

SEQ ID NO: 2555183 - RNA, 19 nt, Artificial Sequence
  Description of Artificial Sequence: Synthetic oligonucleotide
  Antisense strand to SEQ ID NO: 2555182
cuuacacccagaaugucgu

SEQ ID NO: 2555184 - RNA, 19 nt, Artificial Sequence
  Description of Artificial Sequence: Synthetic oligonucleotide
  Sense strand starting at position 3059 of SEQ ID NO: 1888764
gguguaaguccagggaaug

SEQ ID NO: 2555185 - RNA, 19 nt, Artificial Sequence
  Description of Artificial Sequence: Synthetic oligonucleotide
  Antisense strand to SEQ ID NO: 2555184
cauucccuggacuuacacc

SEQ ID NO: 2555186 - RNA, 19 nt, Artificial Sequence
  Description of Artificial Sequence: Synthetic oligonucleotide
  Sense strand starting at position 3070 of SEQ ID NO: 1888764
agggaauggugaucaugca

SEQ ID NO: 2555187 - RNA, 19 nt, Artificial Sequence
  Description of Artificial Sequence: Synthetic oligonucleotide
  Antisense strand to SEQ ID NO: 2555186
ugcaugaucaccauucccu

SEQ ID NO: 2555188 - RNA, 19 nt, Artificial Sequence
  Description of Artificial Sequence: Synthetic oligonucleotide
  Sense strand starting at position 3429 of SEQ ID NO: 1888764
ccuguaccuguugaaucua

SEQ ID NO: 2555189 - RNA, 19 nt, Artificial Sequence
  Description of Artificial Sequence: Synthetic oligonucleotide
  Antisense strand to SEQ ID NO: 2555188
uagauucaacagguacagg

SEQ ID NO: 2555190 - RNA, 19 nt, Artificial Sequence
  Description of Artificial Sequence: Synthetic oligonucleotide
  Sense strand starting at position 3439 of SEQ ID NO: 1888764
uugaaucuacauggucaua

SEQ ID NO: 2555191 - RNA, 19 nt, Artificial Sequence
  Description of Artificial Sequence: Synthetic oligonucleotide
  Antisense strand to SEQ ID NO: 2555190
uaugaccauguagauucaa

SEQ ID NO: 2555192 - RNA, 19 nt, Artificial Sequence
  Description of Artificial Sequence: Synthetic oligonucleotide
  Sense strand starting at position 3441 of SEQ ID NO: 1888764
gaaucuacauggucauaag

SEQ ID NO: 2555193 - RNA, 19 nt, Artificial Sequence
  Description of Artificial Sequence: Synthetic oligonucleotide
  Antisense strand to SEQ ID NO: 2555192
cuuaugaccauguagauuc

SEQ ID NO: 2555194 - RNA, 19 nt, Artificial Sequence
  Description of Artificial Sequence: Synthetic oligonucleotide
  Sense strand starting at position 3547 of SEQ ID NO: 1888764
ugcauuggugcggcacaau

SEQ ID NO: 2555195 - RNA, 19 nt, Artificial Sequence
  Description of Artificial Sequence: Synthetic oligonucleotide
  Antisense strand to SEQ ID NO: 2555194
auugugccgcaccaaugca

SEQ ID NO: 2555196 - RNA, 19 nt, Artificial Sequence
  Description of Artificial Sequence: Synthetic oligonucleotide
  Sense strand starting at position 3636 of SEQ ID NO: 1888764
ggugguaagcgguacaaca

SEQ ID NO: 2555197 - RNA, 19 nt, Artificial Sequence
  Description of Artificial Sequence: Synthetic oligonucleotide
  Antisense strand to SEQ ID NO: 2555196
uguuguaccgcuuaccacc

SEQ ID NO: 2555198 - RNA, 19 nt, Artificial Sequence
  Description of Artificial Sequence: Synthetic oligonucleotide
  Sense strand starting at position 3780 of SEQ ID NO: 1888764
auucgcuaccucuagauca

SEQ ID NO: 2555199 - RNA, 19 nt, Artificial Sequence
  Description of Artificial Sequence: Synthetic oligonucleotide
  Antisense strand to SEQ ID NO: 2555198
ugaucuagagguagcgaau

SEQ ID NO: 2555200 - RNA, 19 nt, Artificial Sequence
  Description of Artificial Sequence: Synthetic oligonucleotide
  Sense strand starting at position 3809 of SEQ ID NO: 1888764
uacauaugucaucagugua

SEQ ID NO: 2555201 - RNA, 19 nt, Artificial Sequence
  Description of Artificial Sequence: Synthetic oligonucleotide
  Antisense strand to SEQ ID NO: 2555200
uacacugaugacauaugua

SEQ ID NO: 2555202 - RNA, 19 nt, Artificial Sequence
  Description of Artificial Sequence: Synthetic oligonucleotide
  Sense strand starting at position 3812 of SEQ ID NO: 1888764
auaugucaucaguguaaua

SEQ ID NO: 2555203 - RNA, 19 nt, Artificial Sequence
  Description of Artificial Sequence: Synthetic oligonucleotide
  Antisense strand to SEQ ID NO: 2555202
uauuacacugaugacauau

SEQ ID NO: 2555204 - RNA, 19 nt, Artificial Sequence
  Description of Artificial Sequence: Synthetic oligonucleotide
  Sense strand starting at position 3814 of SEQ ID NO: 1888764
augucaucaguguaauaaa

SEQ ID NO: 2555205 - RNA, 19 nt, Artificial Sequence
  Description of Artificial Sequence: Synthetic oligonucleotide
  Antisense strand to SEQ ID NO: 2555204
uuuauuacacugaugacau

SEQ ID NO: 2555206 - RNA, 19 nt, Artificial Sequence
  Description of Artificial Sequence: Synthetic oligonucleotide
  Sense strand starting at position 3872 of SEQ ID NO: 1888764
ggauuaugacagugagcca

SEQ ID NO: 2555207 - RNA, 19 nt, Artificial Sequence
  Description of Artificial Sequence: Synthetic oligonucleotide
  Antisense strand to SEQ ID NO: 2555206
uggcucacugucauaaucc

SEQ ID NO: 2555208 - RNA, 19 nt, Artificial Sequence
  Description of Artificial Sequence: Synthetic oligonucleotide
  Sense strand starting at position 3921 of SEQ ID NO: 1888764
cuguucccgcuagaugaaa

SEQ ID NO: 2555209 - RNA, 19 nt, Artificial Sequence
  Description of Artificial Sequence: Synthetic oligonucleotide
  Antisense strand to SEQ ID NO: 2555208
uuucaucuagcgggaacag

SEQ ID NO: 2555210 - RNA, 19 nt, Artificial Sequence
  Description of Artificial Sequence: Synthetic oligonucleotide
  Sense strand starting at position 3957 of SEQ ID NO: 1888764
uucucugcugaaugggaaa

SEQ ID NO: 2555211 - RNA, 19 nt, Artificial Sequence
  Description of Artificial Sequence: Synthetic oligonucleotide
  Antisense strand to SEQ ID NO: 2555210
uuucccauucagcagagaa

SEQ ID NO: 2555212 - RNA, 19 nt, Artificial Sequence
  Description of Artificial Sequence: Synthetic oligonucleotide
  Sense strand starting at position 512 of SEQ ID NO: 1888766
ggacucuuaccugaaugcu

SEQ ID NO: 2555213 - RNA, 19 nt, Artificial Sequence
  Description of Artificial Sequence: Synthetic oligonucleotide
  Antisense strand to SEQ ID NO: 2555212
agcauucagguaagagucc

SEQ ID NO: 2555214 - RNA, 19 nt, Artificial Sequence
  Description of Artificial Sequence: Synthetic oligonucleotide
  Sense strand starting at position 630 of SEQ ID NO: 1888766
accggauaauuaccaagua

SEQ ID NO: 2555215 - RNA, 19 nt, Artificial Sequence
  Description of Artificial Sequence: Synthetic oligonucleotide
  Antisense strand to SEQ ID NO: 2555214
uacuugguaauuauccggu

SEQ ID NO: 2555216 - RNA, 19 nt, Artificial Sequence
  Description of Artificial Sequence: Synthetic oligonucleotide
  Sense strand starting at position 677 of SEQ ID NO: 1888766
aggcauugucucugaaaua

SEQ ID NO: 2555217 - RNA, 19 nt, Artificial Sequence
  Description of Artificial Sequence: Synthetic oligonucleotide
  Antisense strand to SEQ ID NO: 2555216
uauuucagagacaaugccu

SEQ ID NO: 2555218 - RNA, 19 nt, Artificial Sequence
  Description of Artificial Sequence: Synthetic oligonucleotide
  Sense strand starting at position 1020 of SEQ ID NO: 1888766
agcuuuaagcuggauacuu

SEQ ID NO: 2555219 - RNA, 19 nt, Artificial Sequence
  Description of Artificial Sequence: Synthetic oligonucleotide
  Antisense strand to SEQ ID NO: 2555218
aaguauccagcuuaaagcu

SEQ ID NO: 2555220 - RNA, 19 nt, Artificial Sequence
  Description of Artificial Sequence: Synthetic oligonucleotide
  Sense strand starting at position 1022 of SEQ ID NO: 1888766
cuuuaagcuggauacuuau

SEQ ID NO: 2555221 - RNA, 19 nt, Artificial Sequence
  Description of Artificial Sequence: Synthetic oligonucleotide
  Antisense strand to SEQ ID NO: 2555220
auaaguauccagcuuaaag

SEQ ID NO: 2555222 - RNA, 19 nt, Artificial Sequence
  Description of Artificial Sequence: Synthetic oligonucleotide
  Sense strand starting at position 1116 of SEQ ID NO: 1888766
gcccgugagaucuaccaga

SEQ ID NO: 2555223 - RNA, 19 nt, Artificial Sequence
  Description of Artificial Sequence: Synthetic oligonucleotide
  Antisense strand to SEQ ID NO: 2555222
ucugguagaucucacgggc

SEQ ID NO: 2555224 - RNA, 19 nt, Artificial Sequence
  Description of Artificial Sequence: Synthetic oligonucleotide
  Sense strand starting at position 1185 of SEQ ID NO: 1888766
gccauugcuagggacacau

SEQ ID NO: 2555225 - RNA, 19 nt, Artificial Sequence
  Description of Artificial Sequence: Synthetic oligonucleotide
  Antisense strand to SEQ ID NO: 2555224
augugucccuagcaauggc

SEQ ID NO: 2555226 - RNA, 19 nt, Artificial Sequence
  Description of Artificial Sequence: Synthetic oligonucleotide
  Sense strand starting at position 1237 of SEQ ID NO: 1888766
guacuaccauuacuaguaa

SEQ ID NO: 2555227 - RNA, 19 nt, Artificial Sequence
  Description of Artificial Sequence: Synthetic oligonucleotide
  Antisense strand to SEQ ID NO: 2555226
uuacuaguaaugguaguac

SEQ ID NO: 2555228 - RNA, 19 nt, Artificial Sequence
  Description of Artificial Sequence: Synthetic oligonucleotide
  Sense strand starting at position 1259 of SEQ ID NO: 1888766
auuauuccuugauuggaua

SEQ ID NO: 2555229 - RNA, 19 nt, Artificial Sequence
  Description of Artificial Sequence: Synthetic oligonucleotide
  Antisense strand to SEQ ID NO: 2555228
uauccaaucaaggaauaau

SEQ ID NO: 2555230 - RNA, 19 nt, Artificial Sequence
  Description of Artificial Sequence: Synthetic oligonucleotide
  Sense strand starting at position 1260 of SEQ ID NO: 1888766
uuauuccuugauuggauau

SEQ ID NO: 2555231 - RNA, 19 nt, Artificial Sequence
  Description of Artificial Sequence: Synthetic oligonucleotide
  Antisense strand to SEQ ID NO: 2555230
auauccaaucaaggaauaa

SEQ ID NO: 2555232 - RNA, 19 nt, Artificial Sequence
  Description of Artificial Sequence: Synthetic oligonucleotide
  Sense strand starting at position 1286 of SEQ ID NO: 1888766
auuccauggucaccauauu

SEQ ID NO: 2555233 - RNA, 19 nt, Artificial Sequence
  Description of Artificial Sequence: Synthetic oligonucleotide
  Antisense strand to SEQ ID NO: 2555232
aauauggugaccauggaau

SEQ ID NO: 2555234 - RNA, 19 nt, Artificial Sequence
  Description of Artificial Sequence: Synthetic oligonucleotide
  Sense strand starting at position 1432 of SEQ ID NO: 1888766
ccaucaugucuuuacuaga

SEQ ID NO: 2555235 - RNA, 19 nt, Artificial Sequence
  Description of Artificial Sequence: Synthetic oligonucleotide
  Antisense strand to SEQ ID NO: 2555234
ucuaguaaagacaugaugg

SEQ ID NO: 2555236 - RNA, 19 nt, Artificial Sequence
  Description of Artificial Sequence: Synthetic oligonucleotide
  Sense strand starting at position 1455 of SEQ ID NO: 1888766
ugacaaucucauggucauu

SEQ ID NO: 2555237 - RNA, 19 nt, Artificial Sequence
  Description of Artificial Sequence: Synthetic oligonucleotide
  Antisense strand to SEQ ID NO: 2555236
aaugaccaugagauuguca

SEQ ID NO: 2555238 - RNA, 19 nt, Artificial Sequence
  Description of Artificial Sequence: Synthetic oligonucleotide
  Sense strand starting at position 1555 of SEQ ID NO: 1888766
augugcuuaccugaggaaa

SEQ ID NO: 2555239 - RNA, 19 nt, Artificial Sequence
  Description of Artificial Sequence: Synthetic oligonucleotide
  Antisense strand to SEQ ID NO: 2555238
uuuccucagguaagcacau

SEQ ID NO: 2555240 - RNA, 19 nt, Artificial Sequence
  Description of Artificial Sequence: Synthetic oligonucleotide
  Sense strand starting at position 1827 of SEQ ID NO: 1888766
uacggacaugucuaucauc

SEQ ID NO: 2555241 - RNA, 19 nt, Artificial Sequence
  Description of Artificial Sequence: Synthetic oligonucleotide
  Antisense strand to SEQ ID NO: 2555240
gaugauagacauguccgua

SEQ ID NO: 2555242 - RNA, 19 nt, Artificial Sequence
  Description of Artificial Sequence: Synthetic oligonucleotide
  Sense strand starting at position 1885 of SEQ ID NO: 1888766
ugaugagggccaugaucau

SEQ ID NO: 2555243 - RNA, 19 nt, Artificial Sequence
  Description of Artificial Sequence: Synthetic oligonucleotide
  Antisense strand to SEQ ID NO: 2555242
augaucauggcccucauca

SEQ ID NO: 2555244 - RNA, 19 nt, Artificial Sequence
  Description of Artificial Sequence: Synthetic oligonucleotide
  Sense strand starting at position 1891 of SEQ ID NO: 1888766
gggccaugaucaucccaua

SEQ ID NO: 2555245 - RNA, 19 nt, Artificial Sequence
  Description of Artificial Sequence: Synthetic oligonucleotide
  Antisense strand to SEQ ID NO: 2555244
uaugggaugaucauggccc

SEQ ID NO: 2555246 - RNA, 19 nt, Artificial Sequence
  Description of Artificial Sequence: Synthetic oligonucleotide
  Sense strand starting at position 2126 of SEQ ID NO: 1888766
gagaacugauuauugucau

SEQ ID NO: 2555247 - RNA, 19 nt, Artificial Sequence
  Description of Artificial Sequence: Synthetic oligonucleotide
  Antisense strand to SEQ ID NO: 2555246
augacaauaaucaguucuc

SEQ ID NO: 2555248 - RNA, 19 nt, Artificial Sequence
  Description of Artificial Sequence: Synthetic oligonucleotide
  Sense strand starting at position 2138 of SEQ ID NO: 1888766
uugucauuuccuuguaacu

SEQ ID NO: 2555249 - RNA, 19 nt, Artificial Sequence
  Description of Artificial Sequence: Synthetic oligonucleotide
  Antisense strand to SEQ ID NO: 2555248
aguuacaaggaaaugacaa

SEQ ID NO: 2555250 - RNA, 19 nt, Artificial Sequence
  Description of Artificial Sequence: Synthetic oligonucleotide
  Sense strand starting at position 2216 of SEQ ID NO: 1888766
aggagagcgaguuauuaag

SEQ ID NO: 2555251 - RNA, 19 nt, Artificial Sequence
  Description of Artificial Sequence: Synthetic oligonucleotide
  Antisense strand to SEQ ID NO: 2555250
cuuaauaacucgcucuccu

SEQ ID NO: 2555252 - RNA, 19 nt, Artificial Sequence
  Description of Artificial Sequence: Synthetic oligonucleotide
  Sense strand starting at position 2239 of SEQ ID NO: 1888766
ccuggaugugcugaugaau

SEQ ID NO: 2555253 - RNA, 19 nt, Artificial Sequence
  Description of Artificial Sequence: Synthetic oligonucleotide
  Antisense strand to SEQ ID NO: 2555252
auucaucagcacauccagg

SEQ ID NO: 2555254 - RNA, 19 nt, Artificial Sequence
  Description of Artificial Sequence: Synthetic oligonucleotide
  Sense strand starting at position 2245 of SEQ ID NO: 1888766
ugugcugaugaauaaagua

SEQ ID NO: 2555255 - RNA, 19 nt, Artificial Sequence
  Description of Artificial Sequence: Synthetic oligonucleotide
  Antisense strand to SEQ ID NO: 2555254
uacuuuauucaucagcaca

SEQ ID NO: 2555256 - RNA, 19 nt, Artificial Sequence
  Description of Artificial Sequence: Synthetic oligonucleotide
  Sense strand starting at position 2452 of SEQ ID NO: 1888766
uauuaaugcuguccaagga

SEQ ID NO: 2555257 - RNA, 19 nt, Artificial Sequence
  Description of Artificial Sequence: Synthetic oligonucleotide
  Antisense strand to SEQ ID NO: 2555256
uccuuggacagcauuaaua

SEQ ID NO: 2555258 - RNA, 19 nt, Artificial Sequence
  Description of Artificial Sequence: Synthetic oligonucleotide
  Sense strand starting at position 2479 of SEQ ID NO: 1888766
aucucaauauguccaaagu

SEQ ID NO: 2555259 - RNA, 19 nt, Artificial Sequence
  Description of Artificial Sequence: Synthetic oligonucleotide
  Antisense strand to SEQ ID NO: 2555258
acuuuggacauauugagau

SEQ ID NO: 2555260 - RNA, 19 nt, Artificial Sequence
  Description of Artificial Sequence: Synthetic oligonucleotide
  Sense strand starting at position 2480 of SEQ ID NO: 1888766
ucucaauauguccaaaguu

SEQ ID NO: 2555261 - RNA, 19 nt, Artificial Sequence
  Description of Artificial Sequence: Synthetic oligonucleotide
  Antisense strand to SEQ ID NO: 2555260
aacuuuggacauauugaga

SEQ ID NO: 2555262 - RNA, 19 nt, Artificial Sequence
  Description of Artificial Sequence: Synthetic oligonucleotide
  Sense strand starting at position 2760 of SEQ ID NO: 1888766
gcacucuuuguggaaaccu

SEQ ID NO: 2555263 - RNA, 19 nt, Artificial Sequence
  Description of Artificial Sequence: Synthetic oligonucleotide
  Antisense strand to SEQ ID NO: 2555262
agguuuccacaaagagugc

SEQ ID NO: 2555264 - RNA, 19 nt, Artificial Sequence
  Description of Artificial Sequence: Synthetic oligonucleotide
  Sense strand starting at position 2810 of SEQ ID NO: 1888766
augagauucuuagucacga

SEQ ID NO: 2555265 - RNA, 19 nt, Artificial Sequence
  Description of Artificial Sequence: Synthetic oligonucleotide
  Antisense strand to SEQ ID NO: 2555264
ucgugacuaagaaucucau

SEQ ID NO: 2555266 - RNA, 19 nt, Artificial Sequence
  Description of Artificial Sequence: Synthetic oligonucleotide
  Sense strand starting at position 2811 of SEQ ID NO: 1888766
ugagauucuuagucacgaa

SEQ ID NO: 2555267 - RNA, 19 nt, Artificial Sequence
  Description of Artificial Sequence: Synthetic oligonucleotide
  Antisense strand to SEQ ID NO: 2555266
uucgugacuaagaaucuca

SEQ ID NO: 2555268 - RNA, 19 nt, Artificial Sequence
  Description of Artificial Sequence: Synthetic oligonucleotide
  Sense strand starting at position 2821 of SEQ ID NO: 1888766
agucacgaauuccuuugaa

SEQ ID NO: 2555269 - RNA, 19 nt, Artificial Sequence
  Description of Artificial Sequence: Synthetic oligonucleotide
  Antisense strand to SEQ ID NO: 2555268
uucaaaggaauucgugacu

SEQ ID NO: 2555270 - RNA, 19 nt, Artificial Sequence
  Description of Artificial Sequence: Synthetic oligonucleotide
  Sense strand starting at position 2943 of SEQ ID NO: 1888766
ucaccauguggcuauaauu

SEQ ID NO: 2555271 - RNA, 19 nt, Artificial Sequence
  Description of Artificial Sequence: Synthetic oligonucleotide
  Antisense strand to SEQ ID NO: 2555270
aauuauagccacaugguga

SEQ ID NO: 2555272 - RNA, 19 nt, Artificial Sequence
  Description of Artificial Sequence: Synthetic oligonucleotide
  Sense strand starting at position 2996 of SEQ ID NO: 1888766
gcagaugcagaaugaaaua

SEQ ID NO: 2555273 - RNA, 19 nt, Artificial Sequence
  Description of Artificial Sequence: Synthetic oligonucleotide
  Antisense strand to SEQ ID NO: 2555272
uauuucauucugcaucugc

SEQ ID NO: 2555274 - RNA, 19 nt, Artificial Sequence
  Description of Artificial Sequence: Synthetic oligonucleotide
  Sense strand starting at position 3129 of SEQ ID NO: 1888766
auguucuauggugauugua

SEQ ID NO: 2555275 - RNA, 19 nt, Artificial Sequence
  Description of Artificial Sequence: Synthetic oligonucleotide
  Antisense strand to SEQ ID NO: 2555274
uacaaucaccauagaacau

SEQ ID NO: 2555276 - RNA, 19 nt, Artificial Sequence
  Description of Artificial Sequence: Synthetic oligonucleotide
  Sense strand starting at position 3156 of SEQ ID NO: 1888766
acugauauaucauuaggca

SEQ ID NO: 2555277 - RNA, 19 nt, Artificial Sequence
  Description of Artificial Sequence: Synthetic oligonucleotide
  Antisense strand to SEQ ID NO: 2555276
ugccuaaugauauaucagu

SEQ ID NO: 2555278 - RNA, 19 nt, Artificial Sequence
  Description of Artificial Sequence: Synthetic oligonucleotide
  Sense strand starting at position 3429 of SEQ ID NO: 1888766
uugauugacuucccaugga

SEQ ID NO: 2555279 - RNA, 19 nt, Artificial Sequence
  Description of Artificial Sequence: Synthetic oligonucleotide
  Antisense strand to SEQ ID NO: 2555278
uccaugggaagucaaucaa

SEQ ID NO: 2555280 - RNA, 19 nt, Artificial Sequence
  Description of Artificial Sequence: Synthetic oligonucleotide
  Sense strand starting at position 3432 of SEQ ID NO: 1888766
auugacuucccauggaauu

SEQ ID NO: 2555281 - RNA, 19 nt, Artificial Sequence
  Description of Artificial Sequence: Synthetic oligonucleotide
  Antisense strand to SEQ ID NO: 2555280
aauuccaugggaagucaau

SEQ ID NO: 2555282 - RNA, 19 nt, Artificial Sequence
  Description of Artificial Sequence: Synthetic oligonucleotide
  Sense strand starting at position 3433 of SEQ ID NO: 1888766
uugacuucccauggaauua

SEQ ID NO: 2555283 - RNA, 19 nt, Artificial Sequence
  Description of Artificial Sequence: Synthetic oligonucleotide
  Antisense strand to SEQ ID NO: 2555282
uaauuccaugggaagucaa

SEQ ID NO: 2555284 - RNA, 19 nt, Artificial Sequence
  Description of Artificial Sequence: Synthetic oligonucleotide
  Sense strand starting at position 3652 of SEQ ID NO: 1888766
ucaacaucuggcgacaaga

SEQ ID NO: 2555285 - RNA, 19 nt, Artificial Sequence
  Description of Artificial Sequence: Synthetic oligonucleotide
  Antisense strand to SEQ ID NO: 2555284
ucuugucgccagauguuga

SEQ ID NO: 2555286 - RNA, 19 nt, Artificial Sequence
  Description of Artificial Sequence: Synthetic oligonucleotide
  Sense strand starting at position 3672 of SEQ ID NO: 1888766
acaucugaccucugguuua

SEQ ID NO: 2555287 - RNA, 19 nt, Artificial Sequence
  Description of Artificial Sequence: Synthetic oligonucleotide
  Antisense strand to SEQ ID NO: 2555286
uaaaccagaggucagaugu

SEQ ID NO: 2555288 - RNA, 19 nt, Artificial Sequence
  Description of Artificial Sequence: Synthetic oligonucleotide
  Sense strand starting at position 3781 of SEQ ID NO: 1888766
cuucccucagagcaugauu

SEQ ID NO: 2555289 - RNA, 19 nt, Artificial Sequence
  Description of Artificial Sequence: Synthetic oligonucleotide
  Antisense strand to SEQ ID NO: 2555288
aaucaugcucugagggaag

SEQ ID NO: 2555290 - RNA, 19 nt, Artificial Sequence
  Description of Artificial Sequence: Synthetic oligonucleotide
  Sense strand starting at position 3790 of SEQ ID NO: 1888766
gagcaugauuuagaugacu

SEQ ID NO: 2555291 - RNA, 19 nt, Artificial Sequence
  Description of Artificial Sequence: Synthetic oligonucleotide
  Antisense strand to SEQ ID NO: 2555290
agucaucuaaaucaugcuc

SEQ ID NO: 2555292 - RNA, 19 nt, Artificial Sequence
  Description of Artificial Sequence: Synthetic oligonucleotide
  Sense strand starting at position 600 of SEQ ID NO: 1888767
cuucuaauggcugacaaug

SEQ ID NO: 2555293 - RNA, 19 nt, Artificial Sequence
  Description of Artificial Sequence: Synthetic oligonucleotide
  Antisense strand to SEQ ID NO: 2555292
cauugucagccauuagaag

SEQ ID NO: 2555294 - RNA, 19 nt, Artificial Sequence
  Description of Artificial Sequence: Synthetic oligonucleotide
  Sense strand starting at position 640 of SEQ ID NO: 1888767
ggucaaggaacguauauua

SEQ ID NO: 2555295 - RNA, 19 nt, Artificial Sequence
  Description of Artificial Sequence: Synthetic oligonucleotide
  Antisense strand to SEQ ID NO: 2555294
uaauauacguuccuugacc

SEQ ID NO: 2555296 - RNA, 19 nt, Artificial Sequence
  Description of Artificial Sequence: Synthetic oligonucleotide
  Sense strand starting at position 1215 of SEQ ID NO: 1888767
cauccaguuguaggagaau

SEQ ID NO: 2555297 - RNA, 19 nt, Artificial Sequence
  Description of Artificial Sequence: Synthetic oligonucleotide
  Antisense strand to SEQ ID NO: 2555296
auucuccuacaacuggaug

SEQ ID NO: 2555298 - RNA, 19 nt, Artificial Sequence
  Description of Artificial Sequence: Synthetic oligonucleotide
  Sense strand starting at position 1245 of SEQ ID NO: 1888767
ggguaaacaucaguacauu

SEQ ID NO: 2555299 - RNA, 19 nt, Artificial Sequence
  Description of Artificial Sequence: Synthetic oligonucleotide
  Antisense strand to SEQ ID NO: 2555298
aauguacugauguuuaccc

SEQ ID NO: 2555300 - RNA, 19 nt, Artificial Sequence
  Description of Artificial Sequence: Synthetic oligonucleotide
  Sense strand starting at position 1380 of SEQ ID NO: 1888767
gcacuacagauguauugga

SEQ ID NO: 2555301 - RNA, 19 nt, Artificial Sequence
  Description of Artificial Sequence: Synthetic oligonucleotide
  Antisense strand to SEQ ID NO: 2555300
uccaauacaucuguagugc

SEQ ID NO: 2555302 - RNA, 19 nt, Artificial Sequence
  Description of Artificial Sequence: Synthetic oligonucleotide
  Sense strand starting at position 1548 of SEQ ID NO: 1888767
ggugguucugaacagagca

SEQ ID NO: 2555303 - RNA, 19 nt, Artificial Sequence
  Description of Artificial Sequence: Synthetic oligonucleotide
  Antisense strand to SEQ ID NO: 2555302
ugcucuguucagaaccacc

SEQ ID NO: 2555304 - RNA, 19 nt, Artificial Sequence
  Description of Artificial Sequence: Synthetic oligonucleotide
  Sense strand starting at position 2807 of SEQ ID NO: 1888767
aguguuggugaauaaguga

SEQ ID NO: 2555305 - RNA, 19 nt, Artificial Sequence
  Description of Artificial Sequence: Synthetic oligonucleotide
  Antisense strand to SEQ ID NO: 2555304
ucacuuauucaccaacacu

SEQ ID NO: 2555306 - RNA, 19 nt, Artificial Sequence
  Description of Artificial Sequence: Synthetic oligonucleotide
  Sense strand starting at position 2818 of SEQ ID NO: 1888767
auaagugauguugggugaa

SEQ ID NO: 2555307 - RNA, 19 nt, Artificial Sequence
  Description of Artificial Sequence: Synthetic oligonucleotide
  Antisense strand to SEQ ID NO: 2555306
uucacccaacaucacuuau

SEQ ID NO: 2555308 - RNA, 19 nt, Artificial Sequence
  Description of Artificial Sequence: Synthetic oligonucleotide
  Sense strand starting at position 3105 of SEQ ID NO: 1888767
ggucauuuauugcuaguaa

SEQ ID NO: 2555309 - RNA, 19 nt, Artificial Sequence
  Description of Artificial Sequence: Synthetic oligonucleotide
  Antisense strand to SEQ ID NO: 2555308
uuacuagcaauaaaugacc

SEQ ID NO: 2555310 - RNA, 19 nt, Artificial Sequence
  Description of Artificial Sequence: Synthetic oligonucleotide
  Sense strand starting at position 3359 of SEQ ID NO: 1888767
cccagacugguguagaacu

SEQ ID NO: 2555311 - RNA, 19 nt, Artificial Sequence
  Description of Artificial Sequence: Synthetic oligonucleotide
  Antisense strand to SEQ ID NO: 2555310
aguucuacaccagucuggg

SEQ ID NO: 2555312 - RNA, 19 nt, Artificial Sequence
  Description of Artificial Sequence: Synthetic oligonucleotide
  Sense strand starting at position 3818 of SEQ ID NO: 1888767
gcagaaauagcugagucaa

SEQ ID NO: 2555313 - RNA, 19 nt, Artificial Sequence
  Description of Artificial Sequence: Synthetic oligonucleotide
  Antisense strand to SEQ ID NO: 2555312
uugacucagcuauuucugc

SEQ ID NO: 2555314 - RNA, 19 nt, Artificial Sequence
  Description of Artificial Sequence: Synthetic oligonucleotide
  Sense strand starting at position 3820 of SEQ ID NO: 1888767
agaaauagcugagucaaau

SEQ ID NO: 2555315 - RNA, 19 nt, Artificial Sequence
  Description of Artificial Sequence: Synthetic oligonucleotide
  Antisense strand to SEQ ID NO: 2555314
auuugacucagcuauuucu

SEQ ID NO: 2555316 - RNA, 19 nt, Artificial Sequence
  Description of Artificial Sequence: Synthetic oligonucleotide
  Sense strand starting at position 3959 of SEQ ID NO: 1888767
augaguaugcaucacuuau

SEQ ID NO: 2555317 - RNA, 19 nt, Artificial Sequence
  Description of Artificial Sequence: Synthetic oligonucleotide
  Antisense strand to SEQ ID NO: 2555316
auaagugaugcauacucau

SEQ ID NO: 2555318 - RNA, 19 nt, Artificial Sequence
  Description of Artificial Sequence: Synthetic oligonucleotide
  Sense strand starting at position 3981 of SEQ ID NO: 1888767
agaaguauccaaugagagc

SEQ ID NO: 2555319 - RNA, 19 nt, Artificial Sequence
  Description of Artificial Sequence: Synthetic oligonucleotide
  Antisense strand to SEQ ID NO: 2555318
gcucucauuggauacuucu

SEQ ID NO: 2555320 - RNA, 19 nt, Artificial Sequence
  Description of Artificial Sequence: Synthetic oligonucleotide
  Sense strand starting at position 101 of SEQ ID NO: 1888768
gaaauaaucuauguggcua

SEQ ID NO: 2555321 - RNA, 19 nt, Artificial Sequence
  Description of Artificial Sequence: Synthetic oligonucleotide
  Antisense strand to SEQ ID NO: 2555320
uagccacauagauuauuuc

SEQ ID NO: 2555322 - RNA, 19 nt, Artificial Sequence
  Description of Artificial Sequence: Synthetic oligonucleotide
  Sense strand starting at position 154 of SEQ ID NO: 1888768
uucugacgggcucaagaaa

SEQ ID NO: 2555323 - RNA, 19 nt, Artificial Sequence
  Description of Artificial Sequence: Synthetic oligonucleotide
  Antisense strand to SEQ ID NO: 2555322
uuucuugagcccgucagaa

SEQ ID NO: 2555324 - RNA, 19 nt, Artificial Sequence
  Description of Artificial Sequence: Synthetic oligonucleotide
  Sense strand starting at position 182 of SEQ ID NO: 1888768
uuugucauuuauccagcuu

SEQ ID NO: 2555325 - RNA, 19 nt, Artificial Sequence
  Description of Artificial Sequence: Synthetic oligonucleotide
  Antisense strand to SEQ ID NO: 2555324
aagcuggauaaaugacaaa

SEQ ID NO: 2555326 - RNA, 19 nt, Artificial Sequence
  Description of Artificial Sequence: Synthetic oligonucleotide
  Sense strand starting at position 254 of SEQ ID NO: 1888768
ggagaaggguuguuuauga

SEQ ID NO: 2555327 - RNA, 19 nt, Artificial Sequence
  Description of Artificial Sequence: Synthetic oligonucleotide
  Antisense strand to SEQ ID NO: 2555326
ucauaaacaacccuucucc

SEQ ID NO: 2555328 - RNA, 19 nt, Artificial Sequence
  Description of Artificial Sequence: Synthetic oligonucleotide
  Sense strand starting at position 525 of SEQ ID NO: 1888768
aaagguagccuguauuaau

SEQ ID NO: 2555329 - RNA, 19 nt, Artificial Sequence
  Description of Artificial Sequence: Synthetic oligonucleotide
  Antisense strand to SEQ ID NO: 2555328
auuaauacaggcuaccuuu

SEQ ID NO: 2555330 - RNA, 19 nt, Artificial Sequence
  Description of Artificial Sequence: Synthetic oligonucleotide
  Sense strand starting at position 599 of SEQ ID NO: 1888768
cuucuaauggcugacaaug

SEQ ID NO: 2555331 - RNA, 19 nt, Artificial Sequence
  Description of Artificial Sequence: Synthetic oligonucleotide
  Antisense strand to SEQ ID NO: 2555330
cauugucagccauuagaag

SEQ ID NO: 2555332 - RNA, 19 nt, Artificial Sequence
  Description of Artificial Sequence: Synthetic oligonucleotide
  Sense strand starting at position 619 of SEQ ID NO: 1888768
ucuguauaacuugauguua

SEQ ID NO: 2555333 - RNA, 19 nt, Artificial Sequence
  Description of Artificial Sequence: Synthetic oligonucleotide
  Antisense strand to SEQ ID NO: 2555332
uaacaucaaguuauacaga

SEQ ID NO: 2555334 - RNA, 19 nt, Artificial Sequence
  Description of Artificial Sequence: Synthetic oligonucleotide
  Sense strand starting at position 639 of SEQ ID NO: 1888768
ggucaaggaacguauauua

SEQ ID NO: 2555335 - RNA, 19 nt, Artificial Sequence
  Description of Artificial Sequence: Synthetic oligonucleotide
  Antisense strand to SEQ ID NO: 2555334
uaauauacguuccuugacc

SEQ ID NO: 2555336 - RNA, 19 nt, Artificial Sequence
  Description of Artificial Sequence: Synthetic oligonucleotide
  Sense strand starting at position 891 of SEQ ID NO: 1888768
guggacacucuguaauucu

SEQ ID NO: 2555337 - RNA, 19 nt, Artificial Sequence
  Description of Artificial Sequence: Synthetic oligonucleotide
  Antisense strand to SEQ ID NO: 2555336
agaauuacagaguguccac

SEQ ID NO: 2555338 - RNA, 19 nt, Artificial Sequence
  Description of Artificial Sequence: Synthetic oligonucleotide
  Sense strand starting at position 1214 of SEQ ID NO: 1888768
cauccaguuguaggagaau

SEQ ID NO: 2555339 - RNA, 19 nt, Artificial Sequence
  Description of Artificial Sequence: Synthetic oligonucleotide
  Antisense strand to SEQ ID NO: 2555338
auucuccuacaacuggaug

SEQ ID NO: 2555340 - RNA, 19 nt, Artificial Sequence
  Description of Artificial Sequence: Synthetic oligonucleotide
  Sense strand starting at position 1244 of SEQ ID NO: 1888768
ggguaaacaucaguacauu

SEQ ID NO: 2555341 - RNA, 19 nt, Artificial Sequence
  Description of Artificial Sequence: Synthetic oligonucleotide
  Antisense strand to SEQ ID NO: 2555340
aauguacugauguuuaccc

SEQ ID NO: 2555342 - RNA, 19 nt, Artificial Sequence
  Description of Artificial Sequence: Synthetic oligonucleotide
  Sense strand starting at position 1371 of SEQ ID NO: 1888768
agcauauugcacuacagau

SEQ ID NO: 2555343 - RNA, 19 nt, Artificial Sequence
  Description of Artificial Sequence: Synthetic oligonucleotide
  Antisense strand to SEQ ID NO: 2555342
aucuguagugcaauaugcu

SEQ ID NO: 2555344 - RNA, 19 nt, Artificial Sequence
  Description of Artificial Sequence: Synthetic oligonucleotide
  Sense strand starting at position 1379 of SEQ ID NO: 1888768
gcacuacagauguauugga

SEQ ID NO: 2555345 - RNA, 19 nt, Artificial Sequence
  Description of Artificial Sequence: Synthetic oligonucleotide
  Antisense strand to SEQ ID NO: 2555344
uccaauacaucuguagugc

SEQ ID NO: 2555346 - RNA, 19 nt, Artificial Sequence
  Description of Artificial Sequence: Synthetic oligonucleotide
  Sense strand starting at position 1547 of SEQ ID NO: 1888768
ggugguucugaacagagca

SEQ ID NO: 2555347 - RNA, 19 nt, Artificial Sequence
  Description of Artificial Sequence: Synthetic oligonucleotide
  Antisense strand to SEQ ID NO: 2555346
ugcucuguucagaaccacc

SEQ ID NO: 2555348 - RNA, 19 nt, Artificial Sequence
  Description of Artificial Sequence: Synthetic oligonucleotide
  Sense strand starting at position 1549 of SEQ ID NO: 1888768
ugguucugaacagagcauu

SEQ ID NO: 2555349 - RNA, 19 nt, Artificial Sequence
  Description of Artificial Sequence: Synthetic oligonucleotide
  Antisense strand to SEQ ID NO: 2555348
aaugcucuguucagaacca

SEQ ID NO: 2555350 - RNA, 19 nt, Artificial Sequence
  Description of Artificial Sequence: Synthetic oligonucleotide
  Sense strand starting at position 1759 of SEQ ID NO: 1888768
uggcgaugcgguccaguau

SEQ ID NO: 2555351 - RNA, 19 nt, Artificial Sequence
  Description of Artificial Sequence: Synthetic oligonucleotide
  Antisense strand to SEQ ID NO: 2555350
auacuggaccgcaucgcca

SEQ ID NO: 2555352 - RNA, 19 nt, Artificial Sequence
  Description of Artificial Sequence: Synthetic oligonucleotide
  Sense strand starting at position 1771 of SEQ ID NO: 1888768
ccaguaugucacgaaccau

SEQ ID NO: 2555353 - RNA, 19 nt, Artificial Sequence
  Description of Artificial Sequence: Synthetic oligonucleotide
  Antisense strand to SEQ ID NO: 2555352
augguucgugacauacugg

SEQ ID NO: 2555354 - RNA, 19 nt, Artificial Sequence
  Description of Artificial Sequence: Synthetic oligonucleotide
  Sense strand starting at position 2806 of SEQ ID NO: 1888768
aguguuggugaauaaguga

SEQ ID NO: 2555355 - RNA, 19 nt, Artificial Sequence
  Description of Artificial Sequence: Synthetic oligonucleotide
  Antisense strand to SEQ ID NO: 2555354
ucacuuauucaccaacacu

SEQ ID NO: 2555356 - RNA, 19 nt, Artificial Sequence
  Description of Artificial Sequence: Synthetic oligonucleotide
  Sense strand starting at position 2817 of SEQ ID NO: 1888768
auaagugauguugggugaa

SEQ ID NO: 2555357 - RNA, 19 nt, Artificial Sequence
  Description of Artificial Sequence: Synthetic oligonucleotide
  Antisense strand to SEQ ID NO: 2555356
uucacccaacaucacuuau

SEQ ID NO: 2555358 - RNA, 19 nt, Artificial Sequence
  Description of Artificial Sequence: Synthetic oligonucleotide
  Sense strand starting at position 3357 of SEQ ID NO: 1888768
cccagacugguguagaacu

SEQ ID NO: 2555359 - RNA, 19 nt, Artificial Sequence
  Description of Artificial Sequence: Synthetic oligonucleotide
  Antisense strand to SEQ ID NO: 2555358
aguucuacaccagucuggg

SEQ ID NO: 2555360 - RNA, 19 nt, Artificial Sequence
  Description of Artificial Sequence: Synthetic oligonucleotide
  Sense strand starting at position 3480 of SEQ ID NO: 1888768
ugauguugauacccauuga

SEQ ID NO: 2555361 - RNA, 19 nt, Artificial Sequence
  Description of Artificial Sequence: Synthetic oligonucleotide
  Antisense strand to SEQ ID NO: 2555360
ucaauggguaucaacauca

SEQ ID NO: 2555362 - RNA, 19 nt, Artificial Sequence
  Description of Artificial Sequence: Synthetic oligonucleotide
  Sense strand starting at position 3484 of SEQ ID NO: 1888768
guugauacccauugaagga

SEQ ID NO: 2555363 - RNA, 19 nt, Artificial Sequence
  Description of Artificial Sequence: Synthetic oligonucleotide
  Antisense strand to SEQ ID NO: 2555362
uccuucaauggguaucaac

SEQ ID NO: 2555364 - RNA, 19 nt, Artificial Sequence
  Description of Artificial Sequence: Synthetic oligonucleotide
  Sense strand starting at position 3818 of SEQ ID NO: 1888768
gcagaaauagcugagucaa

SEQ ID NO: 2555365 - RNA, 19 nt, Artificial Sequence
  Description of Artificial Sequence: Synthetic oligonucleotide
  Antisense strand to SEQ ID NO: 2555364
uugacucagcuauuucugc

SEQ ID NO: 2555366 - RNA, 19 nt, Artificial Sequence
  Description of Artificial Sequence: Synthetic oligonucleotide
  Sense strand starting at position 3820 of SEQ ID NO: 1888768
agaaauagcugagucaaau

SEQ ID NO: 2555367 - RNA, 19 nt, Artificial Sequence
  Description of Artificial Sequence: Synthetic oligonucleotide
  Antisense strand to SEQ ID NO: 2555366
auuugacucagcuauuucu

SEQ ID NO: 2555368 - RNA, 19 nt, Artificial Sequence
  Description of Artificial Sequence: Synthetic oligonucleotide
  Sense strand starting at position 3959 of SEQ ID NO: 1888768
augaguaugcaucacuuau

SEQ ID NO: 2555369 - RNA, 19 nt, Artificial Sequence
  Description of Artificial Sequence: Synthetic oligonucleotide
  Antisense strand to SEQ ID NO: 2555368
auaagugaugcauacucau

SEQ ID NO: 2555370 - RNA, 19 nt, Artificial Sequence
  Description of Artificial Sequence: Synthetic oligonucleotide
  Sense strand starting at position 3981 of SEQ ID NO: 1888768
agaaguauccaaugagagc

SEQ ID NO: 2555371 - RNA, 19 nt, Artificial Sequence
  Description of Artificial Sequence: Synthetic oligonucleotide
  Antisense strand to SEQ ID NO: 2555370
gcucucauuggauacuucu

SEQ ID NO: 2555372 - RNA, 19 nt, Artificial Sequence
  Description of Artificial Sequence: Synthetic oligonucleotide
  Sense strand starting at position 4 of SEQ ID NO: 1888769
gggcauauguggucuccaa

SEQ ID NO: 2555373 - RNA, 19 nt, Artificial Sequence
  Description of Artificial Sequence: Synthetic oligonucleotide
  Antisense strand to SEQ ID NO: 2555372
uuggagaccacauaugccc

SEQ ID NO: 2555374 - RNA, 19 nt, Artificial Sequence
  Description of Artificial Sequence: Synthetic oligonucleotide
  Sense strand starting at position 135 of SEQ ID NO: 1888769
accacaguuuggucaaggu

SEQ ID NO: 2555375 - RNA, 19 nt, Artificial Sequence
  Description of Artificial Sequence: Synthetic oligonucleotide
  Antisense strand to SEQ ID NO: 2555374
accuugaccaaacuguggu

SEQ ID NO: 2555376 - RNA, 19 nt, Artificial Sequence
  Description of Artificial Sequence: Synthetic oligonucleotide
  Sense strand starting at position 460 of SEQ ID NO: 1888769
aguucuauugcagaucugu

SEQ ID NO: 2555377 - RNA, 19 nt, Artificial Sequence
  Description of Artificial Sequence: Synthetic oligonucleotide
  Antisense strand to SEQ ID NO: 2555376
acagaucugcaauagaacu

SEQ ID NO: 2555378 - RNA, 19 nt, Artificial Sequence
  Description of Artificial Sequence: Synthetic oligonucleotide
  Sense strand starting at position 518 of SEQ ID NO: 1888769
gcugcucuugcugagggaa

SEQ ID NO: 2555379 - RNA, 19 nt, Artificial Sequence
  Description of Artificial Sequence: Synthetic oligonucleotide
  Antisense strand to SEQ ID NO: 2555378
uucccucagcaagagcagc

SEQ ID NO: 2555380 - RNA, 19 nt, Artificial Sequence
  Description of Artificial Sequence: Synthetic oligonucleotide
  Sense strand starting at position 520 of SEQ ID NO: 1888769
ugcucuugcugagggaaga

SEQ ID NO: 2555381 - RNA, 19 nt, Artificial Sequence
  Description of Artificial Sequence: Synthetic oligonucleotide
  Antisense strand to SEQ ID NO: 2555380
ucuucccucagcaagagca

SEQ ID NO: 2555382 - RNA, 19 nt, Artificial Sequence
  Description of Artificial Sequence: Synthetic oligonucleotide
  Sense strand starting at position 521 of SEQ ID NO: 1888769
gcucuugcugagggaagaa

SEQ ID NO: 2555383 - RNA, 19 nt, Artificial Sequence
  Description of Artificial Sequence: Synthetic oligonucleotide
  Antisense strand to SEQ ID NO: 2555382
uucuucccucagcaagagc

SEQ ID NO: 2555384 - RNA, 19 nt, Artificial Sequence
  Description of Artificial Sequence: Synthetic oligonucleotide
  Sense strand starting at position 707 of SEQ ID NO: 1888769
cccacagagugguucucau

SEQ ID NO: 2555385 - RNA, 19 nt, Artificial Sequence
  Description of Artificial Sequence: Synthetic oligonucleotide
  Antisense strand to SEQ ID NO: 2555384
augagaaccacucuguggg

SEQ ID NO: 2555386 - RNA, 19 nt, Artificial Sequence
  Description of Artificial Sequence: Synthetic oligonucleotide
  Sense strand starting at position 771 of SEQ ID NO: 1888769
gauccuucgucucugaauc

SEQ ID NO: 2555387 - RNA, 19 nt, Artificial Sequence
  Description of Artificial Sequence: Synthetic oligonucleotide
  Antisense strand to SEQ ID NO: 2555386
gauucagagacgaaggauc

SEQ ID NO: 2555388 - RNA, 19 nt, Artificial Sequence
  Description of Artificial Sequence: Synthetic oligonucleotide
  Sense strand starting at position 772 of SEQ ID NO: 1888769
auccuucgucucugaauca

SEQ ID NO: 2555389 - RNA, 19 nt, Artificial Sequence
  Description of Artificial Sequence: Synthetic oligonucleotide
  Antisense strand to SEQ ID NO: 2555388
ugauucagagacgaaggau

SEQ ID NO: 2555390 - RNA, 19 nt, Artificial Sequence
  Description of Artificial Sequence: Synthetic oligonucleotide
  Sense strand starting at position 946 of SEQ ID NO: 1888769
cucucugauccuggagaaa

SEQ ID NO: 2555391 - RNA, 19 nt, Artificial Sequence
  Description of Artificial Sequence: Synthetic oligonucleotide
  Antisense strand to SEQ ID NO: 2555390
uuucuccaggaucagagag

SEQ ID NO: 2555392 - RNA, 19 nt, Artificial Sequence
  Description of Artificial Sequence: Synthetic oligonucleotide
  Sense strand starting at position 1154 of SEQ ID NO: 1888769
gguccuuguuugagugagu

SEQ ID NO: 2555393 - RNA, 19 nt, Artificial Sequence
  Description of Artificial Sequence: Synthetic oligonucleotide
  Antisense strand to SEQ ID NO: 2555392
acucacucaaacaaggacc

SEQ ID NO: 2555394 - RNA, 19 nt, Artificial Sequence
  Description of Artificial Sequence: Synthetic oligonucleotide
  Sense strand starting at position 1173 of SEQ ID NO: 1888769
gcgaguguguccguuccuu

SEQ ID NO: 2555395 - RNA, 19 nt, Artificial Sequence
  Description of Artificial Sequence: Synthetic oligonucleotide
  Antisense strand to SEQ ID NO: 2555394
aaggaacggacacacucgc

SEQ ID NO: 2555396 - RNA, 19 nt, Artificial Sequence
  Description of Artificial Sequence: Synthetic oligonucleotide
  Sense strand starting at position 1259 of SEQ ID NO: 1888769
uccagccgucuacaagaaa

SEQ ID NO: 2555397 - RNA, 19 nt, Artificial Sequence
  Description of Artificial Sequence: Synthetic oligonucleotide
  Antisense strand to SEQ ID NO: 2555396
uuucuuguagacggcugga

SEQ ID NO: 2555398 - RNA, 19 nt, Artificial Sequence
  Description of Artificial Sequence: Synthetic oligonucleotide
  Sense strand starting at position 2153 of SEQ ID NO: 1888769
ggcugaaagacuuaguuuc

SEQ ID NO: 2555399 - RNA, 19 nt, Artificial Sequence
  Description of Artificial Sequence: Synthetic oligonucleotide
  Antisense strand to SEQ ID NO: 2555398
gaaacuaagucuuucagcc

SEQ ID NO: 2555400 - RNA, 19 nt, Artificial Sequence
  Description of Artificial Sequence: Synthetic oligonucleotide
  Sense strand starting at position 2160 of SEQ ID NO: 1888769
agacuuaguuucccaggca

SEQ ID NO: 2555401 - RNA, 19 nt, Artificial Sequence
  Description of Artificial Sequence: Synthetic oligonucleotide
  Antisense strand to SEQ ID NO: 2555400
ugccugggaaacuaagucu

SEQ ID NO: 2555402 - RNA, 19 nt, Artificial Sequence
  Description of Artificial Sequence: Synthetic oligonucleotide
  Sense strand starting at position 2223 of SEQ ID NO: 1888769
agguuaaugcucugccucu

SEQ ID NO: 2555403 - RNA, 19 nt, Artificial Sequence
  Description of Artificial Sequence: Synthetic oligonucleotide
  Antisense strand to SEQ ID NO: 2555402
agaggcagagcauuaaccu

SEQ ID NO: 2555404 - RNA, 19 nt, Artificial Sequence
  Description of Artificial Sequence: Synthetic oligonucleotide
  Sense strand starting at position 2224 of SEQ ID NO: 1888769
gguuaaugcucugccucua

SEQ ID NO: 2555405 - RNA, 19 nt, Artificial Sequence
  Description of Artificial Sequence: Synthetic oligonucleotide
  Antisense strand to SEQ ID NO: 2555404
uagaggcagagcauuaacc

SEQ ID NO: 2555406 - RNA, 19 nt, Artificial Sequence
  Description of Artificial Sequence: Synthetic oligonucleotide
  Sense strand starting at position 2238 of SEQ ID NO: 1888769
cucuacauccucugugaga

SEQ ID NO: 2555407 - RNA, 19 nt, Artificial Sequence
  Description of Artificial Sequence: Synthetic oligonucleotide
  Antisense strand to SEQ ID NO: 2555406
ucucacagaggauguagag

SEQ ID NO: 2555408 - RNA, 19 nt, Artificial Sequence
  Description of Artificial Sequence: Synthetic oligonucleotide
  Sense strand starting at position 2239 of SEQ ID NO: 1888769
ucuacauccucugugagaa

SEQ ID NO: 2555409 - RNA, 19 nt, Artificial Sequence
  Description of Artificial Sequence: Synthetic oligonucleotide
  Antisense strand to SEQ ID NO: 2555408
uucucacagaggauguaga

SEQ ID NO: 2555410 - RNA, 19 nt, Artificial Sequence
  Description of Artificial Sequence: Synthetic oligonucleotide
  Sense strand starting at position 2240 of SEQ ID NO: 1888769
cuacauccucugugagaag

SEQ ID NO: 2555411 - RNA, 19 nt, Artificial Sequence
  Description of Artificial Sequence: Synthetic oligonucleotide
  Antisense strand to SEQ ID NO: 2555410
cuucucacagaggauguag

SEQ ID NO: 2555412 - RNA, 19 nt, Artificial Sequence
  Description of Artificial Sequence: Synthetic oligonucleotide
  Sense strand starting at position 2241 of SEQ ID NO: 1888769
uacauccucugugagaagu

SEQ ID NO: 2555413 - RNA, 19 nt, Artificial Sequence
  Description of Artificial Sequence: Synthetic oligonucleotide
  Antisense strand to SEQ ID NO: 2555412
acuucucacagaggaugua

SEQ ID NO: 2555414 - RNA, 19 nt, Artificial Sequence
  Description of Artificial Sequence: Synthetic oligonucleotide
  Sense strand starting at position 2251 of SEQ ID NO: 1888769
gugagaagucuggguccug

SEQ ID NO: 2555415 - RNA, 19 nt, Artificial Sequence
  Description of Artificial Sequence: Synthetic oligonucleotide
  Antisense strand to SEQ ID NO: 2555414
caggacccagacuucucac

SEQ ID NO: 2555416 - RNA, 19 nt, Artificial Sequence
  Description of Artificial Sequence: Synthetic oligonucleotide
  Sense strand starting at position 2876 of SEQ ID NO: 1888769
gguguaugagcauggaugu

SEQ ID NO: 2555417 - RNA, 19 nt, Artificial Sequence
  Description of Artificial Sequence: Synthetic oligonucleotide
  Antisense strand to SEQ ID NO: 2555416
acauccaugcucauacacc

SEQ ID NO: 2555418 - RNA, 19 nt, Artificial Sequence
  Description of Artificial Sequence: Synthetic oligonucleotide
  Sense strand starting at position 3186 of SEQ ID NO: 1888769
ggguguuuccaaggcaaga

SEQ ID NO: 2555419 - RNA, 19 nt, Artificial Sequence
  Description of Artificial Sequence: Synthetic oligonucleotide
  Antisense strand to SEQ ID NO: 2555418
ucuugccuuggaaacaccc

SEQ ID NO: 2555420 - RNA, 19 nt, Artificial Sequence
  Description of Artificial Sequence: Synthetic oligonucleotide
  Sense strand starting at position 3188 of SEQ ID NO: 1888769
guguuuccaaggcaagaau

SEQ ID NO: 2555421 - RNA, 19 nt, Artificial Sequence
  Description of Artificial Sequence: Synthetic oligonucleotide
  Antisense strand to SEQ ID NO: 2555420
auucuugccuuggaaacac

SEQ ID NO: 2555422 - RNA, 19 nt, Artificial Sequence
  Description of Artificial Sequence: Synthetic oligonucleotide
  Sense strand starting at position 3203 of SEQ ID NO: 1888769
gaaugaguuuccugucuuu

SEQ ID NO: 2555423 - RNA, 19 nt, Artificial Sequence
  Description of Artificial Sequence: Synthetic oligonucleotide
  Antisense strand to SEQ ID NO: 2555422
aaagacaggaaacucauuc

SEQ ID NO: 2555424 - RNA, 19 nt, Artificial Sequence
  Description of Artificial Sequence: Synthetic oligonucleotide
  Sense strand starting at position 3208 of SEQ ID NO: 1888769
aguuuccugucuuuagcaa

SEQ ID NO: 2555425 - RNA, 19 nt, Artificial Sequence
  Description of Artificial Sequence: Synthetic oligonucleotide
  Antisense strand to SEQ ID NO: 2555424
uugcuaaagacaggaaacu

SEQ ID NO: 2555426 - RNA, 19 nt, Artificial Sequence
  Description of Artificial Sequence: Synthetic oligonucleotide
  Sense strand starting at position 3594 of SEQ ID NO: 1888769
cccugcuugucggaaaugu

SEQ ID NO: 2555427 - RNA, 19 nt, Artificial Sequence
  Description of Artificial Sequence: Synthetic oligonucleotide
  Antisense strand to SEQ ID NO: 2555426
acauuuccgacaagcaggg

SEQ ID NO: 2555428 - RNA, 19 nt, Artificial Sequence
  Description of Artificial Sequence: Synthetic oligonucleotide
  Sense strand starting at position 3603 of SEQ ID NO: 1888769
ucggaaaugucuucccaug

SEQ ID NO: 2555429 - RNA, 19 nt, Artificial Sequence
  Description of Artificial Sequence: Synthetic oligonucleotide
  Antisense strand to SEQ ID NO: 2555428
caugggaagacauuuccga

SEQ ID NO: 2555430 - RNA, 19 nt, Artificial Sequence
  Description of Artificial Sequence: Synthetic oligonucleotide
  Sense strand starting at position 643 of SEQ ID NO: 1888770
gugcccauucuggagaaau

SEQ ID NO: 2555431 - RNA, 19 nt, Artificial Sequence
  Description of Artificial Sequence: Synthetic oligonucleotide
  Antisense strand to SEQ ID NO: 2555430
auuucuccagaaugggcac

SEQ ID NO: 2555432 - RNA, 19 nt, Artificial Sequence
  Description of Artificial Sequence: Synthetic oligonucleotide
  Sense strand starting at position 1083 of SEQ ID NO: 1888770
ugccuaguagccuugcuua

SEQ ID NO: 2555433 - RNA, 19 nt, Artificial Sequence
  Description of Artificial Sequence: Synthetic oligonucleotide
  Antisense strand to SEQ ID NO: 2555432
uaagcaaggcuacuaggca

SEQ ID NO: 2555434 - RNA, 19 nt, Artificial Sequence
  Description of Artificial Sequence: Synthetic oligonucleotide
  Sense strand starting at position 1294 of SEQ ID NO: 1888770
gcuggaagagucuggguga

SEQ ID NO: 2555435 - RNA, 19 nt, Artificial Sequence
  Description of Artificial Sequence: Synthetic oligonucleotide
  Antisense strand to SEQ ID NO: 2555434
ucacccagacucuuccagc

SEQ ID NO: 2555436 - RNA, 19 nt, Artificial Sequence
  Description of Artificial Sequence: Synthetic oligonucleotide
  Sense strand starting at position 1571 of SEQ ID NO: 1888770
gagggagaaaguugguuua

SEQ ID NO: 2555437 - RNA, 19 nt, Artificial Sequence
  Description of Artificial Sequence: Synthetic oligonucleotide
  Antisense strand to SEQ ID NO: 2555436
uaaaccaacuuucucccuc

SEQ ID NO: 2555438 - RNA, 19 nt, Artificial Sequence
  Description of Artificial Sequence: Synthetic oligonucleotide
  Sense strand starting at position 1649 of SEQ ID NO: 1888770
gcagaaagugcugguuucu

SEQ ID NO: 2555439 - RNA, 19 nt, Artificial Sequence
  Description of Artificial Sequence: Synthetic oligonucleotide
  Antisense strand to SEQ ID NO: 2555438
agaaaccagcacuuucugc

SEQ ID NO: 2555440 - RNA, 19 nt, Artificial Sequence
  Description of Artificial Sequence: Synthetic oligonucleotide
  Sense strand starting at position 1655 of SEQ ID NO: 1888770
agugcugguuucuccacau

SEQ ID NO: 2555441 - RNA, 19 nt, Artificial Sequence
  Description of Artificial Sequence: Synthetic oligonucleotide
  Antisense strand to SEQ ID NO: 2555440
auguggagaaaccagcacu

SEQ ID NO: 2555442 - RNA, 19 nt, Artificial Sequence
  Description of Artificial Sequence: Synthetic oligonucleotide
  Sense strand starting at position 1665 of SEQ ID NO: 1888770
ucuccacaucucggagauu

SEQ ID NO: 2555443 - RNA, 19 nt, Artificial Sequence
  Description of Artificial Sequence: Synthetic oligonucleotide
  Antisense strand to SEQ ID NO: 2555442
aaucuccgagauguggaga

SEQ ID NO: 2555444 - RNA, 19 nt, Artificial Sequence
  Description of Artificial Sequence: Synthetic oligonucleotide
  Sense strand starting at position 1668 of SEQ ID NO: 1888770
ccacaucucggagauuauc

SEQ ID NO: 2555445 - RNA, 19 nt, Artificial Sequence
  Description of Artificial Sequence: Synthetic oligonucleotide
  Antisense strand to SEQ ID NO: 2555444
gauaaucuccgagaugugg

SEQ ID NO: 2555446 - RNA, 19 nt, Artificial Sequence
  Description of Artificial Sequence: Synthetic oligonucleotide
  Sense strand starting at position 1676 of SEQ ID NO: 1888770
cggagauuaucgccaccua

SEQ ID NO: 2555447 - RNA, 19 nt, Artificial Sequence
  Description of Artificial Sequence: Synthetic oligonucleotide
  Antisense strand to SEQ ID NO: 2555446
uagguggcgauaaucuccg

SEQ ID NO: 2555448 - RNA, 19 nt, Artificial Sequence
  Description of Artificial Sequence: Synthetic oligonucleotide
  Sense strand starting at position 1677 of SEQ ID NO: 1888770
ggagauuaucgccaccuac

SEQ ID NO: 2555449 - RNA, 19 nt, Artificial Sequence
  Description of Artificial Sequence: Synthetic oligonucleotide
  Antisense strand to SEQ ID NO: 2555448
guagguggcgauaaucucc

SEQ ID NO: 2555450 - RNA, 19 nt, Artificial Sequence
  Description of Artificial Sequence: Synthetic oligonucleotide
  Sense strand starting at position 2113 of SEQ ID NO: 1888770
accacuuuggcaugaauuc

SEQ ID NO: 2555451 - RNA, 19 nt, Artificial Sequence
  Description of Artificial Sequence: Synthetic oligonucleotide
  Antisense strand to SEQ ID NO: 2555450
gaauucaugccaaaguggu

SEQ ID NO: 2555452 - RNA, 19 nt, Artificial Sequence
  Description of Artificial Sequence: Synthetic oligonucleotide
  Sense strand starting at position 2230 of SEQ ID NO: 1888770
uggaaacugucaucggcaa

SEQ ID NO: 2555453 - RNA, 19 nt, Artificial Sequence
  Description of Artificial Sequence: Synthetic oligonucleotide
  Antisense strand to SEQ ID NO: 2555452
uugccgaugacaguuucca

SEQ ID NO: 2555454 - RNA, 19 nt, Artificial Sequence
  Description of Artificial Sequence: Synthetic oligonucleotide
  Sense strand starting at position 2231 of SEQ ID NO: 1888770
ggaaacugucaucggcaau

SEQ ID NO: 2555455 - RNA, 19 nt, Artificial Sequence
  Description of Artificial Sequence: Synthetic oligonucleotide
  Antisense strand to SEQ ID NO: 2555454
auugccgaugacaguuucc

SEQ ID NO: 2555456 - RNA, 19 nt, Artificial Sequence
  Description of Artificial Sequence: Synthetic oligonucleotide
  Sense strand starting at position 2242 of SEQ ID NO: 1888770
ucggcaauuccucagacga

SEQ ID NO: 2555457 - RNA, 19 nt, Artificial Sequence
  Description of Artificial Sequence: Synthetic oligonucleotide
  Antisense strand to SEQ ID NO: 2555456
ucgucugaggaauugccga

SEQ ID NO: 2555458 - RNA, 19 nt, Artificial Sequence
  Description of Artificial Sequence: Synthetic oligonucleotide
  Sense strand starting at position 2356 of SEQ ID NO: 1888770
uuguguuugggaugagauc

SEQ ID NO: 2555459 - RNA, 19 nt, Artificial Sequence
  Description of Artificial Sequence: Synthetic oligonucleotide
  Antisense strand to SEQ ID NO: 2555458
gaucucaucccaaacacaa

SEQ ID NO: 2555460 - RNA, 19 nt, Artificial Sequence
  Description of Artificial Sequence: Synthetic oligonucleotide
  Sense strand starting at position 2357 of SEQ ID NO: 1888770
uguguuugggaugagauca

SEQ ID NO: 2555461 - RNA, 19 nt, Artificial Sequence
  Description of Artificial Sequence: Synthetic oligonucleotide
  Antisense strand to SEQ ID NO: 2555460
ugaucucaucccaaacaca

SEQ ID NO: 2555462 - RNA, 19 nt, Artificial Sequence
  Description of Artificial Sequence: Synthetic oligonucleotide
  Sense strand starting at position 2365 of SEQ ID NO: 1888770
ggaugagaucagggcauau

SEQ ID NO: 2555463 - RNA, 19 nt, Artificial Sequence
  Description of Artificial Sequence: Synthetic oligonucleotide
  Antisense strand to SEQ ID NO: 2555462
auaugcccugaucucaucc

SEQ ID NO: 2555464 - RNA, 19 nt, Artificial Sequence
  Description of Artificial Sequence: Synthetic oligonucleotide
  Sense strand starting at position 2403 of SEQ ID NO: 1888770
gcaguucugcgggaucagu

SEQ ID NO: 2555465 - RNA, 19 nt, Artificial Sequence
  Description of Artificial Sequence: Synthetic oligonucleotide
  Antisense strand to SEQ ID NO: 2555464
acugaucccgcagaacugc

SEQ ID NO: 2555466 - RNA, 19 nt, Artificial Sequence
  Description of Artificial Sequence: Synthetic oligonucleotide
  Sense strand starting at position 2530 of SEQ ID NO: 1888770
cugugcuuguccuuaggga

SEQ ID NO: 2555467 - RNA, 19 nt, Artificial Sequence
  Description of Artificial Sequence: Synthetic oligonucleotide
  Antisense strand to SEQ ID NO: 2555466
ucccuaaggacaagcacag

SEQ ID NO: 2555468 - RNA, 19 nt, Artificial Sequence
  Description of Artificial Sequence: Synthetic oligonucleotide
  Sense strand starting at position 2531 of SEQ ID NO: 1888770
ugugcuuguccuuagggaa

SEQ ID NO: 2555469 - RNA, 19 nt, Artificial Sequence
  Description of Artificial Sequence: Synthetic oligonucleotide
  Antisense strand to SEQ ID NO: 2555468
uucccuaaggacaagcaca

SEQ ID NO: 2555470 - RNA, 19 nt, Artificial Sequence
  Description of Artificial Sequence: Synthetic oligonucleotide
  Sense strand starting at position 2633 of SEQ ID NO: 1888770
cucuguaauguccauaggu

SEQ ID NO: 2555471 - RNA, 19 nt, Artificial Sequence
  Description of Artificial Sequence: Synthetic oligonucleotide
  Antisense strand to SEQ ID NO: 2555470
accuauggacauuacagag

SEQ ID NO: 2555472 - RNA, 19 nt, Artificial Sequence
  Description of Artificial Sequence: Synthetic oligonucleotide
  Sense strand starting at position 2635 of SEQ ID NO: 1888770
cuguaauguccauagguuc

SEQ ID NO: 2555473 - RNA, 19 nt, Artificial Sequence
  Description of Artificial Sequence: Synthetic oligonucleotide
  Antisense strand to SEQ ID NO: 2555472
gaaccuauggacauuacag

SEQ ID NO: 2555474 - RNA, 19 nt, Artificial Sequence
  Description of Artificial Sequence: Synthetic oligonucleotide
  Sense strand starting at position 2701 of SEQ ID NO: 1888770
uguuucugcagaugaggaa

SEQ ID NO: 2555475 - RNA, 19 nt, Artificial Sequence
  Description of Artificial Sequence: Synthetic oligonucleotide
  Antisense strand to SEQ ID NO: 2555474
uuccucaucugcagaaaca

SEQ ID NO: 2555476 - RNA, 19 nt, Artificial Sequence
  Description of Artificial Sequence: Synthetic oligonucleotide
  Sense strand starting at position 2831 of SEQ ID NO: 1888770
gcccaucaccuuugaaaug

SEQ ID NO: 2555477 - RNA, 19 nt, Artificial Sequence
  Description of Artificial Sequence: Synthetic oligonucleotide
  Antisense strand to SEQ ID NO: 2555476
cauuucaaaggugaugggc

SEQ ID NO: 2555478 - RNA, 19 nt, Artificial Sequence
  Description of Artificial Sequence: Synthetic oligonucleotide
  Sense strand starting at position 2966 of SEQ ID NO: 1888770
ccugauuggcccugcuagu

SEQ ID NO: 2555479 - RNA, 19 nt, Artificial Sequence
  Description of Artificial Sequence: Synthetic oligonucleotide
  Antisense strand to SEQ ID NO: 2555478
acuagcagggccaaucagg

SEQ ID NO: 2555480 - RNA, 19 nt, Artificial Sequence
  Description of Artificial Sequence: Synthetic oligonucleotide
  Sense strand starting at position 2983 of SEQ ID NO: 1888770
guuucauuugucgggaaau

SEQ ID NO: 2555481 - RNA, 19 nt, Artificial Sequence
  Description of Artificial Sequence: Synthetic oligonucleotide
  Antisense strand to SEQ ID NO: 2555480
auuucccgacaaaugaaac

SEQ ID NO: 2555482 - RNA, 19 nt, Artificial Sequence
  Description of Artificial Sequence: Synthetic oligonucleotide
  Sense strand starting at position 3029 of SEQ ID NO: 1888770
aacgucaccucuucugaga

SEQ ID NO: 2555483 - RNA, 19 nt, Artificial Sequence
  Description of Artificial Sequence: Synthetic oligonucleotide
  Antisense strand to SEQ ID NO: 2555482
ucucagaagaggugacguu

SEQ ID NO: 2555484 - RNA, 19 nt, Artificial Sequence
  Description of Artificial Sequence: Synthetic oligonucleotide
  Sense strand starting at position 3239 of SEQ ID NO: 1888770
caggaaaugcucuaaugug

SEQ ID NO: 2555485 - RNA, 19 nt, Artificial Sequence
  Description of Artificial Sequence: Synthetic oligonucleotide
  Antisense strand to SEQ ID NO: 2555484
cacauuagagcauuuccug

SEQ ID NO: 2555486 - RNA, 19 nt, Artificial Sequence
  Description of Artificial Sequence: Synthetic oligonucleotide
  Sense strand starting at position 3249 of SEQ ID NO: 1888770
ucuaaugugacagguagaa

SEQ ID NO: 2555487 - RNA, 19 nt, Artificial Sequence
  Description of Artificial Sequence: Synthetic oligonucleotide
  Antisense strand to SEQ ID NO: 2555486
uucuaccugucacauuaga

SEQ ID NO: 2555488 - RNA, 19 nt, Artificial Sequence
  Description of Artificial Sequence: Synthetic oligonucleotide
  Sense strand starting at position 3275 of SEQ ID NO: 1888770
gaaggcagcucguugaacu

SEQ ID NO: 2555489 - RNA, 19 nt, Artificial Sequence
  Description of Artificial Sequence: Synthetic oligonucleotide
  Antisense strand to SEQ ID NO: 2555488
aguucaacgagcugccuuc

SEQ ID NO: 2555490 - RNA, 19 nt, Artificial Sequence
  Description of Artificial Sequence: Synthetic oligonucleotide
  Sense strand starting at position 3276 of SEQ ID NO: 1888770
aaggcagcucguugaacuu

SEQ ID NO: 2555491 - RNA, 19 nt, Artificial Sequence
  Description of Artificial Sequence: Synthetic oligonucleotide
  Antisense strand to SEQ ID NO: 2555490
aaguucaacgagcugccuu

SEQ ID NO: 2555492 - RNA, 19 nt, Artificial Sequence
  Description of Artificial Sequence: Synthetic oligonucleotide
  Sense strand starting at position 3527 of SEQ ID NO: 1888770
aggauuggguuacaugaca

SEQ ID NO: 2555493 - RNA, 19 nt, Artificial Sequence
  Description of Artificial Sequence: Synthetic oligonucleotide
  Antisense strand to SEQ ID NO: 2555492
ugucauguaacccaauccu

SEQ ID NO: 2555494 - RNA, 19 nt, Artificial Sequence
  Description of Artificial Sequence: Synthetic oligonucleotide
  Sense strand starting at position 3642 of SEQ ID NO: 1888770
ccaggacucgugggugaga

SEQ ID NO: 2555495 - RNA, 19 nt, Artificial Sequence
  Description of Artificial Sequence: Synthetic oligonucleotide
  Antisense strand to SEQ ID NO: 2555494
ucucacccacgaguccugg

SEQ ID NO: 2555496 - RNA, 19 nt, Artificial Sequence
  Description of Artificial Sequence: Synthetic oligonucleotide
  Sense strand starting at position 3643 of SEQ ID NO: 1888770
caggacucgugggugagau

SEQ ID NO: 2555497 - RNA, 19 nt, Artificial Sequence
  Description of Artificial Sequence: Synthetic oligonucleotide
  Antisense strand to SEQ ID NO: 2555496
aucucacccacgaguccug

SEQ ID NO: 2555498 - RNA, 19 nt, Artificial Sequence
  Description of Artificial Sequence: Synthetic oligonucleotide
  Sense strand starting at position 3671 of SEQ ID NO: 1888770
cagguuugucgucacacca

SEQ ID NO: 2555499 - RNA, 19 nt, Artificial Sequence
  Description of Artificial Sequence: Synthetic oligonucleotide
  Antisense strand to SEQ ID NO: 2555498
uggugugacgacaaaccug

SEQ ID NO: 2555500 - RNA, 19 nt, Artificial Sequence
  Description of Artificial Sequence: Synthetic oligonucleotide
  Sense strand starting at position 3692 of SEQ ID NO: 1888770
agcugugcucccugacaga

SEQ ID NO: 2555501 - RNA, 19 nt, Artificial Sequence
  Description of Artificial Sequence: Synthetic oligonucleotide
  Antisense strand to SEQ ID NO: 2555500
ucugucagggagcacagcu

SEQ ID NO: 2555502 - RNA, 19 nt, Artificial Sequence
  Description of Artificial Sequence: Synthetic oligonucleotide
  Sense strand starting at position 3752 of SEQ ID NO: 1888770
aguguucuagaaugagauc

SEQ ID NO: 2555503 - RNA, 19 nt, Artificial Sequence
  Description of Artificial Sequence: Synthetic oligonucleotide
  Antisense strand to SEQ ID NO: 2555502
gaucucauucuagaacacu

SEQ ID NO: 2555504 - RNA, 19 nt, Artificial Sequence
  Description of Artificial Sequence: Synthetic oligonucleotide
  Sense strand starting at position 3853 of SEQ ID NO: 1888770
cucacugaucagcguguga

SEQ ID NO: 2555505 - RNA, 19 nt, Artificial Sequence
  Description of Artificial Sequence: Synthetic oligonucleotide
  Antisense strand to SEQ ID NO: 2555504
ucacacgcugaucagugag

SEQ ID NO: 2555506 - RNA, 19 nt, Artificial Sequence
  Description of Artificial Sequence: Synthetic oligonucleotide
  Sense strand starting at position 3855 of SEQ ID NO: 1888770
cacugaucagcgugugaua

SEQ ID NO: 2555507 - RNA, 19 nt, Artificial Sequence
  Description of Artificial Sequence: Synthetic oligonucleotide
  Antisense strand to SEQ ID NO: 2555506
uaucacacgcugaucagug

SEQ ID NO: 2555508 - RNA, 19 nt, Artificial Sequence
  Description of Artificial Sequence: Synthetic oligonucleotide
  Sense strand starting at position 3899 of SEQ ID NO: 1888770
gccauuuagcuuuguccca

SEQ ID NO: 2555509 - RNA, 19 nt, Artificial Sequence
  Description of Artificial Sequence: Synthetic oligonucleotide
  Antisense strand to SEQ ID NO: 2555508
ugggacaaagcuaaauggc

SEQ ID NO: 2555510 - RNA, 19 nt, Artificial Sequence
  Description of Artificial Sequence: Synthetic oligonucleotide
  Sense strand starting at position 187 of SEQ ID NO: 1888771
aagucuuagguugaacuca

SEQ ID NO: 2555511 - RNA, 19 nt, Artificial Sequence
  Description of Artificial Sequence: Synthetic oligonucleotide
  Antisense strand to SEQ ID NO: 2555510
ugaguucaaccuaagacuu

SEQ ID NO: 2555512 - RNA, 19 nt, Artificial Sequence
  Description of Artificial Sequence: Synthetic oligonucleotide
  Sense strand starting at position 209 of SEQ ID NO: 1888771
ccucaaaucuggcuuagaa

SEQ ID NO: 2555513 - RNA, 19 nt, Artificial Sequence
  Description of Artificial Sequence: Synthetic oligonucleotide
  Antisense strand to SEQ ID NO: 2555512
uucuaagccagauuugagg

SEQ ID NO: 2555514 - RNA, 19 nt, Artificial Sequence
  Description of Artificial Sequence: Synthetic oligonucleotide
  Sense strand starting at position 358 of SEQ ID NO: 1888771
gcaaucgagcuguauuucu

SEQ ID NO: 2555515 - RNA, 19 nt, Artificial Sequence
  Description of Artificial Sequence: Synthetic oligonucleotide
  Antisense strand to SEQ ID NO: 2555514
agaaauacagcucgauugc

SEQ ID NO: 2555516 - RNA, 19 nt, Artificial Sequence
  Description of Artificial Sequence: Synthetic oligonucleotide
  Sense strand starting at position 363 of SEQ ID NO: 1888771
cgagcuguauuucuaauga

SEQ ID NO: 2555517 - RNA, 19 nt, Artificial Sequence
  Description of Artificial Sequence: Synthetic oligonucleotide
  Antisense strand to SEQ ID NO: 2555516
ucauuagaaauacagcucg

SEQ ID NO: 2555518 - RNA, 19 nt, Artificial Sequence
  Description of Artificial Sequence: Synthetic oligonucleotide
  Sense strand starting at position 785 of SEQ ID NO: 1888771
ucaagagcuuucuugggau

SEQ ID NO: 2555519 - RNA, 19 nt, Artificial Sequence
  Description of Artificial Sequence: Synthetic oligonucleotide
  Antisense strand to SEQ ID NO: 2555518
aucccaagaaagcucuuga

SEQ ID NO: 2555520 - RNA, 19 nt, Artificial Sequence
  Description of Artificial Sequence: Synthetic oligonucleotide
  Sense strand starting at position 787 of SEQ ID NO: 1888771
aagagcuuucuugggauua

SEQ ID NO: 2555521 - RNA, 19 nt, Artificial Sequence
  Description of Artificial Sequence: Synthetic oligonucleotide
  Antisense strand to SEQ ID NO: 2555520
uaaucccaagaaagcucuu

SEQ ID NO: 2555522 - RNA, 19 nt, Artificial Sequence
  Description of Artificial Sequence: Synthetic oligonucleotide
  Sense strand starting at position 885 of SEQ ID NO: 1888771
cacugugaagcaggauauu

SEQ ID NO: 2555523 - RNA, 19 nt, Artificial Sequence
  Description of Artificial Sequence: Synthetic oligonucleotide
  Antisense strand to SEQ ID NO: 2555522
aauauccugcuucacagug

SEQ ID NO: 2555524 - RNA, 19 nt, Artificial Sequence
  Description of Artificial Sequence: Synthetic oligonucleotide
  Sense strand starting at position 1340 of SEQ ID NO: 1888771
auuggacgucccgaagaga

SEQ ID NO: 2555525 - RNA, 19 nt, Artificial Sequence
  Description of Artificial Sequence: Synthetic oligonucleotide
  Antisense strand to SEQ ID NO: 2555524
ucucuucgggacguccaau

SEQ ID NO: 2555526 - RNA, 19 nt, Artificial Sequence
  Description of Artificial Sequence: Synthetic oligonucleotide
  Sense strand starting at position 1343 of SEQ ID NO: 1888771
ggacgucccgaagagacau

SEQ ID NO: 2555527 - RNA, 19 nt, Artificial Sequence
  Description of Artificial Sequence: Synthetic oligonucleotide
  Antisense strand to SEQ ID NO: 2555526
augucucuucgggacgucc

SEQ ID NO: 2555528 - RNA, 19 nt, Artificial Sequence
  Description of Artificial Sequence: Synthetic oligonucleotide
  Sense strand starting at position 1367 of SEQ ID NO: 1888771
gcucucagaaacgauauga

SEQ ID NO: 2555529 - RNA, 19 nt, Artificial Sequence
  Description of Artificial Sequence: Synthetic oligonucleotide
  Antisense strand to SEQ ID NO: 2555528
ucauaucguuucugagagc

SEQ ID NO: 2555530 - RNA, 19 nt, Artificial Sequence
  Description of Artificial Sequence: Synthetic oligonucleotide
  Sense strand starting at position 1383 of SEQ ID NO: 1888771
ugagaacacuuccuucuga

SEQ ID NO: 2555531 - RNA, 19 nt, Artificial Sequence
  Description of Artificial Sequence: Synthetic oligonucleotide
  Antisense strand to SEQ ID NO: 2555530
ucagaaggaaguguucuca

SEQ ID NO: 2555532 - RNA, 19 nt, Artificial Sequence
  Description of Artificial Sequence: Synthetic oligonucleotide
  Sense strand starting at position 1398 of SEQ ID NO: 1888771
cugauacagcuuuagguau

SEQ ID NO: 2555533 - RNA, 19 nt, Artificial Sequence
  Description of Artificial Sequence: Synthetic oligonucleotide
  Antisense strand to SEQ ID NO: 2555532
auaccuaaagcuguaucag

SEQ ID NO: 2555534 - RNA, 19 nt, Artificial Sequence
  Description of Artificial Sequence: Synthetic oligonucleotide
  Sense strand starting at position 1418 of SEQ ID NO: 1888771
ugauacagcuacucgaaau

SEQ ID NO: 2555535 - RNA, 19 nt, Artificial Sequence
  Description of Artificial Sequence: Synthetic oligonucleotide
  Antisense strand to SEQ ID NO: 2555534
auuucgaguagcuguauca

SEQ ID NO: 2555536 - RNA, 19 nt, Artificial Sequence
  Description of Artificial Sequence: Synthetic oligonucleotide
  Sense strand starting at position 1888 of SEQ ID NO: 1888771
aaggguuuggcagauguaa

SEQ ID NO: 2555537 - RNA, 19 nt, Artificial Sequence
  Description of Artificial Sequence: Synthetic oligonucleotide
  Antisense strand to SEQ ID NO: 2555536
uuacaucugccaaacccuu

SEQ ID NO: 2555538 - RNA, 19 nt, Artificial Sequence
  Description of Artificial Sequence: Synthetic oligonucleotide
  Sense strand starting at position 1922 of SEQ ID NO: 1888771
ucaauuaggaucgauuguu

SEQ ID NO: 2555539 - RNA, 19 nt, Artificial Sequence
  Description of Artificial Sequence: Synthetic oligonucleotide
  Antisense strand to SEQ ID NO: 2555538
aacaaucgauccuaauuga

SEQ ID NO: 2555540 - RNA, 19 nt, Artificial Sequence
  Description of Artificial Sequence: Synthetic oligonucleotide
  Sense strand starting at position 2039 of SEQ ID NO: 1888771
uguaguuuccggagguuug

SEQ ID NO: 2555541 - RNA, 19 nt, Artificial Sequence
  Description of Artificial Sequence: Synthetic oligonucleotide
  Antisense strand to SEQ ID NO: 2555540
caaaccuccggaaacuaca

SEQ ID NO: 2555542 - RNA, 19 nt, Artificial Sequence
  Description of Artificial Sequence: Synthetic oligonucleotide
  Sense strand starting at position 2051 of SEQ ID NO: 1888771
agguuugagcaacggaaga

SEQ ID NO: 2555543 - RNA, 19 nt, Artificial Sequence
  Description of Artificial Sequence: Synthetic oligonucleotide
  Antisense strand to SEQ ID NO: 2555542
ucuuccguugcucaaaccu

SEQ ID NO: 2555544 - RNA, 19 nt, Artificial Sequence
  Description of Artificial Sequence: Synthetic oligonucleotide
  Sense strand starting at position 2322 of SEQ ID NO: 1888771
uggcacaaaugguuugaaa

SEQ ID NO: 2555545 - RNA, 19 nt, Artificial Sequence
  Description of Artificial Sequence: Synthetic oligonucleotide
  Antisense strand to SEQ ID NO: 2555544
uuucaaaccauuugugcca

SEQ ID NO: 2555546 - RNA, 19 nt, Artificial Sequence
  Description of Artificial Sequence: Synthetic oligonucleotide
  Sense strand starting at position 2402 of SEQ ID NO: 1888771
ccauguccacaugagaguu

SEQ ID NO: 2555547 - RNA, 19 nt, Artificial Sequence
  Description of Artificial Sequence: Synthetic oligonucleotide
  Antisense strand to SEQ ID NO: 2555546
aacucucauguggacaugg

SEQ ID NO: 2555548 - RNA, 19 nt, Artificial Sequence
  Description of Artificial Sequence: Synthetic oligonucleotide
  Sense strand starting at position 2448 of SEQ ID NO: 1888771
aucugauaguacuuuccca

SEQ ID NO: 2555549 - RNA, 19 nt, Artificial Sequence
  Description of Artificial Sequence: Synthetic oligonucleotide
  Antisense strand to SEQ ID NO: 2555548
ugggaaaguacuaucagau

SEQ ID NO: 2555550 - RNA, 19 nt, Artificial Sequence
  Description of Artificial Sequence: Synthetic oligonucleotide
  Sense strand starting at position 2452 of SEQ ID NO: 1888771
gauaguacuuucccaagag

SEQ ID NO: 2555551 - RNA, 19 nt, Artificial Sequence
  Description of Artificial Sequence: Synthetic oligonucleotide
  Antisense strand to SEQ ID NO: 2555550
cucuugggaaaguacuauc

SEQ ID NO: 2555552 - RNA, 19 nt, Artificial Sequence
  Description of Artificial Sequence: Synthetic oligonucleotide
  Sense strand starting at position 2486 of SEQ ID NO: 1888771
ggaaauugcuugguagauu

SEQ ID NO: 2555553 - RNA, 19 nt, Artificial Sequence
  Description of Artificial Sequence: Synthetic oligonucleotide
  Antisense strand to SEQ ID NO: 2555552
aaucuaccaagcaauuucc

SEQ ID NO: 2555554 - RNA, 19 nt, Artificial Sequence
  Description of Artificial Sequence: Synthetic oligonucleotide
  Sense strand starting at position 2498 of SEQ ID NO: 1888771
guagauuccgaucaagcaa

SEQ ID NO: 2555555 - RNA, 19 nt, Artificial Sequence
  Description of Artificial Sequence: Synthetic oligonucleotide
  Antisense strand to SEQ ID NO: 2555554
uugcuugaucggaaucuac

SEQ ID NO: 2555556 - RNA, 19 nt, Artificial Sequence
  Description of Artificial Sequence: Synthetic oligonucleotide
  Sense strand starting at position 2506 of SEQ ID NO: 1888771
cgaucaagcaaugauguca

SEQ ID NO: 2555557 - RNA, 19 nt, Artificial Sequence
  Description of Artificial Sequence: Synthetic oligonucleotide
  Antisense strand to SEQ ID NO: 2555556
ugacaucauugcuugaucg

SEQ ID NO: 2555558 - RNA, 19 nt, Artificial Sequence
  Description of Artificial Sequence: Synthetic oligonucleotide
  Sense strand starting at position 2659 of SEQ ID NO: 1888771
gaggguccaguuuaagacu

SEQ ID NO: 2555559 - RNA, 19 nt, Artificial Sequence
  Description of Artificial Sequence: Synthetic oligonucleotide
  Antisense strand to SEQ ID NO: 2555558
agucuuaaacuggacccuc

SEQ ID NO: 2555560 - RNA, 19 nt, Artificial Sequence
  Description of Artificial Sequence: Synthetic oligonucleotide
  Sense strand starting at position 2866 of SEQ ID NO: 1888771
uuuauugaagauugugaca

SEQ ID NO: 2555561 - RNA, 19 nt, Artificial Sequence
  Description of Artificial Sequence: Synthetic oligonucleotide
  Antisense strand to SEQ ID NO: 2555560
ugucacaaucuucaauaaa

SEQ ID NO: 2555562 - RNA, 19 nt, Artificial Sequence
  Description of Artificial Sequence: Synthetic oligonucleotide
  Sense strand starting at position 2884 of SEQ ID NO: 1888771
augcacauuggccauauua

SEQ ID NO: 2555563 - RNA, 19 nt, Artificial Sequence
  Description of Artificial Sequence: Synthetic oligonucleotide
  Antisense strand to SEQ ID NO: 2555562
uaauauggccaaugugcau

SEQ ID NO: 2555564 - RNA, 19 nt, Artificial Sequence
  Description of Artificial Sequence: Synthetic oligonucleotide
  Sense strand starting at position 2928 of SEQ ID NO: 1888771
uauaaaggagguugcaaua

SEQ ID NO: 2555565 - RNA, 19 nt, Artificial Sequence
  Description of Artificial Sequence: Synthetic oligonucleotide
  Antisense strand to SEQ ID NO: 2555564
uauugcaaccuccuuuaua

SEQ ID NO: 2555566 - RNA, 19 nt, Artificial Sequence
  Description of Artificial Sequence: Synthetic oligonucleotide
  Sense strand starting at position 3073 of SEQ ID NO: 1888771
aaacuugauucguccagga

SEQ ID NO: 2555567 - RNA, 19 nt, Artificial Sequence
  Description of Artificial Sequence: Synthetic oligonucleotide
  Antisense strand to SEQ ID NO: 2555566
uccuggacgaaucaaguuu

SEQ ID NO: 2555568 - RNA, 19 nt, Artificial Sequence
  Description of Artificial Sequence: Synthetic oligonucleotide
  Sense strand starting at position 3075 of SEQ ID NO: 1888771
acuugauucguccaggaug

SEQ ID NO: 2555569 - RNA, 19 nt, Artificial Sequence
  Description of Artificial Sequence: Synthetic oligonucleotide
  Antisense strand to SEQ ID NO: 2555568
cauccuggacgaaucaagu

SEQ ID NO: 2555570 - RNA, 19 nt, Artificial Sequence
  Description of Artificial Sequence: Synthetic oligonucleotide
  Sense strand starting at position 3078 of SEQ ID NO: 1888771
ugauucguccaggaugacu

SEQ ID NO: 2555571 - RNA, 19 nt, Artificial Sequence
  Description of Artificial Sequence: Synthetic oligonucleotide
  Antisense strand to SEQ ID NO: 2555570
agucauccuggacgaauca

SEQ ID NO: 2555572 - RNA, 19 nt, Artificial Sequence
  Description of Artificial Sequence: Synthetic oligonucleotide
  Sense strand starting at position 3089 of SEQ ID NO: 1888771
ggaugacuuuguguuauga

SEQ ID NO: 2555573 - RNA, 19 nt, Artificial Sequence
  Description of Artificial Sequence: Synthetic oligonucleotide
  Antisense strand to SEQ ID NO: 2555572
ucauaacacaaagucaucc

SEQ ID NO: 2555574 - RNA, 19 nt, Artificial Sequence
  Description of Artificial Sequence: Synthetic oligonucleotide
  Sense strand starting at position 3181 of SEQ ID NO: 1888771
gugcucuguaacuagaaug

SEQ ID NO: 2555575 - RNA, 19 nt, Artificial Sequence
  Description of Artificial Sequence: Synthetic oligonucleotide
  Antisense strand to SEQ ID NO: 2555574
cauucuaguuacagagcac

SEQ ID NO: 2555576 - RNA, 19 nt, Artificial Sequence
  Description of Artificial Sequence: Synthetic oligonucleotide
  Sense strand starting at position 3186 of SEQ ID NO: 1888771
cuguaacuagaauguaaga

SEQ ID NO: 2555577 - RNA, 19 nt, Artificial Sequence
  Description of Artificial Sequence: Synthetic oligonucleotide
  Antisense strand to SEQ ID NO: 2555576
ucuuacauucuaguuacag

SEQ ID NO: 2555578 - RNA, 19 nt, Artificial Sequence
  Description of Artificial Sequence: Synthetic oligonucleotide
  Sense strand starting at position 3281 of SEQ ID NO: 1888771
aucugauauuaaguguaca

SEQ ID NO: 2555579 - RNA, 19 nt, Artificial Sequence
  Description of Artificial Sequence: Synthetic oligonucleotide
  Antisense strand to SEQ ID NO: 2555578
uguacacuuaauaucagau

SEQ ID NO: 2555580 - RNA, 19 nt, Artificial Sequence
  Description of Artificial Sequence: Synthetic oligonucleotide
  Sense strand starting at position 3284 of SEQ ID NO: 1888771
ugauauuaaguguacagua

SEQ ID NO: 2555581 - RNA, 19 nt, Artificial Sequence
  Description of Artificial Sequence: Synthetic oligonucleotide
  Antisense strand to SEQ ID NO: 2555580
uacuguacacuuaauauca

SEQ ID NO: 2555582 - RNA, 19 nt, Artificial Sequence
  Description of Artificial Sequence: Synthetic oligonucleotide
  Sense strand starting at position 3712 of SEQ ID NO: 1888771
ugcagagucaaugaaugua

SEQ ID NO: 2555583 - RNA, 19 nt, Artificial Sequence
  Description of Artificial Sequence: Synthetic oligonucleotide
  Antisense strand to SEQ ID NO: 2555582
uacauucauugacucugca

SEQ ID NO: 2555584 - RNA, 19 nt, Artificial Sequence
  Description of Artificial Sequence: Synthetic oligonucleotide
  Sense strand starting at position 3876 of SEQ ID NO: 1888771
agggcaugcugacuagaau

SEQ ID NO: 2555585 - RNA, 19 nt, Artificial Sequence
  Description of Artificial Sequence: Synthetic oligonucleotide
  Antisense strand to SEQ ID NO: 2555584
auucuagucagcaugcccu

SEQ ID NO: 2555586 - RNA, 19 nt, Artificial Sequence
  Description of Artificial Sequence: Synthetic oligonucleotide
  Sense strand starting at position 3877 of SEQ ID NO: 1888771
gggcaugcugacuagaaug

SEQ ID NO: 2555587 - RNA, 19 nt, Artificial Sequence
  Description of Artificial Sequence: Synthetic oligonucleotide
  Antisense strand to SEQ ID NO: 2555586
cauucuagucagcaugccc

SEQ ID NO: 2555588 - RNA, 19 nt, Artificial Sequence
  Description of Artificial Sequence: Synthetic oligonucleotide
  Sense strand starting at position 3879 of SEQ ID NO: 1888771
gcaugcugacuagaaugaa

SEQ ID NO: 2555589 - RNA, 19 nt, Artificial Sequence
  Description of Artificial Sequence: Synthetic oligonucleotide
  Antisense strand to SEQ ID NO: 2555588
uucauucuagucagcaugc

SEQ ID NO: 2555590 - RNA, 19 nt, Artificial Sequence
  Description of Artificial Sequence: Synthetic oligonucleotide
  Sense strand starting at position 167 of SEQ ID NO: 1888772
ggugcuaucauugauggaa

SEQ ID NO: 2555591 - RNA, 19 nt, Artificial Sequence
  Description of Artificial Sequence: Synthetic oligonucleotide
  Antisense strand to SEQ ID NO: 2555590
uuccaucaaugauagcacc

SEQ ID NO: 2555592 - RNA, 19 nt, Artificial Sequence
  Description of Artificial Sequence: Synthetic oligonucleotide
  Sense strand starting at position 214 of SEQ ID NO: 1888772
aggauagcuuucuuugaac

SEQ ID NO: 2555593 - RNA, 19 nt, Artificial Sequence
  Description of Artificial Sequence: Synthetic oligonucleotide
  Antisense strand to SEQ ID NO: 2555592
guucaaagaaagcuauccu

SEQ ID NO: 2555594 - RNA, 19 nt, Artificial Sequence
  Description of Artificial Sequence: Synthetic oligonucleotide
  Sense strand starting at position 354 of SEQ ID NO: 1888772
ccuugagagucuuuaaaug

SEQ ID NO: 2555595 - RNA, 19 nt, Artificial Sequence
  Description of Artificial Sequence: Synthetic oligonucleotide
  Antisense strand to SEQ ID NO: 2555594
cauuuaaagacucucaagg

SEQ ID NO: 2555596 - RNA, 19 nt, Artificial Sequence
  Description of Artificial Sequence: Synthetic oligonucleotide
  Sense strand starting at position 359 of SEQ ID NO: 1888772
agagucuuuaaaugaagug

SEQ ID NO: 2555597 - RNA, 19 nt, Artificial Sequence
  Description of Artificial Sequence: Synthetic oligonucleotide
  Antisense strand to SEQ ID NO: 2555596
cacuucauuuaaagacucu

SEQ ID NO: 2555598 - RNA, 19 nt, Artificial Sequence
  Description of Artificial Sequence: Synthetic oligonucleotide
  Sense strand starting at position 398 of SEQ ID NO: 1888772
gugguccuuguuguguaua

SEQ ID NO: 2555599 - RNA, 19 nt, Artificial Sequence
  Description of Artificial Sequence: Synthetic oligonucleotide
  Antisense strand to SEQ ID NO: 2555598
uauacacaacaaggaccac

SEQ ID NO: 2555600 - RNA, 19 nt, Artificial Sequence
  Description of Artificial Sequence: Synthetic oligonucleotide
  Sense strand starting at position 514 of SEQ ID NO: 1888772
acaucuaagagugggaagu

SEQ ID NO: 2555601 - RNA, 19 nt, Artificial Sequence
  Description of Artificial Sequence: Synthetic oligonucleotide
  Antisense strand to SEQ ID NO: 2555600
acuucccacucuuagaugu

SEQ ID NO: 2555602 - RNA, 19 nt, Artificial Sequence
  Description of Artificial Sequence: Synthetic oligonucleotide
  Sense strand starting at position 515 of SEQ ID NO: 1888772
caucuaagagugggaagua

SEQ ID NO: 2555603 - RNA, 19 nt, Artificial Sequence
  Description of Artificial Sequence: Synthetic oligonucleotide
  Antisense strand to SEQ ID NO: 2555602
uacuucccacucuuagaug

SEQ ID NO: 2555604 - RNA, 19 nt, Artificial Sequence
  Description of Artificial Sequence: Synthetic oligonucleotide
  Sense strand starting at position 811 of SEQ ID NO: 1888772
ccauaagggcaauguaaga

SEQ ID NO: 2555605 - RNA, 19 nt, Artificial Sequence
  Description of Artificial Sequence: Synthetic oligonucleotide
  Antisense strand to SEQ ID NO: 2555604
ucuuacauugcccuuaugg

SEQ ID NO: 2555606 - RNA, 19 nt, Artificial Sequence
  Description of Artificial Sequence: Synthetic oligonucleotide
  Sense strand starting at position 912 of SEQ ID NO: 1888772
ugauccauacacugaguuu

SEQ ID NO: 2555607 - RNA, 19 nt, Artificial Sequence
  Description of Artificial Sequence: Synthetic oligonucleotide
  Antisense strand to SEQ ID NO: 2555606
aaacucaguguauggauca

SEQ ID NO: 2555608 - RNA, 19 nt, Artificial Sequence
  Description of Artificial Sequence: Synthetic oligonucleotide
  Sense strand starting at position 939 of SEQ ID NO: 1888772
guuagaagaaucugguaag

SEQ ID NO: 2555609 - RNA, 19 nt, Artificial Sequence
  Description of Artificial Sequence: Synthetic oligonucleotide
  Antisense strand to SEQ ID NO: 2555608
cuuaccagauucuucuaac

SEQ ID NO: 2555610 - RNA, 19 nt, Artificial Sequence
  Description of Artificial Sequence: Synthetic oligonucleotide
  Sense strand starting at position 1091 of SEQ ID NO: 1888772
aaacuuguaugggcugaau

SEQ ID NO: 2555611 - RNA, 19 nt, Artificial Sequence
  Description of Artificial Sequence: Synthetic oligonucleotide
  Antisense strand to SEQ ID NO: 2555610
auucagcccauacaaguuu

SEQ ID NO: 2555612 - RNA, 19 nt, Artificial Sequence
  Description of Artificial Sequence: Synthetic oligonucleotide
  Sense strand starting at position 1094 of SEQ ID NO: 1888772
cuuguaugggcugaauauu

SEQ ID NO: 2555613 - RNA, 19 nt, Artificial Sequence
  Description of Artificial Sequence: Synthetic oligonucleotide
  Antisense strand to SEQ ID NO: 2555612
aauauucagcccauacaag

SEQ ID NO: 2555614 - RNA, 19 nt, Artificial Sequence
  Description of Artificial Sequence: Synthetic oligonucleotide
  Sense strand starting at position 1102 of SEQ ID NO: 1888772
ggcugaauauuugcgauau

SEQ ID NO: 2555615 - RNA, 19 nt, Artificial Sequence
  Description of Artificial Sequence: Synthetic oligonucleotide
  Antisense strand to SEQ ID NO: 2555614
auaucgcaaauauucagcc

SEQ ID NO: 2555616 - RNA, 19 nt, Artificial Sequence
  Description of Artificial Sequence: Synthetic oligonucleotide
  Sense strand starting at position 1418 of SEQ ID NO: 1888772
gcaauaagauaugucacua

SEQ ID NO: 2555617 - RNA, 19 nt, Artificial Sequence
  Description of Artificial Sequence: Synthetic oligonucleotide
  Antisense strand to SEQ ID NO: 2555616
uagugacauaucuuauugc

SEQ ID NO: 2555618 - RNA, 19 nt, Artificial Sequence
  Description of Artificial Sequence: Synthetic oligonucleotide
  Sense strand starting at position 1449 of SEQ ID NO: 1888772
uuugcaaugaaaggugaau

SEQ ID NO: 2555619 - RNA, 19 nt, Artificial Sequence
  Description of Artificial Sequence: Synthetic oligonucleotide
  Antisense strand to SEQ ID NO: 2555618
auucaccuuucauugcaaa

SEQ ID NO: 2555620 - RNA, 19 nt, Artificial Sequence
  Description of Artificial Sequence: Synthetic oligonucleotide
  Sense strand starting at position 1703 of SEQ ID NO: 1888772
aguuauuuauugcugagca

SEQ ID NO: 2555621 - RNA, 19 nt, Artificial Sequence
  Description of Artificial Sequence: Synthetic oligonucleotide
  Antisense strand to SEQ ID NO: 2555620
ugcucagcaauaaauaacu

SEQ ID NO: 2555622 - RNA, 19 nt, Artificial Sequence
  Description of Artificial Sequence: Synthetic oligonucleotide
  Sense strand starting at position 1713 of SEQ ID NO: 1888772
ugcugagcaccauaaucaa

SEQ ID NO: 2555623 - RNA, 19 nt, Artificial Sequence
  Description of Artificial Sequence: Synthetic oligonucleotide
  Antisense strand to SEQ ID NO: 2555622
uugauuauggugcucagca

SEQ ID NO: 2555624 - RNA, 19 nt, Artificial Sequence
  Description of Artificial Sequence: Synthetic oligonucleotide
  Sense strand starting at position 1831 of SEQ ID NO: 1888772
aguuaacagggauggcauu

SEQ ID NO: 2555625 - RNA, 19 nt, Artificial Sequence
  Description of Artificial Sequence: Synthetic oligonucleotide
  Antisense strand to SEQ ID NO: 2555624
aaugccaucccuguuaacu

SEQ ID NO: 2555626 - RNA, 19 nt, Artificial Sequence
  Description of Artificial Sequence: Synthetic oligonucleotide
  Sense strand starting at position 1837 of SEQ ID NO: 1888772
cagggauggcauugcagaa

SEQ ID NO: 2555627 - RNA, 19 nt, Artificial Sequence
  Description of Artificial Sequence: Synthetic oligonucleotide
  Antisense strand to SEQ ID NO: 2555626
uucugcaaugccaucccug

SEQ ID NO: 2555628 - RNA, 19 nt, Artificial Sequence
  Description of Artificial Sequence: Synthetic oligonucleotide
  Sense strand starting at position 2096 of SEQ ID NO: 1888772
auugguagaaucugaguua

SEQ ID NO: 2555629 - RNA, 19 nt, Artificial Sequence
  Description of Artificial Sequence: Synthetic oligonucleotide
  Antisense strand to SEQ ID NO: 2555628
uaacucagauucuaccaau

SEQ ID NO: 2555630 - RNA, 19 nt, Artificial Sequence
  Description of Artificial Sequence: Synthetic oligonucleotide
  Sense strand starting at position 2099 of SEQ ID NO: 1888772
gguagaaucugaguuaaga

SEQ ID NO: 2555631 - RNA, 19 nt, Artificial Sequence
  Description of Artificial Sequence: Synthetic oligonucleotide
  Antisense strand to SEQ ID NO: 2555630
ucuuaacucagauucuacc

SEQ ID NO: 2555632 - RNA, 19 nt, Artificial Sequence
  Description of Artificial Sequence: Synthetic oligonucleotide
  Sense strand starting at position 2305 of SEQ ID NO: 1888772
cauguauagugacucauag

SEQ ID NO: 2555633 - RNA, 19 nt, Artificial Sequence
  Description of Artificial Sequence: Synthetic oligonucleotide
  Antisense strand to SEQ ID NO: 2555632
cuaugagucacuauacaug

SEQ ID NO: 2555634 - RNA, 19 nt, Artificial Sequence
  Description of Artificial Sequence: Synthetic oligonucleotide
  Sense strand starting at position 2314 of SEQ ID NO: 1888772
ugacucauagacugagcua

SEQ ID NO: 2555635 - RNA, 19 nt, Artificial Sequence
  Description of Artificial Sequence: Synthetic oligonucleotide
  Antisense strand to SEQ ID NO: 2555634
uagcucagucuaugaguca

SEQ ID NO: 2555636 - RNA, 19 nt, Artificial Sequence
  Description of Artificial Sequence: Synthetic oligonucleotide
  Sense strand starting at position 2391 of SEQ ID NO: 1888772
auccucuuccuagauaugu

SEQ ID NO: 2555637 - RNA, 19 nt, Artificial Sequence
  Description of Artificial Sequence: Synthetic oligonucleotide
  Antisense strand to SEQ ID NO: 2555636
acauaucuaggaagaggau

SEQ ID NO: 2555638 - RNA, 19 nt, Artificial Sequence
  Description of Artificial Sequence: Synthetic oligonucleotide
  Sense strand starting at position 2502 of SEQ ID NO: 1888772
uccuucuugggauaucauu

SEQ ID NO: 2555639 - RNA, 19 nt, Artificial Sequence
  Description of Artificial Sequence: Synthetic oligonucleotide
  Antisense strand to SEQ ID NO: 2555638
aaugauaucccaagaagga

SEQ ID NO: 2555640 - RNA, 19 nt, Artificial Sequence
  Description of Artificial Sequence: Synthetic oligonucleotide
  Sense strand starting at position 2546 of SEQ ID NO: 1888772
ugugcauauggugagacua

SEQ ID NO: 2555641 - RNA, 19 nt, Artificial Sequence
  Description of Artificial Sequence: Synthetic oligonucleotide
  Antisense strand to SEQ ID NO: 2555640
uagucucaccauaugcaca

SEQ ID NO: 2555642 - RNA, 19 nt, Artificial Sequence
  Description of Artificial Sequence: Synthetic oligonucleotide
  Sense strand starting at position 2588 of SEQ ID NO: 1888772
uagaacagugccuauggau

SEQ ID NO: 2555643 - RNA, 19 nt, Artificial Sequence
  Description of Artificial Sequence: Synthetic oligonucleotide
  Antisense strand to SEQ ID NO: 2555642
auccauaggcacuguucua

SEQ ID NO: 2555644 - RNA, 19 nt, Artificial Sequence
  Description of Artificial Sequence: Synthetic oligonucleotide
  Sense strand starting at position 2882 of SEQ ID NO: 1888772
gaaggaggguucuuuccuu

SEQ ID NO: 2555645 - RNA, 19 nt, Artificial Sequence
  Description of Artificial Sequence: Synthetic oligonucleotide
  Antisense strand to SEQ ID NO: 2555644
aaggaaagaacccuccuuc

SEQ ID NO: 2555646 - RNA, 19 nt, Artificial Sequence
  Description of Artificial Sequence: Synthetic oligonucleotide
  Sense strand starting at position 2989 of SEQ ID NO: 1888772
uaaggaauauguguugacu

SEQ ID NO: 2555647 - RNA, 19 nt, Artificial Sequence
  Description of Artificial Sequence: Synthetic oligonucleotide
  Antisense strand to SEQ ID NO: 2555646
agucaacacauauuccuua

SEQ ID NO: 2555648 - RNA, 19 nt, Artificial Sequence
  Description of Artificial Sequence: Synthetic oligonucleotide
  Sense strand starting at position 3190 of SEQ ID NO: 1888772
cuucuuuggcaccaaugau

SEQ ID NO: 2555649 - RNA, 19 nt, Artificial Sequence
  Description of Artificial Sequence: Synthetic oligonucleotide
  Antisense strand to SEQ ID NO: 2555648
aucauuggugccaaagaag

SEQ ID NO: 2555650 - RNA, 19 nt, Artificial Sequence
  Description of Artificial Sequence: Synthetic oligonucleotide
  Sense strand starting at position 3349 of SEQ ID NO: 1888772
gugguauuuaagugcuaca

SEQ ID NO: 2555651 - RNA, 19 nt, Artificial Sequence
  Description of Artificial Sequence: Synthetic oligonucleotide
  Antisense strand to SEQ ID NO: 2555650
uguagcacuuaaauaccac

SEQ ID NO: 2555652 - RNA, 19 nt, Artificial Sequence
  Description of Artificial Sequence: Synthetic oligonucleotide
  Sense strand starting at position 3563 of SEQ ID NO: 1888772
ggaguuguggauuagguca

SEQ ID NO: 2555653 - RNA, 19 nt, Artificial Sequence
  Description of Artificial Sequence: Synthetic oligonucleotide
  Antisense strand to SEQ ID NO: 2555652
ugaccuaauccacaacucc

SEQ ID NO: 2555654 - RNA, 19 nt, Artificial Sequence
  Description of Artificial Sequence: Synthetic oligonucleotide
  Sense strand starting at position 3568 of SEQ ID NO: 1888772
uguggauuaggucaaagcu

SEQ ID NO: 2555655 - RNA, 19 nt, Artificial Sequence
  Description of Artificial Sequence: Synthetic oligonucleotide
  Antisense strand to SEQ ID NO: 2555654
agcuuugaccuaauccaca

SEQ ID NO: 2555656 - RNA, 19 nt, Artificial Sequence
  Description of Artificial Sequence: Synthetic oligonucleotide
  Sense strand starting at position 3642 of SEQ ID NO: 1888772
ugagauucaguguagcaug

SEQ ID NO: 2555657 - RNA, 19 nt, Artificial Sequence
  Description of Artificial Sequence: Synthetic oligonucleotide
  Antisense strand to SEQ ID NO: 2555656
caugcuacacugaaucuca

SEQ ID NO: 2555658 - RNA, 19 nt, Artificial Sequence
  Description of Artificial Sequence: Synthetic oligonucleotide
  Sense strand starting at position 3686 of SEQ ID NO: 1888772
uugaauguugcgucaguuc

SEQ ID NO: 2555659 - RNA, 19 nt, Artificial Sequence
  Description of Artificial Sequence: Synthetic oligonucleotide
  Antisense strand to SEQ ID NO: 2555658
gaacugacgcaacauucaa

SEQ ID NO: 2555660 - RNA, 19 nt, Artificial Sequence
  Description of Artificial Sequence: Synthetic oligonucleotide
  Sense strand starting at position 3773 of SEQ ID NO: 1888772
uggaaugggauaugucuga

SEQ ID NO: 2555661 - RNA, 19 nt, Artificial Sequence
  Description of Artificial Sequence: Synthetic oligonucleotide
  Antisense strand to SEQ ID NO: 2555660
ucagacauaucccauucca

SEQ ID NO: 2555662 - RNA, 19 nt, Artificial Sequence
  Description of Artificial Sequence: Synthetic oligonucleotide
  Sense strand starting at position 3777 of SEQ ID NO: 1888772
augggauaugucugagcag

SEQ ID NO: 2555663 - RNA, 19 nt, Artificial Sequence
  Description of Artificial Sequence: Synthetic oligonucleotide
  Antisense strand to SEQ ID NO: 2555662
cugcucagacauaucccau

SEQ ID NO: 2555664 - RNA, 19 nt, Artificial Sequence
  Description of Artificial Sequence: Synthetic oligonucleotide
  Sense strand starting at position 3800 of SEQ ID NO: 1888772
gccagacuacccuggaaau

SEQ ID NO: 2555665 - RNA, 19 nt, Artificial Sequence
  Description of Artificial Sequence: Synthetic oligonucleotide
  Antisense strand to SEQ ID NO: 2555664
auuuccaggguagucuggc

SEQ ID NO: 2555666 - RNA, 19 nt, Artificial Sequence
  Description of Artificial Sequence: Synthetic oligonucleotide
  Sense strand starting at position 3902 of SEQ ID NO: 1888772
agaacugugucacugagau

SEQ ID NO: 2555667 - RNA, 19 nt, Artificial Sequence
  Description of Artificial Sequence: Synthetic oligonucleotide
  Antisense strand to SEQ ID NO: 2555666
aucucagugacacaguucu

SEQ ID NO: 2555668 - RNA, 19 nt, Artificial Sequence
  Description of Artificial Sequence: Synthetic oligonucleotide
  Sense strand starting at position 3941 of SEQ ID NO: 1888772
gagguugacccaugaccaa

SEQ ID NO: 2555669 - RNA, 19 nt, Artificial Sequence
  Description of Artificial Sequence: Synthetic oligonucleotide
  Antisense strand to SEQ ID NO: 2555668
uuggucaugggucaaccuc

SEQ ID NO: 2555670 - RNA, 19 nt, Artificial Sequence
  Description of Artificial Sequence: Synthetic oligonucleotide
  Sense strand starting at position 87 of SEQ ID NO: 1888773
gucuccugccagugaggaa

SEQ ID NO: 2555671 - RNA, 19 nt, Artificial Sequence
  Description of Artificial Sequence: Synthetic oligonucleotide
  Antisense strand to SEQ ID NO: 2555670
uuccucacuggcaggagac

SEQ ID NO: 2555672 - RNA, 19 nt, Artificial Sequence
  Description of Artificial Sequence: Synthetic oligonucleotide
  Sense strand starting at position 186 of SEQ ID NO: 1888773
gccaucucuuagguaacca

SEQ ID NO: 2555673 - RNA, 19 nt, Artificial Sequence
  Description of Artificial Sequence: Synthetic oligonucleotide
  Antisense strand to SEQ ID NO: 2555672
ugguuaccuaagagauggc

SEQ ID NO: 2555674 - RNA, 19 nt, Artificial Sequence
  Description of Artificial Sequence: Synthetic oligonucleotide
  Sense strand starting at position 246 of SEQ ID NO: 1888773
cugagucaugcagagcuca

SEQ ID NO: 2555675 - RNA, 19 nt, Artificial Sequence
  Description of Artificial Sequence: Synthetic oligonucleotide
  Antisense strand to SEQ ID NO: 2555674
ugagcucugcaugacucag

SEQ ID NO: 2555676 - RNA, 19 nt, Artificial Sequence
  Description of Artificial Sequence: Synthetic oligonucleotide
  Sense strand starting at position 281 of SEQ ID NO: 1888773
uugggugucaccuaggcaa

SEQ ID NO: 2555677 - RNA, 19 nt, Artificial Sequence
  Description of Artificial Sequence: Synthetic oligonucleotide
  Antisense strand to SEQ ID NO: 2555676
uugccuaggugacacccaa

SEQ ID NO: 2555678 - RNA, 19 nt, Artificial Sequence
  Description of Artificial Sequence: Synthetic oligonucleotide
  Sense strand starting at position 283 of SEQ ID NO: 1888773
gggugucaccuaggcaaca

SEQ ID NO: 2555679 - RNA, 19 nt, Artificial Sequence
  Description of Artificial Sequence: Synthetic oligonucleotide
  Antisense strand to SEQ ID NO: 2555678
uguugccuaggugacaccc

SEQ ID NO: 2555680 - RNA, 19 nt, Artificial Sequence
  Description of Artificial Sequence: Synthetic oligonucleotide
  Sense strand starting at position 302 of SEQ ID NO: 1888773
gacugcuuccgggagagaa

SEQ ID NO: 2555681 - RNA, 19 nt, Artificial Sequence
  Description of Artificial Sequence: Synthetic oligonucleotide
  Antisense strand to SEQ ID NO: 2555680
uucucucccggaagcaguc

SEQ ID NO: 2555682 - RNA, 19 nt, Artificial Sequence
  Description of Artificial Sequence: Synthetic oligonucleotide
  Sense strand starting at position 622 of SEQ ID NO: 1888773
aggucaagcuuucccauga

SEQ ID NO: 2555683 - RNA, 19 nt, Artificial Sequence
  Description of Artificial Sequence: Synthetic oligonucleotide
  Antisense strand to SEQ ID NO: 2555682
ucaugggaaagcuugaccu

SEQ ID NO: 2555684 - RNA, 19 nt, Artificial Sequence
  Description of Artificial Sequence: Synthetic oligonucleotide
  Sense strand starting at position 694 of SEQ ID NO: 1888773
caagaugucccgcacaauc

SEQ ID NO: 2555685 - RNA, 19 nt, Artificial Sequence
  Description of Artificial Sequence: Synthetic oligonucleotide
  Antisense strand to SEQ ID NO: 2555684
gauugugcgggacaucuug

SEQ ID NO: 2555686 - RNA, 19 nt, Artificial Sequence
  Description of Artificial Sequence: Synthetic oligonucleotide
  Sense strand starting at position 834 of SEQ ID NO: 1888773
ugggaugccaguuggucaa

SEQ ID NO: 2555687 - RNA, 19 nt, Artificial Sequence
  Description of Artificial Sequence: Synthetic oligonucleotide
  Antisense strand to SEQ ID NO: 2555686
uugaccaacuggcauccca

SEQ ID NO: 2555688 - RNA, 19 nt, Artificial Sequence
  Description of Artificial Sequence: Synthetic oligonucleotide
  Sense strand starting at position 836 of SEQ ID NO: 1888773
ggaugccaguuggucaaua

SEQ ID NO: 2555689 - RNA, 19 nt, Artificial Sequence
  Description of Artificial Sequence: Synthetic oligonucleotide
  Antisense strand to SEQ ID NO: 2555688
uauugaccaacuggcaucc

SEQ ID NO: 2555690 - RNA, 19 nt, Artificial Sequence
  Description of Artificial Sequence: Synthetic oligonucleotide
  Sense strand starting at position 837 of SEQ ID NO: 1888773
gaugccaguuggucaauau

SEQ ID NO: 2555691 - RNA, 19 nt, Artificial Sequence
  Description of Artificial Sequence: Synthetic oligonucleotide
  Antisense strand to SEQ ID NO: 2555690
auauugaccaacuggcauc

SEQ ID NO: 2555692 - RNA, 19 nt, Artificial Sequence
  Description of Artificial Sequence: Synthetic oligonucleotide
  Sense strand starting at position 838 of SEQ ID NO: 1888773
augccaguuggucaauauu

SEQ ID NO: 2555693 - RNA, 19 nt, Artificial Sequence
  Description of Artificial Sequence: Synthetic oligonucleotide
  Antisense strand to SEQ ID NO: 2555692
aauauugaccaacuggcau

SEQ ID NO: 2555694 - RNA, 19 nt, Artificial Sequence
  Description of Artificial Sequence: Synthetic oligonucleotide
  Sense strand starting at position 901 of SEQ ID NO: 1888773
gcaggucauccacgaugau

SEQ ID NO: 2555695 - RNA, 19 nt, Artificial Sequence
  Description of Artificial Sequence: Synthetic oligonucleotide
  Antisense strand to SEQ ID NO: 2555694
aucaucguggaugaccugc

SEQ ID NO: 2555696 - RNA, 19 nt, Artificial Sequence
  Description of Artificial Sequence: Synthetic oligonucleotide
  Sense strand starting at position 913 of SEQ ID NO: 1888773
cgaugaugagaagaacguu

SEQ ID NO: 2555697 - RNA, 19 nt, Artificial Sequence
  Description of Artificial Sequence: Synthetic oligonucleotide
  Antisense strand to SEQ ID NO: 2555696
aacguucuucucaucaucg

SEQ ID NO: 2555698 - RNA, 19 nt, Artificial Sequence
  Description of Artificial Sequence: Synthetic oligonucleotide
  Sense strand starting at position 1127 of SEQ ID NO: 1888773
aggguuaggcuuuggucau

SEQ ID NO: 2555699 - RNA, 19 nt, Artificial Sequence
  Description of Artificial Sequence: Synthetic oligonucleotide
  Antisense strand to SEQ ID NO: 2555698
augaccaaagccuaacccu

SEQ ID NO: 2555700 - RNA, 19 nt, Artificial Sequence
  Description of Artificial Sequence: Synthetic oligonucleotide
  Sense strand starting at position 1166 of SEQ ID NO: 1888773
aagcgagauagugagugaa

SEQ ID NO: 2555701 - RNA, 19 nt, Artificial Sequence
  Description of Artificial Sequence: Synthetic oligonucleotide
  Antisense strand to SEQ ID NO: 2555700
uucacucacuaucucgcuu

SEQ ID NO: 2555702 - RNA, 19 nt, Artificial Sequence
  Description of Artificial Sequence: Synthetic oligonucleotide
  Sense strand starting at position 1168 of SEQ ID NO: 1888773
gcgagauagugagugaaag

SEQ ID NO: 2555703 - RNA, 19 nt, Artificial Sequence
  Description of Artificial Sequence: Synthetic oligonucleotide
  Antisense strand to SEQ ID NO: 2555702
cuuucacucacuaucucgc

SEQ ID NO: 2555704 - RNA, 19 nt, Artificial Sequence
  Description of Artificial Sequence: Synthetic oligonucleotide
  Sense strand starting at position 1169 of SEQ ID NO: 1888773
cgagauagugagugaaaga

SEQ ID NO: 2555705 - RNA, 19 nt, Artificial Sequence
  Description of Artificial Sequence: Synthetic oligonucleotide
  Antisense strand to SEQ ID NO: 2555704
ucuuucacucacuaucucg

SEQ ID NO: 2555706 - RNA, 19 nt, Artificial Sequence
  Description of Artificial Sequence: Synthetic oligonucleotide
  Sense strand starting at position 1221 of SEQ ID NO: 1888773
gagaaugauguaugcagga

SEQ ID NO: 2555707 - RNA, 19 nt, Artificial Sequence
  Description of Artificial Sequence: Synthetic oligonucleotide
  Antisense strand to SEQ ID NO: 2555706
uccugcauacaucauucuc

SEQ ID NO: 2555708 - RNA, 19 nt, Artificial Sequence
  Description of Artificial Sequence: Synthetic oligonucleotide
  Sense strand starting at position 2007 of SEQ ID NO: 1888773
gcgcgucauccugcagcaa

SEQ ID NO: 2555709 - RNA, 19 nt, Artificial Sequence
  Description of Artificial Sequence: Synthetic oligonucleotide
  Antisense strand to SEQ ID NO: 2555708
uugcugcaggaugacgcgc

SEQ ID NO: 2555710 - RNA, 19 nt, Artificial Sequence
  Description of Artificial Sequence: Synthetic oligonucleotide
  Sense strand starting at position 2542 of SEQ ID NO: 1888773
ucacuagugaaguggcauu

SEQ ID NO: 2555711 - RNA, 19 nt, Artificial Sequence
  Description of Artificial Sequence: Synthetic oligonucleotide
  Antisense strand to SEQ ID NO: 2555710
aaugccacuucacuaguga

SEQ ID NO: 2555712 - RNA, 19 nt, Artificial Sequence
  Description of Artificial Sequence: Synthetic oligonucleotide
  Sense strand starting at position 2593 of SEQ ID NO: 1888773
gccgcauugaggucugcaa

SEQ ID NO: 2555713 - RNA, 19 nt, Artificial Sequence
  Description of Artificial Sequence: Synthetic oligonucleotide
  Antisense strand to SEQ ID NO: 2555712
uugcagaccucaaugcggc

SEQ ID NO: 2555714 - RNA, 19 nt, Artificial Sequence
  Description of Artificial Sequence: Synthetic oligonucleotide
  Sense strand starting at position 2901 of SEQ ID NO: 1888773
guuagcccucaucagaaau

SEQ ID NO: 2555715 - RNA, 19 nt, Artificial Sequence
  Description of Artificial Sequence: Synthetic oligonucleotide
  Antisense strand to SEQ ID NO: 2555714
auuucugaugagggcuaac

SEQ ID NO: 2555716 - RNA, 19 nt, Artificial Sequence
  Description of Artificial Sequence: Synthetic oligonucleotide
  Sense strand starting at position 3102 of SEQ ID NO: 1888773
acuuucucugucuguugaa

SEQ ID NO: 2555717 - RNA, 19 nt, Artificial Sequence
  Description of Artificial Sequence: Synthetic oligonucleotide
  Antisense strand to SEQ ID NO: 2555716
uucaacagacagagaaagu

SEQ ID NO: 2555718 - RNA, 19 nt, Artificial Sequence
  Description of Artificial Sequence: Synthetic oligonucleotide
  Sense strand starting at position 3199 of SEQ ID NO: 1888773
ucuacaucuuagucagcuu

SEQ ID NO: 2555719 - RNA, 19 nt, Artificial Sequence
  Description of Artificial Sequence: Synthetic oligonucleotide
  Antisense strand to SEQ ID NO: 2555718
aagcugacuaagauguaga

SEQ ID NO: 2555720 - RNA, 19 nt, Artificial Sequence
  Description of Artificial Sequence: Synthetic oligonucleotide
  Sense strand starting at position 3208 of SEQ ID NO: 1888773
uagucagcuuccuugggaa

SEQ ID NO: 2555721 - RNA, 19 nt, Artificial Sequence
  Description of Artificial Sequence: Synthetic oligonucleotide
  Antisense strand to SEQ ID NO: 2555720
uucccaaggaagcugacua

SEQ ID NO: 2555722 - RNA, 19 nt, Artificial Sequence
  Description of Artificial Sequence: Synthetic oligonucleotide
  Sense strand starting at position 3277 of SEQ ID NO: 1888773
gcaggaaauguaggcacau

SEQ ID NO: 2555723 - RNA, 19 nt, Artificial Sequence
  Description of Artificial Sequence: Synthetic oligonucleotide
  Antisense strand to SEQ ID NO: 2555722
augugccuacauuuccugc

SEQ ID NO: 2555724 - RNA, 19 nt, Artificial Sequence
  Description of Artificial Sequence: Synthetic oligonucleotide
  Sense strand starting at position 3278 of SEQ ID NO: 1888773
caggaaauguaggcacauu

SEQ ID NO: 2555725 - RNA, 19 nt, Artificial Sequence
  Description of Artificial Sequence: Synthetic oligonucleotide
  Antisense strand to SEQ ID NO: 2555724
aaugugccuacauuuccug

SEQ ID NO: 2555726 - RNA, 19 nt, Artificial Sequence
  Description of Artificial Sequence: Synthetic oligonucleotide
  Sense strand starting at position 3538 of SEQ ID NO: 1888773
guugauaaccaaugaaguu

SEQ ID NO: 2555727 - RNA, 19 nt, Artificial Sequence
  Description of Artificial Sequence: Synthetic oligonucleotide
  Antisense strand to SEQ ID NO: 2555726
aacuucauugguuaucaac

SEQ ID NO: 2555728 - RNA, 19 nt, Artificial Sequence
  Description of Artificial Sequence: Synthetic oligonucleotide
  Sense strand starting at position 3593 of SEQ ID NO: 1888773
uguaaucuuguauagguuu

SEQ ID NO: 2555729 - RNA, 19 nt, Artificial Sequence
  Description of Artificial Sequence: Synthetic oligonucleotide
  Antisense strand to SEQ ID NO: 2555728
aaaccuauacaagauuaca

SEQ ID NO: 2555730 - RNA, 19 nt, Artificial Sequence
  Description of Artificial Sequence: Synthetic oligonucleotide
  Sense strand starting at position 3596 of SEQ ID NO: 1888773
aaucuuguauagguuugau

SEQ ID NO: 2555731 - RNA, 19 nt, Artificial Sequence
  Description of Artificial Sequence: Synthetic oligonucleotide
  Antisense strand to SEQ ID NO: 2555730
aucaaaccuauacaagauu

SEQ ID NO: 2555732 - RNA, 19 nt, Artificial Sequence
  Description of Artificial Sequence: Synthetic oligonucleotide
  Sense strand starting at position 3599 of SEQ ID NO: 1888773
cuuguauagguuugaucaa

SEQ ID NO: 2555733 - RNA, 19 nt, Artificial Sequence
  Description of Artificial Sequence: Synthetic oligonucleotide
  Antisense strand to SEQ ID NO: 2555732
uugaucaaaccuauacaag

SEQ ID NO: 2555734 - RNA, 19 nt, Artificial Sequence
  Description of Artificial Sequence: Synthetic oligonucleotide
  Sense strand starting at position 3660 of SEQ ID NO: 1888773
auggauaagugaucucauc

SEQ ID NO: 2555735 - RNA, 19 nt, Artificial Sequence
  Description of Artificial Sequence: Synthetic oligonucleotide
  Antisense strand to SEQ ID NO: 2555734
gaugagaucacuuauccau

SEQ ID NO: 2555736 - RNA, 19 nt, Artificial Sequence
  Description of Artificial Sequence: Synthetic oligonucleotide
  Sense strand starting at position 3686 of SEQ ID NO: 1888773
ggaagaagucagcaauguc

SEQ ID NO: 2555737 - RNA, 19 nt, Artificial Sequence
  Description of Artificial Sequence: Synthetic oligonucleotide
  Antisense strand to SEQ ID NO: 2555736
gacauugcugacuucuucc

SEQ ID NO: 2555738 - RNA, 19 nt, Artificial Sequence
  Description of Artificial Sequence: Synthetic oligonucleotide
  Sense strand starting at position 3693 of SEQ ID NO: 1888773
gucagcaaugucuaaaguu

SEQ ID NO: 2555739 - RNA, 19 nt, Artificial Sequence
  Description of Artificial Sequence: Synthetic oligonucleotide
  Antisense strand to SEQ ID NO: 2555738
aacuuuagacauugcugac

SEQ ID NO: 2555740 - RNA, 19 nt, Artificial Sequence
  Description of Artificial Sequence: Synthetic oligonucleotide
  Sense strand starting at position 3735 of SEQ ID NO: 1888773
gaaauagcauaguauuuag

SEQ ID NO: 2555741 - RNA, 19 nt, Artificial Sequence
  Description of Artificial Sequence: Synthetic oligonucleotide
  Antisense strand to SEQ ID NO: 2555740
cuaaauacuaugcuauuuc

SEQ ID NO: 2555742 - RNA, 19 nt, Artificial Sequence
  Description of Artificial Sequence: Synthetic oligonucleotide
  Sense strand starting at position 3761 of SEQ ID NO: 1888773
gggacaaucuacuagaaga

SEQ ID NO: 2555743 - RNA, 19 nt, Artificial Sequence
  Description of Artificial Sequence: Synthetic oligonucleotide
  Antisense strand to SEQ ID NO: 2555742
ucuucuaguagauuguccc

SEQ ID NO: 2555744 - RNA, 19 nt, Artificial Sequence
  Description of Artificial Sequence: Synthetic oligonucleotide
  Sense strand starting at position 3960 of SEQ ID NO: 1888773
gggucuuuaacaggguaau

SEQ ID NO: 2555745 - RNA, 19 nt, Artificial Sequence
  Description of Artificial Sequence: Synthetic oligonucleotide
  Antisense strand to SEQ ID NO: 2555744
auuacccuguuaaagaccc

SEQ ID NO: 2555746 - RNA, 19 nt, Artificial Sequence
  Description of Artificial Sequence: Synthetic oligonucleotide
  Sense strand starting at position 3961 of SEQ ID NO: 1888773
ggucuuuaacaggguaauc

SEQ ID NO: 2555747 - RNA, 19 nt, Artificial Sequence
  Description of Artificial Sequence: Synthetic oligonucleotide
  Antisense strand to SEQ ID NO: 2555746
gauuacccuguuaaagacc

SEQ ID NO: 2555748 - RNA, 19 nt, Artificial Sequence
  Description of Artificial Sequence: Synthetic oligonucleotide
  Sense strand starting at position 3966 of SEQ ID NO: 1888773
uuaacaggguaaucaaguu

SEQ ID NO: 2555749 - RNA, 19 nt, Artificial Sequence
  Description of Artificial Sequence: Synthetic oligonucleotide
  Antisense strand to SEQ ID NO: 2555748
aacuugauuacccuguuaa

SEQ ID NO: 2555750 - RNA, 19 nt, Artificial Sequence
  Description of Artificial Sequence: Synthetic oligonucleotide
  Sense strand starting at position 22 of SEQ ID NO: 1888774
cugaaauaguagggaguaa

SEQ ID NO: 2555751 - RNA, 19 nt, Artificial Sequence
  Description of Artificial Sequence: Synthetic oligonucleotide
  Antisense strand to SEQ ID NO: 2555750
uuacucccuacuauuucag

SEQ ID NO: 2555752 - RNA, 19 nt, Artificial Sequence
  Description of Artificial Sequence: Synthetic oligonucleotide
  Sense strand starting at position 34 of SEQ ID NO: 1888774
ggaguaaagggcugugaug

SEQ ID NO: 2555753 - RNA, 19 nt, Artificial Sequence
  Description of Artificial Sequence: Synthetic oligonucleotide
  Antisense strand to SEQ ID NO: 2555752
caucacagcccuuuacucc

SEQ ID NO: 2555754 - RNA, 19 nt, Artificial Sequence
  Description of Artificial Sequence: Synthetic oligonucleotide
  Sense strand starting at position 43 of SEQ ID NO: 1888774
ggcugugaugucugugaca

SEQ ID NO: 2555755 - RNA, 19 nt, Artificial Sequence
  Description of Artificial Sequence: Synthetic oligonucleotide
  Antisense strand to SEQ ID NO: 2555754
ugucacagacaucacagcc

SEQ ID NO: 2555756 - RNA, 19 nt, Artificial Sequence
  Description of Artificial Sequence: Synthetic oligonucleotide
  Sense strand starting at position 45 of SEQ ID NO: 1888774
cugugaugucugugacaca

SEQ ID NO: 2555757 - RNA, 19 nt, Artificial Sequence
  Description of Artificial Sequence: Synthetic oligonucleotide
  Antisense strand to SEQ ID NO: 2555756
ugugucacagacaucacag

SEQ ID NO: 2555758 - RNA, 19 nt, Artificial Sequence
  Description of Artificial Sequence: Synthetic oligonucleotide
  Sense strand starting at position 46 of SEQ ID NO: 1888774
ugugaugucugugacacau

SEQ ID NO: 2555759 - RNA, 19 nt, Artificial Sequence
  Description of Artificial Sequence: Synthetic oligonucleotide
  Antisense strand to SEQ ID NO: 2555758
augugucacagacaucaca

SEQ ID NO: 2555760 - RNA, 19 nt, Artificial Sequence
  Description of Artificial Sequence: Synthetic oligonucleotide
  Sense strand starting at position 48 of SEQ ID NO: 1888774
ugaugucugugacacauuu

SEQ ID NO: 2555761 - RNA, 19 nt, Artificial Sequence
  Description of Artificial Sequence: Synthetic oligonucleotide
  Antisense strand to SEQ ID NO: 2555760
aaaugugucacagacauca

SEQ ID NO: 2555762 - RNA, 19 nt, Artificial Sequence
  Description of Artificial Sequence: Synthetic oligonucleotide
  Sense strand starting at position 136 of SEQ ID NO: 1888774
uuaggugaggaaugguauu

SEQ ID NO: 2555763 - RNA, 19 nt, Artificial Sequence
  Description of Artificial Sequence: Synthetic oligonucleotide
  Antisense strand to SEQ ID NO: 2555762
aauaccauuccucaccuaa

SEQ ID NO: 2555764 - RNA, 19 nt, Artificial Sequence
  Description of Artificial Sequence: Synthetic oligonucleotide
  Sense strand starting at position 178 of SEQ ID NO: 1888774
aauauuugucuauguguug

SEQ ID NO: 2555765 - RNA, 19 nt, Artificial Sequence
  Description of Artificial Sequence: Synthetic oligonucleotide
  Antisense strand to SEQ ID NO: 2555764
caacacauagacaaauauu

SEQ ID NO: 2555766 - RNA, 19 nt, Artificial Sequence
  Description of Artificial Sequence: Synthetic oligonucleotide
  Sense strand starting at position 179 of SEQ ID NO: 1888774
auauuugucuauguguuga

SEQ ID NO: 2555767 - RNA, 19 nt, Artificial Sequence
  Description of Artificial Sequence: Synthetic oligonucleotide
  Antisense strand to SEQ ID NO: 2555766
ucaacacauagacaaauau

SEQ ID NO: 2555768 - RNA, 19 nt, Artificial Sequence
  Description of Artificial Sequence: Synthetic oligonucleotide
  Sense strand starting at position 270 of SEQ ID NO: 1888774
ggagggagguuuggagaaa

SEQ ID NO: 2555769 - RNA, 19 nt, Artificial Sequence
  Description of Artificial Sequence: Synthetic oligonucleotide
  Antisense strand to SEQ ID NO: 2555768
uuucuccaaaccucccucc

SEQ ID NO: 2555770 - RNA, 19 nt, Artificial Sequence
  Description of Artificial Sequence: Synthetic oligonucleotide
  Sense strand starting at position 2008 of SEQ ID NO: 1888774
gggaauaaauccuggguaa

SEQ ID NO: 2555771 - RNA, 19 nt, Artificial Sequence
  Description of Artificial Sequence: Synthetic oligonucleotide
  Antisense strand to SEQ ID NO: 2555770
uuacccaggauuuauuccc

SEQ ID NO: 2555772 - RNA, 19 nt, Artificial Sequence
  Description of Artificial Sequence: Synthetic oligonucleotide
  Sense strand starting at position 2010 of SEQ ID NO: 1888774
gaauaaauccuggguaagc

SEQ ID NO: 2555773 - RNA, 19 nt, Artificial Sequence
  Description of Artificial Sequence: Synthetic oligonucleotide
  Antisense strand to SEQ ID NO: 2555772
gcuuacccaggauuuauuc

SEQ ID NO: 2555774 - RNA, 19 nt, Artificial Sequence
  Description of Artificial Sequence: Synthetic oligonucleotide
  Sense strand starting at position 2034 of SEQ ID NO: 1888774
cgacacugcuccuuacaga

SEQ ID NO: 2555775 - RNA, 19 nt, Artificial Sequence
  Description of Artificial Sequence: Synthetic oligonucleotide
  Antisense strand to SEQ ID NO: 2555774
ucuguaaggagcagugucg

SEQ ID NO: 2555776 - RNA, 19 nt, Artificial Sequence
  Description of Artificial Sequence: Synthetic oligonucleotide
  Sense strand starting at position 2059 of SEQ ID NO: 1888774
cucagagaacccugcauaa

SEQ ID NO: 2555777 - RNA, 19 nt, Artificial Sequence
  Description of Artificial Sequence: Synthetic oligonucleotide
  Antisense strand to SEQ ID NO: 2555776
uuaugcaggguucucugag

SEQ ID NO: 2555778 - RNA, 19 nt, Artificial Sequence
  Description of Artificial Sequence: Synthetic oligonucleotide
  Sense strand starting at position 2086 of SEQ ID NO: 1888774
guuuccauaugugcagaga

SEQ ID NO: 2555779 - RNA, 19 nt, Artificial Sequence
  Description of Artificial Sequence: Synthetic oligonucleotide
  Antisense strand to SEQ ID NO: 2555778
ucucugcacauauggaaac

SEQ ID NO: 2555780 - RNA, 19 nt, Artificial Sequence
  Description of Artificial Sequence: Synthetic oligonucleotide
  Sense strand starting at position 2087 of SEQ ID NO: 1888774
uuuccauaugugcagagaa

SEQ ID NO: 2555781 - RNA, 19 nt, Artificial Sequence
  Description of Artificial Sequence: Synthetic oligonucleotide
  Antisense strand to SEQ ID NO: 2555780
uucucugcacauauggaaa

SEQ ID NO: 2555782 - RNA, 19 nt, Artificial Sequence
  Description of Artificial Sequence: Synthetic oligonucleotide
  Sense strand starting at position 2089 of SEQ ID NO: 1888774
uccauaugugcagagaagu

SEQ ID NO: 2555783 - RNA, 19 nt, Artificial Sequence
  Description of Artificial Sequence: Synthetic oligonucleotide
  Antisense strand to SEQ ID NO: 2555782
acuucucugcacauaugga

SEQ ID NO: 2555784 - RNA, 19 nt, Artificial Sequence
  Description of Artificial Sequence: Synthetic oligonucleotide
  Sense strand starting at position 2105 of SEQ ID NO: 1888774
aguguaagccuaggagacu

SEQ ID NO: 2555785 - RNA, 19 nt, Artificial Sequence
  Description of Artificial Sequence: Synthetic oligonucleotide
  Antisense strand to SEQ ID NO: 2555784
agucuccuaggcuuacacu

SEQ ID NO: 2555786 - RNA, 19 nt, Artificial Sequence
  Description of Artificial Sequence: Synthetic oligonucleotide
  Sense strand starting at position 2306 of SEQ ID NO: 1888774
uuuguuaugugccaggaag

SEQ ID NO: 2555787 - RNA, 19 nt, Artificial Sequence
  Description of Artificial Sequence: Synthetic oligonucleotide
  Antisense strand to SEQ ID NO: 2555786
cuuccuggcacauaacaaa

SEQ ID NO: 2555788 - RNA, 19 nt, Artificial Sequence
  Description of Artificial Sequence: Synthetic oligonucleotide
  Sense strand starting at position 2363 of SEQ ID NO: 1888774
ugcugagucuaacaagcuu

SEQ ID NO: 2555789 - RNA, 19 nt, Artificial Sequence
  Description of Artificial Sequence: Synthetic oligonucleotide
  Antisense strand to SEQ ID NO: 2555788
aagcuuguuagacucagca

SEQ ID NO: 2555790 - RNA, 19 nt, Artificial Sequence
  Description of Artificial Sequence: Synthetic oligonucleotide
  Sense strand starting at position 2420 of SEQ ID NO: 1888774
ugcuguuauuucuguaguu

SEQ ID NO: 2555791 - RNA, 19 nt, Artificial Sequence
  Description of Artificial Sequence: Synthetic oligonucleotide
  Antisense strand to SEQ ID NO: 2555790
aacuacagaaauaacagca

SEQ ID NO: 2555792 - RNA, 19 nt, Artificial Sequence
  Description of Artificial Sequence: Synthetic oligonucleotide
  Sense strand starting at position 2421 of SEQ ID NO: 1888774
gcuguuauuucuguaguua

SEQ ID NO: 2555793 - RNA, 19 nt, Artificial Sequence
  Description of Artificial Sequence: Synthetic oligonucleotide
  Antisense strand to SEQ ID NO: 2555792
uaacuacagaaauaacagc

SEQ ID NO: 2555794 - RNA, 19 nt, Artificial Sequence
  Description of Artificial Sequence: Synthetic oligonucleotide
  Sense strand starting at position 2486 of SEQ ID NO: 1888774
ggagaagacuccuagaaac

SEQ ID NO: 2555795 - RNA, 19 nt, Artificial Sequence
  Description of Artificial Sequence: Synthetic oligonucleotide
  Antisense strand to SEQ ID NO: 2555794
guuucuaggagucuucucc

SEQ ID NO: 2555796 - RNA, 19 nt, Artificial Sequence
  Description of Artificial Sequence: Synthetic oligonucleotide
  Sense strand starting at position 2584 of SEQ ID NO: 1888774
ugcugaguccuguaaguac

SEQ ID NO: 2555797 - RNA, 19 nt, Artificial Sequence
  Description of Artificial Sequence: Synthetic oligonucleotide
  Antisense strand to SEQ ID NO: 2555796
guacuuacaggacucagca

SEQ ID NO: 2555798 - RNA, 19 nt, Artificial Sequence
  Description of Artificial Sequence: Synthetic oligonucleotide
  Sense strand starting at position 2591 of SEQ ID NO: 1888774
uccuguaaguacucuaggu

SEQ ID NO: 2555799 - RNA, 19 nt, Artificial Sequence
  Description of Artificial Sequence: Synthetic oligonucleotide
  Antisense strand to SEQ ID NO: 2555798
accuagaguacuuacagga

SEQ ID NO: 2555800 - RNA, 19 nt, Artificial Sequence
  Description of Artificial Sequence: Synthetic oligonucleotide
  Sense strand starting at position 2593 of SEQ ID NO: 1888774
cuguaaguacucuagguga

SEQ ID NO: 2555801 - RNA, 19 nt, Artificial Sequence
  Description of Artificial Sequence: Synthetic oligonucleotide
  Antisense strand to SEQ ID NO: 2555800
ucaccuagaguacuuacag

SEQ ID NO: 2555802 - RNA, 19 nt, Artificial Sequence
  Description of Artificial Sequence: Synthetic oligonucleotide
  Sense strand starting at position 2595 of SEQ ID NO: 1888774
guaaguacucuaggugaau

SEQ ID NO: 2555803 - RNA, 19 nt, Artificial Sequence
  Description of Artificial Sequence: Synthetic oligonucleotide
  Antisense strand to SEQ ID NO: 2555802
auucaccuagaguacuuac

SEQ ID NO: 2555804 - RNA, 19 nt, Artificial Sequence
  Description of Artificial Sequence: Synthetic oligonucleotide
  Sense strand starting at position 2596 of SEQ ID NO: 1888774
uaaguacucuaggugaauu

SEQ ID NO: 2555805 - RNA, 19 nt, Artificial Sequence
  Description of Artificial Sequence: Synthetic oligonucleotide
  Antisense strand to SEQ ID NO: 2555804
aauucaccuagaguacuua

SEQ ID NO: 2555806 - RNA, 19 nt, Artificial Sequence
  Description of Artificial Sequence: Synthetic oligonucleotide
  Sense strand starting at position 2608 of SEQ ID NO: 1888774
gugaauugagcuugagagu

SEQ ID NO: 2555807 - RNA, 19 nt, Artificial Sequence
  Description of Artificial Sequence: Synthetic oligonucleotide
  Antisense strand to SEQ ID NO: 2555806
acucucaagcucaauucac

SEQ ID NO: 2555808 - RNA, 19 nt, Artificial Sequence
  Description of Artificial Sequence: Synthetic oligonucleotide
  Sense strand starting at position 2611 of SEQ ID NO: 1888774
aauugagcuugagaguagu

SEQ ID NO: 2555809 - RNA, 19 nt, Artificial Sequence
  Description of Artificial Sequence: Synthetic oligonucleotide
  Antisense strand to SEQ ID NO: 2555808
acuacucucaagcucaauu

SEQ ID NO: 2555810 - RNA, 19 nt, Artificial Sequence
  Description of Artificial Sequence: Synthetic oligonucleotide
  Sense strand starting at position 2757 of SEQ ID NO: 1888774
gcagaaagaucucugacag

SEQ ID NO: 2555811 - RNA, 19 nt, Artificial Sequence
  Description of Artificial Sequence: Synthetic oligonucleotide
  Antisense strand to SEQ ID NO: 2555810
cugucagagaucuuucugc

SEQ ID NO: 2555812 - RNA, 19 nt, Artificial Sequence
  Description of Artificial Sequence: Synthetic oligonucleotide
  Sense strand starting at position 3019 of SEQ ID NO: 1888774
guuguggugggccagagau

SEQ ID NO: 2555813 - RNA, 19 nt, Artificial Sequence
  Description of Artificial Sequence: Synthetic oligonucleotide
  Antisense strand to SEQ ID NO: 2555812
aucucuggcccaccacaac

SEQ ID NO: 2555814 - RNA, 19 nt, Artificial Sequence
  Description of Artificial Sequence: Synthetic oligonucleotide
  Sense strand starting at position 3432 of SEQ ID NO: 1888774
gcaggacucuaagaaauga

SEQ ID NO: 2555815 - RNA, 19 nt, Artificial Sequence
  Description of Artificial Sequence: Synthetic oligonucleotide
  Antisense strand to SEQ ID NO: 2555814
ucauuucuuagaguccugc

SEQ ID NO: 2555816 - RNA, 19 nt, Artificial Sequence
  Description of Artificial Sequence: Synthetic oligonucleotide
  Sense strand starting at position 3443 of SEQ ID NO: 1888774
agaaaugacacgcagucau

SEQ ID NO: 2555817 - RNA, 19 nt, Artificial Sequence
  Description of Artificial Sequence: Synthetic oligonucleotide
  Antisense strand to SEQ ID NO: 2555816
augacugcgugucauuucu

SEQ ID NO: 2555818 - RNA, 19 nt, Artificial Sequence
  Description of Artificial Sequence: Synthetic oligonucleotide
  Sense strand starting at position 3451 of SEQ ID NO: 1888774
cacgcagucaugugaggaa

SEQ ID NO: 2555819 - RNA, 19 nt, Artificial Sequence
  Description of Artificial Sequence: Synthetic oligonucleotide
  Antisense strand to SEQ ID NO: 2555818
uuccucacaugacugcgug

SEQ ID NO: 2555820 - RNA, 19 nt, Artificial Sequence
  Description of Artificial Sequence: Synthetic oligonucleotide
  Sense strand starting at position 3454 of SEQ ID NO: 1888774
gcagucaugugaggaagga

SEQ ID NO: 2555821 - RNA, 19 nt, Artificial Sequence
  Description of Artificial Sequence: Synthetic oligonucleotide
  Antisense strand to SEQ ID NO: 2555820
uccuuccucacaugacugc

SEQ ID NO: 2555822 - RNA, 19 nt, Artificial Sequence
  Description of Artificial Sequence: Synthetic oligonucleotide
  Sense strand starting at position 3550 of SEQ ID NO: 1888774
guugcauugagaugccgaa

SEQ ID NO: 2555823 - RNA, 19 nt, Artificial Sequence
  Description of Artificial Sequence: Synthetic oligonucleotide
  Antisense strand to SEQ ID NO: 2555822
uucggcaucucaaugcaac

SEQ ID NO: 2555824 - RNA, 19 nt, Artificial Sequence
  Description of Artificial Sequence: Synthetic oligonucleotide
  Sense strand starting at position 3705 of SEQ ID NO: 1888774
cgguucuggcgcuaaggaa

SEQ ID NO: 2555825 - RNA, 19 nt, Artificial Sequence
  Description of Artificial Sequence: Synthetic oligonucleotide
  Antisense strand to SEQ ID NO: 2555824
uuccuuagcgccagaaccg

SEQ ID NO: 2555826 - RNA, 19 nt, Artificial Sequence
  Description of Artificial Sequence: Synthetic oligonucleotide
  Sense strand starting at position 3968 of SEQ ID NO: 1888774
gagcaagugacagagucau

SEQ ID NO: 2555827 - RNA, 19 nt, Artificial Sequence
  Description of Artificial Sequence: Synthetic oligonucleotide
  Antisense strand to SEQ ID NO: 2555826
augacucugucacuugcuc

SEQ ID NO: 2555828 - RNA, 19 nt, Artificial Sequence
  Description of Artificial Sequence: Synthetic oligonucleotide
  Sense strand starting at position 3974 of SEQ ID NO: 1888774
gugacagagucauggagga

SEQ ID NO: 2555829 - RNA, 19 nt, Artificial Sequence
  Description of Artificial Sequence: Synthetic oligonucleotide
  Antisense strand to SEQ ID NO: 2555828
uccuccaugacucugucac

SEQ ID NO: 2555830 - RNA, 19 nt, Artificial Sequence
  Description of Artificial Sequence: Synthetic oligonucleotide
  Sense strand starting at position 2313 of SEQ ID NO: 1888775
cgagauuucuuagaaggaa

SEQ ID NO: 2555831 - RNA, 19 nt, Artificial Sequence
  Description of Artificial Sequence: Synthetic oligonucleotide
  Antisense strand to SEQ ID NO: 2555830
uuccuucuaagaaaucucg

SEQ ID NO: 2555832 - RNA, 19 nt, Artificial Sequence
  Description of Artificial Sequence: Synthetic oligonucleotide
  Sense strand starting at position 2326 of SEQ ID NO: 1888775
aaggaauuguuacuuauug

SEQ ID NO: 2555833 - RNA, 19 nt, Artificial Sequence
  Description of Artificial Sequence: Synthetic oligonucleotide
  Antisense strand to SEQ ID NO: 2555832
caauaaguaacaauuccuu

SEQ ID NO: 2555834 - RNA, 19 nt, Artificial Sequence
  Description of Artificial Sequence: Synthetic oligonucleotide
  Sense strand starting at position 2327 of SEQ ID NO: 1888775
aggaauuguuacuuauugu

SEQ ID NO: 2555835 - RNA, 19 nt, Artificial Sequence
  Description of Artificial Sequence: Synthetic oligonucleotide
  Antisense strand to SEQ ID NO: 2555834
acaauaaguaacaauuccu

SEQ ID NO: 2555836 - RNA, 19 nt, Artificial Sequence
  Description of Artificial Sequence: Synthetic oligonucleotide
  Sense strand starting at position 2333 of SEQ ID NO: 1888775
uguuacuuauuguucugaa

SEQ ID NO: 2555837 - RNA, 19 nt, Artificial Sequence
  Description of Artificial Sequence: Synthetic oligonucleotide
  Antisense strand to SEQ ID NO: 2555836
uucagaacaauaaguaaca

SEQ ID NO: 2555838 - RNA, 19 nt, Artificial Sequence
  Description of Artificial Sequence: Synthetic oligonucleotide
  Sense strand starting at position 2334 of SEQ ID NO: 1888775
guuacuuauuguucugaag

SEQ ID NO: 2555839 - RNA, 19 nt, Artificial Sequence
  Description of Artificial Sequence: Synthetic oligonucleotide
  Antisense strand to SEQ ID NO: 2555838
cuucagaacaauaaguaac

SEQ ID NO: 2555840 - RNA, 19 nt, Artificial Sequence
  Description of Artificial Sequence: Synthetic oligonucleotide
  Sense strand starting at position 2341 of SEQ ID NO: 1888775
auuguucugaagugaaagu

SEQ ID NO: 2555841 - RNA, 19 nt, Artificial Sequence
  Description of Artificial Sequence: Synthetic oligonucleotide
  Antisense strand to SEQ ID NO: 2555840
acuuucacuucagaacaau

SEQ ID NO: 2555842 - RNA, 19 nt, Artificial Sequence
  Description of Artificial Sequence: Synthetic oligonucleotide
  Sense strand starting at position 2352 of SEQ ID NO: 1888775
gugaaagucuggucugauu

SEQ ID NO: 2555843 - RNA, 19 nt, Artificial Sequence
  Description of Artificial Sequence: Synthetic oligonucleotide
  Antisense strand to SEQ ID NO: 2555842
aaucagaccagacuuucac

SEQ ID NO: 2555844 - RNA, 19 nt, Artificial Sequence
  Description of Artificial Sequence: Synthetic oligonucleotide
  Sense strand starting at position 2418 of SEQ ID NO: 1888775
cagcaauucucagcguaaa

SEQ ID NO: 2555845 - RNA, 19 nt, Artificial Sequence
  Description of Artificial Sequence: Synthetic oligonucleotide
  Antisense strand to SEQ ID NO: 2555844
uuuacgcugagaauugcug

SEQ ID NO: 2555846 - RNA, 19 nt, Artificial Sequence
  Description of Artificial Sequence: Synthetic oligonucleotide
  Sense strand starting at position 2419 of SEQ ID NO: 1888775
agcaauucucagcguaaau

SEQ ID NO: 2555847 - RNA, 19 nt, Artificial Sequence
  Description of Artificial Sequence: Synthetic oligonucleotide
  Antisense strand to SEQ ID NO: 2555846
auuuacgcugagaauugcu

SEQ ID NO: 2555848 - RNA, 19 nt, Artificial Sequence
  Description of Artificial Sequence: Synthetic oligonucleotide
  Sense strand starting at position 2431 of SEQ ID NO: 1888775
cguaaauucugaucacagg

SEQ ID NO: 2555849 - RNA, 19 nt, Artificial Sequence
  Description of Artificial Sequence: Synthetic oligonucleotide
  Antisense strand to SEQ ID NO: 2555848
ccugugaucagaauuuacg

SEQ ID NO: 2555850 - RNA, 19 nt, Artificial Sequence
  Description of Artificial Sequence: Synthetic oligonucleotide
  Sense strand starting at position 2468 of SEQ ID NO: 1888775
guugcauagcuacaacauu

SEQ ID NO: 2555851 - RNA, 19 nt, Artificial Sequence
  Description of Artificial Sequence: Synthetic oligonucleotide
  Antisense strand to SEQ ID NO: 2555850
aauguuguagcuaugcaac

SEQ ID NO: 2555852 - RNA, 19 nt, Artificial Sequence
  Description of Artificial Sequence: Synthetic oligonucleotide
  Sense strand starting at position 2539 of SEQ ID NO: 1888775
uagagaguuuaguuuaaga

SEQ ID NO: 2555853 - RNA, 19 nt, Artificial Sequence
  Description of Artificial Sequence: Synthetic oligonucleotide
  Antisense strand to SEQ ID NO: 2555852
ucuuaaacuaaacucucua

SEQ ID NO: 2555854 - RNA, 19 nt, Artificial Sequence
  Description of Artificial Sequence: Synthetic oligonucleotide
  Sense strand starting at position 2582 of SEQ ID NO: 1888775
aggugacaauguguaguaa

SEQ ID NO: 2555855 - RNA, 19 nt, Artificial Sequence
  Description of Artificial Sequence: Synthetic oligonucleotide
  Antisense strand to SEQ ID NO: 2555854
uuacuacacauugucaccu

SEQ ID NO: 2555856 - RNA, 19 nt, Artificial Sequence
  Description of Artificial Sequence: Synthetic oligonucleotide
  Sense strand starting at position 2583 of SEQ ID NO: 1888775
ggugacaauguguaguaaa

SEQ ID NO: 2555857 - RNA, 19 nt, Artificial Sequence
  Description of Artificial Sequence: Synthetic oligonucleotide
  Antisense strand to SEQ ID NO: 2555856
uuuacuacacauugucacc

SEQ ID NO: 2555858 - RNA, 19 nt, Artificial Sequence
  Description of Artificial Sequence: Synthetic oligonucleotide
  Sense strand starting at position 2591 of SEQ ID NO: 1888775
uguguaguaaaccaugaua

SEQ ID NO: 2555859 - RNA, 19 nt, Artificial Sequence
  Description of Artificial Sequence: Synthetic oligonucleotide
  Antisense strand to SEQ ID NO: 2555858
uaucaugguuuacuacaca

SEQ ID NO: 2555860 - RNA, 19 nt, Artificial Sequence
  Description of Artificial Sequence: Synthetic oligonucleotide
  Sense strand starting at position 2593 of SEQ ID NO: 1888775
uguaguaaaccaugauaga

SEQ ID NO: 2555861 - RNA, 19 nt, Artificial Sequence
  Description of Artificial Sequence: Synthetic oligonucleotide
  Antisense strand to SEQ ID NO: 2555860
ucuaucaugguuuacuaca

SEQ ID NO: 2555862 - RNA, 19 nt, Artificial Sequence
  Description of Artificial Sequence: Synthetic oligonucleotide
  Sense strand starting at position 2753 of SEQ ID NO: 1888775
ggcacuguaucagcauaua

SEQ ID NO: 2555863 - RNA, 19 nt, Artificial Sequence
  Description of Artificial Sequence: Synthetic oligonucleotide
  Antisense strand to SEQ ID NO: 2555862
uauaugcugauacagugcc

SEQ ID NO: 2555864 - RNA, 19 nt, Artificial Sequence
  Description of Artificial Sequence: Synthetic oligonucleotide
  Sense strand starting at position 2764 of SEQ ID NO: 1888775
agcauauaacauggcuuau

SEQ ID NO: 2555865 - RNA, 19 nt, Artificial Sequence
  Description of Artificial Sequence: Synthetic oligonucleotide
  Antisense strand to SEQ ID NO: 2555864
auaagccauguuauaugcu

SEQ ID NO: 2555866 - RNA, 19 nt, Artificial Sequence
  Description of Artificial Sequence: Synthetic oligonucleotide
  Sense strand starting at position 2775 of SEQ ID NO: 1888775
uggcuuaucuuacucaguu

SEQ ID NO: 2555867 - RNA, 19 nt, Artificial Sequence
  Description of Artificial Sequence: Synthetic oligonucleotide
  Antisense strand to SEQ ID NO: 2555866
aacugaguaagauaagcca

SEQ ID NO: 2555868 - RNA, 19 nt, Artificial Sequence
  Description of Artificial Sequence: Synthetic oligonucleotide
  Sense strand starting at position 2776 of SEQ ID NO: 1888775
ggcuuaucuuacucaguuu

SEQ ID NO: 2555869 - RNA, 19 nt, Artificial Sequence
  Description of Artificial Sequence: Synthetic oligonucleotide
  Antisense strand to SEQ ID NO: 2555868
aaacugaguaagauaagcc

SEQ ID NO: 2555870 - RNA, 19 nt, Artificial Sequence
  Description of Artificial Sequence: Synthetic oligonucleotide
  Sense strand starting at position 2932 of SEQ ID NO: 1888775
gggugaagggcauaugugu

SEQ ID NO: 2555871 - RNA, 19 nt, Artificial Sequence
  Description of Artificial Sequence: Synthetic oligonucleotide
  Antisense strand to SEQ ID NO: 2555870
acacauaugcccuucaccc

SEQ ID NO: 2555872 - RNA, 19 nt, Artificial Sequence
  Description of Artificial Sequence: Synthetic oligonucleotide
  Sense strand starting at position 2941 of SEQ ID NO: 1888775
gcauauguguugcuccaag

SEQ ID NO: 2555873 - RNA, 19 nt, Artificial Sequence
  Description of Artificial Sequence: Synthetic oligonucleotide
  Antisense strand to SEQ ID NO: 2555872
cuuggagcaacacauaugc

SEQ ID NO: 2555874 - RNA, 19 nt, Artificial Sequence
  Description of Artificial Sequence: Synthetic oligonucleotide
  Sense strand starting at position 2955 of SEQ ID NO: 1888775
ccaagugugucaguauaag

SEQ ID NO: 2555875 - RNA, 19 nt, Artificial Sequence
  Description of Artificial Sequence: Synthetic oligonucleotide
  Antisense strand to SEQ ID NO: 2555874
cuuauacugacacacuugg

SEQ ID NO: 2555876 - RNA, 19 nt, Artificial Sequence
  Description of Artificial Sequence: Synthetic oligonucleotide
  Sense strand starting at position 2973 of SEQ ID NO: 1888775
gagagauuagggugagguu

SEQ ID NO: 2555877 - RNA, 19 nt, Artificial Sequence
  Description of Artificial Sequence: Synthetic oligonucleotide
  Antisense strand to SEQ ID NO: 2555876
aaccucacccuaaucucuc

SEQ ID NO: 2555878 - RNA, 19 nt, Artificial Sequence
  Description of Artificial Sequence: Synthetic oligonucleotide
  Sense strand starting at position 3004 of SEQ ID NO: 1888775
ugggcuucagcugaguaau

SEQ ID NO: 2555879 - RNA, 19 nt, Artificial Sequence
  Description of Artificial Sequence: Synthetic oligonucleotide
  Antisense strand to SEQ ID NO: 2555878
auuacucagcugaagccca

SEQ ID NO: 2555880 - RNA, 19 nt, Artificial Sequence
  Description of Artificial Sequence: Synthetic oligonucleotide
  Sense strand starting at position 3016 of SEQ ID NO: 1888775
gaguaauucuaaggaggga

SEQ ID NO: 2555881 - RNA, 19 nt, Artificial Sequence
  Description of Artificial Sequence: Synthetic oligonucleotide
  Antisense strand to SEQ ID NO: 2555880
ucccuccuuagaauuacuc

SEQ ID NO: 2555882 - RNA, 19 nt, Artificial Sequence
  Description of Artificial Sequence: Synthetic oligonucleotide
  Sense strand starting at position 3049 of SEQ ID NO: 1888775
gcaguuuaguaauugagua

SEQ ID NO: 2555883 - RNA, 19 nt, Artificial Sequence
  Description of Artificial Sequence: Synthetic oligonucleotide
  Antisense strand to SEQ ID NO: 2555882
uacucaauuacuaaacugc

SEQ ID NO: 2555884 - RNA, 19 nt, Artificial Sequence
  Description of Artificial Sequence: Synthetic oligonucleotide
  Sense strand starting at position 3051 of SEQ ID NO: 1888775
aguuuaguaauugaguauc

SEQ ID NO: 2555885 - RNA, 19 nt, Artificial Sequence
  Description of Artificial Sequence: Synthetic oligonucleotide
  Antisense strand to SEQ ID NO: 2555884
gauacucaauuacuaaacu

SEQ ID NO: 2555886 - RNA, 19 nt, Artificial Sequence
  Description of Artificial Sequence: Synthetic oligonucleotide
  Sense strand starting at position 3054 of SEQ ID NO: 1888775
uuaguaauugaguaucuca

SEQ ID NO: 2555887 - RNA, 19 nt, Artificial Sequence
  Description of Artificial Sequence: Synthetic oligonucleotide
  Antisense strand to SEQ ID NO: 2555886
ugagauacucaauuacuaa

SEQ ID NO: 2555888 - RNA, 19 nt, Artificial Sequence
  Description of Artificial Sequence: Synthetic oligonucleotide
  Sense strand starting at position 3057 of SEQ ID NO: 1888775
guaauugaguaucucagaa

SEQ ID NO: 2555889 - RNA, 19 nt, Artificial Sequence
  Description of Artificial Sequence: Synthetic oligonucleotide
  Antisense strand to SEQ ID NO: 2555888
uucugagauacucaauuac

SEQ ID NO: 2555890 - RNA, 19 nt, Artificial Sequence
  Description of Artificial Sequence: Synthetic oligonucleotide
  Sense strand starting at position 3210 of SEQ ID NO: 1888775
ggccuuguauguguacauu

SEQ ID NO: 2555891 - RNA, 19 nt, Artificial Sequence
  Description of Artificial Sequence: Synthetic oligonucleotide
  Antisense strand to SEQ ID NO: 2555890
aauguacacauacaaggcc

SEQ ID NO: 2555892 - RNA, 19 nt, Artificial Sequence
  Description of Artificial Sequence: Synthetic oligonucleotide
  Sense strand starting at position 3213 of SEQ ID NO: 1888775
cuuguauguguacauuaca

SEQ ID NO: 2555893 - RNA, 19 nt, Artificial Sequence
  Description of Artificial Sequence: Synthetic oligonucleotide
  Antisense strand to SEQ ID NO: 2555892
uguaauguacacauacaag

SEQ ID NO: 2555894 - RNA, 19 nt, Artificial Sequence
  Description of Artificial Sequence: Synthetic oligonucleotide
  Sense strand starting at position 3226 of SEQ ID NO: 1888775
auuacagucugauuauuag

SEQ ID NO: 2555895 - RNA, 19 nt, Artificial Sequence
  Description of Artificial Sequence: Synthetic oligonucleotide
  Antisense strand to SEQ ID NO: 2555894
cuaauaaucagacuguaau

SEQ ID NO: 2555896 - RNA, 19 nt, Artificial Sequence
  Description of Artificial Sequence: Synthetic oligonucleotide
  Sense strand starting at position 3232 of SEQ ID NO: 1888775
gucugauuauuaguuggga

SEQ ID NO: 2555897 - RNA, 19 nt, Artificial Sequence
  Description of Artificial Sequence: Synthetic oligonucleotide
  Antisense strand to SEQ ID NO: 2555896
ucccaacuaauaaucagac

SEQ ID NO: 2555898 - RNA, 19 nt, Artificial Sequence
  Description of Artificial Sequence: Synthetic oligonucleotide
  Sense strand starting at position 3233 of SEQ ID NO: 1888775
ucugauuauuaguugggau

SEQ ID NO: 2555899 - RNA, 19 nt, Artificial Sequence
  Description of Artificial Sequence: Synthetic oligonucleotide
  Antisense strand to SEQ ID NO: 2555898
aucccaacuaauaaucaga

SEQ ID NO: 2555900 - RNA, 19 nt, Artificial Sequence
  Description of Artificial Sequence: Synthetic oligonucleotide
  Sense strand starting at position 3234 of SEQ ID NO: 1888775
cugauuauuaguugggaug

SEQ ID NO: 2555901 - RNA, 19 nt, Artificial Sequence
  Description of Artificial Sequence: Synthetic oligonucleotide
  Antisense strand to SEQ ID NO: 2555900
caucccaacuaauaaucag

SEQ ID NO: 2555902 - RNA, 19 nt, Artificial Sequence
  Description of Artificial Sequence: Synthetic oligonucleotide
  Sense strand starting at position 3235 of SEQ ID NO: 1888775
ugauuauuaguugggauga

SEQ ID NO: 2555903 - RNA, 19 nt, Artificial Sequence
  Description of Artificial Sequence: Synthetic oligonucleotide
  Antisense strand to SEQ ID NO: 2555902
ucaucccaacuaauaauca

SEQ ID NO: 2555904 - RNA, 19 nt, Artificial Sequence
  Description of Artificial Sequence: Synthetic oligonucleotide
  Sense strand starting at position 3309 of SEQ ID NO: 1888775
ucaccuagauuauugugau

SEQ ID NO: 2555905 - RNA, 19 nt, Artificial Sequence
  Description of Artificial Sequence: Synthetic oligonucleotide
  Antisense strand to SEQ ID NO: 2555904
aucacaauaaucuagguga

SEQ ID NO: 2555906 - RNA, 19 nt, Artificial Sequence
  Description of Artificial Sequence: Synthetic oligonucleotide
  Sense strand starting at position 3437 of SEQ ID NO: 1888775
guugucucuacagaaugua

SEQ ID NO: 2555907 - RNA, 19 nt, Artificial Sequence
  Description of Artificial Sequence: Synthetic oligonucleotide
  Antisense strand to SEQ ID NO: 2555906
uacauucuguagagacaac

SEQ ID NO: 2555908 - RNA, 19 nt, Artificial Sequence
  Description of Artificial Sequence: Synthetic oligonucleotide
  Sense strand starting at position 3526 of SEQ ID NO: 1888775
auuccuugauauucucgaa

SEQ ID NO: 2555909 - RNA, 19 nt, Artificial Sequence
  Description of Artificial Sequence: Synthetic oligonucleotide
  Antisense strand to SEQ ID NO: 2555908
uucgagaauaucaaggaau

SEQ ID NO: 2555910 - RNA, 19 nt, Artificial Sequence
  Description of Artificial Sequence: Synthetic oligonucleotide
  Sense strand starting at position 620 of SEQ ID NO: 1888776
agauuagucaagugaagca

SEQ ID NO: 2555911 - RNA, 19 nt, Artificial Sequence
  Description of Artificial Sequence: Synthetic oligonucleotide
  Antisense strand to SEQ ID NO: 2555910
ugcuucacuugacuaaucu

SEQ ID NO: 2555912 - RNA, 19 nt, Artificial Sequence
  Description of Artificial Sequence: Synthetic oligonucleotide
  Sense strand starting at position 736 of SEQ ID NO: 1888776
ggcagaaugcgacagaaga

SEQ ID NO: 2555913 - RNA, 19 nt, Artificial Sequence
  Description of Artificial Sequence: Synthetic oligonucleotide
  Antisense strand to SEQ ID NO: 2555912
ucuucugucgcauucugcc

SEQ ID NO: 2555914 - RNA, 19 nt, Artificial Sequence
  Description of Artificial Sequence: Synthetic oligonucleotide
  Sense strand starting at position 838 of SEQ ID NO: 1888776
ugaagaaagccaggaugua

SEQ ID NO: 2555915 - RNA, 19 nt, Artificial Sequence
  Description of Artificial Sequence: Synthetic oligonucleotide
  Antisense strand to SEQ ID NO: 2555914
uacauccuggcuuucuuca

SEQ ID NO: 2555916 - RNA, 19 nt, Artificial Sequence
  Description of Artificial Sequence: Synthetic oligonucleotide
  Sense strand starting at position 847 of SEQ ID NO: 1888776
ccaggauguacgggaguuu

SEQ ID NO: 2555917 - RNA, 19 nt, Artificial Sequence
  Description of Artificial Sequence: Synthetic oligonucleotide
  Antisense strand to SEQ ID NO: 2555916
aaacucccguacauccugg

SEQ ID NO: 2555918 - RNA, 19 nt, Artificial Sequence
  Description of Artificial Sequence: Synthetic oligonucleotide
  Sense strand starting at position 859 of SEQ ID NO: 1888776
ggaguuuguuucucacuga

SEQ ID NO: 2555919 - RNA, 19 nt, Artificial Sequence
  Description of Artificial Sequence: Synthetic oligonucleotide
  Antisense strand to SEQ ID NO: 2555918
ucagugagaaacaaacucc

SEQ ID NO: 2555920 - RNA, 19 nt, Artificial Sequence
  Description of Artificial Sequence: Synthetic oligonucleotide
  Sense strand starting at position 860 of SEQ ID NO: 1888776
gaguuuguuucucacugag

SEQ ID NO: 2555921 - RNA, 19 nt, Artificial Sequence
  Description of Artificial Sequence: Synthetic oligonucleotide
  Antisense strand to SEQ ID NO: 2555920
cucagugagaaacaaacuc

SEQ ID NO: 2555922 - RNA, 19 nt, Artificial Sequence
  Description of Artificial Sequence: Synthetic oligonucleotide
  Sense strand starting at position 862 of SEQ ID NO: 1888776
guuuguuucucacugagca

SEQ ID NO: 2555923 - RNA, 19 nt, Artificial Sequence
  Description of Artificial Sequence: Synthetic oligonucleotide
  Antisense strand to SEQ ID NO: 2555922
ugcucagugagaaacaaac

SEQ ID NO: 2555924 - RNA, 19 nt, Artificial Sequence
  Description of Artificial Sequence: Synthetic oligonucleotide
  Sense strand starting at position 882 of SEQ ID NO: 1888776
ggguuccagugguuauagu

SEQ ID NO: 2555925 - RNA, 19 nt, Artificial Sequence
  Description of Artificial Sequence: Synthetic oligonucleotide
  Antisense strand to SEQ ID NO: 2555924
acuauaaccacuggaaccc

SEQ ID NO: 2555926 - RNA, 19 nt, Artificial Sequence
  Description of Artificial Sequence: Synthetic oligonucleotide
  Sense strand starting at position 1000 of SEQ ID NO: 1888776
uuuccaaucuugugaaggu

SEQ ID NO: 2555927 - RNA, 19 nt, Artificial Sequence
  Description of Artificial Sequence: Synthetic oligonucleotide
  Antisense strand to SEQ ID NO: 2555926
accuucacaagauuggaaa

SEQ ID NO: 2555928 - RNA, 19 nt, Artificial Sequence
  Description of Artificial Sequence: Synthetic oligonucleotide
  Sense strand starting at position 1026 of SEQ ID NO: 1888776
ccuccuguauugucauuau

SEQ ID NO: 2555929 - RNA, 19 nt, Artificial Sequence
  Description of Artificial Sequence: Synthetic oligonucleotide
  Antisense strand to SEQ ID NO: 2555928
auaaugacaauacaggagg

SEQ ID NO: 2555930 - RNA, 19 nt, Artificial Sequence
  Description of Artificial Sequence: Synthetic oligonucleotide
  Sense strand starting at position 1029 of SEQ ID NO: 1888776
ccuguauugucauuauuuc

SEQ ID NO: 2555931 - RNA, 19 nt, Artificial Sequence
  Description of Artificial Sequence: Synthetic oligonucleotide
  Antisense strand to SEQ ID NO: 2555930
gaaauaaugacaauacagg

SEQ ID NO: 2555932 - RNA, 19 nt, Artificial Sequence
  Description of Artificial Sequence: Synthetic oligonucleotide
  Sense strand starting at position 1131 of SEQ ID NO: 1888776
acacaugucugccaacgaa

SEQ ID NO: 2555933 - RNA, 19 nt, Artificial Sequence
  Description of Artificial Sequence: Synthetic oligonucleotide
  Antisense strand to SEQ ID NO: 2555932
uucguuggcagacaugugu

SEQ ID NO: 2555934 - RNA, 19 nt, Artificial Sequence
  Description of Artificial Sequence: Synthetic oligonucleotide
  Sense strand starting at position 2875 of SEQ ID NO: 1888776
aaacucacgugaucugauu

SEQ ID NO: 2555935 - RNA, 19 nt, Artificial Sequence
  Description of Artificial Sequence: Synthetic oligonucleotide
  Antisense strand to SEQ ID NO: 2555934
aaucagaucacgugaguuu

SEQ ID NO: 2555936 - RNA, 19 nt, Artificial Sequence
  Description of Artificial Sequence: Synthetic oligonucleotide
  Sense strand starting at position 2881 of SEQ ID NO: 1888776
acgugaucugauuggcaug

SEQ ID NO: 2555937 - RNA, 19 nt, Artificial Sequence
  Description of Artificial Sequence: Synthetic oligonucleotide
  Antisense strand to SEQ ID NO: 2555936
caugccaaucagaucacgu

SEQ ID NO: 2555938 - RNA, 19 nt, Artificial Sequence
  Description of Artificial Sequence: Synthetic oligonucleotide
  Sense strand starting at position 2892 of SEQ ID NO: 1888776
uuggcaugucuccaagcaa

SEQ ID NO: 2555939 - RNA, 19 nt, Artificial Sequence
  Description of Artificial Sequence: Synthetic oligonucleotide
  Antisense strand to SEQ ID NO: 2555938
uugcuuggagacaugccaa

SEQ ID NO: 2555940 - RNA, 19 nt, Artificial Sequence
  Description of Artificial Sequence: Synthetic oligonucleotide
  Sense strand starting at position 2914 of SEQ ID NO: 1888776
cgcucuagcccuuaugaaa

SEQ ID NO: 2555941 - RNA, 19 nt, Artificial Sequence
  Description of Artificial Sequence: Synthetic oligonucleotide
  Antisense strand to SEQ ID NO: 2555940
uuucauaagggcuagagcg

SEQ ID NO: 2555942 - RNA, 19 nt, Artificial Sequence
  Description of Artificial Sequence: Synthetic oligonucleotide
  Sense strand starting at position 2926 of SEQ ID NO: 1888776
uaugaaaugugcucucugu

SEQ ID NO: 2555943 - RNA, 19 nt, Artificial Sequence
  Description of Artificial Sequence: Synthetic oligonucleotide
  Antisense strand to SEQ ID NO: 2555942
acagagagcacauuucaua

SEQ ID NO: 2555944 - RNA, 19 nt, Artificial Sequence
  Description of Artificial Sequence: Synthetic oligonucleotide
  Sense strand starting at position 2932 of SEQ ID NO: 1888776
augugcucucuguagcuaa

SEQ ID NO: 2555945 - RNA, 19 nt, Artificial Sequence
  Description of Artificial Sequence: Synthetic oligonucleotide
  Antisense strand to SEQ ID NO: 2555944
uuagcuacagagagcacau

SEQ ID NO: 2555946 - RNA, 19 nt, Artificial Sequence
  Description of Artificial Sequence: Synthetic oligonucleotide
  Sense strand starting at position 2955 of SEQ ID NO: 1888776
uuguuacaaugucuuaagu

SEQ ID NO: 2555947 - RNA, 19 nt, Artificial Sequence
  Description of Artificial Sequence: Synthetic oligonucleotide
  Antisense strand to SEQ ID NO: 2555946
acuuaagacauuguaacaa

SEQ ID NO: 2555948 - RNA, 19 nt, Artificial Sequence
  Description of Artificial Sequence: Synthetic oligonucleotide
  Sense strand starting at position 2957 of SEQ ID NO: 1888776
guuacaaugucuuaaguca

SEQ ID NO: 2555949 - RNA, 19 nt, Artificial Sequence
  Description of Artificial Sequence: Synthetic oligonucleotide
  Antisense strand to SEQ ID NO: 2555948
ugacuuaagacauuguaac

SEQ ID NO: 2555950 - RNA, 19 nt, Artificial Sequence
  Description of Artificial Sequence: Synthetic oligonucleotide
  Sense strand starting at position 2964 of SEQ ID NO: 1888776
ugucuuaagucauggccca

SEQ ID NO: 2555951 - RNA, 19 nt, Artificial Sequence
  Description of Artificial Sequence: Synthetic oligonucleotide
  Antisense strand to SEQ ID NO: 2555950
ugggccaugacuuaagaca

SEQ ID NO: 2555952 - RNA, 19 nt, Artificial Sequence
  Description of Artificial Sequence: Synthetic oligonucleotide
  Sense strand starting at position 2965 of SEQ ID NO: 1888776
gucuuaagucauggcccaa

SEQ ID NO: 2555953 - RNA, 19 nt, Artificial Sequence
  Description of Artificial Sequence: Synthetic oligonucleotide
  Antisense strand to SEQ ID NO: 2555952
uugggccaugacuuaagac

SEQ ID NO: 2555954 - RNA, 19 nt, Artificial Sequence
  Description of Artificial Sequence: Synthetic oligonucleotide
  Sense strand starting at position 3010 of SEQ ID NO: 1888776
gucaaauagcucugcauuc

SEQ ID NO: 2555955 - RNA, 19 nt, Artificial Sequence
  Description of Artificial Sequence: Synthetic oligonucleotide
  Antisense strand to SEQ ID NO: 2555954
gaaugcagagcuauuugac

SEQ ID NO: 2555956 - RNA, 19 nt, Artificial Sequence
  Description of Artificial Sequence: Synthetic oligonucleotide
  Sense strand starting at position 3083 of SEQ ID NO: 1888776
guagaaaugucgcaagguu

SEQ ID NO: 2555957 - RNA, 19 nt, Artificial Sequence
  Description of Artificial Sequence: Synthetic oligonucleotide
  Antisense strand to SEQ ID NO: 2555956
aaccuugcgacauuucuac

SEQ ID NO: 2555958 - RNA, 19 nt, Artificial Sequence
  Description of Artificial Sequence: Synthetic oligonucleotide
  Sense strand starting at position 3116 of SEQ ID NO: 1888776
aggcguuguucuguagaag

SEQ ID NO: 2555959 - RNA, 19 nt, Artificial Sequence
  Description of Artificial Sequence: Synthetic oligonucleotide
  Antisense strand to SEQ ID NO: 2555958
cuucuacagaacaacgccu

SEQ ID NO: 2555960 - RNA, 19 nt, Artificial Sequence
  Description of Artificial Sequence: Synthetic oligonucleotide
  Sense strand starting at position 3141 of SEQ ID NO: 1888776
gcugguuacuuguggaagu

SEQ ID NO: 2555961 - RNA, 19 nt, Artificial Sequence
  Description of Artificial Sequence: Synthetic oligonucleotide
  Antisense strand to SEQ ID NO: 2555960
acuuccacaaguaaccagc

SEQ ID NO: 2555962 - RNA, 19 nt, Artificial Sequence
  Description of Artificial Sequence: Synthetic oligonucleotide
  Sense strand starting at position 3189 of SEQ ID NO: 1888776
gucagaaaguuugguaaau

SEQ ID NO: 2555963 - RNA, 19 nt, Artificial Sequence
  Description of Artificial Sequence: Synthetic oligonucleotide
  Antisense strand to SEQ ID NO: 2555962
auuuaccaaacuuucugac

SEQ ID NO: 2555964 - RNA, 19 nt, Artificial Sequence
  Description of Artificial Sequence: Synthetic oligonucleotide
  Sense strand starting at position 3190 of SEQ ID NO: 1888776
ucagaaaguuugguaaauu

SEQ ID NO: 2555965 - RNA, 19 nt, Artificial Sequence
  Description of Artificial Sequence: Synthetic oligonucleotide
  Antisense strand to SEQ ID NO: 2555964
aauuuaccaaacuuucuga

SEQ ID NO: 2555966 - RNA, 19 nt, Artificial Sequence
  Description of Artificial Sequence: Synthetic oligonucleotide
  Sense strand starting at position 3191 of SEQ ID NO: 1888776
cagaaaguuugguaaauuc

SEQ ID NO: 2555967 - RNA, 19 nt, Artificial Sequence
  Description of Artificial Sequence: Synthetic oligonucleotide
  Antisense strand to SEQ ID NO: 2555966
gaauuuaccaaacuuucug

SEQ ID NO: 2555968 - RNA, 19 nt, Artificial Sequence
  Description of Artificial Sequence: Synthetic oligonucleotide
  Sense strand starting at position 3198 of SEQ ID NO: 1888776
uuugguaaauucugugaca

SEQ ID NO: 2555969 - RNA, 19 nt, Artificial Sequence
  Description of Artificial Sequence: Synthetic oligonucleotide
  Antisense strand to SEQ ID NO: 2555968
ugucacagaauuuaccaaa

SEQ ID NO: 2555970 - RNA, 19 nt, Artificial Sequence
  Description of Artificial Sequence: Synthetic oligonucleotide
  Sense strand starting at position 3199 of SEQ ID NO: 1888776
uugguaaauucugugacau

SEQ ID NO: 2555971 - RNA, 19 nt, Artificial Sequence
  Description of Artificial Sequence: Synthetic oligonucleotide
  Antisense strand to SEQ ID NO: 2555970
augucacagaauuuaccaa

SEQ ID NO: 2555972 - RNA, 19 nt, Artificial Sequence
  Description of Artificial Sequence: Synthetic oligonucleotide
  Sense strand starting at position 3200 of SEQ ID NO: 1888776
ugguaaauucugugacaua

SEQ ID NO: 2555973 - RNA, 19 nt, Artificial Sequence
  Description of Artificial Sequence: Synthetic oligonucleotide
  Antisense strand to SEQ ID NO: 2555972
uaugucacagaauuuacca

SEQ ID NO: 2555974 - RNA, 19 nt, Artificial Sequence
  Description of Artificial Sequence: Synthetic oligonucleotide
  Sense strand starting at position 3399 of SEQ ID NO: 1888776
uuaguuaggcuuggugauu

SEQ ID NO: 2555975 - RNA, 19 nt, Artificial Sequence
  Description of Artificial Sequence: Synthetic oligonucleotide
  Antisense strand to SEQ ID NO: 2555974
aaucaccaagccuaacuaa

SEQ ID NO: 2555976 - RNA, 19 nt, Artificial Sequence
  Description of Artificial Sequence: Synthetic oligonucleotide
  Sense strand starting at position 3541 of SEQ ID NO: 1888776
gcauuauaugcccaccguu

SEQ ID NO: 2555977 - RNA, 19 nt, Artificial Sequence
  Description of Artificial Sequence: Synthetic oligonucleotide
  Antisense strand to SEQ ID NO: 2555976
aacggugggcauauaaugc

SEQ ID NO: 2555978 - RNA, 19 nt, Artificial Sequence
  Description of Artificial Sequence: Synthetic oligonucleotide
  Sense strand starting at position 3582 of SEQ ID NO: 1888776
gaggcaagcuuguccaauc

SEQ ID NO: 2555979 - RNA, 19 nt, Artificial Sequence
  Description of Artificial Sequence: Synthetic oligonucleotide
  Antisense strand to SEQ ID NO: 2555978
gauuggacaagcuugccuc

SEQ ID NO: 2555980 - RNA, 19 nt, Artificial Sequence
  Description of Artificial Sequence: Synthetic oligonucleotide
  Sense strand starting at position 3632 of SEQ ID NO: 1888776
ugcuuugaaugcgucucaa

SEQ ID NO: 2555981 - RNA, 19 nt, Artificial Sequence
  Description of Artificial Sequence: Synthetic oligonucleotide
  Antisense strand to SEQ ID NO: 2555980
uugagacgcauucaaagca

SEQ ID NO: 2555982 - RNA, 19 nt, Artificial Sequence
  Description of Artificial Sequence: Synthetic oligonucleotide
  Sense strand starting at position 3636 of SEQ ID NO: 1888776
uugaaugcgucucaacaca

SEQ ID NO: 2555983 - RNA, 19 nt, Artificial Sequence
  Description of Artificial Sequence: Synthetic oligonucleotide
  Antisense strand to SEQ ID NO: 2555982
uguguugagacgcauucaa

SEQ ID NO: 2555984 - RNA, 19 nt, Artificial Sequence
  Description of Artificial Sequence: Synthetic oligonucleotide
  Sense strand starting at position 511 of SEQ ID NO: 1888777
uuaagaaaugcaugguaaa

SEQ ID NO: 2555985 - RNA, 19 nt, Artificial Sequence
  Description of Artificial Sequence: Synthetic oligonucleotide
  Antisense strand to SEQ ID NO: 2555984
uuuaccaugcauuucuuaa

SEQ ID NO: 2555986 - RNA, 19 nt, Artificial Sequence
  Description of Artificial Sequence: Synthetic oligonucleotide
  Sense strand starting at position 618 of SEQ ID NO: 1888777
ucacguuaauguuugauuu

SEQ ID NO: 2555987 - RNA, 19 nt, Artificial Sequence
  Description of Artificial Sequence: Synthetic oligonucleotide
  Antisense strand to SEQ ID NO: 2555986
aaaucaaacauuaacguga

SEQ ID NO: 2555988 - RNA, 19 nt, Artificial Sequence
  Description of Artificial Sequence: Synthetic oligonucleotide
  Sense strand starting at position 679 of SEQ ID NO: 1888777
uuccuuguauaucuguaua

SEQ ID NO: 2555989 - RNA, 19 nt, Artificial Sequence
  Description of Artificial Sequence: Synthetic oligonucleotide
  Antisense strand to SEQ ID NO: 2555988
uauacagauauacaaggaa

SEQ ID NO: 2555990 - RNA, 19 nt, Artificial Sequence
  Description of Artificial Sequence: Synthetic oligonucleotide
  Sense strand starting at position 681 of SEQ ID NO: 1888777
ccuuguauaucuguauaug

SEQ ID NO: 2555991 - RNA, 19 nt, Artificial Sequence
  Description of Artificial Sequence: Synthetic oligonucleotide
  Antisense strand to SEQ ID NO: 2555990
cauauacagauauacaagg

SEQ ID NO: 2555992 - RNA, 19 nt, Artificial Sequence
  Description of Artificial Sequence: Synthetic oligonucleotide
  Sense strand starting at position 682 of SEQ ID NO: 1888777
cuuguauaucuguauaugu

SEQ ID NO: 2555993 - RNA, 19 nt, Artificial Sequence
  Description of Artificial Sequence: Synthetic oligonucleotide
  Antisense strand to SEQ ID NO: 2555992
acauauacagauauacaag

SEQ ID NO: 2555994 - RNA, 19 nt, Artificial Sequence
  Description of Artificial Sequence: Synthetic oligonucleotide
  Sense strand starting at position 689 of SEQ ID NO: 1888777
aucuguauaugucuuaagu

SEQ ID NO: 2555995 - RNA, 19 nt, Artificial Sequence
  Description of Artificial Sequence: Synthetic oligonucleotide
  Antisense strand to SEQ ID NO: 2555994
acuuaagacauauacagau

SEQ ID NO: 2555996 - RNA, 19 nt, Artificial Sequence
  Description of Artificial Sequence: Synthetic oligonucleotide
  Sense strand starting at position 910 of SEQ ID NO: 1888777
ucuccuauugauggauaca

SEQ ID NO: 2555997 - RNA, 19 nt, Artificial Sequence
  Description of Artificial Sequence: Synthetic oligonucleotide
  Antisense strand to SEQ ID NO: 2555996
uguauccaucaauaggaga

SEQ ID NO: 2555998 - RNA, 19 nt, Artificial Sequence
  Description of Artificial Sequence: Synthetic oligonucleotide
  Sense strand starting at position 919 of SEQ ID NO: 1888777
gauggauacacagguuguu

SEQ ID NO: 2555999 - RNA, 19 nt, Artificial Sequence
  Description of Artificial Sequence: Synthetic oligonucleotide
  Antisense strand to SEQ ID NO: 2555998
aacaaccuguguauccauc

SEQ ID NO: 2556000 - RNA, 19 nt, Artificial Sequence
  Description of Artificial Sequence: Synthetic oligonucleotide
  Sense strand starting at position 1223 of SEQ ID NO: 1888777
guaaacaugcuaugcuuaa

SEQ ID NO: 2556001 - RNA, 19 nt, Artificial Sequence
  Description of Artificial Sequence: Synthetic oligonucleotide
  Antisense strand to SEQ ID NO: 2556000
uuaagcauagcauguuuac

SEQ ID NO: 2556002 - RNA, 19 nt, Artificial Sequence
  Description of Artificial Sequence: Synthetic oligonucleotide
  Sense strand starting at position 1290 of SEQ ID NO: 1888777
uuucuuagugaguaaucaa

SEQ ID NO: 2556003 - RNA, 19 nt, Artificial Sequence
  Description of Artificial Sequence: Synthetic oligonucleotide
  Antisense strand to SEQ ID NO: 2556002
uugauuacucacuaagaaa

SEQ ID NO: 2556004 - RNA, 19 nt, Artificial Sequence
  Description of Artificial Sequence: Synthetic oligonucleotide
  Sense strand starting at position 1293 of SEQ ID NO: 1888777
cuuagugaguaaucaaccu

SEQ ID NO: 2556005 - RNA, 19 nt, Artificial Sequence
  Description of Artificial Sequence: Synthetic oligonucleotide
  Antisense strand to SEQ ID NO: 2556004
agguugauuacucacuaag

SEQ ID NO: 2556006 - RNA, 19 nt, Artificial Sequence
  Description of Artificial Sequence: Synthetic oligonucleotide
  Sense strand starting at position 1444 of SEQ ID NO: 1888777
gugcauaaugaauacguua

SEQ ID NO: 2556007 - RNA, 19 nt, Artificial Sequence
  Description of Artificial Sequence: Synthetic oligonucleotide
  Antisense strand to SEQ ID NO: 2556006
uaacguauucauuaugcac

SEQ ID NO: 2556008 - RNA, 19 nt, Artificial Sequence
  Description of Artificial Sequence: Synthetic oligonucleotide
  Sense strand starting at position 1584 of SEQ ID NO: 1888777
gcgcgacauggugucaaua

SEQ ID NO: 2556009 - RNA, 19 nt, Artificial Sequence
  Description of Artificial Sequence: Synthetic oligonucleotide
  Antisense strand to SEQ ID NO: 2556008
uauugacaccaugucgcgc

SEQ ID NO: 2556010 - RNA, 19 nt, Artificial Sequence
  Description of Artificial Sequence: Synthetic oligonucleotide
  Sense strand starting at position 1803 of SEQ ID NO: 1888777
aaguguguagccucgcuaa

SEQ ID NO: 2556011 - RNA, 19 nt, Artificial Sequence
  Description of Artificial Sequence: Synthetic oligonucleotide
  Antisense strand to SEQ ID NO: 2556010
uuagcgaggcuacacacuu

SEQ ID NO: 2556012 - RNA, 19 nt, Artificial Sequence
  Description of Artificial Sequence: Synthetic oligonucleotide
  Sense strand starting at position 1993 of SEQ ID NO: 1888777
agggcauaggcggaugaaa

SEQ ID NO: 2556013 - RNA, 19 nt, Artificial Sequence
  Description of Artificial Sequence: Synthetic oligonucleotide
  Antisense strand to SEQ ID NO: 2556012
uuucauccgccuaugcccu

SEQ ID NO: 2556014 - RNA, 19 nt, Artificial Sequence
  Description of Artificial Sequence: Synthetic oligonucleotide
  Sense strand starting at position 2378 of SEQ ID NO: 1888777
ucuguuaucucacuaaguc

SEQ ID NO: 2556015 - RNA, 19 nt, Artificial Sequence
  Description of Artificial Sequence: Synthetic oligonucleotide
  Antisense strand to SEQ ID NO: 2556014
gacuuagugagauaacaga

SEQ ID NO: 2556016 - RNA, 19 nt, Artificial Sequence
  Description of Artificial Sequence: Synthetic oligonucleotide
  Sense strand starting at position 2379 of SEQ ID NO: 1888777
cuguuaucucacuaaguca

SEQ ID NO: 2556017 - RNA, 19 nt, Artificial Sequence
  Description of Artificial Sequence: Synthetic oligonucleotide
  Antisense strand to SEQ ID NO: 2556016
ugacuuagugagauaacag

SEQ ID NO: 2556018 - RNA, 19 nt, Artificial Sequence
  Description of Artificial Sequence: Synthetic oligonucleotide
  Sense strand starting at position 2487 of SEQ ID NO: 1888777
gugcuagaaugagcuagaa

SEQ ID NO: 2556019 - RNA, 19 nt, Artificial Sequence
  Description of Artificial Sequence: Synthetic oligonucleotide
  Antisense strand to SEQ ID NO: 2556018
uucuagcucauucuagcac

SEQ ID NO: 2556020 - RNA, 19 nt, Artificial Sequence
  Description of Artificial Sequence: Synthetic oligonucleotide
  Sense strand starting at position 2539 of SEQ ID NO: 1888777
ccgauagaugaggguguau

SEQ ID NO: 2556021 - RNA, 19 nt, Artificial Sequence
  Description of Artificial Sequence: Synthetic oligonucleotide
  Antisense strand to SEQ ID NO: 2556020
auacacccucaucuaucgg

SEQ ID NO: 2556022 - RNA, 19 nt, Artificial Sequence
  Description of Artificial Sequence: Synthetic oligonucleotide
  Sense strand starting at position 2541 of SEQ ID NO: 1888777
gauagaugaggguguaugu

SEQ ID NO: 2556023 - RNA, 19 nt, Artificial Sequence
  Description of Artificial Sequence: Synthetic oligonucleotide
  Antisense strand to SEQ ID NO: 2556022
acauacacccucaucuauc

SEQ ID NO: 2556024 - RNA, 19 nt, Artificial Sequence
  Description of Artificial Sequence: Synthetic oligonucleotide
  Sense strand starting at position 2601 of SEQ ID NO: 1888777
ggccuagucauacagugag

SEQ ID NO: 2556025 - RNA, 19 nt, Artificial Sequence
  Description of Artificial Sequence: Synthetic oligonucleotide
  Antisense strand to SEQ ID NO: 2556024
cucacuguaugacuaggcc

SEQ ID NO: 2556026 - RNA, 19 nt, Artificial Sequence
  Description of Artificial Sequence: Synthetic oligonucleotide
  Sense strand starting at position 2650 of SEQ ID NO: 1888777
aggugcuuccuuuaauucu

SEQ ID NO: 2556027 - RNA, 19 nt, Artificial Sequence
  Description of Artificial Sequence: Synthetic oligonucleotide
  Antisense strand to SEQ ID NO: 2556026
agaauuaaaggaagcaccu

SEQ ID NO: 2556028 - RNA, 19 nt, Artificial Sequence
  Description of Artificial Sequence: Synthetic oligonucleotide
  Sense strand starting at position 2722 of SEQ ID NO: 1888777
ccuguaaucucaguguaau

SEQ ID NO: 2556029 - RNA, 19 nt, Artificial Sequence
  Description of Artificial Sequence: Synthetic oligonucleotide
  Antisense strand to SEQ ID NO: 2556028
auuacacugagauuacagg

SEQ ID NO: 2556030 - RNA, 19 nt, Artificial Sequence
  Description of Artificial Sequence: Synthetic oligonucleotide
  Sense strand starting at position 3315 of SEQ ID NO: 1888777
uguuguucccgcuccauga

SEQ ID NO: 2556031 - RNA, 19 nt, Artificial Sequence
  Description of Artificial Sequence: Synthetic oligonucleotide
  Antisense strand to SEQ ID NO: 2556030
ucauggagcgggaacaaca

SEQ ID NO: 2556032 - RNA, 19 nt, Artificial Sequence
  Description of Artificial Sequence: Synthetic oligonucleotide
  Sense strand starting at position 3392 of SEQ ID NO: 1888777
uuguuugugaagcauuaug

SEQ ID NO: 2556033 - RNA, 19 nt, Artificial Sequence
  Description of Artificial Sequence: Synthetic oligonucleotide
  Antisense strand to SEQ ID NO: 2556032
cauaaugcuucacaaacaa

SEQ ID NO: 2556034 - RNA, 19 nt, Artificial Sequence
  Description of Artificial Sequence: Synthetic oligonucleotide
  Sense strand starting at position 3400 of SEQ ID NO: 1888777
gaagcauuaugugugagug

SEQ ID NO: 2556035 - RNA, 19 nt, Artificial Sequence
  Description of Artificial Sequence: Synthetic oligonucleotide
  Antisense strand to SEQ ID NO: 2556034
cacucacacauaaugcuuc

SEQ ID NO: 2556036 - RNA, 19 nt, Artificial Sequence
  Description of Artificial Sequence: Synthetic oligonucleotide
  Sense strand starting at position 3403 of SEQ ID NO: 1888777
gcauuaugugugaguggug

SEQ ID NO: 2556037 - RNA, 19 nt, Artificial Sequence
  Description of Artificial Sequence: Synthetic oligonucleotide
  Antisense strand to SEQ ID NO: 2556036
caccacucacacauaaugc

SEQ ID NO: 2556038 - RNA, 19 nt, Artificial Sequence
  Description of Artificial Sequence: Synthetic oligonucleotide
  Sense strand starting at position 3443 of SEQ ID NO: 1888777
gugcuucaccgguaaggaa

SEQ ID NO: 2556039 - RNA, 19 nt, Artificial Sequence
  Description of Artificial Sequence: Synthetic oligonucleotide
  Antisense strand to SEQ ID NO: 2556038
uuccuuaccggugaagcac

SEQ ID NO: 2556040 - RNA, 19 nt, Artificial Sequence
  Description of Artificial Sequence: Synthetic oligonucleotide
  Sense strand starting at position 3603 of SEQ ID NO: 1888777
uugauaucgucacccucaa

SEQ ID NO: 2556041 - RNA, 19 nt, Artificial Sequence
  Description of Artificial Sequence: Synthetic oligonucleotide
  Antisense strand to SEQ ID NO: 2556040
uugagggugacgauaucaa

SEQ ID NO: 2556042 - RNA, 19 nt, Artificial Sequence
  Description of Artificial Sequence: Synthetic oligonucleotide
  Sense strand starting at position 3628 of SEQ ID NO: 1888777
gguaaugauacacaguugu

SEQ ID NO: 2556043 - RNA, 19 nt, Artificial Sequence
  Description of Artificial Sequence: Synthetic oligonucleotide
  Antisense strand to SEQ ID NO: 2556042
acaacuguguaucauuacc

SEQ ID NO: 2556044 - RNA, 19 nt, Artificial Sequence
  Description of Artificial Sequence: Synthetic oligonucleotide
  Sense strand starting at position 3652 of SEQ ID NO: 1888777
acaucugggcauugacaua

SEQ ID NO: 2556045 - RNA, 19 nt, Artificial Sequence
  Description of Artificial Sequence: Synthetic oligonucleotide
  Antisense strand to SEQ ID NO: 2556044
uaugucaaugcccagaugu

SEQ ID NO: 2556046 - RNA, 19 nt, Artificial Sequence
  Description of Artificial Sequence: Synthetic oligonucleotide
  Sense strand starting at position 3659 of SEQ ID NO: 1888777
ggcauugacauauggacau

SEQ ID NO: 2556047 - RNA, 19 nt, Artificial Sequence
  Description of Artificial Sequence: Synthetic oligonucleotide
  Antisense strand to SEQ ID NO: 2556046
auguccauaugucaaugcc

SEQ ID NO: 2556048 - RNA, 19 nt, Artificial Sequence
  Description of Artificial Sequence: Synthetic oligonucleotide
  Sense strand starting at position 3719 of SEQ ID NO: 1888777
guguucaaaggucaguaau

SEQ ID NO: 2556049 - RNA, 19 nt, Artificial Sequence
  Description of Artificial Sequence: Synthetic oligonucleotide
  Antisense strand to SEQ ID NO: 2556048
auuacugaccuuugaacac

SEQ ID NO: 2556050 - RNA, 19 nt, Artificial Sequence
  Description of Artificial Sequence: Synthetic oligonucleotide
  Sense strand starting at position 3743 of SEQ ID NO: 1888777
uggagaggucucuaagcuu

SEQ ID NO: 2556051 - RNA, 19 nt, Artificial Sequence
  Description of Artificial Sequence: Synthetic oligonucleotide
  Antisense strand to SEQ ID NO: 2556050
aagcuuagagaccucucca

SEQ ID NO: 2556052 - RNA, 19 nt, Artificial Sequence
  Description of Artificial Sequence: Synthetic oligonucleotide
  Sense strand starting at position 3746 of SEQ ID NO: 1888777
agaggucucuaagcuuaaa

SEQ ID NO: 2556053 - RNA, 19 nt, Artificial Sequence
  Description of Artificial Sequence: Synthetic oligonucleotide
  Antisense strand to SEQ ID NO: 2556052
uuuaagcuuagagaccucu

SEQ ID NO: 2556054 - RNA, 19 nt, Artificial Sequence
  Description of Artificial Sequence: Synthetic oligonucleotide
  Sense strand starting at position 3795 of SEQ ID NO: 1888777
ugagcacaucuuggaaauu

SEQ ID NO: 2556055 - RNA, 19 nt, Artificial Sequence
  Description of Artificial Sequence: Synthetic oligonucleotide
  Antisense strand to SEQ ID NO: 2556054
aauuuccaagaugugcuca

SEQ ID NO: 2556056 - RNA, 19 nt, Artificial Sequence
  Description of Artificial Sequence: Synthetic oligonucleotide
  Sense strand starting at position 3804 of SEQ ID NO: 1888777
cuuggaaauuuguaggaca

SEQ ID NO: 2556057 - RNA, 19 nt, Artificial Sequence
  Description of Artificial Sequence: Synthetic oligonucleotide
  Antisense strand to SEQ ID NO: 2556056
uguccuacaaauuuccaag

SEQ ID NO: 2556058 - RNA, 19 nt, Artificial Sequence
  Description of Artificial Sequence: Synthetic oligonucleotide
  Sense strand starting at position 3946 of SEQ ID NO: 1888777
aggcaaauaugacuguaaa

SEQ ID NO: 2556059 - RNA, 19 nt, Artificial Sequence
  Description of Artificial Sequence: Synthetic oligonucleotide
  Antisense strand to SEQ ID NO: 2556058
uuuacagucauauuugccu

SEQ ID NO: 2556060 - RNA, 19 nt, Artificial Sequence
  Description of Artificial Sequence: Synthetic oligonucleotide
  Sense strand starting at position 3947 of SEQ ID NO: 1888777
ggcaaauaugacuguaaau

SEQ ID NO: 2556061 - RNA, 19 nt, Artificial Sequence
  Description of Artificial Sequence: Synthetic oligonucleotide
  Antisense strand to SEQ ID NO: 2556060
auuuacagucauauuugcc

SEQ ID NO: 2556062 - RNA, 19 nt, Artificial Sequence
  Description of Artificial Sequence: Synthetic oligonucleotide
  Sense strand starting at position 3957 of SEQ ID NO: 1888777
acuguaaauucugucauau

SEQ ID NO: 2556063 - RNA, 19 nt, Artificial Sequence
  Description of Artificial Sequence: Synthetic oligonucleotide
  Antisense strand to SEQ ID NO: 2556062
auaugacagaauuuacagu

SEQ ID NO: 2556064 - RNA, 19 nt, Artificial Sequence
  Description of Artificial Sequence: Synthetic oligonucleotide
  Sense strand starting at position 284 of SEQ ID NO: 1888778
gggucucaucauggauauu

SEQ ID NO: 2556065 - RNA, 19 nt, Artificial Sequence
  Description of Artificial Sequence: Synthetic oligonucleotide
  Antisense strand to SEQ ID NO: 2556064
aauauccaugaugagaccc

SEQ ID NO: 2556066 - RNA, 19 nt, Artificial Sequence
  Description of Artificial Sequence: Synthetic oligonucleotide
  Sense strand starting at position 368 of SEQ ID NO: 1888778
uguuuagaacuuugugaag

SEQ ID NO: 2556067 - RNA, 19 nt, Artificial Sequence
  Description of Artificial Sequence: Synthetic oligonucleotide
  Antisense strand to SEQ ID NO: 2556066
cuucacaaaguucuaaaca

SEQ ID NO: 2556068 - RNA, 19 nt, Artificial Sequence
  Description of Artificial Sequence: Synthetic oligonucleotide
  Sense strand starting at position 460 of SEQ ID NO: 1888778
ugucacuaucauuaagugu

SEQ ID NO: 2556069 - RNA, 19 nt, Artificial Sequence
  Description of Artificial Sequence: Synthetic oligonucleotide
  Antisense strand to SEQ ID NO: 2556068
acacuuaaugauagugaca

SEQ ID NO: 2556070 - RNA, 19 nt, Artificial Sequence
  Description of Artificial Sequence: Synthetic oligonucleotide
  Sense strand starting at position 535 of SEQ ID NO: 1888778
gugcgauauauguauaaua

SEQ ID NO: 2556071 - RNA, 19 nt, Artificial Sequence
  Description of Artificial Sequence: Synthetic oligonucleotide
  Antisense strand to SEQ ID NO: 2556070
uauuauacauauaucgcac

SEQ ID NO: 2556072 - RNA, 19 nt, Artificial Sequence
  Description of Artificial Sequence: Synthetic oligonucleotide
  Sense strand starting at position 619 of SEQ ID NO: 1888778
cagggaauuauggguguag

SEQ ID NO: 2556073 - RNA, 19 nt, Artificial Sequence
  Description of Artificial Sequence: Synthetic oligonucleotide
  Antisense strand to SEQ ID NO: 2556072
cuacacccauaauucccug

SEQ ID NO: 2556074 - RNA, 19 nt, Artificial Sequence
  Description of Artificial Sequence: Synthetic oligonucleotide
  Sense strand starting at position 620 of SEQ ID NO: 1888778
agggaauuauggguguaga

SEQ ID NO: 2556075 - RNA, 19 nt, Artificial Sequence
  Description of Artificial Sequence: Synthetic oligonucleotide
  Antisense strand to SEQ ID NO: 2556074
ucuacacccauaauucccu

SEQ ID NO: 2556076 - RNA, 19 nt, Artificial Sequence
  Description of Artificial Sequence: Synthetic oligonucleotide
  Sense strand starting at position 621 of SEQ ID NO: 1888778
gggaauuauggguguagac

SEQ ID NO: 2556077 - RNA, 19 nt, Artificial Sequence
  Description of Artificial Sequence: Synthetic oligonucleotide
  Antisense strand to SEQ ID NO: 2556076
gucuacacccauaauuccc

SEQ ID NO: 2556078 - RNA, 19 nt, Artificial Sequence
  Description of Artificial Sequence: Synthetic oligonucleotide
  Sense strand starting at position 728 of SEQ ID NO: 1888778
cagguaugagaacgaccaa

SEQ ID NO: 2556079 - RNA, 19 nt, Artificial Sequence
  Description of Artificial Sequence: Synthetic oligonucleotide
  Antisense strand to SEQ ID NO: 2556078
uuggucguucucauaccug

SEQ ID NO: 2556080 - RNA, 19 nt, Artificial Sequence
  Description of Artificial Sequence: Synthetic oligonucleotide
  Sense strand starting at position 807 of SEQ ID NO: 1888778
cugauaacugaaggugagu

SEQ ID NO: 2556081 - RNA, 19 nt, Artificial Sequence
  Description of Artificial Sequence: Synthetic oligonucleotide
  Antisense strand to SEQ ID NO: 2556080
acucaccuucaguuaucag

SEQ ID NO: 2556082 - RNA, 19 nt, Artificial Sequence
  Description of Artificial Sequence: Synthetic oligonucleotide
  Sense strand starting at position 826 of SEQ ID NO: 1888778
uccuuaaggccuggucaaa

SEQ ID NO: 2556083 - RNA, 19 nt, Artificial Sequence
  Description of Artificial Sequence: Synthetic oligonucleotide
  Antisense strand to SEQ ID NO: 2556082
uuugaccaggccuuaagga

SEQ ID NO: 2556084 - RNA, 19 nt, Artificial Sequence
  Description of Artificial Sequence: Synthetic oligonucleotide
  Sense strand starting at position 899 of SEQ ID NO: 1888778
ccaggagaucugugggcuu

SEQ ID NO: 2556085 - RNA, 19 nt, Artificial Sequence
  Description of Artificial Sequence: Synthetic oligonucleotide
  Antisense strand to SEQ ID NO: 2556084
aagcccacagaucuccugg

SEQ ID NO: 2556086 - RNA, 19 nt, Artificial Sequence
  Description of Artificial Sequence: Synthetic oligonucleotide
  Sense strand starting at position 917 of SEQ ID NO: 1888778
uccuguggugacuaacauu

SEQ ID NO: 2556087 - RNA, 19 nt, Artificial Sequence
  Description of Artificial Sequence: Synthetic oligonucleotide
  Antisense strand to SEQ ID NO: 2556086
aauguuagucaccacagga

SEQ ID NO: 2556088 - RNA, 19 nt, Artificial Sequence
  Description of Artificial Sequence: Synthetic oligonucleotide
  Sense strand starting at position 1162 of SEQ ID NO: 1888778
ccucuaaccucuuuagggu

SEQ ID NO: 2556089 - RNA, 19 nt, Artificial Sequence
  Description of Artificial Sequence: Synthetic oligonucleotide
  Antisense strand to SEQ ID NO: 2556088
acccuaaagagguuagagg

SEQ ID NO: 2556090 - RNA, 19 nt, Artificial Sequence
  Description of Artificial Sequence: Synthetic oligonucleotide
  Sense strand starting at position 1169 of SEQ ID NO: 1888778
ccucuuuaggguugagaaa

SEQ ID NO: 2556091 - RNA, 19 nt, Artificial Sequence
  Description of Artificial Sequence: Synthetic oligonucleotide
  Antisense strand to SEQ ID NO: 2556090
uuucucaacccuaaagagg

SEQ ID NO: 2556092 - RNA, 19 nt, Artificial Sequence
  Description of Artificial Sequence: Synthetic oligonucleotide
  Sense strand starting at position 1469 of SEQ ID NO: 1888778
aguuuaaacuggucaggau

SEQ ID NO: 2556093 - RNA, 19 nt, Artificial Sequence
  Description of Artificial Sequence: Synthetic oligonucleotide
  Antisense strand to SEQ ID NO: 2556092
auccugaccaguuuaaacu

SEQ ID NO: 2556094 - RNA, 19 nt, Artificial Sequence
  Description of Artificial Sequence: Synthetic oligonucleotide
  Sense strand starting at position 2142 of SEQ ID NO: 1888778
gggacuuugauugguuaaa

SEQ ID NO: 2556095 - RNA, 19 nt, Artificial Sequence
  Description of Artificial Sequence: Synthetic oligonucleotide
  Antisense strand to SEQ ID NO: 2556094
uuuaaccaaucaaaguccc

SEQ ID NO: 2556096 - RNA, 19 nt, Artificial Sequence
  Description of Artificial Sequence: Synthetic oligonucleotide
  Sense strand starting at position 2143 of SEQ ID NO: 1888778
ggacuuugauugguuaaag

SEQ ID NO: 2556097 - RNA, 19 nt, Artificial Sequence
  Description of Artificial Sequence: Synthetic oligonucleotide
  Antisense strand to SEQ ID NO: 2556096
cuuuaaccaaucaaagucc

SEQ ID NO: 2556098 - RNA, 19 nt, Artificial Sequence
  Description of Artificial Sequence: Synthetic oligonucleotide
  Sense strand starting at position 2144 of SEQ ID NO: 1888778
gacuuugauugguuaaaga

SEQ ID NO: 2556099 - RNA, 19 nt, Artificial Sequence
  Description of Artificial Sequence: Synthetic oligonucleotide
  Antisense strand to SEQ ID NO: 2556098
ucuuuaaccaaucaaaguc

SEQ ID NO: 2556100 - RNA, 19 nt, Artificial Sequence
  Description of Artificial Sequence: Synthetic oligonucleotide
  Sense strand starting at position 2212 of SEQ ID NO: 1888778
ggcccuuugccugucuauu

SEQ ID NO: 2556101 - RNA, 19 nt, Artificial Sequence
  Description of Artificial Sequence: Synthetic oligonucleotide
  Antisense strand to SEQ ID NO: 2556100
aauagacaggcaaagggcc

SEQ ID NO: 2556102 - RNA, 19 nt, Artificial Sequence
  Description of Artificial Sequence: Synthetic oligonucleotide
  Sense strand starting at position 2292 of SEQ ID NO: 1888778
cgccgagucacugcacaau

SEQ ID NO: 2556103 - RNA, 19 nt, Artificial Sequence
  Description of Artificial Sequence: Synthetic oligonucleotide
  Antisense strand to SEQ ID NO: 2556102
auugugcagugacucggcg

SEQ ID NO: 2556104 - RNA, 19 nt, Artificial Sequence
  Description of Artificial Sequence: Synthetic oligonucleotide
  Sense strand starting at position 2425 of SEQ ID NO: 1888778
agagauuccuaagccaggu

SEQ ID NO: 2556105 - RNA, 19 nt, Artificial Sequence
  Description of Artificial Sequence: Synthetic oligonucleotide
  Antisense strand to SEQ ID NO: 2556104
accuggcuuaggaaucucu

SEQ ID NO: 2556106 - RNA, 19 nt, Artificial Sequence
  Description of Artificial Sequence: Synthetic oligonucleotide
  Sense strand starting at position 2451 of SEQ ID NO: 1888778
gcucaaagugagcagaguu

SEQ ID NO: 2556107 - RNA, 19 nt, Artificial Sequence
  Description of Artificial Sequence: Synthetic oligonucleotide
  Antisense strand to SEQ ID NO: 2556106
aacucugcucacuuugagc

SEQ ID NO: 2556108 - RNA, 19 nt, Artificial Sequence
  Description of Artificial Sequence: Synthetic oligonucleotide
  Sense strand starting at position 2461 of SEQ ID NO: 1888778
agcagaguuccuuauucca

SEQ ID NO: 2556109 - RNA, 19 nt, Artificial Sequence
  Description of Artificial Sequence: Synthetic oligonucleotide
  Antisense strand to SEQ ID NO: 2556108
uggaauaaggaacucugcu

SEQ ID NO: 2556110 - RNA, 19 nt, Artificial Sequence
  Description of Artificial Sequence: Synthetic oligonucleotide
  Sense strand starting at position 2531 of SEQ ID NO: 1888778
cugauaccugcugagacau

SEQ ID NO: 2556111 - RNA, 19 nt, Artificial Sequence
  Description of Artificial Sequence: Synthetic oligonucleotide
  Antisense strand to SEQ ID NO: 2556110
augucucagcagguaucag

SEQ ID NO: 2556112 - RNA, 19 nt, Artificial Sequence
  Description of Artificial Sequence: Synthetic oligonucleotide
  Sense strand starting at position 2539 of SEQ ID NO: 1888778
ugcugagacauuggucaag

SEQ ID NO: 2556113 - RNA, 19 nt, Artificial Sequence
  Description of Artificial Sequence: Synthetic oligonucleotide
  Antisense strand to SEQ ID NO: 2556112
cuugaccaaugucucagca

SEQ ID NO: 2556114 - RNA, 19 nt, Artificial Sequence
  Description of Artificial Sequence: Synthetic oligonucleotide
  Sense strand starting at position 2541 of SEQ ID NO: 1888778
cugagacauuggucaagug

SEQ ID NO: 2556115 - RNA, 19 nt, Artificial Sequence
  Description of Artificial Sequence: Synthetic oligonucleotide
  Antisense strand to SEQ ID NO: 2556114
cacuugaccaaugucucag

SEQ ID NO: 2556116 - RNA, 19 nt, Artificial Sequence
  Description of Artificial Sequence: Synthetic oligonucleotide
  Sense strand starting at position 2569 of SEQ ID NO: 1888778
cuaggagccucaguuuaac

SEQ ID NO: 2556117 - RNA, 19 nt, Artificial Sequence
  Description of Artificial Sequence: Synthetic oligonucleotide
  Antisense strand to SEQ ID NO: 2556116
guuaaacugaggcuccuag

SEQ ID NO: 2556118 - RNA, 19 nt, Artificial Sequence
  Description of Artificial Sequence: Synthetic oligonucleotide
  Sense strand starting at position 2572 of SEQ ID NO: 1888778
ggagccucaguuuaaccau

SEQ ID NO: 2556119 - RNA, 19 nt, Artificial Sequence
  Description of Artificial Sequence: Synthetic oligonucleotide
  Antisense strand to SEQ ID NO: 2556118
augguuaaacugaggcucc

SEQ ID NO: 2556120 - RNA, 19 nt, Artificial Sequence
  Description of Artificial Sequence: Synthetic oligonucleotide
  Sense strand starting at position 2620 of SEQ ID NO: 1888778
ccucacaaugugugaggau

SEQ ID NO: 2556121 - RNA, 19 nt, Artificial Sequence
  Description of Artificial Sequence: Synthetic oligonucleotide
  Antisense strand to SEQ ID NO: 2556120
auccucacacauugugagg

SEQ ID NO: 2556122 - RNA, 19 nt, Artificial Sequence
  Description of Artificial Sequence: Synthetic oligonucleotide
  Sense strand starting at position 2672 of SEQ ID NO: 1888778
gggcauaaauaauuaaguu

SEQ ID NO: 2556123 - RNA, 19 nt, Artificial Sequence
  Description of Artificial Sequence: Synthetic oligonucleotide
  Antisense strand to SEQ ID NO: 2556122
aacuuaauuauuuaugccc

SEQ ID NO: 2556124 - RNA, 19 nt, Artificial Sequence
  Description of Artificial Sequence: Synthetic oligonucleotide
  Sense strand starting at position 2712 of SEQ ID NO: 1888778
aguauucaggcggacagaa

SEQ ID NO: 2556125 - RNA, 19 nt, Artificial Sequence
  Description of Artificial Sequence: Synthetic oligonucleotide
  Antisense strand to SEQ ID NO: 2556124
uucuguccgccugaauacu

SEQ ID NO: 2556126 - RNA, 19 nt, Artificial Sequence
  Description of Artificial Sequence: Synthetic oligonucleotide
  Sense strand starting at position 2838 of SEQ ID NO: 1888778
ccgucuuugcgucuucuua

SEQ ID NO: 2556127 - RNA, 19 nt, Artificial Sequence
  Description of Artificial Sequence: Synthetic oligonucleotide
  Antisense strand to SEQ ID NO: 2556126
uaagaagacgcaaagacgg

SEQ ID NO: 2556128 - RNA, 19 nt, Artificial Sequence
  Description of Artificial Sequence: Synthetic oligonucleotide
  Sense strand starting at position 2878 of SEQ ID NO: 1888778
cgcaguaagacccagaaua

SEQ ID NO: 2556129 - RNA, 19 nt, Artificial Sequence
  Description of Artificial Sequence: Synthetic oligonucleotide
  Antisense strand to SEQ ID NO: 2556128
uauucugggucuuacugcg

SEQ ID NO: 2556130 - RNA, 19 nt, Artificial Sequence
  Description of Artificial Sequence: Synthetic oligonucleotide
  Sense strand starting at position 2983 of SEQ ID NO: 1888778
ucugcagaccucuaaucga

SEQ ID NO: 2556131 - RNA, 19 nt, Artificial Sequence
  Description of Artificial Sequence: Synthetic oligonucleotide
  Antisense strand to SEQ ID NO: 2556130
ucgauuagaggucugcaga

SEQ ID NO: 2556132 - RNA, 19 nt, Artificial Sequence
  Description of Artificial Sequence: Synthetic oligonucleotide
  Sense strand starting at position 3012 of SEQ ID NO: 1888778
aggguuuggagagguccau

SEQ ID NO: 2556133 - RNA, 19 nt, Artificial Sequence
  Description of Artificial Sequence: Synthetic oligonucleotide
  Antisense strand to SEQ ID NO: 2556132
auggaccucuccaaacccu

SEQ ID NO: 2556134 - RNA, 19 nt, Artificial Sequence
  Description of Artificial Sequence: Synthetic oligonucleotide
  Sense strand starting at position 3414 of SEQ ID NO: 1888778
gaauguaacuaggcauagu

SEQ ID NO: 2556135 - RNA, 19 nt, Artificial Sequence
  Description of Artificial Sequence: Synthetic oligonucleotide
  Antisense strand to SEQ ID NO: 2556134
acuaugccuaguuacauuc

SEQ ID NO: 2556136 - RNA, 19 nt, Artificial Sequence
  Description of Artificial Sequence: Synthetic oligonucleotide
  Sense strand starting at position 3499 of SEQ ID NO: 1888778
uguugcagaucucuugaaa

SEQ ID NO: 2556137 - RNA, 19 nt, Artificial Sequence
  Description of Artificial Sequence: Synthetic oligonucleotide
  Antisense strand to SEQ ID NO: 2556136
uuucaagagaucugcaaca

SEQ ID NO: 2556138 - RNA, 19 nt, Artificial Sequence
  Description of Artificial Sequence: Synthetic oligonucleotide
  Sense strand starting at position 3547 of SEQ ID NO: 1888778
ucaugauagucauuagacc

SEQ ID NO: 2556139 - RNA, 19 nt, Artificial Sequence
  Description of Artificial Sequence: Synthetic oligonucleotide
  Antisense strand to SEQ ID NO: 2556138
ggucuaaugacuaucauga

SEQ ID NO: 2556140 - RNA, 19 nt, Artificial Sequence
  Description of Artificial Sequence: Synthetic oligonucleotide
  Sense strand starting at position 3600 of SEQ ID NO: 1888778
ggaguacauauacgauuau

SEQ ID NO: 2556141 - RNA, 19 nt, Artificial Sequence
  Description of Artificial Sequence: Synthetic oligonucleotide
  Antisense strand to SEQ ID NO: 2556140
auaaucguauauguacucc

SEQ ID NO: 2556142 - RNA, 19 nt, Artificial Sequence
  Description of Artificial Sequence: Synthetic oligonucleotide
  Sense strand starting at position 3611 of SEQ ID NO: 1888778
acgauuauacuauagcaca

SEQ ID NO: 2556143 - RNA, 19 nt, Artificial Sequence
  Description of Artificial Sequence: Synthetic oligonucleotide
  Antisense strand to SEQ ID NO: 2556142
ugugcuauaguauaaucgu

SEQ ID NO: 2556144 - RNA, 19 nt, Artificial Sequence
  Description of Artificial Sequence: Synthetic oligonucleotide
  Sense strand starting at position 139 of SEQ ID NO: 1888779
augcauacagauugagacu

SEQ ID NO: 2556145 - RNA, 19 nt, Artificial Sequence
  Description of Artificial Sequence: Synthetic oligonucleotide
  Antisense strand to SEQ ID NO: 2556144
agucucaaucuguaugcau

SEQ ID NO: 2556146 - RNA, 19 nt, Artificial Sequence
  Description of Artificial Sequence: Synthetic oligonucleotide
  Sense strand starting at position 237 of SEQ ID NO: 1888779
ugcuuccaagcuuaugaaa

SEQ ID NO: 2556147 - RNA, 19 nt, Artificial Sequence
  Description of Artificial Sequence: Synthetic oligonucleotide
  Antisense strand to SEQ ID NO: 2556146
uuucauaagcuuggaagca

SEQ ID NO: 2556148 - RNA, 19 nt, Artificial Sequence
  Description of Artificial Sequence: Synthetic oligonucleotide
  Sense strand starting at position 274 of SEQ ID NO: 1888779
gcaaauaaucuuggguaau

SEQ ID NO: 2556149 - RNA, 19 nt, Artificial Sequence
  Description of Artificial Sequence: Synthetic oligonucleotide
  Antisense strand to SEQ ID NO: 2556148
auuacccaagauuauuugc

SEQ ID NO: 2556150 - RNA, 19 nt, Artificial Sequence
  Description of Artificial Sequence: Synthetic oligonucleotide
  Sense strand starting at position 437 of SEQ ID NO: 1888779
aggagcagccauuacuuaa

SEQ ID NO: 2556151 - RNA, 19 nt, Artificial Sequence
  Description of Artificial Sequence: Synthetic oligonucleotide
  Antisense strand to SEQ ID NO: 2556150
uuaaguaauggcugcuccu

SEQ ID NO: 2556152 - RNA, 19 nt, Artificial Sequence
  Description of Artificial Sequence: Synthetic oligonucleotide
  Sense strand starting at position 572 of SEQ ID NO: 1888779
acaaauaacuacgguauuu

SEQ ID NO: 2556153 - RNA, 19 nt, Artificial Sequence
  Description of Artificial Sequence: Synthetic oligonucleotide
  Antisense strand to SEQ ID NO: 2556152
aaauaccguaguuauuugu

SEQ ID NO: 2556154 - RNA, 19 nt, Artificial Sequence
  Description of Artificial Sequence: Synthetic oligonucleotide
  Sense strand starting at position 582 of SEQ ID NO: 1888779
acgguauuucuaugccaaa

SEQ ID NO: 2556155 - RNA, 19 nt, Artificial Sequence
  Description of Artificial Sequence: Synthetic oligonucleotide
  Antisense strand to SEQ ID NO: 2556154
uuuggcauagaaauaccgu

SEQ ID NO: 2556156 - RNA, 19 nt, Artificial Sequence
  Description of Artificial Sequence: Synthetic oligonucleotide
  Sense strand starting at position 646 of SEQ ID NO: 1888779
cugcaaucgagauacaugu

SEQ ID NO: 2556157 - RNA, 19 nt, Artificial Sequence
  Description of Artificial Sequence: Synthetic oligonucleotide
  Antisense strand to SEQ ID NO: 2556156
acauguaucucgauugcag

SEQ ID NO: 2556158 - RNA, 19 nt, Artificial Sequence
  Description of Artificial Sequence: Synthetic oligonucleotide
  Sense strand starting at position 690 of SEQ ID NO: 1888779
cgaccuaaacuccgugaaa

SEQ ID NO: 2556159 - RNA, 19 nt, Artificial Sequence
  Description of Artificial Sequence: Synthetic oligonucleotide
  Antisense strand to SEQ ID NO: 2556158
uuucacggaguuuaggucg

SEQ ID NO: 2556160 - RNA, 19 nt, Artificial Sequence
  Description of Artificial Sequence: Synthetic oligonucleotide
  Sense strand starting at position 691 of SEQ ID NO: 1888779
gaccuaaacuccgugaaac

SEQ ID NO: 2556161 - RNA, 19 nt, Artificial Sequence
  Description of Artificial Sequence: Synthetic oligonucleotide
  Antisense strand to SEQ ID NO: 2556160
guuucacggaguuuagguc

SEQ ID NO: 2556162 - RNA, 19 nt, Artificial Sequence
  Description of Artificial Sequence: Synthetic oligonucleotide
  Sense strand starting at position 692 of SEQ ID NO: 1888779
accuaaacuccgugaaacu

SEQ ID NO: 2556163 - RNA, 19 nt, Artificial Sequence
  Description of Artificial Sequence: Synthetic oligonucleotide
  Antisense strand to SEQ ID NO: 2556162
aguuucacggaguuuaggu

SEQ ID NO: 2556164 - RNA, 19 nt, Artificial Sequence
  Description of Artificial Sequence: Synthetic oligonucleotide
  Sense strand starting at position 693 of SEQ ID NO: 1888779
ccuaaacuccgugaaacuu

SEQ ID NO: 2556165 - RNA, 19 nt, Artificial Sequence
  Description of Artificial Sequence: Synthetic oligonucleotide
  Antisense strand to SEQ ID NO: 2556164
aaguuucacggaguuuagg

SEQ ID NO: 2556166 - RNA, 19 nt, Artificial Sequence
  Description of Artificial Sequence: Synthetic oligonucleotide
  Sense strand starting at position 817 of SEQ ID NO: 1888779
gcaaguuaaguccgaaauu

SEQ ID NO: 2556167 - RNA, 19 nt, Artificial Sequence
  Description of Artificial Sequence: Synthetic oligonucleotide
  Antisense strand to SEQ ID NO: 2556166
aauuucggacuuaacuugc

SEQ ID NO: 2556168 - RNA, 19 nt, Artificial Sequence
  Description of Artificial Sequence: Synthetic oligonucleotide
  Sense strand starting at position 818 of SEQ ID NO: 1888779
caaguuaaguccgaaauuu

SEQ ID NO: 2556169 - RNA, 19 nt, Artificial Sequence
  Description of Artificial Sequence: Synthetic oligonucleotide
  Antisense strand to SEQ ID NO: 2556168
aaauuucggacuuaacuug

SEQ ID NO: 2556170 - RNA, 19 nt, Artificial Sequence
  Description of Artificial Sequence: Synthetic oligonucleotide
  Sense strand starting at position 927 of SEQ ID NO: 1888779
gcaguugugucgacccagu

SEQ ID NO: 2556171 - RNA, 19 nt, Artificial Sequence
  Description of Artificial Sequence: Synthetic oligonucleotide
  Antisense strand to SEQ ID NO: 2556170
acugggucgacacaacugc

SEQ ID NO: 2556172 - RNA, 19 nt, Artificial Sequence
  Description of Artificial Sequence: Synthetic oligonucleotide
  Sense strand starting at position 960 of SEQ ID NO: 1888779
aagcgaucccgucucuguu

SEQ ID NO: 2556173 - RNA, 19 nt, Artificial Sequence
  Description of Artificial Sequence: Synthetic oligonucleotide
  Antisense strand to SEQ ID NO: 2556172
aacagagacgggaucgcuu

SEQ ID NO: 2556174 - RNA, 19 nt, Artificial Sequence
  Description of Artificial Sequence: Synthetic oligonucleotide
  Sense strand starting at position 1002 of SEQ ID NO: 1888779
gcgauuucgcaagggagca

SEQ ID NO: 2556175 - RNA, 19 nt, Artificial Sequence
  Description of Artificial Sequence: Synthetic oligonucleotide
  Antisense strand to SEQ ID NO: 2556174
ugcucccuugcgaaaucgc

SEQ ID NO: 2556176 - RNA, 19 nt, Artificial Sequence
  Description of Artificial Sequence: Synthetic oligonucleotide
  Sense strand starting at position 1003 of SEQ ID NO: 1888779
cgauuucgcaagggagcaa

SEQ ID NO: 2556177 - RNA, 19 nt, Artificial Sequence
  Description of Artificial Sequence: Synthetic oligonucleotide
  Antisense strand to SEQ ID NO: 2556176
uugcucccuugcgaaaucg

SEQ ID NO: 2556178 - RNA, 19 nt, Artificial Sequence
  Description of Artificial Sequence: Synthetic oligonucleotide
  Sense strand starting at position 1056 of SEQ ID NO: 1888779
aggaaauaguuuccggaag

SEQ ID NO: 2556179 - RNA, 19 nt, Artificial Sequence
  Description of Artificial Sequence: Synthetic oligonucleotide
  Antisense strand to SEQ ID NO: 2556178
cuuccggaaacuauuuccu

SEQ ID NO: 2556180 - RNA, 19 nt, Artificial Sequence
  Description of Artificial Sequence: Synthetic oligonucleotide
  Sense strand starting at position 1264 of SEQ ID NO: 1888779
gacacaguuuacucguuaa

SEQ ID NO: 2556181 - RNA, 19 nt, Artificial Sequence
  Description of Artificial Sequence: Synthetic oligonucleotide
  Antisense strand to SEQ ID NO: 2556180
uuaacgaguaaacuguguc

SEQ ID NO: 2556182 - RNA, 19 nt, Artificial Sequence
  Description of Artificial Sequence: Synthetic oligonucleotide
  Sense strand starting at position 1275 of SEQ ID NO: 1888779
cucguuaacgcucagggaa

SEQ ID NO: 2556183 - RNA, 19 nt, Artificial Sequence
  Description of Artificial Sequence: Synthetic oligonucleotide
  Antisense strand to SEQ ID NO: 2556182
uucccugagcguuaacgag

SEQ ID NO: 2556184 - RNA, 19 nt, Artificial Sequence
  Description of Artificial Sequence: Synthetic oligonucleotide
  Sense strand starting at position 2258 of SEQ ID NO: 1888779
gguugugcugguuaaauac

SEQ ID NO: 2556185 - RNA, 19 nt, Artificial Sequence
  Description of Artificial Sequence: Synthetic oligonucleotide
  Antisense strand to SEQ ID NO: 2556184
guauuuaaccagcacaacc

SEQ ID NO: 2556186 - RNA, 19 nt, Artificial Sequence
  Description of Artificial Sequence: Synthetic oligonucleotide
  Sense strand starting at position 2581 of SEQ ID NO: 1888779
uuuggcacugcuggaaaua

SEQ ID NO: 2556187 - RNA, 19 nt, Artificial Sequence
  Description of Artificial Sequence: Synthetic oligonucleotide
  Antisense strand to SEQ ID NO: 2556186
uauuuccagcagugccaaa

SEQ ID NO: 2556188 - RNA, 19 nt, Artificial Sequence
  Description of Artificial Sequence: Synthetic oligonucleotide
  Sense strand starting at position 2582 of SEQ ID NO: 1888779
uuggcacugcuggaaauaa

SEQ ID NO: 2556189 - RNA, 19 nt, Artificial Sequence
  Description of Artificial Sequence: Synthetic oligonucleotide
  Antisense strand to SEQ ID NO: 2556188
uuauuuccagcagugccaa

SEQ ID NO: 2556190 - RNA, 19 nt, Artificial Sequence
  Description of Artificial Sequence: Synthetic oligonucleotide
  Sense strand starting at position 2866 of SEQ ID NO: 1888779
uguguuuacccugugucuu

SEQ ID NO: 2556191 - RNA, 19 nt, Artificial Sequence
  Description of Artificial Sequence: Synthetic oligonucleotide
  Antisense strand to SEQ ID NO: 2556190
aagacacaggguaaacaca

SEQ ID NO: 2556192 - RNA, 19 nt, Artificial Sequence
  Description of Artificial Sequence: Synthetic oligonucleotide
  Sense strand starting at position 2935 of SEQ ID NO: 1888779
gcgggaucugcagaauguu

SEQ ID NO: 2556193 - RNA, 19 nt, Artificial Sequence
  Description of Artificial Sequence: Synthetic oligonucleotide
  Antisense strand to SEQ ID NO: 2556192
aacauucugcagaucccgc

SEQ ID NO: 2556194 - RNA, 19 nt, Artificial Sequence
  Description of Artificial Sequence: Synthetic oligonucleotide
  Sense strand starting at position 2944 of SEQ ID NO: 1888779
gcagaauguuggguucuau

SEQ ID NO: 2556195 - RNA, 19 nt, Artificial Sequence
  Description of Artificial Sequence: Synthetic oligonucleotide
  Antisense strand to SEQ ID NO: 2556194
auagaacccaacauucugc

SEQ ID NO: 2556196 - RNA, 19 nt, Artificial Sequence
  Description of Artificial Sequence: Synthetic oligonucleotide
  Sense strand starting at position 2953 of SEQ ID NO: 1888779
uggguucuauugccaugau

SEQ ID NO: 2556197 - RNA, 19 nt, Artificial Sequence
  Description of Artificial Sequence: Synthetic oligonucleotide
  Antisense strand to SEQ ID NO: 2556196
aucauggcaauagaaccca

SEQ ID NO: 2556198 - RNA, 19 nt, Artificial Sequence
  Description of Artificial Sequence: Synthetic oligonucleotide
  Sense strand starting at position 2956 of SEQ ID NO: 1888779
guucuauugccaugauuuc

SEQ ID NO: 2556199 - RNA, 19 nt, Artificial Sequence
  Description of Artificial Sequence: Synthetic oligonucleotide
  Antisense strand to SEQ ID NO: 2556198
gaaaucauggcaauagaac

SEQ ID NO: 2556200 - RNA, 19 nt, Artificial Sequence
  Description of Artificial Sequence: Synthetic oligonucleotide
  Sense strand starting at position 2975 of SEQ ID NO: 1888779
aguggagccuucuuacaaa

SEQ ID NO: 2556201 - RNA, 19 nt, Artificial Sequence
  Description of Artificial Sequence: Synthetic oligonucleotide
  Antisense strand to SEQ ID NO: 2556200
uuuguaagaaggcuccacu

SEQ ID NO: 2556202 - RNA, 19 nt, Artificial Sequence
  Description of Artificial Sequence: Synthetic oligonucleotide
  Sense strand starting at position 3148 of SEQ ID NO: 1888779
aaggcuuuagucugacuuu

SEQ ID NO: 2556203 - RNA, 19 nt, Artificial Sequence
  Description of Artificial Sequence: Synthetic oligonucleotide
  Antisense strand to SEQ ID NO: 2556202
aaagucagacuaaagccuu

SEQ ID NO: 2556204 - RNA, 19 nt, Artificial Sequence
  Description of Artificial Sequence: Synthetic oligonucleotide
  Sense strand starting at position 3245 of SEQ ID NO: 1888779
ugucuuauaacagggauag

SEQ ID NO: 2556205 - RNA, 19 nt, Artificial Sequence
  Description of Artificial Sequence: Synthetic oligonucleotide
  Antisense strand to SEQ ID NO: 2556204
cuaucccuguuauaagaca

SEQ ID NO: 2556206 - RNA, 19 nt, Artificial Sequence
  Description of Artificial Sequence: Synthetic oligonucleotide
  Sense strand starting at position 3286 of SEQ ID NO: 1888779
ggacaagauucuguuuaua

SEQ ID NO: 2556207 - RNA, 19 nt, Artificial Sequence
  Description of Artificial Sequence: Synthetic oligonucleotide
  Antisense strand to SEQ ID NO: 2556206
uauaaacagaaucuugucc

SEQ ID NO: 2556208 - RNA, 19 nt, Artificial Sequence
  Description of Artificial Sequence: Synthetic oligonucleotide
  Sense strand starting at position 3296 of SEQ ID NO: 1888779
cuguuuauaaacggaguuu

SEQ ID NO: 2556209 - RNA, 19 nt, Artificial Sequence
  Description of Artificial Sequence: Synthetic oligonucleotide
  Antisense strand to SEQ ID NO: 2556208
aaacuccguuuauaaacag

SEQ ID NO: 2556210 - RNA, 19 nt, Artificial Sequence
  Description of Artificial Sequence: Synthetic oligonucleotide
  Sense strand starting at position 3421 of SEQ ID NO: 1888779
accaguauucagcgggaag

SEQ ID NO: 2556211 - RNA, 19 nt, Artificial Sequence
  Description of Artificial Sequence: Synthetic oligonucleotide
  Antisense strand to SEQ ID NO: 2556210
cuucccgcugaauacuggu

SEQ ID NO: 2556212 - RNA, 19 nt, Artificial Sequence
  Description of Artificial Sequence: Synthetic oligonucleotide
  Sense strand starting at position 3424 of SEQ ID NO: 1888779
aguauucagcgggaagcua

SEQ ID NO: 2556213 - RNA, 19 nt, Artificial Sequence
  Description of Artificial Sequence: Synthetic oligonucleotide
  Antisense strand to SEQ ID NO: 2556212
uagcuucccgcugaauacu

SEQ ID NO: 2556214 - RNA, 19 nt, Artificial Sequence
  Description of Artificial Sequence: Synthetic oligonucleotide
  Sense strand starting at position 3590 of SEQ ID NO: 1888779
cuugaaugaguguguacaa

SEQ ID NO: 2556215 - RNA, 19 nt, Artificial Sequence
  Description of Artificial Sequence: Synthetic oligonucleotide
  Antisense strand to SEQ ID NO: 2556214
uuguacacacucauucaag

SEQ ID NO: 2556216 - RNA, 19 nt, Artificial Sequence
  Description of Artificial Sequence: Synthetic oligonucleotide
  Sense strand starting at position 3591 of SEQ ID NO: 1888779
uugaaugaguguguacaaa

SEQ ID NO: 2556217 - RNA, 19 nt, Artificial Sequence
  Description of Artificial Sequence: Synthetic oligonucleotide
  Antisense strand to SEQ ID NO: 2556216
uuuguacacacucauucaa

SEQ ID NO: 2556218 - RNA, 19 nt, Artificial Sequence
  Description of Artificial Sequence: Synthetic oligonucleotide
  Sense strand starting at position 3642 of SEQ ID NO: 1888779
auuguuaacuuugucacaa

SEQ ID NO: 2556219 - RNA, 19 nt, Artificial Sequence
  Description of Artificial Sequence: Synthetic oligonucleotide
  Antisense strand to SEQ ID NO: 2556218
uugugacaaaguuaacaau

SEQ ID NO: 2556220 - RNA, 19 nt, Artificial Sequence
  Description of Artificial Sequence: Synthetic oligonucleotide
  Sense strand starting at position 3643 of SEQ ID NO: 1888779
uuguuaacuuugucacaaa

SEQ ID NO: 2556221 - RNA, 19 nt, Artificial Sequence
  Description of Artificial Sequence: Synthetic oligonucleotide
  Antisense strand to SEQ ID NO: 2556220
uuugugacaaaguuaacaa

SEQ ID NO: 2556222 - RNA, 19 nt, Artificial Sequence
  Description of Artificial Sequence: Synthetic oligonucleotide
  Sense strand starting at position 3790 of SEQ ID NO: 1888779
ugacuaucucccugaaguu

SEQ ID NO: 2556223 - RNA, 19 nt, Artificial Sequence
  Description of Artificial Sequence: Synthetic oligonucleotide
  Antisense strand to SEQ ID NO: 2556222
aacuucagggagauaguca

SEQ ID NO: 2556224 - RNA, 19 nt, Artificial Sequence
  Description of Artificial Sequence: Synthetic oligonucleotide
  Sense strand starting at position 830 of SEQ ID NO: 1888780
agagaaccguccucccuau

SEQ ID NO: 2556225 - RNA, 19 nt, Artificial Sequence
  Description of Artificial Sequence: Synthetic oligonucleotide
  Antisense strand to SEQ ID NO: 2556224
auagggaggacgguucucu

SEQ ID NO: 2556226 - RNA, 19 nt, Artificial Sequence
  Description of Artificial Sequence: Synthetic oligonucleotide
  Sense strand starting at position 2326 of SEQ ID NO: 1888780
uacgcugauucuguauaga

SEQ ID NO: 2556227 - RNA, 19 nt, Artificial Sequence
  Description of Artificial Sequence: Synthetic oligonucleotide
  Antisense strand to SEQ ID NO: 2556226
ucuauacagaaucagcgua

SEQ ID NO: 2556228 - RNA, 19 nt, Artificial Sequence
  Description of Artificial Sequence: Synthetic oligonucleotide
  Sense strand starting at position 2329 of SEQ ID NO: 1888780
gcugauucuguauagaaag

SEQ ID NO: 2556229 - RNA, 19 nt, Artificial Sequence
  Description of Artificial Sequence: Synthetic oligonucleotide
  Antisense strand to SEQ ID NO: 2556228
cuuucuauacagaaucagc

SEQ ID NO: 2556230 - RNA, 19 nt, Artificial Sequence
  Description of Artificial Sequence: Synthetic oligonucleotide
  Sense strand starting at position 2435 of SEQ ID NO: 1888780
cuuuaauucgcauggugca

SEQ ID NO: 2556231 - RNA, 19 nt, Artificial Sequence
  Description of Artificial Sequence: Synthetic oligonucleotide
  Antisense strand to SEQ ID NO: 2556230
ugcaccaugcgaauuaaag

SEQ ID NO: 2556232 - RNA, 19 nt, Artificial Sequence
  Description of Artificial Sequence: Synthetic oligonucleotide
  Sense strand starting at position 2498 of SEQ ID NO: 1888780
uucccuuucugguauauuu

SEQ ID NO: 2556233 - RNA, 19 nt, Artificial Sequence
  Description of Artificial Sequence: Synthetic oligonucleotide
  Antisense strand to SEQ ID NO: 2556232
aaauauaccagaaagggaa

SEQ ID NO: 2556234 - RNA, 19 nt, Artificial Sequence
  Description of Artificial Sequence: Synthetic oligonucleotide
  Sense strand starting at position 2506 of SEQ ID NO: 1888780
cugguauauuugcugguca

SEQ ID NO: 2556235 - RNA, 19 nt, Artificial Sequence
  Description of Artificial Sequence: Synthetic oligonucleotide
  Antisense strand to SEQ ID NO: 2556234
ugaccagcaaauauaccag

SEQ ID NO: 2556236 - RNA, 19 nt, Artificial Sequence
  Description of Artificial Sequence: Synthetic oligonucleotide
  Sense strand starting at position 2510 of SEQ ID NO: 1888780
uauauuugcuggucacgua

SEQ ID NO: 2556237 - RNA, 19 nt, Artificial Sequence
  Description of Artificial Sequence: Synthetic oligonucleotide
  Antisense strand to SEQ ID NO: 2556236
uacgugaccagcaaauaua

SEQ ID NO: 2556238 - RNA, 19 nt, Artificial Sequence
  Description of Artificial Sequence: Synthetic oligonucleotide
  Sense strand starting at position 2511 of SEQ ID NO: 1888780
auauuugcuggucacguau

SEQ ID NO: 2556239 - RNA, 19 nt, Artificial Sequence
  Description of Artificial Sequence: Synthetic oligonucleotide
  Antisense strand to SEQ ID NO: 2556238
auacgugaccagcaaauau

SEQ ID NO: 2556240 - RNA, 19 nt, Artificial Sequence
  Description of Artificial Sequence: Synthetic oligonucleotide
  Sense strand starting at position 2522 of SEQ ID NO: 1888780
ucacguauaucucuuuauu

SEQ ID NO: 2556241 - RNA, 19 nt, Artificial Sequence
  Description of Artificial Sequence: Synthetic oligonucleotide
  Antisense strand to SEQ ID NO: 2556240
aauaaagagauauacguga

SEQ ID NO: 2556242 - RNA, 19 nt, Artificial Sequence
  Description of Artificial Sequence: Synthetic oligonucleotide
  Sense strand starting at position 2530 of SEQ ID NO: 1888780
aucucuuuauuggcgaauu

SEQ ID NO: 2556243 - RNA, 19 nt, Artificial Sequence
  Description of Artificial Sequence: Synthetic oligonucleotide
  Antisense strand to SEQ ID NO: 2556242
aauucgccaauaaagagau

SEQ ID NO: 2556244 - RNA, 19 nt, Artificial Sequence
  Description of Artificial Sequence: Synthetic oligonucleotide
  Sense strand starting at position 2663 of SEQ ID NO: 1888780
uguugccagugugcuuaaa

SEQ ID NO: 2556245 - RNA, 19 nt, Artificial Sequence
  Description of Artificial Sequence: Synthetic oligonucleotide
  Antisense strand to SEQ ID NO: 2556244
uuuaagcacacuggcaaca

SEQ ID NO: 2556246 - RNA, 19 nt, Artificial Sequence
  Description of Artificial Sequence: Synthetic oligonucleotide
  Sense strand starting at position 2775 of SEQ ID NO: 1888780
gcucucacuucguuauggu

SEQ ID NO: 2556247 - RNA, 19 nt, Artificial Sequence
  Description of Artificial Sequence: Synthetic oligonucleotide
  Antisense strand to SEQ ID NO: 2556246
accauaacgaagugagagc

SEQ ID NO: 2556248 - RNA, 19 nt, Artificial Sequence
  Description of Artificial Sequence: Synthetic oligonucleotide
  Sense strand starting at position 2782 of SEQ ID NO: 1888780
cuucguuauggucaugacu

SEQ ID NO: 2556249 - RNA, 19 nt, Artificial Sequence
  Description of Artificial Sequence: Synthetic oligonucleotide
  Antisense strand to SEQ ID NO: 2556248
agucaugaccauaacgaag

SEQ ID NO: 2556250 - RNA, 19 nt, Artificial Sequence
  Description of Artificial Sequence: Synthetic oligonucleotide
  Sense strand starting at position 2862 of SEQ ID NO: 1888780
aaagguugacguggguauu

SEQ ID NO: 2556251 - RNA, 19 nt, Artificial Sequence
  Description of Artificial Sequence: Synthetic oligonucleotide
  Antisense strand to SEQ ID NO: 2556250
aauacccacgucaaccuuu

SEQ ID NO: 2556252 - RNA, 19 nt, Artificial Sequence
  Description of Artificial Sequence: Synthetic oligonucleotide
  Sense strand starting at position 2872 of SEQ ID NO: 1888780
guggguauuuaagaacucu

SEQ ID NO: 2556253 - RNA, 19 nt, Artificial Sequence
  Description of Artificial Sequence: Synthetic oligonucleotide
  Antisense strand to SEQ ID NO: 2556252
agaguucuuaaauacccac

SEQ ID NO: 2556254 - RNA, 19 nt, Artificial Sequence
  Description of Artificial Sequence: Synthetic oligonucleotide
  Sense strand starting at position 2904 of SEQ ID NO: 1888780
caccgucacgccugaucau

SEQ ID NO: 2556255 - RNA, 19 nt, Artificial Sequence
  Description of Artificial Sequence: Synthetic oligonucleotide
  Antisense strand to SEQ ID NO: 2556254
augaucaggcgugacggug

SEQ ID NO: 2556256 - RNA, 19 nt, Artificial Sequence
  Description of Artificial Sequence: Synthetic oligonucleotide
  Sense strand starting at position 2913 of SEQ ID NO: 1888780
gccugaucaucucuauggu

SEQ ID NO: 2556257 - RNA, 19 nt, Artificial Sequence
  Description of Artificial Sequence: Synthetic oligonucleotide
  Antisense strand to SEQ ID NO: 2556256
accauagagaugaucaggc

SEQ ID NO: 2556258 - RNA, 19 nt, Artificial Sequence
  Description of Artificial Sequence: Synthetic oligonucleotide
  Sense strand starting at position 2914 of SEQ ID NO: 1888780
ccugaucaucucuauggua

SEQ ID NO: 2556259 - RNA, 19 nt, Artificial Sequence
  Description of Artificial Sequence: Synthetic oligonucleotide
  Antisense strand to SEQ ID NO: 2556258
uaccauagagaugaucagg

SEQ ID NO: 2556260 - RNA, 19 nt, Artificial Sequence
  Description of Artificial Sequence: Synthetic oligonucleotide
  Sense strand starting at position 2916 of SEQ ID NO: 1888780
ugaucaucucuaugguauc

SEQ ID NO: 2556261 - RNA, 19 nt, Artificial Sequence
  Description of Artificial Sequence: Synthetic oligonucleotide
  Antisense strand to SEQ ID NO: 2556260
gauaccauagagaugauca

SEQ ID NO: 2556262 - RNA, 19 nt, Artificial Sequence
  Description of Artificial Sequence: Synthetic oligonucleotide
  Sense strand starting at position 2926 of SEQ ID NO: 1888780
uaugguaucccacguaacu

SEQ ID NO: 2556263 - RNA, 19 nt, Artificial Sequence
  Description of Artificial Sequence: Synthetic oligonucleotide
  Antisense strand to SEQ ID NO: 2556262
aguuacgugggauaccaua

SEQ ID NO: 2556264 - RNA, 19 nt, Artificial Sequence
  Description of Artificial Sequence: Synthetic oligonucleotide
  Sense strand starting at position 2928 of SEQ ID NO: 1888780
ugguaucccacguaacuga

SEQ ID NO: 2556265 - RNA, 19 nt, Artificial Sequence
  Description of Artificial Sequence: Synthetic oligonucleotide
  Antisense strand to SEQ ID NO: 2556264
ucaguuacgugggauacca

SEQ ID NO: 2556266 - RNA, 19 nt, Artificial Sequence
  Description of Artificial Sequence: Synthetic oligonucleotide
  Sense strand starting at position 3018 of SEQ ID NO: 1888780
guuccagaaucacuggauu

SEQ ID NO: 2556267 - RNA, 19 nt, Artificial Sequence
  Description of Artificial Sequence: Synthetic oligonucleotide
  Antisense strand to SEQ ID NO: 2556266
aauccagugauucuggaac

SEQ ID NO: 2556268 - RNA, 19 nt, Artificial Sequence
  Description of Artificial Sequence: Synthetic oligonucleotide
  Sense strand starting at position 3029 of SEQ ID NO: 1888780
acuggauucugguuauugu

SEQ ID NO: 2556269 - RNA, 19 nt, Artificial Sequence
  Description of Artificial Sequence: Synthetic oligonucleotide
  Antisense strand to SEQ ID NO: 2556268
acaauaaccagaauccagu

SEQ ID NO: 2556270 - RNA, 19 nt, Artificial Sequence
  Description of Artificial Sequence: Synthetic oligonucleotide
  Sense strand starting at position 3036 of SEQ ID NO: 1888780
ucugguuauuguguggaca

SEQ ID NO: 2556271 - RNA, 19 nt, Artificial Sequence
  Description of Artificial Sequence: Synthetic oligonucleotide
  Antisense strand to SEQ ID NO: 2556270
uguccacacaauaaccaga

SEQ ID NO: 2556272 - RNA, 19 nt, Artificial Sequence
  Description of Artificial Sequence: Synthetic oligonucleotide
  Sense strand starting at position 3037 of SEQ ID NO: 1888780
cugguuauuguguggacau

SEQ ID NO: 2556273 - RNA, 19 nt, Artificial Sequence
  Description of Artificial Sequence: Synthetic oligonucleotide
  Antisense strand to SEQ ID NO: 2556272
auguccacacaauaaccag

SEQ ID NO: 2556274 - RNA, 19 nt, Artificial Sequence
  Description of Artificial Sequence: Synthetic oligonucleotide
  Sense strand starting at position 3039 of SEQ ID NO: 1888780
gguuauuguguggacauca

SEQ ID NO: 2556275 - RNA, 19 nt, Artificial Sequence
  Description of Artificial Sequence: Synthetic oligonucleotide
  Antisense strand to SEQ ID NO: 2556274
ugauguccacacaauaacc

SEQ ID NO: 2556276 - RNA, 19 nt, Artificial Sequence
  Description of Artificial Sequence: Synthetic oligonucleotide
  Sense strand starting at position 3044 of SEQ ID NO: 1888780
uuguguggacaucacgauu

SEQ ID NO: 2556277 - RNA, 19 nt, Artificial Sequence
  Description of Artificial Sequence: Synthetic oligonucleotide
  Antisense strand to SEQ ID NO: 2556276
aaucgugauguccacacaa

SEQ ID NO: 2556278 - RNA, 19 nt, Artificial Sequence
  Description of Artificial Sequence: Synthetic oligonucleotide
  Sense strand starting at position 3231 of SEQ ID NO: 1888780
ugucuuccacgcugaugau

SEQ ID NO: 2556279 - RNA, 19 nt, Artificial Sequence
  Description of Artificial Sequence: Synthetic oligonucleotide
  Antisense strand to SEQ ID NO: 2556278
aucaucagcguggaagaca

SEQ ID NO: 2556280 - RNA, 19 nt, Artificial Sequence
  Description of Artificial Sequence: Synthetic oligonucleotide
  Sense strand starting at position 3461 of SEQ ID NO: 1888780
ggauuauaggcgugcaauc

SEQ ID NO: 2556281 - RNA, 19 nt, Artificial Sequence
  Description of Artificial Sequence: Synthetic oligonucleotide
  Antisense strand to SEQ ID NO: 2556280
gauugcacgccuauaaucc

SEQ ID NO: 2556282 - RNA, 19 nt, Artificial Sequence
  Description of Artificial Sequence: Synthetic oligonucleotide
  Sense strand starting at position 3470 of SEQ ID NO: 1888780
gcgugcaaucucggcauuu

SEQ ID NO: 2556283 - RNA, 19 nt, Artificial Sequence
  Description of Artificial Sequence: Synthetic oligonucleotide
  Antisense strand to SEQ ID NO: 2556282
aaaugccgagauugcacgc

SEQ ID NO: 2556284 - RNA, 19 nt, Artificial Sequence
  Description of Artificial Sequence: Synthetic oligonucleotide
  Sense strand starting at position 3536 of SEQ ID NO: 1888780
agguccucgucucuacaaa

SEQ ID NO: 2556285 - RNA, 19 nt, Artificial Sequence
  Description of Artificial Sequence: Synthetic oligonucleotide
  Antisense strand to SEQ ID NO: 2556284
uuuguagagacgaggaccu

SEQ ID NO: 2556286 - RNA, 19 nt, Artificial Sequence
  Description of Artificial Sequence: Synthetic oligonucleotide
  Sense strand starting at position 3690 of SEQ ID NO: 1888780
gagugagacugccucuacu

SEQ ID NO: 2556287 - RNA, 19 nt, Artificial Sequence
  Description of Artificial Sequence: Synthetic oligonucleotide
  Antisense strand to SEQ ID NO: 2556286
aguagaggcagucucacuc

SEQ ID NO: 2556288 - RNA, 19 nt, Artificial Sequence
  Description of Artificial Sequence: Synthetic oligonucleotide
  Sense strand starting at position 3693 of SEQ ID NO: 1888780
ugagacugccucuacuaca

SEQ ID NO: 2556289 - RNA, 19 nt, Artificial Sequence
  Description of Artificial Sequence: Synthetic oligonucleotide
  Antisense strand to SEQ ID NO: 2556288
uguaguagaggcagucuca

SEQ ID NO: 2556290 - RNA, 19 nt, Artificial Sequence
  Description of Artificial Sequence: Synthetic oligonucleotide
  Sense strand starting at position 3745 of SEQ ID NO: 1888780
gcucuauauuguucugguu

SEQ ID NO: 2556291 - RNA, 19 nt, Artificial Sequence
  Description of Artificial Sequence: Synthetic oligonucleotide
  Antisense strand to SEQ ID NO: 2556290
aaccagaacaauauagagc

SEQ ID NO: 2556292 - RNA, 19 nt, Artificial Sequence
  Description of Artificial Sequence: Synthetic oligonucleotide
  Sense strand starting at position 3751 of SEQ ID NO: 1888780
uauuguucugguuaagaca

SEQ ID NO: 2556293 - RNA, 19 nt, Artificial Sequence
  Description of Artificial Sequence: Synthetic oligonucleotide
  Antisense strand to SEQ ID NO: 2556292
ugucuuaaccagaacaaua

SEQ ID NO: 2556294 - RNA, 19 nt, Artificial Sequence
  Description of Artificial Sequence: Synthetic oligonucleotide
  Sense strand starting at position 3788 of SEQ ID NO: 1888780
uuuacuucgcucuauaugu

SEQ ID NO: 2556295 - RNA, 19 nt, Artificial Sequence
  Description of Artificial Sequence: Synthetic oligonucleotide
  Antisense strand to SEQ ID NO: 2556294
acauauagagcgaaguaaa

SEQ ID NO: 2556296 - RNA, 19 nt, Artificial Sequence
  Description of Artificial Sequence: Synthetic oligonucleotide
  Sense strand starting at position 3796 of SEQ ID NO: 1888780
gcucuauaugucuguaugu

SEQ ID NO: 2556297 - RNA, 19 nt, Artificial Sequence
  Description of Artificial Sequence: Synthetic oligonucleotide
  Antisense strand to SEQ ID NO: 2556296
acauacagacauauagagc

SEQ ID NO: 2556298 - RNA, 19 nt, Artificial Sequence
  Description of Artificial Sequence: Synthetic oligonucleotide
  Sense strand starting at position 3813 of SEQ ID NO: 1888780
guccaaauguaugucugua

SEQ ID NO: 2556299 - RNA, 19 nt, Artificial Sequence
  Description of Artificial Sequence: Synthetic oligonucleotide
  Antisense strand to SEQ ID NO: 2556298
uacagacauacauuuggac

SEQ ID NO: 2556300 - RNA, 19 nt, Artificial Sequence
  Description of Artificial Sequence: Synthetic oligonucleotide
  Sense strand starting at position 3815 of SEQ ID NO: 1888780
ccaaauguaugucuguaca

SEQ ID NO: 2556301 - RNA, 19 nt, Artificial Sequence
  Description of Artificial Sequence: Synthetic oligonucleotide
  Antisense strand to SEQ ID NO: 2556300
uguacagacauacauuugg

SEQ ID NO: 2556302 - RNA, 19 nt, Artificial Sequence
  Description of Artificial Sequence: Synthetic oligonucleotide
  Sense strand starting at position 3827 of SEQ ID NO: 1888780
cuguacauauuccuuguau

SEQ ID NO: 2556303 - RNA, 19 nt, Artificial Sequence
  Description of Artificial Sequence: Synthetic oligonucleotide
  Antisense strand to SEQ ID NO: 2556302
auacaaggaauauguacag

SEQ ID NO: 2556304 - RNA, 19 nt, Artificial Sequence
  Description of Artificial Sequence: Synthetic oligonucleotide
  Sense strand starting at position 73 of SEQ ID NO: 1888781
auccuaucugcaugucaag

SEQ ID NO: 2556305 - RNA, 19 nt, Artificial Sequence
  Description of Artificial Sequence: Synthetic oligonucleotide
  Antisense strand to SEQ ID NO: 2556304
cuugacaugcagauaggau

SEQ ID NO: 2556306 - RNA, 19 nt, Artificial Sequence
  Description of Artificial Sequence: Synthetic oligonucleotide
  Sense strand starting at position 79 of SEQ ID NO: 1888781
ucugcaugucaagggcaaa

SEQ ID NO: 2556307 - RNA, 19 nt, Artificial Sequence
  Description of Artificial Sequence: Synthetic oligonucleotide
  Antisense strand to SEQ ID NO: 2556306
uuugcccuugacaugcaga

SEQ ID NO: 2556308 - RNA, 19 nt, Artificial Sequence
  Description of Artificial Sequence: Synthetic oligonucleotide
  Sense strand starting at position 80 of SEQ ID NO: 1888781
cugcaugucaagggcaaau

SEQ ID NO: 2556309 - RNA, 19 nt, Artificial Sequence
  Description of Artificial Sequence: Synthetic oligonucleotide
  Antisense strand to SEQ ID NO: 2556308
auuugcccuugacaugcag

SEQ ID NO: 2556310 - RNA, 19 nt, Artificial Sequence
  Description of Artificial Sequence: Synthetic oligonucleotide
  Sense strand starting at position 408 of SEQ ID NO: 1888781
aacgucaaugccugaaaga

SEQ ID NO: 2556311 - RNA, 19 nt, Artificial Sequence
  Description of Artificial Sequence: Synthetic oligonucleotide
  Antisense strand to SEQ ID NO: 2556310
ucuuucaggcauugacguu

SEQ ID NO: 2556312 - RNA, 19 nt, Artificial Sequence
  Description of Artificial Sequence: Synthetic oligonucleotide
  Sense strand starting at position 409 of SEQ ID NO: 1888781
acgucaaugccugaaagag

SEQ ID NO: 2556313 - RNA, 19 nt, Artificial Sequence
  Description of Artificial Sequence: Synthetic oligonucleotide
  Antisense strand to SEQ ID NO: 2556312
cucuuucaggcauugacgu

SEQ ID NO: 2556314 - RNA, 19 nt, Artificial Sequence
  Description of Artificial Sequence: Synthetic oligonucleotide
  Sense strand starting at position 929 of SEQ ID NO: 1888781
uagggcucggccuagaaga

SEQ ID NO: 2556315 - RNA, 19 nt, Artificial Sequence
  Description of Artificial Sequence: Synthetic oligonucleotide
  Antisense strand to SEQ ID NO: 2556314
ucuucuaggccgagcccua

SEQ ID NO: 2556316 - RNA, 19 nt, Artificial Sequence
  Description of Artificial Sequence: Synthetic oligonucleotide
  Sense strand starting at position 945 of SEQ ID NO: 1888781
agagaaccguccucccuau

SEQ ID NO: 2556317 - RNA, 19 nt, Artificial Sequence
  Description of Artificial Sequence: Synthetic oligonucleotide
  Antisense strand to SEQ ID NO: 2556316
auagggaggacgguucucu

SEQ ID NO: 2556318 - RNA, 19 nt, Artificial Sequence
  Description of Artificial Sequence: Synthetic oligonucleotide
  Sense strand starting at position 1457 of SEQ ID NO: 1888781
gggccuguucagugcauuu

SEQ ID NO: 2556319 - RNA, 19 nt, Artificial Sequence
  Description of Artificial Sequence: Synthetic oligonucleotide
  Antisense strand to SEQ ID NO: 2556318
aaaugcacugaacaggccc

SEQ ID NO: 2556320 - RNA, 19 nt, Artificial Sequence
  Description of Artificial Sequence: Synthetic oligonucleotide
  Sense strand starting at position 2389 of SEQ ID NO: 1888781
gaucgauugcugugacacu

SEQ ID NO: 2556321 - RNA, 19 nt, Artificial Sequence
  Description of Artificial Sequence: Synthetic oligonucleotide
  Antisense strand to SEQ ID NO: 2556320
agugucacagcaaucgauc

SEQ ID NO: 2556322 - RNA, 19 nt, Artificial Sequence
  Description of Artificial Sequence: Synthetic oligonucleotide
  Sense strand starting at position 2453 of SEQ ID NO: 1888781
uaagcugauucuguacaga

SEQ ID NO: 2556323 - RNA, 19 nt, Artificial Sequence
  Description of Artificial Sequence: Synthetic oligonucleotide
  Antisense strand to SEQ ID NO: 2556322
ucuguacagaaucagcuua

SEQ ID NO: 2556324 - RNA, 19 nt, Artificial Sequence
  Description of Artificial Sequence: Synthetic oligonucleotide
  Sense strand starting at position 2456 of SEQ ID NO: 1888781
gcugauucuguacagaaag

SEQ ID NO: 2556325 - RNA, 19 nt, Artificial Sequence
  Description of Artificial Sequence: Synthetic oligonucleotide
  Antisense strand to SEQ ID NO: 2556324
cuuucuguacagaaucagc

SEQ ID NO: 2556326 - RNA, 19 nt, Artificial Sequence
  Description of Artificial Sequence: Synthetic oligonucleotide
  Sense strand starting at position 2591 of SEQ ID NO: 1888781
guaauucugcgcuaaagag

SEQ ID NO: 2556327 - RNA, 19 nt, Artificial Sequence
  Description of Artificial Sequence: Synthetic oligonucleotide
  Antisense strand to SEQ ID NO: 2556326
cucuuuagcgcagaauuac

SEQ ID NO: 2556328 - RNA, 19 nt, Artificial Sequence
  Description of Artificial Sequence: Synthetic oligonucleotide
  Sense strand starting at position 2649 of SEQ ID NO: 1888781
uguauuugcuggucacgua

SEQ ID NO: 2556329 - RNA, 19 nt, Artificial Sequence
  Description of Artificial Sequence: Synthetic oligonucleotide
  Antisense strand to SEQ ID NO: 2556328
uacgugaccagcaaauaca

SEQ ID NO: 2556330 - RNA, 19 nt, Artificial Sequence
  Description of Artificial Sequence: Synthetic oligonucleotide
  Sense strand starting at position 2650 of SEQ ID NO: 1888781
guauuugcuggucacguau

SEQ ID NO: 2556331 - RNA, 19 nt, Artificial Sequence
  Description of Artificial Sequence: Synthetic oligonucleotide
  Antisense strand to SEQ ID NO: 2556330
auacgugaccagcaaauac

SEQ ID NO: 2556332 - RNA, 19 nt, Artificial Sequence
  Description of Artificial Sequence: Synthetic oligonucleotide
  Sense strand starting at position 2711 of SEQ ID NO: 1888781
agcagucuucuugauccau

SEQ ID NO: 2556333 - RNA, 19 nt, Artificial Sequence
  Description of Artificial Sequence: Synthetic oligonucleotide
  Antisense strand to SEQ ID NO: 2556332
auggaucaagaagacugcu

SEQ ID NO: 2556334 - RNA, 19 nt, Artificial Sequence
  Description of Artificial Sequence: Synthetic oligonucleotide
  Sense strand starting at position 2871 of SEQ ID NO: 1888781
guuuaauaaagccgggaaa

SEQ ID NO: 2556335 - RNA, 19 nt, Artificial Sequence
  Description of Artificial Sequence: Synthetic oligonucleotide
  Antisense strand to SEQ ID NO: 2556334
uuucccggcuuuauuaaac

SEQ ID NO: 2556336 - RNA, 19 nt, Artificial Sequence
  Description of Artificial Sequence: Synthetic oligonucleotide
  Sense strand starting at position 2872 of SEQ ID NO: 1888781
uuuaauaaagccgggaaau

SEQ ID NO: 2556337 - RNA, 19 nt, Artificial Sequence
  Description of Artificial Sequence: Synthetic oligonucleotide
  Antisense strand to SEQ ID NO: 2556336
auuucccggcuuuauuaaa

SEQ ID NO: 2556338 - RNA, 19 nt, Artificial Sequence
  Description of Artificial Sequence: Synthetic oligonucleotide
  Sense strand starting at position 2873 of SEQ ID NO: 1888781
uuaauaaagccgggaaaua

SEQ ID NO: 2556339 - RNA, 19 nt, Artificial Sequence
  Description of Artificial Sequence: Synthetic oligonucleotide
  Antisense strand to SEQ ID NO: 2556338
uauuucccggcuuuauuaa

SEQ ID NO: 2556340 - RNA, 19 nt, Artificial Sequence
  Description of Artificial Sequence: Synthetic oligonucleotide
  Sense strand starting at position 2898 of SEQ ID NO: 1888781
cuuuguuauggucaugacu

SEQ ID NO: 2556341 - RNA, 19 nt, Artificial Sequence
  Description of Artificial Sequence: Synthetic oligonucleotide
  Antisense strand to SEQ ID NO: 2556340
agucaugaccauaacaaag

SEQ ID NO: 2556342 - RNA, 19 nt, Artificial Sequence
  Description of Artificial Sequence: Synthetic oligonucleotide
  Sense strand starting at position 2973 of SEQ ID NO: 1888781
caaagauugacguggguau

SEQ ID NO: 2556343 - RNA, 19 nt, Artificial Sequence
  Description of Artificial Sequence: Synthetic oligonucleotide
  Antisense strand to SEQ ID NO: 2556342
auacccacgucaaucuuug

SEQ ID NO: 2556344 - RNA, 19 nt, Artificial Sequence
  Description of Artificial Sequence: Synthetic oligonucleotide
  Sense strand starting at position 2974 of SEQ ID NO: 1888781
aaagauugacguggguauu

SEQ ID NO: 2556345 - RNA, 19 nt, Artificial Sequence
  Description of Artificial Sequence: Synthetic oligonucleotide
  Antisense strand to SEQ ID NO: 2556344
aauacccacgucaaucuuu

SEQ ID NO: 2556346 - RNA, 19 nt, Artificial Sequence
  Description of Artificial Sequence: Synthetic oligonucleotide
  Sense strand starting at position 2984 of SEQ ID NO: 1888781
guggguauuuaagaacucu

SEQ ID NO: 2556347 - RNA, 19 nt, Artificial Sequence
  Description of Artificial Sequence: Synthetic oligonucleotide
  Antisense strand to SEQ ID NO: 2556346
agaguucuuaaauacccac

SEQ ID NO: 2556348 - RNA, 19 nt, Artificial Sequence
  Description of Artificial Sequence: Synthetic oligonucleotide
  Sense strand starting at position 3009 of SEQ ID NO: 1888781
accuguucgccgucacacu

SEQ ID NO: 2556349 - RNA, 19 nt, Artificial Sequence
  Description of Artificial Sequence: Synthetic oligonucleotide
  Antisense strand to SEQ ID NO: 2556348
agugugacggcgaacaggu

SEQ ID NO: 2556350 - RNA, 19 nt, Artificial Sequence
  Description of Artificial Sequence: Synthetic oligonucleotide
  Sense strand starting at position 3025 of SEQ ID NO: 1888781
acuugaucaucucuauggu

SEQ ID NO: 2556351 - RNA, 19 nt, Artificial Sequence
  Description of Artificial Sequence: Synthetic oligonucleotide
  Antisense strand to SEQ ID NO: 2556350
accauagagaugaucaagu

SEQ ID NO: 2556352 - RNA, 19 nt, Artificial Sequence
  Description of Artificial Sequence: Synthetic oligonucleotide
  Sense strand starting at position 3026 of SEQ ID NO: 1888781
cuugaucaucucuauggua

SEQ ID NO: 2556353 - RNA, 19 nt, Artificial Sequence
  Description of Artificial Sequence: Synthetic oligonucleotide
  Antisense strand to SEQ ID NO: 2556352
uaccauagagaugaucaag

SEQ ID NO: 2556354 - RNA, 19 nt, Artificial Sequence
  Description of Artificial Sequence: Synthetic oligonucleotide
  Sense strand starting at position 3028 of SEQ ID NO: 1888781
ugaucaucucuaugguauc

SEQ ID NO: 2556355 - RNA, 19 nt, Artificial Sequence
  Description of Artificial Sequence: Synthetic oligonucleotide
  Antisense strand to SEQ ID NO: 2556354
gauaccauagagaugauca

SEQ ID NO: 2556356 - RNA, 19 nt, Artificial Sequence
  Description of Artificial Sequence: Synthetic oligonucleotide
  Sense strand starting at position 3038 of SEQ ID NO: 1888781
uaugguaucccacguaacu

SEQ ID NO: 2556357 - RNA, 19 nt, Artificial Sequence
  Description of Artificial Sequence: Synthetic oligonucleotide
  Antisense strand to SEQ ID NO: 2556356
aguuacgugggauaccaua

SEQ ID NO: 2556358 - RNA, 19 nt, Artificial Sequence
  Description of Artificial Sequence: Synthetic oligonucleotide
  Sense strand starting at position 3047 of SEQ ID NO: 1888781
ccacguaacuguuuaagga

SEQ ID NO: 2556359 - RNA, 19 nt, Artificial Sequence
  Description of Artificial Sequence: Synthetic oligonucleotide
  Antisense strand to SEQ ID NO: 2556358
uccuuaaacaguuacgugg

SEQ ID NO: 2556360 - RNA, 19 nt, Artificial Sequence
  Description of Artificial Sequence: Synthetic oligonucleotide
  Sense strand starting at position 3048 of SEQ ID NO: 1888781
cacguaacuguuuaaggaa

SEQ ID NO: 2556361 - RNA, 19 nt, Artificial Sequence
  Description of Artificial Sequence: Synthetic oligonucleotide
  Antisense strand to SEQ ID NO: 2556360
uuccuuaaacaguuacgug

SEQ ID NO: 2556362 - RNA, 19 nt, Artificial Sequence
  Description of Artificial Sequence: Synthetic oligonucleotide
  Sense strand starting at position 3055 of SEQ ID NO: 1888781
cuguuuaaggaacguagua

SEQ ID NO: 2556363 - RNA, 19 nt, Artificial Sequence
  Description of Artificial Sequence: Synthetic oligonucleotide
  Antisense strand to SEQ ID NO: 2556362
uacuacguuccuuaaacag

SEQ ID NO: 2556364 - RNA, 19 nt, Artificial Sequence
  Description of Artificial Sequence: Synthetic oligonucleotide
  Sense strand starting at position 3103 of SEQ ID NO: 1888781
cuaccuacaugaucaugua

SEQ ID NO: 2556365 - RNA, 19 nt, Artificial Sequence
  Description of Artificial Sequence: Synthetic oligonucleotide
  Antisense strand to SEQ ID NO: 2556364
uacaugaucauguagguag

SEQ ID NO: 2556366 - RNA, 19 nt, Artificial Sequence
  Description of Artificial Sequence: Synthetic oligonucleotide
  Sense strand starting at position 3438 of SEQ ID NO: 1888781
aagagaauuugugaguaac

SEQ ID NO: 2556367 - RNA, 19 nt, Artificial Sequence
  Description of Artificial Sequence: Synthetic oligonucleotide
  Antisense strand to SEQ ID NO: 2556366
guuacucacaaauucucuu

SEQ ID NO: 2556368 - RNA, 19 nt, Artificial Sequence
  Description of Artificial Sequence: Synthetic oligonucleotide
  Sense strand starting at position 3452 of SEQ ID NO: 1888781
guaacagaccuaugcuuaa

SEQ ID NO: 2556369 - RNA, 19 nt, Artificial Sequence
  Description of Artificial Sequence: Synthetic oligonucleotide
  Antisense strand to SEQ ID NO: 2556368
uuaagcauaggucuguuac

SEQ ID NO: 2556370 - RNA, 19 nt, Artificial Sequence
  Description of Artificial Sequence: Synthetic oligonucleotide
  Sense strand starting at position 3455 of SEQ ID NO: 1888781
acagaccuaugcuuaaaga

SEQ ID NO: 2556371 - RNA, 19 nt, Artificial Sequence
  Description of Artificial Sequence: Synthetic oligonucleotide
  Antisense strand to SEQ ID NO: 2556370
ucuuuaagcauaggucugu

SEQ ID NO: 2556372 - RNA, 19 nt, Artificial Sequence
  Description of Artificial Sequence: Synthetic oligonucleotide
  Sense strand starting at position 3463 of SEQ ID NO: 1888781
augcuuaaagaauggcaga

SEQ ID NO: 2556373 - RNA, 19 nt, Artificial Sequence
  Description of Artificial Sequence: Synthetic oligonucleotide
  Antisense strand to SEQ ID NO: 2556372
ucugccauucuuuaagcau

SEQ ID NO: 2556374 - RNA, 19 nt, Artificial Sequence
  Description of Artificial Sequence: Synthetic oligonucleotide
  Sense strand starting at position 3628 of SEQ ID NO: 1888781
acuauuaugucaucugaug

SEQ ID NO: 2556375 - RNA, 19 nt, Artificial Sequence
  Description of Artificial Sequence: Synthetic oligonucleotide
  Antisense strand to SEQ ID NO: 2556374
caucagaugacauaauagu

SEQ ID NO: 2556376 - RNA, 19 nt, Artificial Sequence
  Description of Artificial Sequence: Synthetic oligonucleotide
  Sense strand starting at position 3642 of SEQ ID NO: 1888781
ugaugugaugcuuaauaua

SEQ ID NO: 2556377 - RNA, 19 nt, Artificial Sequence
  Description of Artificial Sequence: Synthetic oligonucleotide
  Antisense strand to SEQ ID NO: 2556376
uauauuaagcaucacauca

SEQ ID NO: 2556378 - RNA, 19 nt, Artificial Sequence
  Description of Artificial Sequence: Synthetic oligonucleotide
  Sense strand starting at position 3739 of SEQ ID NO: 1888781
cuuacuggaagugguuuaa

SEQ ID NO: 2556379 - RNA, 19 nt, Artificial Sequence
  Description of Artificial Sequence: Synthetic oligonucleotide
  Antisense strand to SEQ ID NO: 2556378
uuaaaccacuuccaguaag

SEQ ID NO: 2556380 - RNA, 19 nt, Artificial Sequence
  Description of Artificial Sequence: Synthetic oligonucleotide
  Sense strand starting at position 3765 of SEQ ID NO: 1888781
augguaguagaaugugaua

SEQ ID NO: 2556381 - RNA, 19 nt, Artificial Sequence
  Description of Artificial Sequence: Synthetic oligonucleotide
  Antisense strand to SEQ ID NO: 2556380
uaucacauucuacuaccau

SEQ ID NO: 2556382 - RNA, 19 nt, Artificial Sequence
  Description of Artificial Sequence: Synthetic oligonucleotide
  Sense strand starting at position 3767 of SEQ ID NO: 1888781
gguaguagaaugugauaag

SEQ ID NO: 2556383 - RNA, 19 nt, Artificial Sequence
  Description of Artificial Sequence: Synthetic oligonucleotide
  Antisense strand to SEQ ID NO: 2556382
cuuaucacauucuacuacc

SEQ ID NO: 2556384 - RNA, 19 nt, Artificial Sequence
  Description of Artificial Sequence: Synthetic oligonucleotide
  Sense strand starting at position 8 of SEQ ID NO: 1888783
ugcauugcucuugaaucca

SEQ ID NO: 2556385 - RNA, 19 nt, Artificial Sequence
  Description of Artificial Sequence: Synthetic oligonucleotide
  Antisense strand to SEQ ID NO: 2556384
uggauucaagagcaaugca

SEQ ID NO: 2556386 - RNA, 19 nt, Artificial Sequence
  Description of Artificial Sequence: Synthetic oligonucleotide
  Sense strand starting at position 74 of SEQ ID NO: 1888783
aucucuugccuacaagagu

SEQ ID NO: 2556387 - RNA, 19 nt, Artificial Sequence
  Description of Artificial Sequence: Synthetic oligonucleotide
  Antisense strand to SEQ ID NO: 2556386
acucuuguaggcaagagau

SEQ ID NO: 2556388 - RNA, 19 nt, Artificial Sequence
  Description of Artificial Sequence: Synthetic oligonucleotide
  Sense strand starting at position 362 of SEQ ID NO: 1888783
guucucucuggcuagaaug

SEQ ID NO: 2556389 - RNA, 19 nt, Artificial Sequence
  Description of Artificial Sequence: Synthetic oligonucleotide
  Antisense strand to SEQ ID NO: 2556388
cauucuagccagagagaac

SEQ ID NO: 2556390 - RNA, 19 nt, Artificial Sequence
  Description of Artificial Sequence: Synthetic oligonucleotide
  Sense strand starting at position 498 of SEQ ID NO: 1888783
ccugauuguggguaauguu

SEQ ID NO: 2556391 - RNA, 19 nt, Artificial Sequence
  Description of Artificial Sequence: Synthetic oligonucleotide
  Antisense strand to SEQ ID NO: 2556390
aacauuacccacaaucagg

SEQ ID NO: 2556392 - RNA, 19 nt, Artificial Sequence
  Description of Artificial Sequence: Synthetic oligonucleotide
  Sense strand starting at position 506 of SEQ ID NO: 1888783
uggguaauguuggugaaac

SEQ ID NO: 2556393 - RNA, 19 nt, Artificial Sequence
  Description of Artificial Sequence: Synthetic oligonucleotide
  Antisense strand to SEQ ID NO: 2556392
guuucaccaacauuaccca

SEQ ID NO: 2556394 - RNA, 19 nt, Artificial Sequence
  Description of Artificial Sequence: Synthetic oligonucleotide
  Sense strand starting at position 508 of SEQ ID NO: 1888783
gguaauguuggugaaacaa

SEQ ID NO: 2556395 - RNA, 19 nt, Artificial Sequence
  Description of Artificial Sequence: Synthetic oligonucleotide
  Antisense strand to SEQ ID NO: 2556394
uuguuucaccaacauuacc

SEQ ID NO: 2556396 - RNA, 19 nt, Artificial Sequence
  Description of Artificial Sequence: Synthetic oligonucleotide
  Sense strand starting at position 611 of SEQ ID NO: 1888783
gggacuaagcuuggugacu

SEQ ID NO: 2556397 - RNA, 19 nt, Artificial Sequence
  Description of Artificial Sequence: Synthetic oligonucleotide
  Antisense strand to SEQ ID NO: 2556396
agucaccaagcuuaguccc

SEQ ID NO: 2556398 - RNA, 19 nt, Artificial Sequence
  Description of Artificial Sequence: Synthetic oligonucleotide
  Sense strand starting at position 629 of SEQ ID NO: 1888783
uggacagucucauuggacu

SEQ ID NO: 2556399 - RNA, 19 nt, Artificial Sequence
  Description of Artificial Sequence: Synthetic oligonucleotide
  Antisense strand to SEQ ID NO: 2556398
aguccaaugagacugucca

SEQ ID NO: 2556400 - RNA, 19 nt, Artificial Sequence
  Description of Artificial Sequence: Synthetic oligonucleotide
  Sense strand starting at position 865 of SEQ ID NO: 1888783
cuccuaaguuaaucagaga

SEQ ID NO: 2556401 - RNA, 19 nt, Artificial Sequence
  Description of Artificial Sequence: Synthetic oligonucleotide
  Antisense strand to SEQ ID NO: 2556400
ucucugauuaacuuaggag

SEQ ID NO: 2556402 - RNA, 19 nt, Artificial Sequence
  Description of Artificial Sequence: Synthetic oligonucleotide
  Sense strand starting at position 903 of SEQ ID NO: 1888783
ccaacaauuucugauagga

SEQ ID NO: 2556403 - RNA, 19 nt, Artificial Sequence
  Description of Artificial Sequence: Synthetic oligonucleotide
  Antisense strand to SEQ ID NO: 2556402
uccuaucagaaauuguugg

SEQ ID NO: 2556404 - RNA, 19 nt, Artificial Sequence
  Description of Artificial Sequence: Synthetic oligonucleotide
  Sense strand starting at position 945 of SEQ ID NO: 1888783
ucugguucugcacaaacau

SEQ ID NO: 2556405 - RNA, 19 nt, Artificial Sequence
  Description of Artificial Sequence: Synthetic oligonucleotide
  Antisense strand to SEQ ID NO: 2556404
auguuugugcagaaccaga

SEQ ID NO: 2556406 - RNA, 19 nt, Artificial Sequence
  Description of Artificial Sequence: Synthetic oligonucleotide
  Sense strand starting at position 1031 of SEQ ID NO: 1888783
uguuccuuccauuagggua

SEQ ID NO: 2556407 - RNA, 19 nt, Artificial Sequence
  Description of Artificial Sequence: Synthetic oligonucleotide
  Antisense strand to SEQ ID NO: 2556406
uacccuaauggaaggaaca

SEQ ID NO: 2556408 - RNA, 19 nt, Artificial Sequence
  Description of Artificial Sequence: Synthetic oligonucleotide
  Sense strand starting at position 1251 of SEQ ID NO: 1888783
ugagucuggcuaggaauaa

SEQ ID NO: 2556409 - RNA, 19 nt, Artificial Sequence
  Description of Artificial Sequence: Synthetic oligonucleotide
  Antisense strand to SEQ ID NO: 2556408
uuauuccuagccagacuca

SEQ ID NO: 2556410 - RNA, 19 nt, Artificial Sequence
  Description of Artificial Sequence: Synthetic oligonucleotide
  Sense strand starting at position 1260 of SEQ ID NO: 1888783
cuaggaauaacgugggaug

SEQ ID NO: 2556411 - RNA, 19 nt, Artificial Sequence
  Description of Artificial Sequence: Synthetic oligonucleotide
  Antisense strand to SEQ ID NO: 2556410
caucccacguuauuccuag

SEQ ID NO: 2556412 - RNA, 19 nt, Artificial Sequence
  Description of Artificial Sequence: Synthetic oligonucleotide
  Sense strand starting at position 1261 of SEQ ID NO: 1888783
uaggaauaacgugggauga

SEQ ID NO: 2556413 - RNA, 19 nt, Artificial Sequence
  Description of Artificial Sequence: Synthetic oligonucleotide
  Antisense strand to SEQ ID NO: 2556412
ucaucccacguuauuccua

SEQ ID NO: 2556414 - RNA, 19 nt, Artificial Sequence
  Description of Artificial Sequence: Synthetic oligonucleotide
  Sense strand starting at position 1262 of SEQ ID NO: 1888783
aggaauaacgugggaugau

SEQ ID NO: 2556415 - RNA, 19 nt, Artificial Sequence
  Description of Artificial Sequence: Synthetic oligonucleotide
  Antisense strand to SEQ ID NO: 2556414
aucaucccacguuauuccu

SEQ ID NO: 2556416 - RNA, 19 nt, Artificial Sequence
  Description of Artificial Sequence: Synthetic oligonucleotide
  Sense strand starting at position 1404 of SEQ ID NO: 1888783
ugguggugagugggauuaa

SEQ ID NO: 2556417 - RNA, 19 nt, Artificial Sequence
  Description of Artificial Sequence: Synthetic oligonucleotide
  Antisense strand to SEQ ID NO: 2556416
uuaaucccacucaccacca

SEQ ID NO: 2556418 - RNA, 19 nt, Artificial Sequence
  Description of Artificial Sequence: Synthetic oligonucleotide
  Sense strand starting at position 1487 of SEQ ID NO: 1888783
ugaauaggcugcucaauug

SEQ ID NO: 2556419 - RNA, 19 nt, Artificial Sequence
  Description of Artificial Sequence: Synthetic oligonucleotide
  Antisense strand to SEQ ID NO: 2556418
caauugagcagccuauuca

SEQ ID NO: 2556420 - RNA, 19 nt, Artificial Sequence
  Description of Artificial Sequence: Synthetic oligonucleotide
  Sense strand starting at position 1504 of SEQ ID NO: 1888783
uguuucugguaauucugaa

SEQ ID NO: 2556421 - RNA, 19 nt, Artificial Sequence
  Description of Artificial Sequence: Synthetic oligonucleotide
  Antisense strand to SEQ ID NO: 2556420
uucagaauuaccagaaaca

SEQ ID NO: 2556422 - RNA, 19 nt, Artificial Sequence
  Description of Artificial Sequence: Synthetic oligonucleotide
  Sense strand starting at position 1994 of SEQ ID NO: 1888783
gggagaagaugcguaauca

SEQ ID NO: 2556423 - RNA, 19 nt, Artificial Sequence
  Description of Artificial Sequence: Synthetic oligonucleotide
  Antisense strand to SEQ ID NO: 2556422
ugauuacgcaucuucuccc

SEQ ID NO: 2556424 - RNA, 19 nt, Artificial Sequence
  Description of Artificial Sequence: Synthetic oligonucleotide
  Sense strand starting at position 1995 of SEQ ID NO: 1888783
ggagaagaugcguaaucag

SEQ ID NO: 2556425 - RNA, 19 nt, Artificial Sequence
  Description of Artificial Sequence: Synthetic oligonucleotide
  Antisense strand to SEQ ID NO: 2556424
cugauuacgcaucuucucc

SEQ ID NO: 2556426 - RNA, 19 nt, Artificial Sequence
  Description of Artificial Sequence: Synthetic oligonucleotide
  Sense strand starting at position 2003 of SEQ ID NO: 1888783
ugcguaaucaggcaauuag

SEQ ID NO: 2556427 - RNA, 19 nt, Artificial Sequence
  Description of Artificial Sequence: Synthetic oligonucleotide
  Antisense strand to SEQ ID NO: 2556426
cuaauugccugauuacgca

SEQ ID NO: 2556428 - RNA, 19 nt, Artificial Sequence
  Description of Artificial Sequence: Synthetic oligonucleotide
  Sense strand starting at position 2173 of SEQ ID NO: 1888783
ccaacugguccaggacaaa

SEQ ID NO: 2556429 - RNA, 19 nt, Artificial Sequence
  Description of Artificial Sequence: Synthetic oligonucleotide
  Antisense strand to SEQ ID NO: 2556428
uuuguccuggaccaguugg

SEQ ID NO: 2556430 - RNA, 19 nt, Artificial Sequence
  Description of Artificial Sequence: Synthetic oligonucleotide
  Sense strand starting at position 2375 of SEQ ID NO: 1888783
aaaguuuccuggguuauug

SEQ ID NO: 2556431 - RNA, 19 nt, Artificial Sequence
  Description of Artificial Sequence: Synthetic oligonucleotide
  Antisense strand to SEQ ID NO: 2556430
caauaacccaggaaacuuu

SEQ ID NO: 2556432 - RNA, 19 nt, Artificial Sequence
  Description of Artificial Sequence: Synthetic oligonucleotide
  Sense strand starting at position 2405 of SEQ ID NO: 1888783
uaaagcugugaaugagaua

SEQ ID NO: 2556433 - RNA, 19 nt, Artificial Sequence
  Description of Artificial Sequence: Synthetic oligonucleotide
  Antisense strand to SEQ ID NO: 2556432
uaucucauucacagcuuua

SEQ ID NO: 2556434 - RNA, 19 nt, Artificial Sequence
  Description of Artificial Sequence: Synthetic oligonucleotide
  Sense strand starting at position 2437 of SEQ ID NO: 1888783
cuaucagggagcugauagu

SEQ ID NO: 2556435 - RNA, 19 nt, Artificial Sequence
  Description of Artificial Sequence: Synthetic oligonucleotide
  Antisense strand to SEQ ID NO: 2556434
acuaucagcucccugauag

SEQ ID NO: 2556436 - RNA, 19 nt, Artificial Sequence
  Description of Artificial Sequence: Synthetic oligonucleotide
  Sense strand starting at position 2446 of SEQ ID NO: 1888783
agcugauaguaauugagga

SEQ ID NO: 2556437 - RNA, 19 nt, Artificial Sequence
  Description of Artificial Sequence: Synthetic oligonucleotide
  Antisense strand to SEQ ID NO: 2556436
uccucaauuacuaucagcu

SEQ ID NO: 2556438 - RNA, 19 nt, Artificial Sequence
  Description of Artificial Sequence: Synthetic oligonucleotide
  Sense strand starting at position 2485 of SEQ ID NO: 1888783
acuuauaugguacaagcaa

SEQ ID NO: 2556439 - RNA, 19 nt, Artificial Sequence
  Description of Artificial Sequence: Synthetic oligonucleotide
  Antisense strand to SEQ ID NO: 2556438
uugcuuguaccauauaagu

SEQ ID NO: 2556440 - RNA, 19 nt, Artificial Sequence
  Description of Artificial Sequence: Synthetic oligonucleotide
  Sense strand starting at position 2657 of SEQ ID NO: 1888783
aaguauagugaacagugua

SEQ ID NO: 2556441 - RNA, 19 nt, Artificial Sequence
  Description of Artificial Sequence: Synthetic oligonucleotide
  Antisense strand to SEQ ID NO: 2556440
uacacuguucacuauacuu

SEQ ID NO: 2556442 - RNA, 19 nt, Artificial Sequence
  Description of Artificial Sequence: Synthetic oligonucleotide
  Sense strand starting at position 2662 of SEQ ID NO: 1888783
uagugaacaguguauguga

SEQ ID NO: 2556443 - RNA, 19 nt, Artificial Sequence
  Description of Artificial Sequence: Synthetic oligonucleotide
  Antisense strand to SEQ ID NO: 2556442
ucacauacacuguucacua

SEQ ID NO: 2556444 - RNA, 19 nt, Artificial Sequence
  Description of Artificial Sequence: Synthetic oligonucleotide
  Sense strand starting at position 2764 of SEQ ID NO: 1888783
gaaagaugggcagggcauu

SEQ ID NO: 2556445 - RNA, 19 nt, Artificial Sequence
  Description of Artificial Sequence: Synthetic oligonucleotide
  Antisense strand to SEQ ID NO: 2556444
aaugcccugcccaucuuuc

SEQ ID NO: 2556446 - RNA, 19 nt, Artificial Sequence
  Description of Artificial Sequence: Synthetic oligonucleotide
  Sense strand starting at position 2873 of SEQ ID NO: 1888783
ugugacuuccacuacugau

SEQ ID NO: 2556447 - RNA, 19 nt, Artificial Sequence
  Description of Artificial Sequence: Synthetic oligonucleotide
  Antisense strand to SEQ ID NO: 2556446
aucaguaguggaagucaca

SEQ ID NO: 2556448 - RNA, 19 nt, Artificial Sequence
  Description of Artificial Sequence: Synthetic oligonucleotide
  Sense strand starting at position 2942 of SEQ ID NO: 1888783
gcuugacucagagaagguu

SEQ ID NO: 2556449 - RNA, 19 nt, Artificial Sequence
  Description of Artificial Sequence: Synthetic oligonucleotide
  Antisense strand to SEQ ID NO: 2556448
aaccuucucugagucaagc

SEQ ID NO: 2556450 - RNA, 19 nt, Artificial Sequence
  Description of Artificial Sequence: Synthetic oligonucleotide
  Sense strand starting at position 2951 of SEQ ID NO: 1888783
agagaagguuuagagaaga

SEQ ID NO: 2556451 - RNA, 19 nt, Artificial Sequence
  Description of Artificial Sequence: Synthetic oligonucleotide
  Antisense strand to SEQ ID NO: 2556450
ucuucucuaaaccuucucu

SEQ ID NO: 2556452 - RNA, 19 nt, Artificial Sequence
  Description of Artificial Sequence: Synthetic oligonucleotide
  Sense strand starting at position 2962 of SEQ ID NO: 1888783
agagaagauucuggaauuu

SEQ ID NO: 2556453 - RNA, 19 nt, Artificial Sequence
  Description of Artificial Sequence: Synthetic oligonucleotide
  Antisense strand to SEQ ID NO: 2556452
aaauuccagaaucuucucu

SEQ ID NO: 2556454 - RNA, 19 nt, Artificial Sequence
  Description of Artificial Sequence: Synthetic oligonucleotide
  Sense strand starting at position 2971 of SEQ ID NO: 1888783
ucuggaauuugagagcuga

SEQ ID NO: 2556455 - RNA, 19 nt, Artificial Sequence
  Description of Artificial Sequence: Synthetic oligonucleotide
  Antisense strand to SEQ ID NO: 2556454
ucagcucucaaauuccaga

SEQ ID NO: 2556456 - RNA, 19 nt, Artificial Sequence
  Description of Artificial Sequence: Synthetic oligonucleotide
  Sense strand starting at position 2988 of SEQ ID NO: 1888783
gagagagcucuuggagaac

SEQ ID NO: 2556457 - RNA, 19 nt, Artificial Sequence
  Description of Artificial Sequence: Synthetic oligonucleotide
  Antisense strand to SEQ ID NO: 2556456
guucuccaagagcucucuc

SEQ ID NO: 2556458 - RNA, 19 nt, Artificial Sequence
  Description of Artificial Sequence: Synthetic oligonucleotide
  Sense strand starting at position 3000 of SEQ ID NO: 1888783
ggagaacauuuagguccaa

SEQ ID NO: 2556459 - RNA, 19 nt, Artificial Sequence
  Description of Artificial Sequence: Synthetic oligonucleotide
  Antisense strand to SEQ ID NO: 2556458
uuggaccuaaauguucucc

SEQ ID NO: 2556460 - RNA, 19 nt, Artificial Sequence
  Description of Artificial Sequence: Synthetic oligonucleotide
  Sense strand starting at position 3147 of SEQ ID NO: 1888783
ugccucuguggagaucuaa

SEQ ID NO: 2556461 - RNA, 19 nt, Artificial Sequence
  Description of Artificial Sequence: Synthetic oligonucleotide
  Antisense strand to SEQ ID NO: 2556460
uuagaucuccacagaggca

SEQ ID NO: 2556462 - RNA, 19 nt, Artificial Sequence
  Description of Artificial Sequence: Synthetic oligonucleotide
  Sense strand starting at position 3955 of SEQ ID NO: 1888783
gcuuuaguccuagaaggag

SEQ ID NO: 2556463 - RNA, 19 nt, Artificial Sequence
  Description of Artificial Sequence: Synthetic oligonucleotide
  Antisense strand to SEQ ID NO: 2556462
cuccuucuaggacuaaagc

SEQ ID NO: 2556464 - RNA, 19 nt, Artificial Sequence
  Description of Artificial Sequence: Synthetic oligonucleotide
  Sense strand starting at position 135 of SEQ ID NO: 1888784
guugcaauuugucuuuaga

SEQ ID NO: 2556465 - RNA, 19 nt, Artificial Sequence
  Description of Artificial Sequence: Synthetic oligonucleotide
  Antisense strand to SEQ ID NO: 2556464
ucuaaagacaaauugcaac

SEQ ID NO: 2556466 - RNA, 19 nt, Artificial Sequence
  Description of Artificial Sequence: Synthetic oligonucleotide
  Sense strand starting at position 310 of SEQ ID NO: 1888784
gcaccagagcuuuauaaau

SEQ ID NO: 2556467 - RNA, 19 nt, Artificial Sequence
  Description of Artificial Sequence: Synthetic oligonucleotide
  Antisense strand to SEQ ID NO: 2556466
auuuauaaagcucuggugc

SEQ ID NO: 2556468 - RNA, 19 nt, Artificial Sequence
  Description of Artificial Sequence: Synthetic oligonucleotide
  Sense strand starting at position 328 of SEQ ID NO: 1888784
ugaucuaucugaggauuua

SEQ ID NO: 2556469 - RNA, 19 nt, Artificial Sequence
  Description of Artificial Sequence: Synthetic oligonucleotide
  Antisense strand to SEQ ID NO: 2556468
uaaauccucagauagauca

SEQ ID NO: 2556470 - RNA, 19 nt, Artificial Sequence
  Description of Artificial Sequence: Synthetic oligonucleotide
  Sense strand starting at position 423 of SEQ ID NO: 1888784
ggaaacuuguagcuuagua

SEQ ID NO: 2556471 - RNA, 19 nt, Artificial Sequence
  Description of Artificial Sequence: Synthetic oligonucleotide
  Antisense strand to SEQ ID NO: 2556470
uacuaagcuacaaguuucc

SEQ ID NO: 2556472 - RNA, 19 nt, Artificial Sequence
  Description of Artificial Sequence: Synthetic oligonucleotide
  Sense strand starting at position 427 of SEQ ID NO: 1888784
acuuguagcuuaguaauaa

SEQ ID NO: 2556473 - RNA, 19 nt, Artificial Sequence
  Description of Artificial Sequence: Synthetic oligonucleotide
  Antisense strand to SEQ ID NO: 2556472
uuauuacuaagcuacaagu

SEQ ID NO: 2556474 - RNA, 19 nt, Artificial Sequence
  Description of Artificial Sequence: Synthetic oligonucleotide
  Sense strand starting at position 554 of SEQ ID NO: 1888784
cuuugcagacccugaaaga

SEQ ID NO: 2556475 - RNA, 19 nt, Artificial Sequence
  Description of Artificial Sequence: Synthetic oligonucleotide
  Antisense strand to SEQ ID NO: 2556474
ucuuucagggucugcaaag

SEQ ID NO: 2556476 - RNA, 19 nt, Artificial Sequence
  Description of Artificial Sequence: Synthetic oligonucleotide
  Sense strand starting at position 658 of SEQ ID NO: 1888784
gcgagaucgcccuugcaaa

SEQ ID NO: 2556477 - RNA, 19 nt, Artificial Sequence
  Description of Artificial Sequence: Synthetic oligonucleotide
  Antisense strand to SEQ ID NO: 2556476
uuugcaagggcgaucucgc

SEQ ID NO: 2556478 - RNA, 19 nt, Artificial Sequence
  Description of Artificial Sequence: Synthetic oligonucleotide
  Sense strand starting at position 703 of SEQ ID NO: 1888784
acagaaauaugacaguaaa

SEQ ID NO: 2556479 - RNA, 19 nt, Artificial Sequence
  Description of Artificial Sequence: Synthetic oligonucleotide
  Antisense strand to SEQ ID NO: 2556478
uuuacugucauauuucugu

SEQ ID NO: 2556480 - RNA, 19 nt, Artificial Sequence
  Description of Artificial Sequence: Synthetic oligonucleotide
  Sense strand starting at position 720 of SEQ ID NO: 1888784
aaaugcaugcgagaguuaa

SEQ ID NO: 2556481 - RNA, 19 nt, Artificial Sequence
  Description of Artificial Sequence: Synthetic oligonucleotide
  Antisense strand to SEQ ID NO: 2556480
uuaacucucgcaugcauuu

SEQ ID NO: 2556482 - RNA, 19 nt, Artificial Sequence
  Description of Artificial Sequence: Synthetic oligonucleotide
  Sense strand starting at position 731 of SEQ ID NO: 1888784
agaguuaaguagcucaaac

SEQ ID NO: 2556483 - RNA, 19 nt, Artificial Sequence
  Description of Artificial Sequence: Synthetic oligonucleotide
  Antisense strand to SEQ ID NO: 2556482
guuugagcuacuuaacucu

SEQ ID NO: 2556484 - RNA, 19 nt, Artificial Sequence
  Description of Artificial Sequence: Synthetic oligonucleotide
  Sense strand starting at position 1260 of SEQ ID NO: 1888784
cccugcuugcucgcagauu

SEQ ID NO: 2556485 - RNA, 19 nt, Artificial Sequence
  Description of Artificial Sequence: Synthetic oligonucleotide
  Antisense strand to SEQ ID NO: 2556484
aaucugcgagcaagcaggg

SEQ ID NO: 2556486 - RNA, 19 nt, Artificial Sequence
  Description of Artificial Sequence: Synthetic oligonucleotide
  Sense strand starting at position 1647 of SEQ ID NO: 1888784
cuuaauagcgucuaacauc

SEQ ID NO: 2556487 - RNA, 19 nt, Artificial Sequence
  Description of Artificial Sequence: Synthetic oligonucleotide
  Antisense strand to SEQ ID NO: 2556486
gauguuagacgcuauuaag

SEQ ID NO: 2556488 - RNA, 19 nt, Artificial Sequence
  Description of Artificial Sequence: Synthetic oligonucleotide
  Sense strand starting at position 1654 of SEQ ID NO: 1888784
gcgucuaacauccaggaua

SEQ ID NO: 2556489 - RNA, 19 nt, Artificial Sequence
  Description of Artificial Sequence: Synthetic oligonucleotide
  Antisense strand to SEQ ID NO: 2556488
uauccuggauguuagacgc

SEQ ID NO: 2556490 - RNA, 19 nt, Artificial Sequence
  Description of Artificial Sequence: Synthetic oligonucleotide
  Sense strand starting at position 1656 of SEQ ID NO: 1888784
gucuaacauccaggauaag

SEQ ID NO: 2556491 - RNA, 19 nt, Artificial Sequence
  Description of Artificial Sequence: Synthetic oligonucleotide
  Antisense strand to SEQ ID NO: 2556490
cuuauccuggauguuagac

SEQ ID NO: 2556492 - RNA, 19 nt, Artificial Sequence
  Description of Artificial Sequence: Synthetic oligonucleotide
  Sense strand starting at position 1734 of SEQ ID NO: 1888784
ugggcacauguguaaacaa

SEQ ID NO: 2556493 - RNA, 19 nt, Artificial Sequence
  Description of Artificial Sequence: Synthetic oligonucleotide
  Antisense strand to SEQ ID NO: 2556492
uuguuuacacaugugccca

SEQ ID NO: 2556494 - RNA, 19 nt, Artificial Sequence
  Description of Artificial Sequence: Synthetic oligonucleotide
  Sense strand starting at position 1765 of SEQ ID NO: 1888784
cuguguuaugcccaccaaa

SEQ ID NO: 2556495 - RNA, 19 nt, Artificial Sequence
  Description of Artificial Sequence: Synthetic oligonucleotide
  Antisense strand to SEQ ID NO: 2556494
uuuggugggcauaacacag

SEQ ID NO: 2556496 - RNA, 19 nt, Artificial Sequence
  Description of Artificial Sequence: Synthetic oligonucleotide
  Sense strand starting at position 2968 of SEQ ID NO: 1888784
gggcaaaucugacauuuaa

SEQ ID NO: 2556497 - RNA, 19 nt, Artificial Sequence
  Description of Artificial Sequence: Synthetic oligonucleotide
  Antisense strand to SEQ ID NO: 2556496
uuaaaugucagauuugccc

SEQ ID NO: 2556498 - RNA, 19 nt, Artificial Sequence
  Description of Artificial Sequence: Synthetic oligonucleotide
  Sense strand starting at position 3179 of SEQ ID NO: 1888784
uaguuaugucuuggaaaga

SEQ ID NO: 2556499 - RNA, 19 nt, Artificial Sequence
  Description of Artificial Sequence: Synthetic oligonucleotide
  Antisense strand to SEQ ID NO: 2556498
ucuuuccaagacauaacua

SEQ ID NO: 2556500 - RNA, 19 nt, Artificial Sequence
  Description of Artificial Sequence: Synthetic oligonucleotide
  Sense strand starting at position 3190 of SEQ ID NO: 1888784
uggaaagaaaugugugauu

SEQ ID NO: 2556501 - RNA, 19 nt, Artificial Sequence
  Description of Artificial Sequence: Synthetic oligonucleotide
  Antisense strand to SEQ ID NO: 2556500
aaucacacauuucuuucca

SEQ ID NO: 2556502 - RNA, 19 nt, Artificial Sequence
  Description of Artificial Sequence: Synthetic oligonucleotide
  Sense strand starting at position 3217 of SEQ ID NO: 1888784
auugucucucccgaauuaa

SEQ ID NO: 2556503 - RNA, 19 nt, Artificial Sequence
  Description of Artificial Sequence: Synthetic oligonucleotide
  Antisense strand to SEQ ID NO: 2556502
uuaauucgggagagacaau

SEQ ID NO: 2556504 - RNA, 19 nt, Artificial Sequence
  Description of Artificial Sequence: Synthetic oligonucleotide
  Sense strand starting at position 3260 of SEQ ID NO: 1888784
cccguagggacuugacauu

SEQ ID NO: 2556505 - RNA, 19 nt, Artificial Sequence
  Description of Artificial Sequence: Synthetic oligonucleotide
  Antisense strand to SEQ ID NO: 2556504
aaugucaagucccuacggg

SEQ ID NO: 2556506 - RNA, 19 nt, Artificial Sequence
  Description of Artificial Sequence: Synthetic oligonucleotide
  Sense strand starting at position 3266 of SEQ ID NO: 1888784
gggacuugacauuguggaa

SEQ ID NO: 2556507 - RNA, 19 nt, Artificial Sequence
  Description of Artificial Sequence: Synthetic oligonucleotide
  Antisense strand to SEQ ID NO: 2556506
uuccacaaugucaaguccc

SEQ ID NO: 2556508 - RNA, 19 nt, Artificial Sequence
  Description of Artificial Sequence: Synthetic oligonucleotide
  Sense strand starting at position 3270 of SEQ ID NO: 1888784
cuugacauuguggaaguuu

SEQ ID NO: 2556509 - RNA, 19 nt, Artificial Sequence
  Description of Artificial Sequence: Synthetic oligonucleotide
  Antisense strand to SEQ ID NO: 2556508
aaacuuccacaaugucaag

SEQ ID NO: 2556510 - RNA, 19 nt, Artificial Sequence
  Description of Artificial Sequence: Synthetic oligonucleotide
  Sense strand starting at position 3278 of SEQ ID NO: 1888784
uguggaaguuuggcuagaa

SEQ ID NO: 2556511 - RNA, 19 nt, Artificial Sequence
  Description of Artificial Sequence: Synthetic oligonucleotide
  Antisense strand to SEQ ID NO: 2556510
uucuagccaaacuuccaca

SEQ ID NO: 2556512 - RNA, 19 nt, Artificial Sequence
  Description of Artificial Sequence: Synthetic oligonucleotide
  Sense strand starting at position 3279 of SEQ ID NO: 1888784
guggaaguuuggcuagaau

SEQ ID NO: 2556513 - RNA, 19 nt, Artificial Sequence
  Description of Artificial Sequence: Synthetic oligonucleotide
  Antisense strand to SEQ ID NO: 2556512
auucuagccaaacuuccac

SEQ ID NO: 2556514 - RNA, 19 nt, Artificial Sequence
  Description of Artificial Sequence: Synthetic oligonucleotide
  Sense strand starting at position 3291 of SEQ ID NO: 1888784
cuagaaugcgccgagagaa

SEQ ID NO: 2556515 - RNA, 19 nt, Artificial Sequence
  Description of Artificial Sequence: Synthetic oligonucleotide
  Antisense strand to SEQ ID NO: 2556514
uucucucggcgcauucuag

SEQ ID NO: 2556516 - RNA, 19 nt, Artificial Sequence
  Description of Artificial Sequence: Synthetic oligonucleotide
  Sense strand starting at position 3387 of SEQ ID NO: 1888784
gaggaagaggcguauucuu

SEQ ID NO: 2556517 - RNA, 19 nt, Artificial Sequence
  Description of Artificial Sequence: Synthetic oligonucleotide
  Antisense strand to SEQ ID NO: 2556516
aagaauacgccucuuccuc

SEQ ID NO: 2556518 - RNA, 19 nt, Artificial Sequence
  Description of Artificial Sequence: Synthetic oligonucleotide
  Sense strand starting at position 3462 of SEQ ID NO: 1888784
gcaacucgaaaguaucgau

SEQ ID NO: 2556519 - RNA, 19 nt, Artificial Sequence
  Description of Artificial Sequence: Synthetic oligonucleotide
  Antisense strand to SEQ ID NO: 2556518
aucgauacuuucgaguugc

SEQ ID NO: 2556520 - RNA, 19 nt, Artificial Sequence
  Description of Artificial Sequence: Synthetic oligonucleotide
  Sense strand starting at position 3466 of SEQ ID NO: 1888784
cucgaaaguaucgauucuu

SEQ ID NO: 2556521 - RNA, 19 nt, Artificial Sequence
  Description of Artificial Sequence: Synthetic oligonucleotide
  Antisense strand to SEQ ID NO: 2556520
aagaaucgauacuuucgag

SEQ ID NO: 2556522 - RNA, 19 nt, Artificial Sequence
  Description of Artificial Sequence: Synthetic oligonucleotide
  Sense strand starting at position 3487 of SEQ ID NO: 1888784
ucuauuguaucagugaaug

SEQ ID NO: 2556523 - RNA, 19 nt, Artificial Sequence
  Description of Artificial Sequence: Synthetic oligonucleotide
  Antisense strand to SEQ ID NO: 2556522
cauucacugauacaauaga

SEQ ID NO: 2556524 - RNA, 19 nt, Artificial Sequence
  Description of Artificial Sequence: Synthetic oligonucleotide
  Sense strand starting at position 3622 of SEQ ID NO: 1888784
uuguacuaucacugggaga

SEQ ID NO: 2556525 - RNA, 19 nt, Artificial Sequence
  Description of Artificial Sequence: Synthetic oligonucleotide
  Antisense strand to SEQ ID NO: 2556524
ucucccagugauaguacaa

SEQ ID NO: 2556526 - RNA, 19 nt, Artificial Sequence
  Description of Artificial Sequence: Synthetic oligonucleotide
  Sense strand starting at position 3623 of SEQ ID NO: 1888784
uguacuaucacugggagag

SEQ ID NO: 2556527 - RNA, 19 nt, Artificial Sequence
  Description of Artificial Sequence: Synthetic oligonucleotide
  Antisense strand to SEQ ID NO: 2556526
cucucccagugauaguaca

SEQ ID NO: 2556528 - RNA, 19 nt, Artificial Sequence
  Description of Artificial Sequence: Synthetic oligonucleotide
  Sense strand starting at position 3649 of SEQ ID NO: 1888784
ggguuagggugaaagguau

SEQ ID NO: 2556529 - RNA, 19 nt, Artificial Sequence
  Description of Artificial Sequence: Synthetic oligonucleotide
  Antisense strand to SEQ ID NO: 2556528
auaccuuucacccuaaccc

SEQ ID NO: 2556530 - RNA, 19 nt, Artificial Sequence
  Description of Artificial Sequence: Synthetic oligonucleotide
  Sense strand starting at position 3723 of SEQ ID NO: 1888784
gcuguuucgaaugaacuuu

SEQ ID NO: 2556531 - RNA, 19 nt, Artificial Sequence
  Description of Artificial Sequence: Synthetic oligonucleotide
  Antisense strand to SEQ ID NO: 2556530
aaaguucauucgaaacagc

SEQ ID NO: 2556532 - RNA, 19 nt, Artificial Sequence
  Description of Artificial Sequence: Synthetic oligonucleotide
  Sense strand starting at position 3772 of SEQ ID NO: 1888784
uuaaauuaggcaugacuuu

SEQ ID NO: 2556533 - RNA, 19 nt, Artificial Sequence
  Description of Artificial Sequence: Synthetic oligonucleotide
  Antisense strand to SEQ ID NO: 2556532
aaagucaugccuaauuuaa

SEQ ID NO: 2556534 - RNA, 19 nt, Artificial Sequence
  Description of Artificial Sequence: Synthetic oligonucleotide
  Sense strand starting at position 3781 of SEQ ID NO: 1888784
gcaugacuuuaacuucuga

SEQ ID NO: 2556535 - RNA, 19 nt, Artificial Sequence
  Description of Artificial Sequence: Synthetic oligonucleotide
  Antisense strand to SEQ ID NO: 2556534
ucagaaguuaaagucaugc

SEQ ID NO: 2556536 - RNA, 19 nt, Artificial Sequence
  Description of Artificial Sequence: Synthetic oligonucleotide
  Sense strand starting at position 3807 of SEQ ID NO: 1888784
gcucguauauuugugugga

SEQ ID NO: 2556537 - RNA, 19 nt, Artificial Sequence
  Description of Artificial Sequence: Synthetic oligonucleotide
  Antisense strand to SEQ ID NO: 2556536
uccacacaaauauacgagc

SEQ ID NO: 2556538 - RNA, 19 nt, Artificial Sequence
  Description of Artificial Sequence: Synthetic oligonucleotide
  Sense strand starting at position 3809 of SEQ ID NO: 1888784
ucguauauuuguguggaac

SEQ ID NO: 2556539 - RNA, 19 nt, Artificial Sequence
  Description of Artificial Sequence: Synthetic oligonucleotide
  Antisense strand to SEQ ID NO: 2556538
guuccacacaaauauacga

SEQ ID NO: 2556540 - RNA, 19 nt, Artificial Sequence
  Description of Artificial Sequence: Synthetic oligonucleotide
  Sense strand starting at position 3810 of SEQ ID NO: 1888784
cguauauuuguguggaaca

SEQ ID NO: 2556541 - RNA, 19 nt, Artificial Sequence
  Description of Artificial Sequence: Synthetic oligonucleotide
  Antisense strand to SEQ ID NO: 2556540
uguuccacacaaauauacg

SEQ ID NO: 2556542 - RNA, 19 nt, Artificial Sequence
  Description of Artificial Sequence: Synthetic oligonucleotide
  Sense strand starting at position 3932 of SEQ ID NO: 1888784
aucccaaagucaguguaaa

SEQ ID NO: 2556543 - RNA, 19 nt, Artificial Sequence
  Description of Artificial Sequence: Synthetic oligonucleotide
  Antisense strand to SEQ ID NO: 2556542
uuuacacugacuuugggau

SEQ ID NO: 2556544 - RNA, 19 nt, Artificial Sequence
  Description of Artificial Sequence: Synthetic oligonucleotide
  Sense strand starting at position 108 of SEQ ID NO: 1888785
gucuguacuccagacacua

SEQ ID NO: 2556545 - RNA, 19 nt, Artificial Sequence
  Description of Artificial Sequence: Synthetic oligonucleotide
  Antisense strand to SEQ ID NO: 2556544
uagugucuggaguacagac

SEQ ID NO: 2556546 - RNA, 19 nt, Artificial Sequence
  Description of Artificial Sequence: Synthetic oligonucleotide
  Sense strand starting at position 173 of SEQ ID NO: 1888785
gaagaauaaucucuagugu

SEQ ID NO: 2556547 - RNA, 19 nt, Artificial Sequence
  Description of Artificial Sequence: Synthetic oligonucleotide
  Antisense strand to SEQ ID NO: 2556546
acacuagagauuauucuuc

SEQ ID NO: 2556548 - RNA, 19 nt, Artificial Sequence
  Description of Artificial Sequence: Synthetic oligonucleotide
  Sense strand starting at position 190 of SEQ ID NO: 1888785
guucuauagcauuauacua

SEQ ID NO: 2556549 - RNA, 19 nt, Artificial Sequence
  Description of Artificial Sequence: Synthetic oligonucleotide
  Antisense strand to SEQ ID NO: 2556548
uaguauaaugcuauagaac

SEQ ID NO: 2556550 - RNA, 19 nt, Artificial Sequence
  Description of Artificial Sequence: Synthetic oligonucleotide
  Sense strand starting at position 390 of SEQ ID NO: 1888785
auaaucauguguccauaua

SEQ ID NO: 2556551 - RNA, 19 nt, Artificial Sequence
  Description of Artificial Sequence: Synthetic oligonucleotide
  Antisense strand to SEQ ID NO: 2556550
uauauggacacaugauuau

SEQ ID NO: 2556552 - RNA, 19 nt, Artificial Sequence
  Description of Artificial Sequence: Synthetic oligonucleotide
  Sense strand starting at position 562 of SEQ ID NO: 1888785
agaagaugguaaguguuca

SEQ ID NO: 2556553 - RNA, 19 nt, Artificial Sequence
  Description of Artificial Sequence: Synthetic oligonucleotide
  Antisense strand to SEQ ID NO: 2556552
ugaacacuuaccaucuucu

SEQ ID NO: 2556554 - RNA, 19 nt, Artificial Sequence
  Description of Artificial Sequence: Synthetic oligonucleotide
  Sense strand starting at position 608 of SEQ ID NO: 1888785
uguacaauacugggaaugu

SEQ ID NO: 2556555 - RNA, 19 nt, Artificial Sequence
  Description of Artificial Sequence: Synthetic oligonucleotide
  Antisense strand to SEQ ID NO: 2556554
acauucccaguauuguaca

SEQ ID NO: 2556556 - RNA, 19 nt, Artificial Sequence
  Description of Artificial Sequence: Synthetic oligonucleotide
  Sense strand starting at position 644 of SEQ ID NO: 1888785
acagaaacaguauggucau

SEQ ID NO: 2556557 - RNA, 19 nt, Artificial Sequence
  Description of Artificial Sequence: Synthetic oligonucleotide
  Antisense strand to SEQ ID NO: 2556556
augaccauacuguuucugu

SEQ ID NO: 2556558 - RNA, 19 nt, Artificial Sequence
  Description of Artificial Sequence: Synthetic oligonucleotide
  Sense strand starting at position 650 of SEQ ID NO: 1888785
acaguauggucauuccuga

SEQ ID NO: 2556559 - RNA, 19 nt, Artificial Sequence
  Description of Artificial Sequence: Synthetic oligonucleotide
  Antisense strand to SEQ ID NO: 2556558
ucaggaaugaccauacugu

SEQ ID NO: 2556560 - RNA, 19 nt, Artificial Sequence
  Description of Artificial Sequence: Synthetic oligonucleotide
  Sense strand starting at position 860 of SEQ ID NO: 1888785
cacacaauggcguacuauu

SEQ ID NO: 2556561 - RNA, 19 nt, Artificial Sequence
  Description of Artificial Sequence: Synthetic oligonucleotide
  Antisense strand to SEQ ID NO: 2556560
aauaguacgccauugugug

SEQ ID NO: 2556562 - RNA, 19 nt, Artificial Sequence
  Description of Artificial Sequence: Synthetic oligonucleotide
  Sense strand starting at position 1147 of SEQ ID NO: 1888785
cauagugaccaugguuaau

SEQ ID NO: 2556563 - RNA, 19 nt, Artificial Sequence
  Description of Artificial Sequence: Synthetic oligonucleotide
  Antisense strand to SEQ ID NO: 2556562
auuaaccauggucacuaug

SEQ ID NO: 2556564 - RNA, 19 nt, Artificial Sequence
  Description of Artificial Sequence: Synthetic oligonucleotide
  Sense strand starting at position 1149 of SEQ ID NO: 1888785
uagugaccaugguuaauaa

SEQ ID NO: 2556565 - RNA, 19 nt, Artificial Sequence
  Description of Artificial Sequence: Synthetic oligonucleotide
  Antisense strand to SEQ ID NO: 2556564
uuauuaaccauggucacua

SEQ ID NO: 2556566 - RNA, 19 nt, Artificial Sequence
  Description of Artificial Sequence: Synthetic oligonucleotide
  Sense strand starting at position 1236 of SEQ ID NO: 1888785
uuagguaaugcauagguuu

SEQ ID NO: 2556567 - RNA, 19 nt, Artificial Sequence
  Description of Artificial Sequence: Synthetic oligonucleotide
  Antisense strand to SEQ ID NO: 2556566
aaaccuaugcauuaccuaa

SEQ ID NO: 2556568 - RNA, 19 nt, Artificial Sequence
  Description of Artificial Sequence: Synthetic oligonucleotide
  Sense strand starting at position 1439 of SEQ ID NO: 1888785
uuugauaguguugauggga

SEQ ID NO: 2556569 - RNA, 19 nt, Artificial Sequence
  Description of Artificial Sequence: Synthetic oligonucleotide
  Antisense strand to SEQ ID NO: 2556568
ucccaucaacacuaucaaa

SEQ ID NO: 2556570 - RNA, 19 nt, Artificial Sequence
  Description of Artificial Sequence: Synthetic oligonucleotide
  Sense strand starting at position 1442 of SEQ ID NO: 1888785
gauaguguugaugggaauc

SEQ ID NO: 2556571 - RNA, 19 nt, Artificial Sequence
  Description of Artificial Sequence: Synthetic oligonucleotide
  Antisense strand to SEQ ID NO: 2556570
gauucccaucaacacuauc

SEQ ID NO: 2556572 - RNA, 19 nt, Artificial Sequence
  Description of Artificial Sequence: Synthetic oligonucleotide
  Sense strand starting at position 1452 of SEQ ID NO: 1888785
augggaaucacugguuauu

SEQ ID NO: 2556573 - RNA, 19 nt, Artificial Sequence
  Description of Artificial Sequence: Synthetic oligonucleotide
  Antisense strand to SEQ ID NO: 2556572
aauaaccagugauucccau

SEQ ID NO: 2556574 - RNA, 19 nt, Artificial Sequence
  Description of Artificial Sequence: Synthetic oligonucleotide
  Sense strand starting at position 1454 of SEQ ID NO: 1888785
gggaaucacugguuauuau

SEQ ID NO: 2556575 - RNA, 19 nt, Artificial Sequence
  Description of Artificial Sequence: Synthetic oligonucleotide
  Antisense strand to SEQ ID NO: 2556574
auaauaaccagugauuccc

SEQ ID NO: 2556576 - RNA, 19 nt, Artificial Sequence
  Description of Artificial Sequence: Synthetic oligonucleotide
  Sense strand starting at position 1465 of SEQ ID NO: 1888785
guuauuauuuaugcaguca

SEQ ID NO: 2556577 - RNA, 19 nt, Artificial Sequence
  Description of Artificial Sequence: Synthetic oligonucleotide
  Antisense strand to SEQ ID NO: 2556576
ugacugcauaaauaauaac

SEQ ID NO: 2556578 - RNA, 19 nt, Artificial Sequence
  Description of Artificial Sequence: Synthetic oligonucleotide
  Sense strand starting at position 1537 of SEQ ID NO: 1888785
uugucuauacuguaagaaa

SEQ ID NO: 2556579 - RNA, 19 nt, Artificial Sequence
  Description of Artificial Sequence: Synthetic oligonucleotide
  Antisense strand to SEQ ID NO: 2556578
uuucuuacaguauagacaa

SEQ ID NO: 2556580 - RNA, 19 nt, Artificial Sequence
  Description of Artificial Sequence: Synthetic oligonucleotide
  Sense strand starting at position 1621 of SEQ ID NO: 1888785
ggcuaucgucuugcaccua

SEQ ID NO: 2556581 - RNA, 19 nt, Artificial Sequence
  Description of Artificial Sequence: Synthetic oligonucleotide
  Antisense strand to SEQ ID NO: 2556580
uaggugcaagacgauagcc

SEQ ID NO: 2556582 - RNA, 19 nt, Artificial Sequence
  Description of Artificial Sequence: Synthetic oligonucleotide
  Sense strand starting at position 1752 of SEQ ID NO: 1888785
cgccuuuacagggaaagua

SEQ ID NO: 2556583 - RNA, 19 nt, Artificial Sequence
  Description of Artificial Sequence: Synthetic oligonucleotide
  Antisense strand to SEQ ID NO: 2556582
uacuuucccuguaaaggcg

SEQ ID NO: 2556584 - RNA, 19 nt, Artificial Sequence
  Description of Artificial Sequence: Synthetic oligonucleotide
  Sense strand starting at position 1992 of SEQ ID NO: 1888785
aggccaaauuggucucaau

SEQ ID NO: 2556585 - RNA, 19 nt, Artificial Sequence
  Description of Artificial Sequence: Synthetic oligonucleotide
  Antisense strand to SEQ ID NO: 2556584
auugagaccaauuuggccu

SEQ ID NO: 2556586 - RNA, 19 nt, Artificial Sequence
  Description of Artificial Sequence: Synthetic oligonucleotide
  Sense strand starting at position 2016 of SEQ ID NO: 1888785
gucgucaccgucgcuaaua

SEQ ID NO: 2556587 - RNA, 19 nt, Artificial Sequence
  Description of Artificial Sequence: Synthetic oligonucleotide
  Antisense strand to SEQ ID NO: 2556586
uauuagcgacggugacgac

SEQ ID NO: 2556588 - RNA, 19 nt, Artificial Sequence
  Description of Artificial Sequence: Synthetic oligonucleotide
  Sense strand starting at position 2029 of SEQ ID NO: 1888785
cuaauaugacgucagguua

SEQ ID NO: 2556589 - RNA, 19 nt, Artificial Sequence
  Description of Artificial Sequence: Synthetic oligonucleotide
  Antisense strand to SEQ ID NO: 2556588
uaaccugacgucauauuag

SEQ ID NO: 2556590 - RNA, 19 nt, Artificial Sequence
  Description of Artificial Sequence: Synthetic oligonucleotide
  Sense strand starting at position 2215 of SEQ ID NO: 1888785
cucucuacucauuauggua

SEQ ID NO: 2556591 - RNA, 19 nt, Artificial Sequence
  Description of Artificial Sequence: Synthetic oligonucleotide
  Antisense strand to SEQ ID NO: 2556590
uaccauaaugaguagagag

SEQ ID NO: 2556592 - RNA, 19 nt, Artificial Sequence
  Description of Artificial Sequence: Synthetic oligonucleotide
  Sense strand starting at position 2243 of SEQ ID NO: 1888785
aaguccauguugucaggaa

SEQ ID NO: 2556593 - RNA, 19 nt, Artificial Sequence
  Description of Artificial Sequence: Synthetic oligonucleotide
  Antisense strand to SEQ ID NO: 2556592
uuccugacaacauggacuu

SEQ ID NO: 2556594 - RNA, 19 nt, Artificial Sequence
  Description of Artificial Sequence: Synthetic oligonucleotide
  Sense strand starting at position 2554 of SEQ ID NO: 1888785
agaggaguaucaucaguac

SEQ ID NO: 2556595 - RNA, 19 nt, Artificial Sequence
  Description of Artificial Sequence: Synthetic oligonucleotide
  Antisense strand to SEQ ID NO: 2556594
guacugaugauacuccucu

SEQ ID NO: 2556596 - RNA, 19 nt, Artificial Sequence
  Description of Artificial Sequence: Synthetic oligonucleotide
  Sense strand starting at position 2557 of SEQ ID NO: 1888785
ggaguaucaucaguacaca

SEQ ID NO: 2556597 - RNA, 19 nt, Artificial Sequence
  Description of Artificial Sequence: Synthetic oligonucleotide
  Antisense strand to SEQ ID NO: 2556596
uguguacugaugauacucc

SEQ ID NO: 2556598 - RNA, 19 nt, Artificial Sequence
  Description of Artificial Sequence: Synthetic oligonucleotide
  Sense strand starting at position 2591 of SEQ ID NO: 1888785
guccuaggacucugggaga

SEQ ID NO: 2556599 - RNA, 19 nt, Artificial Sequence
  Description of Artificial Sequence: Synthetic oligonucleotide
  Antisense strand to SEQ ID NO: 2556598
ucucccagaguccuaggac

SEQ ID NO: 2556600 - RNA, 19 nt, Artificial Sequence
  Description of Artificial Sequence: Synthetic oligonucleotide
  Sense strand starting at position 2686 of SEQ ID NO: 1888785
gauuguuuauaaucaagug

SEQ ID NO: 2556601 - RNA, 19 nt, Artificial Sequence
  Description of Artificial Sequence: Synthetic oligonucleotide
  Antisense strand to SEQ ID NO: 2556600
cacuugauuauaaacaauc

SEQ ID NO: 2556602 - RNA, 19 nt, Artificial Sequence
  Description of Artificial Sequence: Synthetic oligonucleotide
  Sense strand starting at position 2824 of SEQ ID NO: 1888785
aguaguuugccuuaaggaa

SEQ ID NO: 2556603 - RNA, 19 nt, Artificial Sequence
  Description of Artificial Sequence: Synthetic oligonucleotide
  Antisense strand to SEQ ID NO: 2556602
uuccuuaaggcaaacuacu

SEQ ID NO: 2556604 - RNA, 19 nt, Artificial Sequence
  Description of Artificial Sequence: Synthetic oligonucleotide
  Sense strand starting at position 3253 of SEQ ID NO: 1888785
gcaggaaugacuuauccga

SEQ ID NO: 2556605 - RNA, 19 nt, Artificial Sequence
  Description of Artificial Sequence: Synthetic oligonucleotide
  Antisense strand to SEQ ID NO: 2556604
ucggauaagucauuccugc

SEQ ID NO: 2556606 - RNA, 19 nt, Artificial Sequence
  Description of Artificial Sequence: Synthetic oligonucleotide
  Sense strand starting at position 3255 of SEQ ID NO: 1888785
aggaaugacuuauccgauu

SEQ ID NO: 2556607 - RNA, 19 nt, Artificial Sequence
  Description of Artificial Sequence: Synthetic oligonucleotide
  Antisense strand to SEQ ID NO: 2556606
aaucggauaagucauuccu

SEQ ID NO: 2556608 - RNA, 19 nt, Artificial Sequence
  Description of Artificial Sequence: Synthetic oligonucleotide
  Sense strand starting at position 3261 of SEQ ID NO: 1888785
gacuuauccgauuggagaa

SEQ ID NO: 2556609 - RNA, 19 nt, Artificial Sequence
  Description of Artificial Sequence: Synthetic oligonucleotide
  Antisense strand to SEQ ID NO: 2556608
uucuccaaucggauaaguc

SEQ ID NO: 2556610 - RNA, 19 nt, Artificial Sequence
  Description of Artificial Sequence: Synthetic oligonucleotide
  Sense strand starting at position 3262 of SEQ ID NO: 1888785
acuuauccgauuggagaau

SEQ ID NO: 2556611 - RNA, 19 nt, Artificial Sequence
  Description of Artificial Sequence: Synthetic oligonucleotide
  Antisense strand to SEQ ID NO: 2556610
auucuccaaucggauaagu

SEQ ID NO: 2556612 - RNA, 19 nt, Artificial Sequence
  Description of Artificial Sequence: Synthetic oligonucleotide
  Sense strand starting at position 3696 of SEQ ID NO: 1888785
caaggacugcaauguauau

SEQ ID NO: 2556613 - RNA, 19 nt, Artificial Sequence
  Description of Artificial Sequence: Synthetic oligonucleotide
  Antisense strand to SEQ ID NO: 2556612
auauacauugcaguccuug

SEQ ID NO: 2556614 - RNA, 19 nt, Artificial Sequence
  Description of Artificial Sequence: Synthetic oligonucleotide
  Sense strand starting at position 3777 of SEQ ID NO: 1888785
aaggguuaucacuauagca

SEQ ID NO: 2556615 - RNA, 19 nt, Artificial Sequence
  Description of Artificial Sequence: Synthetic oligonucleotide
  Antisense strand to SEQ ID NO: 2556614
ugcuauagugauaacccuu

SEQ ID NO: 2556616 - RNA, 19 nt, Artificial Sequence
  Description of Artificial Sequence: Synthetic oligonucleotide
  Sense strand starting at position 3809 of SEQ ID NO: 1888785
caggacacuuucuuugaga

SEQ ID NO: 2556617 - RNA, 19 nt, Artificial Sequence
  Description of Artificial Sequence: Synthetic oligonucleotide
  Antisense strand to SEQ ID NO: 2556616
ucucaaagaaaguguccug

SEQ ID NO: 2556618 - RNA, 19 nt, Artificial Sequence
  Description of Artificial Sequence: Synthetic oligonucleotide
  Sense strand starting at position 3886 of SEQ ID NO: 1888785
auagaaugguuuguagcaa

SEQ ID NO: 2556619 - RNA, 19 nt, Artificial Sequence
  Description of Artificial Sequence: Synthetic oligonucleotide
  Antisense strand to SEQ ID NO: 2556618
uugcuacaaaccauucuau

SEQ ID NO: 2556620 - RNA, 19 nt, Artificial Sequence
  Description of Artificial Sequence: Synthetic oligonucleotide
  Sense strand starting at position 3927 of SEQ ID NO: 1888785
acaugauugcagugggaau

SEQ ID NO: 2556621 - RNA, 19 nt, Artificial Sequence
  Description of Artificial Sequence: Synthetic oligonucleotide
  Antisense strand to SEQ ID NO: 2556620
auucccacugcaaucaugu

SEQ ID NO: 2556622 - RNA, 19 nt, Artificial Sequence
  Description of Artificial Sequence: Synthetic oligonucleotide
  Sense strand starting at position 3948 of SEQ ID NO: 1888785
uucuuaaggaguuagguuu

SEQ ID NO: 2556623 - RNA, 19 nt, Artificial Sequence
  Description of Artificial Sequence: Synthetic oligonucleotide
  Antisense strand to SEQ ID NO: 2556622
aaaccuaacuccuuaagaa

SEQ ID NO: 2556624 - RNA, 19 nt, Artificial Sequence
  Description of Artificial Sequence: Synthetic oligonucleotide
  Sense strand starting at position 245 of SEQ ID NO: 1888786
gacauuuagugggacaucu

SEQ ID NO: 2556625 - RNA, 19 nt, Artificial Sequence
  Description of Artificial Sequence: Synthetic oligonucleotide
  Antisense strand to SEQ ID NO: 2556624
agaugucccacuaaauguc

SEQ ID NO: 2556626 - RNA, 19 nt, Artificial Sequence
  Description of Artificial Sequence: Synthetic oligonucleotide
  Sense strand starting at position 256 of SEQ ID NO: 1888786
ggacaucuauaugauagaa

SEQ ID NO: 2556627 - RNA, 19 nt, Artificial Sequence
  Description of Artificial Sequence: Synthetic oligonucleotide
  Antisense strand to SEQ ID NO: 2556626
uucuaucauauagaugucc

SEQ ID NO: 2556628 - RNA, 19 nt, Artificial Sequence
  Description of Artificial Sequence: Synthetic oligonucleotide
  Sense strand starting at position 479 of SEQ ID NO: 1888786
cucuaaguuacgggauuau

SEQ ID NO: 2556629 - RNA, 19 nt, Artificial Sequence
  Description of Artificial Sequence: Synthetic oligonucleotide
  Antisense strand to SEQ ID NO: 2556628
auaaucccguaacuuagag

SEQ ID NO: 2556630 - RNA, 19 nt, Artificial Sequence
  Description of Artificial Sequence: Synthetic oligonucleotide
  Sense strand starting at position 682 of SEQ ID NO: 1888786
aaacgagcucauuauguac

SEQ ID NO: 2556631 - RNA, 19 nt, Artificial Sequence
  Description of Artificial Sequence: Synthetic oligonucleotide
  Antisense strand to SEQ ID NO: 2556630
guacauaaugagcucguuu

SEQ ID NO: 2556632 - RNA, 19 nt, Artificial Sequence
  Description of Artificial Sequence: Synthetic oligonucleotide
  Sense strand starting at position 716 of SEQ ID NO: 1888786
gcauuauuugcaugucagu

SEQ ID NO: 2556633 - RNA, 19 nt, Artificial Sequence
  Description of Artificial Sequence: Synthetic oligonucleotide
  Antisense strand to SEQ ID NO: 2556632
acugacaugcaaauaaugc

SEQ ID NO: 2556634 - RNA, 19 nt, Artificial Sequence
  Description of Artificial Sequence: Synthetic oligonucleotide
  Sense strand starting at position 733 of SEQ ID NO: 1888786
guauguauagaaugucuua

SEQ ID NO: 2556635 - RNA, 19 nt, Artificial Sequence
  Description of Artificial Sequence: Synthetic oligonucleotide
  Antisense strand to SEQ ID NO: 2556634
uaagacauucuauacauac

SEQ ID NO: 2556636 - RNA, 19 nt, Artificial Sequence
  Description of Artificial Sequence: Synthetic oligonucleotide
  Sense strand starting at position 736 of SEQ ID NO: 1888786
uguauagaaugucuuauac

SEQ ID NO: 2556637 - RNA, 19 nt, Artificial Sequence
  Description of Artificial Sequence: Synthetic oligonucleotide
  Antisense strand to SEQ ID NO: 2556636
guauaagacauucuauaca

SEQ ID NO: 2556638 - RNA, 19 nt, Artificial Sequence
  Description of Artificial Sequence: Synthetic oligonucleotide
  Sense strand starting at position 1176 of SEQ ID NO: 1888786
auuaaagcuucguugauaa

SEQ ID NO: 2556639 - RNA, 19 nt, Artificial Sequence
  Description of Artificial Sequence: Synthetic oligonucleotide
  Antisense strand to SEQ ID NO: 2556638
uuaucaacgaagcuuuaau

SEQ ID NO: 2556640 - RNA, 19 nt, Artificial Sequence
  Description of Artificial Sequence: Synthetic oligonucleotide
  Sense strand starting at position 1178 of SEQ ID NO: 1888786
uaaagcuucguugauaaga

SEQ ID NO: 2556641 - RNA, 19 nt, Artificial Sequence
  Description of Artificial Sequence: Synthetic oligonucleotide
  Antisense strand to SEQ ID NO: 2556640
ucuuaucaacgaagcuuua

SEQ ID NO: 2556642 - RNA, 19 nt, Artificial Sequence
  Description of Artificial Sequence: Synthetic oligonucleotide
  Sense strand starting at position 1189 of SEQ ID NO: 1888786
ugauaagaaucucugcuau

SEQ ID NO: 2556643 - RNA, 19 nt, Artificial Sequence
  Description of Artificial Sequence: Synthetic oligonucleotide
  Antisense strand to SEQ ID NO: 2556642
auagcagagauucuuauca

SEQ ID NO: 2556644 - RNA, 19 nt, Artificial Sequence
  Description of Artificial Sequence: Synthetic oligonucleotide
  Sense strand starting at position 1825 of SEQ ID NO: 1888786
cccaaugcugcugauuaga

SEQ ID NO: 2556645 - RNA, 19 nt, Artificial Sequence
  Description of Artificial Sequence: Synthetic oligonucleotide
  Antisense strand to SEQ ID NO: 2556644
ucuaaucagcagcauuggg

SEQ ID NO: 2556646 - RNA, 19 nt, Artificial Sequence
  Description of Artificial Sequence: Synthetic oligonucleotide
  Sense strand starting at position 2037 of SEQ ID NO: 1888786
uuggaaaugagauguacuc

SEQ ID NO: 2556647 - RNA, 19 nt, Artificial Sequence
  Description of Artificial Sequence: Synthetic oligonucleotide
  Antisense strand to SEQ ID NO: 2556646
gaguacaucucauuuccaa

SEQ ID NO: 2556648 - RNA, 19 nt, Artificial Sequence
  Description of Artificial Sequence: Synthetic oligonucleotide
  Sense strand starting at position 2212 of SEQ ID NO: 1888786
acacuuaaguugccuugau

SEQ ID NO: 2556649 - RNA, 19 nt, Artificial Sequence
  Description of Artificial Sequence: Synthetic oligonucleotide
  Antisense strand to SEQ ID NO: 2556648
aucaaggcaacuuaagugu

SEQ ID NO: 2556650 - RNA, 19 nt, Artificial Sequence
  Description of Artificial Sequence: Synthetic oligonucleotide
  Sense strand starting at position 2222 of SEQ ID NO: 1888786
ugccuugauuuccagagga

SEQ ID NO: 2556651 - RNA, 19 nt, Artificial Sequence
  Description of Artificial Sequence: Synthetic oligonucleotide
  Antisense strand to SEQ ID NO: 2556650
uccucuggaaaucaaggca

SEQ ID NO: 2556652 - RNA, 19 nt, Artificial Sequence
  Description of Artificial Sequence: Synthetic oligonucleotide
  Sense strand starting at position 2244 of SEQ ID NO: 1888786
ccuacaagacuaugagcuu

SEQ ID NO: 2556653 - RNA, 19 nt, Artificial Sequence
  Description of Artificial Sequence: Synthetic oligonucleotide
  Antisense strand to SEQ ID NO: 2556652
aagcucauagucuuguagg

SEQ ID NO: 2556654 - RNA, 19 nt, Artificial Sequence
  Description of Artificial Sequence: Synthetic oligonucleotide
  Sense strand starting at position 2319 of SEQ ID NO: 1888786
gguccuacuaggcaucaga

SEQ ID NO: 2556655 - RNA, 19 nt, Artificial Sequence
  Description of Artificial Sequence: Synthetic oligonucleotide
  Antisense strand to SEQ ID NO: 2556654
ucugaugccuaguaggacc

SEQ ID NO: 2556656 - RNA, 19 nt, Artificial Sequence
  Description of Artificial Sequence: Synthetic oligonucleotide
  Sense strand starting at position 2355 of SEQ ID NO: 1888786
agucucugaggaugaacau

SEQ ID NO: 2556657 - RNA, 19 nt, Artificial Sequence
  Description of Artificial Sequence: Synthetic oligonucleotide
  Antisense strand to SEQ ID NO: 2556656
auguucauccucagagacu

SEQ ID NO: 2556658 - RNA, 19 nt, Artificial Sequence
  Description of Artificial Sequence: Synthetic oligonucleotide
  Sense strand starting at position 2532 of SEQ ID NO: 1888786
guagaacccuguucuaaua

SEQ ID NO: 2556659 - RNA, 19 nt, Artificial Sequence
  Description of Artificial Sequence: Synthetic oligonucleotide
  Antisense strand to SEQ ID NO: 2556658
uauuagaacaggguucuac

SEQ ID NO: 2556660 - RNA, 19 nt, Artificial Sequence
  Description of Artificial Sequence: Synthetic oligonucleotide
  Sense strand starting at position 2549 of SEQ ID NO: 1888786
uaugaaugugcucaaugcu

SEQ ID NO: 2556661 - RNA, 19 nt, Artificial Sequence
  Description of Artificial Sequence: Synthetic oligonucleotide
  Antisense strand to SEQ ID NO: 2556660
agcauugagcacauucaua

SEQ ID NO: 2556662 - RNA, 19 nt, Artificial Sequence
  Description of Artificial Sequence: Synthetic oligonucleotide
  Sense strand starting at position 2683 of SEQ ID NO: 1888786
gagguauuccuguaauacc

SEQ ID NO: 2556663 - RNA, 19 nt, Artificial Sequence
  Description of Artificial Sequence: Synthetic oligonucleotide
  Antisense strand to SEQ ID NO: 2556662
gguauuacaggaauaccuc

SEQ ID NO: 2556664 - RNA, 19 nt, Artificial Sequence
  Description of Artificial Sequence: Synthetic oligonucleotide
  Sense strand starting at position 2691 of SEQ ID NO: 1888786
ccuguaauaccacagucaa

SEQ ID NO: 2556665 - RNA, 19 nt, Artificial Sequence
  Description of Artificial Sequence: Synthetic oligonucleotide
  Antisense strand to SEQ ID NO: 2556664
uugacugugguauuacagg

SEQ ID NO: 2556666 - RNA, 19 nt, Artificial Sequence
  Description of Artificial Sequence: Synthetic oligonucleotide
  Sense strand starting at position 2848 of SEQ ID NO: 1888786
uggguaacguuaucauuag

SEQ ID NO: 2556667 - RNA, 19 nt, Artificial Sequence
  Description of Artificial Sequence: Synthetic oligonucleotide
  Antisense strand to SEQ ID NO: 2556666
cuaaugauaacguuaccca

SEQ ID NO: 2556668 - RNA, 19 nt, Artificial Sequence
  Description of Artificial Sequence: Synthetic oligonucleotide
  Sense strand starting at position 2982 of SEQ ID NO: 1888786
gcacacuuaucuuuacagu

SEQ ID NO: 2556669 - RNA, 19 nt, Artificial Sequence
  Description of Artificial Sequence: Synthetic oligonucleotide
  Antisense strand to SEQ ID NO: 2556668
acuguaaagauaagugugc

SEQ ID NO: 2556670 - RNA, 19 nt, Artificial Sequence
  Description of Artificial Sequence: Synthetic oligonucleotide
  Sense strand starting at position 3100 of SEQ ID NO: 1888786
uuuaauuucugccagauag

SEQ ID NO: 2556671 - RNA, 19 nt, Artificial Sequence
  Description of Artificial Sequence: Synthetic oligonucleotide
  Antisense strand to SEQ ID NO: 2556670
cuaucuggcagaaauuaaa

SEQ ID NO: 2556672 - RNA, 19 nt, Artificial Sequence
  Description of Artificial Sequence: Synthetic oligonucleotide
  Sense strand starting at position 3115 of SEQ ID NO: 1888786
auaggaaauauguggcaau

SEQ ID NO: 2556673 - RNA, 19 nt, Artificial Sequence
  Description of Artificial Sequence: Synthetic oligonucleotide
  Antisense strand to SEQ ID NO: 2556672
auugccacauauuuccuau

SEQ ID NO: 2556674 - RNA, 19 nt, Artificial Sequence
  Description of Artificial Sequence: Synthetic oligonucleotide
  Sense strand starting at position 3163 of SEQ ID NO: 1888786
ucaguaccuuuauuaugua

SEQ ID NO: 2556675 - RNA, 19 nt, Artificial Sequence
  Description of Artificial Sequence: Synthetic oligonucleotide
  Antisense strand to SEQ ID NO: 2556674
uacauaauaaagguacuga

SEQ ID NO: 2556676 - RNA, 19 nt, Artificial Sequence
  Description of Artificial Sequence: Synthetic oligonucleotide
  Sense strand starting at position 3205 of SEQ ID NO: 1888786
cuaaguaccaggugaugaa

SEQ ID NO: 2556677 - RNA, 19 nt, Artificial Sequence
  Description of Artificial Sequence: Synthetic oligonucleotide
  Antisense strand to SEQ ID NO: 2556676
uucaucaccugguacuuag

SEQ ID NO: 2556678 - RNA, 19 nt, Artificial Sequence
  Description of Artificial Sequence: Synthetic oligonucleotide
  Sense strand starting at position 3320 of SEQ ID NO: 1888786
ucuaaaucaccuggagugu

SEQ ID NO: 2556679 - RNA, 19 nt, Artificial Sequence
  Description of Artificial Sequence: Synthetic oligonucleotide
  Antisense strand to SEQ ID NO: 2556678
acacuccaggugauuuaga

SEQ ID NO: 2556680 - RNA, 19 nt, Artificial Sequence
  Description of Artificial Sequence: Synthetic oligonucleotide
  Sense strand starting at position 3321 of SEQ ID NO: 1888786
cuaaaucaccuggaguguu

SEQ ID NO: 2556681 - RNA, 19 nt, Artificial Sequence
  Description of Artificial Sequence: Synthetic oligonucleotide
  Antisense strand to SEQ ID NO: 2556680
aacacuccaggugauuuag

SEQ ID NO: 2556682 - RNA, 19 nt, Artificial Sequence
  Description of Artificial Sequence: Synthetic oligonucleotide
  Sense strand starting at position 3324 of SEQ ID NO: 1888786
aaucaccuggaguguuaau

SEQ ID NO: 2556683 - RNA, 19 nt, Artificial Sequence
  Description of Artificial Sequence: Synthetic oligonucleotide
  Antisense strand to SEQ ID NO: 2556682
auuaacacuccaggugauu

SEQ ID NO: 2556684 - RNA, 19 nt, Artificial Sequence
  Description of Artificial Sequence: Synthetic oligonucleotide
  Sense strand starting at position 3432 of SEQ ID NO: 1888786
cgucaucauuugguucuga

SEQ ID NO: 2556685 - RNA, 19 nt, Artificial Sequence
  Description of Artificial Sequence: Synthetic oligonucleotide
  Antisense strand to SEQ ID NO: 2556684
ucagaaccaaaugaugacg

SEQ ID NO: 2556686 - RNA, 19 nt, Artificial Sequence
  Description of Artificial Sequence: Synthetic oligonucleotide
  Sense strand starting at position 3437 of SEQ ID NO: 1888786
ucauuugguucugaccaga

SEQ ID NO: 2556687 - RNA, 19 nt, Artificial Sequence
  Description of Artificial Sequence: Synthetic oligonucleotide
  Antisense strand to SEQ ID NO: 2556686
ucuggucagaaccaaauga

SEQ ID NO: 2556688 - RNA, 19 nt, Artificial Sequence
  Description of Artificial Sequence: Synthetic oligonucleotide
  Sense strand starting at position 3479 of SEQ ID NO: 1888786
uugguaauguuauuggaga

SEQ ID NO: 2556689 - RNA, 19 nt, Artificial Sequence
  Description of Artificial Sequence: Synthetic oligonucleotide
  Antisense strand to SEQ ID NO: 2556688
ucuccaauaacauuaccaa

SEQ ID NO: 2556690 - RNA, 19 nt, Artificial Sequence
  Description of Artificial Sequence: Synthetic oligonucleotide
  Sense strand starting at position 3481 of SEQ ID NO: 1888786
gguaauguuauuggagaag

SEQ ID NO: 2556691 - RNA, 19 nt, Artificial Sequence
  Description of Artificial Sequence: Synthetic oligonucleotide
  Antisense strand to SEQ ID NO: 2556690
cuucuccaauaacauuacc

SEQ ID NO: 2556692 - RNA, 19 nt, Artificial Sequence
  Description of Artificial Sequence: Synthetic oligonucleotide
  Sense strand starting at position 3571 of SEQ ID NO: 1888786
uauauucugcaugguuaga

SEQ ID NO: 2556693 - RNA, 19 nt, Artificial Sequence
  Description of Artificial Sequence: Synthetic oligonucleotide
  Antisense strand to SEQ ID NO: 2556692
ucuaaccaugcagaauaua

SEQ ID NO: 2556694 - RNA, 19 nt, Artificial Sequence
  Description of Artificial Sequence: Synthetic oligonucleotide
  Sense strand starting at position 3680 of SEQ ID NO: 1888786
ugaagagaauccuaaagaa

SEQ ID NO: 2556695 - RNA, 19 nt, Artificial Sequence
  Description of Artificial Sequence: Synthetic oligonucleotide
  Antisense strand to SEQ ID NO: 2556694
uucuuuaggauucucuuca

SEQ ID NO: 2556696 - RNA, 19 nt, Artificial Sequence
  Description of Artificial Sequence: Synthetic oligonucleotide
  Sense strand starting at position 3696 of SEQ ID NO: 1888786
gaaaccuuuggugacggau

SEQ ID NO: 2556697 - RNA, 19 nt, Artificial Sequence
  Description of Artificial Sequence: Synthetic oligonucleotide
  Antisense strand to SEQ ID NO: 2556696
auccgucaccaaagguuuc

SEQ ID NO: 2556698 - RNA, 19 nt, Artificial Sequence
  Description of Artificial Sequence: Synthetic oligonucleotide
  Sense strand starting at position 3753 of SEQ ID NO: 1888786
agacaaaucuuacuagguc

SEQ ID NO: 2556699 - RNA, 19 nt, Artificial Sequence
  Description of Artificial Sequence: Synthetic oligonucleotide
  Antisense strand to SEQ ID NO: 2556698
gaccuaguaagauuugucu

SEQ ID NO: 2556700 - RNA, 19 nt, Artificial Sequence
  Description of Artificial Sequence: Synthetic oligonucleotide
  Sense strand starting at position 3837 of SEQ ID NO: 1888786
acaucuaaugcccagguau

SEQ ID NO: 2556701 - RNA, 19 nt, Artificial Sequence
  Description of Artificial Sequence: Synthetic oligonucleotide
  Antisense strand to SEQ ID NO: 2556700
auaccugggcauuagaugu

SEQ ID NO: 2556702 - RNA, 19 nt, Artificial Sequence
  Description of Artificial Sequence: Synthetic oligonucleotide
  Sense strand starting at position 3839 of SEQ ID NO: 1888786
aucuaaugcccagguauua

SEQ ID NO: 2556703 - RNA, 19 nt, Artificial Sequence
  Description of Artificial Sequence: Synthetic oligonucleotide
  Antisense strand to SEQ ID NO: 2556702
uaauaccugggcauuagau

SEQ ID NO: 2556704 - RNA, 19 nt, Artificial Sequence
  Description of Artificial Sequence: Synthetic oligonucleotide
  Sense strand starting at position 91 of SEQ ID NO: 1888787
cuggaaggcucuguggaua

SEQ ID NO: 2556705 - RNA, 19 nt, Artificial Sequence
  Description of Artificial Sequence: Synthetic oligonucleotide
  Antisense strand to SEQ ID NO: 2556704
uauccacagagccuuccag

SEQ ID NO: 2556706 - RNA, 19 nt, Artificial Sequence
  Description of Artificial Sequence: Synthetic oligonucleotide
  Sense strand starting at position 94 of SEQ ID NO: 1888787
gaaggcucuguggauauga

SEQ ID NO: 2556707 - RNA, 19 nt, Artificial Sequence
  Description of Artificial Sequence: Synthetic oligonucleotide
  Antisense strand to SEQ ID NO: 2556706
ucauauccacagagccuuc

SEQ ID NO: 2556708 - RNA, 19 nt, Artificial Sequence
  Description of Artificial Sequence: Synthetic oligonucleotide
  Sense strand starting at position 96 of SEQ ID NO: 1888787
aggcucuguggauaugaca

SEQ ID NO: 2556709 - RNA, 19 nt, Artificial Sequence
  Description of Artificial Sequence: Synthetic oligonucleotide
  Antisense strand to SEQ ID NO: 2556708
ugucauauccacagagccu

SEQ ID NO: 2556710 - RNA, 19 nt, Artificial Sequence
  Description of Artificial Sequence: Synthetic oligonucleotide
  Sense strand starting at position 104 of SEQ ID NO: 1888787
uggauaugacauuggcagu

SEQ ID NO: 2556711 - RNA, 19 nt, Artificial Sequence
  Description of Artificial Sequence: Synthetic oligonucleotide
  Antisense strand to SEQ ID NO: 2556710
acugccaaugucauaucca

SEQ ID NO: 2556712 - RNA, 19 nt, Artificial Sequence
  Description of Artificial Sequence: Synthetic oligonucleotide
  Sense strand starting at position 105 of SEQ ID NO: 1888787
ggauaugacauuggcagua

SEQ ID NO: 2556713 - RNA, 19 nt, Artificial Sequence
  Description of Artificial Sequence: Synthetic oligonucleotide
  Antisense strand to SEQ ID NO: 2556712
uacugccaaugucauaucc

SEQ ID NO: 2556714 - RNA, 19 nt, Artificial Sequence
  Description of Artificial Sequence: Synthetic oligonucleotide
  Sense strand starting at position 110 of SEQ ID NO: 1888787
ugacauuggcaguauuaaa

SEQ ID NO: 2556715 - RNA, 19 nt, Artificial Sequence
  Description of Artificial Sequence: Synthetic oligonucleotide
  Antisense strand to SEQ ID NO: 2556714
uuuaauacugccaauguca

SEQ ID NO: 2556716 - RNA, 19 nt, Artificial Sequence
  Description of Artificial Sequence: Synthetic oligonucleotide
  Sense strand starting at position 248 of SEQ ID NO: 1888787
aagagucuuugguccucaa

SEQ ID NO: 2556717 - RNA, 19 nt, Artificial Sequence
  Description of Artificial Sequence: Synthetic oligonucleotide
  Antisense strand to SEQ ID NO: 2556716
uugaggaccaaagacucuu

SEQ ID NO: 2556718 - RNA, 19 nt, Artificial Sequence
  Description of Artificial Sequence: Synthetic oligonucleotide
  Sense strand starting at position 583 of SEQ ID NO: 1888787
ccauguccacccuagaguu

SEQ ID NO: 2556719 - RNA, 19 nt, Artificial Sequence
  Description of Artificial Sequence: Synthetic oligonucleotide
  Antisense strand to SEQ ID NO: 2556718
aacucuaggguggacaugg

SEQ ID NO: 2556720 - RNA, 19 nt, Artificial Sequence
  Description of Artificial Sequence: Synthetic oligonucleotide
  Sense strand starting at position 705 of SEQ ID NO: 1888787
uugcguuugaaggauuugu

SEQ ID NO: 2556721 - RNA, 19 nt, Artificial Sequence
  Description of Artificial Sequence: Synthetic oligonucleotide
  Antisense strand to SEQ ID NO: 2556720
acaaauccuucaaacgcaa

SEQ ID NO: 2556722 - RNA, 19 nt, Artificial Sequence
  Description of Artificial Sequence: Synthetic oligonucleotide
  Sense strand starting at position 768 of SEQ ID NO: 1888787
gggacuucuuuauccauga

SEQ ID NO: 2556723 - RNA, 19 nt, Artificial Sequence
  Description of Artificial Sequence: Synthetic oligonucleotide
  Antisense strand to SEQ ID NO: 2556722
ucauggauaaagaaguccc

SEQ ID NO: 2556724 - RNA, 19 nt, Artificial Sequence
  Description of Artificial Sequence: Synthetic oligonucleotide
  Sense strand starting at position 769 of SEQ ID NO: 1888787
ggacuucuuuauccaugau

SEQ ID NO: 2556725 - RNA, 19 nt, Artificial Sequence
  Description of Artificial Sequence: Synthetic oligonucleotide
  Antisense strand to SEQ ID NO: 2556724
aucauggauaaagaagucc

SEQ ID NO: 2556726 - RNA, 19 nt, Artificial Sequence
  Description of Artificial Sequence: Synthetic oligonucleotide
  Sense strand starting at position 781 of SEQ ID NO: 1888787
ccaugauguguugacucca

SEQ ID NO: 2556727 - RNA, 19 nt, Artificial Sequence
  Description of Artificial Sequence: Synthetic oligonucleotide
  Antisense strand to SEQ ID NO: 2556726
uggagucaacacaucaugg

SEQ ID NO: 2556728 - RNA, 19 nt, Artificial Sequence
  Description of Artificial Sequence: Synthetic oligonucleotide
  Sense strand starting at position 786 of SEQ ID NO: 1888787
auguguugacuccacccaa

SEQ ID NO: 2556729 - RNA, 19 nt, Artificial Sequence
  Description of Artificial Sequence: Synthetic oligonucleotide
  Antisense strand to SEQ ID NO: 2556728
uuggguggagucaacacau

SEQ ID NO: 2556730 - RNA, 19 nt, Artificial Sequence
  Description of Artificial Sequence: Synthetic oligonucleotide
  Sense strand starting at position 1290 of SEQ ID NO: 1888787
ucauguuaugcagaguaau

SEQ ID NO: 2556731 - RNA, 19 nt, Artificial Sequence
  Description of Artificial Sequence: Synthetic oligonucleotide
  Antisense strand to SEQ ID NO: 2556730
auuacucugcauaacauga

SEQ ID NO: 2556732 - RNA, 19 nt, Artificial Sequence
  Description of Artificial Sequence: Synthetic oligonucleotide
  Sense strand starting at position 1302 of SEQ ID NO: 1888787
gaguaauucucuuugguaa

SEQ ID NO: 2556733 - RNA, 19 nt, Artificial Sequence
  Description of Artificial Sequence: Synthetic oligonucleotide
  Antisense strand to SEQ ID NO: 2556732
uuaccaaagagaauuacuc

SEQ ID NO: 2556734 - RNA, 19 nt, Artificial Sequence
  Description of Artificial Sequence: Synthetic oligonucleotide
  Sense strand starting at position 1303 of SEQ ID NO: 1888787
aguaauucucuuugguaaa

SEQ ID NO: 2556735 - RNA, 19 nt, Artificial Sequence
  Description of Artificial Sequence: Synthetic oligonucleotide
  Antisense strand to SEQ ID NO: 2556734
uuuaccaaagagaauuacu

SEQ ID NO: 2556736 - RNA, 19 nt, Artificial Sequence
  Description of Artificial Sequence: Synthetic oligonucleotide
  Sense strand starting at position 1462 of SEQ ID NO: 1888787
uggugaagcagguaugaau

SEQ ID NO: 2556737 - RNA, 19 nt, Artificial Sequence
  Description of Artificial Sequence: Synthetic oligonucleotide
  Antisense strand to SEQ ID NO: 2556736
auucauaccugcuucacca

SEQ ID NO: 2556738 - RNA, 19 nt, Artificial Sequence
  Description of Artificial Sequence: Synthetic oligonucleotide
  Sense strand starting at position 1584 of SEQ ID NO: 1888787
aucacaguggcuuaaagau

SEQ ID NO: 2556739 - RNA, 19 nt, Artificial Sequence
  Description of Artificial Sequence: Synthetic oligonucleotide
  Antisense strand to SEQ ID NO: 2556738
aucuuuaagccacugugau

SEQ ID NO: 2556740 - RNA, 19 nt, Artificial Sequence
  Description of Artificial Sequence: Synthetic oligonucleotide
  Sense strand starting at position 1752 of SEQ ID NO: 1888787
gugacagagaggugagauu

SEQ ID NO: 2556741 - RNA, 19 nt, Artificial Sequence
  Description of Artificial Sequence: Synthetic oligonucleotide
  Antisense strand to SEQ ID NO: 2556740
aaucucaccucucugucac

SEQ ID NO: 2556742 - RNA, 19 nt, Artificial Sequence
  Description of Artificial Sequence: Synthetic oligonucleotide
  Sense strand starting at position 1776 of SEQ ID NO: 1888787
ugagaaagccuguaucuga

SEQ ID NO: 2556743 - RNA, 19 nt, Artificial Sequence
  Description of Artificial Sequence: Synthetic oligonucleotide
  Antisense strand to SEQ ID NO: 2556742
ucagauacaggcuuucuca

SEQ ID NO: 2556744 - RNA, 19 nt, Artificial Sequence
  Description of Artificial Sequence: Synthetic oligonucleotide
  Sense strand starting at position 1828 of SEQ ID NO: 1888787
ucuguaucaguuugaacaa

SEQ ID NO: 2556745 - RNA, 19 nt, Artificial Sequence
  Description of Artificial Sequence: Synthetic oligonucleotide
  Antisense strand to SEQ ID NO: 2556744
uuguucaaacugauacaga

SEQ ID NO: 2556746 - RNA, 19 nt, Artificial Sequence
  Description of Artificial Sequence: Synthetic oligonucleotide
  Sense strand starting at position 1888 of SEQ ID NO: 1888787
ggguuuaucagguagguua

SEQ ID NO: 2556747 - RNA, 19 nt, Artificial Sequence
  Description of Artificial Sequence: Synthetic oligonucleotide
  Antisense strand to SEQ ID NO: 2556746
uaaccuaccugauaaaccc

SEQ ID NO: 2556748 - RNA, 19 nt, Artificial Sequence
  Description of Artificial Sequence: Synthetic oligonucleotide
  Sense strand starting at position 2189 of SEQ ID NO: 1888787
gaauaaggugaguggaagu

SEQ ID NO: 2556749 - RNA, 19 nt, Artificial Sequence
  Description of Artificial Sequence: Synthetic oligonucleotide
  Antisense strand to SEQ ID NO: 2556748
acuuccacucaccuuauuc

SEQ ID NO: 2556750 - RNA, 19 nt, Artificial Sequence
  Description of Artificial Sequence: Synthetic oligonucleotide
  Sense strand starting at position 2256 of SEQ ID NO: 1888787
gucuccuuccuagacagaa

SEQ ID NO: 2556751 - RNA, 19 nt, Artificial Sequence
  Description of Artificial Sequence: Synthetic oligonucleotide
  Antisense strand to SEQ ID NO: 2556750
uucugucuaggaaggagac

SEQ ID NO: 2556752 - RNA, 19 nt, Artificial Sequence
  Description of Artificial Sequence: Synthetic oligonucleotide
  Sense strand starting at position 2383 of SEQ ID NO: 1888787
gguagugaucagcaacuuu

SEQ ID NO: 2556753 - RNA, 19 nt, Artificial Sequence
  Description of Artificial Sequence: Synthetic oligonucleotide
  Antisense strand to SEQ ID NO: 2556752
aaaguugcugaucacuacc

SEQ ID NO: 2556754 - RNA, 19 nt, Artificial Sequence
  Description of Artificial Sequence: Synthetic oligonucleotide
  Sense strand starting at position 2410 of SEQ ID NO: 1888787
uguuccaauccaggaauua

SEQ ID NO: 2556755 - RNA, 19 nt, Artificial Sequence
  Description of Artificial Sequence: Synthetic oligonucleotide
  Antisense strand to SEQ ID NO: 2556754
uaauuccuggauuggaaca

SEQ ID NO: 2556756 - RNA, 19 nt, Artificial Sequence
  Description of Artificial Sequence: Synthetic oligonucleotide
  Sense strand starting at position 2719 of SEQ ID NO: 1888787
ggaccaguuccuugagaca

SEQ ID NO: 2556757 - RNA, 19 nt, Artificial Sequence
  Description of Artificial Sequence: Synthetic oligonucleotide
  Antisense strand to SEQ ID NO: 2556756
ugucucaaggaacuggucc

SEQ ID NO: 2556758 - RNA, 19 nt, Artificial Sequence
  Description of Artificial Sequence: Synthetic oligonucleotide
  Sense strand starting at position 2853 of SEQ ID NO: 1888787
caggcugucagagggauaa

SEQ ID NO: 2556759 - RNA, 19 nt, Artificial Sequence
  Description of Artificial Sequence: Synthetic oligonucleotide
  Antisense strand to SEQ ID NO: 2556758
uuaucccucugacagccug

SEQ ID NO: 2556760 - RNA, 19 nt, Artificial Sequence
  Description of Artificial Sequence: Synthetic oligonucleotide
  Sense strand starting at position 2903 of SEQ ID NO: 1888787
ugugguucucaugaggaac

SEQ ID NO: 2556761 - RNA, 19 nt, Artificial Sequence
  Description of Artificial Sequence: Synthetic oligonucleotide
  Antisense strand to SEQ ID NO: 2556760
guuccucaugagaaccaca

SEQ ID NO: 2556762 - RNA, 19 nt, Artificial Sequence
  Description of Artificial Sequence: Synthetic oligonucleotide
  Sense strand starting at position 2991 of SEQ ID NO: 1888787
ggaaauugacguuacugua

SEQ ID NO: 2556763 - RNA, 19 nt, Artificial Sequence
  Description of Artificial Sequence: Synthetic oligonucleotide
  Antisense strand to SEQ ID NO: 2556762
uacaguaacgucaauuucc

SEQ ID NO: 2556764 - RNA, 19 nt, Artificial Sequence
  Description of Artificial Sequence: Synthetic oligonucleotide
  Sense strand starting at position 3161 of SEQ ID NO: 1888787
agagaacauauugguguau

SEQ ID NO: 2556765 - RNA, 19 nt, Artificial Sequence
  Description of Artificial Sequence: Synthetic oligonucleotide
  Antisense strand to SEQ ID NO: 2556764
auacaccaauauguucucu

SEQ ID NO: 2556766 - RNA, 19 nt, Artificial Sequence
  Description of Artificial Sequence: Synthetic oligonucleotide
  Sense strand starting at position 3162 of SEQ ID NO: 1888787
gagaacauauugguguauu

SEQ ID NO: 2556767 - RNA, 19 nt, Artificial Sequence
  Description of Artificial Sequence: Synthetic oligonucleotide
  Antisense strand to SEQ ID NO: 2556766
aauacaccaauauguucuc

SEQ ID NO: 2556768 - RNA, 19 nt, Artificial Sequence
  Description of Artificial Sequence: Synthetic oligonucleotide
  Sense strand starting at position 3428 of SEQ ID NO: 1888787
auguuccaacuguaagaca

SEQ ID NO: 2556769 - RNA, 19 nt, Artificial Sequence
  Description of Artificial Sequence: Synthetic oligonucleotide
  Antisense strand to SEQ ID NO: 2556768
ugucuuacaguuggaacau

SEQ ID NO: 2556770 - RNA, 19 nt, Artificial Sequence
  Description of Artificial Sequence: Synthetic oligonucleotide
  Sense strand starting at position 3471 of SEQ ID NO: 1888787
uggugauugccauaagcag

SEQ ID NO: 2556771 - RNA, 19 nt, Artificial Sequence
  Description of Artificial Sequence: Synthetic oligonucleotide
  Antisense strand to SEQ ID NO: 2556770
cugcuuauggcaaucacca

SEQ ID NO: 2556772 - RNA, 19 nt, Artificial Sequence
  Description of Artificial Sequence: Synthetic oligonucleotide
  Sense strand starting at position 3570 of SEQ ID NO: 1888787
cugucuguuccuuaaauag

SEQ ID NO: 2556773 - RNA, 19 nt, Artificial Sequence
  Description of Artificial Sequence: Synthetic oligonucleotide
  Antisense strand to SEQ ID NO: 2556772
cuauuuaaggaacagacag

SEQ ID NO: 2556774 - RNA, 19 nt, Artificial Sequence
  Description of Artificial Sequence: Synthetic oligonucleotide
  Sense strand starting at position 3753 of SEQ ID NO: 1888787
cacauagaaccguguaaag

SEQ ID NO: 2556775 - RNA, 19 nt, Artificial Sequence
  Description of Artificial Sequence: Synthetic oligonucleotide
  Antisense strand to SEQ ID NO: 2556774
cuuuacacgguucuaugug

SEQ ID NO: 2556776 - RNA, 19 nt, Artificial Sequence
  Description of Artificial Sequence: Synthetic oligonucleotide
  Sense strand starting at position 3755 of SEQ ID NO: 1888787
cauagaaccguguaaagac

SEQ ID NO: 2556777 - RNA, 19 nt, Artificial Sequence
  Description of Artificial Sequence: Synthetic oligonucleotide
  Antisense strand to SEQ ID NO: 2556776
gucuuuacacgguucuaug

SEQ ID NO: 2556778 - RNA, 19 nt, Artificial Sequence
  Description of Artificial Sequence: Synthetic oligonucleotide
  Sense strand starting at position 3817 of SEQ ID NO: 1888787
auaacuuaucgguguauuu

SEQ ID NO: 2556779 - RNA, 19 nt, Artificial Sequence
  Description of Artificial Sequence: Synthetic oligonucleotide
  Antisense strand to SEQ ID NO: 2556778
aaauacaccgauaaguuau

SEQ ID NO: 2556780 - RNA, 19 nt, Artificial Sequence
  Description of Artificial Sequence: Synthetic oligonucleotide
  Sense strand starting at position 3885 of SEQ ID NO: 1888787
cuagaaauccaaggcaauc

SEQ ID NO: 2556781 - RNA, 19 nt, Artificial Sequence
  Description of Artificial Sequence: Synthetic oligonucleotide
  Antisense strand to SEQ ID NO: 2556780
gauugccuuggauuucuag

SEQ ID NO: 2556782 - RNA, 19 nt, Artificial Sequence
  Description of Artificial Sequence: Synthetic oligonucleotide
  Sense strand starting at position 3897 of SEQ ID NO: 1888787
ggcaaucaccuaggaaaua

SEQ ID NO: 2556783 - RNA, 19 nt, Artificial Sequence
  Description of Artificial Sequence: Synthetic oligonucleotide
  Antisense strand to SEQ ID NO: 2556782
uauuuccuaggugauugcc

SEQ ID NO: 2556784 - RNA, 19 nt, Artificial Sequence
  Description of Artificial Sequence: Synthetic oligonucleotide
  Sense strand starting at position 79 of SEQ ID NO: 1888788
aagcauugucuauagguca

SEQ ID NO: 2556785 - RNA, 19 nt, Artificial Sequence
  Description of Artificial Sequence: Synthetic oligonucleotide
  Antisense strand to SEQ ID NO: 2556784
ugaccuauagacaaugcuu

SEQ ID NO: 2556786 - RNA, 19 nt, Artificial Sequence
  Description of Artificial Sequence: Synthetic oligonucleotide
  Sense strand starting at position 158 of SEQ ID NO: 1888788
aguccagauacguauguau

SEQ ID NO: 2556787 - RNA, 19 nt, Artificial Sequence
  Description of Artificial Sequence: Synthetic oligonucleotide
  Antisense strand to SEQ ID NO: 2556786
auacauacguaucuggacu

SEQ ID NO: 2556788 - RNA, 19 nt, Artificial Sequence
  Description of Artificial Sequence: Synthetic oligonucleotide
  Sense strand starting at position 225 of SEQ ID NO: 1888788
uaucuuucucaagaggugu

SEQ ID NO: 2556789 - RNA, 19 nt, Artificial Sequence
  Description of Artificial Sequence: Synthetic oligonucleotide
  Antisense strand to SEQ ID NO: 2556788
acaccucuugagaaagaua

SEQ ID NO: 2556790 - RNA, 19 nt, Artificial Sequence
  Description of Artificial Sequence: Synthetic oligonucleotide
  Sense strand starting at position 556 of SEQ ID NO: 1888788
cuccauugaccuuggugau

SEQ ID NO: 2556791 - RNA, 19 nt, Artificial Sequence
  Description of Artificial Sequence: Synthetic oligonucleotide
  Antisense strand to SEQ ID NO: 2556790
aucaccaaggucaauggag

SEQ ID NO: 2556792 - RNA, 19 nt, Artificial Sequence
  Description of Artificial Sequence: Synthetic oligonucleotide
  Sense strand starting at position 557 of SEQ ID NO: 1888788
uccauugaccuuggugauu

SEQ ID NO: 2556793 - RNA, 19 nt, Artificial Sequence
  Description of Artificial Sequence: Synthetic oligonucleotide
  Antisense strand to SEQ ID NO: 2556792
aaucaccaaggucaaugga

SEQ ID NO: 2556794 - RNA, 19 nt, Artificial Sequence
  Description of Artificial Sequence: Synthetic oligonucleotide
  Sense strand starting at position 941 of SEQ ID NO: 1888788
gauguuauuccgucgucau

SEQ ID NO: 2556795 - RNA, 19 nt, Artificial Sequence
  Description of Artificial Sequence: Synthetic oligonucleotide
  Antisense strand to SEQ ID NO: 2556794
augacgacggaauaacauc

SEQ ID NO: 2556796 - RNA, 19 nt, Artificial Sequence
  Description of Artificial Sequence: Synthetic oligonucleotide
  Sense strand starting at position 952 of SEQ ID NO: 1888788
gucgucauuccugcaugua

SEQ ID NO: 2556797 - RNA, 19 nt, Artificial Sequence
  Description of Artificial Sequence: Synthetic oligonucleotide
  Antisense strand to SEQ ID NO: 2556796
uacaugcaggaaugacgac

SEQ ID NO: 2556798 - RNA, 19 nt, Artificial Sequence
  Description of Artificial Sequence: Synthetic oligonucleotide
  Sense strand starting at position 1511 of SEQ ID NO: 1888788
ccugaaacacuuggugaaa

SEQ ID NO: 2556799 - RNA, 19 nt, Artificial Sequence
  Description of Artificial Sequence: Synthetic oligonucleotide
  Antisense strand to SEQ ID NO: 2556798
uuucaccaaguguuucagg

SEQ ID NO: 2556800 - RNA, 19 nt, Artificial Sequence
  Description of Artificial Sequence: Synthetic oligonucleotide
  Sense strand starting at position 1936 of SEQ ID NO: 1888788
acaggacuucguugaagac

SEQ ID NO: 2556801 - RNA, 19 nt, Artificial Sequence
  Description of Artificial Sequence: Synthetic oligonucleotide
  Antisense strand to SEQ ID NO: 2556800
gucuucaacgaaguccugu

SEQ ID NO: 2556802 - RNA, 19 nt, Artificial Sequence
  Description of Artificial Sequence: Synthetic oligonucleotide
  Sense strand starting at position 2221 of SEQ ID NO: 1888788
gaggguccuccucgagaga

SEQ ID NO: 2556803 - RNA, 19 nt, Artificial Sequence
  Description of Artificial Sequence: Synthetic oligonucleotide
  Antisense strand to SEQ ID NO: 2556802
ucucucgaggaggacccuc

SEQ ID NO: 2556804 - RNA, 19 nt, Artificial Sequence
  Description of Artificial Sequence: Synthetic oligonucleotide
  Sense strand starting at position 2222 of SEQ ID NO: 1888788
aggguccuccucgagagaa

SEQ ID NO: 2556805 - RNA, 19 nt, Artificial Sequence
  Description of Artificial Sequence: Synthetic oligonucleotide
  Antisense strand to SEQ ID NO: 2556804
uucucucgaggaggacccu

SEQ ID NO: 2556806 - RNA, 19 nt, Artificial Sequence
  Description of Artificial Sequence: Synthetic oligonucleotide
  Sense strand starting at position 2224 of SEQ ID NO: 1888788
gguccuccucgagagaaca

SEQ ID NO: 2556807 - RNA, 19 nt, Artificial Sequence
  Description of Artificial Sequence: Synthetic oligonucleotide
  Antisense strand to SEQ ID NO: 2556806
uguucucucgaggaggacc

SEQ ID NO: 2556808 - RNA, 19 nt, Artificial Sequence
  Description of Artificial Sequence: Synthetic oligonucleotide
  Sense strand starting at position 2238 of SEQ ID NO: 1888788
gaacaugauguguagaggu

SEQ ID NO: 2556809 - RNA, 19 nt, Artificial Sequence
  Description of Artificial Sequence: Synthetic oligonucleotide
  Antisense strand to SEQ ID NO: 2556808
accucuacacaucauguuc

SEQ ID NO: 2556810 - RNA, 19 nt, Artificial Sequence
  Description of Artificial Sequence: Synthetic oligonucleotide
  Sense strand starting at position 2423 of SEQ ID NO: 1888788
uggacacuauugucacauu

SEQ ID NO: 2556811 - RNA, 19 nt, Artificial Sequence
  Description of Artificial Sequence: Synthetic oligonucleotide
  Antisense strand to SEQ ID NO: 2556810
aaugugacaauagugucca

SEQ ID NO: 2556812 - RNA, 19 nt, Artificial Sequence
  Description of Artificial Sequence: Synthetic oligonucleotide
  Sense strand starting at position 2468 of SEQ ID NO: 1888788
acaguuggaccuuguagau

SEQ ID NO: 2556813 - RNA, 19 nt, Artificial Sequence
  Description of Artificial Sequence: Synthetic oligonucleotide
  Antisense strand to SEQ ID NO: 2556812
aucuacaagguccaacugu

SEQ ID NO: 2556814 - RNA, 19 nt, Artificial Sequence
  Description of Artificial Sequence: Synthetic oligonucleotide
  Sense strand starting at position 2480 of SEQ ID NO: 1888788
uguagaugaaauuguaaga

SEQ ID NO: 2556815 - RNA, 19 nt, Artificial Sequence
  Description of Artificial Sequence: Synthetic oligonucleotide
  Antisense strand to SEQ ID NO: 2556814
ucuuacaauuucaucuaca

SEQ ID NO: 2556816 - RNA, 19 nt, Artificial Sequence
  Description of Artificial Sequence: Synthetic oligonucleotide
  Sense strand starting at position 2491 of SEQ ID NO: 1888788
uuguaagagugauccugau

SEQ ID NO: 2556817 - RNA, 19 nt, Artificial Sequence
  Description of Artificial Sequence: Synthetic oligonucleotide
  Antisense strand to SEQ ID NO: 2556816
aucaggaucacucuuacaa

SEQ ID NO: 2556818 - RNA, 19 nt, Artificial Sequence
  Description of Artificial Sequence: Synthetic oligonucleotide
  Sense strand starting at position 2519 of SEQ ID NO: 1888788
guagacauuuaugaguaau

SEQ ID NO: 2556819 - RNA, 19 nt, Artificial Sequence
  Description of Artificial Sequence: Synthetic oligonucleotide
  Antisense strand to SEQ ID NO: 2556818
auuacucauaaaugucuac

SEQ ID NO: 2556820 - RNA, 19 nt, Artificial Sequence
  Description of Artificial Sequence: Synthetic oligonucleotide
  Sense strand starting at position 2527 of SEQ ID NO: 1888788
uuaugaguaaucgaugugu

SEQ ID NO: 2556821 - RNA, 19 nt, Artificial Sequence
  Description of Artificial Sequence: Synthetic oligonucleotide
  Antisense strand to SEQ ID NO: 2556820
acacaucgauuacucauaa

SEQ ID NO: 2556822 - RNA, 19 nt, Artificial Sequence
  Description of Artificial Sequence: Synthetic oligonucleotide
  Sense strand starting at position 2533 of SEQ ID NO: 1888788
guaaucgauguguauugaa

SEQ ID NO: 2556823 - RNA, 19 nt, Artificial Sequence
  Description of Artificial Sequence: Synthetic oligonucleotide
  Antisense strand to SEQ ID NO: 2556822
uucaauacacaucgauuac

SEQ ID NO: 2556824 - RNA, 19 nt, Artificial Sequence
  Description of Artificial Sequence: Synthetic oligonucleotide
  Sense strand starting at position 2545 of SEQ ID NO: 1888788
uauugaaggcucuguauau

SEQ ID NO: 2556825 - RNA, 19 nt, Artificial Sequence
  Description of Artificial Sequence: Synthetic oligonucleotide
  Antisense strand to SEQ ID NO: 2556824
auauacagagccuucaaua

SEQ ID NO: 2556826 - RNA, 19 nt, Artificial Sequence
  Description of Artificial Sequence: Synthetic oligonucleotide
  Sense strand starting at position 2546 of SEQ ID NO: 1888788
auugaaggcucuguauauc

SEQ ID NO: 2556827 - RNA, 19 nt, Artificial Sequence
  Description of Artificial Sequence: Synthetic oligonucleotide
  Antisense strand to SEQ ID NO: 2556826
gauauacagagccuucaau

SEQ ID NO: 2556828 - RNA, 19 nt, Artificial Sequence
  Description of Artificial Sequence: Synthetic oligonucleotide
  Sense strand starting at position 2564 of SEQ ID NO: 1888788
cuucauaguguggagguaa

SEQ ID NO: 2556829 - RNA, 19 nt, Artificial Sequence
  Description of Artificial Sequence: Synthetic oligonucleotide
  Antisense strand to SEQ ID NO: 2556828
uuaccuccacacuaugaag

SEQ ID NO: 2556830 - RNA, 19 nt, Artificial Sequence
  Description of Artificial Sequence: Synthetic oligonucleotide
  Sense strand starting at position 2577 of SEQ ID NO: 1888788
agguaaaugcagcauuaug

SEQ ID NO: 2556831 - RNA, 19 nt, Artificial Sequence
  Description of Artificial Sequence: Synthetic oligonucleotide
  Antisense strand to SEQ ID NO: 2556830
cauaaugcugcauuuaccu

SEQ ID NO: 2556832 - RNA, 19 nt, Artificial Sequence
  Description of Artificial Sequence: Synthetic oligonucleotide
  Sense strand starting at position 2799 of SEQ ID NO: 1888788
gccaucgcuggcuuuguaa

SEQ ID NO: 2556833 - RNA, 19 nt, Artificial Sequence
  Description of Artificial Sequence: Synthetic oligonucleotide
  Antisense strand to SEQ ID NO: 2556832
uuacaaagccagcgauggc

SEQ ID NO: 2556834 - RNA, 19 nt, Artificial Sequence
  Description of Artificial Sequence: Synthetic oligonucleotide
  Sense strand starting at position 2808 of SEQ ID NO: 1888788
ggcuuuguaagguaaugag

SEQ ID NO: 2556835 - RNA, 19 nt, Artificial Sequence
  Description of Artificial Sequence: Synthetic oligonucleotide
  Antisense strand to SEQ ID NO: 2556834
cucauuaccuuacaaagcc

SEQ ID NO: 2556836 - RNA, 19 nt, Artificial Sequence
  Description of Artificial Sequence: Synthetic oligonucleotide
  Sense strand starting at position 2929 of SEQ ID NO: 1888788
aggauucgugugcaaauca

SEQ ID NO: 2556837 - RNA, 19 nt, Artificial Sequence
  Description of Artificial Sequence: Synthetic oligonucleotide
  Antisense strand to SEQ ID NO: 2556836
ugauuugcacacgaauccu

SEQ ID NO: 2556838 - RNA, 19 nt, Artificial Sequence
  Description of Artificial Sequence: Synthetic oligonucleotide
  Sense strand starting at position 2938 of SEQ ID NO: 1888788
gugcaaaucagagguaaag

SEQ ID NO: 2556839 - RNA, 19 nt, Artificial Sequence
  Description of Artificial Sequence: Synthetic oligonucleotide
  Antisense strand to SEQ ID NO: 2556838
cuuuaccucugauuugcac

SEQ ID NO: 2556840 - RNA, 19 nt, Artificial Sequence
  Description of Artificial Sequence: Synthetic oligonucleotide
  Sense strand starting at position 3209 of SEQ ID NO: 1888788
cuuauaguuguauaugacu

SEQ ID NO: 2556841 - RNA, 19 nt, Artificial Sequence
  Description of Artificial Sequence: Synthetic oligonucleotide
  Antisense strand to SEQ ID NO: 2556840
agucauauacaacuauaag

SEQ ID NO: 2556842 - RNA, 19 nt, Artificial Sequence
  Description of Artificial Sequence: Synthetic oligonucleotide
  Sense strand starting at position 3215 of SEQ ID NO: 1888788
guuguauaugacuagcuau

SEQ ID NO: 2556843 - RNA, 19 nt, Artificial Sequence
  Description of Artificial Sequence: Synthetic oligonucleotide
  Antisense strand to SEQ ID NO: 2556842
auagcuagucauauacaac

SEQ ID NO: 2556844 - RNA, 19 nt, Artificial Sequence
  Description of Artificial Sequence: Synthetic oligonucleotide
  Sense strand starting at position 3221 of SEQ ID NO: 1888788
uaugacuagcuaugugauu

SEQ ID NO: 2556845 - RNA, 19 nt, Artificial Sequence
  Description of Artificial Sequence: Synthetic oligonucleotide
  Antisense strand to SEQ ID NO: 2556844
aaucacauagcuagucaua

SEQ ID NO: 2556846 - RNA, 19 nt, Artificial Sequence
  Description of Artificial Sequence: Synthetic oligonucleotide
  Sense strand starting at position 3222 of SEQ ID NO: 1888788
augacuagcuaugugauua

SEQ ID NO: 2556847 - RNA, 19 nt, Artificial Sequence
  Description of Artificial Sequence: Synthetic oligonucleotide
  Antisense strand to SEQ ID NO: 2556846
uaaucacauagcuagucau

SEQ ID NO: 2556848 - RNA, 19 nt, Artificial Sequence
  Description of Artificial Sequence: Synthetic oligonucleotide
  Sense strand starting at position 3394 of SEQ ID NO: 1888788
guaggaagguuguuccaaa

SEQ ID NO: 2556849 - RNA, 19 nt, Artificial Sequence
  Description of Artificial Sequence: Synthetic oligonucleotide
  Antisense strand to SEQ ID NO: 2556848
uuuggaacaaccuuccuac

SEQ ID NO: 2556850 - RNA, 19 nt, Artificial Sequence
  Description of Artificial Sequence: Synthetic oligonucleotide
  Sense strand starting at position 3395 of SEQ ID NO: 1888788
uaggaagguuguuccaaac

SEQ ID NO: 2556851 - RNA, 19 nt, Artificial Sequence
  Description of Artificial Sequence: Synthetic oligonucleotide
  Antisense strand to SEQ ID NO: 2556850
guuuggaacaaccuuccua

SEQ ID NO: 2556852 - RNA, 19 nt, Artificial Sequence
  Description of Artificial Sequence: Synthetic oligonucleotide
  Sense strand starting at position 3406 of SEQ ID NO: 1888788
uuccaaacugcuggaaauu

SEQ ID NO: 2556853 - RNA, 19 nt, Artificial Sequence
  Description of Artificial Sequence: Synthetic oligonucleotide
  Antisense strand to SEQ ID NO: 2556852
aauuuccagcaguuuggaa

SEQ ID NO: 2556854 - RNA, 19 nt, Artificial Sequence
  Description of Artificial Sequence: Synthetic oligonucleotide
  Sense strand starting at position 3659 of SEQ ID NO: 1888788
guuucugacgucuaugaug

SEQ ID NO: 2556855 - RNA, 19 nt, Artificial Sequence
  Description of Artificial Sequence: Synthetic oligonucleotide
  Antisense strand to SEQ ID NO: 2556854
caucauagacgucagaaac

SEQ ID NO: 2556856 - RNA, 19 nt, Artificial Sequence
  Description of Artificial Sequence: Synthetic oligonucleotide
  Sense strand starting at position 3741 of SEQ ID NO: 1888788
auuaguaacccugggaugu

SEQ ID NO: 2556857 - RNA, 19 nt, Artificial Sequence
  Description of Artificial Sequence: Synthetic oligonucleotide
  Antisense strand to SEQ ID NO: 2556856
acaucccaggguuacuaau

SEQ ID NO: 2556858 - RNA, 19 nt, Artificial Sequence
  Description of Artificial Sequence: Synthetic oligonucleotide
  Sense strand starting at position 3825 of SEQ ID NO: 1888788
aucugugauucugcaggga

SEQ ID NO: 2556859 - RNA, 19 nt, Artificial Sequence
  Description of Artificial Sequence: Synthetic oligonucleotide
  Antisense strand to SEQ ID NO: 2556858
ucccugcagaaucacagau

SEQ ID NO: 2556860 - RNA, 19 nt, Artificial Sequence
  Description of Artificial Sequence: Synthetic oligonucleotide
  Sense strand starting at position 3828 of SEQ ID NO: 1888788
ugugauucugcagggacau

SEQ ID NO: 2556861 - RNA, 19 nt, Artificial Sequence
  Description of Artificial Sequence: Synthetic oligonucleotide
  Antisense strand to SEQ ID NO: 2556860
augucccugcagaaucaca

SEQ ID NO: 2556862 - RNA, 19 nt, Artificial Sequence
  Description of Artificial Sequence: Synthetic oligonucleotide
  Sense strand starting at position 3829 of SEQ ID NO: 1888788
gugauucugcagggacauu

SEQ ID NO: 2556863 - RNA, 19 nt, Artificial Sequence
  Description of Artificial Sequence: Synthetic oligonucleotide
  Antisense strand to SEQ ID NO: 2556862
aaugucccugcagaaucac

SEQ ID NO: 2556864 - RNA, 19 nt, Artificial Sequence
  Description of Artificial Sequence: Synthetic oligonucleotide
  Sense strand starting at position 80 of SEQ ID NO: 1888789
aagcauugucuauagguca

SEQ ID NO: 2556865 - RNA, 19 nt, Artificial Sequence
  Description of Artificial Sequence: Synthetic oligonucleotide
  Antisense strand to SEQ ID NO: 2556864
ugaccuauagacaaugcuu

SEQ ID NO: 2556866 - RNA, 19 nt, Artificial Sequence
  Description of Artificial Sequence: Synthetic oligonucleotide
  Sense strand starting at position 159 of SEQ ID NO: 1888789
aguccagauacguauguau

SEQ ID NO: 2556867 - RNA, 19 nt, Artificial Sequence
  Description of Artificial Sequence: Synthetic oligonucleotide
  Antisense strand to SEQ ID NO: 2556866
auacauacguaucuggacu

SEQ ID NO: 2556868 - RNA, 19 nt, Artificial Sequence
  Description of Artificial Sequence: Synthetic oligonucleotide
  Sense strand starting at position 226 of SEQ ID NO: 1888789
uaucuuucucaagaggugu

SEQ ID NO: 2556869 - RNA, 19 nt, Artificial Sequence
  Description of Artificial Sequence: Synthetic oligonucleotide
  Antisense strand to SEQ ID NO: 2556868
acaccucuugagaaagaua

SEQ ID NO: 2556870 - RNA, 19 nt, Artificial Sequence
  Description of Artificial Sequence: Synthetic oligonucleotide
  Sense strand starting at position 527 of SEQ ID NO: 1888789
auuacugugugucugaaag

SEQ ID NO: 2556871 - RNA, 19 nt, Artificial Sequence
  Description of Artificial Sequence: Synthetic oligonucleotide
  Antisense strand to SEQ ID NO: 2556870
cuuucagacacacaguaau

SEQ ID NO: 2556872 - RNA, 19 nt, Artificial Sequence
  Description of Artificial Sequence: Synthetic oligonucleotide
  Sense strand starting at position 557 of SEQ ID NO: 1888789
cuccauugaccuuggugau

SEQ ID NO: 2556873 - RNA, 19 nt, Artificial Sequence
  Description of Artificial Sequence: Synthetic oligonucleotide
  Antisense strand to SEQ ID NO: 2556872
aucaccaaggucaauggag

SEQ ID NO: 2556874 - RNA, 19 nt, Artificial Sequence
  Description of Artificial Sequence: Synthetic oligonucleotide
  Sense strand starting at position 558 of SEQ ID NO: 1888789
uccauugaccuuggugauu

SEQ ID NO: 2556875 - RNA, 19 nt, Artificial Sequence
  Description of Artificial Sequence: Synthetic oligonucleotide
  Antisense strand to SEQ ID NO: 2556874
aaucaccaaggucaaugga

SEQ ID NO: 2556876 - RNA, 19 nt, Artificial Sequence
  Description of Artificial Sequence: Synthetic oligonucleotide
  Sense strand starting at position 942 of SEQ ID NO: 1888789
gauguuauuccgucgucau

SEQ ID NO: 2556877 - RNA, 19 nt, Artificial Sequence
  Description of Artificial Sequence: Synthetic oligonucleotide
  Antisense strand to SEQ ID NO: 2556876
augacgacggaauaacauc

SEQ ID NO: 2556878 - RNA, 19 nt, Artificial Sequence
  Description of Artificial Sequence: Synthetic oligonucleotide
  Sense strand starting at position 953 of SEQ ID NO: 1888789
gucgucauuccugcaugua

SEQ ID NO: 2556879 - RNA, 19 nt, Artificial Sequence
  Description of Artificial Sequence: Synthetic oligonucleotide
  Antisense strand to SEQ ID NO: 2556878
uacaugcaggaaugacgac

SEQ ID NO: 2556880 - RNA, 19 nt, Artificial Sequence
  Description of Artificial Sequence: Synthetic oligonucleotide
  Sense strand starting at position 2222 of SEQ ID NO: 1888789
gaggguccuccucgagaga

SEQ ID NO: 2556881 - RNA, 19 nt, Artificial Sequence
  Description of Artificial Sequence: Synthetic oligonucleotide
  Antisense strand to SEQ ID NO: 2556880
ucucucgaggaggacccuc

SEQ ID NO: 2556882 - RNA, 19 nt, Artificial Sequence
  Description of Artificial Sequence: Synthetic oligonucleotide
  Sense strand starting at position 2223 of SEQ ID NO: 1888789
aggguccuccucgagagaa

SEQ ID NO: 2556883 - RNA, 19 nt, Artificial Sequence
  Description of Artificial Sequence: Synthetic oligonucleotide
  Antisense strand to SEQ ID NO: 2556882
uucucucgaggaggacccu

SEQ ID NO: 2556884 - RNA, 19 nt, Artificial Sequence
  Description of Artificial Sequence: Synthetic oligonucleotide
  Sense strand starting at position 2225 of SEQ ID NO: 1888789
gguccuccucgagagaaca

SEQ ID NO: 2556885 - RNA, 19 nt, Artificial Sequence
  Description of Artificial Sequence: Synthetic oligonucleotide
  Antisense strand to SEQ ID NO: 2556884
uguucucucgaggaggacc

SEQ ID NO: 2556886 - RNA, 19 nt, Artificial Sequence
  Description of Artificial Sequence: Synthetic oligonucleotide
  Sense strand starting at position 2239 of SEQ ID NO: 1888789
gaacaugauguguagaggu

SEQ ID NO: 2556887 - RNA, 19 nt, Artificial Sequence
  Description of Artificial Sequence: Synthetic oligonucleotide
  Antisense strand to SEQ ID NO: 2556886
accucuacacaucauguuc

SEQ ID NO: 2556888 - RNA, 19 nt, Artificial Sequence
  Description of Artificial Sequence: Synthetic oligonucleotide
  Sense strand starting at position 2424 of SEQ ID NO: 1888789
uggacacuauugucacauu

SEQ ID NO: 2556889 - RNA, 19 nt, Artificial Sequence
  Description of Artificial Sequence: Synthetic oligonucleotide
  Antisense strand to SEQ ID NO: 2556888
aaugugacaauagugucca

SEQ ID NO: 2556890 - RNA, 19 nt, Artificial Sequence
  Description of Artificial Sequence: Synthetic oligonucleotide
  Sense strand starting at position 2469 of SEQ ID NO: 1888789
acaguuggaccuuguagau

SEQ ID NO: 2556891 - RNA, 19 nt, Artificial Sequence
  Description of Artificial Sequence: Synthetic oligonucleotide
  Antisense strand to SEQ ID NO: 2556890
aucuacaagguccaacugu

SEQ ID NO: 2556892 - RNA, 19 nt, Artificial Sequence
  Description of Artificial Sequence: Synthetic oligonucleotide
  Sense strand starting at position 2475 of SEQ ID NO: 1888789
ggaccuuguagaugaaauu

SEQ ID NO: 2556893 - RNA, 19 nt, Artificial Sequence
  Description of Artificial Sequence: Synthetic oligonucleotide
  Antisense strand to SEQ ID NO: 2556892
aauuucaucuacaaggucc

SEQ ID NO: 2556894 - RNA, 19 nt, Artificial Sequence
  Description of Artificial Sequence: Synthetic oligonucleotide
  Sense strand starting at position 2481 of SEQ ID NO: 1888789
uguagaugaaauuguaaga

SEQ ID NO: 2556895 - RNA, 19 nt, Artificial Sequence
  Description of Artificial Sequence: Synthetic oligonucleotide
  Antisense strand to SEQ ID NO: 2556894
ucuuacaauuucaucuaca

SEQ ID NO: 2556896 - RNA, 19 nt, Artificial Sequence
  Description of Artificial Sequence: Synthetic oligonucleotide
  Sense strand starting at position 2492 of SEQ ID NO: 1888789
uuguaagagugauccugau

SEQ ID NO: 2556897 - RNA, 19 nt, Artificial Sequence
  Description of Artificial Sequence: Synthetic oligonucleotide
  Antisense strand to SEQ ID NO: 2556896
aucaggaucacucuuacaa

SEQ ID NO: 2556898 - RNA, 19 nt, Artificial Sequence
  Description of Artificial Sequence: Synthetic oligonucleotide
  Sense strand starting at position 2520 of SEQ ID NO: 1888789
guagacauuuaugaguaau

SEQ ID NO: 2556899 - RNA, 19 nt, Artificial Sequence
  Description of Artificial Sequence: Synthetic oligonucleotide
  Antisense strand to SEQ ID NO: 2556898
auuacucauaaaugucuac

SEQ ID NO: 2556900 - RNA, 19 nt, Artificial Sequence
  Description of Artificial Sequence: Synthetic oligonucleotide
  Sense strand starting at position 2528 of SEQ ID NO: 1888789
uuaugaguaaucgaugugu

SEQ ID NO: 2556901 - RNA, 19 nt, Artificial Sequence
  Description of Artificial Sequence: Synthetic oligonucleotide
  Antisense strand to SEQ ID NO: 2556900
acacaucgauuacucauaa

SEQ ID NO: 2556902 - RNA, 19 nt, Artificial Sequence
  Description of Artificial Sequence: Synthetic oligonucleotide
  Sense strand starting at position 2534 of SEQ ID NO: 1888789
guaaucgauguguauugaa

SEQ ID NO: 2556903 - RNA, 19 nt, Artificial Sequence
  Description of Artificial Sequence: Synthetic oligonucleotide
  Antisense strand to SEQ ID NO: 2556902
uucaauacacaucgauuac

SEQ ID NO: 2556904 - RNA, 19 nt, Artificial Sequence
  Description of Artificial Sequence: Synthetic oligonucleotide
  Sense strand starting at position 2546 of SEQ ID NO: 1888789
uauugaaggcucuguauau

SEQ ID NO: 2556905 - RNA, 19 nt, Artificial Sequence
  Description of Artificial Sequence: Synthetic oligonucleotide
  Antisense strand to SEQ ID NO: 2556904
auauacagagccuucaaua

SEQ ID NO: 2556906 - RNA, 19 nt, Artificial Sequence
  Description of Artificial Sequence: Synthetic oligonucleotide
  Sense strand starting at position 2547 of SEQ ID NO: 1888789
auugaaggcucuguauauc

SEQ ID NO: 2556907 - RNA, 19 nt, Artificial Sequence
  Description of Artificial Sequence: Synthetic oligonucleotide
  Antisense strand to SEQ ID NO: 2556906
gauauacagagccuucaau

SEQ ID NO: 2556908 - RNA, 19 nt, Artificial Sequence
  Description of Artificial Sequence: Synthetic oligonucleotide
  Sense strand starting at position 2565 of SEQ ID NO: 1888789
cuucauaguguggagguaa

SEQ ID NO: 2556909 - RNA, 19 nt, Artificial Sequence
  Description of Artificial Sequence: Synthetic oligonucleotide
  Antisense strand to SEQ ID NO: 2556908
uuaccuccacacuaugaag

SEQ ID NO: 2556910 - RNA, 19 nt, Artificial Sequence
  Description of Artificial Sequence: Synthetic oligonucleotide
  Sense strand starting at position 2578 of SEQ ID NO: 1888789
agguaaaugcagcauuaug

SEQ ID NO: 2556911 - RNA, 19 nt, Artificial Sequence
  Description of Artificial Sequence: Synthetic oligonucleotide
  Antisense strand to SEQ ID NO: 2556910
cauaaugcugcauuuaccu

SEQ ID NO: 2556912 - RNA, 19 nt, Artificial Sequence
  Description of Artificial Sequence: Synthetic oligonucleotide
  Sense strand starting at position 2800 of SEQ ID NO: 1888789
gccaucgcuggcuuuguaa

SEQ ID NO: 2556913 - RNA, 19 nt, Artificial Sequence
  Description of Artificial Sequence: Synthetic oligonucleotide
  Antisense strand to SEQ ID NO: 2556912
uuacaaagccagcgauggc

SEQ ID NO: 2556914 - RNA, 19 nt, Artificial Sequence
  Description of Artificial Sequence: Synthetic oligonucleotide
  Sense strand starting at position 2809 of SEQ ID NO: 1888789
ggcuuuguaagguaaugag

SEQ ID NO: 2556915 - RNA, 19 nt, Artificial Sequence
  Description of Artificial Sequence: Synthetic oligonucleotide
  Antisense strand to SEQ ID NO: 2556914
cucauuaccuuacaaagcc

SEQ ID NO: 2556916 - RNA, 19 nt, Artificial Sequence
  Description of Artificial Sequence: Synthetic oligonucleotide
  Sense strand starting at position 2930 of SEQ ID NO: 1888789
aggauucgugugcaaauca

SEQ ID NO: 2556917 - RNA, 19 nt, Artificial Sequence
  Description of Artificial Sequence: Synthetic oligonucleotide
  Antisense strand to SEQ ID NO: 2556916
ugauuugcacacgaauccu

SEQ ID NO: 2556918 - RNA, 19 nt, Artificial Sequence
  Description of Artificial Sequence: Synthetic oligonucleotide
  Sense strand starting at position 2939 of SEQ ID NO: 1888789
gugcaaaucagagguaaag

SEQ ID NO: 2556919 - RNA, 19 nt, Artificial Sequence
  Description of Artificial Sequence: Synthetic oligonucleotide
  Antisense strand to SEQ ID NO: 2556918
cuuuaccucugauuugcac

SEQ ID NO: 2556920 - RNA, 19 nt, Artificial Sequence
  Description of Artificial Sequence: Synthetic oligonucleotide
  Sense strand starting at position 3210 of SEQ ID NO: 1888789
cuuauaguuguauaugacu

SEQ ID NO: 2556921 - RNA, 19 nt, Artificial Sequence
  Description of Artificial Sequence: Synthetic oligonucleotide
  Antisense strand to SEQ ID NO: 2556920
agucauauacaacuauaag

SEQ ID NO: 2556922 - RNA, 19 nt, Artificial Sequence
  Description of Artificial Sequence: Synthetic oligonucleotide
  Sense strand starting at position 3216 of SEQ ID NO: 1888789
guuguauaugacuagcuau

SEQ ID NO: 2556923 - RNA, 19 nt, Artificial Sequence
  Description of Artificial Sequence: Synthetic oligonucleotide
  Antisense strand to SEQ ID NO: 2556922
auagcuagucauauacaac

SEQ ID NO: 2556924 - RNA, 19 nt, Artificial Sequence
  Description of Artificial Sequence: Synthetic oligonucleotide
  Sense strand starting at position 3222 of SEQ ID NO: 1888789
uaugacuagcuaugugauu

SEQ ID NO: 2556925 - RNA, 19 nt, Artificial Sequence
  Description of Artificial Sequence: Synthetic oligonucleotide
  Antisense strand to SEQ ID NO: 2556924
aaucacauagcuagucaua

SEQ ID NO: 2556926 - RNA, 19 nt, Artificial Sequence
  Description of Artificial Sequence: Synthetic oligonucleotide
  Sense strand starting at position 3223 of SEQ ID NO: 1888789
augacuagcuaugugauua

SEQ ID NO: 2556927 - RNA, 19 nt, Artificial Sequence
  Description of Artificial Sequence: Synthetic oligonucleotide
  Antisense strand to SEQ ID NO: 2556926
uaaucacauagcuagucau

SEQ ID NO: 2556928 - RNA, 19 nt, Artificial Sequence
  Description of Artificial Sequence: Synthetic oligonucleotide
  Sense strand starting at position 3395 of SEQ ID NO: 1888789
guaggaagguuguuccaaa

SEQ ID NO: 2556929 - RNA, 19 nt, Artificial Sequence
  Description of Artificial Sequence: Synthetic oligonucleotide
  Antisense strand to SEQ ID NO: 2556928
uuuggaacaaccuuccuac

SEQ ID NO: 2556930 - RNA, 19 nt, Artificial Sequence
  Description of Artificial Sequence: Synthetic oligonucleotide
  Sense strand starting at position 3396 of SEQ ID NO: 1888789
uaggaagguuguuccaaac

SEQ ID NO: 2556931 - RNA, 19 nt, Artificial Sequence
  Description of Artificial Sequence: Synthetic oligonucleotide
  Antisense strand to SEQ ID NO: 2556930
guuuggaacaaccuuccua

SEQ ID NO: 2556932 - RNA, 19 nt, Artificial Sequence
  Description of Artificial Sequence: Synthetic oligonucleotide
  Sense strand starting at position 3407 of SEQ ID NO: 1888789
uuccaaacugcuggaaauu

SEQ ID NO: 2556933 - RNA, 19 nt, Artificial Sequence
  Description of Artificial Sequence: Synthetic oligonucleotide
  Antisense strand to SEQ ID NO: 2556932
aauuuccagcaguuuggaa

SEQ ID NO: 2556934 - RNA, 19 nt, Artificial Sequence
  Description of Artificial Sequence: Synthetic oligonucleotide
  Sense strand starting at position 3660 of SEQ ID NO: 1888789
guuucugacgucuaugaug

SEQ ID NO: 2556935 - RNA, 19 nt, Artificial Sequence
  Description of Artificial Sequence: Synthetic oligonucleotide
  Antisense strand to SEQ ID NO: 2556934
caucauagacgucagaaac

SEQ ID NO: 2556936 - RNA, 19 nt, Artificial Sequence
  Description of Artificial Sequence: Synthetic oligonucleotide
  Sense strand starting at position 3742 of SEQ ID NO: 1888789
auuaguaacccugggaugu

SEQ ID NO: 2556937 - RNA, 19 nt, Artificial Sequence
  Description of Artificial Sequence: Synthetic oligonucleotide
  Antisense strand to SEQ ID NO: 2556936
acaucccaggguuacuaau

SEQ ID NO: 2556938 - RNA, 19 nt, Artificial Sequence
  Description of Artificial Sequence: Synthetic oligonucleotide
  Sense strand starting at position 3826 of SEQ ID NO: 1888789
aucugugauucugcaggga

SEQ ID NO: 2556939 - RNA, 19 nt, Artificial Sequence
  Description of Artificial Sequence: Synthetic oligonucleotide
  Antisense strand to SEQ ID NO: 2556938
ucccugcagaaucacagau

SEQ ID NO: 2556940 - RNA, 19 nt, Artificial Sequence
  Description of Artificial Sequence: Synthetic oligonucleotide
  Sense strand starting at position 3829 of SEQ ID NO: 1888789
ugugauucugcagggacau

SEQ ID NO: 2556941 - RNA, 19 nt, Artificial Sequence
  Description of Artificial Sequence: Synthetic oligonucleotide
  Antisense strand to SEQ ID NO: 2556940
augucccugcagaaucaca

SEQ ID NO: 2556942 - RNA, 19 nt, Artificial Sequence
  Description of Artificial Sequence: Synthetic oligonucleotide
  Sense strand starting at position 3830 of SEQ ID NO: 1888789
gugauucugcagggacauu

SEQ ID NO: 2556943 - RNA, 19 nt, Artificial Sequence
  Description of Artificial Sequence: Synthetic oligonucleotide
  Antisense strand to SEQ ID NO: 2556942
aaugucccugcagaaucac

SEQ ID NO: 2556944 - RNA, 19 nt, Artificial Sequence
  Description of Artificial Sequence: Synthetic oligonucleotide
  Sense strand starting at position 672 of SEQ ID NO: 1888791
agggucaucuaguagugau

SEQ ID NO: 2556945 - RNA, 19 nt, Artificial Sequence
  Description of Artificial Sequence: Synthetic oligonucleotide
  Antisense strand to SEQ ID NO: 2556944
aucacuacuagaugacccu

SEQ ID NO: 2556946 - RNA, 19 nt, Artificial Sequence
  Description of Artificial Sequence: Synthetic oligonucleotide
  Sense strand starting at position 675 of SEQ ID NO: 1888791
gucaucuaguagugauuua

SEQ ID NO: 2556947 - RNA, 19 nt, Artificial Sequence
  Description of Artificial Sequence: Synthetic oligonucleotide
  Antisense strand to SEQ ID NO: 2556946
uaaaucacuacuagaugac

SEQ ID NO: 2556948 - RNA, 19 nt, Artificial Sequence
  Description of Artificial Sequence: Synthetic oligonucleotide
  Sense strand starting at position 718 of SEQ ID NO: 1888791
uucugaacucgguagggua

SEQ ID NO: 2556949 - RNA, 19 nt, Artificial Sequence
  Description of Artificial Sequence: Synthetic oligonucleotide
  Antisense strand to SEQ ID NO: 2556948
uacccuaccgaguucagaa

SEQ ID NO: 2556950 - RNA, 19 nt, Artificial Sequence
  Description of Artificial Sequence: Synthetic oligonucleotide
  Sense strand starting at position 905 of SEQ ID NO: 1888791
guauuuaggucgggaggga

SEQ ID NO: 2556951 - RNA, 19 nt, Artificial Sequence
  Description of Artificial Sequence: Synthetic oligonucleotide
  Antisense strand to SEQ ID NO: 2556950
ucccucccgaccuaaauac

SEQ ID NO: 2556952 - RNA, 19 nt, Artificial Sequence
  Description of Artificial Sequence: Synthetic oligonucleotide
  Sense strand starting at position 921 of SEQ ID NO: 1888791
ggaacagacugauggaaug

SEQ ID NO: 2556953 - RNA, 19 nt, Artificial Sequence
  Description of Artificial Sequence: Synthetic oligonucleotide
  Antisense strand to SEQ ID NO: 2556952
cauuccaucagucuguucc

SEQ ID NO: 2556954 - RNA, 19 nt, Artificial Sequence
  Description of Artificial Sequence: Synthetic oligonucleotide
  Sense strand starting at position 932 of SEQ ID NO: 1888791
auggaaugguaauucccaa

SEQ ID NO: 2556955 - RNA, 19 nt, Artificial Sequence
  Description of Artificial Sequence: Synthetic oligonucleotide
  Antisense strand to SEQ ID NO: 2556954
uugggaauuaccauuccau

SEQ ID NO: 2556956 - RNA, 19 nt, Artificial Sequence
  Description of Artificial Sequence: Synthetic oligonucleotide
  Sense strand starting at position 936 of SEQ ID NO: 1888791
aaugguaauucccaagagu

SEQ ID NO: 2556957 - RNA, 19 nt, Artificial Sequence
  Description of Artificial Sequence: Synthetic oligonucleotide
  Antisense strand to SEQ ID NO: 2556956
acucuugggaauuaccauu

SEQ ID NO: 2556958 - RNA, 19 nt, Artificial Sequence
  Description of Artificial Sequence: Synthetic oligonucleotide
  Sense strand starting at position 1002 of SEQ ID NO: 1888791
ugggaucugaggugucagu

SEQ ID NO: 2556959 - RNA, 19 nt, Artificial Sequence
  Description of Artificial Sequence: Synthetic oligonucleotide
  Antisense strand to SEQ ID NO: 2556958
acugacaccucagauccca

SEQ ID NO: 2556960 - RNA, 19 nt, Artificial Sequence
  Description of Artificial Sequence: Synthetic oligonucleotide
  Sense strand starting at position 1085 of SEQ ID NO: 1888791
cuggaauguuuaggcguga

SEQ ID NO: 2556961 - RNA, 19 nt, Artificial Sequence
  Description of Artificial Sequence: Synthetic oligonucleotide
  Antisense strand to SEQ ID NO: 2556960
ucacgccuaaacauuccag

SEQ ID NO: 2556962 - RNA, 19 nt, Artificial Sequence
  Description of Artificial Sequence: Synthetic oligonucleotide
  Sense strand starting at position 1181 of SEQ ID NO: 1888791
gcagguccuugucuccaua

SEQ ID NO: 2556963 - RNA, 19 nt, Artificial Sequence
  Description of Artificial Sequence: Synthetic oligonucleotide
  Antisense strand to SEQ ID NO: 2556962
uauggagacaaggaccugc

SEQ ID NO: 2556964 - RNA, 19 nt, Artificial Sequence
  Description of Artificial Sequence: Synthetic oligonucleotide
  Sense strand starting at position 1308 of SEQ ID NO: 1888791
gaggaugggucccugaguu

SEQ ID NO: 2556965 - RNA, 19 nt, Artificial Sequence
  Description of Artificial Sequence: Synthetic oligonucleotide
  Antisense strand to SEQ ID NO: 2556964
aacucagggacccauccuc

SEQ ID NO: 2556966 - RNA, 19 nt, Artificial Sequence
  Description of Artificial Sequence: Synthetic oligonucleotide
  Sense strand starting at position 1338 of SEQ ID NO: 1888791
gcaauauuguaucauuugu

SEQ ID NO: 2556967 - RNA, 19 nt, Artificial Sequence
  Description of Artificial Sequence: Synthetic oligonucleotide
  Antisense strand to SEQ ID NO: 2556966
acaaaugauacaauauugc

SEQ ID NO: 2556968 - RNA, 19 nt, Artificial Sequence
  Description of Artificial Sequence: Synthetic oligonucleotide
  Sense strand starting at position 1707 of SEQ ID NO: 1888791
cuggaaauuucuugcauuu

SEQ ID NO: 2556969 - RNA, 19 nt, Artificial Sequence
  Description of Artificial Sequence: Synthetic oligonucleotide
  Antisense strand to SEQ ID NO: 2556968
aaaugcaagaaauuuccag

SEQ ID NO: 2556970 - RNA, 19 nt, Artificial Sequence
  Description of Artificial Sequence: Synthetic oligonucleotide
  Sense strand starting at position 1748 of SEQ ID NO: 1888791
acuggaaguuucuugccau

SEQ ID NO: 2556971 - RNA, 19 nt, Artificial Sequence
  Description of Artificial Sequence: Synthetic oligonucleotide
  Antisense strand to SEQ ID NO: 2556970
auggcaagaaacuuccagu

SEQ ID NO: 2556972 - RNA, 19 nt, Artificial Sequence
  Description of Artificial Sequence: Synthetic oligonucleotide
  Sense strand starting at position 1749 of SEQ ID NO: 1888791
cuggaaguuucuugccauu

SEQ ID NO: 2556973 - RNA, 19 nt, Artificial Sequence
  Description of Artificial Sequence: Synthetic oligonucleotide
  Antisense strand to SEQ ID NO: 2556972
aauggcaagaaacuuccag

SEQ ID NO: 2556974 - RNA, 19 nt, Artificial Sequence
  Description of Artificial Sequence: Synthetic oligonucleotide
  Sense strand starting at position 1751 of SEQ ID NO: 1888791
ggaaguuucuugccauuuc

SEQ ID NO: 2556975 - RNA, 19 nt, Artificial Sequence
  Description of Artificial Sequence: Synthetic oligonucleotide
  Antisense strand to SEQ ID NO: 2556974
gaaauggcaagaaacuucc

SEQ ID NO: 2556976 - RNA, 19 nt, Artificial Sequence
  Description of Artificial Sequence: Synthetic oligonucleotide
  Sense strand starting at position 1761 of SEQ ID NO: 1888791
ugccauuucuacuacugga

SEQ ID NO: 2556977 - RNA, 19 nt, Artificial Sequence
  Description of Artificial Sequence: Synthetic oligonucleotide
  Antisense strand to SEQ ID NO: 2556976
uccaguaguagaaauggca

SEQ ID NO: 2556978 - RNA, 19 nt, Artificial Sequence
  Description of Artificial Sequence: Synthetic oligonucleotide
  Sense strand starting at position 1777 of SEQ ID NO: 1888791
ggagauuugugugagguuc

SEQ ID NO: 2556979 - RNA, 19 nt, Artificial Sequence
  Description of Artificial Sequence: Synthetic oligonucleotide
  Antisense strand to SEQ ID NO: 2556978
gaaccucacacaaaucucc

SEQ ID NO: 2556980 - RNA, 19 nt, Artificial Sequence
  Description of Artificial Sequence: Synthetic oligonucleotide
  Sense strand starting at position 1779 of SEQ ID NO: 1888791
agauuugugugagguucaa

SEQ ID NO: 2556981 - RNA, 19 nt, Artificial Sequence
  Description of Artificial Sequence: Synthetic oligonucleotide
  Antisense strand to SEQ ID NO: 2556980
uugaaccucacacaaaucu

SEQ ID NO: 2556982 - RNA, 19 nt, Artificial Sequence
  Description of Artificial Sequence: Synthetic oligonucleotide
  Sense strand starting at position 2037 of SEQ ID NO: 1888791
ccagguuauuccucacacu

SEQ ID NO: 2556983 - RNA, 19 nt, Artificial Sequence
  Description of Artificial Sequence: Synthetic oligonucleotide
  Antisense strand to SEQ ID NO: 2556982
agugugaggaauaaccugg

SEQ ID NO: 2556984 - RNA, 19 nt, Artificial Sequence
  Description of Artificial Sequence: Synthetic oligonucleotide
  Sense strand starting at position 2424 of SEQ ID NO: 1888791
agagaauguuggguugagu

SEQ ID NO: 2556985 - RNA, 19 nt, Artificial Sequence
  Description of Artificial Sequence: Synthetic oligonucleotide
  Antisense strand to SEQ ID NO: 2556984
acucaacccaacauucucu

SEQ ID NO: 2556986 - RNA, 19 nt, Artificial Sequence
  Description of Artificial Sequence: Synthetic oligonucleotide
  Sense strand starting at position 2688 of SEQ ID NO: 1888791
acucauaucuaacgucuga

SEQ ID NO: 2556987 - RNA, 19 nt, Artificial Sequence
  Description of Artificial Sequence: Synthetic oligonucleotide
  Antisense strand to SEQ ID NO: 2556986
ucagacguuagauaugagu

SEQ ID NO: 2556988 - RNA, 19 nt, Artificial Sequence
  Description of Artificial Sequence: Synthetic oligonucleotide
  Sense strand starting at position 2692 of SEQ ID NO: 1888791
auaucuaacgucugagaaa

SEQ ID NO: 2556989 - RNA, 19 nt, Artificial Sequence
  Description of Artificial Sequence: Synthetic oligonucleotide
  Antisense strand to SEQ ID NO: 2556988
uuucucagacguuagauau

SEQ ID NO: 2556990 - RNA, 19 nt, Artificial Sequence
  Description of Artificial Sequence: Synthetic oligonucleotide
  Sense strand starting at position 2885 of SEQ ID NO: 1888791
cacggauugugagcugaag

SEQ ID NO: 2556991 - RNA, 19 nt, Artificial Sequence
  Description of Artificial Sequence: Synthetic oligonucleotide
  Antisense strand to SEQ ID NO: 2556990
cuucagcucacaauccgug

SEQ ID NO: 2556992 - RNA, 19 nt, Artificial Sequence
  Description of Artificial Sequence: Synthetic oligonucleotide
  Sense strand starting at position 2887 of SEQ ID NO: 1888791
cggauugugagcugaagca

SEQ ID NO: 2556993 - RNA, 19 nt, Artificial Sequence
  Description of Artificial Sequence: Synthetic oligonucleotide
  Antisense strand to SEQ ID NO: 2556992
ugcuucagcucacaauccg

SEQ ID NO: 2556994 - RNA, 19 nt, Artificial Sequence
  Description of Artificial Sequence: Synthetic oligonucleotide
  Sense strand starting at position 3551 of SEQ ID NO: 1888791
cugcgauaucugcuguucu

SEQ ID NO: 2556995 - RNA, 19 nt, Artificial Sequence
  Description of Artificial Sequence: Synthetic oligonucleotide
  Antisense strand to SEQ ID NO: 2556994
agaacagcagauaucgcag

SEQ ID NO: 2556996 - RNA, 19 nt, Artificial Sequence
  Description of Artificial Sequence: Synthetic oligonucleotide
  Sense strand starting at position 3554 of SEQ ID NO: 1888791
cgauaucugcuguucugca

SEQ ID NO: 2556997 - RNA, 19 nt, Artificial Sequence
  Description of Artificial Sequence: Synthetic oligonucleotide
  Antisense strand to SEQ ID NO: 2556996
ugcagaacagcagauaucg

SEQ ID NO: 2556998 - RNA, 19 nt, Artificial Sequence
  Description of Artificial Sequence: Synthetic oligonucleotide
  Sense strand starting at position 3570 of SEQ ID NO: 1888791
gcagccuccucgggugauu

SEQ ID NO: 2556999 - RNA, 19 nt, Artificial Sequence
  Description of Artificial Sequence: Synthetic oligonucleotide
  Antisense strand to SEQ ID NO: 2556998
aaucacccgaggaggcugc

SEQ ID NO: 2557000 - RNA, 19 nt, Artificial Sequence
  Description of Artificial Sequence: Synthetic oligonucleotide
  Sense strand starting at position 3573 of SEQ ID NO: 1888791
gccuccucgggugauugau

SEQ ID NO: 2557001 - RNA, 19 nt, Artificial Sequence
  Description of Artificial Sequence: Synthetic oligonucleotide
  Antisense strand to SEQ ID NO: 2557000
aucaaucacccgaggaggc

SEQ ID NO: 2557002 - RNA, 19 nt, Artificial Sequence
  Description of Artificial Sequence: Synthetic oligonucleotide
  Sense strand starting at position 3582 of SEQ ID NO: 1888791
ggugauugauacccaggca

SEQ ID NO: 2557003 - RNA, 19 nt, Artificial Sequence
  Description of Artificial Sequence: Synthetic oligonucleotide
  Antisense strand to SEQ ID NO: 2557002
ugccuggguaucaaucacc

SEQ ID NO: 2557004 - RNA, 19 nt, Artificial Sequence
  Description of Artificial Sequence: Synthetic oligonucleotide
  Sense strand starting at position 3583 of SEQ ID NO: 1888791
gugauugauacccaggcaa

SEQ ID NO: 2557005 - RNA, 19 nt, Artificial Sequence
  Description of Artificial Sequence: Synthetic oligonucleotide
  Antisense strand to SEQ ID NO: 2557004
uugccuggguaucaaucac

SEQ ID NO: 2557006 - RNA, 19 nt, Artificial Sequence
  Description of Artificial Sequence: Synthetic oligonucleotide
  Sense strand starting at position 3648 of SEQ ID NO: 1888791
gaagguccugacgguuaga

SEQ ID NO: 2557007 - RNA, 19 nt, Artificial Sequence
  Description of Artificial Sequence: Synthetic oligonucleotide
  Antisense strand to SEQ ID NO: 2557006
ucuaaccgucaggaccuuc

SEQ ID NO: 2557008 - RNA, 19 nt, Artificial Sequence
  Description of Artificial Sequence: Synthetic oligonucleotide
  Sense strand starting at position 5 of SEQ ID NO: 1888792
aguugaaauauuggcuugu

SEQ ID NO: 2557009 - RNA, 19 nt, Artificial Sequence
  Description of Artificial Sequence: Synthetic oligonucleotide
  Antisense strand to SEQ ID NO: 2557008
acaagccaauauuucaacu

SEQ ID NO: 2557010 - RNA, 19 nt, Artificial Sequence
  Description of Artificial Sequence: Synthetic oligonucleotide
  Sense strand starting at position 6 of SEQ ID NO: 1888792
guugaaauauuggcuuguu

SEQ ID NO: 2557011 - RNA, 19 nt, Artificial Sequence
  Description of Artificial Sequence: Synthetic oligonucleotide
  Antisense strand to SEQ ID NO: 2557010
aacaagccaauauuucaac

SEQ ID NO: 2557012 - RNA, 19 nt, Artificial Sequence
  Description of Artificial Sequence: Synthetic oligonucleotide
  Sense strand starting at position 7 of SEQ ID NO: 1888792
uugaaauauuggcuuguuu

SEQ ID NO: 2557013 - RNA, 19 nt, Artificial Sequence
  Description of Artificial Sequence: Synthetic oligonucleotide
  Antisense strand to SEQ ID NO: 2557012
aaacaagccaauauuucaa

SEQ ID NO: 2557014 - RNA, 19 nt, Artificial Sequence
  Description of Artificial Sequence: Synthetic oligonucleotide
  Sense strand starting at position 9 of SEQ ID NO: 1888792
gaaauauuggcuuguuuac

SEQ ID NO: 2557015 - RNA, 19 nt, Artificial Sequence
  Description of Artificial Sequence: Synthetic oligonucleotide
  Antisense strand to SEQ ID NO: 2557014
guaaacaagccaauauuuc

SEQ ID NO: 2557016 - RNA, 19 nt, Artificial Sequence
  Description of Artificial Sequence: Synthetic oligonucleotide
  Sense strand starting at position 263 of SEQ ID NO: 1888792
accauuggaucuguuauaa

SEQ ID NO: 2557017 - RNA, 19 nt, Artificial Sequence
  Description of Artificial Sequence: Synthetic oligonucleotide
  Antisense strand to SEQ ID NO: 2557016
uuauaacagauccaauggu

SEQ ID NO: 2557018 - RNA, 19 nt, Artificial Sequence
  Description of Artificial Sequence: Synthetic oligonucleotide
  Sense strand starting at position 410 of SEQ ID NO: 1888792
auaucauucugacccuagu

SEQ ID NO: 2557019 - RNA, 19 nt, Artificial Sequence
  Description of Artificial Sequence: Synthetic oligonucleotide
  Antisense strand to SEQ ID NO: 2557018
acuagggucagaaugauau

SEQ ID NO: 2557020 - RNA, 19 nt, Artificial Sequence
  Description of Artificial Sequence: Synthetic oligonucleotide
  Sense strand starting at position 717 of SEQ ID NO: 1888792
gucguuaaagcuuaaaguu

SEQ ID NO: 2557021 - RNA, 19 nt, Artificial Sequence
  Description of Artificial Sequence: Synthetic oligonucleotide
  Antisense strand to SEQ ID NO: 2557020
aacuuuaagcuuuaacgac

SEQ ID NO: 2557022 - RNA, 19 nt, Artificial Sequence
  Description of Artificial Sequence: Synthetic oligonucleotide
  Sense strand starting at position 1049 of SEQ ID NO: 1888792
gagguucucccugagagcu

SEQ ID NO: 2557023 - RNA, 19 nt, Artificial Sequence
  Description of Artificial Sequence: Synthetic oligonucleotide
  Antisense strand to SEQ ID NO: 2557022
agcucucagggagaaccuc

SEQ ID NO: 2557024 - RNA, 19 nt, Artificial Sequence
  Description of Artificial Sequence: Synthetic oligonucleotide
  Sense strand starting at position 1457 of SEQ ID NO: 1888792
uuuguagugauaggaauau

SEQ ID NO: 2557025 - RNA, 19 nt, Artificial Sequence
  Description of Artificial Sequence: Synthetic oligonucleotide
  Antisense strand to SEQ ID NO: 2557024
auauuccuaucacuacaaa

SEQ ID NO: 2557026 - RNA, 19 nt, Artificial Sequence
  Description of Artificial Sequence: Synthetic oligonucleotide
  Sense strand starting at position 1487 of SEQ ID NO: 1888792
aaaggaguuucuguuacau

SEQ ID NO: 2557027 - RNA, 19 nt, Artificial Sequence
  Description of Artificial Sequence: Synthetic oligonucleotide
  Antisense strand to SEQ ID NO: 2557026
auguaacagaaacuccuuu

SEQ ID NO: 2557028 - RNA, 19 nt, Artificial Sequence
  Description of Artificial Sequence: Synthetic oligonucleotide
  Sense strand starting at position 1506 of SEQ ID NO: 1888792
ggugcacgcauuugucaau

SEQ ID NO: 2557029 - RNA, 19 nt, Artificial Sequence
  Description of Artificial Sequence: Synthetic oligonucleotide
  Antisense strand to SEQ ID NO: 2557028
auugacaaaugcgugcacc

SEQ ID NO: 2557030 - RNA, 19 nt, Artificial Sequence
  Description of Artificial Sequence: Synthetic oligonucleotide
  Sense strand starting at position 1507 of SEQ ID NO: 1888792
gugcacgcauuugucaaua

SEQ ID NO: 2557031 - RNA, 19 nt, Artificial Sequence
  Description of Artificial Sequence: Synthetic oligonucleotide
  Antisense strand to SEQ ID NO: 2557030
uauugacaaaugcgugcac

SEQ ID NO: 2557032 - RNA, 19 nt, Artificial Sequence
  Description of Artificial Sequence: Synthetic oligonucleotide
  Sense strand starting at position 1541 of SEQ ID NO: 1888792
accuaacagguuuguauau

SEQ ID NO: 2557033 - RNA, 19 nt, Artificial Sequence
  Description of Artificial Sequence: Synthetic oligonucleotide
  Antisense strand to SEQ ID NO: 2557032
auauacaaaccuguuaggu

SEQ ID NO: 2557034 - RNA, 19 nt, Artificial Sequence
  Description of Artificial Sequence: Synthetic oligonucleotide
  Sense strand starting at position 1623 of SEQ ID NO: 1888792
uccugauaugcaugauaaa

SEQ ID NO: 2557035 - RNA, 19 nt, Artificial Sequence
  Description of Artificial Sequence: Synthetic oligonucleotide
  Antisense strand to SEQ ID NO: 2557034
uuuaucaugcauaucagga

SEQ ID NO: 2557036 - RNA, 19 nt, Artificial Sequence
  Description of Artificial Sequence: Synthetic oligonucleotide
  Sense strand starting at position 1630 of SEQ ID NO: 1888792
augcaugauaaaggguuua

SEQ ID NO: 2557037 - RNA, 19 nt, Artificial Sequence
  Description of Artificial Sequence: Synthetic oligonucleotide
  Antisense strand to SEQ ID NO: 2557036
uaaacccuuuaucaugcau

SEQ ID NO: 2557038 - RNA, 19 nt, Artificial Sequence
  Description of Artificial Sequence: Synthetic oligonucleotide
  Sense strand starting at position 1651 of SEQ ID NO: 1888792
gaugaagugcauugauguc

SEQ ID NO: 2557039 - RNA, 19 nt, Artificial Sequence
  Description of Artificial Sequence: Synthetic oligonucleotide
  Antisense strand to SEQ ID NO: 2557038
gacaucaaugcacuucauc

SEQ ID NO: 2557040 - RNA, 19 nt, Artificial Sequence
  Description of Artificial Sequence: Synthetic oligonucleotide
  Sense strand starting at position 1658 of SEQ ID NO: 1888792
ugcauugaugucuguaacu

SEQ ID NO: 2557041 - RNA, 19 nt, Artificial Sequence
  Description of Artificial Sequence: Synthetic oligonucleotide
  Antisense strand to SEQ ID NO: 2557040
aguuacagacaucaaugca

SEQ ID NO: 2557042 - RNA, 19 nt, Artificial Sequence
  Description of Artificial Sequence: Synthetic oligonucleotide
  Sense strand starting at position 1717 of SEQ ID NO: 1888792
gcauuaauugauggauaua

SEQ ID NO: 2557043 - RNA, 19 nt, Artificial Sequence
  Description of Artificial Sequence: Synthetic oligonucleotide
  Antisense strand to SEQ ID NO: 2557042
uauauccaucaauuaaugc

SEQ ID NO: 2557044 - RNA, 19 nt, Artificial Sequence
  Description of Artificial Sequence: Synthetic oligonucleotide
  Sense strand starting at position 1796 of SEQ ID NO: 1888792
ccguaaguuggagauugua

SEQ ID NO: 2557045 - RNA, 19 nt, Artificial Sequence
  Description of Artificial Sequence: Synthetic oligonucleotide
  Antisense strand to SEQ ID NO: 2557044
uacaaucuccaacuuacgg

SEQ ID NO: 2557046 - RNA, 19 nt, Artificial Sequence
  Description of Artificial Sequence: Synthetic oligonucleotide
  Sense strand starting at position 1799 of SEQ ID NO: 1888792
uaaguuggagauuguauca

SEQ ID NO: 2557047 - RNA, 19 nt, Artificial Sequence
  Description of Artificial Sequence: Synthetic oligonucleotide
  Antisense strand to SEQ ID NO: 2557046
ugauacaaucuccaacuua

SEQ ID NO: 2557048 - RNA, 19 nt, Artificial Sequence
  Description of Artificial Sequence: Synthetic oligonucleotide
  Sense strand starting at position 1804 of SEQ ID NO: 1888792
uggagauuguaucaaauuu

SEQ ID NO: 2557049 - RNA, 19 nt, Artificial Sequence
  Description of Artificial Sequence: Synthetic oligonucleotide
  Antisense strand to SEQ ID NO: 2557048
aaauuugauacaaucucca

SEQ ID NO: 2557050 - RNA, 19 nt, Artificial Sequence
  Description of Artificial Sequence: Synthetic oligonucleotide
  Sense strand starting at position 1813 of SEQ ID NO: 1888792
uaucaaauuuguuagaggu

SEQ ID NO: 2557051 - RNA, 19 nt, Artificial Sequence
  Description of Artificial Sequence: Synthetic oligonucleotide
  Antisense strand to SEQ ID NO: 2557050
accucuaacaaauuugaua

SEQ ID NO: 2557052 - RNA, 19 nt, Artificial Sequence
  Description of Artificial Sequence: Synthetic oligonucleotide
  Sense strand starting at position 1815 of SEQ ID NO: 1888792
ucaaauuuguuagaggugu

SEQ ID NO: 2557053 - RNA, 19 nt, Artificial Sequence
  Description of Artificial Sequence: Synthetic oligonucleotide
  Antisense strand to SEQ ID NO: 2557052
acaccucuaacaaauuuga

SEQ ID NO: 2557054 - RNA, 19 nt, Artificial Sequence
  Description of Artificial Sequence: Synthetic oligonucleotide
  Sense strand starting at position 1902 of SEQ ID NO: 1888792
acugaaagaagcuguguaa

SEQ ID NO: 2557055 - RNA, 19 nt, Artificial Sequence
  Description of Artificial Sequence: Synthetic oligonucleotide
  Antisense strand to SEQ ID NO: 2557054
uuacacagcuucuuucagu

SEQ ID NO: 2557056 - RNA, 19 nt, Artificial Sequence
  Description of Artificial Sequence: Synthetic oligonucleotide
  Sense strand starting at position 1930 of SEQ ID NO: 1888792
ggaucaucaugguaaagag

SEQ ID NO: 2557057 - RNA, 19 nt, Artificial Sequence
  Description of Artificial Sequence: Synthetic oligonucleotide
  Antisense strand to SEQ ID NO: 2557056
cucuuuaccaugaugaucc

SEQ ID NO: 2557058 - RNA, 19 nt, Artificial Sequence
  Description of Artificial Sequence: Synthetic oligonucleotide
  Sense strand starting at position 2228 of SEQ ID NO: 1888792
caagaaauucgaggcugca

SEQ ID NO: 2557059 - RNA, 19 nt, Artificial Sequence
  Description of Artificial Sequence: Synthetic oligonucleotide
  Antisense strand to SEQ ID NO: 2557058
ugcagccucgaauuucuug

SEQ ID NO: 2557060 - RNA, 19 nt, Artificial Sequence
  Description of Artificial Sequence: Synthetic oligonucleotide
  Sense strand starting at position 2254 of SEQ ID NO: 1888792
gcgauugugccacuguaau

SEQ ID NO: 2557061 - RNA, 19 nt, Artificial Sequence
  Description of Artificial Sequence: Synthetic oligonucleotide
  Antisense strand to SEQ ID NO: 2557060
auuacaguggcacaaucgc

SEQ ID NO: 2557062 - RNA, 19 nt, Artificial Sequence
  Description of Artificial Sequence: Synthetic oligonucleotide
  Sense strand starting at position 2494 of SEQ ID NO: 1888792
caaguaugagaguaccuuu

SEQ ID NO: 2557063 - RNA, 19 nt, Artificial Sequence
  Description of Artificial Sequence: Synthetic oligonucleotide
  Antisense strand to SEQ ID NO: 2557062
aaagguacucucauacuug

SEQ ID NO: 2557064 - RNA, 19 nt, Artificial Sequence
  Description of Artificial Sequence: Synthetic oligonucleotide
  Sense strand starting at position 2523 of SEQ ID NO: 1888792
gguaguccagcucacagau

SEQ ID NO: 2557065 - RNA, 19 nt, Artificial Sequence
  Description of Artificial Sequence: Synthetic oligonucleotide
  Antisense strand to SEQ ID NO: 2557064
aucugugagcuggacuacc

SEQ ID NO: 2557066 - RNA, 19 nt, Artificial Sequence
  Description of Artificial Sequence: Synthetic oligonucleotide
  Sense strand starting at position 2663 of SEQ ID NO: 1888792
auuucuccauugggugaaa

SEQ ID NO: 2557067 - RNA, 19 nt, Artificial Sequence
  Description of Artificial Sequence: Synthetic oligonucleotide
  Antisense strand to SEQ ID NO: 2557066
uuucacccaauggagaaau

SEQ ID NO: 2557068 - RNA, 19 nt, Artificial Sequence
  Description of Artificial Sequence: Synthetic oligonucleotide
  Sense strand starting at position 2777 of SEQ ID NO: 1888792
ggaucaucaugucugagug

SEQ ID NO: 2557069 - RNA, 19 nt, Artificial Sequence
  Description of Artificial Sequence: Synthetic oligonucleotide
  Antisense strand to SEQ ID NO: 2557068
cacucagacaugaugaucc

SEQ ID NO: 2557070 - RNA, 19 nt, Artificial Sequence
  Description of Artificial Sequence: Synthetic oligonucleotide
  Sense strand starting at position 2778 of SEQ ID NO: 1888792
gaucaucaugucugaguga

SEQ ID NO: 2557071 - RNA, 19 nt, Artificial Sequence
  Description of Artificial Sequence: Synthetic oligonucleotide
  Antisense strand to SEQ ID NO: 2557070
ucacucagacaugaugauc

SEQ ID NO: 2557072 - RNA, 19 nt, Artificial Sequence
  Description of Artificial Sequence: Synthetic oligonucleotide
  Sense strand starting at position 2957 of SEQ ID NO: 1888792
acacaugggugcucccaaa

SEQ ID NO: 2557073 - RNA, 19 nt, Artificial Sequence
  Description of Artificial Sequence: Synthetic oligonucleotide
  Antisense strand to SEQ ID NO: 2557072
uuugggagcacccaugugu

SEQ ID NO: 2557074 - RNA, 19 nt, Artificial Sequence
  Description of Artificial Sequence: Synthetic oligonucleotide
  Sense strand starting at position 3074 of SEQ ID NO: 1888792
cagcuugacucugugggaa

SEQ ID NO: 2557075 - RNA, 19 nt, Artificial Sequence
  Description of Artificial Sequence: Synthetic oligonucleotide
  Antisense strand to SEQ ID NO: 2557074
uucccacagagucaagcug

SEQ ID NO: 2557076 - RNA, 19 nt, Artificial Sequence
  Description of Artificial Sequence: Synthetic oligonucleotide
  Sense strand starting at position 3147 of SEQ ID NO: 1888792
augggaaacucucagaauu

SEQ ID NO: 2557077 - RNA, 19 nt, Artificial Sequence
  Description of Artificial Sequence: Synthetic oligonucleotide
  Antisense strand to SEQ ID NO: 2557076
aauucugagaguuucccau

SEQ ID NO: 2557078 - RNA, 19 nt, Artificial Sequence
  Description of Artificial Sequence: Synthetic oligonucleotide
  Sense strand starting at position 3149 of SEQ ID NO: 1888792
gggaaacucucagaauuug

SEQ ID NO: 2557079 - RNA, 19 nt, Artificial Sequence
  Description of Artificial Sequence: Synthetic oligonucleotide
  Antisense strand to SEQ ID NO: 2557078
caaauucugagaguuuccc

SEQ ID NO: 2557080 - RNA, 19 nt, Artificial Sequence
  Description of Artificial Sequence: Synthetic oligonucleotide
  Sense strand starting at position 3245 of SEQ ID NO: 1888792
aaagaugugcaagagucuu

SEQ ID NO: 2557081 - RNA, 19 nt, Artificial Sequence
  Description of Artificial Sequence: Synthetic oligonucleotide
  Antisense strand to SEQ ID NO: 2557080
aagacucuugcacaucuuu

SEQ ID NO: 2557082 - RNA, 19 nt, Artificial Sequence
  Description of Artificial Sequence: Synthetic oligonucleotide
  Sense strand starting at position 3285 of SEQ ID NO: 1888792
ugguauaacuguuucucuu

SEQ ID NO: 2557083 - RNA, 19 nt, Artificial Sequence
  Description of Artificial Sequence: Synthetic oligonucleotide
  Antisense strand to SEQ ID NO: 2557082
aagagaaacaguuauacca

SEQ ID NO: 2557084 - RNA, 19 nt, Artificial Sequence
  Description of Artificial Sequence: Synthetic oligonucleotide
  Sense strand starting at position 3313 of SEQ ID NO: 1888792
gucaguauaggcugaagga

SEQ ID NO: 2557085 - RNA, 19 nt, Artificial Sequence
  Description of Artificial Sequence: Synthetic oligonucleotide
  Antisense strand to SEQ ID NO: 2557084
uccuucagccuauacugac

SEQ ID NO: 2557086 - RNA, 19 nt, Artificial Sequence
  Description of Artificial Sequence: Synthetic oligonucleotide
  Sense strand starting at position 3510 of SEQ ID NO: 1888792
uggguugcuacaugagaac

SEQ ID NO: 2557087 - RNA, 19 nt, Artificial Sequence
  Description of Artificial Sequence: Synthetic oligonucleotide
  Antisense strand to SEQ ID NO: 2557086
guucucauguagcaaccca

SEQ ID NO: 2557088 - RNA, 19 nt, Artificial Sequence
  Description of Artificial Sequence: Synthetic oligonucleotide
  Sense strand starting at position 257 of SEQ ID NO: 1888793
caguucuuucuggaaagcu

SEQ ID NO: 2557089 - RNA, 19 nt, Artificial Sequence
  Description of Artificial Sequence: Synthetic oligonucleotide
  Antisense strand to SEQ ID NO: 2557088
agcuuuccagaaagaacug

SEQ ID NO: 2557090 - RNA, 19 nt, Artificial Sequence
  Description of Artificial Sequence: Synthetic oligonucleotide
  Sense strand starting at position 485 of SEQ ID NO: 1888793
gcaggaaaugagugauuau

SEQ ID NO: 2557091 - RNA, 19 nt, Artificial Sequence
  Description of Artificial Sequence: Synthetic oligonucleotide
  Antisense strand to SEQ ID NO: 2557090
auaaucacucauuuccugc

SEQ ID NO: 2557092 - RNA, 19 nt, Artificial Sequence
  Description of Artificial Sequence: Synthetic oligonucleotide
  Sense strand starting at position 601 of SEQ ID NO: 1888793
auaacuggucaauguccaa

SEQ ID NO: 2557093 - RNA, 19 nt, Artificial Sequence
  Description of Artificial Sequence: Synthetic oligonucleotide
  Antisense strand to SEQ ID NO: 2557092
uuggacauugaccaguuau

SEQ ID NO: 2557094 - RNA, 19 nt, Artificial Sequence
  Description of Artificial Sequence: Synthetic oligonucleotide
  Sense strand starting at position 605 of SEQ ID NO: 1888793
cuggucaauguccaauauu

SEQ ID NO: 2557095 - RNA, 19 nt, Artificial Sequence
  Description of Artificial Sequence: Synthetic oligonucleotide
  Antisense strand to SEQ ID NO: 2557094
aauauuggacauugaccag

SEQ ID NO: 2557096 - RNA, 19 nt, Artificial Sequence
  Description of Artificial Sequence: Synthetic oligonucleotide
  Sense strand starting at position 804 of SEQ ID NO: 1888793
uugacaucagcauagugua

SEQ ID NO: 2557097 - RNA, 19 nt, Artificial Sequence
  Description of Artificial Sequence: Synthetic oligonucleotide
  Antisense strand to SEQ ID NO: 2557096
uacacuaugcugaugucaa

SEQ ID NO: 2557098 - RNA, 19 nt, Artificial Sequence
  Description of Artificial Sequence: Synthetic oligonucleotide
  Sense strand starting at position 809 of SEQ ID NO: 1888793
aucagcauaguguauauaa

SEQ ID NO: 2557099 - RNA, 19 nt, Artificial Sequence
  Description of Artificial Sequence: Synthetic oligonucleotide
  Antisense strand to SEQ ID NO: 2557098
uuauauacacuaugcugau

SEQ ID NO: 2557100 - RNA, 19 nt, Artificial Sequence
  Description of Artificial Sequence: Synthetic oligonucleotide
  Sense strand starting at position 889 of SEQ ID NO: 1888793
gggaauaacuuucugcauc

SEQ ID NO: 2557101 - RNA, 19 nt, Artificial Sequence
  Description of Artificial Sequence: Synthetic oligonucleotide
  Antisense strand to SEQ ID NO: 2557100
gaugcagaaaguuauuccc

SEQ ID NO: 2557102 - RNA, 19 nt, Artificial Sequence
  Description of Artificial Sequence: Synthetic oligonucleotide
  Sense strand starting at position 922 of SEQ ID NO: 1888793
gggauucuuugagugaaac

SEQ ID NO: 2557103 - RNA, 19 nt, Artificial Sequence
  Description of Artificial Sequence: Synthetic oligonucleotide
  Antisense strand to SEQ ID NO: 2557102
guuucacucaaagaauccc

SEQ ID NO: 2557104 - RNA, 19 nt, Artificial Sequence
  Description of Artificial Sequence: Synthetic oligonucleotide
  Sense strand starting at position 923 of SEQ ID NO: 1888793
ggauucuuugagugaaacu

SEQ ID NO: 2557105 - RNA, 19 nt, Artificial Sequence
  Description of Artificial Sequence: Synthetic oligonucleotide
  Antisense strand to SEQ ID NO: 2557104
aguuucacucaaagaaucc

SEQ ID NO: 2557106 - RNA, 19 nt, Artificial Sequence
  Description of Artificial Sequence: Synthetic oligonucleotide
  Sense strand starting at position 1146 of SEQ ID NO: 1888793
ggaacaacccacugguaau

SEQ ID NO: 2557107 - RNA, 19 nt, Artificial Sequence
  Description of Artificial Sequence: Synthetic oligonucleotide
  Antisense strand to SEQ ID NO: 2557106
auuaccaguggguuguucc

SEQ ID NO: 2557108 - RNA, 19 nt, Artificial Sequence
  Description of Artificial Sequence: Synthetic oligonucleotide
  Sense strand starting at position 1206 of SEQ ID NO: 1888793
gcugaaaucucaucaagua

SEQ ID NO: 2557109 - RNA, 19 nt, Artificial Sequence
  Description of Artificial Sequence: Synthetic oligonucleotide
  Antisense strand to SEQ ID NO: 2557108
uacuugaugagauuucagc

SEQ ID NO: 2557110 - RNA, 19 nt, Artificial Sequence
  Description of Artificial Sequence: Synthetic oligonucleotide
  Sense strand starting at position 1421 of SEQ ID NO: 1888793
uggagccauuaaguaauaa

SEQ ID NO: 2557111 - RNA, 19 nt, Artificial Sequence
  Description of Artificial Sequence: Synthetic oligonucleotide
  Antisense strand to SEQ ID NO: 2557110
uuauuacuuaauggcucca

SEQ ID NO: 2557112 - RNA, 19 nt, Artificial Sequence
  Description of Artificial Sequence: Synthetic oligonucleotide
  Sense strand starting at position 1474 of SEQ ID NO: 1888793
gcagauggugccuauuugu

SEQ ID NO: 2557113 - RNA, 19 nt, Artificial Sequence
  Description of Artificial Sequence: Synthetic oligonucleotide
  Antisense strand to SEQ ID NO: 2557112
acaaauaggcaccaucugc

SEQ ID NO: 2557114 - RNA, 19 nt, Artificial Sequence
  Description of Artificial Sequence: Synthetic oligonucleotide
  Sense strand starting at position 1752 of SEQ ID NO: 1888793
aguaaucccuuugcagaaa

SEQ ID NO: 2557115 - RNA, 19 nt, Artificial Sequence
  Description of Artificial Sequence: Synthetic oligonucleotide
  Antisense strand to SEQ ID NO: 2557114
uuucugcaaagggauuacu

SEQ ID NO: 2557116 - RNA, 19 nt, Artificial Sequence
  Description of Artificial Sequence: Synthetic oligonucleotide
  Sense strand starting at position 2058 of SEQ ID NO: 1888793
agaagcaaaguuuguauaa

SEQ ID NO: 2557117 - RNA, 19 nt, Artificial Sequence
  Description of Artificial Sequence: Synthetic oligonucleotide
  Antisense strand to SEQ ID NO: 2557116
uuauacaaacuuugcuucu

SEQ ID NO: 2557118 - RNA, 19 nt, Artificial Sequence
  Description of Artificial Sequence: Synthetic oligonucleotide
  Sense strand starting at position 2059 of SEQ ID NO: 1888793
gaagcaaaguuuguauaag

SEQ ID NO: 2557119 - RNA, 19 nt, Artificial Sequence
  Description of Artificial Sequence: Synthetic oligonucleotide
  Antisense strand to SEQ ID NO: 2557118
cuuauacaaacuuugcuuc

SEQ ID NO: 2557120 - RNA, 19 nt, Artificial Sequence
  Description of Artificial Sequence: Synthetic oligonucleotide
  Sense strand starting at position 2105 of SEQ ID NO: 1888793
ccucaugaaucuguaagac

SEQ ID NO: 2557121 - RNA, 19 nt, Artificial Sequence
  Description of Artificial Sequence: Synthetic oligonucleotide
  Antisense strand to SEQ ID NO: 2557120
gucuuacagauucaugagg

SEQ ID NO: 2557122 - RNA, 19 nt, Artificial Sequence
  Description of Artificial Sequence: Synthetic oligonucleotide
  Sense strand starting at position 2173 of SEQ ID NO: 1888793
aggaucaaaucucuagcua

SEQ ID NO: 2557123 - RNA, 19 nt, Artificial Sequence
  Description of Artificial Sequence: Synthetic oligonucleotide
  Antisense strand to SEQ ID NO: 2557122
uagcuagagauuugauccu

SEQ ID NO: 2557124 - RNA, 19 nt, Artificial Sequence
  Description of Artificial Sequence: Synthetic oligonucleotide
  Sense strand starting at position 2213 of SEQ ID NO: 1888793
ugggucuuacaguaauaua

SEQ ID NO: 2557125 - RNA, 19 nt, Artificial Sequence
  Description of Artificial Sequence: Synthetic oligonucleotide
  Antisense strand to SEQ ID NO: 2557124
uauauuacuguaagaccca

SEQ ID NO: 2557126 - RNA, 19 nt, Artificial Sequence
  Description of Artificial Sequence: Synthetic oligonucleotide
  Sense strand starting at position 2221 of SEQ ID NO: 1888793
acaguaauauaugcuuaga

SEQ ID NO: 2557127 - RNA, 19 nt, Artificial Sequence
  Description of Artificial Sequence: Synthetic oligonucleotide
  Antisense strand to SEQ ID NO: 2557126
ucuaagcauauauuacugu

SEQ ID NO: 2557128 - RNA, 19 nt, Artificial Sequence
  Description of Artificial Sequence: Synthetic oligonucleotide
  Sense strand starting at position 2250 of SEQ ID NO: 1888793
aacauuccaggaugugaua

SEQ ID NO: 2557129 - RNA, 19 nt, Artificial Sequence
  Description of Artificial Sequence: Synthetic oligonucleotide
  Antisense strand to SEQ ID NO: 2557128
uaucacauccuggaauguu

SEQ ID NO: 2557130 - RNA, 19 nt, Artificial Sequence
  Description of Artificial Sequence: Synthetic oligonucleotide
  Sense strand starting at position 2262 of SEQ ID NO: 1888793
ugugauagugcuuaaauaa

SEQ ID NO: 2557131 - RNA, 19 nt, Artificial Sequence
  Description of Artificial Sequence: Synthetic oligonucleotide
  Antisense strand to SEQ ID NO: 2557130
uuauuuaagcacuaucaca

SEQ ID NO: 2557132 - RNA, 19 nt, Artificial Sequence
  Description of Artificial Sequence: Synthetic oligonucleotide
  Sense strand starting at position 2308 of SEQ ID NO: 1888793
auguguauauuucuagguu

SEQ ID NO: 2557133 - RNA, 19 nt, Artificial Sequence
  Description of Artificial Sequence: Synthetic oligonucleotide
  Antisense strand to SEQ ID NO: 2557132
aaccuagaaauauacacau

SEQ ID NO: 2557134 - RNA, 19 nt, Artificial Sequence
  Description of Artificial Sequence: Synthetic oligonucleotide
  Sense strand starting at position 2498 of SEQ ID NO: 1888793
gucaaaggcccuuaucauc

SEQ ID NO: 2557135 - RNA, 19 nt, Artificial Sequence
  Description of Artificial Sequence: Synthetic oligonucleotide
  Antisense strand to SEQ ID NO: 2557134
gaugauaagggccuuugac

SEQ ID NO: 2557136 - RNA, 19 nt, Artificial Sequence
  Description of Artificial Sequence: Synthetic oligonucleotide
  Sense strand starting at position 2522 of SEQ ID NO: 1888793
cauauuguggcaggaggaa

SEQ ID NO: 2557137 - RNA, 19 nt, Artificial Sequence
  Description of Artificial Sequence: Synthetic oligonucleotide
  Antisense strand to SEQ ID NO: 2557136
uuccuccugccacaauaug

SEQ ID NO: 2557138 - RNA, 19 nt, Artificial Sequence
  Description of Artificial Sequence: Synthetic oligonucleotide
  Sense strand starting at position 2615 of SEQ ID NO: 1888793
agcccugugauuuggguau

SEQ ID NO: 2557139 - RNA, 19 nt, Artificial Sequence
  Description of Artificial Sequence: Synthetic oligonucleotide
  Antisense strand to SEQ ID NO: 2557138
auacccaaaucacagggcu

SEQ ID NO: 2557140 - RNA, 19 nt, Artificial Sequence
  Description of Artificial Sequence: Synthetic oligonucleotide
  Sense strand starting at position 2627 of SEQ ID NO: 1888793
uggguauuaugauccucau

SEQ ID NO: 2557141 - RNA, 19 nt, Artificial Sequence
  Description of Artificial Sequence: Synthetic oligonucleotide
  Antisense strand to SEQ ID NO: 2557140
augaggaucauaauaccca

SEQ ID NO: 2557142 - RNA, 19 nt, Artificial Sequence
  Description of Artificial Sequence: Synthetic oligonucleotide
  Sense strand starting at position 2724 of SEQ ID NO: 1888793
aaggccaugugaucccaaa

SEQ ID NO: 2557143 - RNA, 19 nt, Artificial Sequence
  Description of Artificial Sequence: Synthetic oligonucleotide
  Antisense strand to SEQ ID NO: 2557142
uuugggaucacauggccuu

SEQ ID NO: 2557144 - RNA, 19 nt, Artificial Sequence
  Description of Artificial Sequence: Synthetic oligonucleotide
  Sense strand starting at position 3178 of SEQ ID NO: 1888793
uuucucaaacuguggaaua

SEQ ID NO: 2557145 - RNA, 19 nt, Artificial Sequence
  Description of Artificial Sequence: Synthetic oligonucleotide
  Antisense strand to SEQ ID NO: 2557144
uauuccacaguuugagaaa

SEQ ID NO: 2557146 - RNA, 19 nt, Artificial Sequence
  Description of Artificial Sequence: Synthetic oligonucleotide
  Sense strand starting at position 3220 of SEQ ID NO: 1888793
uaguaugcucaagaaagua

SEQ ID NO: 2557147 - RNA, 19 nt, Artificial Sequence
  Description of Artificial Sequence: Synthetic oligonucleotide
  Antisense strand to SEQ ID NO: 2557146
uacuuucuugagcauacua

SEQ ID NO: 2557148 - RNA, 19 nt, Artificial Sequence
  Description of Artificial Sequence: Synthetic oligonucleotide
  Sense strand starting at position 3258 of SEQ ID NO: 1888793
uuuccuagaugauugaauu

SEQ ID NO: 2557149 - RNA, 19 nt, Artificial Sequence
  Description of Artificial Sequence: Synthetic oligonucleotide
  Antisense strand to SEQ ID NO: 2557148
aauucaaucaucuaggaaa

SEQ ID NO: 2557150 - RNA, 19 nt, Artificial Sequence
  Description of Artificial Sequence: Synthetic oligonucleotide
  Sense strand starting at position 3278 of SEQ ID NO: 1888793
acuugaauauuuggacaag

SEQ ID NO: 2557151 - RNA, 19 nt, Artificial Sequence
  Description of Artificial Sequence: Synthetic oligonucleotide
  Antisense strand to SEQ ID NO: 2557150
cuuguccaaauauucaagu

SEQ ID NO: 2557152 - RNA, 19 nt, Artificial Sequence
  Description of Artificial Sequence: Synthetic oligonucleotide
  Sense strand starting at position 3296 of SEQ ID NO: 1888793
ggagaacguagauaguuua

SEQ ID NO: 2557153 - RNA, 19 nt, Artificial Sequence
  Description of Artificial Sequence: Synthetic oligonucleotide
  Antisense strand to SEQ ID NO: 2557152
uaaacuaucuacguucucc

SEQ ID NO: 2557154 - RNA, 19 nt, Artificial Sequence
  Description of Artificial Sequence: Synthetic oligonucleotide
  Sense strand starting at position 3526 of SEQ ID NO: 1888793
cagaaagaucagggucuuu

SEQ ID NO: 2557155 - RNA, 19 nt, Artificial Sequence
  Description of Artificial Sequence: Synthetic oligonucleotide
  Antisense strand to SEQ ID NO: 2557154
aaagacccugaucuuucug

SEQ ID NO: 2557156 - RNA, 19 nt, Artificial Sequence
  Description of Artificial Sequence: Synthetic oligonucleotide
  Sense strand starting at position 3531 of SEQ ID NO: 1888793
agaucagggucuuugaaau

SEQ ID NO: 2557157 - RNA, 19 nt, Artificial Sequence
  Description of Artificial Sequence: Synthetic oligonucleotide
  Antisense strand to SEQ ID NO: 2557156
auuucaaagacccugaucu

SEQ ID NO: 2557158 - RNA, 19 nt, Artificial Sequence
  Description of Artificial Sequence: Synthetic oligonucleotide
  Sense strand starting at position 3597 of SEQ ID NO: 1888793
uuaccuuaagaaggucaau

SEQ ID NO: 2557159 - RNA, 19 nt, Artificial Sequence
  Description of Artificial Sequence: Synthetic oligonucleotide
  Antisense strand to SEQ ID NO: 2557158
auugaccuucuuaagguaa

SEQ ID NO: 2557160 - RNA, 19 nt, Artificial Sequence
  Description of Artificial Sequence: Synthetic oligonucleotide
  Sense strand starting at position 3771 of SEQ ID NO: 1888793
cgugaaucuaaccagaggu

SEQ ID NO: 2557161 - RNA, 19 nt, Artificial Sequence
  Description of Artificial Sequence: Synthetic oligonucleotide
  Antisense strand to SEQ ID NO: 2557160
accucugguuagauucacg

SEQ ID NO: 2557162 - RNA, 19 nt, Artificial Sequence
  Description of Artificial Sequence: Synthetic oligonucleotide
  Sense strand starting at position 3856 of SEQ ID NO: 1888793
aaauucgaguuuccaggaa

SEQ ID NO: 2557163 - RNA, 19 nt, Artificial Sequence
  Description of Artificial Sequence: Synthetic oligonucleotide
  Antisense strand to SEQ ID NO: 2557162
uuccuggaaacucgaauuu

SEQ ID NO: 2557164 - RNA, 19 nt, Artificial Sequence
  Description of Artificial Sequence: Synthetic oligonucleotide
  Sense strand starting at position 3889 of SEQ ID NO: 1888793
cccacaauaguugggaauu

SEQ ID NO: 2557165 - RNA, 19 nt, Artificial Sequence
  Description of Artificial Sequence: Synthetic oligonucleotide
  Antisense strand to SEQ ID NO: 2557164
aauucccaacuauuguggg

SEQ ID NO: 2557166 - RNA, 19 nt, Artificial Sequence
  Description of Artificial Sequence: Synthetic oligonucleotide
  Sense strand starting at position 3980 of SEQ ID NO: 1888793
gucagauugugaaagggag

SEQ ID NO: 2557167 - RNA, 19 nt, Artificial Sequence
  Description of Artificial Sequence: Synthetic oligonucleotide
  Antisense strand to SEQ ID NO: 2557166
cucccuuucacaaucugac

SEQ ID NO: 2557168 - RNA, 19 nt, Artificial Sequence
  Description of Artificial Sequence: Synthetic oligonucleotide
  Sense strand starting at position 406 of SEQ ID NO: 1888794
ucagucuaguuagcauuua

SEQ ID NO: 2557169 - RNA, 19 nt, Artificial Sequence
  Description of Artificial Sequence: Synthetic oligonucleotide
  Antisense strand to SEQ ID NO: 2557168
uaaaugcuaacuagacuga

SEQ ID NO: 2557170 - RNA, 19 nt, Artificial Sequence
  Description of Artificial Sequence: Synthetic oligonucleotide
  Sense strand starting at position 583 of SEQ ID NO: 1888794
ggaauugcucgucaacuga

SEQ ID NO: 2557171 - RNA, 19 nt, Artificial Sequence
  Description of Artificial Sequence: Synthetic oligonucleotide
  Antisense strand to SEQ ID NO: 2557170
ucaguugacgagcaauucc

SEQ ID NO: 2557172 - RNA, 19 nt, Artificial Sequence
  Description of Artificial Sequence: Synthetic oligonucleotide
  Sense strand starting at position 1409 of SEQ ID NO: 1888794
ccuguuuguccucacuaga

SEQ ID NO: 2557173 - RNA, 19 nt, Artificial Sequence
  Description of Artificial Sequence: Synthetic oligonucleotide
  Antisense strand to SEQ ID NO: 2557172
ucuagugaggacaaacagg

SEQ ID NO: 2557174 - RNA, 19 nt, Artificial Sequence
  Description of Artificial Sequence: Synthetic oligonucleotide
  Sense strand starting at position 1514 of SEQ ID NO: 1888794
ggagauaaugggcgaucua

SEQ ID NO: 2557175 - RNA, 19 nt, Artificial Sequence
  Description of Artificial Sequence: Synthetic oligonucleotide
  Antisense strand to SEQ ID NO: 2557174
uagaucgcccauuaucucc

SEQ ID NO: 2557176 - RNA, 19 nt, Artificial Sequence
  Description of Artificial Sequence: Synthetic oligonucleotide
  Sense strand starting at position 2639 of SEQ ID NO: 1888794
cguauauaggcggaaucau

SEQ ID NO: 2557177 - RNA, 19 nt, Artificial Sequence
  Description of Artificial Sequence: Synthetic oligonucleotide
  Antisense strand to SEQ ID NO: 2557176
augauuccgccuauauacg

SEQ ID NO: 2557178 - RNA, 19 nt, Artificial Sequence
  Description of Artificial Sequence: Synthetic oligonucleotide
  Sense strand starting at position 2647 of SEQ ID NO: 1888794
ggcggaaucauguaguauu

SEQ ID NO: 2557179 - RNA, 19 nt, Artificial Sequence
  Description of Artificial Sequence: Synthetic oligonucleotide
  Antisense strand to SEQ ID NO: 2557178
aauacuacaugauuccgcc

SEQ ID NO: 2557180 - RNA, 19 nt, Artificial Sequence
  Description of Artificial Sequence: Synthetic oligonucleotide
  Sense strand starting at position 3172 of SEQ ID NO: 1888794
acaugaugauuugaaauac

SEQ ID NO: 2557181 - RNA, 19 nt, Artificial Sequence
  Description of Artificial Sequence: Synthetic oligonucleotide
  Antisense strand to SEQ ID NO: 2557180
guauuucaaaucaucaugu

SEQ ID NO: 2557182 - RNA, 19 nt, Artificial Sequence
  Description of Artificial Sequence: Synthetic oligonucleotide
  Sense strand starting at position 3323 of SEQ ID NO: 1888794
agucaccaugucuacaaua

SEQ ID NO: 2557183 - RNA, 19 nt, Artificial Sequence
  Description of Artificial Sequence: Synthetic oligonucleotide
  Antisense strand to SEQ ID NO: 2557182
uauuguagacauggugacu

SEQ ID NO: 2557184 - RNA, 19 nt, Artificial Sequence
  Description of Artificial Sequence: Synthetic oligonucleotide
  Sense strand starting at position 3635 of SEQ ID NO: 1888794
acacaugugcuuuacccau

SEQ ID NO: 2557185 - RNA, 19 nt, Artificial Sequence
  Description of Artificial Sequence: Synthetic oligonucleotide
  Antisense strand to SEQ ID NO: 2557184
auggguaaagcacaugugu

SEQ ID NO: 2557186 - RNA, 19 nt, Artificial Sequence
  Description of Artificial Sequence: Synthetic oligonucleotide
  Sense strand starting at position 3769 of SEQ ID NO: 1888794
cuauccaguagugggauua

SEQ ID NO: 2557187 - RNA, 19 nt, Artificial Sequence
  Description of Artificial Sequence: Synthetic oligonucleotide
  Antisense strand to SEQ ID NO: 2557186
uaaucccacuacuggauag

SEQ ID NO: 2557188 - RNA, 19 nt, Artificial Sequence
  Description of Artificial Sequence: Synthetic oligonucleotide
  Sense strand starting at position 3799 of SEQ ID NO: 1888794
gauagugcuauggauaagu

SEQ ID NO: 2557189 - RNA, 19 nt, Artificial Sequence
  Description of Artificial Sequence: Synthetic oligonucleotide
  Antisense strand to SEQ ID NO: 2557188
acuuauccauagcacuauc

SEQ ID NO: 2557190 - RNA, 19 nt, Artificial Sequence
  Description of Artificial Sequence: Synthetic oligonucleotide
  Sense strand starting at position 3801 of SEQ ID NO: 1888794
uagugcuauggauaaguuu

SEQ ID NO: 2557191 - RNA, 19 nt, Artificial Sequence
  Description of Artificial Sequence: Synthetic oligonucleotide
  Antisense strand to SEQ ID NO: 2557190
aaacuuauccauagcacua

SEQ ID NO: 2557192 - RNA, 19 nt, Artificial Sequence
  Description of Artificial Sequence: Synthetic oligonucleotide
  Sense strand starting at position 3897 of SEQ ID NO: 1888794
guguguaaugaucaguuca

SEQ ID NO: 2557193 - RNA, 19 nt, Artificial Sequence
  Description of Artificial Sequence: Synthetic oligonucleotide
  Antisense strand to SEQ ID NO: 2557192
ugaacugaucauuacacac

SEQ ID NO: 2557194 - RNA, 19 nt, Artificial Sequence
  Description of Artificial Sequence: Synthetic oligonucleotide
  Sense strand starting at position 70 of SEQ ID NO: 1888795
agagaaugaccggguggua

SEQ ID NO: 2557195 - RNA, 19 nt, Artificial Sequence
  Description of Artificial Sequence: Synthetic oligonucleotide
  Antisense strand to SEQ ID NO: 2557194
uaccacccggucauucucu

SEQ ID NO: 2557196 - RNA, 19 nt, Artificial Sequence
  Description of Artificial Sequence: Synthetic oligonucleotide
  Sense strand starting at position 184 of SEQ ID NO: 1888795
aacccuguuaggugaggua

SEQ ID NO: 2557197 - RNA, 19 nt, Artificial Sequence
  Description of Artificial Sequence: Synthetic oligonucleotide
  Antisense strand to SEQ ID NO: 2557196
uaccucaccuaacaggguu

SEQ ID NO: 2557198 - RNA, 19 nt, Artificial Sequence
  Description of Artificial Sequence: Synthetic oligonucleotide
  Sense strand starting at position 405 of SEQ ID NO: 1888795
ucagucuaguuagcauuua

SEQ ID NO: 2557199 - RNA, 19 nt, Artificial Sequence
  Description of Artificial Sequence: Synthetic oligonucleotide
  Antisense strand to SEQ ID NO: 2557198
uaaaugcuaacuagacuga

SEQ ID NO: 2557200 - RNA, 19 nt, Artificial Sequence
  Description of Artificial Sequence: Synthetic oligonucleotide
  Sense strand starting at position 582 of SEQ ID NO: 1888795
ggaauugcucgucaacuga

SEQ ID NO: 2557201 - RNA, 19 nt, Artificial Sequence
  Description of Artificial Sequence: Synthetic oligonucleotide
  Antisense strand to SEQ ID NO: 2557200
ucaguugacgagcaauucc

SEQ ID NO: 2557202 - RNA, 19 nt, Artificial Sequence
  Description of Artificial Sequence: Synthetic oligonucleotide
  Sense strand starting at position 885 of SEQ ID NO: 1888795
gcaagaaagcuagagcuau

SEQ ID NO: 2557203 - RNA, 19 nt, Artificial Sequence
  Description of Artificial Sequence: Synthetic oligonucleotide
  Antisense strand to SEQ ID NO: 2557202
auagcucuagcuuucuugc

SEQ ID NO: 2557204 - RNA, 19 nt, Artificial Sequence
  Description of Artificial Sequence: Synthetic oligonucleotide
  Sense strand starting at position 893 of SEQ ID NO: 1888795
gcuagagcuaucugggaua

SEQ ID NO: 2557205 - RNA, 19 nt, Artificial Sequence
  Description of Artificial Sequence: Synthetic oligonucleotide
  Antisense strand to SEQ ID NO: 2557204
uaucccagauagcucuagc

SEQ ID NO: 2557206 - RNA, 19 nt, Artificial Sequence
  Description of Artificial Sequence: Synthetic oligonucleotide
  Sense strand starting at position 895 of SEQ ID NO: 1888795
uagagcuaucugggauaaa

SEQ ID NO: 2557207 - RNA, 19 nt, Artificial Sequence
  Description of Artificial Sequence: Synthetic oligonucleotide
  Antisense strand to SEQ ID NO: 2557206
uuuaucccagauagcucua

SEQ ID NO: 2557208 - RNA, 19 nt, Artificial Sequence
  Description of Artificial Sequence: Synthetic oligonucleotide
  Sense strand starting at position 1019 of SEQ ID NO: 1888795
ggaagacaaucauaaucag

SEQ ID NO: 2557209 - RNA, 19 nt, Artificial Sequence
  Description of Artificial Sequence: Synthetic oligonucleotide
  Antisense strand to SEQ ID NO: 2557208
cugauuaugauugucuucc

SEQ ID NO: 2557210 - RNA, 19 nt, Artificial Sequence
  Description of Artificial Sequence: Synthetic oligonucleotide
  Sense strand starting at position 1408 of SEQ ID NO: 1888795
ccuguuuguccucacuaga

SEQ ID NO: 2557211 - RNA, 19 nt, Artificial Sequence
  Description of Artificial Sequence: Synthetic oligonucleotide
  Antisense strand to SEQ ID NO: 2557210
ucuagugaggacaaacagg

SEQ ID NO: 2557212 - RNA, 19 nt, Artificial Sequence
  Description of Artificial Sequence: Synthetic oligonucleotide
  Sense strand starting at position 1513 of SEQ ID NO: 1888795
ggagauaaugggcgaucua

SEQ ID NO: 2557213 - RNA, 19 nt, Artificial Sequence
  Description of Artificial Sequence: Synthetic oligonucleotide
  Antisense strand to SEQ ID NO: 2557212
uagaucgcccauuaucucc

SEQ ID NO: 2557214 - RNA, 19 nt, Artificial Sequence
  Description of Artificial Sequence: Synthetic oligonucleotide
  Sense strand starting at position 1667 of SEQ ID NO: 1888795
aucuaagguuccuugauca

SEQ ID NO: 2557215 - RNA, 19 nt, Artificial Sequence
  Description of Artificial Sequence: Synthetic oligonucleotide
  Antisense strand to SEQ ID NO: 2557214
ugaucaaggaaccuuagau

SEQ ID NO: 2557216 - RNA, 19 nt, Artificial Sequence
  Description of Artificial Sequence: Synthetic oligonucleotide
  Sense strand starting at position 1671 of SEQ ID NO: 1888795
aagguuccuugaucaggaa

SEQ ID NO: 2557217 - RNA, 19 nt, Artificial Sequence
  Description of Artificial Sequence: Synthetic oligonucleotide
  Antisense strand to SEQ ID NO: 2557216
uuccugaucaaggaaccuu

SEQ ID NO: 2557218 - RNA, 19 nt, Artificial Sequence
  Description of Artificial Sequence: Synthetic oligonucleotide
  Sense strand starting at position 2066 of SEQ ID NO: 1888795
agcaucuguccgccaagua

SEQ ID NO: 2557219 - RNA, 19 nt, Artificial Sequence
  Description of Artificial Sequence: Synthetic oligonucleotide
  Antisense strand to SEQ ID NO: 2557218
uacuuggcggacagaugcu

SEQ ID NO: 2557220 - RNA, 19 nt, Artificial Sequence
  Description of Artificial Sequence: Synthetic oligonucleotide
  Sense strand starting at position 2088 of SEQ ID NO: 1888795
auugaaagggcuuguuaga

SEQ ID NO: 2557221 - RNA, 19 nt, Artificial Sequence
  Description of Artificial Sequence: Synthetic oligonucleotide
  Antisense strand to SEQ ID NO: 2557220
ucuaacaagcccuuucaau

SEQ ID NO: 2557222 - RNA, 19 nt, Artificial Sequence
  Description of Artificial Sequence: Synthetic oligonucleotide
  Sense strand starting at position 2133 of SEQ ID NO: 1888795
uugaggucgggucaugaga

SEQ ID NO: 2557223 - RNA, 19 nt, Artificial Sequence
  Description of Artificial Sequence: Synthetic oligonucleotide
  Antisense strand to SEQ ID NO: 2557222
ucucaugacccgaccucaa

SEQ ID NO: 2557224 - RNA, 19 nt, Artificial Sequence
  Description of Artificial Sequence: Synthetic oligonucleotide
  Sense strand starting at position 2638 of SEQ ID NO: 1888795
cguauauaggcggaaucau

SEQ ID NO: 2557225 - RNA, 19 nt, Artificial Sequence
  Description of Artificial Sequence: Synthetic oligonucleotide
  Antisense strand to SEQ ID NO: 2557224
augauuccgccuauauacg

SEQ ID NO: 2557226 - RNA, 19 nt, Artificial Sequence
  Description of Artificial Sequence: Synthetic oligonucleotide
  Sense strand starting at position 2646 of SEQ ID NO: 1888795
ggcggaaucauguaguauu

SEQ ID NO: 2557227 - RNA, 19 nt, Artificial Sequence
  Description of Artificial Sequence: Synthetic oligonucleotide
  Antisense strand to SEQ ID NO: 2557226
aauacuacaugauuccgcc

SEQ ID NO: 2557228 - RNA, 19 nt, Artificial Sequence
  Description of Artificial Sequence: Synthetic oligonucleotide
  Sense strand starting at position 2882 of SEQ ID NO: 1888795
guacaaauaucucugagac

SEQ ID NO: 2557229 - RNA, 19 nt, Artificial Sequence
  Description of Artificial Sequence: Synthetic oligonucleotide
  Antisense strand to SEQ ID NO: 2557228
gucucagagauauuuguac

SEQ ID NO: 2557230 - RNA, 19 nt, Artificial Sequence
  Description of Artificial Sequence: Synthetic oligonucleotide
  Sense strand starting at position 3171 of SEQ ID NO: 1888795
acaugaugauuugaaauac

SEQ ID NO: 2557231 - RNA, 19 nt, Artificial Sequence
  Description of Artificial Sequence: Synthetic oligonucleotide
  Antisense strand to SEQ ID NO: 2557230
guauuucaaaucaucaugu

SEQ ID NO: 2557232 - RNA, 19 nt, Artificial Sequence
  Description of Artificial Sequence: Synthetic oligonucleotide
  Sense strand starting at position 3197 of SEQ ID NO: 1888795
uugugcaauggcuaaauua

SEQ ID NO: 2557233 - RNA, 19 nt, Artificial Sequence
  Description of Artificial Sequence: Synthetic oligonucleotide
  Antisense strand to SEQ ID NO: 2557232
uaauuuagccauugcacaa

SEQ ID NO: 2557234 - RNA, 19 nt, Artificial Sequence
  Description of Artificial Sequence: Synthetic oligonucleotide
  Sense strand starting at position 3322 of SEQ ID NO: 1888795
agucaccaugucuacaaua

SEQ ID NO: 2557235 - RNA, 19 nt, Artificial Sequence
  Description of Artificial Sequence: Synthetic oligonucleotide
  Antisense strand to SEQ ID NO: 2557234
uauuguagacauggugacu

SEQ ID NO: 2557236 - RNA, 19 nt, Artificial Sequence
  Description of Artificial Sequence: Synthetic oligonucleotide
  Sense strand starting at position 3634 of SEQ ID NO: 1888795
acacaugugcuuuacccau

SEQ ID NO: 2557237 - RNA, 19 nt, Artificial Sequence
  Description of Artificial Sequence: Synthetic oligonucleotide
  Antisense strand to SEQ ID NO: 2557236
auggguaaagcacaugugu

SEQ ID NO: 2557238 - RNA, 19 nt, Artificial Sequence
  Description of Artificial Sequence: Synthetic oligonucleotide
  Sense strand starting at position 3796 of SEQ ID NO: 1888795
augauagugcuauggauaa

SEQ ID NO: 2557239 - RNA, 19 nt, Artificial Sequence
  Description of Artificial Sequence: Synthetic oligonucleotide
  Antisense strand to SEQ ID NO: 2557238
uuauccauagcacuaucau

SEQ ID NO: 2557240 - RNA, 19 nt, Artificial Sequence
  Description of Artificial Sequence: Synthetic oligonucleotide
  Sense strand starting at position 3798 of SEQ ID NO: 1888795
gauagugcuauggauaagu

SEQ ID NO: 2557241 - RNA, 19 nt, Artificial Sequence
  Description of Artificial Sequence: Synthetic oligonucleotide
  Antisense strand to SEQ ID NO: 2557240
acuuauccauagcacuauc

SEQ ID NO: 2557242 - RNA, 19 nt, Artificial Sequence
  Description of Artificial Sequence: Synthetic oligonucleotide
  Sense strand starting at position 3800 of SEQ ID NO: 1888795
uagugcuauggauaaguuu

SEQ ID NO: 2557243 - RNA, 19 nt, Artificial Sequence
  Description of Artificial Sequence: Synthetic oligonucleotide
  Antisense strand to SEQ ID NO: 2557242
aaacuuauccauagcacua

SEQ ID NO: 2557244 - RNA, 19 nt, Artificial Sequence
  Description of Artificial Sequence: Synthetic oligonucleotide
  Sense strand starting at position 3896 of SEQ ID NO: 1888795
guguguaaugaucaguuca

SEQ ID NO: 2557245 - RNA, 19 nt, Artificial Sequence
  Description of Artificial Sequence: Synthetic oligonucleotide
  Antisense strand to SEQ ID NO: 2557244
ugaacugaucauuacacac

SEQ ID NO: 2557246 - RNA, 19 nt, Artificial Sequence
  Description of Artificial Sequence: Synthetic oligonucleotide
  Sense strand starting at position 3898 of SEQ ID NO: 1888795
guguaaugaucaguucagg

SEQ ID NO: 2557247 - RNA, 19 nt, Artificial Sequence
  Description of Artificial Sequence: Synthetic oligonucleotide
  Antisense strand to SEQ ID NO: 2557246
ccugaacugaucauuacac

SEQ ID NO: 2557248 - RNA, 19 nt, Artificial Sequence
  Description of Artificial Sequence: Synthetic oligonucleotide
  Sense strand starting at position 17 of SEQ ID NO: 1888796
ugagcuuucuuggcacaua

SEQ ID NO: 2557249 - RNA, 19 nt, Artificial Sequence
  Description of Artificial Sequence: Synthetic oligonucleotide
  Antisense strand to SEQ ID NO: 2557248
uaugugccaagaaagcuca

SEQ ID NO: 2557250 - RNA, 19 nt, Artificial Sequence
  Description of Artificial Sequence: Synthetic oligonucleotide
  Sense strand starting at position 50 of SEQ ID NO: 1888796
guauccuagaggcaggauu

SEQ ID NO: 2557251 - RNA, 19 nt, Artificial Sequence
  Description of Artificial Sequence: Synthetic oligonucleotide
  Antisense strand to SEQ ID NO: 2557250
aauccugccucuaggauac

SEQ ID NO: 2557252 - RNA, 19 nt, Artificial Sequence
  Description of Artificial Sequence: Synthetic oligonucleotide
  Sense strand starting at position 120 of SEQ ID NO: 1888796
ucaugcuuugaagggaauu

SEQ ID NO: 2557253 - RNA, 19 nt, Artificial Sequence
  Description of Artificial Sequence: Synthetic oligonucleotide
  Antisense strand to SEQ ID NO: 2557252
aauucccuucaaagcauga

SEQ ID NO: 2557254 - RNA, 19 nt, Artificial Sequence
  Description of Artificial Sequence: Synthetic oligonucleotide
  Sense strand starting at position 141 of SEQ ID NO: 1888796
ggaagaaauuucuagucau

SEQ ID NO: 2557255 - RNA, 19 nt, Artificial Sequence
  Description of Artificial Sequence: Synthetic oligonucleotide
  Antisense strand to SEQ ID NO: 2557254
augacuagaaauuucuucc

SEQ ID NO: 2557256 - RNA, 19 nt, Artificial Sequence
  Description of Artificial Sequence: Synthetic oligonucleotide
  Sense strand starting at position 212 of SEQ ID NO: 1888796
cugugaguuuagccaaaca

SEQ ID NO: 2557257 - RNA, 19 nt, Artificial Sequence
  Description of Artificial Sequence: Synthetic oligonucleotide
  Antisense strand to SEQ ID NO: 2557256
uguuuggcuaaacucacag

SEQ ID NO: 2557258 - RNA, 19 nt, Artificial Sequence
  Description of Artificial Sequence: Synthetic oligonucleotide
  Sense strand starting at position 295 of SEQ ID NO: 1888796
agguucucccauugauguu

SEQ ID NO: 2557259 - RNA, 19 nt, Artificial Sequence
  Description of Artificial Sequence: Synthetic oligonucleotide
  Antisense strand to SEQ ID NO: 2557258
aacaucaaugggagaaccu

SEQ ID NO: 2557260 - RNA, 19 nt, Artificial Sequence
  Description of Artificial Sequence: Synthetic oligonucleotide
  Sense strand starting at position 301 of SEQ ID NO: 1888796
ucccauugauguuuccuau

SEQ ID NO: 2557261 - RNA, 19 nt, Artificial Sequence
  Description of Artificial Sequence: Synthetic oligonucleotide
  Antisense strand to SEQ ID NO: 2557260
auaggaaacaucaauggga

SEQ ID NO: 2557262 - RNA, 19 nt, Artificial Sequence
  Description of Artificial Sequence: Synthetic oligonucleotide
  Sense strand starting at position 307 of SEQ ID NO: 1888796
ugauguuuccuauggcaag

SEQ ID NO: 2557263 - RNA, 19 nt, Artificial Sequence
  Description of Artificial Sequence: Synthetic oligonucleotide
  Antisense strand to SEQ ID NO: 2557262
cuugccauaggaaacauca

SEQ ID NO: 2557264 - RNA, 19 nt, Artificial Sequence
  Description of Artificial Sequence: Synthetic oligonucleotide
  Sense strand starting at position 346 of SEQ ID NO: 1888796
gcuaacaccgaguagucaa

SEQ ID NO: 2557265 - RNA, 19 nt, Artificial Sequence
  Description of Artificial Sequence: Synthetic oligonucleotide
  Antisense strand to SEQ ID NO: 2557264
uugacuacucgguguuagc

SEQ ID NO: 2557266 - RNA, 19 nt, Artificial Sequence
  Description of Artificial Sequence: Synthetic oligonucleotide
  Sense strand starting at position 349 of SEQ ID NO: 1888796
aacaccgaguagucaauau

SEQ ID NO: 2557267 - RNA, 19 nt, Artificial Sequence
  Description of Artificial Sequence: Synthetic oligonucleotide
  Antisense strand to SEQ ID NO: 2557266
auauugacuacucgguguu

SEQ ID NO: 2557268 - RNA, 19 nt, Artificial Sequence
  Description of Artificial Sequence: Synthetic oligonucleotide
  Sense strand starting at position 353 of SEQ ID NO: 1888796
ccgaguagucaauauccuu

SEQ ID NO: 2557269 - RNA, 19 nt, Artificial Sequence
  Description of Artificial Sequence: Synthetic oligonucleotide
  Antisense strand to SEQ ID NO: 2557268
aaggauauugacuacucgg

SEQ ID NO: 2557270 - RNA, 19 nt, Artificial Sequence
  Description of Artificial Sequence: Synthetic oligonucleotide
  Sense strand starting at position 401 of SEQ ID NO: 1888796
gcacuaggcucucugauag

SEQ ID NO: 2557271 - RNA, 19 nt, Artificial Sequence
  Description of Artificial Sequence: Synthetic oligonucleotide
  Antisense strand to SEQ ID NO: 2557270
cuaucagagagccuagugc

SEQ ID NO: 2557272 - RNA, 19 nt, Artificial Sequence
  Description of Artificial Sequence: Synthetic oligonucleotide
  Sense strand starting at position 411 of SEQ ID NO: 1888796
cucugauaggucugggaau

SEQ ID NO: 2557273 - RNA, 19 nt, Artificial Sequence
  Description of Artificial Sequence: Synthetic oligonucleotide
  Antisense strand to SEQ ID NO: 2557272
auucccagaccuaucagag

SEQ ID NO: 2557274 - RNA, 19 nt, Artificial Sequence
  Description of Artificial Sequence: Synthetic oligonucleotide
  Sense strand starting at position 445 of SEQ ID NO: 1888796
cagagcugcuaguuaagga

SEQ ID NO: 2557275 - RNA, 19 nt, Artificial Sequence
  Description of Artificial Sequence: Synthetic oligonucleotide
  Antisense strand to SEQ ID NO: 2557274
uccuuaacuagcagcucug

SEQ ID NO: 2557276 - RNA, 19 nt, Artificial Sequence
  Description of Artificial Sequence: Synthetic oligonucleotide
  Sense strand starting at position 495 of SEQ ID NO: 1888796
uggguaagcauccacagua

SEQ ID NO: 2557277 - RNA, 19 nt, Artificial Sequence
  Description of Artificial Sequence: Synthetic oligonucleotide
  Antisense strand to SEQ ID NO: 2557276
uacuguggaugcuuaccca

SEQ ID NO: 2557278 - RNA, 19 nt, Artificial Sequence
  Description of Artificial Sequence: Synthetic oligonucleotide
  Sense strand starting at position 788 of SEQ ID NO: 1888796
aauaucagguguuuauaga

SEQ ID NO: 2557279 - RNA, 19 nt, Artificial Sequence
  Description of Artificial Sequence: Synthetic oligonucleotide
  Antisense strand to SEQ ID NO: 2557278
ucuauaaacaccugauauu

SEQ ID NO: 2557280 - RNA, 19 nt, Artificial Sequence
  Description of Artificial Sequence: Synthetic oligonucleotide
  Sense strand starting at position 902 of SEQ ID NO: 1888796
gccugacaugauugaacau

SEQ ID NO: 2557281 - RNA, 19 nt, Artificial Sequence
  Description of Artificial Sequence: Synthetic oligonucleotide
  Antisense strand to SEQ ID NO: 2557280
auguucaaucaugucaggc

SEQ ID NO: 2557282 - RNA, 19 nt, Artificial Sequence
  Description of Artificial Sequence: Synthetic oligonucleotide
  Sense strand starting at position 919 of SEQ ID NO: 1888796
auuuaagacuugucugugu

SEQ ID NO: 2557283 - RNA, 19 nt, Artificial Sequence
  Description of Artificial Sequence: Synthetic oligonucleotide
  Antisense strand to SEQ ID NO: 2557282
acacagacaagucuuaaau

SEQ ID NO: 2557284 - RNA, 19 nt, Artificial Sequence
  Description of Artificial Sequence: Synthetic oligonucleotide
  Sense strand starting at position 1311 of SEQ ID NO: 1888796
ccuagagcuccaggacuuu

SEQ ID NO: 2557285 - RNA, 19 nt, Artificial Sequence
  Description of Artificial Sequence: Synthetic oligonucleotide
  Antisense strand to SEQ ID NO: 2557284
aaaguccuggagcucuagg

SEQ ID NO: 2557286 - RNA, 19 nt, Artificial Sequence
  Description of Artificial Sequence: Synthetic oligonucleotide
  Sense strand starting at position 1383 of SEQ ID NO: 1888796
ccgccuacccugcaauuua

SEQ ID NO: 2557287 - RNA, 19 nt, Artificial Sequence
  Description of Artificial Sequence: Synthetic oligonucleotide
  Antisense strand to SEQ ID NO: 2557286
uaaauugcaggguaggcgg

SEQ ID NO: 2557288 - RNA, 19 nt, Artificial Sequence
  Description of Artificial Sequence: Synthetic oligonucleotide
  Sense strand starting at position 1606 of SEQ ID NO: 1888796
ucucuuagguauccucaca

SEQ ID NO: 2557289 - RNA, 19 nt, Artificial Sequence
  Description of Artificial Sequence: Synthetic oligonucleotide
  Antisense strand to SEQ ID NO: 2557288
ugugaggauaccuaagaga

SEQ ID NO: 2557290 - RNA, 19 nt, Artificial Sequence
  Description of Artificial Sequence: Synthetic oligonucleotide
  Sense strand starting at position 1622 of SEQ ID NO: 1888796
acaggagacugccuucuua

SEQ ID NO: 2557291 - RNA, 19 nt, Artificial Sequence
  Description of Artificial Sequence: Synthetic oligonucleotide
  Antisense strand to SEQ ID NO: 2557290
uaagaaggcagucuccugu

SEQ ID NO: 2557292 - RNA, 19 nt, Artificial Sequence
  Description of Artificial Sequence: Synthetic oligonucleotide
  Sense strand starting at position 1654 of SEQ ID NO: 1888796
gcagaagaccucuaguucu

SEQ ID NO: 2557293 - RNA, 19 nt, Artificial Sequence
  Description of Artificial Sequence: Synthetic oligonucleotide
  Antisense strand to SEQ ID NO: 2557292
agaacuagaggucuucugc

SEQ ID NO: 2557294 - RNA, 19 nt, Artificial Sequence
  Description of Artificial Sequence: Synthetic oligonucleotide
  Sense strand starting at position 1985 of SEQ ID NO: 1888796
cagccaugucugcaucuga

SEQ ID NO: 2557295 - RNA, 19 nt, Artificial Sequence
  Description of Artificial Sequence: Synthetic oligonucleotide
  Antisense strand to SEQ ID NO: 2557294
ucagaugcagacauggcug

SEQ ID NO: 2557296 - RNA, 19 nt, Artificial Sequence
  Description of Artificial Sequence: Synthetic oligonucleotide
  Sense strand starting at position 1992 of SEQ ID NO: 1888796
gucugcaucugauuaagga

SEQ ID NO: 2557297 - RNA, 19 nt, Artificial Sequence
  Description of Artificial Sequence: Synthetic oligonucleotide
  Antisense strand to SEQ ID NO: 2557296
uccuuaaucagaugcagac

SEQ ID NO: 2557298 - RNA, 19 nt, Artificial Sequence
  Description of Artificial Sequence: Synthetic oligonucleotide
  Sense strand starting at position 2230 of SEQ ID NO: 1888796
guauauuacuggcuuagaa

SEQ ID NO: 2557299 - RNA, 19 nt, Artificial Sequence
  Description of Artificial Sequence: Synthetic oligonucleotide
  Antisense strand to SEQ ID NO: 2557298
uucuaagccaguaauauac

SEQ ID NO: 2557300 - RNA, 19 nt, Artificial Sequence
  Description of Artificial Sequence: Synthetic oligonucleotide
  Sense strand starting at position 2255 of SEQ ID NO: 1888796
cugugauacacugauagug

SEQ ID NO: 2557301 - RNA, 19 nt, Artificial Sequence
  Description of Artificial Sequence: Synthetic oligonucleotide
  Antisense strand to SEQ ID NO: 2557300
cacuaucaguguaucacag

SEQ ID NO: 2557302 - RNA, 19 nt, Artificial Sequence
  Description of Artificial Sequence: Synthetic oligonucleotide
  Sense strand starting at position 2272 of SEQ ID NO: 1888796
ugcaaauaucauggcagaa

SEQ ID NO: 2557303 - RNA, 19 nt, Artificial Sequence
  Description of Artificial Sequence: Synthetic oligonucleotide
  Antisense strand to SEQ ID NO: 2557302
uucugccaugauauuugca

SEQ ID NO: 2557304 - RNA, 19 nt, Artificial Sequence
  Description of Artificial Sequence: Synthetic oligonucleotide
  Sense strand starting at position 2633 of SEQ ID NO: 1888796
aguugagagugucccuaaa

SEQ ID NO: 2557305 - RNA, 19 nt, Artificial Sequence
  Description of Artificial Sequence: Synthetic oligonucleotide
  Antisense strand to SEQ ID NO: 2557304
uuuagggacacucucaacu

SEQ ID NO: 2557306 - RNA, 19 nt, Artificial Sequence
  Description of Artificial Sequence: Synthetic oligonucleotide
  Sense strand starting at position 2635 of SEQ ID NO: 1888796
uugagagugucccuaaagu

SEQ ID NO: 2557307 - RNA, 19 nt, Artificial Sequence
  Description of Artificial Sequence: Synthetic oligonucleotide
  Antisense strand to SEQ ID NO: 2557306
acuuuagggacacucucaa

SEQ ID NO: 2557308 - RNA, 19 nt, Artificial Sequence
  Description of Artificial Sequence: Synthetic oligonucleotide
  Sense strand starting at position 2860 of SEQ ID NO: 1888796
gacaguuuccacuagagca

SEQ ID NO: 2557309 - RNA, 19 nt, Artificial Sequence
  Description of Artificial Sequence: Synthetic oligonucleotide
  Antisense strand to SEQ ID NO: 2557308
ugcucuaguggaaacuguc

SEQ ID NO: 2557310 - RNA, 19 nt, Artificial Sequence
  Description of Artificial Sequence: Synthetic oligonucleotide
  Sense strand starting at position 2892 of SEQ ID NO: 1888796
cucaauagcccguaucuuu

SEQ ID NO: 2557311 - RNA, 19 nt, Artificial Sequence
  Description of Artificial Sequence: Synthetic oligonucleotide
  Antisense strand to SEQ ID NO: 2557310
aaagauacgggcuauugag

SEQ ID NO: 2557312 - RNA, 19 nt, Artificial Sequence
  Description of Artificial Sequence: Synthetic oligonucleotide
  Sense strand starting at position 2907 of SEQ ID NO: 1888796
cuuugacaucaggauguuu

SEQ ID NO: 2557313 - RNA, 19 nt, Artificial Sequence
  Description of Artificial Sequence: Synthetic oligonucleotide
  Antisense strand to SEQ ID NO: 2557312
aaacauccugaugucaaag

SEQ ID NO: 2557314 - RNA, 19 nt, Artificial Sequence
  Description of Artificial Sequence: Synthetic oligonucleotide
  Sense strand starting at position 2937 of SEQ ID NO: 1888796
ggagaaggauguccuggua

SEQ ID NO: 2557315 - RNA, 19 nt, Artificial Sequence
  Description of Artificial Sequence: Synthetic oligonucleotide
  Antisense strand to SEQ ID NO: 2557314
uaccaggacauccuucucc

SEQ ID NO: 2557316 - RNA, 19 nt, Artificial Sequence
  Description of Artificial Sequence: Synthetic oligonucleotide
  Sense strand starting at position 2940 of SEQ ID NO: 1888796
gaaggauguccugguacuc

SEQ ID NO: 2557317 - RNA, 19 nt, Artificial Sequence
  Description of Artificial Sequence: Synthetic oligonucleotide
  Antisense strand to SEQ ID NO: 2557316
gaguaccaggacauccuuc

SEQ ID NO: 2557318 - RNA, 19 nt, Artificial Sequence
  Description of Artificial Sequence: Synthetic oligonucleotide
  Sense strand starting at position 3055 of SEQ ID NO: 1888796
auaucuguucuggguugaa

SEQ ID NO: 2557319 - RNA, 19 nt, Artificial Sequence
  Description of Artificial Sequence: Synthetic oligonucleotide
  Antisense strand to SEQ ID NO: 2557318
uucaacccagaacagauau

SEQ ID NO: 2557320 - RNA, 19 nt, Artificial Sequence
  Description of Artificial Sequence: Synthetic oligonucleotide
  Sense strand starting at position 3433 of SEQ ID NO: 1888796
ccuccaggacugugaaaga

SEQ ID NO: 2557321 - RNA, 19 nt, Artificial Sequence
  Description of Artificial Sequence: Synthetic oligonucleotide
  Antisense strand to SEQ ID NO: 2557320
ucuuucacaguccuggagg

SEQ ID NO: 2557322 - RNA, 19 nt, Artificial Sequence
  Description of Artificial Sequence: Synthetic oligonucleotide
  Sense strand starting at position 3553 of SEQ ID NO: 1888796
uugaaaugcugcuccaauc

SEQ ID NO: 2557323 - RNA, 19 nt, Artificial Sequence
  Description of Artificial Sequence: Synthetic oligonucleotide
  Antisense strand to SEQ ID NO: 2557322
gauuggagcagcauuucaa

SEQ ID NO: 2557324 - RNA, 19 nt, Artificial Sequence
  Description of Artificial Sequence: Synthetic oligonucleotide
  Sense strand starting at position 3675 of SEQ ID NO: 1888796
gaaacaagucugcaaggua

SEQ ID NO: 2557325 - RNA, 19 nt, Artificial Sequence
  Description of Artificial Sequence: Synthetic oligonucleotide
  Antisense strand to SEQ ID NO: 2557324
uaccuugcagacuuguuuc

SEQ ID NO: 2557326 - RNA, 19 nt, Artificial Sequence
  Description of Artificial Sequence: Synthetic oligonucleotide
  Sense strand starting at position 3698 of SEQ ID NO: 1888796
aagacuugugucuggguga

SEQ ID NO: 2557327 - RNA, 19 nt, Artificial Sequence
  Description of Artificial Sequence: Synthetic oligonucleotide
  Antisense strand to SEQ ID NO: 2557326
ucacccagacacaagucuu

SEQ ID NO: 2557328 - RNA, 19 nt, Artificial Sequence
  Description of Artificial Sequence: Synthetic oligonucleotide
  Sense strand starting at position 48 of SEQ ID NO: 1888797
gcccuuauguggccaccaa

SEQ ID NO: 2557329 - RNA, 19 nt, Artificial Sequence
  Description of Artificial Sequence: Synthetic oligonucleotide
  Antisense strand to SEQ ID NO: 2557328
uugguggccacauaagggc

SEQ ID NO: 2557330 - RNA, 19 nt, Artificial Sequence
  Description of Artificial Sequence: Synthetic oligonucleotide
  Sense strand starting at position 388 of SEQ ID NO: 1888797
cgagcuucuccagggagaa

SEQ ID NO: 2557331 - RNA, 19 nt, Artificial Sequence
  Description of Artificial Sequence: Synthetic oligonucleotide
  Antisense strand to SEQ ID NO: 2557330
uucucccuggagaagcucg

SEQ ID NO: 2557332 - RNA, 19 nt, Artificial Sequence
  Description of Artificial Sequence: Synthetic oligonucleotide
  Sense strand starting at position 389 of SEQ ID NO: 1888797
gagcuucuccagggagaag

SEQ ID NO: 2557333 - RNA, 19 nt, Artificial Sequence
  Description of Artificial Sequence: Synthetic oligonucleotide
  Antisense strand to SEQ ID NO: 2557332
cuucucccuggagaagcuc

SEQ ID NO: 2557334 - RNA, 19 nt, Artificial Sequence
  Description of Artificial Sequence: Synthetic oligonucleotide
  Sense strand starting at position 390 of SEQ ID NO: 1888797
agcuucuccagggagaagu

SEQ ID NO: 2557335 - RNA, 19 nt, Artificial Sequence
  Description of Artificial Sequence: Synthetic oligonucleotide
  Antisense strand to SEQ ID NO: 2557334
acuucucccuggagaagcu

SEQ ID NO: 2557336 - RNA, 19 nt, Artificial Sequence
  Description of Artificial Sequence: Synthetic oligonucleotide
  Sense strand starting at position 409 of SEQ ID NO: 1888797
aggcgcaucucacuagaaa

SEQ ID NO: 2557337 - RNA, 19 nt, Artificial Sequence
  Description of Artificial Sequence: Synthetic oligonucleotide
  Antisense strand to SEQ ID NO: 2557336
uuucuagugagaugcgccu

SEQ ID NO: 2557338 - RNA, 19 nt, Artificial Sequence
  Description of Artificial Sequence: Synthetic oligonucleotide
  Sense strand starting at position 645 of SEQ ID NO: 1888797
agacgaaagucucuaauac

SEQ ID NO: 2557339 - RNA, 19 nt, Artificial Sequence
  Description of Artificial Sequence: Synthetic oligonucleotide
  Antisense strand to SEQ ID NO: 2557338
guauuagagacuuucgucu

SEQ ID NO: 2557340 - RNA, 19 nt, Artificial Sequence
  Description of Artificial Sequence: Synthetic oligonucleotide
  Sense strand starting at position 646 of SEQ ID NO: 1888797
gacgaaagucucuaauacu

SEQ ID NO: 2557341 - RNA, 19 nt, Artificial Sequence
  Description of Artificial Sequence: Synthetic oligonucleotide
  Antisense strand to SEQ ID NO: 2557340
aguauuagagacuuucguc

SEQ ID NO: 2557342 - RNA, 19 nt, Artificial Sequence
  Description of Artificial Sequence: Synthetic oligonucleotide
  Sense strand starting at position 673 of SEQ ID NO: 1888797
ggcugugaaggugacuuua

SEQ ID NO: 2557343 - RNA, 19 nt, Artificial Sequence
  Description of Artificial Sequence: Synthetic oligonucleotide
  Antisense strand to SEQ ID NO: 2557342
uaaagucaccuucacagcc

SEQ ID NO: 2557344 - RNA, 19 nt, Artificial Sequence
  Description of Artificial Sequence: Synthetic oligonucleotide
  Sense strand starting at position 675 of SEQ ID NO: 1888797
cugugaaggugacuuuaaa

SEQ ID NO: 2557345 - RNA, 19 nt, Artificial Sequence
  Description of Artificial Sequence: Synthetic oligonucleotide
  Antisense strand to SEQ ID NO: 2557344
uuuaaagucaccuucacag

SEQ ID NO: 2557346 - RNA, 19 nt, Artificial Sequence
  Description of Artificial Sequence: Synthetic oligonucleotide
  Sense strand starting at position 691 of SEQ ID NO: 1888797
aaaguugugccuugaagga

SEQ ID NO: 2557347 - RNA, 19 nt, Artificial Sequence
  Description of Artificial Sequence: Synthetic oligonucleotide
  Antisense strand to SEQ ID NO: 2557346
uccuucaaggcacaacuuu

SEQ ID NO: 2557348 - RNA, 19 nt, Artificial Sequence
  Description of Artificial Sequence: Synthetic oligonucleotide
  Sense strand starting at position 815 of SEQ ID NO: 1888797
cccaaagaguguuuggcuu

SEQ ID NO: 2557349 - RNA, 19 nt, Artificial Sequence
  Description of Artificial Sequence: Synthetic oligonucleotide
  Antisense strand to SEQ ID NO: 2557348
aagccaaacacucuuuggg

SEQ ID NO: 2557350 - RNA, 19 nt, Artificial Sequence
  Description of Artificial Sequence: Synthetic oligonucleotide
  Sense strand starting at position 821 of SEQ ID NO: 1888797
gaguguuuggcuuaagggu

SEQ ID NO: 2557351 - RNA, 19 nt, Artificial Sequence
  Description of Artificial Sequence: Synthetic oligonucleotide
  Antisense strand to SEQ ID NO: 2557350
acccuuaagccaaacacuc

SEQ ID NO: 2557352 - RNA, 19 nt, Artificial Sequence
  Description of Artificial Sequence: Synthetic oligonucleotide
  Sense strand starting at position 860 of SEQ ID NO: 1888797
ccugaacugcuaggacuua

SEQ ID NO: 2557353 - RNA, 19 nt, Artificial Sequence
  Description of Artificial Sequence: Synthetic oligonucleotide
  Antisense strand to SEQ ID NO: 2557352
uaaguccuagcaguucagg

SEQ ID NO: 2557354 - RNA, 19 nt, Artificial Sequence
  Description of Artificial Sequence: Synthetic oligonucleotide
  Sense strand starting at position 921 of SEQ ID NO: 1888797
gggacagauuugugacuua

SEQ ID NO: 2557355 - RNA, 19 nt, Artificial Sequence
  Description of Artificial Sequence: Synthetic oligonucleotide
  Antisense strand to SEQ ID NO: 2557354
uaagucacaaaucuguccc

SEQ ID NO: 2557356 - RNA, 19 nt, Artificial Sequence
  Description of Artificial Sequence: Synthetic oligonucleotide
  Sense strand starting at position 1045 of SEQ ID NO: 1888797
gccugaauucuggaaguag

SEQ ID NO: 2557357 - RNA, 19 nt, Artificial Sequence
  Description of Artificial Sequence: Synthetic oligonucleotide
  Antisense strand to SEQ ID NO: 2557356
cuacuuccagaauucaggc

SEQ ID NO: 2557358 - RNA, 19 nt, Artificial Sequence
  Description of Artificial Sequence: Synthetic oligonucleotide
  Sense strand starting at position 1119 of SEQ ID NO: 1888797
ggacccagaacuugguuau

SEQ ID NO: 2557359 - RNA, 19 nt, Artificial Sequence
  Description of Artificial Sequence: Synthetic oligonucleotide
  Antisense strand to SEQ ID NO: 2557358
auaaccaaguucugggucc

SEQ ID NO: 2557360 - RNA, 19 nt, Artificial Sequence
  Description of Artificial Sequence: Synthetic oligonucleotide
  Sense strand starting at position 1122 of SEQ ID NO: 1888797
cccagaacuugguuaugaa

SEQ ID NO: 2557361 - RNA, 19 nt, Artificial Sequence
  Description of Artificial Sequence: Synthetic oligonucleotide
  Antisense strand to SEQ ID NO: 2557360
uucauaaccaaguucuggg

SEQ ID NO: 2557362 - RNA, 19 nt, Artificial Sequence
  Description of Artificial Sequence: Synthetic oligonucleotide
  Sense strand starting at position 1126 of SEQ ID NO: 1888797
gaacuugguuaugaaguca

SEQ ID NO: 2557363 - RNA, 19 nt, Artificial Sequence
  Description of Artificial Sequence: Synthetic oligonucleotide
  Antisense strand to SEQ ID NO: 2557362
ugacuucauaaccaaguuc

SEQ ID NO: 2557364 - RNA, 19 nt, Artificial Sequence
  Description of Artificial Sequence: Synthetic oligonucleotide
  Sense strand starting at position 1208 of SEQ ID NO: 1888797
gcccgugacugagagaaga

SEQ ID NO: 2557365 - RNA, 19 nt, Artificial Sequence
  Description of Artificial Sequence: Synthetic oligonucleotide
  Antisense strand to SEQ ID NO: 2557364
ucuucucucagucacgggc

SEQ ID NO: 2557366 - RNA, 19 nt, Artificial Sequence
  Description of Artificial Sequence: Synthetic oligonucleotide
  Sense strand starting at position 1238 of SEQ ID NO: 1888797
gcaaguuugccagggaagu

SEQ ID NO: 2557367 - RNA, 19 nt, Artificial Sequence
  Description of Artificial Sequence: Synthetic oligonucleotide
  Antisense strand to SEQ ID NO: 2557366
acuucccuggcaaacuugc

SEQ ID NO: 2557368 - RNA, 19 nt, Artificial Sequence
  Description of Artificial Sequence: Synthetic oligonucleotide
  Sense strand starting at position 1239 of SEQ ID NO: 1888797
caaguuugccagggaaguu

SEQ ID NO: 2557369 - RNA, 19 nt, Artificial Sequence
  Description of Artificial Sequence: Synthetic oligonucleotide
  Antisense strand to SEQ ID NO: 2557368
aacuucccuggcaaacuug

SEQ ID NO: 2557370 - RNA, 19 nt, Artificial Sequence
  Description of Artificial Sequence: Synthetic oligonucleotide
  Sense strand starting at position 2115 of SEQ ID NO: 1888797
cacagagcuuucucgugau

SEQ ID NO: 2557371 - RNA, 19 nt, Artificial Sequence
  Description of Artificial Sequence: Synthetic oligonucleotide
  Antisense strand to SEQ ID NO: 2557370
aucacgagaaagcucugug

SEQ ID NO: 2557372 - RNA, 19 nt, Artificial Sequence
  Description of Artificial Sequence: Synthetic oligonucleotide
  Sense strand starting at position 2119 of SEQ ID NO: 1888797
gagcuuucucgugauucca

SEQ ID NO: 2557373 - RNA, 19 nt, Artificial Sequence
  Description of Artificial Sequence: Synthetic oligonucleotide
  Antisense strand to SEQ ID NO: 2557372
uggaaucacgagaaagcuc

SEQ ID NO: 2557374 - RNA, 19 nt, Artificial Sequence
  Description of Artificial Sequence: Synthetic oligonucleotide
  Sense strand starting at position 3103 of SEQ ID NO: 1888797
cagugcgugucuucgagaa

SEQ ID NO: 2557375 - RNA, 19 nt, Artificial Sequence
  Description of Artificial Sequence: Synthetic oligonucleotide
  Antisense strand to SEQ ID NO: 2557374
uucucgaagacacgcacug

SEQ ID NO: 2557376 - RNA, 19 nt, Artificial Sequence
  Description of Artificial Sequence: Synthetic oligonucleotide
  Sense strand starting at position 3108 of SEQ ID NO: 1888797
cgugucuucgagaaugcga

SEQ ID NO: 2557377 - RNA, 19 nt, Artificial Sequence
  Description of Artificial Sequence: Synthetic oligonucleotide
  Antisense strand to SEQ ID NO: 2557376
ucgcauucucgaagacacg

SEQ ID NO: 2557378 - RNA, 19 nt, Artificial Sequence
  Description of Artificial Sequence: Synthetic oligonucleotide
  Sense strand starting at position 3110 of SEQ ID NO: 1888797
ugucuucgagaaugcgaga

SEQ ID NO: 2557379 - RNA, 19 nt, Artificial Sequence
  Description of Artificial Sequence: Synthetic oligonucleotide
  Antisense strand to SEQ ID NO: 2557378
ucucgcauucucgaagaca

SEQ ID NO: 2557380 - RNA, 19 nt, Artificial Sequence
  Description of Artificial Sequence: Synthetic oligonucleotide
  Sense strand starting at position 3115 of SEQ ID NO: 1888797
ucgagaaugcgagauucau

SEQ ID NO: 2557381 - RNA, 19 nt, Artificial Sequence
  Description of Artificial Sequence: Synthetic oligonucleotide
  Antisense strand to SEQ ID NO: 2557380
augaaucucgcauucucga

SEQ ID NO: 2557382 - RNA, 19 nt, Artificial Sequence
  Description of Artificial Sequence: Synthetic oligonucleotide
  Sense strand starting at position 3130 of SEQ ID NO: 1888797
ucauaauguuugcugucua

SEQ ID NO: 2557383 - RNA, 19 nt, Artificial Sequence
  Description of Artificial Sequence: Synthetic oligonucleotide
  Antisense strand to SEQ ID NO: 2557382
uagacagcaaacauuauga

SEQ ID NO: 2557384 - RNA, 19 nt, Artificial Sequence
  Description of Artificial Sequence: Synthetic oligonucleotide
  Sense strand starting at position 3134 of SEQ ID NO: 1888797
aauguuugcugucuauaug

SEQ ID NO: 2557385 - RNA, 19 nt, Artificial Sequence
  Description of Artificial Sequence: Synthetic oligonucleotide
  Antisense strand to SEQ ID NO: 2557384
cauauagacagcaaacauu

SEQ ID NO: 2557386 - RNA, 19 nt, Artificial Sequence
  Description of Artificial Sequence: Synthetic oligonucleotide
  Sense strand starting at position 3137 of SEQ ID NO: 1888797
guuugcugucuauaugcau

SEQ ID NO: 2557387 - RNA, 19 nt, Artificial Sequence
  Description of Artificial Sequence: Synthetic oligonucleotide
  Antisense strand to SEQ ID NO: 2557386
augcauauagacagcaaac

SEQ ID NO: 2557388 - RNA, 19 nt, Artificial Sequence
  Description of Artificial Sequence: Synthetic oligonucleotide
  Sense strand starting at position 3143 of SEQ ID NO: 1888797
ugucuauaugcauggcuga

SEQ ID NO: 2557389 - RNA, 19 nt, Artificial Sequence
  Description of Artificial Sequence: Synthetic oligonucleotide
  Antisense strand to SEQ ID NO: 2557388
ucagccaugcauauagaca

SEQ ID NO: 2557390 - RNA, 19 nt, Artificial Sequence
  Description of Artificial Sequence: Synthetic oligonucleotide
  Sense strand starting at position 3146 of SEQ ID NO: 1888797
cuauaugcauggcugagua

SEQ ID NO: 2557391 - RNA, 19 nt, Artificial Sequence
  Description of Artificial Sequence: Synthetic oligonucleotide
  Antisense strand to SEQ ID NO: 2557390
uacucagccaugcauauag

SEQ ID NO: 2557392 - RNA, 19 nt, Artificial Sequence
  Description of Artificial Sequence: Synthetic oligonucleotide
  Sense strand starting at position 3189 of SEQ ID NO: 1888797
ugugcauacaugcgugauu

SEQ ID NO: 2557393 - RNA, 19 nt, Artificial Sequence
  Description of Artificial Sequence: Synthetic oligonucleotide
  Antisense strand to SEQ ID NO: 2557392
aaucacgcauguaugcaca

SEQ ID NO: 2557394 - RNA, 19 nt, Artificial Sequence
  Description of Artificial Sequence: Synthetic oligonucleotide
  Sense strand starting at position 3216 of SEQ ID NO: 1888797
acguacguucuucgugaaa

SEQ ID NO: 2557395 - RNA, 19 nt, Artificial Sequence
  Description of Artificial Sequence: Synthetic oligonucleotide
  Antisense strand to SEQ ID NO: 2557394
uuucacgaagaacguacgu

SEQ ID NO: 2557396 - RNA, 19 nt, Artificial Sequence
  Description of Artificial Sequence: Synthetic oligonucleotide
  Sense strand starting at position 3221 of SEQ ID NO: 1888797
cguucuucgugaaagggau

SEQ ID NO: 2557397 - RNA, 19 nt, Artificial Sequence
  Description of Artificial Sequence: Synthetic oligonucleotide
  Antisense strand to SEQ ID NO: 2557396
aucccuuucacgaagaacg

SEQ ID NO: 2557398 - RNA, 19 nt, Artificial Sequence
  Description of Artificial Sequence: Synthetic oligonucleotide
  Sense strand starting at position 3724 of SEQ ID NO: 1888797
gugcgucugcgaguagaaa

SEQ ID NO: 2557399 - RNA, 19 nt, Artificial Sequence
  Description of Artificial Sequence: Synthetic oligonucleotide
  Antisense strand to SEQ ID NO: 2557398
uuucuacucgcagacgcac

SEQ ID NO: 2557400 - RNA, 19 nt, Artificial Sequence
  Description of Artificial Sequence: Synthetic oligonucleotide
  Sense strand starting at position 3736 of SEQ ID NO: 1888797
guagaaagcccguguacug

SEQ ID NO: 2557401 - RNA, 19 nt, Artificial Sequence
  Description of Artificial Sequence: Synthetic oligonucleotide
  Antisense strand to SEQ ID NO: 2557400
caguacacgggcuuucuac

SEQ ID NO: 2557402 - RNA, 19 nt, Artificial Sequence
  Description of Artificial Sequence: Synthetic oligonucleotide
  Sense strand starting at position 3879 of SEQ ID NO: 1888797
gcgugaccuacccagaauu

SEQ ID NO: 2557403 - RNA, 19 nt, Artificial Sequence
  Description of Artificial Sequence: Synthetic oligonucleotide
  Antisense strand to SEQ ID NO: 2557402
aauucuggguaggucacgc

SEQ ID NO: 2557404 - RNA, 19 nt, Artificial Sequence
  Description of Artificial Sequence: Synthetic oligonucleotide
  Sense strand starting at position 3893 of SEQ ID NO: 1888797
gaauuaagcugaggacaau

SEQ ID NO: 2557405 - RNA, 19 nt, Artificial Sequence
  Description of Artificial Sequence: Synthetic oligonucleotide
  Antisense strand to SEQ ID NO: 2557404
auuguccucagcuuaauuc

SEQ ID NO: 2557406 - RNA, 19 nt, Artificial Sequence
  Description of Artificial Sequence: Synthetic oligonucleotide
  Sense strand starting at position 3981 of SEQ ID NO: 1888797
ggagcaugcuuggcugcaa

SEQ ID NO: 2557407 - RNA, 19 nt, Artificial Sequence
  Description of Artificial Sequence: Synthetic oligonucleotide
  Antisense strand to SEQ ID NO: 2557406
uugcagccaagcaugcucc

SEQ ID NO: 2557408 - RNA, 19 nt, Artificial Sequence
  Description of Artificial Sequence: Synthetic oligonucleotide
  Sense strand starting at position 604 of SEQ ID NO: 1888798
cacagagcuuucucgugau

SEQ ID NO: 2557409 - RNA, 19 nt, Artificial Sequence
  Description of Artificial Sequence: Synthetic oligonucleotide
  Antisense strand to SEQ ID NO: 2557408
aucacgagaaagcucugug

SEQ ID NO: 2557410 - RNA, 19 nt, Artificial Sequence
  Description of Artificial Sequence: Synthetic oligonucleotide
  Sense strand starting at position 608 of SEQ ID NO: 1888798
gagcuuucucgugauucca

SEQ ID NO: 2557411 - RNA, 19 nt, Artificial Sequence
  Description of Artificial Sequence: Synthetic oligonucleotide
  Antisense strand to SEQ ID NO: 2557410
uggaaucacgagaaagcuc

SEQ ID NO: 2557412 - RNA, 19 nt, Artificial Sequence
  Description of Artificial Sequence: Synthetic oligonucleotide
  Sense strand starting at position 2060 of SEQ ID NO: 1888798
acacguacguuccucauga

SEQ ID NO: 2557413 - RNA, 19 nt, Artificial Sequence
  Description of Artificial Sequence: Synthetic oligonucleotide
  Antisense strand to SEQ ID NO: 2557412
ucaugaggaacguacgugu

SEQ ID NO: 2557414 - RNA, 19 nt, Artificial Sequence
  Description of Artificial Sequence: Synthetic oligonucleotide
  Sense strand starting at position 2061 of SEQ ID NO: 1888798
cacguacguuccucaugaa

SEQ ID NO: 2557415 - RNA, 19 nt, Artificial Sequence
  Description of Artificial Sequence: Synthetic oligonucleotide
  Antisense strand to SEQ ID NO: 2557414
uucaugaggaacguacgug

SEQ ID NO: 2557416 - RNA, 19 nt, Artificial Sequence
  Description of Artificial Sequence: Synthetic oligonucleotide
  Sense strand starting at position 2062 of SEQ ID NO: 1888798
acguacguuccucaugaaa

SEQ ID NO: 2557417 - RNA, 19 nt, Artificial Sequence
  Description of Artificial Sequence: Synthetic oligonucleotide
  Antisense strand to SEQ ID NO: 2557416
uuucaugaggaacguacgu

SEQ ID NO: 2557418 - RNA, 19 nt, Artificial Sequence
  Description of Artificial Sequence: Synthetic oligonucleotide
  Sense strand starting at position 2140 of SEQ ID NO: 1888798
accgguuuccgggaguaag

SEQ ID NO: 2557419 - RNA, 19 nt, Artificial Sequence
  Description of Artificial Sequence: Synthetic oligonucleotide
  Antisense strand to SEQ ID NO: 2557418
cuuacucccggaaaccggu

SEQ ID NO: 2557420 - RNA, 19 nt, Artificial Sequence
  Description of Artificial Sequence: Synthetic oligonucleotide
  Sense strand starting at position 2435 of SEQ ID NO: 1888798
cuggguuucgggcagagaa

SEQ ID NO: 2557421 - RNA, 19 nt, Artificial Sequence
  Description of Artificial Sequence: Synthetic oligonucleotide
  Antisense strand to SEQ ID NO: 2557420
uucucugcccgaaacccag

SEQ ID NO: 2557422 - RNA, 19 nt, Artificial Sequence
  Description of Artificial Sequence: Synthetic oligonucleotide
  Sense strand starting at position 2701 of SEQ ID NO: 1888798
agaauuaagcaguggacaa

SEQ ID NO: 2557423 - RNA, 19 nt, Artificial Sequence
  Description of Artificial Sequence: Synthetic oligonucleotide
  Antisense strand to SEQ ID NO: 2557422
uuguccacugcuuaauucu

SEQ ID NO: 2557424 - RNA, 19 nt, Artificial Sequence
  Description of Artificial Sequence: Synthetic oligonucleotide
  Sense strand starting at position 2739 of SEQ ID NO: 1888798
acccucguccgaugacaau

SEQ ID NO: 2557425 - RNA, 19 nt, Artificial Sequence
  Description of Artificial Sequence: Synthetic oligonucleotide
  Antisense strand to SEQ ID NO: 2557424
auugucaucggacgagggu

SEQ ID NO: 2557426 - RNA, 19 nt, Artificial Sequence
  Description of Artificial Sequence: Synthetic oligonucleotide
  Sense strand starting at position 2794 of SEQ ID NO: 1888798
gcgugcucagcuguaggaa

SEQ ID NO: 2557427 - RNA, 19 nt, Artificial Sequence
  Description of Artificial Sequence: Synthetic oligonucleotide
  Antisense strand to SEQ ID NO: 2557426
uuccuacagcugagcacgc

SEQ ID NO: 2557428 - RNA, 19 nt, Artificial Sequence
  Description of Artificial Sequence: Synthetic oligonucleotide
  Sense strand starting at position 2795 of SEQ ID NO: 1888798
cgugcucagcuguaggaau

SEQ ID NO: 2557429 - RNA, 19 nt, Artificial Sequence
  Description of Artificial Sequence: Synthetic oligonucleotide
  Antisense strand to SEQ ID NO: 2557428
auuccuacagcugagcacg

SEQ ID NO: 2557430 - RNA, 19 nt, Artificial Sequence
  Description of Artificial Sequence: Synthetic oligonucleotide
  Sense strand starting at position 2806 of SEQ ID NO: 1888798
guaggaaugugacucaacu

SEQ ID NO: 2557431 - RNA, 19 nt, Artificial Sequence
  Description of Artificial Sequence: Synthetic oligonucleotide
  Antisense strand to SEQ ID NO: 2557430
aguugagucacauuccuac

SEQ ID NO: 2557432 - RNA, 19 nt, Artificial Sequence
  Description of Artificial Sequence: Synthetic oligonucleotide
  Sense strand starting at position 2815 of SEQ ID NO: 1888798
ugacucaacuugcugaaau

SEQ ID NO: 2557433 - RNA, 19 nt, Artificial Sequence
  Description of Artificial Sequence: Synthetic oligonucleotide
  Antisense strand to SEQ ID NO: 2557432
auuucagcaaguugaguca

SEQ ID NO: 2557434 - RNA, 19 nt, Artificial Sequence
  Description of Artificial Sequence: Synthetic oligonucleotide
  Sense strand starting at position 2975 of SEQ ID NO: 1888798
augccugcugaguagaaga

SEQ ID NO: 2557435 - RNA, 19 nt, Artificial Sequence
  Description of Artificial Sequence: Synthetic oligonucleotide
  Antisense strand to SEQ ID NO: 2557434
ucuucuacucagcaggcau

SEQ ID NO: 2557436 - RNA, 19 nt, Artificial Sequence
  Description of Artificial Sequence: Synthetic oligonucleotide
  Sense strand starting at position 3056 of SEQ ID NO: 1888798
ccuuguugugcagguaaag

SEQ ID NO: 2557437 - RNA, 19 nt, Artificial Sequence
  Description of Artificial Sequence: Synthetic oligonucleotide
  Antisense strand to SEQ ID NO: 2557436
cuuuaccugcacaacaagg

SEQ ID NO: 2557438 - RNA, 19 nt, Artificial Sequence
  Description of Artificial Sequence: Synthetic oligonucleotide
  Sense strand starting at position 3084 of SEQ ID NO: 1888798
ggaagaguguuuccuccuc

SEQ ID NO: 2557439 - RNA, 19 nt, Artificial Sequence
  Description of Artificial Sequence: Synthetic oligonucleotide
  Antisense strand to SEQ ID NO: 2557438
gaggaggaaacacucuucc

SEQ ID NO: 2557440 - RNA, 19 nt, Artificial Sequence
  Description of Artificial Sequence: Synthetic oligonucleotide
  Sense strand starting at position 3168 of SEQ ID NO: 1888798
ucaguuacaucaguuccua

SEQ ID NO: 2557441 - RNA, 19 nt, Artificial Sequence
  Description of Artificial Sequence: Synthetic oligonucleotide
  Antisense strand to SEQ ID NO: 2557440
uaggaacugauguaacuga

SEQ ID NO: 2557442 - RNA, 19 nt, Artificial Sequence
  Description of Artificial Sequence: Synthetic oligonucleotide
  Sense strand starting at position 3361 of SEQ ID NO: 1888798
caaggaaccugguuaucuu

SEQ ID NO: 2557443 - RNA, 19 nt, Artificial Sequence
  Description of Artificial Sequence: Synthetic oligonucleotide
  Antisense strand to SEQ ID NO: 2557442
aagauaaccagguuccuug

SEQ ID NO: 2557444 - RNA, 19 nt, Artificial Sequence
  Description of Artificial Sequence: Synthetic oligonucleotide
  Sense strand starting at position 3371 of SEQ ID NO: 1888798
gguuaucuuuggucacuca

SEQ ID NO: 2557445 - RNA, 19 nt, Artificial Sequence
  Description of Artificial Sequence: Synthetic oligonucleotide
  Antisense strand to SEQ ID NO: 2557444
ugagugaccaaagauaacc

SEQ ID NO: 2557446 - RNA, 19 nt, Artificial Sequence
  Description of Artificial Sequence: Synthetic oligonucleotide
  Sense strand starting at position 3372 of SEQ ID NO: 1888798
guuaucuuuggucacucau

SEQ ID NO: 2557447 - RNA, 19 nt, Artificial Sequence
  Description of Artificial Sequence: Synthetic oligonucleotide
  Antisense strand to SEQ ID NO: 2557446
augagugaccaaagauaac

SEQ ID NO: 2557448 - RNA, 19 nt, Artificial Sequence
  Description of Artificial Sequence: Synthetic oligonucleotide
  Sense strand starting at position 3378 of SEQ ID NO: 1888798
uuuggucacucaucagaag

SEQ ID NO: 2557449 - RNA, 19 nt, Artificial Sequence
  Description of Artificial Sequence: Synthetic oligonucleotide
  Antisense strand to SEQ ID NO: 2557448
cuucugaugagugaccaaa

SEQ ID NO: 2557450 - RNA, 19 nt, Artificial Sequence
  Description of Artificial Sequence: Synthetic oligonucleotide
  Sense strand starting at position 3414 of SEQ ID NO: 1888798
gccacaagugugugaggaa

SEQ ID NO: 2557451 - RNA, 19 nt, Artificial Sequence
  Description of Artificial Sequence: Synthetic oligonucleotide
  Antisense strand to SEQ ID NO: 2557450
uuccucacacacuuguggc

SEQ ID NO: 2557452 - RNA, 19 nt, Artificial Sequence
  Description of Artificial Sequence: Synthetic oligonucleotide
  Sense strand starting at position 3464 of SEQ ID NO: 1888798
acgggugagucuuugugga

SEQ ID NO: 2557453 - RNA, 19 nt, Artificial Sequence
  Description of Artificial Sequence: Synthetic oligonucleotide
  Antisense strand to SEQ ID NO: 2557452
uccacaaagacucacccgu

SEQ ID NO: 2557454 - RNA, 19 nt, Artificial Sequence
  Description of Artificial Sequence: Synthetic oligonucleotide
  Sense strand starting at position 3465 of SEQ ID NO: 1888798
cgggugagucuuuguggaa

SEQ ID NO: 2557455 - RNA, 19 nt, Artificial Sequence
  Description of Artificial Sequence: Synthetic oligonucleotide
  Antisense strand to SEQ ID NO: 2557454
uuccacaaagacucacccg

SEQ ID NO: 2557456 - RNA, 19 nt, Artificial Sequence
  Description of Artificial Sequence: Synthetic oligonucleotide
  Sense strand starting at position 3466 of SEQ ID NO: 1888798
gggugagucuuuguggaaa

SEQ ID NO: 2557457 - RNA, 19 nt, Artificial Sequence
  Description of Artificial Sequence: Synthetic oligonucleotide
  Antisense strand to SEQ ID NO: 2557456
uuuccacaaagacucaccc

SEQ ID NO: 2557458 - RNA, 19 nt, Artificial Sequence
  Description of Artificial Sequence: Synthetic oligonucleotide
  Sense strand starting at position 3469 of SEQ ID NO: 1888798
ugagucuuuguggaaaguc

SEQ ID NO: 2557459 - RNA, 19 nt, Artificial Sequence
  Description of Artificial Sequence: Synthetic oligonucleotide
  Antisense strand to SEQ ID NO: 2557458
gacuuuccacaaagacuca

SEQ ID NO: 2557460 - RNA, 19 nt, Artificial Sequence
  Description of Artificial Sequence: Synthetic oligonucleotide
  Sense strand starting at position 3483 of SEQ ID NO: 1888798
aagucauuugcuggcagau

SEQ ID NO: 2557461 - RNA, 19 nt, Artificial Sequence
  Description of Artificial Sequence: Synthetic oligonucleotide
  Antisense strand to SEQ ID NO: 2557460
aucugccagcaaaugacuu

SEQ ID NO: 2557462 - RNA, 19 nt, Artificial Sequence
  Description of Artificial Sequence: Synthetic oligonucleotide
  Sense strand starting at position 3495 of SEQ ID NO: 1888798
ggcagauaucagcaucuua

SEQ ID NO: 2557463 - RNA, 19 nt, Artificial Sequence
  Description of Artificial Sequence: Synthetic oligonucleotide
  Antisense strand to SEQ ID NO: 2557462
uaagaugcugauaucugcc

SEQ ID NO: 2557464 - RNA, 19 nt, Artificial Sequence
  Description of Artificial Sequence: Synthetic oligonucleotide
  Sense strand starting at position 3557 of SEQ ID NO: 1888798
ucacacagcgaguguuaga

SEQ ID NO: 2557465 - RNA, 19 nt, Artificial Sequence
  Description of Artificial Sequence: Synthetic oligonucleotide
  Antisense strand to SEQ ID NO: 2557464
ucuaacacucgcuguguga

SEQ ID NO: 2557466 - RNA, 19 nt, Artificial Sequence
  Description of Artificial Sequence: Synthetic oligonucleotide
  Sense strand starting at position 3566 of SEQ ID NO: 1888798
gaguguuagaaguaauguc

SEQ ID NO: 2557467 - RNA, 19 nt, Artificial Sequence
  Description of Artificial Sequence: Synthetic oligonucleotide
  Antisense strand to SEQ ID NO: 2557466
gacauuacuucuaacacuc

SEQ ID NO: 2557468 - RNA, 19 nt, Artificial Sequence
  Description of Artificial Sequence: Synthetic oligonucleotide
  Sense strand starting at position 3602 of SEQ ID NO: 1888798
ugggaagcaacuuguaacu

SEQ ID NO: 2557469 - RNA, 19 nt, Artificial Sequence
  Description of Artificial Sequence: Synthetic oligonucleotide
  Antisense strand to SEQ ID NO: 2557468
aguuacaaguugcuuccca

SEQ ID NO: 2557470 - RNA, 19 nt, Artificial Sequence
  Description of Artificial Sequence: Synthetic oligonucleotide
  Sense strand starting at position 3612 of SEQ ID NO: 1888798
cuuguaacucuccaucagu

SEQ ID NO: 2557471 - RNA, 19 nt, Artificial Sequence
  Description of Artificial Sequence: Synthetic oligonucleotide
  Antisense strand to SEQ ID NO: 2557470
acugauggagaguuacaag

SEQ ID NO: 2557472 - RNA, 19 nt, Artificial Sequence
  Description of Artificial Sequence: Synthetic oligonucleotide
  Sense strand starting at position 3705 of SEQ ID NO: 1888798
aagauugucagguggaaag

SEQ ID NO: 2557473 - RNA, 19 nt, Artificial Sequence
  Description of Artificial Sequence: Synthetic oligonucleotide
  Antisense strand to SEQ ID NO: 2557472
cuuuccaccugacaaucuu

SEQ ID NO: 2557474 - RNA, 19 nt, Artificial Sequence
  Description of Artificial Sequence: Synthetic oligonucleotide
  Sense strand starting at position 3720 of SEQ ID NO: 1888798
aaagaaugggcuugaugug

SEQ ID NO: 2557475 - RNA, 19 nt, Artificial Sequence
  Description of Artificial Sequence: Synthetic oligonucleotide
  Antisense strand to SEQ ID NO: 2557474
cacaucaagcccauucuuu

SEQ ID NO: 2557476 - RNA, 19 nt, Artificial Sequence
  Description of Artificial Sequence: Synthetic oligonucleotide
  Sense strand starting at position 3735 of SEQ ID NO: 1888798
ugugcugucaaauggcaaa

SEQ ID NO: 2557477 - RNA, 19 nt, Artificial Sequence
  Description of Artificial Sequence: Synthetic oligonucleotide
  Antisense strand to SEQ ID NO: 2557476
uuugccauuugacagcaca

SEQ ID NO: 2557478 - RNA, 19 nt, Artificial Sequence
  Description of Artificial Sequence: Synthetic oligonucleotide
  Sense strand starting at position 3770 of SEQ ID NO: 1888798
ugcagauguguugggaaca

SEQ ID NO: 2557479 - RNA, 19 nt, Artificial Sequence
  Description of Artificial Sequence: Synthetic oligonucleotide
  Antisense strand to SEQ ID NO: 2557478
uguucccaacacaucugca

SEQ ID NO: 2557480 - RNA, 19 nt, Artificial Sequence
  Description of Artificial Sequence: Synthetic oligonucleotide
  Sense strand starting at position 3789 of SEQ ID NO: 1888798
gcaguuugccaagauggcu

SEQ ID NO: 2557481 - RNA, 19 nt, Artificial Sequence
  Description of Artificial Sequence: Synthetic oligonucleotide
  Antisense strand to SEQ ID NO: 2557480
agccaucuuggcaaacugc

SEQ ID NO: 2557482 - RNA, 19 nt, Artificial Sequence
  Description of Artificial Sequence: Synthetic oligonucleotide
  Sense strand starting at position 3795 of SEQ ID NO: 1888798
ugccaagauggcugaaaca

SEQ ID NO: 2557483 - RNA, 19 nt, Artificial Sequence
  Description of Artificial Sequence: Synthetic oligonucleotide
  Antisense strand to SEQ ID NO: 2557482
uguuucagccaucuuggca

SEQ ID NO: 2557484 - RNA, 19 nt, Artificial Sequence
  Description of Artificial Sequence: Synthetic oligonucleotide
  Sense strand starting at position 3912 of SEQ ID NO: 1888798
uucugugggcugugaaaga

SEQ ID NO: 2557485 - RNA, 19 nt, Artificial Sequence
  Description of Artificial Sequence: Synthetic oligonucleotide
  Antisense strand to SEQ ID NO: 2557484
ucuuucacagcccacagaa

SEQ ID NO: 2557486 - RNA, 19 nt, Artificial Sequence
  Description of Artificial Sequence: Synthetic oligonucleotide
  Sense strand starting at position 3972 of SEQ ID NO: 1888798
cggcaaucuuuggcacuca

SEQ ID NO: 2557487 - RNA, 19 nt, Artificial Sequence
  Description of Artificial Sequence: Synthetic oligonucleotide
  Antisense strand to SEQ ID NO: 2557486
ugagugccaaagauugccg

SEQ ID NO: 2557488 - RNA, 19 nt, Artificial Sequence
  Description of Artificial Sequence: Synthetic oligonucleotide
  Sense strand starting at position 148 of SEQ ID NO: 1888799
cuuggcuuugcucauuaga

SEQ ID NO: 2557489 - RNA, 19 nt, Artificial Sequence
  Description of Artificial Sequence: Synthetic oligonucleotide
  Antisense strand to SEQ ID NO: 2557488
ucuaaugagcaaagccaag

SEQ ID NO: 2557490 - RNA, 19 nt, Artificial Sequence
  Description of Artificial Sequence: Synthetic oligonucleotide
  Sense strand starting at position 151 of SEQ ID NO: 1888799
ggcuuugcucauuagauaa

SEQ ID NO: 2557491 - RNA, 19 nt, Artificial Sequence
  Description of Artificial Sequence: Synthetic oligonucleotide
  Antisense strand to SEQ ID NO: 2557490
uuaucuaaugagcaaagcc

SEQ ID NO: 2557492 - RNA, 19 nt, Artificial Sequence
  Description of Artificial Sequence: Synthetic oligonucleotide
  Sense strand starting at position 236 of SEQ ID NO: 1888799
gggagauggugguccauaa

SEQ ID NO: 2557493 - RNA, 19 nt, Artificial Sequence
  Description of Artificial Sequence: Synthetic oligonucleotide
  Antisense strand to SEQ ID NO: 2557492
uuauggaccaccaucuccc

SEQ ID NO: 2557494 - RNA, 19 nt, Artificial Sequence
  Description of Artificial Sequence: Synthetic oligonucleotide
  Sense strand starting at position 772 of SEQ ID NO: 1888799
ggccaagugcuguaagaga

SEQ ID NO: 2557495 - RNA, 19 nt, Artificial Sequence
  Description of Artificial Sequence: Synthetic oligonucleotide
  Antisense strand to SEQ ID NO: 2557494
ucucuuacagcacuuggcc

SEQ ID NO: 2557496 - RNA, 19 nt, Artificial Sequence
  Description of Artificial Sequence: Synthetic oligonucleotide
  Sense strand starting at position 834 of SEQ ID NO: 1888799
cuucucaaaucaccgagaa

SEQ ID NO: 2557497 - RNA, 19 nt, Artificial Sequence
  Description of Artificial Sequence: Synthetic oligonucleotide
  Antisense strand to SEQ ID NO: 2557496
uucucggugauuugagaag

SEQ ID NO: 2557498 - RNA, 19 nt, Artificial Sequence
  Description of Artificial Sequence: Synthetic oligonucleotide
  Sense strand starting at position 835 of SEQ ID NO: 1888799
uucucaaaucaccgagaaa

SEQ ID NO: 2557499 - RNA, 19 nt, Artificial Sequence
  Description of Artificial Sequence: Synthetic oligonucleotide
  Antisense strand to SEQ ID NO: 2557498
uuucucggugauuugagaa

SEQ ID NO: 2557500 - RNA, 19 nt, Artificial Sequence
  Description of Artificial Sequence: Synthetic oligonucleotide
  Sense strand starting at position 906 of SEQ ID NO: 1888799
uagaauauuguggagguuu

SEQ ID NO: 2557501 - RNA, 19 nt, Artificial Sequence
  Description of Artificial Sequence: Synthetic oligonucleotide
  Antisense strand to SEQ ID NO: 2557500
aaaccuccacaauauucua

SEQ ID NO: 2557502 - RNA, 19 nt, Artificial Sequence
  Description of Artificial Sequence: Synthetic oligonucleotide
  Sense strand starting at position 928 of SEQ ID NO: 1888799
gggcaacuuugaccaaaga

SEQ ID NO: 2557503 - RNA, 19 nt, Artificial Sequence
  Description of Artificial Sequence: Synthetic oligonucleotide
  Antisense strand to SEQ ID NO: 2557502
ucuuuggucaaaguugccc

SEQ ID NO: 2557504 - RNA, 19 nt, Artificial Sequence
  Description of Artificial Sequence: Synthetic oligonucleotide
  Sense strand starting at position 1282 of SEQ ID NO: 1888799
acgugcuuucaggcguuau

SEQ ID NO: 2557505 - RNA, 19 nt, Artificial Sequence
  Description of Artificial Sequence: Synthetic oligonucleotide
  Antisense strand to SEQ ID NO: 2557504
auaacgccugaaagcacgu

SEQ ID NO: 2557506 - RNA, 19 nt, Artificial Sequence
  Description of Artificial Sequence: Synthetic oligonucleotide
  Sense strand starting at position 1284 of SEQ ID NO: 1888799
gugcuuucaggcguuaucu

SEQ ID NO: 2557507 - RNA, 19 nt, Artificial Sequence
  Description of Artificial Sequence: Synthetic oligonucleotide
  Antisense strand to SEQ ID NO: 2557506
agauaacgccugaaagcac

SEQ ID NO: 2557508 - RNA, 19 nt, Artificial Sequence
  Description of Artificial Sequence: Synthetic oligonucleotide
  Sense strand starting at position 1307 of SEQ ID NO: 1888799
cugauucuacuggagcuau

SEQ ID NO: 2557509 - RNA, 19 nt, Artificial Sequence
  Description of Artificial Sequence: Synthetic oligonucleotide
  Antisense strand to SEQ ID NO: 2557508
auagcuccaguagaaucag

SEQ ID NO: 2557510 - RNA, 19 nt, Artificial Sequence
  Description of Artificial Sequence: Synthetic oligonucleotide
  Sense strand starting at position 1337 of SEQ ID NO: 1888799
uaaguuguaggucacugau

SEQ ID NO: 2557511 - RNA, 19 nt, Artificial Sequence
  Description of Artificial Sequence: Synthetic oligonucleotide
  Antisense strand to SEQ ID NO: 2557510
aucagugaccuacaacuua

SEQ ID NO: 2557512 - RNA, 19 nt, Artificial Sequence
  Description of Artificial Sequence: Synthetic oligonucleotide
  Sense strand starting at position 1339 of SEQ ID NO: 1888799
aguuguaggucacugauag

SEQ ID NO: 2557513 - RNA, 19 nt, Artificial Sequence
  Description of Artificial Sequence: Synthetic oligonucleotide
  Antisense strand to SEQ ID NO: 2557512
cuaucagugaccuacaacu

SEQ ID NO: 2557514 - RNA, 19 nt, Artificial Sequence
  Description of Artificial Sequence: Synthetic oligonucleotide
  Sense strand starting at position 1340 of SEQ ID NO: 1888799
guuguaggucacugauaga

SEQ ID NO: 2557515 - RNA, 19 nt, Artificial Sequence
  Description of Artificial Sequence: Synthetic oligonucleotide
  Antisense strand to SEQ ID NO: 2557514
ucuaucagugaccuacaac

SEQ ID NO: 2557516 - RNA, 19 nt, Artificial Sequence
  Description of Artificial Sequence: Synthetic oligonucleotide
  Sense strand starting at position 1583 of SEQ ID NO: 1888799
uuuauaucuguauaacggu

SEQ ID NO: 2557517 - RNA, 19 nt, Artificial Sequence
  Description of Artificial Sequence: Synthetic oligonucleotide
  Antisense strand to SEQ ID NO: 2557516
accguuauacagauauaaa

SEQ ID NO: 2557518 - RNA, 19 nt, Artificial Sequence
  Description of Artificial Sequence: Synthetic oligonucleotide
  Sense strand starting at position 1685 of SEQ ID NO: 1888799
ggaggaccuucagucuaga

SEQ ID NO: 2557519 - RNA, 19 nt, Artificial Sequence
  Description of Artificial Sequence: Synthetic oligonucleotide
  Antisense strand to SEQ ID NO: 2557518
ucuagacugaagguccucc

SEQ ID NO: 2557520 - RNA, 19 nt, Artificial Sequence
  Description of Artificial Sequence: Synthetic oligonucleotide
  Sense strand starting at position 1723 of SEQ ID NO: 1888799
uccggucuauagguaaaga

SEQ ID NO: 2557521 - RNA, 19 nt, Artificial Sequence
  Description of Artificial Sequence: Synthetic oligonucleotide
  Antisense strand to SEQ ID NO: 2557520
ucuuuaccuauagaccgga

SEQ ID NO: 2557522 - RNA, 19 nt, Artificial Sequence
  Description of Artificial Sequence: Synthetic oligonucleotide
  Sense strand starting at position 1757 of SEQ ID NO: 1888799
agagcugugcuccacagaa

SEQ ID NO: 2557523 - RNA, 19 nt, Artificial Sequence
  Description of Artificial Sequence: Synthetic oligonucleotide
  Antisense strand to SEQ ID NO: 2557522
uucuguggagcacagcucu

SEQ ID NO: 2557524 - RNA, 19 nt, Artificial Sequence
  Description of Artificial Sequence: Synthetic oligonucleotide
  Sense strand starting at position 1759 of SEQ ID NO: 1888799
agcugugcuccacagaaga

SEQ ID NO: 2557525 - RNA, 19 nt, Artificial Sequence
  Description of Artificial Sequence: Synthetic oligonucleotide
  Antisense strand to SEQ ID NO: 2557524
ucuucuguggagcacagcu

SEQ ID NO: 2557526 - RNA, 19 nt, Artificial Sequence
  Description of Artificial Sequence: Synthetic oligonucleotide
  Sense strand starting at position 1786 of SEQ ID NO: 1888799
ggcucuucgaaagggacau

SEQ ID NO: 2557527 - RNA, 19 nt, Artificial Sequence
  Description of Artificial Sequence: Synthetic oligonucleotide
  Antisense strand to SEQ ID NO: 2557526
augucccuuucgaagagcc

SEQ ID NO: 2557528 - RNA, 19 nt, Artificial Sequence
  Description of Artificial Sequence: Synthetic oligonucleotide
  Sense strand starting at position 2028 of SEQ ID NO: 1888799
acacaaugaucaguggcau

SEQ ID NO: 2557529 - RNA, 19 nt, Artificial Sequence
  Description of Artificial Sequence: Synthetic oligonucleotide
  Antisense strand to SEQ ID NO: 2557528
augccacugaucauugugu

SEQ ID NO: 2557530 - RNA, 19 nt, Artificial Sequence
  Description of Artificial Sequence: Synthetic oligonucleotide
  Sense strand starting at position 2029 of SEQ ID NO: 1888799
cacaaugaucaguggcauu

SEQ ID NO: 2557531 - RNA, 19 nt, Artificial Sequence
  Description of Artificial Sequence: Synthetic oligonucleotide
  Antisense strand to SEQ ID NO: 2557530
aaugccacugaucauugug

SEQ ID NO: 2557532 - RNA, 19 nt, Artificial Sequence
  Description of Artificial Sequence: Synthetic oligonucleotide
  Sense strand starting at position 2168 of SEQ ID NO: 1888799
auguaaauccucugccaag

SEQ ID NO: 2557533 - RNA, 19 nt, Artificial Sequence
  Description of Artificial Sequence: Synthetic oligonucleotide
  Antisense strand to SEQ ID NO: 2557532
cuuggcagaggauuuacau

SEQ ID NO: 2557534 - RNA, 19 nt, Artificial Sequence
  Description of Artificial Sequence: Synthetic oligonucleotide
  Sense strand starting at position 2288 of SEQ ID NO: 1888799
guaagaaugcgguaacaaa

SEQ ID NO: 2557535 - RNA, 19 nt, Artificial Sequence
  Description of Artificial Sequence: Synthetic oligonucleotide
  Antisense strand to SEQ ID NO: 2557534
uuuguuaccgcauucuuac

SEQ ID NO: 2557536 - RNA, 19 nt, Artificial Sequence
  Description of Artificial Sequence: Synthetic oligonucleotide
  Sense strand starting at position 2334 of SEQ ID NO: 1888799
ugaggaggcuuccuuugaa

SEQ ID NO: 2557537 - RNA, 19 nt, Artificial Sequence
  Description of Artificial Sequence: Synthetic oligonucleotide
  Antisense strand to SEQ ID NO: 2557536
uucaaaggaagccuccuca

SEQ ID NO: 2557538 - RNA, 19 nt, Artificial Sequence
  Description of Artificial Sequence: Synthetic oligonucleotide
  Sense strand starting at position 2337 of SEQ ID NO: 1888799
ggaggcuuccuuugaagug

SEQ ID NO: 2557539 - RNA, 19 nt, Artificial Sequence
  Description of Artificial Sequence: Synthetic oligonucleotide
  Antisense strand to SEQ ID NO: 2557538
cacuucaaaggaagccucc

SEQ ID NO: 2557540 - RNA, 19 nt, Artificial Sequence
  Description of Artificial Sequence: Synthetic oligonucleotide
  Sense strand starting at position 2466 of SEQ ID NO: 1888799
cuaagaaguuucuuagagc

SEQ ID NO: 2557541 - RNA, 19 nt, Artificial Sequence
  Description of Artificial Sequence: Synthetic oligonucleotide
  Antisense strand to SEQ ID NO: 2557540
gcucuaagaaacuucuuag

SEQ ID NO: 2557542 - RNA, 19 nt, Artificial Sequence
  Description of Artificial Sequence: Synthetic oligonucleotide
  Sense strand starting at position 2472 of SEQ ID NO: 1888799
aguuucuuagagcaugcau

SEQ ID NO: 2557543 - RNA, 19 nt, Artificial Sequence
  Description of Artificial Sequence: Synthetic oligonucleotide
  Antisense strand to SEQ ID NO: 2557542
augcaugcucuaagaaacu

SEQ ID NO: 2557544 - RNA, 19 nt, Artificial Sequence
  Description of Artificial Sequence: Synthetic oligonucleotide
  Sense strand starting at position 2683 of SEQ ID NO: 1888799
auacuugaucccugagaau

SEQ ID NO: 2557545 - RNA, 19 nt, Artificial Sequence
  Description of Artificial Sequence: Synthetic oligonucleotide
  Antisense strand to SEQ ID NO: 2557544
auucucagggaucaaguau

SEQ ID NO: 2557546 - RNA, 19 nt, Artificial Sequence
  Description of Artificial Sequence: Synthetic oligonucleotide
  Sense strand starting at position 3124 of SEQ ID NO: 1888799
ucugguauauuugcuuuau

SEQ ID NO: 2557547 - RNA, 19 nt, Artificial Sequence
  Description of Artificial Sequence: Synthetic oligonucleotide
  Antisense strand to SEQ ID NO: 2557546
auaaagcaaauauaccaga

SEQ ID NO: 2557548 - RNA, 19 nt, Artificial Sequence
  Description of Artificial Sequence: Synthetic oligonucleotide
  Sense strand starting at position 3126 of SEQ ID NO: 1888799
ugguauauuugcuuuaucu

SEQ ID NO: 2557549 - RNA, 19 nt, Artificial Sequence
  Description of Artificial Sequence: Synthetic oligonucleotide
  Antisense strand to SEQ ID NO: 2557548
agauaaagcaaauauacca

SEQ ID NO: 2557550 - RNA, 19 nt, Artificial Sequence
  Description of Artificial Sequence: Synthetic oligonucleotide
  Sense strand starting at position 3475 of SEQ ID NO: 1888799
uuggaauagucccucuacu

SEQ ID NO: 2557551 - RNA, 19 nt, Artificial Sequence
  Description of Artificial Sequence: Synthetic oligonucleotide
  Antisense strand to SEQ ID NO: 2557550
aguagagggacuauuccaa

SEQ ID NO: 2557552 - RNA, 19 nt, Artificial Sequence
  Description of Artificial Sequence: Synthetic oligonucleotide
  Sense strand starting at position 3687 of SEQ ID NO: 1888799
uggaaauagucacuguaga

SEQ ID NO: 2557553 - RNA, 19 nt, Artificial Sequence
  Description of Artificial Sequence: Synthetic oligonucleotide
  Antisense strand to SEQ ID NO: 2557552
ucuacagugacuauuucca

SEQ ID NO: 2557554 - RNA, 19 nt, Artificial Sequence
  Description of Artificial Sequence: Synthetic oligonucleotide
  Sense strand starting at position 3688 of SEQ ID NO: 1888799
ggaaauagucacuguagac

SEQ ID NO: 2557555 - RNA, 19 nt, Artificial Sequence
  Description of Artificial Sequence: Synthetic oligonucleotide
  Antisense strand to SEQ ID NO: 2557554
gucuacagugacuauuucc

SEQ ID NO: 2557556 - RNA, 19 nt, Artificial Sequence
  Description of Artificial Sequence: Synthetic oligonucleotide
  Sense strand starting at position 3798 of SEQ ID NO: 1888799
uggagauagacaugcacau

SEQ ID NO: 2557557 - RNA, 19 nt, Artificial Sequence
  Description of Artificial Sequence: Synthetic oligonucleotide
  Antisense strand to SEQ ID NO: 2557556
augugcaugucuaucucca

SEQ ID NO: 2557558 - RNA, 19 nt, Artificial Sequence
  Description of Artificial Sequence: Synthetic oligonucleotide
  Sense strand starting at position 3822 of SEQ ID NO: 1888799
gggaaugcccuguggacau

SEQ ID NO: 2557559 - RNA, 19 nt, Artificial Sequence
  Description of Artificial Sequence: Synthetic oligonucleotide
  Antisense strand to SEQ ID NO: 2557558
auguccacagggcauuccc

SEQ ID NO: 2557560 - RNA, 19 nt, Artificial Sequence
  Description of Artificial Sequence: Synthetic oligonucleotide
  Sense strand starting at position 3857 of SEQ ID NO: 1888799
gugacacuucuacauguca

SEQ ID NO: 2557561 - RNA, 19 nt, Artificial Sequence
  Description of Artificial Sequence: Synthetic oligonucleotide
  Antisense strand to SEQ ID NO: 2557560
ugacauguagaagugucac

SEQ ID NO: 2557562 - RNA, 19 nt, Artificial Sequence
  Description of Artificial Sequence: Synthetic oligonucleotide
  Sense strand starting at position 3865 of SEQ ID NO: 1888799
ucuacaugucaaggaaugu

SEQ ID NO: 2557563 - RNA, 19 nt, Artificial Sequence
  Description of Artificial Sequence: Synthetic oligonucleotide
  Antisense strand to SEQ ID NO: 2557562
acauuccuugacauguaga

SEQ ID NO: 2557564 - RNA, 19 nt, Artificial Sequence
  Description of Artificial Sequence: Synthetic oligonucleotide
  Sense strand starting at position 3869 of SEQ ID NO: 1888799
caugucaaggaaugugaaa

SEQ ID NO: 2557565 - RNA, 19 nt, Artificial Sequence
  Description of Artificial Sequence: Synthetic oligonucleotide
  Antisense strand to SEQ ID NO: 2557564
uuucacauuccuugacaug

SEQ ID NO: 2557566 - RNA, 19 nt, Artificial Sequence
  Description of Artificial Sequence: Synthetic oligonucleotide
  Sense strand starting at position 3881 of SEQ ID NO: 1888799
ugugaaagauugcuagcaa

SEQ ID NO: 2557567 - RNA, 19 nt, Artificial Sequence
  Description of Artificial Sequence: Synthetic oligonucleotide
  Antisense strand to SEQ ID NO: 2557566
uugcuagcaaucuuucaca

SEQ ID NO: 2557568 - RNA, 19 nt, Artificial Sequence
  Description of Artificial Sequence: Synthetic oligonucleotide
  Sense strand starting at position 72 of SEQ ID NO: 1888800
ccaagauuacauggcuaga

SEQ ID NO: 2557569 - RNA, 19 nt, Artificial Sequence
  Description of Artificial Sequence: Synthetic oligonucleotide
  Antisense strand to SEQ ID NO: 2557568
ucuagccauguaaucuugg

SEQ ID NO: 2557570 - RNA, 19 nt, Artificial Sequence
  Description of Artificial Sequence: Synthetic oligonucleotide
  Sense strand starting at position 247 of SEQ ID NO: 1888800
uuccgaggacucugggauu

SEQ ID NO: 2557571 - RNA, 19 nt, Artificial Sequence
  Description of Artificial Sequence: Synthetic oligonucleotide
  Antisense strand to SEQ ID NO: 2557570
aaucccagaguccucggaa

SEQ ID NO: 2557572 - RNA, 19 nt, Artificial Sequence
  Description of Artificial Sequence: Synthetic oligonucleotide
  Sense strand starting at position 363 of SEQ ID NO: 1888800
gcuggauaagcucauggga

SEQ ID NO: 2557573 - RNA, 19 nt, Artificial Sequence
  Description of Artificial Sequence: Synthetic oligonucleotide
  Antisense strand to SEQ ID NO: 2557572
ucccaugagcuuauccagc

SEQ ID NO: 2557574 - RNA, 19 nt, Artificial Sequence
  Description of Artificial Sequence: Synthetic oligonucleotide
  Sense strand starting at position 384 of SEQ ID NO: 1888800
agguaaggcugagauuuca

SEQ ID NO: 2557575 - RNA, 19 nt, Artificial Sequence
  Description of Artificial Sequence: Synthetic oligonucleotide
  Antisense strand to SEQ ID NO: 2557574
ugaaaucucagccuuaccu

SEQ ID NO: 2557576 - RNA, 19 nt, Artificial Sequence
  Description of Artificial Sequence: Synthetic oligonucleotide
  Sense strand starting at position 410 of SEQ ID NO: 1888800
gggccugaaacuggacauu

SEQ ID NO: 2557577 - RNA, 19 nt, Artificial Sequence
  Description of Artificial Sequence: Synthetic oligonucleotide
  Antisense strand to SEQ ID NO: 2557576
aauguccaguuucaggccc

SEQ ID NO: 2557578 - RNA, 19 nt, Artificial Sequence
  Description of Artificial Sequence: Synthetic oligonucleotide
  Sense strand starting at position 419 of SEQ ID NO: 1888800
acuggacauuucuagaugu

SEQ ID NO: 2557579 - RNA, 19 nt, Artificial Sequence
  Description of Artificial Sequence: Synthetic oligonucleotide
  Antisense strand to SEQ ID NO: 2557578
acaucuagaaauguccagu

SEQ ID NO: 2557580 - RNA, 19 nt, Artificial Sequence
  Description of Artificial Sequence: Synthetic oligonucleotide
  Sense strand starting at position 448 of SEQ ID NO: 1888800
uggcuuggaugacuaagua

SEQ ID NO: 2557581 - RNA, 19 nt, Artificial Sequence
  Description of Artificial Sequence: Synthetic oligonucleotide
  Antisense strand to SEQ ID NO: 2557580
uacuuagucauccaagcca

SEQ ID NO: 2557582 - RNA, 19 nt, Artificial Sequence
  Description of Artificial Sequence: Synthetic oligonucleotide
  Sense strand starting at position 456 of SEQ ID NO: 1888800
augacuaaguauucguaaa

SEQ ID NO: 2557583 - RNA, 19 nt, Artificial Sequence
  Description of Artificial Sequence: Synthetic oligonucleotide
  Antisense strand to SEQ ID NO: 2557582
uuuacgaauacuuagucau

SEQ ID NO: 2557584 - RNA, 19 nt, Artificial Sequence
  Description of Artificial Sequence: Synthetic oligonucleotide
  Sense strand starting at position 457 of SEQ ID NO: 1888800
ugacuaaguauucguaaag

SEQ ID NO: 2557585 - RNA, 19 nt, Artificial Sequence
  Description of Artificial Sequence: Synthetic oligonucleotide
  Antisense strand to SEQ ID NO: 2557584
cuuuacgaauacuuaguca

SEQ ID NO: 2557586 - RNA, 19 nt, Artificial Sequence
  Description of Artificial Sequence: Synthetic oligonucleotide
  Sense strand starting at position 458 of SEQ ID NO: 1888800
gacuaaguauucguaaaga

SEQ ID NO: 2557587 - RNA, 19 nt, Artificial Sequence
  Description of Artificial Sequence: Synthetic oligonucleotide
  Antisense strand to SEQ ID NO: 2557586
ucuuuacgaauacuuaguc

SEQ ID NO: 2557588 - RNA, 19 nt, Artificial Sequence
  Description of Artificial Sequence: Synthetic oligonucleotide
  Sense strand starting at position 493 of SEQ ID NO: 1888800
gcaggucuggugaguguuu

SEQ ID NO: 2557589 - RNA, 19 nt, Artificial Sequence
  Description of Artificial Sequence: Synthetic oligonucleotide
  Antisense strand to SEQ ID NO: 2557588
aaacacucaccagaccugc

SEQ ID NO: 2557590 - RNA, 19 nt, Artificial Sequence
  Description of Artificial Sequence: Synthetic oligonucleotide
  Sense strand starting at position 633 of SEQ ID NO: 1888800
ugaagauagcucugcuuug

SEQ ID NO: 2557591 - RNA, 19 nt, Artificial Sequence
  Description of Artificial Sequence: Synthetic oligonucleotide
  Antisense strand to SEQ ID NO: 2557590
caaagcagagcuaucuuca

SEQ ID NO: 2557592 - RNA, 19 nt, Artificial Sequence
  Description of Artificial Sequence: Synthetic oligonucleotide
  Sense strand starting at position 655 of SEQ ID NO: 1888800
agaauuguacagcaaagua

SEQ ID NO: 2557593 - RNA, 19 nt, Artificial Sequence
  Description of Artificial Sequence: Synthetic oligonucleotide
  Antisense strand to SEQ ID NO: 2557592
uacuuugcuguacaauucu

SEQ ID NO: 2557594 - RNA, 19 nt, Artificial Sequence
  Description of Artificial Sequence: Synthetic oligonucleotide
  Sense strand starting at position 715 of SEQ ID NO: 1888800
auacuaauaucagugguua

SEQ ID NO: 2557595 - RNA, 19 nt, Artificial Sequence
  Description of Artificial Sequence: Synthetic oligonucleotide
  Antisense strand to SEQ ID NO: 2557594
uaaccacugauauuaguau

SEQ ID NO: 2557596 - RNA, 19 nt, Artificial Sequence
  Description of Artificial Sequence: Synthetic oligonucleotide
  Sense strand starting at position 716 of SEQ ID NO: 1888800
uacuaauaucagugguuag

SEQ ID NO: 2557597 - RNA, 19 nt, Artificial Sequence
  Description of Artificial Sequence: Synthetic oligonucleotide
  Antisense strand to SEQ ID NO: 2557596
cuaaccacugauauuagua

SEQ ID NO: 2557598 - RNA, 19 nt, Artificial Sequence
  Description of Artificial Sequence: Synthetic oligonucleotide
  Sense strand starting at position 719 of SEQ ID NO: 1888800
uaauaucagugguuagcaa

SEQ ID NO: 2557599 - RNA, 19 nt, Artificial Sequence
  Description of Artificial Sequence: Synthetic oligonucleotide
  Antisense strand to SEQ ID NO: 2557598
uugcuaaccacugauauua

SEQ ID NO: 2557600 - RNA, 19 nt, Artificial Sequence
  Description of Artificial Sequence: Synthetic oligonucleotide
  Sense strand starting at position 720 of SEQ ID NO: 1888800
aauaucagugguuagcaaa

SEQ ID NO: 2557601 - RNA, 19 nt, Artificial Sequence
  Description of Artificial Sequence: Synthetic oligonucleotide
  Antisense strand to SEQ ID NO: 2557600
uuugcuaaccacugauauu

SEQ ID NO: 2557602 - RNA, 19 nt, Artificial Sequence
  Description of Artificial Sequence: Synthetic oligonucleotide
  Sense strand starting at position 874 of SEQ ID NO: 1888800
ccauucucccaguggagaa

SEQ ID NO: 2557603 - RNA, 19 nt, Artificial Sequence
  Description of Artificial Sequence: Synthetic oligonucleotide
  Antisense strand to SEQ ID NO: 2557602
uucuccacugggagaaugg

SEQ ID NO: 2557604 - RNA, 19 nt, Artificial Sequence
  Description of Artificial Sequence: Synthetic oligonucleotide
  Sense strand starting at position 1110 of SEQ ID NO: 1888800
gugcuuccauauguauuua

SEQ ID NO: 2557605 - RNA, 19 nt, Artificial Sequence
  Description of Artificial Sequence: Synthetic oligonucleotide
  Antisense strand to SEQ ID NO: 2557604
uaaauacauauggaagcac

SEQ ID NO: 2557606 - RNA, 19 nt, Artificial Sequence
  Description of Artificial Sequence: Synthetic oligonucleotide
  Sense strand starting at position 1411 of SEQ ID NO: 1888800
gcggaauucgcaggagaag

SEQ ID NO: 2557607 - RNA, 19 nt, Artificial Sequence
  Description of Artificial Sequence: Synthetic oligonucleotide
  Antisense strand to SEQ ID NO: 2557606
cuucuccugcgaauuccgc

SEQ ID NO: 2557608 - RNA, 19 nt, Artificial Sequence
  Description of Artificial Sequence: Synthetic oligonucleotide
  Sense strand starting at position 1560 of SEQ ID NO: 1888800
ugaugccugcccuaagaga

SEQ ID NO: 2557609 - RNA, 19 nt, Artificial Sequence
  Description of Artificial Sequence: Synthetic oligonucleotide
  Antisense strand to SEQ ID NO: 2557608
ucucuuagggcaggcauca

SEQ ID NO: 2557610 - RNA, 19 nt, Artificial Sequence
  Description of Artificial Sequence: Synthetic oligonucleotide
  Sense strand starting at position 1681 of SEQ ID NO: 1888800
ccucuugagggcugagaua

SEQ ID NO: 2557611 - RNA, 19 nt, Artificial Sequence
  Description of Artificial Sequence: Synthetic oligonucleotide
  Antisense strand to SEQ ID NO: 2557610
uaucucagcccucaagagg

SEQ ID NO: 2557612 - RNA, 19 nt, Artificial Sequence
  Description of Artificial Sequence: Synthetic oligonucleotide
  Sense strand starting at position 2466 of SEQ ID NO: 1888800
cgcauaaaucaccagcuuu

SEQ ID NO: 2557613 - RNA, 19 nt, Artificial Sequence
  Description of Artificial Sequence: Synthetic oligonucleotide
  Antisense strand to SEQ ID NO: 2557612
aaagcuggugauuuaugcg

SEQ ID NO: 2557614 - RNA, 19 nt, Artificial Sequence
  Description of Artificial Sequence: Synthetic oligonucleotide
  Sense strand starting at position 2641 of SEQ ID NO: 1888800
ggaugaaugucccugacag

SEQ ID NO: 2557615 - RNA, 19 nt, Artificial Sequence
  Description of Artificial Sequence: Synthetic oligonucleotide
  Antisense strand to SEQ ID NO: 2557614
cugucagggacauucaucc

SEQ ID NO: 2557616 - RNA, 19 nt, Artificial Sequence
  Description of Artificial Sequence: Synthetic oligonucleotide
  Sense strand starting at position 2642 of SEQ ID NO: 1888800
gaugaaugucccugacagg

SEQ ID NO: 2557617 - RNA, 19 nt, Artificial Sequence
  Description of Artificial Sequence: Synthetic oligonucleotide
  Antisense strand to SEQ ID NO: 2557616
ccugucagggacauucauc

SEQ ID NO: 2557618 - RNA, 19 nt, Artificial Sequence
  Description of Artificial Sequence: Synthetic oligonucleotide
  Sense strand starting at position 2684 of SEQ ID NO: 1888800
gaaggaggcggguauucau

SEQ ID NO: 2557619 - RNA, 19 nt, Artificial Sequence
  Description of Artificial Sequence: Synthetic oligonucleotide
  Antisense strand to SEQ ID NO: 2557618
augaauacccgccuccuuc

SEQ ID NO: 2557620 - RNA, 19 nt, Artificial Sequence
  Description of Artificial Sequence: Synthetic oligonucleotide
  Sense strand starting at position 2794 of SEQ ID NO: 1888800
aagagaugaugacacugaa

SEQ ID NO: 2557621 - RNA, 19 nt, Artificial Sequence
  Description of Artificial Sequence: Synthetic oligonucleotide
  Antisense strand to SEQ ID NO: 2557620
uucagugucaucaucucuu

SEQ ID NO: 2557622 - RNA, 19 nt, Artificial Sequence
  Description of Artificial Sequence: Synthetic oligonucleotide
  Sense strand starting at position 2940 of SEQ ID NO: 1888800
uuccuuggguacuugagau

SEQ ID NO: 2557623 - RNA, 19 nt, Artificial Sequence
  Description of Artificial Sequence: Synthetic oligonucleotide
  Antisense strand to SEQ ID NO: 2557622
aucucaaguacccaaggaa

SEQ ID NO: 2557624 - RNA, 19 nt, Artificial Sequence
  Description of Artificial Sequence: Synthetic oligonucleotide
  Sense strand starting at position 2947 of SEQ ID NO: 1888800
gguacuugagaucaaugcu

SEQ ID NO: 2557625 - RNA, 19 nt, Artificial Sequence
  Description of Artificial Sequence: Synthetic oligonucleotide
  Antisense strand to SEQ ID NO: 2557624
agcauugaucucaaguacc

SEQ ID NO: 2557626 - RNA, 19 nt, Artificial Sequence
  Description of Artificial Sequence: Synthetic oligonucleotide
  Sense strand starting at position 2953 of SEQ ID NO: 1888800
ugagaucaaugcuugguuu

SEQ ID NO: 2557627 - RNA, 19 nt, Artificial Sequence
  Description of Artificial Sequence: Synthetic oligonucleotide
  Antisense strand to SEQ ID NO: 2557626
aaaccaagcauugaucuca

SEQ ID NO: 2557628 - RNA, 19 nt, Artificial Sequence
  Description of Artificial Sequence: Synthetic oligonucleotide
  Sense strand starting at position 2993 of SEQ ID NO: 1888800
gacacaagugugcaaagau

SEQ ID NO: 2557629 - RNA, 19 nt, Artificial Sequence
  Description of Artificial Sequence: Synthetic oligonucleotide
  Antisense strand to SEQ ID NO: 2557628
aucuuugcacacuuguguc

SEQ ID NO: 2557630 - RNA, 19 nt, Artificial Sequence
  Description of Artificial Sequence: Synthetic oligonucleotide
  Sense strand starting at position 3431 of SEQ ID NO: 1888800
agaaccaucccaggaguuu

SEQ ID NO: 2557631 - RNA, 19 nt, Artificial Sequence
  Description of Artificial Sequence: Synthetic oligonucleotide
  Antisense strand to SEQ ID NO: 2557630
aaacuccugggaugguucu

SEQ ID NO: 2557632 - RNA, 19 nt, Artificial Sequence
  Description of Artificial Sequence: Synthetic oligonucleotide
  Sense strand starting at position 3511 of SEQ ID NO: 1888800
caagaucucugagaaggaa

SEQ ID NO: 2557633 - RNA, 19 nt, Artificial Sequence
  Description of Artificial Sequence: Synthetic oligonucleotide
  Antisense strand to SEQ ID NO: 2557632
uuccuucucagagaucuug

SEQ ID NO: 2557634 - RNA, 19 nt, Artificial Sequence
  Description of Artificial Sequence: Synthetic oligonucleotide
  Sense strand starting at position 3583 of SEQ ID NO: 1888800
uuauaugauccuggugaau

SEQ ID NO: 2557635 - RNA, 19 nt, Artificial Sequence
  Description of Artificial Sequence: Synthetic oligonucleotide
  Antisense strand to SEQ ID NO: 2557634
auucaccaggaucauauaa

SEQ ID NO: 2557636 - RNA, 19 nt, Artificial Sequence
  Description of Artificial Sequence: Synthetic oligonucleotide
  Sense strand starting at position 3701 of SEQ ID NO: 1888800
ggacuagaagguugucaug

SEQ ID NO: 2557637 - RNA, 19 nt, Artificial Sequence
  Description of Artificial Sequence: Synthetic oligonucleotide
  Antisense strand to SEQ ID NO: 2557636
caugacaaccuucuagucc

SEQ ID NO: 2557638 - RNA, 19 nt, Artificial Sequence
  Description of Artificial Sequence: Synthetic oligonucleotide
  Sense strand starting at position 3717 of SEQ ID NO: 1888800
augugacuccaaugagauc

SEQ ID NO: 2557639 - RNA, 19 nt, Artificial Sequence
  Description of Artificial Sequence: Synthetic oligonucleotide
  Antisense strand to SEQ ID NO: 2557638
gaucucauuggagucacau

SEQ ID NO: 2557640 - RNA, 19 nt, Artificial Sequence
  Description of Artificial Sequence: Synthetic oligonucleotide
  Sense strand starting at position 3748 of SEQ ID NO: 1888800
gcuccuuuaugaguaacca

SEQ ID NO: 2557641 - RNA, 19 nt, Artificial Sequence
  Description of Artificial Sequence: Synthetic oligonucleotide
  Antisense strand to SEQ ID NO: 2557640
ugguuacucauaaaggagc

SEQ ID NO: 2557642 - RNA, 19 nt, Artificial Sequence
  Description of Artificial Sequence: Synthetic oligonucleotide
  Sense strand starting at position 3863 of SEQ ID NO: 1888800
aaucuauguccugggaacu

SEQ ID NO: 2557643 - RNA, 19 nt, Artificial Sequence
  Description of Artificial Sequence: Synthetic oligonucleotide
  Antisense strand to SEQ ID NO: 2557642
aguucccaggacauagauu

SEQ ID NO: 2557644 - RNA, 19 nt, Artificial Sequence
  Description of Artificial Sequence: Synthetic oligonucleotide
  Sense strand starting at position 3864 of SEQ ID NO: 1888800
aucuauguccugggaacuu

SEQ ID NO: 2557645 - RNA, 19 nt, Artificial Sequence
  Description of Artificial Sequence: Synthetic oligonucleotide
  Antisense strand to SEQ ID NO: 2557644
aaguucccaggacauagau

SEQ ID NO: 2557646 - RNA, 19 nt, Artificial Sequence
  Description of Artificial Sequence: Synthetic oligonucleotide
  Sense strand starting at position 3972 of SEQ ID NO: 1888800
uguucuuaccuaggccaaa

SEQ ID NO: 2557647 - RNA, 19 nt, Artificial Sequence
  Description of Artificial Sequence: Synthetic oligonucleotide
  Antisense strand to SEQ ID NO: 2557646
uuuggccuagguaagaaca

SEQ ID NO: 2557648 - RNA, 19 nt, Artificial Sequence
  Description of Artificial Sequence: Synthetic oligonucleotide
  Sense strand starting at position 299 of SEQ ID NO: 1888801
aggucucuccaucaucauu

SEQ ID NO: 2557649 - RNA, 19 nt, Artificial Sequence
  Description of Artificial Sequence: Synthetic oligonucleotide
  Antisense strand to SEQ ID NO: 2557648
aaugaugauggagagaccu

SEQ ID NO: 2557650 - RNA, 19 nt, Artificial Sequence
  Description of Artificial Sequence: Synthetic oligonucleotide
  Sense strand starting at position 339 of SEQ ID NO: 1888801
acauauuaauuaccguaga

SEQ ID NO: 2557651 - RNA, 19 nt, Artificial Sequence
  Description of Artificial Sequence: Synthetic oligonucleotide
  Antisense strand to SEQ ID NO: 2557650
ucuacgguaauuaauaugu

SEQ ID NO: 2557652 - RNA, 19 nt, Artificial Sequence
  Description of Artificial Sequence: Synthetic oligonucleotide
  Sense strand starting at position 342 of SEQ ID NO: 1888801
uauuaauuaccguagauag

SEQ ID NO: 2557653 - RNA, 19 nt, Artificial Sequence
  Description of Artificial Sequence: Synthetic oligonucleotide
  Antisense strand to SEQ ID NO: 2557652
cuaucuacgguaauuaaua

SEQ ID NO: 2557654 - RNA, 19 nt, Artificial Sequence
  Description of Artificial Sequence: Synthetic oligonucleotide
  Sense strand starting at position 366 of SEQ ID NO: 1888801
ccgugaucucuugacacac

SEQ ID NO: 2557655 - RNA, 19 nt, Artificial Sequence
  Description of Artificial Sequence: Synthetic oligonucleotide
  Antisense strand to SEQ ID NO: 2557654
gugugucaagagaucacgg

SEQ ID NO: 2557656 - RNA, 19 nt, Artificial Sequence
  Description of Artificial Sequence: Synthetic oligonucleotide
  Sense strand starting at position 402 of SEQ ID NO: 1888801
gggaaauggguuugguacu

SEQ ID NO: 2557657 - RNA, 19 nt, Artificial Sequence
  Description of Artificial Sequence: Synthetic oligonucleotide
  Antisense strand to SEQ ID NO: 2557656
aguaccaaacccauuuccc

SEQ ID NO: 2557658 - RNA, 19 nt, Artificial Sequence
  Description of Artificial Sequence: Synthetic oligonucleotide
  Sense strand starting at position 574 of SEQ ID NO: 1888801
uaauguggugaugagcaau

SEQ ID NO: 2557659 - RNA, 19 nt, Artificial Sequence
  Description of Artificial Sequence: Synthetic oligonucleotide
  Antisense strand to SEQ ID NO: 2557658
auugcucaucaccacauua

SEQ ID NO: 2557660 - RNA, 19 nt, Artificial Sequence
  Description of Artificial Sequence: Synthetic oligonucleotide
  Sense strand starting at position 601 of SEQ ID NO: 1888801
auagcaagauaccugcaua

SEQ ID NO: 2557661 - RNA, 19 nt, Artificial Sequence
  Description of Artificial Sequence: Synthetic oligonucleotide
  Antisense strand to SEQ ID NO: 2557660
uaugcagguaucuugcuau

SEQ ID NO: 2557662 - RNA, 19 nt, Artificial Sequence
  Description of Artificial Sequence: Synthetic oligonucleotide
  Sense strand starting at position 604 of SEQ ID NO: 1888801
gcaagauaccugcauauau

SEQ ID NO: 2557663 - RNA, 19 nt, Artificial Sequence
  Description of Artificial Sequence: Synthetic oligonucleotide
  Antisense strand to SEQ ID NO: 2557662
auauaugcagguaucuugc

SEQ ID NO: 2557664 - RNA, 19 nt, Artificial Sequence
  Description of Artificial Sequence: Synthetic oligonucleotide
  Sense strand starting at position 619 of SEQ ID NO: 1888801
auaugucuaucaguacaag

SEQ ID NO: 2557665 - RNA, 19 nt, Artificial Sequence
  Description of Artificial Sequence: Synthetic oligonucleotide
  Antisense strand to SEQ ID NO: 2557664
cuuguacugauagacauau

SEQ ID NO: 2557666 - RNA, 19 nt, Artificial Sequence
  Description of Artificial Sequence: Synthetic oligonucleotide
  Sense strand starting at position 691 of SEQ ID NO: 1888801
guuaguaguagggauaauu

SEQ ID NO: 2557667 - RNA, 19 nt, Artificial Sequence
  Description of Artificial Sequence: Synthetic oligonucleotide
  Antisense strand to SEQ ID NO: 2557666
aauuaucccuacuacuaac

SEQ ID NO: 2557668 - RNA, 19 nt, Artificial Sequence
  Description of Artificial Sequence: Synthetic oligonucleotide
  Sense strand starting at position 730 of SEQ ID NO: 1888801
ugccauaaacaagguuuau

SEQ ID NO: 2557669 - RNA, 19 nt, Artificial Sequence
  Description of Artificial Sequence: Synthetic oligonucleotide
  Antisense strand to SEQ ID NO: 2557668
auaaaccuuguuuauggca

SEQ ID NO: 2557670 - RNA, 19 nt, Artificial Sequence
  Description of Artificial Sequence: Synthetic oligonucleotide
  Sense strand starting at position 888 of SEQ ID NO: 1888801
cuguguuagagggaccaua

SEQ ID NO: 2557671 - RNA, 19 nt, Artificial Sequence
  Description of Artificial Sequence: Synthetic oligonucleotide
  Antisense strand to SEQ ID NO: 2557670
uauggucccucuaacacag

SEQ ID NO: 2557672 - RNA, 19 nt, Artificial Sequence
  Description of Artificial Sequence: Synthetic oligonucleotide
  Sense strand starting at position 896 of SEQ ID NO: 1888801
gagggaccauacuugcuua

SEQ ID NO: 2557673 - RNA, 19 nt, Artificial Sequence
  Description of Artificial Sequence: Synthetic oligonucleotide
  Antisense strand to SEQ ID NO: 2557672
uaagcaaguauggucccuc

SEQ ID NO: 2557674 - RNA, 19 nt, Artificial Sequence
  Description of Artificial Sequence: Synthetic oligonucleotide
  Sense strand starting at position 1058 of SEQ ID NO: 1888801
ugaugaauguguuuaauga

SEQ ID NO: 2557675 - RNA, 19 nt, Artificial Sequence
  Description of Artificial Sequence: Synthetic oligonucleotide
  Antisense strand to SEQ ID NO: 2557674
ucauuaaacacauucauca

SEQ ID NO: 2557676 - RNA, 19 nt, Artificial Sequence
  Description of Artificial Sequence: Synthetic oligonucleotide
  Sense strand starting at position 1164 of SEQ ID NO: 1888801
ucgaucuuaguagaacuuu

SEQ ID NO: 2557677 - RNA, 19 nt, Artificial Sequence
  Description of Artificial Sequence: Synthetic oligonucleotide
  Antisense strand to SEQ ID NO: 2557676
aaaguucuacuaagaucga

SEQ ID NO: 2557678 - RNA, 19 nt, Artificial Sequence
  Description of Artificial Sequence: Synthetic oligonucleotide
  Sense strand starting at position 1170 of SEQ ID NO: 1888801
uuaguagaacuuugagauc

SEQ ID NO: 2557679 - RNA, 19 nt, Artificial Sequence
  Description of Artificial Sequence: Synthetic oligonucleotide
  Antisense strand to SEQ ID NO: 2557678
gaucucaaaguucuacuaa

SEQ ID NO: 2557680 - RNA, 19 nt, Artificial Sequence
  Description of Artificial Sequence: Synthetic oligonucleotide
  Sense strand starting at position 1200 of SEQ ID NO: 1888801
uagagauaccaucaucgcu

SEQ ID NO: 2557681 - RNA, 19 nt, Artificial Sequence
  Description of Artificial Sequence: Synthetic oligonucleotide
  Antisense strand to SEQ ID NO: 2557680
agcgaugaugguaucucua

SEQ ID NO: 2557682 - RNA, 19 nt, Artificial Sequence
  Description of Artificial Sequence: Synthetic oligonucleotide
  Sense strand starting at position 1291 of SEQ ID NO: 1888801
cuccuuagagacuaauguu

SEQ ID NO: 2557683 - RNA, 19 nt, Artificial Sequence
  Description of Artificial Sequence: Synthetic oligonucleotide
  Antisense strand to SEQ ID NO: 2557682
aacauuagucucuaaggag

SEQ ID NO: 2557684 - RNA, 19 nt, Artificial Sequence
  Description of Artificial Sequence: Synthetic oligonucleotide
  Sense strand starting at position 1445 of SEQ ID NO: 1888801
uccagaguagcucauacua

SEQ ID NO: 2557685 - RNA, 19 nt, Artificial Sequence
  Description of Artificial Sequence: Synthetic oligonucleotide
  Antisense strand to SEQ ID NO: 2557684
uaguaugagcuacucugga

SEQ ID NO: 2557686 - RNA, 19 nt, Artificial Sequence
  Description of Artificial Sequence: Synthetic oligonucleotide
  Sense strand starting at position 1688 of SEQ ID NO: 1888801
auuacuuaccuggaugcaa

SEQ ID NO: 2557687 - RNA, 19 nt, Artificial Sequence
  Description of Artificial Sequence: Synthetic oligonucleotide
  Antisense strand to SEQ ID NO: 2557686
uugcauccagguaaguaau

SEQ ID NO: 2557688 - RNA, 19 nt, Artificial Sequence
  Description of Artificial Sequence: Synthetic oligonucleotide
  Sense strand starting at position 1775 of SEQ ID NO: 1888801
ugacaaauguguguagaca

SEQ ID NO: 2557689 - RNA, 19 nt, Artificial Sequence
  Description of Artificial Sequence: Synthetic oligonucleotide
  Antisense strand to SEQ ID NO: 2557688
ugucuacacacauuuguca

SEQ ID NO: 2557690 - RNA, 19 nt, Artificial Sequence
  Description of Artificial Sequence: Synthetic oligonucleotide
  Sense strand starting at position 1853 of SEQ ID NO: 1888801
ucaaguauaccuggaaucu

SEQ ID NO: 2557691 - RNA, 19 nt, Artificial Sequence
  Description of Artificial Sequence: Synthetic oligonucleotide
  Antisense strand to SEQ ID NO: 2557690
agauuccagguauacuuga

SEQ ID NO: 2557692 - RNA, 19 nt, Artificial Sequence
  Description of Artificial Sequence: Synthetic oligonucleotide
  Sense strand starting at position 2068 of SEQ ID NO: 1888801
guuaguaaagacuaucauu

SEQ ID NO: 2557693 - RNA, 19 nt, Artificial Sequence
  Description of Artificial Sequence: Synthetic oligonucleotide
  Antisense strand to SEQ ID NO: 2557692
aaugauagucuuuacuaac

SEQ ID NO: 2557694 - RNA, 19 nt, Artificial Sequence
  Description of Artificial Sequence: Synthetic oligonucleotide
  Sense strand starting at position 2086 of SEQ ID NO: 1888801
uucuuacuugaguaccuau

SEQ ID NO: 2557695 - RNA, 19 nt, Artificial Sequence
  Description of Artificial Sequence: Synthetic oligonucleotide
  Antisense strand to SEQ ID NO: 2557694
auagguacucaaguaagaa

SEQ ID NO: 2557696 - RNA, 19 nt, Artificial Sequence
  Description of Artificial Sequence: Synthetic oligonucleotide
  Sense strand starting at position 2473 of SEQ ID NO: 1888801
agaagaucugauggucuau

SEQ ID NO: 2557697 - RNA, 19 nt, Artificial Sequence
  Description of Artificial Sequence: Synthetic oligonucleotide
  Antisense strand to SEQ ID NO: 2557696
auagaccaucagaucuucu

SEQ ID NO: 2557698 - RNA, 19 nt, Artificial Sequence
  Description of Artificial Sequence: Synthetic oligonucleotide
  Sense strand starting at position 2475 of SEQ ID NO: 1888801
aagaucugauggucuauga

SEQ ID NO: 2557699 - RNA, 19 nt, Artificial Sequence
  Description of Artificial Sequence: Synthetic oligonucleotide
  Antisense strand to SEQ ID NO: 2557698
ucauagaccaucagaucuu

SEQ ID NO: 2557700 - RNA, 19 nt, Artificial Sequence
  Description of Artificial Sequence: Synthetic oligonucleotide
  Sense strand starting at position 2528 of SEQ ID NO: 1888801
accagaaaugucugccaua

SEQ ID NO: 2557701 - RNA, 19 nt, Artificial Sequence
  Description of Artificial Sequence: Synthetic oligonucleotide
  Antisense strand to SEQ ID NO: 2557700
uauggcagacauuucuggu

SEQ ID NO: 2557702 - RNA, 19 nt, Artificial Sequence
  Description of Artificial Sequence: Synthetic oligonucleotide
  Sense strand starting at position 2600 of SEQ ID NO: 1888801
ugugaaauauguguuaaag

SEQ ID NO: 2557703 - RNA, 19 nt, Artificial Sequence
  Description of Artificial Sequence: Synthetic oligonucleotide
  Antisense strand to SEQ ID NO: 2557702
cuuuaacacauauuucaca

SEQ ID NO: 2557704 - RNA, 19 nt, Artificial Sequence
  Description of Artificial Sequence: Synthetic oligonucleotide
  Sense strand starting at position 2657 of SEQ ID NO: 1888801
ucgucacuccaucauuaca

SEQ ID NO: 2557705 - RNA, 19 nt, Artificial Sequence
  Description of Artificial Sequence: Synthetic oligonucleotide
  Antisense strand to SEQ ID NO: 2557704
uguaaugauggagugacga

SEQ ID NO: 2557706 - RNA, 19 nt, Artificial Sequence
  Description of Artificial Sequence: Synthetic oligonucleotide
  Sense strand starting at position 2659 of SEQ ID NO: 1888801
gucacuccaucauuacaga

SEQ ID NO: 2557707 - RNA, 19 nt, Artificial Sequence
  Description of Artificial Sequence: Synthetic oligonucleotide
  Antisense strand to SEQ ID NO: 2557706
ucuguaaugauggagugac

SEQ ID NO: 2557708 - RNA, 19 nt, Artificial Sequence
  Description of Artificial Sequence: Synthetic oligonucleotide
  Sense strand starting at position 2689 of SEQ ID NO: 1888801
cuaccuggauacuuguaau

SEQ ID NO: 2557709 - RNA, 19 nt, Artificial Sequence
  Description of Artificial Sequence: Synthetic oligonucleotide
  Antisense strand to SEQ ID NO: 2557708
auuacaaguauccagguag

SEQ ID NO: 2557710 - RNA, 19 nt, Artificial Sequence
  Description of Artificial Sequence: Synthetic oligonucleotide
  Sense strand starting at position 2896 of SEQ ID NO: 1888801
ugguaagagcucuaucauu

SEQ ID NO: 2557711 - RNA, 19 nt, Artificial Sequence
  Description of Artificial Sequence: Synthetic oligonucleotide
  Antisense strand to SEQ ID NO: 2557710
aaugauagagcucuuacca

SEQ ID NO: 2557712 - RNA, 19 nt, Artificial Sequence
  Description of Artificial Sequence: Synthetic oligonucleotide
  Sense strand starting at position 3190 of SEQ ID NO: 1888801
gggccuaucaaagguaacu

SEQ ID NO: 2557713 - RNA, 19 nt, Artificial Sequence
  Description of Artificial Sequence: Synthetic oligonucleotide
  Antisense strand to SEQ ID NO: 2557712
aguuaccuuugauaggccc

SEQ ID NO: 2557714 - RNA, 19 nt, Artificial Sequence
  Description of Artificial Sequence: Synthetic oligonucleotide
  Sense strand starting at position 3251 of SEQ ID NO: 1888801
cuuuccucucuugaaguga

SEQ ID NO: 2557715 - RNA, 19 nt, Artificial Sequence
  Description of Artificial Sequence: Synthetic oligonucleotide
  Antisense strand to SEQ ID NO: 2557714
ucacuucaagagaggaaag

SEQ ID NO: 2557716 - RNA, 19 nt, Artificial Sequence
  Description of Artificial Sequence: Synthetic oligonucleotide
  Sense strand starting at position 3288 of SEQ ID NO: 1888801
cauuacagugauggacaau

SEQ ID NO: 2557717 - RNA, 19 nt, Artificial Sequence
  Description of Artificial Sequence: Synthetic oligonucleotide
  Antisense strand to SEQ ID NO: 2557716
auuguccaucacuguaaug

SEQ ID NO: 2557718 - RNA, 19 nt, Artificial Sequence
  Description of Artificial Sequence: Synthetic oligonucleotide
  Sense strand starting at position 3320 of SEQ ID NO: 1888801
uggauacucgcauauccau

SEQ ID NO: 2557719 - RNA, 19 nt, Artificial Sequence
  Description of Artificial Sequence: Synthetic oligonucleotide
  Antisense strand to SEQ ID NO: 2557718
auggauaugcgaguaucca

SEQ ID NO: 2557720 - RNA, 19 nt, Artificial Sequence
  Description of Artificial Sequence: Synthetic oligonucleotide
  Sense strand starting at position 3591 of SEQ ID NO: 1888801
augguagacaaguguuaag

SEQ ID NO: 2557721 - RNA, 19 nt, Artificial Sequence
  Description of Artificial Sequence: Synthetic oligonucleotide
  Antisense strand to SEQ ID NO: 2557720
cuuaacacuugucuaccau

SEQ ID NO: 2557722 - RNA, 19 nt, Artificial Sequence
  Description of Artificial Sequence: Synthetic oligonucleotide
  Sense strand starting at position 3639 of SEQ ID NO: 1888801
aagaucuaauggucugauu

SEQ ID NO: 2557723 - RNA, 19 nt, Artificial Sequence
  Description of Artificial Sequence: Synthetic oligonucleotide
  Antisense strand to SEQ ID NO: 2557722
aaucagaccauuagaucuu

SEQ ID NO: 2557724 - RNA, 19 nt, Artificial Sequence
  Description of Artificial Sequence: Synthetic oligonucleotide
  Sense strand starting at position 3726 of SEQ ID NO: 1888801
uugugagcucauuacagaa

SEQ ID NO: 2557725 - RNA, 19 nt, Artificial Sequence
  Description of Artificial Sequence: Synthetic oligonucleotide
  Antisense strand to SEQ ID NO: 2557724
uucuguaaugagcucacaa

SEQ ID NO: 2557726 - RNA, 19 nt, Artificial Sequence
  Description of Artificial Sequence: Synthetic oligonucleotide
  Sense strand starting at position 3920 of SEQ ID NO: 1888801
gaagucucauggucaauaa

SEQ ID NO: 2557727 - RNA, 19 nt, Artificial Sequence
  Description of Artificial Sequence: Synthetic oligonucleotide
  Antisense strand to SEQ ID NO: 2557726
uuauugaccaugagacuuc

SEQ ID NO: 2557728 - RNA, 19 nt, Artificial Sequence
  Description of Artificial Sequence: Synthetic oligonucleotide
  Sense strand starting at position 63 of SEQ ID NO: 1888802
guugcuauuugacaggaaa

SEQ ID NO: 2557729 - RNA, 19 nt, Artificial Sequence
  Description of Artificial Sequence: Synthetic oligonucleotide
  Antisense strand to SEQ ID NO: 2557728
uuuccugucaaauagcaac

SEQ ID NO: 2557730 - RNA, 19 nt, Artificial Sequence
  Description of Artificial Sequence: Synthetic oligonucleotide
  Sense strand starting at position 168 of SEQ ID NO: 1888802
gaauguuggcuuuggcaaa

SEQ ID NO: 2557731 - RNA, 19 nt, Artificial Sequence
  Description of Artificial Sequence: Synthetic oligonucleotide
  Antisense strand to SEQ ID NO: 2557730
uuugccaaagccaacauuc

SEQ ID NO: 2557732 - RNA, 19 nt, Artificial Sequence
  Description of Artificial Sequence: Synthetic oligonucleotide
  Sense strand starting at position 268 of SEQ ID NO: 1888802
auggcaggauauguuaaau

SEQ ID NO: 2557733 - RNA, 19 nt, Artificial Sequence
  Description of Artificial Sequence: Synthetic oligonucleotide
  Antisense strand to SEQ ID NO: 2557732
auuuaacauauccugccau

SEQ ID NO: 2557734 - RNA, 19 nt, Artificial Sequence
  Description of Artificial Sequence: Synthetic oligonucleotide
  Sense strand starting at position 309 of SEQ ID NO: 1888802
aaaucuagggccugguuaa

SEQ ID NO: 2557735 - RNA, 19 nt, Artificial Sequence
  Description of Artificial Sequence: Synthetic oligonucleotide
  Antisense strand to SEQ ID NO: 2557734
uuaaccaggcccuagauuu

SEQ ID NO: 2557736 - RNA, 19 nt, Artificial Sequence
  Description of Artificial Sequence: Synthetic oligonucleotide
  Sense strand starting at position 322 of SEQ ID NO: 1888802
gguuaagccacucgagaau

SEQ ID NO: 2557737 - RNA, 19 nt, Artificial Sequence
  Description of Artificial Sequence: Synthetic oligonucleotide
  Antisense strand to SEQ ID NO: 2557736
auucucgaguggcuuaacc

SEQ ID NO: 2557738 - RNA, 19 nt, Artificial Sequence
  Description of Artificial Sequence: Synthetic oligonucleotide
  Sense strand starting at position 462 of SEQ ID NO: 1888802
gaaugucauuuggaaagga

SEQ ID NO: 2557739 - RNA, 19 nt, Artificial Sequence
  Description of Artificial Sequence: Synthetic oligonucleotide
  Antisense strand to SEQ ID NO: 2557738
uccuuuccaaaugacauuc

SEQ ID NO: 2557740 - RNA, 19 nt, Artificial Sequence
  Description of Artificial Sequence: Synthetic oligonucleotide
  Sense strand starting at position 478 of SEQ ID NO: 1888802
ggaagaagucaaugccaau

SEQ ID NO: 2557741 - RNA, 19 nt, Artificial Sequence
  Description of Artificial Sequence: Synthetic oligonucleotide
  Antisense strand to SEQ ID NO: 2557740
auuggcauugacuucuucc

SEQ ID NO: 2557742 - RNA, 19 nt, Artificial Sequence
  Description of Artificial Sequence: Synthetic oligonucleotide
  Sense strand starting at position 531 of SEQ ID NO: 1888802
cuugaacuaccuugucagu

SEQ ID NO: 2557743 - RNA, 19 nt, Artificial Sequence
  Description of Artificial Sequence: Synthetic oligonucleotide
  Antisense strand to SEQ ID NO: 2557742
acugacaagguaguucaag

SEQ ID NO: 2557744 - RNA, 19 nt, Artificial Sequence
  Description of Artificial Sequence: Synthetic oligonucleotide
  Sense strand starting at position 540 of SEQ ID NO: 1888802
ccuugucaguucucucaau

SEQ ID NO: 2557745 - RNA, 19 nt, Artificial Sequence
  Description of Artificial Sequence: Synthetic oligonucleotide
  Antisense strand to SEQ ID NO: 2557744
auugagagaacugacaagg

SEQ ID NO: 2557746 - RNA, 19 nt, Artificial Sequence
  Description of Artificial Sequence: Synthetic oligonucleotide
  Sense strand starting at position 541 of SEQ ID NO: 1888802
cuugucaguucucucaauc

SEQ ID NO: 2557747 - RNA, 19 nt, Artificial Sequence
  Description of Artificial Sequence: Synthetic oligonucleotide
  Antisense strand to SEQ ID NO: 2557746
gauugagagaacugacaag

SEQ ID NO: 2557748 - RNA, 19 nt, Artificial Sequence
  Description of Artificial Sequence: Synthetic oligonucleotide
  Sense strand starting at position 625 of SEQ ID NO: 1888802
gcucaacauuguguuaaau

SEQ ID NO: 2557749 - RNA, 19 nt, Artificial Sequence
  Description of Artificial Sequence: Synthetic oligonucleotide
  Antisense strand to SEQ ID NO: 2557748
auuuaacacaauguugagc

SEQ ID NO: 2557750 - RNA, 19 nt, Artificial Sequence
  Description of Artificial Sequence: Synthetic oligonucleotide
  Sense strand starting at position 686 of SEQ ID NO: 1888802
agcuuaaggucuucuaggu

SEQ ID NO: 2557751 - RNA, 19 nt, Artificial Sequence
  Description of Artificial Sequence: Synthetic oligonucleotide
  Antisense strand to SEQ ID NO: 2557750
accuagaagaccuuaagcu

SEQ ID NO: 2557752 - RNA, 19 nt, Artificial Sequence
  Description of Artificial Sequence: Synthetic oligonucleotide
  Sense strand starting at position 692 of SEQ ID NO: 1888802
aggucuucuaggugacgaa

SEQ ID NO: 2557753 - RNA, 19 nt, Artificial Sequence
  Description of Artificial Sequence: Synthetic oligonucleotide
  Antisense strand to SEQ ID NO: 2557752
uucgucaccuagaagaccu

SEQ ID NO: 2557754 - RNA, 19 nt, Artificial Sequence
  Description of Artificial Sequence: Synthetic oligonucleotide
  Sense strand starting at position 748 of SEQ ID NO: 1888802
gguacaagacagugguaaa

SEQ ID NO: 2557755 - RNA, 19 nt, Artificial Sequence
  Description of Artificial Sequence: Synthetic oligonucleotide
  Antisense strand to SEQ ID NO: 2557754
uuuaccacugucuuguacc

SEQ ID NO: 2557756 - RNA, 19 nt, Artificial Sequence
  Description of Artificial Sequence: Synthetic oligonucleotide
  Sense strand starting at position 749 of SEQ ID NO: 1888802
guacaagacagugguaaag

SEQ ID NO: 2557757 - RNA, 19 nt, Artificial Sequence
  Description of Artificial Sequence: Synthetic oligonucleotide
  Antisense strand to SEQ ID NO: 2557756
cuuuaccacugucuuguac

SEQ ID NO: 2557758 - RNA, 19 nt, Artificial Sequence
  Description of Artificial Sequence: Synthetic oligonucleotide
  Sense strand starting at position 803 of SEQ ID NO: 1888802
gggccugacuucucucaac

SEQ ID NO: 2557759 - RNA, 19 nt, Artificial Sequence
  Description of Artificial Sequence: Synthetic oligonucleotide
  Antisense strand to SEQ ID NO: 2557758
guugagagaagucaggccc

SEQ ID NO: 2557760 - RNA, 19 nt, Artificial Sequence
  Description of Artificial Sequence: Synthetic oligonucleotide
  Sense strand starting at position 831 of SEQ ID NO: 1888802
aggguaaaucuuugggcuu

SEQ ID NO: 2557761 - RNA, 19 nt, Artificial Sequence
  Description of Artificial Sequence: Synthetic oligonucleotide
  Antisense strand to SEQ ID NO: 2557760
aagcccaaagauuuacccu

SEQ ID NO: 2557762 - RNA, 19 nt, Artificial Sequence
  Description of Artificial Sequence: Synthetic oligonucleotide
  Sense strand starting at position 834 of SEQ ID NO: 1888802
guaaaucuuugggcuuaca

SEQ ID NO: 2557763 - RNA, 19 nt, Artificial Sequence
  Description of Artificial Sequence: Synthetic oligonucleotide
  Antisense strand to SEQ ID NO: 2557762
uguaagcccaaagauuuac

SEQ ID NO: 2557764 - RNA, 19 nt, Artificial Sequence
  Description of Artificial Sequence: Synthetic oligonucleotide
  Sense strand starting at position 885 of SEQ ID NO: 1888802
auguuauacuaacuggauu

SEQ ID NO: 2557765 - RNA, 19 nt, Artificial Sequence
  Description of Artificial Sequence: Synthetic oligonucleotide
  Antisense strand to SEQ ID NO: 2557764
aauccaguuaguauaacau

SEQ ID NO: 2557766 - RNA, 19 nt, Artificial Sequence
  Description of Artificial Sequence: Synthetic oligonucleotide
  Sense strand starting at position 1080 of SEQ ID NO: 1888802
gcuauaaacuucuugagga

SEQ ID NO: 2557767 - RNA, 19 nt, Artificial Sequence
  Description of Artificial Sequence: Synthetic oligonucleotide
  Antisense strand to SEQ ID NO: 2557766
uccucaagaaguuuauagc

SEQ ID NO: 2557768 - RNA, 19 nt, Artificial Sequence
  Description of Artificial Sequence: Synthetic oligonucleotide
  Sense strand starting at position 1205 of SEQ ID NO: 1888802
ugaauucugaagugcaguu

SEQ ID NO: 2557769 - RNA, 19 nt, Artificial Sequence
  Description of Artificial Sequence: Synthetic oligonucleotide
  Antisense strand to SEQ ID NO: 2557768
aacugcacuucagaauuca

SEQ ID NO: 2557770 - RNA, 19 nt, Artificial Sequence
  Description of Artificial Sequence: Synthetic oligonucleotide
  Sense strand starting at position 1357 of SEQ ID NO: 1888802
gugggcuuucuugagugau

SEQ ID NO: 2557771 - RNA, 19 nt, Artificial Sequence
  Description of Artificial Sequence: Synthetic oligonucleotide
  Antisense strand to SEQ ID NO: 2557770
aucacucaagaaagcccac

SEQ ID NO: 2557772 - RNA, 19 nt, Artificial Sequence
  Description of Artificial Sequence: Synthetic oligonucleotide
  Sense strand starting at position 1359 of SEQ ID NO: 1888802
gggcuuucuugagugauug

SEQ ID NO: 2557773 - RNA, 19 nt, Artificial Sequence
  Description of Artificial Sequence: Synthetic oligonucleotide
  Antisense strand to SEQ ID NO: 2557772
caaucacucaagaaagccc

SEQ ID NO: 2557774 - RNA, 19 nt, Artificial Sequence
  Description of Artificial Sequence: Synthetic oligonucleotide
  Sense strand starting at position 1363 of SEQ ID NO: 1888802
uuucuugagugauugcuaa

SEQ ID NO: 2557775 - RNA, 19 nt, Artificial Sequence
  Description of Artificial Sequence: Synthetic oligonucleotide
  Antisense strand to SEQ ID NO: 2557774
uuagcaaucacucaagaaa

SEQ ID NO: 2557776 - RNA, 19 nt, Artificial Sequence
  Description of Artificial Sequence: Synthetic oligonucleotide
  Sense strand starting at position 1481 of SEQ ID NO: 1888802
augggaagauauuaugaag

SEQ ID NO: 2557777 - RNA, 19 nt, Artificial Sequence
  Description of Artificial Sequence: Synthetic oligonucleotide
  Antisense strand to SEQ ID NO: 2557776
cuucauaauaucuucccau

SEQ ID NO: 2557778 - RNA, 19 nt, Artificial Sequence
  Description of Artificial Sequence: Synthetic oligonucleotide
  Sense strand starting at position 1557 of SEQ ID NO: 1888802
cuacgaguggcugaagaua

SEQ ID NO: 2557779 - RNA, 19 nt, Artificial Sequence
  Description of Artificial Sequence: Synthetic oligonucleotide
  Antisense strand to SEQ ID NO: 2557778
uaucuucagccacucguag

SEQ ID NO: 2557780 - RNA, 19 nt, Artificial Sequence
  Description of Artificial Sequence: Synthetic oligonucleotide
  Sense strand starting at position 1605 of SEQ ID NO: 1888802
agaacaauaucugucugca

SEQ ID NO: 2557781 - RNA, 19 nt, Artificial Sequence
  Description of Artificial Sequence: Synthetic oligonucleotide
  Antisense strand to SEQ ID NO: 2557780
ugcagacagauauuguucu

SEQ ID NO: 2557782 - RNA, 19 nt, Artificial Sequence
  Description of Artificial Sequence: Synthetic oligonucleotide
  Sense strand starting at position 1608 of SEQ ID NO: 1888802
acaauaucugucugcaaag

SEQ ID NO: 2557783 - RNA, 19 nt, Artificial Sequence
  Description of Artificial Sequence: Synthetic oligonucleotide
  Antisense strand to SEQ ID NO: 2557782
cuuugcagacagauauugu

SEQ ID NO: 2557784 - RNA, 19 nt, Artificial Sequence
  Description of Artificial Sequence: Synthetic oligonucleotide
  Sense strand starting at position 1677 of SEQ ID NO: 1888802
ggagcauuggcccaucaug

SEQ ID NO: 2557785 - RNA, 19 nt, Artificial Sequence
  Description of Artificial Sequence: Synthetic oligonucleotide
  Antisense strand to SEQ ID NO: 2557784
caugaugggccaaugcucc

SEQ ID NO: 2557786 - RNA, 19 nt, Artificial Sequence
  Description of Artificial Sequence: Synthetic oligonucleotide
  Sense strand starting at position 1686 of SEQ ID NO: 1888802
gcccaucaugcaugagauu

SEQ ID NO: 2557787 - RNA, 19 nt, Artificial Sequence
  Description of Artificial Sequence: Synthetic oligonucleotide
  Antisense strand to SEQ ID NO: 2557786
aaucucaugcaugaugggc

SEQ ID NO: 2557788 - RNA, 19 nt, Artificial Sequence
  Description of Artificial Sequence: Synthetic oligonucleotide
  Sense strand starting at position 1997 of SEQ ID NO: 1888802
gggugacauuguguuauga

SEQ ID NO: 2557789 - RNA, 19 nt, Artificial Sequence
  Description of Artificial Sequence: Synthetic oligonucleotide
  Antisense strand to SEQ ID NO: 2557788
ucauaacacaaugucaccc

SEQ ID NO: 2557790 - RNA, 19 nt, Artificial Sequence
  Description of Artificial Sequence: Synthetic oligonucleotide
  Sense strand starting at position 2015 of SEQ ID NO: 1888802
augaucuugcccuauggga

SEQ ID NO: 2557791 - RNA, 19 nt, Artificial Sequence
  Description of Artificial Sequence: Synthetic oligonucleotide
  Antisense strand to SEQ ID NO: 2557790
ucccauagggcaagaucau

SEQ ID NO: 2557792 - RNA, 19 nt, Artificial Sequence
  Description of Artificial Sequence: Synthetic oligonucleotide
  Sense strand starting at position 2017 of SEQ ID NO: 1888802
gaucuugcccuaugggaga

SEQ ID NO: 2557793 - RNA, 19 nt, Artificial Sequence
  Description of Artificial Sequence: Synthetic oligonucleotide
  Antisense strand to SEQ ID NO: 2557792
ucucccauagggcaagauc

SEQ ID NO: 2557794 - RNA, 19 nt, Artificial Sequence
  Description of Artificial Sequence: Synthetic oligonucleotide
  Sense strand starting at position 2085 of SEQ ID NO: 1888802
ggcucagagaaacauguuu

SEQ ID NO: 2557795 - RNA, 19 nt, Artificial Sequence
  Description of Artificial Sequence: Synthetic oligonucleotide
  Antisense strand to SEQ ID NO: 2557794
aaacauguuucucugagcc

SEQ ID NO: 2557796 - RNA, 19 nt, Artificial Sequence
  Description of Artificial Sequence: Synthetic oligonucleotide
  Sense strand starting at position 2090 of SEQ ID NO: 1888802
agagaaacauguuuaucuu

SEQ ID NO: 2557797 - RNA, 19 nt, Artificial Sequence
  Description of Artificial Sequence: Synthetic oligonucleotide
  Antisense strand to SEQ ID NO: 2557796
aagauaaacauguuucucu

SEQ ID NO: 2557798 - RNA, 19 nt, Artificial Sequence
  Description of Artificial Sequence: Synthetic oligonucleotide
  Sense strand starting at position 2210 of SEQ ID NO: 1888802
guauuuaugucuuucccau

SEQ ID NO: 2557799 - RNA, 19 nt, Artificial Sequence
  Description of Artificial Sequence: Synthetic oligonucleotide
  Antisense strand to SEQ ID NO: 2557798
augggaaagacauaaauac

SEQ ID NO: 2557800 - RNA, 19 nt, Artificial Sequence
  Description of Artificial Sequence: Synthetic oligonucleotide
  Sense strand starting at position 2231 of SEQ ID NO: 1888802
cugcaaugagguuguaaga

SEQ ID NO: 2557801 - RNA, 19 nt, Artificial Sequence
  Description of Artificial Sequence: Synthetic oligonucleotide
  Antisense strand to SEQ ID NO: 2557800
ucuuacaaccucauugcag

SEQ ID NO: 2557802 - RNA, 19 nt, Artificial Sequence
  Description of Artificial Sequence: Synthetic oligonucleotide
  Sense strand starting at position 2408 of SEQ ID NO: 1888802
agaccacaacuggguuaua

SEQ ID NO: 2557803 - RNA, 19 nt, Artificial Sequence
  Description of Artificial Sequence: Synthetic oligonucleotide
  Antisense strand to SEQ ID NO: 2557802
uauaacccaguuguggucu

SEQ ID NO: 2557804 - RNA, 19 nt, Artificial Sequence
  Description of Artificial Sequence: Synthetic oligonucleotide
  Sense strand starting at position 2409 of SEQ ID NO: 1888802
gaccacaacuggguuauaa

SEQ ID NO: 2557805 - RNA, 19 nt, Artificial Sequence
  Description of Artificial Sequence: Synthetic oligonucleotide
  Antisense strand to SEQ ID NO: 2557804
uuauaacccaguugugguc

SEQ ID NO: 2557806 - RNA, 19 nt, Artificial Sequence
  Description of Artificial Sequence: Synthetic oligonucleotide
  Sense strand starting at position 2823 of SEQ ID NO: 1888802
gcgugaucucggcugcuac

SEQ ID NO: 2557807 - RNA, 19 nt, Artificial Sequence
  Description of Artificial Sequence: Synthetic oligonucleotide
  Antisense strand to SEQ ID NO: 2557806
guagcagccgagaucacgc

SEQ ID NO: 2557808 - RNA, 19 nt, Artificial Sequence
  Description of Artificial Sequence: Synthetic oligonucleotide
  Sense strand starting at position 261 of SEQ ID NO: 1888803
ccaaacucaugauuggagu

SEQ ID NO: 2557809 - RNA, 19 nt, Artificial Sequence
  Description of Artificial Sequence: Synthetic oligonucleotide
  Antisense strand to SEQ ID NO: 2557808
acuccaaucaugaguuugg

SEQ ID NO: 2557810 - RNA, 19 nt, Artificial Sequence
  Description of Artificial Sequence: Synthetic oligonucleotide
  Sense strand starting at position 262 of SEQ ID NO: 1888803
caaacucaugauuggagua

SEQ ID NO: 2557811 - RNA, 19 nt, Artificial Sequence
  Description of Artificial Sequence: Synthetic oligonucleotide
  Antisense strand to SEQ ID NO: 2557810
uacuccaaucaugaguuug

SEQ ID NO: 2557812 - RNA, 19 nt, Artificial Sequence
  Description of Artificial Sequence: Synthetic oligonucleotide
  Sense strand starting at position 306 of SEQ ID NO: 1888803
agaucucagcuguauugau

SEQ ID NO: 2557813 - RNA, 19 nt, Artificial Sequence
  Description of Artificial Sequence: Synthetic oligonucleotide
  Antisense strand to SEQ ID NO: 2557812
aucaauacagcugagaucu

SEQ ID NO: 2557814 - RNA, 19 nt, Artificial Sequence
  Description of Artificial Sequence: Synthetic oligonucleotide
  Sense strand starting at position 427 of SEQ ID NO: 1888803
aguaaaugguaucuggagu

SEQ ID NO: 2557815 - RNA, 19 nt, Artificial Sequence
  Description of Artificial Sequence: Synthetic oligonucleotide
  Antisense strand to SEQ ID NO: 2557814
acuccagauaccauuuacu

SEQ ID NO: 2557816 - RNA, 19 nt, Artificial Sequence
  Description of Artificial Sequence: Synthetic oligonucleotide
  Sense strand starting at position 428 of SEQ ID NO: 1888803
guaaaugguaucuggagua

SEQ ID NO: 2557817 - RNA, 19 nt, Artificial Sequence
  Description of Artificial Sequence: Synthetic oligonucleotide
  Antisense strand to SEQ ID NO: 2557816
uacuccagauaccauuuac

SEQ ID NO: 2557818 - RNA, 19 nt, Artificial Sequence
  Description of Artificial Sequence: Synthetic oligonucleotide
  Sense strand starting at position 470 of SEQ ID NO: 1888803
guacauggaucuuuaagaa

SEQ ID NO: 2557819 - RNA, 19 nt, Artificial Sequence
  Description of Artificial Sequence: Synthetic oligonucleotide
  Antisense strand to SEQ ID NO: 2557818
uucuuaaagauccauguac

SEQ ID NO: 2557820 - RNA, 19 nt, Artificial Sequence
  Description of Artificial Sequence: Synthetic oligonucleotide
  Sense strand starting at position 817 of SEQ ID NO: 1888803
uuagauuauuuccaaagug

SEQ ID NO: 2557821 - RNA, 19 nt, Artificial Sequence
  Description of Artificial Sequence: Synthetic oligonucleotide
  Antisense strand to SEQ ID NO: 2557820
cacuuuggaaauaaucuaa

SEQ ID NO: 2557822 - RNA, 19 nt, Artificial Sequence
  Description of Artificial Sequence: Synthetic oligonucleotide
  Sense strand starting at position 880 of SEQ ID NO: 1888803
ugcauaccuguguguauuu

SEQ ID NO: 2557823 - RNA, 19 nt, Artificial Sequence
  Description of Artificial Sequence: Synthetic oligonucleotide
  Antisense strand to SEQ ID NO: 2557822
aaauacacacagguaugca

SEQ ID NO: 2557824 - RNA, 19 nt, Artificial Sequence
  Description of Artificial Sequence: Synthetic oligonucleotide
  Sense strand starting at position 1165 of SEQ ID NO: 1888803
acguuuacucaccauacuu

SEQ ID NO: 2557825 - RNA, 19 nt, Artificial Sequence
  Description of Artificial Sequence: Synthetic oligonucleotide
  Antisense strand to SEQ ID NO: 2557824
aaguauggugaguaaacgu

SEQ ID NO: 2557826 - RNA, 19 nt, Artificial Sequence
  Description of Artificial Sequence: Synthetic oligonucleotide
  Sense strand starting at position 1167 of SEQ ID NO: 1888803
guuuacucaccauacuuga

SEQ ID NO: 2557827 - RNA, 19 nt, Artificial Sequence
  Description of Artificial Sequence: Synthetic oligonucleotide
  Antisense strand to SEQ ID NO: 2557826
ucaaguauggugaguaaac

SEQ ID NO: 2557828 - RNA, 19 nt, Artificial Sequence
  Description of Artificial Sequence: Synthetic oligonucleotide
  Sense strand starting at position 1319 of SEQ ID NO: 1888803
aucagaguagaugguauaa

SEQ ID NO: 2557829 - RNA, 19 nt, Artificial Sequence
  Description of Artificial Sequence: Synthetic oligonucleotide
  Antisense strand to SEQ ID NO: 2557828
uuauaccaucuacucugau

SEQ ID NO: 2557830 - RNA, 19 nt, Artificial Sequence
  Description of Artificial Sequence: Synthetic oligonucleotide
  Sense strand starting at position 1522 of SEQ ID NO: 1888803
gaauuaaggcucuggauua

SEQ ID NO: 2557831 - RNA, 19 nt, Artificial Sequence
  Description of Artificial Sequence: Synthetic oligonucleotide
  Antisense strand to SEQ ID NO: 2557830
uaauccagagccuuaauuc

SEQ ID NO: 2557832 - RNA, 19 nt, Artificial Sequence
  Description of Artificial Sequence: Synthetic oligonucleotide
  Sense strand starting at position 2138 of SEQ ID NO: 1888803
uggagagagugcuucuuaa

SEQ ID NO: 2557833 - RNA, 19 nt, Artificial Sequence
  Description of Artificial Sequence: Synthetic oligonucleotide
  Antisense strand to SEQ ID NO: 2557832
uuaagaagcacucucucca

SEQ ID NO: 2557834 - RNA, 19 nt, Artificial Sequence
  Description of Artificial Sequence: Synthetic oligonucleotide
  Sense strand starting at position 2203 of SEQ ID NO: 1888803
cugagaguuucgucuauuu

SEQ ID NO: 2557835 - RNA, 19 nt, Artificial Sequence
  Description of Artificial Sequence: Synthetic oligonucleotide
  Antisense strand to SEQ ID NO: 2557834
aaauagacgaaacucucag

SEQ ID NO: 2557836 - RNA, 19 nt, Artificial Sequence
  Description of Artificial Sequence: Synthetic oligonucleotide
  Sense strand starting at position 2213 of SEQ ID NO: 1888803
cgucuauuucuauggcauu

SEQ ID NO: 2557837 - RNA, 19 nt, Artificial Sequence
  Description of Artificial Sequence: Synthetic oligonucleotide
  Antisense strand to SEQ ID NO: 2557836
aaugccauagaaauagacg

SEQ ID NO: 2557838 - RNA, 19 nt, Artificial Sequence
  Description of Artificial Sequence: Synthetic oligonucleotide
  Sense strand starting at position 2226 of SEQ ID NO: 1888803
ggcauuaugcuggaaauua

SEQ ID NO: 2557839 - RNA, 19 nt, Artificial Sequence
  Description of Artificial Sequence: Synthetic oligonucleotide
  Antisense strand to SEQ ID NO: 2557838
uaauuuccagcauaaugcc

SEQ ID NO: 2557840 - RNA, 19 nt, Artificial Sequence
  Description of Artificial Sequence: Synthetic oligonucleotide
  Sense strand starting at position 2290 of SEQ ID NO: 1888803
acauacagaucuguauuau

SEQ ID NO: 2557841 - RNA, 19 nt, Artificial Sequence
  Description of Artificial Sequence: Synthetic oligonucleotide
  Antisense strand to SEQ ID NO: 2557840
auaauacagaucuguaugu

SEQ ID NO: 2557842 - RNA, 19 nt, Artificial Sequence
  Description of Artificial Sequence: Synthetic oligonucleotide
  Sense strand starting at position 2378 of SEQ ID NO: 1888803
auaauuaaagcgggauuau

SEQ ID NO: 2557843 - RNA, 19 nt, Artificial Sequence
  Description of Artificial Sequence: Synthetic oligonucleotide
  Antisense strand to SEQ ID NO: 2557842
auaaucccgcuuuaauuau

SEQ ID NO: 2557844 - RNA, 19 nt, Artificial Sequence
  Description of Artificial Sequence: Synthetic oligonucleotide
  Sense strand starting at position 2568 of SEQ ID NO: 1888803
augauugucacagggcuua

SEQ ID NO: 2557845 - RNA, 19 nt, Artificial Sequence
  Description of Artificial Sequence: Synthetic oligonucleotide
  Antisense strand to SEQ ID NO: 2557844
uaagcccugugacaaucau

SEQ ID NO: 2557846 - RNA, 19 nt, Artificial Sequence
  Description of Artificial Sequence: Synthetic oligonucleotide
  Sense strand starting at position 2580 of SEQ ID NO: 1888803
gggcuuagaaccugauauu

SEQ ID NO: 2557847 - RNA, 19 nt, Artificial Sequence
  Description of Artificial Sequence: Synthetic oligonucleotide
  Antisense strand to SEQ ID NO: 2557846
aauaucagguucuaagccc

SEQ ID NO: 2557848 - RNA, 19 nt, Artificial Sequence
  Description of Artificial Sequence: Synthetic oligonucleotide
  Sense strand starting at position 2581 of SEQ ID NO: 1888803
ggcuuagaaccugauauuc

SEQ ID NO: 2557849 - RNA, 19 nt, Artificial Sequence
  Description of Artificial Sequence: Synthetic oligonucleotide
  Antisense strand to SEQ ID NO: 2557848
gaauaucagguucuaagcc

SEQ ID NO: 2557850 - RNA, 19 nt, Artificial Sequence
  Description of Artificial Sequence: Synthetic oligonucleotide
  Sense strand starting at position 2599 of SEQ ID NO: 1888803
cggcuaugcauuccuguca

SEQ ID NO: 2557851 - RNA, 19 nt, Artificial Sequence
  Description of Artificial Sequence: Synthetic oligonucleotide
  Antisense strand to SEQ ID NO: 2557850
ugacaggaaugcauagccg

SEQ ID NO: 2557852 - RNA, 19 nt, Artificial Sequence
  Description of Artificial Sequence: Synthetic oligonucleotide
  Sense strand starting at position 2764 of SEQ ID NO: 1888803
gaucgaagacguuaacuug

SEQ ID NO: 2557853 - RNA, 19 nt, Artificial Sequence
  Description of Artificial Sequence: Synthetic oligonucleotide
  Antisense strand to SEQ ID NO: 2557852
caaguuaacgucuucgauc

SEQ ID NO: 2557854 - RNA, 19 nt, Artificial Sequence
  Description of Artificial Sequence: Synthetic oligonucleotide
  Sense strand starting at position 2865 of SEQ ID NO: 1888803
agucaauguguauaaggca

SEQ ID NO: 2557855 - RNA, 19 nt, Artificial Sequence
  Description of Artificial Sequence: Synthetic oligonucleotide
  Antisense strand to SEQ ID NO: 2557854
ugccuuauacacauugacu

SEQ ID NO: 2557856 - RNA, 19 nt, Artificial Sequence
  Description of Artificial Sequence: Synthetic oligonucleotide
  Sense strand starting at position 2893 of SEQ ID NO: 1888803
augucuggcagugagaaga

SEQ ID NO: 2557857 - RNA, 19 nt, Artificial Sequence
  Description of Artificial Sequence: Synthetic oligonucleotide
  Antisense strand to SEQ ID NO: 2557856
ucuucucacugccagacau

SEQ ID NO: 2557858 - RNA, 19 nt, Artificial Sequence
  Description of Artificial Sequence: Synthetic oligonucleotide
  Sense strand starting at position 2942 of SEQ ID NO: 1888803
cagacauugcagcauagga

SEQ ID NO: 2557859 - RNA, 19 nt, Artificial Sequence
  Description of Artificial Sequence: Synthetic oligonucleotide
  Antisense strand to SEQ ID NO: 2557858
uccuaugcugcaaugucug

SEQ ID NO: 2557860 - RNA, 19 nt, Artificial Sequence
  Description of Artificial Sequence: Synthetic oligonucleotide
  Sense strand starting at position 2944 of SEQ ID NO: 1888803
gacauugcagcauaggaau

SEQ ID NO: 2557861 - RNA, 19 nt, Artificial Sequence
  Description of Artificial Sequence: Synthetic oligonucleotide
  Antisense strand to SEQ ID NO: 2557860
auuccuaugcugcaauguc

SEQ ID NO: 2557862 - RNA, 19 nt, Artificial Sequence
  Description of Artificial Sequence: Synthetic oligonucleotide
  Sense strand starting at position 2985 of SEQ ID NO: 1888803
cuccaagaacacuggugau

SEQ ID NO: 2557863 - RNA, 19 nt, Artificial Sequence
  Description of Artificial Sequence: Synthetic oligonucleotide
  Antisense strand to SEQ ID NO: 2557862
aucaccaguguucuuggag

SEQ ID NO: 2557864 - RNA, 19 nt, Artificial Sequence
  Description of Artificial Sequence: Synthetic oligonucleotide
  Sense strand starting at position 3032 of SEQ ID NO: 1888803
uccugugugggugacauaa

SEQ ID NO: 2557865 - RNA, 19 nt, Artificial Sequence
  Description of Artificial Sequence: Synthetic oligonucleotide
  Antisense strand to SEQ ID NO: 2557864
uuaugucacccacacagga

SEQ ID NO: 2557866 - RNA, 19 nt, Artificial Sequence
  Description of Artificial Sequence: Synthetic oligonucleotide
  Sense strand starting at position 3105 of SEQ ID NO: 1888803
acaccaagguuguuuagaa

SEQ ID NO: 2557867 - RNA, 19 nt, Artificial Sequence
  Description of Artificial Sequence: Synthetic oligonucleotide
  Antisense strand to SEQ ID NO: 2557866
uucuaaacaaccuuggugu

SEQ ID NO: 2557868 - RNA, 19 nt, Artificial Sequence
  Description of Artificial Sequence: Synthetic oligonucleotide
  Sense strand starting at position 3106 of SEQ ID NO: 1888803
caccaagguuguuuagaaa

SEQ ID NO: 2557869 - RNA, 19 nt, Artificial Sequence
  Description of Artificial Sequence: Synthetic oligonucleotide
  Antisense strand to SEQ ID NO: 2557868
uuucuaaacaaccuuggug

SEQ ID NO: 2557870 - RNA, 19 nt, Artificial Sequence
  Description of Artificial Sequence: Synthetic oligonucleotide
  Sense strand starting at position 3183 of SEQ ID NO: 1888803
ugcguuauuagcucaaguu

SEQ ID NO: 2557871 - RNA, 19 nt, Artificial Sequence
  Description of Artificial Sequence: Synthetic oligonucleotide
  Antisense strand to SEQ ID NO: 2557870
aacuugagcuaauaacgca

SEQ ID NO: 2557872 - RNA, 19 nt, Artificial Sequence
  Description of Artificial Sequence: Synthetic oligonucleotide
  Sense strand starting at position 3244 of SEQ ID NO: 1888803
ggauaacaguacuaauuuc

SEQ ID NO: 2557873 - RNA, 19 nt, Artificial Sequence
  Description of Artificial Sequence: Synthetic oligonucleotide
  Antisense strand to SEQ ID NO: 2557872
gaaauuaguacuguuaucc

SEQ ID NO: 2557874 - RNA, 19 nt, Artificial Sequence
  Description of Artificial Sequence: Synthetic oligonucleotide
  Sense strand starting at position 3303 of SEQ ID NO: 1888803
caacgacugccacauaagu

SEQ ID NO: 2557875 - RNA, 19 nt, Artificial Sequence
  Description of Artificial Sequence: Synthetic oligonucleotide
  Antisense strand to SEQ ID NO: 2557874
acuuauguggcagucguug

SEQ ID NO: 2557876 - RNA, 19 nt, Artificial Sequence
  Description of Artificial Sequence: Synthetic oligonucleotide
  Sense strand starting at position 3400 of SEQ ID NO: 1888803
acugucucagccuaaagua

SEQ ID NO: 2557877 - RNA, 19 nt, Artificial Sequence
  Description of Artificial Sequence: Synthetic oligonucleotide
  Antisense strand to SEQ ID NO: 2557876
uacuuuaggcugagacagu

SEQ ID NO: 2557878 - RNA, 19 nt, Artificial Sequence
  Description of Artificial Sequence: Synthetic oligonucleotide
  Sense strand starting at position 3490 of SEQ ID NO: 1888803
uaucgugaagcugauaaga

SEQ ID NO: 2557879 - RNA, 19 nt, Artificial Sequence
  Description of Artificial Sequence: Synthetic oligonucleotide
  Antisense strand to SEQ ID NO: 2557878
ucuuaucagcuucacgaua

SEQ ID NO: 2557880 - RNA, 19 nt, Artificial Sequence
  Description of Artificial Sequence: Synthetic oligonucleotide
  Sense strand starting at position 3498 of SEQ ID NO: 1888803
agcugauaagauuguaaug

SEQ ID NO: 2557881 - RNA, 19 nt, Artificial Sequence
  Description of Artificial Sequence: Synthetic oligonucleotide
  Antisense strand to SEQ ID NO: 2557880
cauuacaaucuuaucagcu

SEQ ID NO: 2557882 - RNA, 19 nt, Artificial Sequence
  Description of Artificial Sequence: Synthetic oligonucleotide
  Sense strand starting at position 3508 of SEQ ID NO: 1888803
auuguaauguccuuggaaa

SEQ ID NO: 2557883 - RNA, 19 nt, Artificial Sequence
  Description of Artificial Sequence: Synthetic oligonucleotide
  Antisense strand to SEQ ID NO: 2557882
uuuccaaggacauuacaau

SEQ ID NO: 2557884 - RNA, 19 nt, Artificial Sequence
  Description of Artificial Sequence: Synthetic oligonucleotide
  Sense strand starting at position 3606 of SEQ ID NO: 1888803
augauaaccugagcuacua

SEQ ID NO: 2557885 - RNA, 19 nt, Artificial Sequence
  Description of Artificial Sequence: Synthetic oligonucleotide
  Antisense strand to SEQ ID NO: 2557884
uaguagcucagguuaucau

SEQ ID NO: 2557886 - RNA, 19 nt, Artificial Sequence
  Description of Artificial Sequence: Synthetic oligonucleotide
  Sense strand starting at position 3939 of SEQ ID NO: 1888803
gagucaucacaccgaccau

SEQ ID NO: 2557887 - RNA, 19 nt, Artificial Sequence
  Description of Artificial Sequence: Synthetic oligonucleotide
  Antisense strand to SEQ ID NO: 2557886
auggucggugugaugacuc

SEQ ID NO: 2557888 - RNA, 19 nt, Artificial Sequence
  Description of Artificial Sequence: Synthetic oligonucleotide
  Sense strand starting at position 397 of SEQ ID NO: 1888804
ugccucucauuugcagaau

SEQ ID NO: 2557889 - RNA, 19 nt, Artificial Sequence
  Description of Artificial Sequence: Synthetic oligonucleotide
  Antisense strand to SEQ ID NO: 2557888
auucugcaaaugagaggca

SEQ ID NO: 2557890 - RNA, 19 nt, Artificial Sequence
  Description of Artificial Sequence: Synthetic oligonucleotide
  Sense strand starting at position 455 of SEQ ID NO: 1888804
aggaauuguucuguuauua

SEQ ID NO: 2557891 - RNA, 19 nt, Artificial Sequence
  Description of Artificial Sequence: Synthetic oligonucleotide
  Antisense strand to SEQ ID NO: 2557890
uaauaacagaacaauuccu

SEQ ID NO: 2557892 - RNA, 19 nt, Artificial Sequence
  Description of Artificial Sequence: Synthetic oligonucleotide
  Sense strand starting at position 500 of SEQ ID NO: 1888804
agaaauauauugcucaugu

SEQ ID NO: 2557893 - RNA, 19 nt, Artificial Sequence
  Description of Artificial Sequence: Synthetic oligonucleotide
  Antisense strand to SEQ ID NO: 2557892
acaugagcaauauauuucu

SEQ ID NO: 2557894 - RNA, 19 nt, Artificial Sequence
  Description of Artificial Sequence: Synthetic oligonucleotide
  Sense strand starting at position 501 of SEQ ID NO: 1888804
gaaauauauugcucaugug

SEQ ID NO: 2557895 - RNA, 19 nt, Artificial Sequence
  Description of Artificial Sequence: Synthetic oligonucleotide
  Antisense strand to SEQ ID NO: 2557894
cacaugagcaauauauuuc

SEQ ID NO: 2557896 - RNA, 19 nt, Artificial Sequence
  Description of Artificial Sequence: Synthetic oligonucleotide
  Sense strand starting at position 510 of SEQ ID NO: 1888804
ugcucaugugaguaaauau

SEQ ID NO: 2557897 - RNA, 19 nt, Artificial Sequence
  Description of Artificial Sequence: Synthetic oligonucleotide
  Antisense strand to SEQ ID NO: 2557896
auauuuacucacaugagca

SEQ ID NO: 2557898 - RNA, 19 nt, Artificial Sequence
  Description of Artificial Sequence: Synthetic oligonucleotide
  Sense strand starting at position 554 of SEQ ID NO: 1888804
cauauaugugaguacugcu

SEQ ID NO: 2557899 - RNA, 19 nt, Artificial Sequence
  Description of Artificial Sequence: Synthetic oligonucleotide
  Antisense strand to SEQ ID NO: 2557898
agcaguacucacauauaug

SEQ ID NO: 2557900 - RNA, 19 nt, Artificial Sequence
  Description of Artificial Sequence: Synthetic oligonucleotide
  Sense strand starting at position 621 of SEQ ID NO: 1888804
gcugacaaguaguuaggaa

SEQ ID NO: 2557901 - RNA, 19 nt, Artificial Sequence
  Description of Artificial Sequence: Synthetic oligonucleotide
  Antisense strand to SEQ ID NO: 2557900
uuccuaacuacuugucagc

SEQ ID NO: 2557902 - RNA, 19 nt, Artificial Sequence
  Description of Artificial Sequence: Synthetic oligonucleotide
  Sense strand starting at position 689 of SEQ ID NO: 1888804
ucuggagucuaugcacuaa

SEQ ID NO: 2557903 - RNA, 19 nt, Artificial Sequence
  Description of Artificial Sequence: Synthetic oligonucleotide
  Antisense strand to SEQ ID NO: 2557902
uuagugcauagacuccaga

SEQ ID NO: 2557904 - RNA, 19 nt, Artificial Sequence
  Description of Artificial Sequence: Synthetic oligonucleotide
  Sense strand starting at position 766 of SEQ ID NO: 1888804
ggaguuaccuaacuugguu

SEQ ID NO: 2557905 - RNA, 19 nt, Artificial Sequence
  Description of Artificial Sequence: Synthetic oligonucleotide
  Antisense strand to SEQ ID NO: 2557904
aaccaaguuagguaacucc

SEQ ID NO: 2557906 - RNA, 19 nt, Artificial Sequence
  Description of Artificial Sequence: Synthetic oligonucleotide
  Sense strand starting at position 772 of SEQ ID NO: 1888804
accuaacuugguugugaga

SEQ ID NO: 2557907 - RNA, 19 nt, Artificial Sequence
  Description of Artificial Sequence: Synthetic oligonucleotide
  Antisense strand to SEQ ID NO: 2557906
ucucacaaccaaguuaggu

SEQ ID NO: 2557908 - RNA, 19 nt, Artificial Sequence
  Description of Artificial Sequence: Synthetic oligonucleotide
  Sense strand starting at position 857 of SEQ ID NO: 1888804
uuaagauguccugauucuu

SEQ ID NO: 2557909 - RNA, 19 nt, Artificial Sequence
  Description of Artificial Sequence: Synthetic oligonucleotide
  Antisense strand to SEQ ID NO: 2557908
aagaaucaggacaucuuaa

SEQ ID NO: 2557910 - RNA, 19 nt, Artificial Sequence
  Description of Artificial Sequence: Synthetic oligonucleotide
  Sense strand starting at position 865 of SEQ ID NO: 1888804
uccugauucuuucuaggag

SEQ ID NO: 2557911 - RNA, 19 nt, Artificial Sequence
  Description of Artificial Sequence: Synthetic oligonucleotide
  Antisense strand to SEQ ID NO: 2557910
cuccuagaaagaaucagga

SEQ ID NO: 2557912 - RNA, 19 nt, Artificial Sequence
  Description of Artificial Sequence: Synthetic oligonucleotide
  Sense strand starting at position 1098 of SEQ ID NO: 1888804
uuacauaaguaguugggau

SEQ ID NO: 2557913 - RNA, 19 nt, Artificial Sequence
  Description of Artificial Sequence: Synthetic oligonucleotide
  Antisense strand to SEQ ID NO: 2557912
aucccaacuacuuauguaa

SEQ ID NO: 2557914 - RNA, 19 nt, Artificial Sequence
  Description of Artificial Sequence: Synthetic oligonucleotide
  Sense strand starting at position 1224 of SEQ ID NO: 1888804
uccuuacugcagcagauaa

SEQ ID NO: 2557915 - RNA, 19 nt, Artificial Sequence
  Description of Artificial Sequence: Synthetic oligonucleotide
  Antisense strand to SEQ ID NO: 2557914
uuaucugcugcaguaagga

SEQ ID NO: 2557916 - RNA, 19 nt, Artificial Sequence
  Description of Artificial Sequence: Synthetic oligonucleotide
  Sense strand starting at position 1245 of SEQ ID NO: 1888804
uuuguaucaguuggauaac

SEQ ID NO: 2557917 - RNA, 19 nt, Artificial Sequence
  Description of Artificial Sequence: Synthetic oligonucleotide
  Antisense strand to SEQ ID NO: 2557916
guuauccaacugauacaaa

SEQ ID NO: 2557918 - RNA, 19 nt, Artificial Sequence
  Description of Artificial Sequence: Synthetic oligonucleotide
  Sense strand starting at position 1248 of SEQ ID NO: 1888804
guaucaguuggauaaccuu

SEQ ID NO: 2557919 - RNA, 19 nt, Artificial Sequence
  Description of Artificial Sequence: Synthetic oligonucleotide
  Antisense strand to SEQ ID NO: 2557918
aagguuauccaacugauac

SEQ ID NO: 2557920 - RNA, 19 nt, Artificial Sequence
  Description of Artificial Sequence: Synthetic oligonucleotide
  Sense strand starting at position 1251 of SEQ ID NO: 1888804
ucaguuggauaaccuuuaa

SEQ ID NO: 2557921 - RNA, 19 nt, Artificial Sequence
  Description of Artificial Sequence: Synthetic oligonucleotide
  Antisense strand to SEQ ID NO: 2557920
uuaaagguuauccaacuga

SEQ ID NO: 2557922 - RNA, 19 nt, Artificial Sequence
  Description of Artificial Sequence: Synthetic oligonucleotide
  Sense strand starting at position 1326 of SEQ ID NO: 1888804
auguaauaaggaggucuaa

SEQ ID NO: 2557923 - RNA, 19 nt, Artificial Sequence
  Description of Artificial Sequence: Synthetic oligonucleotide
  Antisense strand to SEQ ID NO: 2557922
uuagaccuccuuauuacau

SEQ ID NO: 2557924 - RNA, 19 nt, Artificial Sequence
  Description of Artificial Sequence: Synthetic oligonucleotide
  Sense strand starting at position 1352 of SEQ ID NO: 1888804
augcucuaggauugguuaa

SEQ ID NO: 2557925 - RNA, 19 nt, Artificial Sequence
  Description of Artificial Sequence: Synthetic oligonucleotide
  Antisense strand to SEQ ID NO: 2557924
uuaaccaauccuagagcau

SEQ ID NO: 2557926 - RNA, 19 nt, Artificial Sequence
  Description of Artificial Sequence: Synthetic oligonucleotide
  Sense strand starting at position 1425 of SEQ ID NO: 1888804
gcauucuugguauauuauu

SEQ ID NO: 2557927 - RNA, 19 nt, Artificial Sequence
  Description of Artificial Sequence: Synthetic oligonucleotide
  Antisense strand to SEQ ID NO: 2557926
aauaauauaccaagaaugc

SEQ ID NO: 2557928 - RNA, 19 nt, Artificial Sequence
  Description of Artificial Sequence: Synthetic oligonucleotide
  Sense strand starting at position 1608 of SEQ ID NO: 1888804
cagagcacuggccagaauu

SEQ ID NO: 2557929 - RNA, 19 nt, Artificial Sequence
  Description of Artificial Sequence: Synthetic oligonucleotide
  Antisense strand to SEQ ID NO: 2557928
aauucuggccagugcucug

SEQ ID NO: 2557930 - RNA, 19 nt, Artificial Sequence
  Description of Artificial Sequence: Synthetic oligonucleotide
  Sense strand starting at position 1610 of SEQ ID NO: 1888804
gagcacuggccagaauuaa

SEQ ID NO: 2557931 - RNA, 19 nt, Artificial Sequence
  Description of Artificial Sequence: Synthetic oligonucleotide
  Antisense strand to SEQ ID NO: 2557930
uuaauucuggccagugcuc

SEQ ID NO: 2557932 - RNA, 19 nt, Artificial Sequence
  Description of Artificial Sequence: Synthetic oligonucleotide
  Sense strand starting at position 1681 of SEQ ID NO: 1888804
cuuaacuuaggcgaaucau

SEQ ID NO: 2557933 - RNA, 19 nt, Artificial Sequence
  Description of Artificial Sequence: Synthetic oligonucleotide
  Antisense strand to SEQ ID NO: 2557932
augauucgccuaaguuaag

SEQ ID NO: 2557934 - RNA, 19 nt, Artificial Sequence
  Description of Artificial Sequence: Synthetic oligonucleotide
  Sense strand starting at position 1690 of SEQ ID NO: 1888804
ggcgaaucauuucuuguaa

SEQ ID NO: 2557935 - RNA, 19 nt, Artificial Sequence
  Description of Artificial Sequence: Synthetic oligonucleotide
  Antisense strand to SEQ ID NO: 2557934
uuacaagaaaugauucgcc

SEQ ID NO: 2557936 - RNA, 19 nt, Artificial Sequence
  Description of Artificial Sequence: Synthetic oligonucleotide
  Sense strand starting at position 1809 of SEQ ID NO: 1888804
ccugaaugacauugagguu

SEQ ID NO: 2557937 - RNA, 19 nt, Artificial Sequence
  Description of Artificial Sequence: Synthetic oligonucleotide
  Antisense strand to SEQ ID NO: 2557936
aaccucaaugucauucagg

SEQ ID NO: 2557938 - RNA, 19 nt, Artificial Sequence
  Description of Artificial Sequence: Synthetic oligonucleotide
  Sense strand starting at position 1920 of SEQ ID NO: 1888804
gagguugugacgugcauuu

SEQ ID NO: 2557939 - RNA, 19 nt, Artificial Sequence
  Description of Artificial Sequence: Synthetic oligonucleotide
  Antisense strand to SEQ ID NO: 2557938
aaaugcacgucacaaccuc

SEQ ID NO: 2557940 - RNA, 19 nt, Artificial Sequence
  Description of Artificial Sequence: Synthetic oligonucleotide
  Sense strand starting at position 1922 of SEQ ID NO: 1888804
gguugugacgugcauuuaa

SEQ ID NO: 2557941 - RNA, 19 nt, Artificial Sequence
  Description of Artificial Sequence: Synthetic oligonucleotide
  Antisense strand to SEQ ID NO: 2557940
uuaaaugcacgucacaacc

SEQ ID NO: 2557942 - RNA, 19 nt, Artificial Sequence
  Description of Artificial Sequence: Synthetic oligonucleotide
  Sense strand starting at position 2095 of SEQ ID NO: 1888804
ugucuagacgauugugaaa

SEQ ID NO: 2557943 - RNA, 19 nt, Artificial Sequence
  Description of Artificial Sequence: Synthetic oligonucleotide
  Antisense strand to SEQ ID NO: 2557942
uuucacaaucgucuagaca

SEQ ID NO: 2557944 - RNA, 19 nt, Artificial Sequence
  Description of Artificial Sequence: Synthetic oligonucleotide
  Sense strand starting at position 2194 of SEQ ID NO: 1888804
ccagcaauauugucaagag

SEQ ID NO: 2557945 - RNA, 19 nt, Artificial Sequence
  Description of Artificial Sequence: Synthetic oligonucleotide
  Antisense strand to SEQ ID NO: 2557944
cucuugacaauauugcugg

SEQ ID NO: 2557946 - RNA, 19 nt, Artificial Sequence
  Description of Artificial Sequence: Synthetic oligonucleotide
  Sense strand starting at position 2198 of SEQ ID NO: 1888804
caauauugucaagaggcca

SEQ ID NO: 2557947 - RNA, 19 nt, Artificial Sequence
  Description of Artificial Sequence: Synthetic oligonucleotide
  Antisense strand to SEQ ID NO: 2557946
uggccucuugacaauauug

SEQ ID NO: 2557948 - RNA, 19 nt, Artificial Sequence
  Description of Artificial Sequence: Synthetic oligonucleotide
  Sense strand starting at position 2741 of SEQ ID NO: 1888804
uugcaaggucuauacacau

SEQ ID NO: 2557949 - RNA, 19 nt, Artificial Sequence
  Description of Artificial Sequence: Synthetic oligonucleotide
  Antisense strand to SEQ ID NO: 2557948
auguguauagaccuugcaa

SEQ ID NO: 2557950 - RNA, 19 nt, Artificial Sequence
  Description of Artificial Sequence: Synthetic oligonucleotide
  Sense strand starting at position 3144 of SEQ ID NO: 1888804
gaaagcuugcaugguagaa

SEQ ID NO: 2557951 - RNA, 19 nt, Artificial Sequence
  Description of Artificial Sequence: Synthetic oligonucleotide
  Antisense strand to SEQ ID NO: 2557950
uucuaccaugcaagcuuuc

SEQ ID NO: 2557952 - RNA, 19 nt, Artificial Sequence
  Description of Artificial Sequence: Synthetic oligonucleotide
  Sense strand starting at position 3201 of SEQ ID NO: 1888804
aaaggucuccgugauaaau

SEQ ID NO: 2557953 - RNA, 19 nt, Artificial Sequence
  Description of Artificial Sequence: Synthetic oligonucleotide
  Antisense strand to SEQ ID NO: 2557952
auuuaucacggagaccuuu

SEQ ID NO: 2557954 - RNA, 19 nt, Artificial Sequence
  Description of Artificial Sequence: Synthetic oligonucleotide
  Sense strand starting at position 3210 of SEQ ID NO: 1888804
cgugauaaaucucccacau

SEQ ID NO: 2557955 - RNA, 19 nt, Artificial Sequence
  Description of Artificial Sequence: Synthetic oligonucleotide
  Antisense strand to SEQ ID NO: 2557954
augugggagauuuaucacg

SEQ ID NO: 2557956 - RNA, 19 nt, Artificial Sequence
  Description of Artificial Sequence: Synthetic oligonucleotide
  Sense strand starting at position 3288 of SEQ ID NO: 1888804
aagggagacucagccaauu

SEQ ID NO: 2557957 - RNA, 19 nt, Artificial Sequence
  Description of Artificial Sequence: Synthetic oligonucleotide
  Antisense strand to SEQ ID NO: 2557956
aauuggcugagucucccuu

SEQ ID NO: 2557958 - RNA, 19 nt, Artificial Sequence
  Description of Artificial Sequence: Synthetic oligonucleotide
  Sense strand starting at position 3376 of SEQ ID NO: 1888804
ucuugugaccgugaaacaa

SEQ ID NO: 2557959 - RNA, 19 nt, Artificial Sequence
  Description of Artificial Sequence: Synthetic oligonucleotide
  Antisense strand to SEQ ID NO: 2557958
uuguuucacggucacaaga

SEQ ID NO: 2557960 - RNA, 19 nt, Artificial Sequence
  Description of Artificial Sequence: Synthetic oligonucleotide
  Sense strand starting at position 3468 of SEQ ID NO: 1888804
auuguagaaccaugguaca

SEQ ID NO: 2557961 - RNA, 19 nt, Artificial Sequence
  Description of Artificial Sequence: Synthetic oligonucleotide
  Antisense strand to SEQ ID NO: 2557960
uguaccaugguucuacaau

SEQ ID NO: 2557962 - RNA, 19 nt, Artificial Sequence
  Description of Artificial Sequence: Synthetic oligonucleotide
  Sense strand starting at position 3512 of SEQ ID NO: 1888804
aauuucgcggucugugaaa

SEQ ID NO: 2557963 - RNA, 19 nt, Artificial Sequence
  Description of Artificial Sequence: Synthetic oligonucleotide
  Antisense strand to SEQ ID NO: 2557962
uuucacagaccgcgaaauu

SEQ ID NO: 2557964 - RNA, 19 nt, Artificial Sequence
  Description of Artificial Sequence: Synthetic oligonucleotide
  Sense strand starting at position 3551 of SEQ ID NO: 1888804
ugacuaagccacuguuaua

SEQ ID NO: 2557965 - RNA, 19 nt, Artificial Sequence
  Description of Artificial Sequence: Synthetic oligonucleotide
  Antisense strand to SEQ ID NO: 2557964
uauaacaguggcuuaguca

SEQ ID NO: 2557966 - RNA, 19 nt, Artificial Sequence
  Description of Artificial Sequence: Synthetic oligonucleotide
  Sense strand starting at position 3949 of SEQ ID NO: 1888804
gcgacaugaucuuuaaaga

SEQ ID NO: 2557967 - RNA, 19 nt, Artificial Sequence
  Description of Artificial Sequence: Synthetic oligonucleotide
  Antisense strand to SEQ ID NO: 2557966
ucuuuaaagaucaugucgc

SEQ ID NO: 2557968 - RNA, 19 nt, Artificial Sequence
  Description of Artificial Sequence: Synthetic oligonucleotide
  Sense strand starting at position 115 of SEQ ID NO: 1888805
gccuuaauugcagauggga

SEQ ID NO: 2557969 - RNA, 19 nt, Artificial Sequence
  Description of Artificial Sequence: Synthetic oligonucleotide
  Antisense strand to SEQ ID NO: 2557968
ucccaucugcaauuaaggc

SEQ ID NO: 2557970 - RNA, 19 nt, Artificial Sequence
  Description of Artificial Sequence: Synthetic oligonucleotide
  Sense strand starting at position 304 of SEQ ID NO: 1888805
uggugugagaggcauucua

SEQ ID NO: 2557971 - RNA, 19 nt, Artificial Sequence
  Description of Artificial Sequence: Synthetic oligonucleotide
  Antisense strand to SEQ ID NO: 2557970
uagaaugccucucacacca

SEQ ID NO: 2557972 - RNA, 19 nt, Artificial Sequence
  Description of Artificial Sequence: Synthetic oligonucleotide
  Sense strand starting at position 311 of SEQ ID NO: 1888805
agaggcauucuagauguua

SEQ ID NO: 2557973 - RNA, 19 nt, Artificial Sequence
  Description of Artificial Sequence: Synthetic oligonucleotide
  Antisense strand to SEQ ID NO: 2557972
uaacaucuagaaugccucu

SEQ ID NO: 2557974 - RNA, 19 nt, Artificial Sequence
  Description of Artificial Sequence: Synthetic oligonucleotide
  Sense strand starting at position 494 of SEQ ID NO: 1888805
gcaggaagcccagaucugu

SEQ ID NO: 2557975 - RNA, 19 nt, Artificial Sequence
  Description of Artificial Sequence: Synthetic oligonucleotide
  Antisense strand to SEQ ID NO: 2557974
acagaucugggcuuccugc

SEQ ID NO: 2557976 - RNA, 19 nt, Artificial Sequence
  Description of Artificial Sequence: Synthetic oligonucleotide
  Sense strand starting at position 513 of SEQ ID NO: 1888805
ggaagcuccucccuugaaa

SEQ ID NO: 2557977 - RNA, 19 nt, Artificial Sequence
  Description of Artificial Sequence: Synthetic oligonucleotide
  Antisense strand to SEQ ID NO: 2557976
uuucaagggaggagcuucc

SEQ ID NO: 2557978 - RNA, 19 nt, Artificial Sequence
  Description of Artificial Sequence: Synthetic oligonucleotide
  Sense strand starting at position 516 of SEQ ID NO: 1888805
agcuccucccuugaaagaa

SEQ ID NO: 2557979 - RNA, 19 nt, Artificial Sequence
  Description of Artificial Sequence: Synthetic oligonucleotide
  Antisense strand to SEQ ID NO: 2557978
uucuuucaagggaggagcu

SEQ ID NO: 2557980 - RNA, 19 nt, Artificial Sequence
  Description of Artificial Sequence: Synthetic oligonucleotide
  Sense strand starting at position 590 of SEQ ID NO: 1888805
cuuugacauuuauaaggau

SEQ ID NO: 2557981 - RNA, 19 nt, Artificial Sequence
  Description of Artificial Sequence: Synthetic oligonucleotide
  Antisense strand to SEQ ID NO: 2557980
auccuuauaaaugucaaag

SEQ ID NO: 2557982 - RNA, 19 nt, Artificial Sequence
  Description of Artificial Sequence: Synthetic oligonucleotide
  Sense strand starting at position 689 of SEQ ID NO: 1888805
uuagaauuggcagaaugcu

SEQ ID NO: 2557983 - RNA, 19 nt, Artificial Sequence
  Description of Artificial Sequence: Synthetic oligonucleotide
  Antisense strand to SEQ ID NO: 2557982
agcauucugccaauucuaa

SEQ ID NO: 2557984 - RNA, 19 nt, Artificial Sequence
  Description of Artificial Sequence: Synthetic oligonucleotide
  Sense strand starting at position 787 of SEQ ID NO: 1888805
guuugcuuccaucauacau

SEQ ID NO: 2557985 - RNA, 19 nt, Artificial Sequence
  Description of Artificial Sequence: Synthetic oligonucleotide
  Antisense strand to SEQ ID NO: 2557984
auguaugauggaagcaaac

SEQ ID NO: 2557986 - RNA, 19 nt, Artificial Sequence
  Description of Artificial Sequence: Synthetic oligonucleotide
  Sense strand starting at position 830 of SEQ ID NO: 1888805
cucuacuuuccugacugua

SEQ ID NO: 2557987 - RNA, 19 nt, Artificial Sequence
  Description of Artificial Sequence: Synthetic oligonucleotide
  Antisense strand to SEQ ID NO: 2557986
uacagucaggaaaguagag

SEQ ID NO: 2557988 - RNA, 19 nt, Artificial Sequence
  Description of Artificial Sequence: Synthetic oligonucleotide
  Sense strand starting at position 832 of SEQ ID NO: 1888805
cuacuuuccugacuguaga

SEQ ID NO: 2557989 - RNA, 19 nt, Artificial Sequence
  Description of Artificial Sequence: Synthetic oligonucleotide
  Antisense strand to SEQ ID NO: 2557988
ucuacagucaggaaaguag

SEQ ID NO: 2557990 - RNA, 19 nt, Artificial Sequence
  Description of Artificial Sequence: Synthetic oligonucleotide
  Sense strand starting at position 1035 of SEQ ID NO: 1888805
aguugugguccugaaugac

SEQ ID NO: 2557991 - RNA, 19 nt, Artificial Sequence
  Description of Artificial Sequence: Synthetic oligonucleotide
  Antisense strand to SEQ ID NO: 2557990
gucauucaggaccacaacu

SEQ ID NO: 2557992 - RNA, 19 nt, Artificial Sequence
  Description of Artificial Sequence: Synthetic oligonucleotide
  Sense strand starting at position 1045 of SEQ ID NO: 1888805
cugaaugacuacccaaagu

SEQ ID NO: 2557993 - RNA, 19 nt, Artificial Sequence
  Description of Artificial Sequence: Synthetic oligonucleotide
  Antisense strand to SEQ ID NO: 2557992
acuuuggguagucauucag

SEQ ID NO: 2557994 - RNA, 19 nt, Artificial Sequence
  Description of Artificial Sequence: Synthetic oligonucleotide
  Sense strand starting at position 1187 of SEQ ID NO: 1888805
uaguuuauuuaggaaagac

SEQ ID NO: 2557995 - RNA, 19 nt, Artificial Sequence
  Description of Artificial Sequence: Synthetic oligonucleotide
  Antisense strand to SEQ ID NO: 2557994
gucuuuccuaaauaaacua

SEQ ID NO: 2557996 - RNA, 19 nt, Artificial Sequence
  Description of Artificial Sequence: Synthetic oligonucleotide
  Sense strand starting at position 1259 of SEQ ID NO: 1888805
ggauguuuguaugcagaga

SEQ ID NO: 2557997 - RNA, 19 nt, Artificial Sequence
  Description of Artificial Sequence: Synthetic oligonucleotide
  Antisense strand to SEQ ID NO: 2557996
ucucugcauacaaacaucc

SEQ ID NO: 2557998 - RNA, 19 nt, Artificial Sequence
  Description of Artificial Sequence: Synthetic oligonucleotide
  Sense strand starting at position 1260 of SEQ ID NO: 1888805
gauguuuguaugcagagau

SEQ ID NO: 2557999 - RNA, 19 nt, Artificial Sequence
  Description of Artificial Sequence: Synthetic oligonucleotide
  Antisense strand to SEQ ID NO: 2557998
aucucugcauacaaacauc

SEQ ID NO: 2558000 - RNA, 19 nt, Artificial Sequence
  Description of Artificial Sequence: Synthetic oligonucleotide
  Sense strand starting at position 1422 of SEQ ID NO: 1888805
cuggacuugccauaaucca

SEQ ID NO: 2558001 - RNA, 19 nt, Artificial Sequence
  Description of Artificial Sequence: Synthetic oligonucleotide
  Antisense strand to SEQ ID NO: 2558000
uggauuauggcaaguccag

SEQ ID NO: 2558002 - RNA, 19 nt, Artificial Sequence
  Description of Artificial Sequence: Synthetic oligonucleotide
  Sense strand starting at position 1548 of SEQ ID NO: 1888805
uaugaagaguaaucugcua

SEQ ID NO: 2558003 - RNA, 19 nt, Artificial Sequence
  Description of Artificial Sequence: Synthetic oligonucleotide
  Antisense strand to SEQ ID NO: 2558002
uagcagauuacucuucaua

SEQ ID NO: 2558004 - RNA, 19 nt, Artificial Sequence
  Description of Artificial Sequence: Synthetic oligonucleotide
  Sense strand starting at position 1754 of SEQ ID NO: 1888805
agguuaucacuacaggcaa

SEQ ID NO: 2558005 - RNA, 19 nt, Artificial Sequence
  Description of Artificial Sequence: Synthetic oligonucleotide
  Antisense strand to SEQ ID NO: 2558004
uugccuguagugauaaccu

SEQ ID NO: 2558006 - RNA, 19 nt, Artificial Sequence
  Description of Artificial Sequence: Synthetic oligonucleotide
  Sense strand starting at position 1830 of SEQ ID NO: 1888805
gccauucuaccugaagagu

SEQ ID NO: 2558007 - RNA, 19 nt, Artificial Sequence
  Description of Artificial Sequence: Synthetic oligonucleotide
  Antisense strand to SEQ ID NO: 2558006
acucuucagguagaauggc

SEQ ID NO: 2558008 - RNA, 19 nt, Artificial Sequence
  Description of Artificial Sequence: Synthetic oligonucleotide
  Sense strand starting at position 1845 of SEQ ID NO: 1888805
gaguaagagagcugggaua

SEQ ID NO: 2558009 - RNA, 19 nt, Artificial Sequence
  Description of Artificial Sequence: Synthetic oligonucleotide
  Antisense strand to SEQ ID NO: 2558008
uaucccagcucucuuacuc

SEQ ID NO: 2558010 - RNA, 19 nt, Artificial Sequence
  Description of Artificial Sequence: Synthetic oligonucleotide
  Sense strand starting at position 1847 of SEQ ID NO: 1888805
guaagagagcugggauauu

SEQ ID NO: 2558011 - RNA, 19 nt, Artificial Sequence
  Description of Artificial Sequence: Synthetic oligonucleotide
  Antisense strand to SEQ ID NO: 2558010
aauaucccagcucucuuac

SEQ ID NO: 2558012 - RNA, 19 nt, Artificial Sequence
  Description of Artificial Sequence: Synthetic oligonucleotide
  Sense strand starting at position 1878 of SEQ ID NO: 1888805
ccugaaggucauugguuga

SEQ ID NO: 2558013 - RNA, 19 nt, Artificial Sequence
  Description of Artificial Sequence: Synthetic oligonucleotide
  Antisense strand to SEQ ID NO: 2558012
ucaaccaaugaccuucagg

SEQ ID NO: 2558014 - RNA, 19 nt, Artificial Sequence
  Description of Artificial Sequence: Synthetic oligonucleotide
  Sense strand starting at position 2027 of SEQ ID NO: 1888805
augcacaggacugguaaau

SEQ ID NO: 2558015 - RNA, 19 nt, Artificial Sequence
  Description of Artificial Sequence: Synthetic oligonucleotide
  Antisense strand to SEQ ID NO: 2558014
auuuaccaguccugugcau

SEQ ID NO: 2558016 - RNA, 19 nt, Artificial Sequence
  Description of Artificial Sequence: Synthetic oligonucleotide
  Sense strand starting at position 2103 of SEQ ID NO: 1888805
gaaagaugaucuuugugac

SEQ ID NO: 2558017 - RNA, 19 nt, Artificial Sequence
  Description of Artificial Sequence: Synthetic oligonucleotide
  Antisense strand to SEQ ID NO: 2558016
gucacaaagaucaucuuuc

SEQ ID NO: 2558018 - RNA, 19 nt, Artificial Sequence
  Description of Artificial Sequence: Synthetic oligonucleotide
  Sense strand starting at position 2116 of SEQ ID NO: 1888805
ugugacguuagauaauaau

SEQ ID NO: 2558019 - RNA, 19 nt, Artificial Sequence
  Description of Artificial Sequence: Synthetic oligonucleotide
  Antisense strand to SEQ ID NO: 2558018
auuauuaucuaacgucaca

SEQ ID NO: 2558020 - RNA, 19 nt, Artificial Sequence
  Description of Artificial Sequence: Synthetic oligonucleotide
  Sense strand starting at position 2226 of SEQ ID NO: 1888805
gcaaguauacuccaggaca

SEQ ID NO: 2558021 - RNA, 19 nt, Artificial Sequence
  Description of Artificial Sequence: Synthetic oligonucleotide
  Antisense strand to SEQ ID NO: 2558020
uguccuggaguauacuugc

SEQ ID NO: 2558022 - RNA, 19 nt, Artificial Sequence
  Description of Artificial Sequence: Synthetic oligonucleotide
  Sense strand starting at position 2405 of SEQ ID NO: 1888805
ucgauuugcuccuuacacu

SEQ ID NO: 2558023 - RNA, 19 nt, Artificial Sequence
  Description of Artificial Sequence: Synthetic oligonucleotide
  Antisense strand to SEQ ID NO: 2558022
aguguaaggagcaaaucga

SEQ ID NO: 2558024 - RNA, 19 nt, Artificial Sequence
  Description of Artificial Sequence: Synthetic oligonucleotide
  Sense strand starting at position 2452 of SEQ ID NO: 1888805
ugauguacuuaguuaaacu

SEQ ID NO: 2558025 - RNA, 19 nt, Artificial Sequence
  Description of Artificial Sequence: Synthetic oligonucleotide
  Antisense strand to SEQ ID NO: 2558024
aguuuaacuaaguacauca

SEQ ID NO: 2558026 - RNA, 19 nt, Artificial Sequence
  Description of Artificial Sequence: Synthetic oligonucleotide
  Sense strand starting at position 2552 of SEQ ID NO: 1888805
guaguacucccaggaaagg

SEQ ID NO: 2558027 - RNA, 19 nt, Artificial Sequence
  Description of Artificial Sequence: Synthetic oligonucleotide
  Antisense strand to SEQ ID NO: 2558026
ccuuuccugggaguacuac

SEQ ID NO: 2558028 - RNA, 19 nt, Artificial Sequence
  Description of Artificial Sequence: Synthetic oligonucleotide
  Sense strand starting at position 2759 of SEQ ID NO: 1888805
gagcaaaugcaucaggacu

SEQ ID NO: 2558029 - RNA, 19 nt, Artificial Sequence
  Description of Artificial Sequence: Synthetic oligonucleotide
  Antisense strand to SEQ ID NO: 2558028
aguccugaugcauuugcuc

SEQ ID NO: 2558030 - RNA, 19 nt, Artificial Sequence
  Description of Artificial Sequence: Synthetic oligonucleotide
  Sense strand starting at position 2795 of SEQ ID NO: 1888805
acuucuuauuuauggaaga

SEQ ID NO: 2558031 - RNA, 19 nt, Artificial Sequence
  Description of Artificial Sequence: Synthetic oligonucleotide
  Antisense strand to SEQ ID NO: 2558030
ucuuccauaaauaagaagu

SEQ ID NO: 2558032 - RNA, 19 nt, Artificial Sequence
  Description of Artificial Sequence: Synthetic oligonucleotide
  Sense strand starting at position 2869 of SEQ ID NO: 1888805
aaauguaauccaggcugau

SEQ ID NO: 2558033 - RNA, 19 nt, Artificial Sequence
  Description of Artificial Sequence: Synthetic oligonucleotide
  Antisense strand to SEQ ID NO: 2558032
aucagccuggauuacauuu

SEQ ID NO: 2558034 - RNA, 19 nt, Artificial Sequence
  Description of Artificial Sequence: Synthetic oligonucleotide
  Sense strand starting at position 2973 of SEQ ID NO: 1888805
ucaugaagguaaucauugu

SEQ ID NO: 2558035 - RNA, 19 nt, Artificial Sequence
  Description of Artificial Sequence: Synthetic oligonucleotide
  Antisense strand to SEQ ID NO: 2558034
acaaugauuaccuucauga

SEQ ID NO: 2558036 - RNA, 19 nt, Artificial Sequence
  Description of Artificial Sequence: Synthetic oligonucleotide
  Sense strand starting at position 3010 of SEQ ID NO: 1888805
acuaauauugggcacugua

SEQ ID NO: 2558037 - RNA, 19 nt, Artificial Sequence
  Description of Artificial Sequence: Synthetic oligonucleotide
  Antisense strand to SEQ ID NO: 2558036
uacagugcccaauauuagu

SEQ ID NO: 2558038 - RNA, 19 nt, Artificial Sequence
  Description of Artificial Sequence: Synthetic oligonucleotide
  Sense strand starting at position 3338 of SEQ ID NO: 1888805
aguuguuguggguauagga

SEQ ID NO: 2558039 - RNA, 19 nt, Artificial Sequence
  Description of Artificial Sequence: Synthetic oligonucleotide
  Antisense strand to SEQ ID NO: 2558038
uccuauacccacaacaacu

SEQ ID NO: 2558040 - RNA, 19 nt, Artificial Sequence
  Description of Artificial Sequence: Synthetic oligonucleotide
  Sense strand starting at position 3400 of SEQ ID NO: 1888805
cuugguuauggguaguuua

SEQ ID NO: 2558041 - RNA, 19 nt, Artificial Sequence
  Description of Artificial Sequence: Synthetic oligonucleotide
  Antisense strand to SEQ ID NO: 2558040
uaaacuacccauaaccaag

SEQ ID NO: 2558042 - RNA, 19 nt, Artificial Sequence
  Description of Artificial Sequence: Synthetic oligonucleotide
  Sense strand starting at position 3425 of SEQ ID NO: 1888805
ggguaagcucaaggagcua

SEQ ID NO: 2558043 - RNA, 19 nt, Artificial Sequence
  Description of Artificial Sequence: Synthetic oligonucleotide
  Antisense strand to SEQ ID NO: 2558042
uagcuccuugagcuuaccc

SEQ ID NO: 2558044 - RNA, 19 nt, Artificial Sequence
  Description of Artificial Sequence: Synthetic oligonucleotide
  Sense strand starting at position 3521 of SEQ ID NO: 1888805
uugauaugacucugaacuc

SEQ ID NO: 2558045 - RNA, 19 nt, Artificial Sequence
  Description of Artificial Sequence: Synthetic oligonucleotide
  Antisense strand to SEQ ID NO: 2558044
gaguucagagucauaucaa

SEQ ID NO: 2558046 - RNA, 19 nt, Artificial Sequence
  Description of Artificial Sequence: Synthetic oligonucleotide
  Sense strand starting at position 3979 of SEQ ID NO: 1888805
guggaugcaccuuaugaaa

SEQ ID NO: 2558047 - RNA, 19 nt, Artificial Sequence
  Description of Artificial Sequence: Synthetic oligonucleotide
  Antisense strand to SEQ ID NO: 2558046
uuucauaaggugcauccac

SEQ ID NO: 2558048 - RNA, 19 nt, Artificial Sequence
  Description of Artificial Sequence: Synthetic oligonucleotide
  Sense strand starting at position 42 of SEQ ID NO: 1888806
augccuuaaugacuggaaa

SEQ ID NO: 2558049 - RNA, 19 nt, Artificial Sequence
  Description of Artificial Sequence: Synthetic oligonucleotide
  Antisense strand to SEQ ID NO: 2558048
uuuccagucauuaaggcau

SEQ ID NO: 2558050 - RNA, 19 nt, Artificial Sequence
  Description of Artificial Sequence: Synthetic oligonucleotide
  Sense strand starting at position 43 of SEQ ID NO: 1888806
ugccuuaaugacuggaaag

SEQ ID NO: 2558051 - RNA, 19 nt, Artificial Sequence
  Description of Artificial Sequence: Synthetic oligonucleotide
  Antisense strand to SEQ ID NO: 2558050
cuuuccagucauuaaggca

SEQ ID NO: 2558052 - RNA, 19 nt, Artificial Sequence
  Description of Artificial Sequence: Synthetic oligonucleotide
  Sense strand starting at position 241 of SEQ ID NO: 1888806
cuguaaucucaggauggua

SEQ ID NO: 2558053 - RNA, 19 nt, Artificial Sequence
  Description of Artificial Sequence: Synthetic oligonucleotide
  Antisense strand to SEQ ID NO: 2558052
uaccauccugagauuacag

SEQ ID NO: 2558054 - RNA, 19 nt, Artificial Sequence
  Description of Artificial Sequence: Synthetic oligonucleotide
  Sense strand starting at position 243 of SEQ ID NO: 1888806
guaaucucaggaugguaua

SEQ ID NO: 2558055 - RNA, 19 nt, Artificial Sequence
  Description of Artificial Sequence: Synthetic oligonucleotide
  Antisense strand to SEQ ID NO: 2558054
uauaccauccugagauuac

SEQ ID NO: 2558056 - RNA, 19 nt, Artificial Sequence
  Description of Artificial Sequence: Synthetic oligonucleotide
  Sense strand starting at position 244 of SEQ ID NO: 1888806
uaaucucaggaugguauau

SEQ ID NO: 2558057 - RNA, 19 nt, Artificial Sequence
  Description of Artificial Sequence: Synthetic oligonucleotide
  Antisense strand to SEQ ID NO: 2558056
auauaccauccugagauua

SEQ ID NO: 2558058 - RNA, 19 nt, Artificial Sequence
  Description of Artificial Sequence: Synthetic oligonucleotide
  Sense strand starting at position 312 of SEQ ID NO: 1888806
cuguguacacaucaguaaa

SEQ ID NO: 2558059 - RNA, 19 nt, Artificial Sequence
  Description of Artificial Sequence: Synthetic oligonucleotide
  Antisense strand to SEQ ID NO: 2558058
uuuacugauguguacacag

SEQ ID NO: 2558060 - RNA, 19 nt, Artificial Sequence
  Description of Artificial Sequence: Synthetic oligonucleotide
  Sense strand starting at position 315 of SEQ ID NO: 1888806
uguacacaucaguaaaguu

SEQ ID NO: 2558061 - RNA, 19 nt, Artificial Sequence
  Description of Artificial Sequence: Synthetic oligonucleotide
  Antisense strand to SEQ ID NO: 2558060
aacuuuacugauguguaca

SEQ ID NO: 2558062 - RNA, 19 nt, Artificial Sequence
  Description of Artificial Sequence: Synthetic oligonucleotide
  Sense strand starting at position 358 of SEQ ID NO: 1888806
ugucauuugugaguugauu

SEQ ID NO: 2558063 - RNA, 19 nt, Artificial Sequence
  Description of Artificial Sequence: Synthetic oligonucleotide
  Antisense strand to SEQ ID NO: 2558062
aaucaacucacaaaugaca

SEQ ID NO: 2558064 - RNA, 19 nt, Artificial Sequence
  Description of Artificial Sequence: Synthetic oligonucleotide
  Sense strand starting at position 556 of SEQ ID NO: 1888806
ggucaaguggaugguaaau

SEQ ID NO: 2558065 - RNA, 19 nt, Artificial Sequence
  Description of Artificial Sequence: Synthetic oligonucleotide
  Antisense strand to SEQ ID NO: 2558064
auuuaccauccacuugacc

SEQ ID NO: 2558066 - RNA, 19 nt, Artificial Sequence
  Description of Artificial Sequence: Synthetic oligonucleotide
  Sense strand starting at position 750 of SEQ ID NO: 1888806
cugucaugaagaggaguau

SEQ ID NO: 2558067 - RNA, 19 nt, Artificial Sequence
  Description of Artificial Sequence: Synthetic oligonucleotide
  Antisense strand to SEQ ID NO: 2558066
auacuccucuucaugacag

SEQ ID NO: 2558068 - RNA, 19 nt, Artificial Sequence
  Description of Artificial Sequence: Synthetic oligonucleotide
  Sense strand starting at position 801 of SEQ ID NO: 1888806
ccuugaaagcuugacuugu

SEQ ID NO: 2558069 - RNA, 19 nt, Artificial Sequence
  Description of Artificial Sequence: Synthetic oligonucleotide
  Antisense strand to SEQ ID NO: 2558068
acaagucaagcuuucaagg

SEQ ID NO: 2558070 - RNA, 19 nt, Artificial Sequence
  Description of Artificial Sequence: Synthetic oligonucleotide
  Sense strand starting at position 942 of SEQ ID NO: 1888806
gucagcucucaggagaguu

SEQ ID NO: 2558071 - RNA, 19 nt, Artificial Sequence
  Description of Artificial Sequence: Synthetic oligonucleotide
  Antisense strand to SEQ ID NO: 2558070
aacucuccugagagcugac

SEQ ID NO: 2558072 - RNA, 19 nt, Artificial Sequence
  Description of Artificial Sequence: Synthetic oligonucleotide
  Sense strand starting at position 1272 of SEQ ID NO: 1888806
guaccacauuaacucgaau

SEQ ID NO: 2558073 - RNA, 19 nt, Artificial Sequence
  Description of Artificial Sequence: Synthetic oligonucleotide
  Antisense strand to SEQ ID NO: 2558072
auucgaguuaaugugguac

SEQ ID NO: 2558074 - RNA, 19 nt, Artificial Sequence
  Description of Artificial Sequence: Synthetic oligonucleotide
  Sense strand starting at position 1278 of SEQ ID NO: 1888806
cauuaacucgaaugaguac

SEQ ID NO: 2558075 - RNA, 19 nt, Artificial Sequence
  Description of Artificial Sequence: Synthetic oligonucleotide
  Antisense strand to SEQ ID NO: 2558074
guacucauucgaguuaaug

SEQ ID NO: 2558076 - RNA, 19 nt, Artificial Sequence
  Description of Artificial Sequence: Synthetic oligonucleotide
  Sense strand starting at position 1285 of SEQ ID NO: 1888806
ucgaaugaguacucauaaa

SEQ ID NO: 2558077 - RNA, 19 nt, Artificial Sequence
  Description of Artificial Sequence: Synthetic oligonucleotide
  Antisense strand to SEQ ID NO: 2558076
uuuaugaguacucauucga

SEQ ID NO: 2558078 - RNA, 19 nt, Artificial Sequence
  Description of Artificial Sequence: Synthetic oligonucleotide
  Sense strand starting at position 1350 of SEQ ID NO: 1888806
uuugcuucucuccagggaa

SEQ ID NO: 2558079 - RNA, 19 nt, Artificial Sequence
  Description of Artificial Sequence: Synthetic oligonucleotide
  Antisense strand to SEQ ID NO: 2558078
uucccuggagagaagcaaa

SEQ ID NO: 2558080 - RNA, 19 nt, Artificial Sequence
  Description of Artificial Sequence: Synthetic oligonucleotide
  Sense strand starting at position 1399 of SEQ ID NO: 1888806
cugggcuuuccaugaagaa

SEQ ID NO: 2558081 - RNA, 19 nt, Artificial Sequence
  Description of Artificial Sequence: Synthetic oligonucleotide
  Antisense strand to SEQ ID NO: 2558080
uucuucauggaaagcccag

SEQ ID NO: 2558082 - RNA, 19 nt, Artificial Sequence
  Description of Artificial Sequence: Synthetic oligonucleotide
  Sense strand starting at position 1416 of SEQ ID NO: 1888806
aagcuauuggauugaguca

SEQ ID NO: 2558083 - RNA, 19 nt, Artificial Sequence
  Description of Artificial Sequence: Synthetic oligonucleotide
  Antisense strand to SEQ ID NO: 2558082
ugacucaauccaauagcuu

SEQ ID NO: 2558084 - RNA, 19 nt, Artificial Sequence
  Description of Artificial Sequence: Synthetic oligonucleotide
  Sense strand starting at position 1432 of SEQ ID NO: 1888806
ucacuauuggaaugaguac

SEQ ID NO: 2558085 - RNA, 19 nt, Artificial Sequence
  Description of Artificial Sequence: Synthetic oligonucleotide
  Antisense strand to SEQ ID NO: 2558084
guacucauuccaauaguga

SEQ ID NO: 2558086 - RNA, 19 nt, Artificial Sequence
  Description of Artificial Sequence: Synthetic oligonucleotide
  Sense strand starting at position 1444 of SEQ ID NO: 1888806
ugaguacagcauuggaaau

SEQ ID NO: 2558087 - RNA, 19 nt, Artificial Sequence
  Description of Artificial Sequence: Synthetic oligonucleotide
  Antisense strand to SEQ ID NO: 2558086
auuuccaaugcuguacuca

SEQ ID NO: 2558088 - RNA, 19 nt, Artificial Sequence
  Description of Artificial Sequence: Synthetic oligonucleotide
  Sense strand starting at position 2137 of SEQ ID NO: 1888806
uggccagcccuagaaauua

SEQ ID NO: 2558089 - RNA, 19 nt, Artificial Sequence
  Description of Artificial Sequence: Synthetic oligonucleotide
  Antisense strand to SEQ ID NO: 2558088
uaauuucuagggcuggcca

SEQ ID NO: 2558090 - RNA, 19 nt, Artificial Sequence
  Description of Artificial Sequence: Synthetic oligonucleotide
  Sense strand starting at position 2227 of SEQ ID NO: 1888806
uuggauucccugcaggauu

SEQ ID NO: 2558091 - RNA, 19 nt, Artificial Sequence
  Description of Artificial Sequence: Synthetic oligonucleotide
  Antisense strand to SEQ ID NO: 2558090
aauccugcagggaauccaa

SEQ ID NO: 2558092 - RNA, 19 nt, Artificial Sequence
  Description of Artificial Sequence: Synthetic oligonucleotide
  Sense strand starting at position 2229 of SEQ ID NO: 1888806
ggauucccugcaggauuaa

SEQ ID NO: 2558093 - RNA, 19 nt, Artificial Sequence
  Description of Artificial Sequence: Synthetic oligonucleotide
  Antisense strand to SEQ ID NO: 2558092
uuaauccugcagggaaucc

SEQ ID NO: 2558094 - RNA, 19 nt, Artificial Sequence
  Description of Artificial Sequence: Synthetic oligonucleotide
  Sense strand starting at position 2384 of SEQ ID NO: 1888806
ccacuuacauguuuggaga

SEQ ID NO: 2558095 - RNA, 19 nt, Artificial Sequence
  Description of Artificial Sequence: Synthetic oligonucleotide
  Antisense strand to SEQ ID NO: 2558094
ucuccaaacauguaagugg

SEQ ID NO: 2558096 - RNA, 19 nt, Artificial Sequence
  Description of Artificial Sequence: Synthetic oligonucleotide
  Sense strand starting at position 2385 of SEQ ID NO: 1888806
cacuuacauguuuggagau

SEQ ID NO: 2558097 - RNA, 19 nt, Artificial Sequence
  Description of Artificial Sequence: Synthetic oligonucleotide
  Antisense strand to SEQ ID NO: 2558096
aucuccaaacauguaagug

SEQ ID NO: 2558098 - RNA, 19 nt, Artificial Sequence
  Description of Artificial Sequence: Synthetic oligonucleotide
  Sense strand starting at position 2410 of SEQ ID NO: 1888806
ugaauccuugguuaaguca

SEQ ID NO: 2558099 - RNA, 19 nt, Artificial Sequence
  Description of Artificial Sequence: Synthetic oligonucleotide
  Antisense strand to SEQ ID NO: 2558098
ugacuuaaccaaggauuca

SEQ ID NO: 2558100 - RNA, 19 nt, Artificial Sequence
  Description of Artificial Sequence: Synthetic oligonucleotide
  Sense strand starting at position 2458 of SEQ ID NO: 1888806
uugggaagguaucucuaga

SEQ ID NO: 2558101 - RNA, 19 nt, Artificial Sequence
  Description of Artificial Sequence: Synthetic oligonucleotide
  Antisense strand to SEQ ID NO: 2558100
ucuagagauaccuucccaa

SEQ ID NO: 2558102 - RNA, 19 nt, Artificial Sequence
  Description of Artificial Sequence: Synthetic oligonucleotide
  Sense strand starting at position 2598 of SEQ ID NO: 1888806
agguuauguauguacacau

SEQ ID NO: 2558103 - RNA, 19 nt, Artificial Sequence
  Description of Artificial Sequence: Synthetic oligonucleotide
  Antisense strand to SEQ ID NO: 2558102
auguguacauacauaaccu

SEQ ID NO: 2558104 - RNA, 19 nt, Artificial Sequence
  Description of Artificial Sequence: Synthetic oligonucleotide
  Sense strand starting at position 2641 of SEQ ID NO: 1888806
gcuucuauucgcucuguaa

SEQ ID NO: 2558105 - RNA, 19 nt, Artificial Sequence
  Description of Artificial Sequence: Synthetic oligonucleotide
  Antisense strand to SEQ ID NO: 2558104
uuacagagcgaauagaagc

SEQ ID NO: 2558106 - RNA, 19 nt, Artificial Sequence
  Description of Artificial Sequence: Synthetic oligonucleotide
  Sense strand starting at position 2966 of SEQ ID NO: 1888806
ggcuauuagguacauacau

SEQ ID NO: 2558107 - RNA, 19 nt, Artificial Sequence
  Description of Artificial Sequence: Synthetic oligonucleotide
  Antisense strand to SEQ ID NO: 2558106
auguauguaccuaauagcc

SEQ ID NO: 2558108 - RNA, 19 nt, Artificial Sequence
  Description of Artificial Sequence: Synthetic oligonucleotide
  Sense strand starting at position 3019 of SEQ ID NO: 1888806
auauguauauggucauaug

SEQ ID NO: 2558109 - RNA, 19 nt, Artificial Sequence
  Description of Artificial Sequence: Synthetic oligonucleotide
  Antisense strand to SEQ ID NO: 2558108
cauaugaccauauacauau

SEQ ID NO: 2558110 - RNA, 19 nt, Artificial Sequence
  Description of Artificial Sequence: Synthetic oligonucleotide
  Sense strand starting at position 3020 of SEQ ID NO: 1888806
uauguauauggucauaugu

SEQ ID NO: 2558111 - RNA, 19 nt, Artificial Sequence
  Description of Artificial Sequence: Synthetic oligonucleotide
  Antisense strand to SEQ ID NO: 2558110
acauaugaccauauacaua

SEQ ID NO: 2558112 - RNA, 19 nt, Artificial Sequence
  Description of Artificial Sequence: Synthetic oligonucleotide
  Sense strand starting at position 3298 of SEQ ID NO: 1888806
aauuuaacuugugaugaug

SEQ ID NO: 2558113 - RNA, 19 nt, Artificial Sequence
  Description of Artificial Sequence: Synthetic oligonucleotide
  Antisense strand to SEQ ID NO: 2558112
caucaucacaaguuaaauu

SEQ ID NO: 2558114 - RNA, 19 nt, Artificial Sequence
  Description of Artificial Sequence: Synthetic oligonucleotide
  Sense strand starting at position 3306 of SEQ ID NO: 1888806
uugugaugaugacuagguu

SEQ ID NO: 2558115 - RNA, 19 nt, Artificial Sequence
  Description of Artificial Sequence: Synthetic oligonucleotide
  Antisense strand to SEQ ID NO: 2558114
aaccuagucaucaucacaa

SEQ ID NO: 2558116 - RNA, 19 nt, Artificial Sequence
  Description of Artificial Sequence: Synthetic oligonucleotide
  Sense strand starting at position 3307 of SEQ ID NO: 1888806
ugugaugaugacuagguuu

SEQ ID NO: 2558117 - RNA, 19 nt, Artificial Sequence
  Description of Artificial Sequence: Synthetic oligonucleotide
  Antisense strand to SEQ ID NO: 2558116
aaaccuagucaucaucaca

SEQ ID NO: 2558118 - RNA, 19 nt, Artificial Sequence
  Description of Artificial Sequence: Synthetic oligonucleotide
  Sense strand starting at position 3468 of SEQ ID NO: 1888806
guaaucacauacuuagagu

SEQ ID NO: 2558119 - RNA, 19 nt, Artificial Sequence
  Description of Artificial Sequence: Synthetic oligonucleotide
  Antisense strand to SEQ ID NO: 2558118
acucuaaguaugugauuac

SEQ ID NO: 2558120 - RNA, 19 nt, Artificial Sequence
  Description of Artificial Sequence: Synthetic oligonucleotide
  Sense strand starting at position 3642 of SEQ ID NO: 1888806
uggccagaucuaggcaaga

SEQ ID NO: 2558121 - RNA, 19 nt, Artificial Sequence
  Description of Artificial Sequence: Synthetic oligonucleotide
  Antisense strand to SEQ ID NO: 2558120
ucuugccuagaucuggcca

SEQ ID NO: 2558122 - RNA, 19 nt, Artificial Sequence
  Description of Artificial Sequence: Synthetic oligonucleotide
  Sense strand starting at position 3729 of SEQ ID NO: 1888806
gcaauaucaggccagauau

SEQ ID NO: 2558123 - RNA, 19 nt, Artificial Sequence
  Description of Artificial Sequence: Synthetic oligonucleotide
  Antisense strand to SEQ ID NO: 2558122
auaucuggccugauauugc

SEQ ID NO: 2558124 - RNA, 19 nt, Artificial Sequence
  Description of Artificial Sequence: Synthetic oligonucleotide
  Sense strand starting at position 3828 of SEQ ID NO: 1888806
acaggaauaucgguacaac

SEQ ID NO: 2558125 - RNA, 19 nt, Artificial Sequence
  Description of Artificial Sequence: Synthetic oligonucleotide
  Antisense strand to SEQ ID NO: 2558124
guuguaccgauauuccugu

SEQ ID NO: 2558126 - RNA, 19 nt, Artificial Sequence
  Description of Artificial Sequence: Synthetic oligonucleotide
  Sense strand starting at position 3952 of SEQ ID NO: 1888806
uugaaaugcugaccacaca

SEQ ID NO: 2558127 - RNA, 19 nt, Artificial Sequence
  Description of Artificial Sequence: Synthetic oligonucleotide
  Antisense strand to SEQ ID NO: 2558126
uguguggucagcauuucaa

SEQ ID NO: 2558128 - RNA, 19 nt, Artificial Sequence
  Description of Artificial Sequence: Synthetic oligonucleotide
  Sense strand starting at position 111 of SEQ ID NO: 1888807
gcagacaaaugguugccua

SEQ ID NO: 2558129 - RNA, 19 nt, Artificial Sequence
  Description of Artificial Sequence: Synthetic oligonucleotide
  Antisense strand to SEQ ID NO: 2558128
uaggcaaccauuugucugc

SEQ ID NO: 2558130 - RNA, 19 nt, Artificial Sequence
  Description of Artificial Sequence: Synthetic oligonucleotide
  Sense strand starting at position 122 of SEQ ID NO: 1888807
guugccuagggcuaaacau

SEQ ID NO: 2558131 - RNA, 19 nt, Artificial Sequence
  Description of Artificial Sequence: Synthetic oligonucleotide
  Antisense strand to SEQ ID NO: 2558130
auguuuagcccuaggcaac

SEQ ID NO: 2558132 - RNA, 19 nt, Artificial Sequence
  Description of Artificial Sequence: Synthetic oligonucleotide
  Sense strand starting at position 434 of SEQ ID NO: 1888807
cacuuaaagucaguggauu

SEQ ID NO: 2558133 - RNA, 19 nt, Artificial Sequence
  Description of Artificial Sequence: Synthetic oligonucleotide
  Antisense strand to SEQ ID NO: 2558132
aauccacugacuuuaagug

SEQ ID NO: 2558134 - RNA, 19 nt, Artificial Sequence
  Description of Artificial Sequence: Synthetic oligonucleotide
  Sense strand starting at position 1216 of SEQ ID NO: 1888807
ugaauuaaguuucugagac

SEQ ID NO: 2558135 - RNA, 19 nt, Artificial Sequence
  Description of Artificial Sequence: Synthetic oligonucleotide
  Antisense strand to SEQ ID NO: 2558134
gucucagaaacuuaauuca

SEQ ID NO: 2558136 - RNA, 19 nt, Artificial Sequence
  Description of Artificial Sequence: Synthetic oligonucleotide
  Sense strand starting at position 1220 of SEQ ID NO: 1888807
uuaaguuucugagacauuu

SEQ ID NO: 2558137 - RNA, 19 nt, Artificial Sequence
  Description of Artificial Sequence: Synthetic oligonucleotide
  Antisense strand to SEQ ID NO: 2558136
aaaugucucagaaacuuaa

SEQ ID NO: 2558138 - RNA, 19 nt, Artificial Sequence
  Description of Artificial Sequence: Synthetic oligonucleotide
  Sense strand starting at position 1283 of SEQ ID NO: 1888807
agcaucucagucugagaaa

SEQ ID NO: 2558139 - RNA, 19 nt, Artificial Sequence
  Description of Artificial Sequence: Synthetic oligonucleotide
  Antisense strand to SEQ ID NO: 2558138
uuucucagacugagaugcu

SEQ ID NO: 2558140 - RNA, 19 nt, Artificial Sequence
  Description of Artificial Sequence: Synthetic oligonucleotide
  Sense strand starting at position 1295 of SEQ ID NO: 1888807
ugagaaauuguacgauguc

SEQ ID NO: 2558141 - RNA, 19 nt, Artificial Sequence
  Description of Artificial Sequence: Synthetic oligonucleotide
  Antisense strand to SEQ ID NO: 2558140
gacaucguacaauuucuca

SEQ ID NO: 2558142 - RNA, 19 nt, Artificial Sequence
  Description of Artificial Sequence: Synthetic oligonucleotide
  Sense strand starting at position 1298 of SEQ ID NO: 1888807
gaaauuguacgaugucuug

SEQ ID NO: 2558143 - RNA, 19 nt, Artificial Sequence
  Description of Artificial Sequence: Synthetic oligonucleotide
  Antisense strand to SEQ ID NO: 2558142
caagacaucguacaauuuc

SEQ ID NO: 2558144 - RNA, 19 nt, Artificial Sequence
  Description of Artificial Sequence: Synthetic oligonucleotide
  Sense strand starting at position 1308 of SEQ ID NO: 1888807
gaugucuugagguguacaa

SEQ ID NO: 2558145 - RNA, 19 nt, Artificial Sequence
  Description of Artificial Sequence: Synthetic oligonucleotide
  Antisense strand to SEQ ID NO: 2558144
uuguacaccucaagacauc

SEQ ID NO: 2558146 - RNA, 19 nt, Artificial Sequence
  Description of Artificial Sequence: Synthetic oligonucleotide
  Sense strand starting at position 1349 of SEQ ID NO: 1888807
caguguguagucuagauac

SEQ ID NO: 2558147 - RNA, 19 nt, Artificial Sequence
  Description of Artificial Sequence: Synthetic oligonucleotide
  Antisense strand to SEQ ID NO: 2558146
guaucuagacuacacacug

SEQ ID NO: 2558148 - RNA, 19 nt, Artificial Sequence
  Description of Artificial Sequence: Synthetic oligonucleotide
  Sense strand starting at position 1351 of SEQ ID NO: 1888807
guguguagucuagauacuc

SEQ ID NO: 2558149 - RNA, 19 nt, Artificial Sequence
  Description of Artificial Sequence: Synthetic oligonucleotide
  Antisense strand to SEQ ID NO: 2558148
gaguaucuagacuacacac

SEQ ID NO: 2558150 - RNA, 19 nt, Artificial Sequence
  Description of Artificial Sequence: Synthetic oligonucleotide
  Sense strand starting at position 1422 of SEQ ID NO: 1888807
gcaagaaacuagucaguua

SEQ ID NO: 2558151 - RNA, 19 nt, Artificial Sequence
  Description of Artificial Sequence: Synthetic oligonucleotide
  Antisense strand to SEQ ID NO: 2558150
uaacugacuaguuucuugc

SEQ ID NO: 2558152 - RNA, 19 nt, Artificial Sequence
  Description of Artificial Sequence: Synthetic oligonucleotide
  Sense strand starting at position 1425 of SEQ ID NO: 1888807
agaaacuagucaguuaaca

SEQ ID NO: 2558153 - RNA, 19 nt, Artificial Sequence
  Description of Artificial Sequence: Synthetic oligonucleotide
  Antisense strand to SEQ ID NO: 2558152
uguuaacugacuaguuucu

SEQ ID NO: 2558154 - RNA, 19 nt, Artificial Sequence
  Description of Artificial Sequence: Synthetic oligonucleotide
  Sense strand starting at position 1480 of SEQ ID NO: 1888807
ccaggugaauuguucuauu

SEQ ID NO: 2558155 - RNA, 19 nt, Artificial Sequence
  Description of Artificial Sequence: Synthetic oligonucleotide
  Antisense strand to SEQ ID NO: 2558154
aauagaacaauucaccugg

SEQ ID NO: 2558156 - RNA, 19 nt, Artificial Sequence
  Description of Artificial Sequence: Synthetic oligonucleotide
  Sense strand starting at position 1491 of SEQ ID NO: 1888807
guucuauuacagcauaucu

SEQ ID NO: 2558157 - RNA, 19 nt, Artificial Sequence
  Description of Artificial Sequence: Synthetic oligonucleotide
  Antisense strand to SEQ ID NO: 2558156
agauaugcuguaauagaac

SEQ ID NO: 2558158 - RNA, 19 nt, Artificial Sequence
  Description of Artificial Sequence: Synthetic oligonucleotide
  Sense strand starting at position 1576 of SEQ ID NO: 1888807
agugcuuauugggcaagga

SEQ ID NO: 2558159 - RNA, 19 nt, Artificial Sequence
  Description of Artificial Sequence: Synthetic oligonucleotide
  Antisense strand to SEQ ID NO: 2558158
uccuugcccaauaagcacu

SEQ ID NO: 2558160 - RNA, 19 nt, Artificial Sequence
  Description of Artificial Sequence: Synthetic oligonucleotide
  Sense strand starting at position 1577 of SEQ ID NO: 1888807
gugcuuauugggcaaggau

SEQ ID NO: 2558161 - RNA, 19 nt, Artificial Sequence
  Description of Artificial Sequence: Synthetic oligonucleotide
  Antisense strand to SEQ ID NO: 2558160
auccuugcccaauaagcac

SEQ ID NO: 2558162 - RNA, 19 nt, Artificial Sequence
  Description of Artificial Sequence: Synthetic oligonucleotide
  Sense strand starting at position 1739 of SEQ ID NO: 1888807
gggacaaagucccuccuuu

SEQ ID NO: 2558163 - RNA, 19 nt, Artificial Sequence
  Description of Artificial Sequence: Synthetic oligonucleotide
  Antisense strand to SEQ ID NO: 2558162
aaaggagggacuuuguccc

SEQ ID NO: 2558164 - RNA, 19 nt, Artificial Sequence
  Description of Artificial Sequence: Synthetic oligonucleotide
  Sense strand starting at position 2309 of SEQ ID NO: 1888807
gccagauaauuaucuugaa

SEQ ID NO: 2558165 - RNA, 19 nt, Artificial Sequence
  Description of Artificial Sequence: Synthetic oligonucleotide
  Antisense strand to SEQ ID NO: 2558164
uucaagauaauuaucuggc

SEQ ID NO: 2558166 - RNA, 19 nt, Artificial Sequence
  Description of Artificial Sequence: Synthetic oligonucleotide
  Sense strand starting at position 2388 of SEQ ID NO: 1888807
uuguuuguuugauuaagag

SEQ ID NO: 2558167 - RNA, 19 nt, Artificial Sequence
  Description of Artificial Sequence: Synthetic oligonucleotide
  Antisense strand to SEQ ID NO: 2558166
cucuuaaucaaacaaacaa

SEQ ID NO: 2558168 - RNA, 19 nt, Artificial Sequence
  Description of Artificial Sequence: Synthetic oligonucleotide
  Sense strand starting at position 2445 of SEQ ID NO: 1888807
ccgagauugugagcuaauu

SEQ ID NO: 2558169 - RNA, 19 nt, Artificial Sequence
  Description of Artificial Sequence: Synthetic oligonucleotide
  Antisense strand to SEQ ID NO: 2558168
aauuagcucacaaucucgg

SEQ ID NO: 2558170 - RNA, 19 nt, Artificial Sequence
  Description of Artificial Sequence: Synthetic oligonucleotide
  Sense strand starting at position 2503 of SEQ ID NO: 1888807
gacaauaauggugaagugu

SEQ ID NO: 2558171 - RNA, 19 nt, Artificial Sequence
  Description of Artificial Sequence: Synthetic oligonucleotide
  Antisense strand to SEQ ID NO: 2558170
acacuucaccauuauuguc

SEQ ID NO: 2558172 - RNA, 19 nt, Artificial Sequence
  Description of Artificial Sequence: Synthetic oligonucleotide
  Sense strand starting at position 2512 of SEQ ID NO: 1888807
ggugaaguguuugugagga

SEQ ID NO: 2558173 - RNA, 19 nt, Artificial Sequence
  Description of Artificial Sequence: Synthetic oligonucleotide
  Antisense strand to SEQ ID NO: 2558172
uccucacaaacacuucacc

SEQ ID NO: 2558174 - RNA, 19 nt, Artificial Sequence
  Description of Artificial Sequence: Synthetic oligonucleotide
  Sense strand starting at position 2517 of SEQ ID NO: 1888807
aguguuugugaggauucac

SEQ ID NO: 2558175 - RNA, 19 nt, Artificial Sequence
  Description of Artificial Sequence: Synthetic oligonucleotide
  Antisense strand to SEQ ID NO: 2558174
gugaauccucacaaacacu

SEQ ID NO: 2558176 - RNA, 19 nt, Artificial Sequence
  Description of Artificial Sequence: Synthetic oligonucleotide
  Sense strand starting at position 2537 of SEQ ID NO: 1888807
gguguuugugaggagcaaa

SEQ ID NO: 2558177 - RNA, 19 nt, Artificial Sequence
  Description of Artificial Sequence: Synthetic oligonucleotide
  Antisense strand to SEQ ID NO: 2558176
uuugcuccucacaaacacc

SEQ ID NO: 2558178 - RNA, 19 nt, Artificial Sequence
  Description of Artificial Sequence: Synthetic oligonucleotide
  Sense strand starting at position 2580 of SEQ ID NO: 1888807
agcagacagguuuaagcua

SEQ ID NO: 2558179 - RNA, 19 nt, Artificial Sequence
  Description of Artificial Sequence: Synthetic oligonucleotide
  Antisense strand to SEQ ID NO: 2558178
uagcuuaaaccugucugcu

SEQ ID NO: 2558180 - RNA, 19 nt, Artificial Sequence
  Description of Artificial Sequence: Synthetic oligonucleotide
  Sense strand starting at position 2645 of SEQ ID NO: 1888807
aguaaacaccuucgagaaa

SEQ ID NO: 2558181 - RNA, 19 nt, Artificial Sequence
  Description of Artificial Sequence: Synthetic oligonucleotide
  Antisense strand to SEQ ID NO: 2558180
uuucucgaagguguuuacu

SEQ ID NO: 2558182 - RNA, 19 nt, Artificial Sequence
  Description of Artificial Sequence: Synthetic oligonucleotide
  Sense strand starting at position 2700 of SEQ ID NO: 1888807
uaaggugaauuguccauua

SEQ ID NO: 2558183 - RNA, 19 nt, Artificial Sequence
  Description of Artificial Sequence: Synthetic oligonucleotide
  Antisense strand to SEQ ID NO: 2558182
uaauggacaauucaccuua

SEQ ID NO: 2558184 - RNA, 19 nt, Artificial Sequence
  Description of Artificial Sequence: Synthetic oligonucleotide
  Sense strand starting at position 2762 of SEQ ID NO: 1888807
cggccuggacacugagaau

SEQ ID NO: 2558185 - RNA, 19 nt, Artificial Sequence
  Description of Artificial Sequence: Synthetic oligonucleotide
  Antisense strand to SEQ ID NO: 2558184
auucucaguguccaggccg

SEQ ID NO: 2558186 - RNA, 19 nt, Artificial Sequence
  Description of Artificial Sequence: Synthetic oligonucleotide
  Sense strand starting at position 2857 of SEQ ID NO: 1888807
cguucucugcaggcgaaua

SEQ ID NO: 2558187 - RNA, 19 nt, Artificial Sequence
  Description of Artificial Sequence: Synthetic oligonucleotide
  Antisense strand to SEQ ID NO: 2558186
uauucgccugcagagaacg

SEQ ID NO: 2558188 - RNA, 19 nt, Artificial Sequence
  Description of Artificial Sequence: Synthetic oligonucleotide
  Sense strand starting at position 2907 of SEQ ID NO: 1888807
ccaucaacucgucaaugga

SEQ ID NO: 2558189 - RNA, 19 nt, Artificial Sequence
  Description of Artificial Sequence: Synthetic oligonucleotide
  Antisense strand to SEQ ID NO: 2558188
uccauugacgaguugaugg

SEQ ID NO: 2558190 - RNA, 19 nt, Artificial Sequence
  Description of Artificial Sequence: Synthetic oligonucleotide
  Sense strand starting at position 3001 of SEQ ID NO: 1888807
ccuagaauguugguaucuc

SEQ ID NO: 2558191 - RNA, 19 nt, Artificial Sequence
  Description of Artificial Sequence: Synthetic oligonucleotide
  Antisense strand to SEQ ID NO: 2558190
gagauaccaacauucuagg

SEQ ID NO: 2558192 - RNA, 19 nt, Artificial Sequence
  Description of Artificial Sequence: Synthetic oligonucleotide
  Sense strand starting at position 3145 of SEQ ID NO: 1888807
agugguguucucccguagu

SEQ ID NO: 2558193 - RNA, 19 nt, Artificial Sequence
  Description of Artificial Sequence: Synthetic oligonucleotide
  Antisense strand to SEQ ID NO: 2558192
acuacgggagaacaccacu

SEQ ID NO: 2558194 - RNA, 19 nt, Artificial Sequence
  Description of Artificial Sequence: Synthetic oligonucleotide
  Sense strand starting at position 3147 of SEQ ID NO: 1888807
ugguguucucccguaguga

SEQ ID NO: 2558195 - RNA, 19 nt, Artificial Sequence
  Description of Artificial Sequence: Synthetic oligonucleotide
  Antisense strand to SEQ ID NO: 2558194
ucacuacgggagaacacca

SEQ ID NO: 2558196 - RNA, 19 nt, Artificial Sequence
  Description of Artificial Sequence: Synthetic oligonucleotide
  Sense strand starting at position 3196 of SEQ ID NO: 1888807
ucaggugcauuggugauau

SEQ ID NO: 2558197 - RNA, 19 nt, Artificial Sequence
  Description of Artificial Sequence: Synthetic oligonucleotide
  Antisense strand to SEQ ID NO: 2558196
auaucaccaaugcaccuga

SEQ ID NO: 2558198 - RNA, 19 nt, Artificial Sequence
  Description of Artificial Sequence: Synthetic oligonucleotide
  Sense strand starting at position 3198 of SEQ ID NO: 1888807
aggugcauuggugauauau

SEQ ID NO: 2558199 - RNA, 19 nt, Artificial Sequence
  Description of Artificial Sequence: Synthetic oligonucleotide
  Antisense strand to SEQ ID NO: 2558198
auauaucaccaaugcaccu

SEQ ID NO: 2558200 - RNA, 19 nt, Artificial Sequence
  Description of Artificial Sequence: Synthetic oligonucleotide
  Sense strand starting at position 3332 of SEQ ID NO: 1888807
uggaauaauuagccaagca

SEQ ID NO: 2558201 - RNA, 19 nt, Artificial Sequence
  Description of Artificial Sequence: Synthetic oligonucleotide
  Antisense strand to SEQ ID NO: 2558200
ugcuuggcuaauuauucca

SEQ ID NO: 2558202 - RNA, 19 nt, Artificial Sequence
  Description of Artificial Sequence: Synthetic oligonucleotide
  Sense strand starting at position 3773 of SEQ ID NO: 1888807
ggugauaucuuccucuuua

SEQ ID NO: 2558203 - RNA, 19 nt, Artificial Sequence
  Description of Artificial Sequence: Synthetic oligonucleotide
  Antisense strand to SEQ ID NO: 2558202
uaaagaggaagauaucacc

SEQ ID NO: 2558204 - RNA, 19 nt, Artificial Sequence
  Description of Artificial Sequence: Synthetic oligonucleotide
  Sense strand starting at position 3774 of SEQ ID NO: 1888807
gugauaucuuccucuuuac

SEQ ID NO: 2558205 - RNA, 19 nt, Artificial Sequence
  Description of Artificial Sequence: Synthetic oligonucleotide
  Antisense strand to SEQ ID NO: 2558204
guaaagaggaagauaucac

SEQ ID NO: 2558206 - RNA, 19 nt, Artificial Sequence
  Description of Artificial Sequence: Synthetic oligonucleotide
  Sense strand starting at position 3943 of SEQ ID NO: 1888807
cuguguuuccaucaauucu

SEQ ID NO: 2558207 - RNA, 19 nt, Artificial Sequence
  Description of Artificial Sequence: Synthetic oligonucleotide
  Antisense strand to SEQ ID NO: 2558206
agaauugauggaaacacag

SEQ ID NO: 2558208 - RNA, 19 nt, Artificial Sequence
  Description of Artificial Sequence: Synthetic oligonucleotide
  Sense strand starting at position 112 of SEQ ID NO: 1888808
ccaguaaugggaggcauca

SEQ ID NO: 2558209 - RNA, 19 nt, Artificial Sequence
  Description of Artificial Sequence: Synthetic oligonucleotide
  Antisense strand to SEQ ID NO: 2558208
ugaugccucccauuacugg

SEQ ID NO: 2558210 - RNA, 19 nt, Artificial Sequence
  Description of Artificial Sequence: Synthetic oligonucleotide
  Sense strand starting at position 180 of SEQ ID NO: 1888808
ggaugaaucuaucugguuc

SEQ ID NO: 2558211 - RNA, 19 nt, Artificial Sequence
  Description of Artificial Sequence: Synthetic oligonucleotide
  Antisense strand to SEQ ID NO: 2558210
gaaccagauagauucaucc

SEQ ID NO: 2558212 - RNA, 19 nt, Artificial Sequence
  Description of Artificial Sequence: Synthetic oligonucleotide
  Sense strand starting at position 184 of SEQ ID NO: 1888808
gaaucuaucugguucucag

SEQ ID NO: 2558213 - RNA, 19 nt, Artificial Sequence
  Description of Artificial Sequence: Synthetic oligonucleotide
  Antisense strand to SEQ ID NO: 2558212
cugagaaccagauagauuc

SEQ ID NO: 2558214 - RNA, 19 nt, Artificial Sequence
  Description of Artificial Sequence: Synthetic oligonucleotide
  Sense strand starting at position 256 of SEQ ID NO: 1888808
augagaguucaaugaggca

SEQ ID NO: 2558215 - RNA, 19 nt, Artificial Sequence
  Description of Artificial Sequence: Synthetic oligonucleotide
  Antisense strand to SEQ ID NO: 2558214
ugccucauugaacucucau

SEQ ID NO: 2558216 - RNA, 19 nt, Artificial Sequence
  Description of Artificial Sequence: Synthetic oligonucleotide
  Sense strand starting at position 339 of SEQ ID NO: 1888808
cgacgucugguagaaagaa

SEQ ID NO: 2558217 - RNA, 19 nt, Artificial Sequence
  Description of Artificial Sequence: Synthetic oligonucleotide
  Antisense strand to SEQ ID NO: 2558216
uucuuucuaccagacgucg

SEQ ID NO: 2558218 - RNA, 19 nt, Artificial Sequence
  Description of Artificial Sequence: Synthetic oligonucleotide
  Sense strand starting at position 351 of SEQ ID NO: 1888808
gaaagaaaguggcuuuauu

SEQ ID NO: 2558219 - RNA, 19 nt, Artificial Sequence
  Description of Artificial Sequence: Synthetic oligonucleotide
  Antisense strand to SEQ ID NO: 2558218
aauaaagccacuuucuuuc

SEQ ID NO: 2558220 - RNA, 19 nt, Artificial Sequence
  Description of Artificial Sequence: Synthetic oligonucleotide
  Sense strand starting at position 667 of SEQ ID NO: 1888808
guaaacauguaguuagaua

SEQ ID NO: 2558221 - RNA, 19 nt, Artificial Sequence
  Description of Artificial Sequence: Synthetic oligonucleotide
  Antisense strand to SEQ ID NO: 2558220
uaucuaacuacauguuuac

SEQ ID NO: 2558222 - RNA, 19 nt, Artificial Sequence
  Description of Artificial Sequence: Synthetic oligonucleotide
  Sense strand starting at position 700 of SEQ ID NO: 1888808
ggagugucugguggagaga

SEQ ID NO: 2558223 - RNA, 19 nt, Artificial Sequence
  Description of Artificial Sequence: Synthetic oligonucleotide
  Antisense strand to SEQ ID NO: 2558222
ucucuccaccagacacucc

SEQ ID NO: 2558224 - RNA, 19 nt, Artificial Sequence
  Description of Artificial Sequence: Synthetic oligonucleotide
  Sense strand starting at position 701 of SEQ ID NO: 1888808
gagugucugguggagagaa

SEQ ID NO: 2558225 - RNA, 19 nt, Artificial Sequence
  Description of Artificial Sequence: Synthetic oligonucleotide
  Antisense strand to SEQ ID NO: 2558224
uucucuccaccagacacuc

SEQ ID NO: 2558226 - RNA, 19 nt, Artificial Sequence
  Description of Artificial Sequence: Synthetic oligonucleotide
  Sense strand starting at position 810 of SEQ ID NO: 1888808
agagguacuugguuauaua

SEQ ID NO: 2558227 - RNA, 19 nt, Artificial Sequence
  Description of Artificial Sequence: Synthetic oligonucleotide
  Antisense strand to SEQ ID NO: 2558226
uauauaaccaaguaccucu

SEQ ID NO: 2558228 - RNA, 19 nt, Artificial Sequence
  Description of Artificial Sequence: Synthetic oligonucleotide
  Sense strand starting at position 811 of SEQ ID NO: 1888808
gagguacuugguuauauau

SEQ ID NO: 2558229 - RNA, 19 nt, Artificial Sequence
  Description of Artificial Sequence: Synthetic oligonucleotide
  Antisense strand to SEQ ID NO: 2558228
auauauaaccaaguaccuc

SEQ ID NO: 2558230 - RNA, 19 nt, Artificial Sequence
  Description of Artificial Sequence: Synthetic oligonucleotide
  Sense strand starting at position 931 of SEQ ID NO: 1888808
cucugacaugcuuaagaua

SEQ ID NO: 2558231 - RNA, 19 nt, Artificial Sequence
  Description of Artificial Sequence: Synthetic oligonucleotide
  Antisense strand to SEQ ID NO: 2558230
uaucuuaagcaugucagag

SEQ ID NO: 2558232 - RNA, 19 nt, Artificial Sequence
  Description of Artificial Sequence: Synthetic oligonucleotide
  Sense strand starting at position 959 of SEQ ID NO: 1888808
aucuuaaaccugggauauu

SEQ ID NO: 2558233 - RNA, 19 nt, Artificial Sequence
  Description of Artificial Sequence: Synthetic oligonucleotide
  Antisense strand to SEQ ID NO: 2558232
aauaucccagguuuaagau

SEQ ID NO: 2558234 - RNA, 19 nt, Artificial Sequence
  Description of Artificial Sequence: Synthetic oligonucleotide
  Sense strand starting at position 1038 of SEQ ID NO: 1888808
cagccagagugaucugaug

SEQ ID NO: 2558235 - RNA, 19 nt, Artificial Sequence
  Description of Artificial Sequence: Synthetic oligonucleotide
  Antisense strand to SEQ ID NO: 2558234
caucagaucacucuggcug

SEQ ID NO: 2558236 - RNA, 19 nt, Artificial Sequence
  Description of Artificial Sequence: Synthetic oligonucleotide
  Sense strand starting at position 1114 of SEQ ID NO: 1888808
uuggguuggguccagagua

SEQ ID NO: 2558237 - RNA, 19 nt, Artificial Sequence
  Description of Artificial Sequence: Synthetic oligonucleotide
  Antisense strand to SEQ ID NO: 2558236
uacucuggacccaacccaa

SEQ ID NO: 2558238 - RNA, 19 nt, Artificial Sequence
  Description of Artificial Sequence: Synthetic oligonucleotide
  Sense strand starting at position 1162 of SEQ ID NO: 1888808
auuauuauuugcucuggua

SEQ ID NO: 2558239 - RNA, 19 nt, Artificial Sequence
  Description of Artificial Sequence: Synthetic oligonucleotide
  Antisense strand to SEQ ID NO: 2558238
uaccagagcaaauaauaau

SEQ ID NO: 2558240 - RNA, 19 nt, Artificial Sequence
  Description of Artificial Sequence: Synthetic oligonucleotide
  Sense strand starting at position 1171 of SEQ ID NO: 1888808
ugcucugguaucuaggaau

SEQ ID NO: 2558241 - RNA, 19 nt, Artificial Sequence
  Description of Artificial Sequence: Synthetic oligonucleotide
  Antisense strand to SEQ ID NO: 2558240
auuccuagauaccagagca

SEQ ID NO: 2558242 - RNA, 19 nt, Artificial Sequence
  Description of Artificial Sequence: Synthetic oligonucleotide
  Sense strand starting at position 1284 of SEQ ID NO: 1888808
ccaacauaggcuuauugau

SEQ ID NO: 2558243 - RNA, 19 nt, Artificial Sequence
  Description of Artificial Sequence: Synthetic oligonucleotide
  Antisense strand to SEQ ID NO: 2558242
aucaauaagccuauguugg

SEQ ID NO: 2558244 - RNA, 19 nt, Artificial Sequence
  Description of Artificial Sequence: Synthetic oligonucleotide
  Sense strand starting at position 1292 of SEQ ID NO: 1888808
ggcuuauugauggaagcac

SEQ ID NO: 2558245 - RNA, 19 nt, Artificial Sequence
  Description of Artificial Sequence: Synthetic oligonucleotide
  Antisense strand to SEQ ID NO: 2558244
gugcuuccaucaauaagcc

SEQ ID NO: 2558246 - RNA, 19 nt, Artificial Sequence
  Description of Artificial Sequence: Synthetic oligonucleotide
  Sense strand starting at position 1349 of SEQ ID NO: 1888808
acaagaagaugcucuaucu

SEQ ID NO: 2558247 - RNA, 19 nt, Artificial Sequence
  Description of Artificial Sequence: Synthetic oligonucleotide
  Antisense strand to SEQ ID NO: 2558246
agauagagcaucuucuugu

SEQ ID NO: 2558248 - RNA, 19 nt, Artificial Sequence
  Description of Artificial Sequence: Synthetic oligonucleotide
  Sense strand starting at position 1601 of SEQ ID NO: 1888808
cuagcaaguagugagugaa

SEQ ID NO: 2558249 - RNA, 19 nt, Artificial Sequence
  Description of Artificial Sequence: Synthetic oligonucleotide
  Antisense strand to SEQ ID NO: 2558248
uucacucacuacuugcuag

SEQ ID NO: 2558250 - RNA, 19 nt, Artificial Sequence
  Description of Artificial Sequence: Synthetic oligonucleotide
  Sense strand starting at position 1649 of SEQ ID NO: 1888808
agggucacugcucacauaa

SEQ ID NO: 2558251 - RNA, 19 nt, Artificial Sequence
  Description of Artificial Sequence: Synthetic oligonucleotide
  Antisense strand to SEQ ID NO: 2558250
uuaugugagcagugacccu

SEQ ID NO: 2558252 - RNA, 19 nt, Artificial Sequence
  Description of Artificial Sequence: Synthetic oligonucleotide
  Sense strand starting at position 1838 of SEQ ID NO: 1888808
accuaagaugccuaugagu

SEQ ID NO: 2558253 - RNA, 19 nt, Artificial Sequence
  Description of Artificial Sequence: Synthetic oligonucleotide
  Antisense strand to SEQ ID NO: 2558252
acucauaggcaucuuaggu

SEQ ID NO: 2558254 - RNA, 19 nt, Artificial Sequence
  Description of Artificial Sequence: Synthetic oligonucleotide
  Sense strand starting at position 1840 of SEQ ID NO: 1888808
cuaagaugccuaugaguga

SEQ ID NO: 2558255 - RNA, 19 nt, Artificial Sequence
  Description of Artificial Sequence: Synthetic oligonucleotide
  Antisense strand to SEQ ID NO: 2558254
ucacucauaggcaucuuag

SEQ ID NO: 2558256 - RNA, 19 nt, Artificial Sequence
  Description of Artificial Sequence: Synthetic oligonucleotide
  Sense strand starting at position 1845 of SEQ ID NO: 1888808
augccuaugagugacugaa

SEQ ID NO: 2558257 - RNA, 19 nt, Artificial Sequence
  Description of Artificial Sequence: Synthetic oligonucleotide
  Antisense strand to SEQ ID NO: 2558256
uucagucacucauaggcau

SEQ ID NO: 2558258 - RNA, 19 nt, Artificial Sequence
  Description of Artificial Sequence: Synthetic oligonucleotide
  Sense strand starting at position 2151 of SEQ ID NO: 1888808
gcugauuucuuagccaucu

SEQ ID NO: 2558259 - RNA, 19 nt, Artificial Sequence
  Description of Artificial Sequence: Synthetic oligonucleotide
  Antisense strand to SEQ ID NO: 2558258
agauggcuaagaaaucagc

SEQ ID NO: 2558260 - RNA, 19 nt, Artificial Sequence
  Description of Artificial Sequence: Synthetic oligonucleotide
  Sense strand starting at position 2162 of SEQ ID NO: 1888808
agccaucuugcagaaauau

SEQ ID NO: 2558261 - RNA, 19 nt, Artificial Sequence
  Description of Artificial Sequence: Synthetic oligonucleotide
  Antisense strand to SEQ ID NO: 2558260
auauuucugcaagauggcu

SEQ ID NO: 2558262 - RNA, 19 nt, Artificial Sequence
  Description of Artificial Sequence: Synthetic oligonucleotide
  Sense strand starting at position 2190 of SEQ ID NO: 1888808
gcacuuauccauuagguac

SEQ ID NO: 2558263 - RNA, 19 nt, Artificial Sequence
  Description of Artificial Sequence: Synthetic oligonucleotide
  Antisense strand to SEQ ID NO: 2558262
guaccuaauggauaagugc

SEQ ID NO: 2558264 - RNA, 19 nt, Artificial Sequence
  Description of Artificial Sequence: Synthetic oligonucleotide
  Sense strand starting at position 2289 of SEQ ID NO: 1888808
agauaaugauaguugcaaa

SEQ ID NO: 2558265 - RNA, 19 nt, Artificial Sequence
  Description of Artificial Sequence: Synthetic oligonucleotide
  Antisense strand to SEQ ID NO: 2558264
uuugcaacuaucauuaucu

SEQ ID NO: 2558266 - RNA, 19 nt, Artificial Sequence
  Description of Artificial Sequence: Synthetic oligonucleotide
  Sense strand starting at position 2375 of SEQ ID NO: 1888808
uccagugcucaggauauua

SEQ ID NO: 2558267 - RNA, 19 nt, Artificial Sequence
  Description of Artificial Sequence: Synthetic oligonucleotide
  Antisense strand to SEQ ID NO: 2558266
uaauauccugagcacugga

SEQ ID NO: 2558268 - RNA, 19 nt, Artificial Sequence
  Description of Artificial Sequence: Synthetic oligonucleotide
  Sense strand starting at position 2377 of SEQ ID NO: 1888808
cagugcucaggauauuaac

SEQ ID NO: 2558269 - RNA, 19 nt, Artificial Sequence
  Description of Artificial Sequence: Synthetic oligonucleotide
  Antisense strand to SEQ ID NO: 2558268
guuaauauccugagcacug

SEQ ID NO: 2558270 - RNA, 19 nt, Artificial Sequence
  Description of Artificial Sequence: Synthetic oligonucleotide
  Sense strand starting at position 2493 of SEQ ID NO: 1888808
ugagcauaagauugggauu

SEQ ID NO: 2558271 - RNA, 19 nt, Artificial Sequence
  Description of Artificial Sequence: Synthetic oligonucleotide
  Antisense strand to SEQ ID NO: 2558270
aaucccaaucuuaugcuca

SEQ ID NO: 2558272 - RNA, 19 nt, Artificial Sequence
  Description of Artificial Sequence: Synthetic oligonucleotide
  Sense strand starting at position 2624 of SEQ ID NO: 1888808
gaguacuuguaaccagaag

SEQ ID NO: 2558273 - RNA, 19 nt, Artificial Sequence
  Description of Artificial Sequence: Synthetic oligonucleotide
  Antisense strand to SEQ ID NO: 2558272
cuucugguuacaaguacuc

SEQ ID NO: 2558274 - RNA, 19 nt, Artificial Sequence
  Description of Artificial Sequence: Synthetic oligonucleotide
  Sense strand starting at position 3154 of SEQ ID NO: 1888808
gcgauuccucccgugaucu

SEQ ID NO: 2558275 - RNA, 19 nt, Artificial Sequence
  Description of Artificial Sequence: Synthetic oligonucleotide
  Antisense strand to SEQ ID NO: 2558274
agaucacgggaggaaucgc

SEQ ID NO: 2558276 - RNA, 19 nt, Artificial Sequence
  Description of Artificial Sequence: Synthetic oligonucleotide
  Sense strand starting at position 3206 of SEQ ID NO: 1888808
aaauaccguccagauguaa

SEQ ID NO: 2558277 - RNA, 19 nt, Artificial Sequence
  Description of Artificial Sequence: Synthetic oligonucleotide
  Antisense strand to SEQ ID NO: 2558276
uuacaucuggacgguauuu

SEQ ID NO: 2558278 - RNA, 19 nt, Artificial Sequence
  Description of Artificial Sequence: Synthetic oligonucleotide
  Sense strand starting at position 3660 of SEQ ID NO: 1888808
gggaaacuuuggccugaua

SEQ ID NO: 2558279 - RNA, 19 nt, Artificial Sequence
  Description of Artificial Sequence: Synthetic oligonucleotide
  Antisense strand to SEQ ID NO: 2558278
uaucaggccaaaguuuccc

SEQ ID NO: 2558280 - RNA, 19 nt, Artificial Sequence
  Description of Artificial Sequence: Synthetic oligonucleotide
  Sense strand starting at position 3669 of SEQ ID NO: 1888808
uggccugauaacuagguuu

SEQ ID NO: 2558281 - RNA, 19 nt, Artificial Sequence
  Description of Artificial Sequence: Synthetic oligonucleotide
  Antisense strand to SEQ ID NO: 2558280
aaaccuaguuaucaggcca

SEQ ID NO: 2558282 - RNA, 19 nt, Artificial Sequence
  Description of Artificial Sequence: Synthetic oligonucleotide
  Sense strand starting at position 3675 of SEQ ID NO: 1888808
gauaacuagguuuguauaa

SEQ ID NO: 2558283 - RNA, 19 nt, Artificial Sequence
  Description of Artificial Sequence: Synthetic oligonucleotide
  Antisense strand to SEQ ID NO: 2558282
uuauacaaaccuaguuauc

SEQ ID NO: 2558284 - RNA, 19 nt, Artificial Sequence
  Description of Artificial Sequence: Synthetic oligonucleotide
  Sense strand starting at position 3912 of SEQ ID NO: 1888808
agccucaaucuggauauua

SEQ ID NO: 2558285 - RNA, 19 nt, Artificial Sequence
  Description of Artificial Sequence: Synthetic oligonucleotide
  Antisense strand to SEQ ID NO: 2558284
uaauauccagauugaggcu

SEQ ID NO: 2558286 - RNA, 19 nt, Artificial Sequence
  Description of Artificial Sequence: Synthetic oligonucleotide
  Sense strand starting at position 3953 of SEQ ID NO: 1888808
gguguugggagguaaguau

SEQ ID NO: 2558287 - RNA, 19 nt, Artificial Sequence
  Description of Artificial Sequence: Synthetic oligonucleotide
  Antisense strand to SEQ ID NO: 2558286
auacuuaccucccaacacc

SEQ ID NO: 2558288 - RNA, 19 nt, Artificial Sequence
  Description of Artificial Sequence: Synthetic oligonucleotide
  Sense strand starting at position 343 of SEQ ID NO: 1888809
aaagguuuacugcacgaau

SEQ ID NO: 2558289 - RNA, 19 nt, Artificial Sequence
  Description of Artificial Sequence: Synthetic oligonucleotide
  Antisense strand to SEQ ID NO: 2558288
auucgugcaguaaaccuuu

SEQ ID NO: 2558290 - RNA, 19 nt, Artificial Sequence
  Description of Artificial Sequence: Synthetic oligonucleotide
  Sense strand starting at position 346 of SEQ ID NO: 1888809
gguuuacugcacgaaugaa

SEQ ID NO: 2558291 - RNA, 19 nt, Artificial Sequence
  Description of Artificial Sequence: Synthetic oligonucleotide
  Antisense strand to SEQ ID NO: 2558290
uucauucgugcaguaaacc

SEQ ID NO: 2558292 - RNA, 19 nt, Artificial Sequence
  Description of Artificial Sequence: Synthetic oligonucleotide
  Sense strand starting at position 506 of SEQ ID NO: 1888809
auaguagcacuugauggau

SEQ ID NO: 2558293 - RNA, 19 nt, Artificial Sequence
  Description of Artificial Sequence: Synthetic oligonucleotide
  Antisense strand to SEQ ID NO: 2558292
auccaucaagugcuacuau

SEQ ID NO: 2558294 - RNA, 19 nt, Artificial Sequence
  Description of Artificial Sequence: Synthetic oligonucleotide
  Sense strand starting at position 509 of SEQ ID NO: 1888809
guagcacuugauggauauu

SEQ ID NO: 2558295 - RNA, 19 nt, Artificial Sequence
  Description of Artificial Sequence: Synthetic oligonucleotide
  Antisense strand to SEQ ID NO: 2558294
aauauccaucaagugcuac

SEQ ID NO: 2558296 - RNA, 19 nt, Artificial Sequence
  Description of Artificial Sequence: Synthetic oligonucleotide
  Sense strand starting at position 533 of SEQ ID NO: 1888809
gaaguauaugcucagcaua

SEQ ID NO: 2558297 - RNA, 19 nt, Artificial Sequence
  Description of Artificial Sequence: Synthetic oligonucleotide
  Antisense strand to SEQ ID NO: 2558296
uaugcugagcauauacuuc

SEQ ID NO: 2558298 - RNA, 19 nt, Artificial Sequence
  Description of Artificial Sequence: Synthetic oligonucleotide
  Sense strand starting at position 536 of SEQ ID NO: 1888809
guauaugcucagcauaaca

SEQ ID NO: 2558299 - RNA, 19 nt, Artificial Sequence
  Description of Artificial Sequence: Synthetic oligonucleotide
  Antisense strand to SEQ ID NO: 2558298
uguuaugcugagcauauac

SEQ ID NO: 2558300 - RNA, 19 nt, Artificial Sequence
  Description of Artificial Sequence: Synthetic oligonucleotide
  Sense strand starting at position 1156 of SEQ ID NO: 1888809
ggauuugacuaucacauug

SEQ ID NO: 2558301 - RNA, 19 nt, Artificial Sequence
  Description of Artificial Sequence: Synthetic oligonucleotide
  Antisense strand to SEQ ID NO: 2558300
caaugugauagucaaaucc

SEQ ID NO: 2558302 - RNA, 19 nt, Artificial Sequence
  Description of Artificial Sequence: Synthetic oligonucleotide
  Sense strand starting at position 1626 of SEQ ID NO: 1888809
gaaggaaauuugugagaau

SEQ ID NO: 2558303 - RNA, 19 nt, Artificial Sequence
  Description of Artificial Sequence: Synthetic oligonucleotide
  Antisense strand to SEQ ID NO: 2558302
auucucacaaauuuccuuc

SEQ ID NO: 2558304 - RNA, 19 nt, Artificial Sequence
  Description of Artificial Sequence: Synthetic oligonucleotide
  Sense strand starting at position 1627 of SEQ ID NO: 1888809
aaggaaauuugugagaaug

SEQ ID NO: 2558305 - RNA, 19 nt, Artificial Sequence
  Description of Artificial Sequence: Synthetic oligonucleotide
  Antisense strand to SEQ ID NO: 2558304
cauucucacaaauuuccuu

SEQ ID NO: 2558306 - RNA, 19 nt, Artificial Sequence
  Description of Artificial Sequence: Synthetic oligonucleotide
  Sense strand starting at position 1629 of SEQ ID NO: 1888809
ggaaauuugugagaaugca

SEQ ID NO: 2558307 - RNA, 19 nt, Artificial Sequence
  Description of Artificial Sequence: Synthetic oligonucleotide
  Antisense strand to SEQ ID NO: 2558306
ugcauucucacaaauuucc

SEQ ID NO: 2558308 - RNA, 19 nt, Artificial Sequence
  Description of Artificial Sequence: Synthetic oligonucleotide
  Sense strand starting at position 1663 of SEQ ID NO: 1888809
gagccuagauguccuagau

SEQ ID NO: 2558309 - RNA, 19 nt, Artificial Sequence
  Description of Artificial Sequence: Synthetic oligonucleotide
  Antisense strand to SEQ ID NO: 2558308
aucuaggacaucuaggcuc

SEQ ID NO: 2558310 - RNA, 19 nt, Artificial Sequence
  Description of Artificial Sequence: Synthetic oligonucleotide
  Sense strand starting at position 1684 of SEQ ID NO: 1888809
gaaagaaucugaccugguu

SEQ ID NO: 2558311 - RNA, 19 nt, Artificial Sequence
  Description of Artificial Sequence: Synthetic oligonucleotide
  Antisense strand to SEQ ID NO: 2558310
aaccaggucagauucuuuc

SEQ ID NO: 2558312 - RNA, 19 nt, Artificial Sequence
  Description of Artificial Sequence: Synthetic oligonucleotide
  Sense strand starting at position 2129 of SEQ ID NO: 1888809
ucuauuaggauggguguua

SEQ ID NO: 2558313 - RNA, 19 nt, Artificial Sequence
  Description of Artificial Sequence: Synthetic oligonucleotide
  Antisense strand to SEQ ID NO: 2558312
uaacacccauccuaauaga

SEQ ID NO: 2558314 - RNA, 19 nt, Artificial Sequence
  Description of Artificial Sequence: Synthetic oligonucleotide
  Sense strand starting at position 2130 of SEQ ID NO: 1888809
cuauuaggauggguguuaa

SEQ ID NO: 2558315 - RNA, 19 nt, Artificial Sequence
  Description of Artificial Sequence: Synthetic oligonucleotide
  Antisense strand to SEQ ID NO: 2558314
uuaacacccauccuaauag

SEQ ID NO: 2558316 - RNA, 19 nt, Artificial Sequence
  Description of Artificial Sequence: Synthetic oligonucleotide
  Sense strand starting at position 2153 of SEQ ID NO: 1888809
cgaugucguuauuuaauau

SEQ ID NO: 2558317 - RNA, 19 nt, Artificial Sequence
  Description of Artificial Sequence: Synthetic oligonucleotide
  Antisense strand to SEQ ID NO: 2558316
auauuaaauaacgacaucg

SEQ ID NO: 2558318 - RNA, 19 nt, Artificial Sequence
  Description of Artificial Sequence: Synthetic oligonucleotide
  Sense strand starting at position 2283 of SEQ ID NO: 1888809
guaaacucugaauggcuua

SEQ ID NO: 2558319 - RNA, 19 nt, Artificial Sequence
  Description of Artificial Sequence: Synthetic oligonucleotide
  Antisense strand to SEQ ID NO: 2558318
uaagccauucagaguuuac

SEQ ID NO: 2558320 - RNA, 19 nt, Artificial Sequence
  Description of Artificial Sequence: Synthetic oligonucleotide
  Sense strand starting at position 2288 of SEQ ID NO: 1888809
cucugaauggcuuauaugu

SEQ ID NO: 2558321 - RNA, 19 nt, Artificial Sequence
  Description of Artificial Sequence: Synthetic oligonucleotide
  Antisense strand to SEQ ID NO: 2558320
acauauaagccauucagag

SEQ ID NO: 2558322 - RNA, 19 nt, Artificial Sequence
  Description of Artificial Sequence: Synthetic oligonucleotide
  Sense strand starting at position 2298 of SEQ ID NO: 1888809
cuuauaugugugggaggga

SEQ ID NO: 2558323 - RNA, 19 nt, Artificial Sequence
  Description of Artificial Sequence: Synthetic oligonucleotide
  Antisense strand to SEQ ID NO: 2558322
ucccucccacacauauaag

SEQ ID NO: 2558324 - RNA, 19 nt, Artificial Sequence
  Description of Artificial Sequence: Synthetic oligonucleotide
  Sense strand starting at position 2380 of SEQ ID NO: 1888809
aucacagagcugugaaacu

SEQ ID NO: 2558325 - RNA, 19 nt, Artificial Sequence
  Description of Artificial Sequence: Synthetic oligonucleotide
  Antisense strand to SEQ ID NO: 2558324
aguuucacagcucugugau

SEQ ID NO: 2558326 - RNA, 19 nt, Artificial Sequence
  Description of Artificial Sequence: Synthetic oligonucleotide
  Sense strand starting at position 2389 of SEQ ID NO: 1888809
cugugaaacuagcuacaaa

SEQ ID NO: 2558327 - RNA, 19 nt, Artificial Sequence
  Description of Artificial Sequence: Synthetic oligonucleotide
  Antisense strand to SEQ ID NO: 2558326
uuuguagcuaguuucacag

SEQ ID NO: 2558328 - RNA, 19 nt, Artificial Sequence
  Description of Artificial Sequence: Synthetic oligonucleotide
  Sense strand starting at position 2430 of SEQ ID NO: 1888809
cauguaaguugacuagagu

SEQ ID NO: 2558329 - RNA, 19 nt, Artificial Sequence
  Description of Artificial Sequence: Synthetic oligonucleotide
  Antisense strand to SEQ ID NO: 2558328
acucuagucaacuuacaug

SEQ ID NO: 2558330 - RNA, 19 nt, Artificial Sequence
  Description of Artificial Sequence: Synthetic oligonucleotide
  Sense strand starting at position 2433 of SEQ ID NO: 1888809
guaaguugacuagagugca

SEQ ID NO: 2558331 - RNA, 19 nt, Artificial Sequence
  Description of Artificial Sequence: Synthetic oligonucleotide
  Antisense strand to SEQ ID NO: 2558330
ugcacucuagucaacuuac

SEQ ID NO: 2558332 - RNA, 19 nt, Artificial Sequence
  Description of Artificial Sequence: Synthetic oligonucleotide
  Sense strand starting at position 2601 of SEQ ID NO: 1888809
aggaaaucucugcgaccua

SEQ ID NO: 2558333 - RNA, 19 nt, Artificial Sequence
  Description of Artificial Sequence: Synthetic oligonucleotide
  Antisense strand to SEQ ID NO: 2558332
uaggucgcagagauuuccu

SEQ ID NO: 2558334 - RNA, 19 nt, Artificial Sequence
  Description of Artificial Sequence: Synthetic oligonucleotide
  Sense strand starting at position 2664 of SEQ ID NO: 1888809
cuuucuuguagguauggaa

SEQ ID NO: 2558335 - RNA, 19 nt, Artificial Sequence
  Description of Artificial Sequence: Synthetic oligonucleotide
  Antisense strand to SEQ ID NO: 2558334
uuccauaccuacaagaaag

SEQ ID NO: 2558336 - RNA, 19 nt, Artificial Sequence
  Description of Artificial Sequence: Synthetic oligonucleotide
  Sense strand starting at position 2688 of SEQ ID NO: 1888809
ugacccaucuuacuaguga

SEQ ID NO: 2558337 - RNA, 19 nt, Artificial Sequence
  Description of Artificial Sequence: Synthetic oligonucleotide
  Antisense strand to SEQ ID NO: 2558336
ucacuaguaagauggguca

SEQ ID NO: 2558338 - RNA, 19 nt, Artificial Sequence
  Description of Artificial Sequence: Synthetic oligonucleotide
  Sense strand starting at position 2696 of SEQ ID NO: 1888809
cuuacuagugaugauaugu

SEQ ID NO: 2558339 - RNA, 19 nt, Artificial Sequence
  Description of Artificial Sequence: Synthetic oligonucleotide
  Antisense strand to SEQ ID NO: 2558338
acauaucaucacuaguaag

SEQ ID NO: 2558340 - RNA, 19 nt, Artificial Sequence
  Description of Artificial Sequence: Synthetic oligonucleotide
  Sense strand starting at position 2722 of SEQ ID NO: 1888809
uaugauuuaugguaaccag

SEQ ID NO: 2558341 - RNA, 19 nt, Artificial Sequence
  Description of Artificial Sequence: Synthetic oligonucleotide
  Antisense strand to SEQ ID NO: 2558340
cugguuaccauaaaucaua

SEQ ID NO: 2558342 - RNA, 19 nt, Artificial Sequence
  Description of Artificial Sequence: Synthetic oligonucleotide
  Sense strand starting at position 2822 of SEQ ID NO: 1888809
ucccuuuagcuauggacaa

SEQ ID NO: 2558343 - RNA, 19 nt, Artificial Sequence
  Description of Artificial Sequence: Synthetic oligonucleotide
  Antisense strand to SEQ ID NO: 2558342
uuguccauagcuaaaggga

SEQ ID NO: 2558344 - RNA, 19 nt, Artificial Sequence
  Description of Artificial Sequence: Synthetic oligonucleotide
  Sense strand starting at position 2905 of SEQ ID NO: 1888809
gagagagcuuaguccuuaa

SEQ ID NO: 2558345 - RNA, 19 nt, Artificial Sequence
  Description of Artificial Sequence: Synthetic oligonucleotide
  Antisense strand to SEQ ID NO: 2558344
uuaaggacuaagcucucuc

SEQ ID NO: 2558346 - RNA, 19 nt, Artificial Sequence
  Description of Artificial Sequence: Synthetic oligonucleotide
  Sense strand starting at position 2917 of SEQ ID NO: 1888809
uccuuaaugccagaguaga

SEQ ID NO: 2558347 - RNA, 19 nt, Artificial Sequence
  Description of Artificial Sequence: Synthetic oligonucleotide
  Antisense strand to SEQ ID NO: 2558346
ucuacucuggcauuaagga

SEQ ID NO: 2558348 - RNA, 19 nt, Artificial Sequence
  Description of Artificial Sequence: Synthetic oligonucleotide
  Sense strand starting at position 2969 of SEQ ID NO: 1888809
gagcucuuugaguaauuau

SEQ ID NO: 2558349 - RNA, 19 nt, Artificial Sequence
  Description of Artificial Sequence: Synthetic oligonucleotide
  Antisense strand to SEQ ID NO: 2558348
auaauuacucaaagagcuc

SEQ ID NO: 2558350 - RNA, 19 nt, Artificial Sequence
  Description of Artificial Sequence: Synthetic oligonucleotide
  Sense strand starting at position 2995 of SEQ ID NO: 1888809
cuuggaacuuugguuucua

SEQ ID NO: 2558351 - RNA, 19 nt, Artificial Sequence
  Description of Artificial Sequence: Synthetic oligonucleotide
  Antisense strand to SEQ ID NO: 2558350
uagaaaccaaaguuccaag

SEQ ID NO: 2558352 - RNA, 19 nt, Artificial Sequence
  Description of Artificial Sequence: Synthetic oligonucleotide
  Sense strand starting at position 3156 of SEQ ID NO: 1888809
caguaaauauuugggaaau

SEQ ID NO: 2558353 - RNA, 19 nt, Artificial Sequence
  Description of Artificial Sequence: Synthetic oligonucleotide
  Antisense strand to SEQ ID NO: 2558352
auuucccaaauauuuacug

SEQ ID NO: 2558354 - RNA, 19 nt, Artificial Sequence
  Description of Artificial Sequence: Synthetic oligonucleotide
  Sense strand starting at position 3262 of SEQ ID NO: 1888809
ggcauugagagaggcaaua

SEQ ID NO: 2558355 - RNA, 19 nt, Artificial Sequence
  Description of Artificial Sequence: Synthetic oligonucleotide
  Antisense strand to SEQ ID NO: 2558354
uauugccucucucaaugcc

SEQ ID NO: 2558356 - RNA, 19 nt, Artificial Sequence
  Description of Artificial Sequence: Synthetic oligonucleotide
  Sense strand starting at position 3331 of SEQ ID NO: 1888809
gcaacauagaggugauagu

SEQ ID NO: 2558357 - RNA, 19 nt, Artificial Sequence
  Description of Artificial Sequence: Synthetic oligonucleotide
  Antisense strand to SEQ ID NO: 2558356
acuaucaccucuauguugc

SEQ ID NO: 2558358 - RNA, 19 nt, Artificial Sequence
  Description of Artificial Sequence: Synthetic oligonucleotide
  Sense strand starting at position 3470 of SEQ ID NO: 1888809
gagaaagaguggucaaagu

SEQ ID NO: 2558359 - RNA, 19 nt, Artificial Sequence
  Description of Artificial Sequence: Synthetic oligonucleotide
  Antisense strand to SEQ ID NO: 2558358
acuuugaccacucuuucuc

SEQ ID NO: 2558360 - RNA, 19 nt, Artificial Sequence
  Description of Artificial Sequence: Synthetic oligonucleotide
  Sense strand starting at position 3480 of SEQ ID NO: 1888809
ggucaaagucagcgaagaa

SEQ ID NO: 2558361 - RNA, 19 nt, Artificial Sequence
  Description of Artificial Sequence: Synthetic oligonucleotide
  Antisense strand to SEQ ID NO: 2558360
uucuucgcugacuuugacc

SEQ ID NO: 2558362 - RNA, 19 nt, Artificial Sequence
  Description of Artificial Sequence: Synthetic oligonucleotide
  Sense strand starting at position 3546 of SEQ ID NO: 1888809
ccaaaucaaucuuuguagu

SEQ ID NO: 2558363 - RNA, 19 nt, Artificial Sequence
  Description of Artificial Sequence: Synthetic oligonucleotide
  Antisense strand to SEQ ID NO: 2558362
acuacaaagauugauuugg

SEQ ID NO: 2558364 - RNA, 19 nt, Artificial Sequence
  Description of Artificial Sequence: Synthetic oligonucleotide
  Sense strand starting at position 3614 of SEQ ID NO: 1888809
acuauaugccaguacuacu

SEQ ID NO: 2558365 - RNA, 19 nt, Artificial Sequence
  Description of Artificial Sequence: Synthetic oligonucleotide
  Antisense strand to SEQ ID NO: 2558364
aguaguacuggcauauagu

SEQ ID NO: 2558366 - RNA, 19 nt, Artificial Sequence
  Description of Artificial Sequence: Synthetic oligonucleotide
  Sense strand starting at position 3945 of SEQ ID NO: 1888809
ugcaguuaagucguucuau

SEQ ID NO: 2558367 - RNA, 19 nt, Artificial Sequence
  Description of Artificial Sequence: Synthetic oligonucleotide
  Antisense strand to SEQ ID NO: 2558366
auagaacgacuuaacugca

SEQ ID NO: 2558368 - RNA, 19 nt, Artificial Sequence
  Description of Artificial Sequence: Synthetic oligonucleotide
  Sense strand starting at position 4 of SEQ ID NO: 1888810
cuuccaggcucauugauga

SEQ ID NO: 2558369 - RNA, 19 nt, Artificial Sequence
  Description of Artificial Sequence: Synthetic oligonucleotide
  Antisense strand to SEQ ID NO: 2558368
ucaucaaugagccuggaag

SEQ ID NO: 2558370 - RNA, 19 nt, Artificial Sequence
  Description of Artificial Sequence: Synthetic oligonucleotide
  Sense strand starting at position 256 of SEQ ID NO: 1888810
aguccuugugaagggauaa

SEQ ID NO: 2558371 - RNA, 19 nt, Artificial Sequence
  Description of Artificial Sequence: Synthetic oligonucleotide
  Antisense strand to SEQ ID NO: 2558370
uuaucccuucacaaggacu

SEQ ID NO: 2558372 - RNA, 19 nt, Artificial Sequence
  Description of Artificial Sequence: Synthetic oligonucleotide
  Sense strand starting at position 257 of SEQ ID NO: 1888810
guccuugugaagggauaaa

SEQ ID NO: 2558373 - RNA, 19 nt, Artificial Sequence
  Description of Artificial Sequence: Synthetic oligonucleotide
  Antisense strand to SEQ ID NO: 2558372
uuuaucccuucacaaggac

SEQ ID NO: 2558374 - RNA, 19 nt, Artificial Sequence
  Description of Artificial Sequence: Synthetic oligonucleotide
  Sense strand starting at position 606 of SEQ ID NO: 1888810
uucccuguuccauaguaaa

SEQ ID NO: 2558375 - RNA, 19 nt, Artificial Sequence
  Description of Artificial Sequence: Synthetic oligonucleotide
  Antisense strand to SEQ ID NO: 2558374
uuuacuauggaacagggaa

SEQ ID NO: 2558376 - RNA, 19 nt, Artificial Sequence
  Description of Artificial Sequence: Synthetic oligonucleotide
  Sense strand starting at position 648 of SEQ ID NO: 1888810
cagccaguucuggagagau

SEQ ID NO: 2558377 - RNA, 19 nt, Artificial Sequence
  Description of Artificial Sequence: Synthetic oligonucleotide
  Antisense strand to SEQ ID NO: 2558376
aucucuccagaacuggcug

SEQ ID NO: 2558378 - RNA, 19 nt, Artificial Sequence
  Description of Artificial Sequence: Synthetic oligonucleotide
  Sense strand starting at position 650 of SEQ ID NO: 1888810
gccaguucuggagagauua

SEQ ID NO: 2558379 - RNA, 19 nt, Artificial Sequence
  Description of Artificial Sequence: Synthetic oligonucleotide
  Antisense strand to SEQ ID NO: 2558378
uaaucucuccagaacuggc

SEQ ID NO: 2558380 - RNA, 19 nt, Artificial Sequence
  Description of Artificial Sequence: Synthetic oligonucleotide
  Sense strand starting at position 673 of SEQ ID NO: 1888810
augauagaguguuucugac

SEQ ID NO: 2558381 - RNA, 19 nt, Artificial Sequence
  Description of Artificial Sequence: Synthetic oligonucleotide
  Antisense strand to SEQ ID NO: 2558380
gucagaaacacucuaucau

SEQ ID NO: 2558382 - RNA, 19 nt, Artificial Sequence
  Description of Artificial Sequence: Synthetic oligonucleotide
  Sense strand starting at position 675 of SEQ ID NO: 1888810
gauagaguguuucugacca

SEQ ID NO: 2558383 - RNA, 19 nt, Artificial Sequence
  Description of Artificial Sequence: Synthetic oligonucleotide
  Antisense strand to SEQ ID NO: 2558382
uggucagaaacacucuauc

SEQ ID NO: 2558384 - RNA, 19 nt, Artificial Sequence
  Description of Artificial Sequence: Synthetic oligonucleotide
  Sense strand starting at position 705 of SEQ ID NO: 1888810
ccagacauucucugggagu

SEQ ID NO: 2558385 - RNA, 19 nt, Artificial Sequence
  Description of Artificial Sequence: Synthetic oligonucleotide
  Antisense strand to SEQ ID NO: 2558384
acucccagagaaugucugg

SEQ ID NO: 2558386 - RNA, 19 nt, Artificial Sequence
  Description of Artificial Sequence: Synthetic oligonucleotide
  Sense strand starting at position 953 of SEQ ID NO: 1888810
cuucucuuuguguaggauu

SEQ ID NO: 2558387 - RNA, 19 nt, Artificial Sequence
  Description of Artificial Sequence: Synthetic oligonucleotide
  Antisense strand to SEQ ID NO: 2558386
aauccuacacaaagagaag

SEQ ID NO: 2558388 - RNA, 19 nt, Artificial Sequence
  Description of Artificial Sequence: Synthetic oligonucleotide
  Sense strand starting at position 1276 of SEQ ID NO: 1888810
uuacacagucuuggaaaga

SEQ ID NO: 2558389 - RNA, 19 nt, Artificial Sequence
  Description of Artificial Sequence: Synthetic oligonucleotide
  Antisense strand to SEQ ID NO: 2558388
ucuuuccaagacuguguaa

SEQ ID NO: 2558390 - RNA, 19 nt, Artificial Sequence
  Description of Artificial Sequence: Synthetic oligonucleotide
  Sense strand starting at position 1289 of SEQ ID NO: 1888810
gaaagaaaucccugugucu

SEQ ID NO: 2558391 - RNA, 19 nt, Artificial Sequence
  Description of Artificial Sequence: Synthetic oligonucleotide
  Antisense strand to SEQ ID NO: 2558390
agacacagggauuucuuuc

SEQ ID NO: 2558392 - RNA, 19 nt, Artificial Sequence
  Description of Artificial Sequence: Synthetic oligonucleotide
  Sense strand starting at position 1366 of SEQ ID NO: 1888810
uuuagagguugacucauga

SEQ ID NO: 2558393 - RNA, 19 nt, Artificial Sequence
  Description of Artificial Sequence: Synthetic oligonucleotide
  Antisense strand to SEQ ID NO: 2558392
ucaugagucaaccucuaaa

SEQ ID NO: 2558394 - RNA, 19 nt, Artificial Sequence
  Description of Artificial Sequence: Synthetic oligonucleotide
  Sense strand starting at position 1621 of SEQ ID NO: 1888810
ccacuuuccuauguggaaa

SEQ ID NO: 2558395 - RNA, 19 nt, Artificial Sequence
  Description of Artificial Sequence: Synthetic oligonucleotide
  Antisense strand to SEQ ID NO: 2558394
uuuccacauaggaaagugg

SEQ ID NO: 2558396 - RNA, 19 nt, Artificial Sequence
  Description of Artificial Sequence: Synthetic oligonucleotide
  Sense strand starting at position 1740 of SEQ ID NO: 1888810
guuuauguaguguaacuga

SEQ ID NO: 2558397 - RNA, 19 nt, Artificial Sequence
  Description of Artificial Sequence: Synthetic oligonucleotide
  Antisense strand to SEQ ID NO: 2558396
ucaguuacacuacauaaac

SEQ ID NO: 2558398 - RNA, 19 nt, Artificial Sequence
  Description of Artificial Sequence: Synthetic oligonucleotide
  Sense strand starting at position 1747 of SEQ ID NO: 1888810
uaguguaacugauugauag

SEQ ID NO: 2558399 - RNA, 19 nt, Artificial Sequence
  Description of Artificial Sequence: Synthetic oligonucleotide
  Antisense strand to SEQ ID NO: 2558398
cuaucaaucaguuacacua

SEQ ID NO: 2558400 - RNA, 19 nt, Artificial Sequence
  Description of Artificial Sequence: Synthetic oligonucleotide
  Sense strand starting at position 1748 of SEQ ID NO: 1888810
aguguaacugauugauaga

SEQ ID NO: 2558401 - RNA, 19 nt, Artificial Sequence
  Description of Artificial Sequence: Synthetic oligonucleotide
  Antisense strand to SEQ ID NO: 2558400
ucuaucaaucaguuacacu

SEQ ID NO: 2558402 - RNA, 19 nt, Artificial Sequence
  Description of Artificial Sequence: Synthetic oligonucleotide
  Sense strand starting at position 1761 of SEQ ID NO: 1888810
gauagagcauauguaaaga

SEQ ID NO: 2558403 - RNA, 19 nt, Artificial Sequence
  Description of Artificial Sequence: Synthetic oligonucleotide
  Antisense strand to SEQ ID NO: 2558402
ucuuuacauaugcucuauc

SEQ ID NO: 2558404 - RNA, 19 nt, Artificial Sequence
  Description of Artificial Sequence: Synthetic oligonucleotide
  Sense strand starting at position 2000 of SEQ ID NO: 1888810
uugcuugaaacuggaaagu

SEQ ID NO: 2558405 - RNA, 19 nt, Artificial Sequence
  Description of Artificial Sequence: Synthetic oligonucleotide
  Antisense strand to SEQ ID NO: 2558404
acuuuccaguuucaagcaa

SEQ ID NO: 2558406 - RNA, 19 nt, Artificial Sequence
  Description of Artificial Sequence: Synthetic oligonucleotide
  Sense strand starting at position 2178 of SEQ ID NO: 1888810
gcguauuuccagugaaaga

SEQ ID NO: 2558407 - RNA, 19 nt, Artificial Sequence
  Description of Artificial Sequence: Synthetic oligonucleotide
  Antisense strand to SEQ ID NO: 2558406
ucuuucacuggaaauacgc

SEQ ID NO: 2558408 - RNA, 19 nt, Artificial Sequence
  Description of Artificial Sequence: Synthetic oligonucleotide
  Sense strand starting at position 2272 of SEQ ID NO: 1888810
aggaaugaauccuugugac

SEQ ID NO: 2558409 - RNA, 19 nt, Artificial Sequence
  Description of Artificial Sequence: Synthetic oligonucleotide
  Antisense strand to SEQ ID NO: 2558408
gucacaaggauucauuccu

SEQ ID NO: 2558410 - RNA, 19 nt, Artificial Sequence
  Description of Artificial Sequence: Synthetic oligonucleotide
  Sense strand starting at position 2278 of SEQ ID NO: 1888810
gaauccuugugacuaugaa

SEQ ID NO: 2558411 - RNA, 19 nt, Artificial Sequence
  Description of Artificial Sequence: Synthetic oligonucleotide
  Antisense strand to SEQ ID NO: 2558410
uucauagucacaaggauuc

SEQ ID NO: 2558412 - RNA, 19 nt, Artificial Sequence
  Description of Artificial Sequence: Synthetic oligonucleotide
  Sense strand starting at position 2333 of SEQ ID NO: 1888810
aguucagaggcgugauuuc

SEQ ID NO: 2558413 - RNA, 19 nt, Artificial Sequence
  Description of Artificial Sequence: Synthetic oligonucleotide
  Antisense strand to SEQ ID NO: 2558412
gaaaucacgccucugaacu

SEQ ID NO: 2558414 - RNA, 19 nt, Artificial Sequence
  Description of Artificial Sequence: Synthetic oligonucleotide
  Sense strand starting at position 2489 of SEQ ID NO: 1888810
aauuaaucccacugugagg

SEQ ID NO: 2558415 - RNA, 19 nt, Artificial Sequence
  Description of Artificial Sequence: Synthetic oligonucleotide
  Antisense strand to SEQ ID NO: 2558414
ccucacagugggauuaauu

SEQ ID NO: 2558416 - RNA, 19 nt, Artificial Sequence
  Description of Artificial Sequence: Synthetic oligonucleotide
  Sense strand starting at position 2648 of SEQ ID NO: 1888810
cuggguuugauaggaacau

SEQ ID NO: 2558417 - RNA, 19 nt, Artificial Sequence
  Description of Artificial Sequence: Synthetic oligonucleotide
  Antisense strand to SEQ ID NO: 2558416
auguuccuaucaaacccag

SEQ ID NO: 2558418 - RNA, 19 nt, Artificial Sequence
  Description of Artificial Sequence: Synthetic oligonucleotide
  Sense strand starting at position 2725 of SEQ ID NO: 1888810
gccaguggucuguaaagau

SEQ ID NO: 2558419 - RNA, 19 nt, Artificial Sequence
  Description of Artificial Sequence: Synthetic oligonucleotide
  Antisense strand to SEQ ID NO: 2558418
aucuuuacagaccacuggc

SEQ ID NO: 2558420 - RNA, 19 nt, Artificial Sequence
  Description of Artificial Sequence: Synthetic oligonucleotide
  Sense strand starting at position 2844 of SEQ ID NO: 1888810
uggaaugcugauugaguca

SEQ ID NO: 2558421 - RNA, 19 nt, Artificial Sequence
  Description of Artificial Sequence: Synthetic oligonucleotide
  Antisense strand to SEQ ID NO: 2558420
ugacucaaucagcauucca

SEQ ID NO: 2558422 - RNA, 19 nt, Artificial Sequence
  Description of Artificial Sequence: Synthetic oligonucleotide
  Sense strand starting at position 2871 of SEQ ID NO: 1888810
gcugguguuggagacucua

SEQ ID NO: 2558423 - RNA, 19 nt, Artificial Sequence
  Description of Artificial Sequence: Synthetic oligonucleotide
  Antisense strand to SEQ ID NO: 2558422
uagagucuccaacaccagc

SEQ ID NO: 2558424 - RNA, 19 nt, Artificial Sequence
  Description of Artificial Sequence: Synthetic oligonucleotide
  Sense strand starting at position 2891 of SEQ ID NO: 1888810
agccucaaagaaugucuau

SEQ ID NO: 2558425 - RNA, 19 nt, Artificial Sequence
  Description of Artificial Sequence: Synthetic oligonucleotide
  Antisense strand to SEQ ID NO: 2558424
auagacauucuuugaggcu

SEQ ID NO: 2558426 - RNA, 19 nt, Artificial Sequence
  Description of Artificial Sequence: Synthetic oligonucleotide
  Sense strand starting at position 3082 of SEQ ID NO: 1888810
ugagaaugacaccgucuua

SEQ ID NO: 2558427 - RNA, 19 nt, Artificial Sequence
  Description of Artificial Sequence: Synthetic oligonucleotide
  Antisense strand to SEQ ID NO: 2558426
uaagacggugucauucuca

SEQ ID NO: 2558428 - RNA, 19 nt, Artificial Sequence
  Description of Artificial Sequence: Synthetic oligonucleotide
  Sense strand starting at position 3104 of SEQ ID NO: 1888810
ggaaguguccuccauuguu

SEQ ID NO: 2558429 - RNA, 19 nt, Artificial Sequence
  Description of Artificial Sequence: Synthetic oligonucleotide
  Antisense strand to SEQ ID NO: 2558428
aacaauggaggacacuucc

SEQ ID NO: 2558430 - RNA, 19 nt, Artificial Sequence
  Description of Artificial Sequence: Synthetic oligonucleotide
  Sense strand starting at position 3248 of SEQ ID NO: 1888810
uagguuauggcugagccaa

SEQ ID NO: 2558431 - RNA, 19 nt, Artificial Sequence
  Description of Artificial Sequence: Synthetic oligonucleotide
  Antisense strand to SEQ ID NO: 2558430
uuggcucagccauaaccua

SEQ ID NO: 2558432 - RNA, 19 nt, Artificial Sequence
  Description of Artificial Sequence: Synthetic oligonucleotide
  Sense strand starting at position 3283 of SEQ ID NO: 1888810
ucugcagugguuuagauaa

SEQ ID NO: 2558433 - RNA, 19 nt, Artificial Sequence
  Description of Artificial Sequence: Synthetic oligonucleotide
  Antisense strand to SEQ ID NO: 2558432
uuaucuaaaccacugcaga

SEQ ID NO: 2558434 - RNA, 19 nt, Artificial Sequence
  Description of Artificial Sequence: Synthetic oligonucleotide
  Sense strand starting at position 3480 of SEQ ID NO: 1888810
gcuuuacaaggcugaaauc

SEQ ID NO: 2558435 - RNA, 19 nt, Artificial Sequence
  Description of Artificial Sequence: Synthetic oligonucleotide
  Antisense strand to SEQ ID NO: 2558434
gauuucagccuuguaaagc

SEQ ID NO: 2558436 - RNA, 19 nt, Artificial Sequence
  Description of Artificial Sequence: Synthetic oligonucleotide
  Sense strand starting at position 3524 of SEQ ID NO: 1888810
caggaucauguuugcucaa

SEQ ID NO: 2558437 - RNA, 19 nt, Artificial Sequence
  Description of Artificial Sequence: Synthetic oligonucleotide
  Antisense strand to SEQ ID NO: 2558436
uugagcaaacaugauccug

SEQ ID NO: 2558438 - RNA, 19 nt, Artificial Sequence
  Description of Artificial Sequence: Synthetic oligonucleotide
  Sense strand starting at position 3525 of SEQ ID NO: 1888810
aggaucauguuugcucaaa

SEQ ID NO: 2558439 - RNA, 19 nt, Artificial Sequence
  Description of Artificial Sequence: Synthetic oligonucleotide
  Antisense strand to SEQ ID NO: 2558438
uuugagcaaacaugauccu

SEQ ID NO: 2558440 - RNA, 19 nt, Artificial Sequence
  Description of Artificial Sequence: Synthetic oligonucleotide
  Sense strand starting at position 3526 of SEQ ID NO: 1888810
ggaucauguuugcucaaau

SEQ ID NO: 2558441 - RNA, 19 nt, Artificial Sequence
  Description of Artificial Sequence: Synthetic oligonucleotide
  Antisense strand to SEQ ID NO: 2558440
auuugagcaaacaugaucc

SEQ ID NO: 2558442 - RNA, 19 nt, Artificial Sequence
  Description of Artificial Sequence: Synthetic oligonucleotide
  Sense strand starting at position 3527 of SEQ ID NO: 1888810
gaucauguuugcucaaaug

SEQ ID NO: 2558443 - RNA, 19 nt, Artificial Sequence
  Description of Artificial Sequence: Synthetic oligonucleotide
  Antisense strand to SEQ ID NO: 2558442
cauuugagcaaacaugauc

SEQ ID NO: 2558444 - RNA, 19 nt, Artificial Sequence
  Description of Artificial Sequence: Synthetic oligonucleotide
  Sense strand starting at position 3773 of SEQ ID NO: 1888810
acgguuaaucaggaaguuu

SEQ ID NO: 2558445 - RNA, 19 nt, Artificial Sequence
  Description of Artificial Sequence: Synthetic oligonucleotide
  Antisense strand to SEQ ID NO: 2558444
aaacuuccugauuaaccgu

SEQ ID NO: 2558446 - RNA, 19 nt, Artificial Sequence
  Description of Artificial Sequence: Synthetic oligonucleotide
  Sense strand starting at position 3893 of SEQ ID NO: 1888810
cgcuuuaccucauuugauu

SEQ ID NO: 2558447 - RNA, 19 nt, Artificial Sequence
  Description of Artificial Sequence: Synthetic oligonucleotide
  Antisense strand to SEQ ID NO: 2558446
aaucaaaugagguaaagcg

SEQ ID NO: 2558448 - RNA, 19 nt, Artificial Sequence
  Description of Artificial Sequence: Synthetic oligonucleotide
  Sense strand starting at position 210 of SEQ ID NO: 1888811
uuaggaggauucucucuaa

SEQ ID NO: 2558449 - RNA, 19 nt, Artificial Sequence
  Description of Artificial Sequence: Synthetic oligonucleotide
  Antisense strand to SEQ ID NO: 2558448
uuagagagaauccuccuaa

SEQ ID NO: 2558450 - RNA, 19 nt, Artificial Sequence
  Description of Artificial Sequence: Synthetic oligonucleotide
  Sense strand starting at position 213 of SEQ ID NO: 1888811
ggaggauucucucuaagua

SEQ ID NO: 2558451 - RNA, 19 nt, Artificial Sequence
  Description of Artificial Sequence: Synthetic oligonucleotide
  Antisense strand to SEQ ID NO: 2558450
uacuuagagagaauccucc

SEQ ID NO: 2558452 - RNA, 19 nt, Artificial Sequence
  Description of Artificial Sequence: Synthetic oligonucleotide
  Sense strand starting at position 288 of SEQ ID NO: 1888811
ugagucaagcacuaaguaa

SEQ ID NO: 2558453 - RNA, 19 nt, Artificial Sequence
  Description of Artificial Sequence: Synthetic oligonucleotide
  Antisense strand to SEQ ID NO: 2558452
uuacuuagugcuugacuca

SEQ ID NO: 2558454 - RNA, 19 nt, Artificial Sequence
  Description of Artificial Sequence: Synthetic oligonucleotide
  Sense strand starting at position 321 of SEQ ID NO: 1888811
ucauaauuugugugcaguu

SEQ ID NO: 2558455 - RNA, 19 nt, Artificial Sequence
  Description of Artificial Sequence: Synthetic oligonucleotide
  Antisense strand to SEQ ID NO: 2558454
aacugcacacaaauuauga

SEQ ID NO: 2558456 - RNA, 19 nt, Artificial Sequence
  Description of Artificial Sequence: Synthetic oligonucleotide
  Sense strand starting at position 322 of SEQ ID NO: 1888811
cauaauuugugugcaguuu

SEQ ID NO: 2558457 - RNA, 19 nt, Artificial Sequence
  Description of Artificial Sequence: Synthetic oligonucleotide
  Antisense strand to SEQ ID NO: 2558456
aaacugcacacaaauuaug

SEQ ID NO: 2558458 - RNA, 19 nt, Artificial Sequence
  Description of Artificial Sequence: Synthetic oligonucleotide
  Sense strand starting at position 394 of SEQ ID NO: 1888811
aucaguugcuaccuaaaga

SEQ ID NO: 2558459 - RNA, 19 nt, Artificial Sequence
  Description of Artificial Sequence: Synthetic oligonucleotide
  Antisense strand to SEQ ID NO: 2558458
ucuuuagguagcaacugau

SEQ ID NO: 2558460 - RNA, 19 nt, Artificial Sequence
  Description of Artificial Sequence: Synthetic oligonucleotide
  Sense strand starting at position 951 of SEQ ID NO: 1888811
gugagaggauuagcugaga

SEQ ID NO: 2558461 - RNA, 19 nt, Artificial Sequence
  Description of Artificial Sequence: Synthetic oligonucleotide
  Antisense strand to SEQ ID NO: 2558460
ucucagcuaauccucucac

SEQ ID NO: 2558462 - RNA, 19 nt, Artificial Sequence
  Description of Artificial Sequence: Synthetic oligonucleotide
  Sense strand starting at position 1222 of SEQ ID NO: 1888811
uggguaaugucucccagac

SEQ ID NO: 2558463 - RNA, 19 nt, Artificial Sequence
  Description of Artificial Sequence: Synthetic oligonucleotide
  Antisense strand to SEQ ID NO: 2558462
gucugggagacauuaccca

SEQ ID NO: 2558464 - RNA, 19 nt, Artificial Sequence
  Description of Artificial Sequence: Synthetic oligonucleotide
  Sense strand starting at position 1242 of SEQ ID NO: 1888811
aguaaaguauucccaagaa

SEQ ID NO: 2558465 - RNA, 19 nt, Artificial Sequence
  Description of Artificial Sequence: Synthetic oligonucleotide
  Antisense strand to SEQ ID NO: 2558464
uucuugggaauacuuuacu

SEQ ID NO: 2558466 - RNA, 19 nt, Artificial Sequence
  Description of Artificial Sequence: Synthetic oligonucleotide
  Sense strand starting at position 1254 of SEQ ID NO: 1888811
ccaagaaauuucugaagga

SEQ ID NO: 2558467 - RNA, 19 nt, Artificial Sequence
  Description of Artificial Sequence: Synthetic oligonucleotide
  Antisense strand to SEQ ID NO: 2558466
uccuucagaaauuucuugg

SEQ ID NO: 2558468 - RNA, 19 nt, Artificial Sequence
  Description of Artificial Sequence: Synthetic oligonucleotide
  Sense strand starting at position 1440 of SEQ ID NO: 1888811
ggacguuacaacuaugcau

SEQ ID NO: 2558469 - RNA, 19 nt, Artificial Sequence
  Description of Artificial Sequence: Synthetic oligonucleotide
  Antisense strand to SEQ ID NO: 2558468
augcauaguuguaacgucc

SEQ ID NO: 2558470 - RNA, 19 nt, Artificial Sequence
  Description of Artificial Sequence: Synthetic oligonucleotide
  Sense strand starting at position 1521 of SEQ ID NO: 1888811
guucuugcaccucaacaga

SEQ ID NO: 2558471 - RNA, 19 nt, Artificial Sequence
  Description of Artificial Sequence: Synthetic oligonucleotide
  Antisense strand to SEQ ID NO: 2558470
ucuguugaggugcaagaac

SEQ ID NO: 2558472 - RNA, 19 nt, Artificial Sequence
  Description of Artificial Sequence: Synthetic oligonucleotide
  Sense strand starting at position 1672 of SEQ ID NO: 1888811
cuuagaugaugguucccaa

SEQ ID NO: 2558473 - RNA, 19 nt, Artificial Sequence
  Description of Artificial Sequence: Synthetic oligonucleotide
  Antisense strand to SEQ ID NO: 2558472
uugggaaccaucaucuaag

SEQ ID NO: 2558474 - RNA, 19 nt, Artificial Sequence
  Description of Artificial Sequence: Synthetic oligonucleotide
  Sense strand starting at position 2095 of SEQ ID NO: 1888811
uuugaaauuucugauggag

SEQ ID NO: 2558475 - RNA, 19 nt, Artificial Sequence
  Description of Artificial Sequence: Synthetic oligonucleotide
  Antisense strand to SEQ ID NO: 2558474
cuccaucagaaauuucaaa

SEQ ID NO: 2558476 - RNA, 19 nt, Artificial Sequence
  Description of Artificial Sequence: Synthetic oligonucleotide
  Sense strand starting at position 2166 of SEQ ID NO: 1888811
uucuuaagugcauauaagu

SEQ ID NO: 2558477 - RNA, 19 nt, Artificial Sequence
  Description of Artificial Sequence: Synthetic oligonucleotide
  Antisense strand to SEQ ID NO: 2558476
acuuauaugcacuuaagaa

SEQ ID NO: 2558478 - RNA, 19 nt, Artificial Sequence
  Description of Artificial Sequence: Synthetic oligonucleotide
  Sense strand starting at position 2173 of SEQ ID NO: 1888811
gugcauauaaguuauggau

SEQ ID NO: 2558479 - RNA, 19 nt, Artificial Sequence
  Description of Artificial Sequence: Synthetic oligonucleotide
  Antisense strand to SEQ ID NO: 2558478
auccauaacuuauaugcac

SEQ ID NO: 2558480 - RNA, 19 nt, Artificial Sequence
  Description of Artificial Sequence: Synthetic oligonucleotide
  Sense strand starting at position 2204 of SEQ ID NO: 1888811
uaaagauagugauuguauc

SEQ ID NO: 2558481 - RNA, 19 nt, Artificial Sequence
  Description of Artificial Sequence: Synthetic oligonucleotide
  Antisense strand to SEQ ID NO: 2558480
gauacaaucacuaucuuua

SEQ ID NO: 2558482 - RNA, 19 nt, Artificial Sequence
  Description of Artificial Sequence: Synthetic oligonucleotide
  Sense strand starting at position 2205 of SEQ ID NO: 1888811
aaagauagugauuguauca

SEQ ID NO: 2558483 - RNA, 19 nt, Artificial Sequence
  Description of Artificial Sequence: Synthetic oligonucleotide
  Antisense strand to SEQ ID NO: 2558482
ugauacaaucacuaucuuu

SEQ ID NO: 2558484 - RNA, 19 nt, Artificial Sequence
  Description of Artificial Sequence: Synthetic oligonucleotide
  Sense strand starting at position 2299 of SEQ ID NO: 1888811
gaugaacuggcuuauguga

SEQ ID NO: 2558485 - RNA, 19 nt, Artificial Sequence
  Description of Artificial Sequence: Synthetic oligonucleotide
  Antisense strand to SEQ ID NO: 2558484
ucacauaagccaguucauc

SEQ ID NO: 2558486 - RNA, 19 nt, Artificial Sequence
  Description of Artificial Sequence: Synthetic oligonucleotide
  Sense strand starting at position 2503 of SEQ ID NO: 1888811
ggauaaucuuguuuacaua

SEQ ID NO: 2558487 - RNA, 19 nt, Artificial Sequence
  Description of Artificial Sequence: Synthetic oligonucleotide
  Antisense strand to SEQ ID NO: 2558486
uauguaaacaagauuaucc

SEQ ID NO: 2558488 - RNA, 19 nt, Artificial Sequence
  Description of Artificial Sequence: Synthetic oligonucleotide
  Sense strand starting at position 2592 of SEQ ID NO: 1888811
uggaauaacuggcuuaugu

SEQ ID NO: 2558489 - RNA, 19 nt, Artificial Sequence
  Description of Artificial Sequence: Synthetic oligonucleotide
  Antisense strand to SEQ ID NO: 2558488
acauaagccaguuauucca

SEQ ID NO: 2558490 - RNA, 19 nt, Artificial Sequence
  Description of Artificial Sequence: Synthetic oligonucleotide
  Sense strand starting at position 2594 of SEQ ID NO: 1888811
gaauaacuggcuuauguua

SEQ ID NO: 2558491 - RNA, 19 nt, Artificial Sequence
  Description of Artificial Sequence: Synthetic oligonucleotide
  Antisense strand to SEQ ID NO: 2558490
uaacauaagccaguuauuc

SEQ ID NO: 2558492 - RNA, 19 nt, Artificial Sequence
  Description of Artificial Sequence: Synthetic oligonucleotide
  Sense strand starting at position 2628 of SEQ ID NO: 1888811
gggacuauagccuagcuau

SEQ ID NO: 2558493 - RNA, 19 nt, Artificial Sequence
  Description of Artificial Sequence: Synthetic oligonucleotide
  Antisense strand to SEQ ID NO: 2558492
auagcuaggcuauaguccc

SEQ ID NO: 2558494 - RNA, 19 nt, Artificial Sequence
  Description of Artificial Sequence: Synthetic oligonucleotide
  Sense strand starting at position 2987 of SEQ ID NO: 1888811
ugaccacuacagugauguu

SEQ ID NO: 2558495 - RNA, 19 nt, Artificial Sequence
  Description of Artificial Sequence: Synthetic oligonucleotide
  Antisense strand to SEQ ID NO: 2558494
aacaucacuguagugguca

SEQ ID NO: 2558496 - RNA, 19 nt, Artificial Sequence
  Description of Artificial Sequence: Synthetic oligonucleotide
  Sense strand starting at position 3144 of SEQ ID NO: 1888811
cuaugaaggucauuagcca

SEQ ID NO: 2558497 - RNA, 19 nt, Artificial Sequence
  Description of Artificial Sequence: Synthetic oligonucleotide
  Antisense strand to SEQ ID NO: 2558496
uggcuaaugaccuucauag

SEQ ID NO: 2558498 - RNA, 19 nt, Artificial Sequence
  Description of Artificial Sequence: Synthetic oligonucleotide
  Sense strand starting at position 3145 of SEQ ID NO: 1888811
uaugaaggucauuagccau

SEQ ID NO: 2558499 - RNA, 19 nt, Artificial Sequence
  Description of Artificial Sequence: Synthetic oligonucleotide
  Antisense strand to SEQ ID NO: 2558498
auggcuaaugaccuucaua

SEQ ID NO: 2558500 - RNA, 19 nt, Artificial Sequence
  Description of Artificial Sequence: Synthetic oligonucleotide
  Sense strand starting at position 3346 of SEQ ID NO: 1888811
ugucacaaauguuuaauga

SEQ ID NO: 2558501 - RNA, 19 nt, Artificial Sequence
  Description of Artificial Sequence: Synthetic oligonucleotide
  Antisense strand to SEQ ID NO: 2558500
ucauuaaacauuugugaca

SEQ ID NO: 2558502 - RNA, 19 nt, Artificial Sequence
  Description of Artificial Sequence: Synthetic oligonucleotide
  Sense strand starting at position 3369 of SEQ ID NO: 1888811
acucucccuugaguuagaa

SEQ ID NO: 2558503 - RNA, 19 nt, Artificial Sequence
  Description of Artificial Sequence: Synthetic oligonucleotide
  Antisense strand to SEQ ID NO: 2558502
uucuaacucaagggagagu

SEQ ID NO: 2558504 - RNA, 19 nt, Artificial Sequence
  Description of Artificial Sequence: Synthetic oligonucleotide
  Sense strand starting at position 3378 of SEQ ID NO: 1888811
ugaguuagaaaugguaggu

SEQ ID NO: 2558505 - RNA, 19 nt, Artificial Sequence
  Description of Artificial Sequence: Synthetic oligonucleotide
  Antisense strand to SEQ ID NO: 2558504
accuaccauuucuaacuca

SEQ ID NO: 2558506 - RNA, 19 nt, Artificial Sequence
  Description of Artificial Sequence: Synthetic oligonucleotide
  Sense strand starting at position 3387 of SEQ ID NO: 1888811
aaugguaggugcuuugaaa

SEQ ID NO: 2558507 - RNA, 19 nt, Artificial Sequence
  Description of Artificial Sequence: Synthetic oligonucleotide
  Antisense strand to SEQ ID NO: 2558506
uuucaaagcaccuaccauu

SEQ ID NO: 2558508 - RNA, 19 nt, Artificial Sequence
  Description of Artificial Sequence: Synthetic oligonucleotide
  Sense strand starting at position 3394 of SEQ ID NO: 1888811
ggugcuuugaaauacuuga

SEQ ID NO: 2558509 - RNA, 19 nt, Artificial Sequence
  Description of Artificial Sequence: Synthetic oligonucleotide
  Antisense strand to SEQ ID NO: 2558508
ucaaguauuucaaagcacc

SEQ ID NO: 2558510 - RNA, 19 nt, Artificial Sequence
  Description of Artificial Sequence: Synthetic oligonucleotide
  Sense strand starting at position 3452 of SEQ ID NO: 1888811
ccuacuguccaguaauaau

SEQ ID NO: 2558511 - RNA, 19 nt, Artificial Sequence
  Description of Artificial Sequence: Synthetic oligonucleotide
  Antisense strand to SEQ ID NO: 2558510
auuauuacuggacaguagg

SEQ ID NO: 2558512 - RNA, 19 nt, Artificial Sequence
  Description of Artificial Sequence: Synthetic oligonucleotide
  Sense strand starting at position 3527 of SEQ ID NO: 1888811
uaaugauuauugucuugag

SEQ ID NO: 2558513 - RNA, 19 nt, Artificial Sequence
  Description of Artificial Sequence: Synthetic oligonucleotide
  Antisense strand to SEQ ID NO: 2558512
cucaagacaauaaucauua

SEQ ID NO: 2558514 - RNA, 19 nt, Artificial Sequence
  Description of Artificial Sequence: Synthetic oligonucleotide
  Sense strand starting at position 3531 of SEQ ID NO: 1888811
gauuauugucuugagggcu

SEQ ID NO: 2558515 - RNA, 19 nt, Artificial Sequence
  Description of Artificial Sequence: Synthetic oligonucleotide
  Antisense strand to SEQ ID NO: 2558514
agcccucaagacaauaauc

SEQ ID NO: 2558516 - RNA, 19 nt, Artificial Sequence
  Description of Artificial Sequence: Synthetic oligonucleotide
  Sense strand starting at position 3550 of SEQ ID NO: 1888811
ugggaaggauuagaugaga

SEQ ID NO: 2558517 - RNA, 19 nt, Artificial Sequence
  Description of Artificial Sequence: Synthetic oligonucleotide
  Antisense strand to SEQ ID NO: 2558516
ucucaucuaauccuuccca

SEQ ID NO: 2558518 - RNA, 19 nt, Artificial Sequence
  Description of Artificial Sequence: Synthetic oligonucleotide
  Sense strand starting at position 3596 of SEQ ID NO: 1888811
guagauguuccacaaauau

SEQ ID NO: 2558519 - RNA, 19 nt, Artificial Sequence
  Description of Artificial Sequence: Synthetic oligonucleotide
  Antisense strand to SEQ ID NO: 2558518
auauuuguggaacaucuac

SEQ ID NO: 2558520 - RNA, 19 nt, Artificial Sequence
  Description of Artificial Sequence: Synthetic oligonucleotide
  Sense strand starting at position 3729 of SEQ ID NO: 1888811
cuguguagcgaagaaucaa

SEQ ID NO: 2558521 - RNA, 19 nt, Artificial Sequence
  Description of Artificial Sequence: Synthetic oligonucleotide
  Antisense strand to SEQ ID NO: 2558520
uugauucuucgcuacacag

SEQ ID NO: 2558522 - RNA, 19 nt, Artificial Sequence
  Description of Artificial Sequence: Synthetic oligonucleotide
  Sense strand starting at position 3737 of SEQ ID NO: 1888811
cgaagaaucaagugagguu

SEQ ID NO: 2558523 - RNA, 19 nt, Artificial Sequence
  Description of Artificial Sequence: Synthetic oligonucleotide
  Antisense strand to SEQ ID NO: 2558522
aaccucacuugauucuucg

SEQ ID NO: 2558524 - RNA, 19 nt, Artificial Sequence
  Description of Artificial Sequence: Synthetic oligonucleotide
  Sense strand starting at position 3803 of SEQ ID NO: 1888811
guggcuuuguauuuacuua

SEQ ID NO: 2558525 - RNA, 19 nt, Artificial Sequence
  Description of Artificial Sequence: Synthetic oligonucleotide
  Antisense strand to SEQ ID NO: 2558524
uaaguaaauacaaagccac

SEQ ID NO: 2558526 - RNA, 19 nt, Artificial Sequence
  Description of Artificial Sequence: Synthetic oligonucleotide
  Sense strand starting at position 3811 of SEQ ID NO: 1888811
guauuuacuuaugugcaua

SEQ ID NO: 2558527 - RNA, 19 nt, Artificial Sequence
  Description of Artificial Sequence: Synthetic oligonucleotide
  Antisense strand to SEQ ID NO: 2558526
uaugcacauaaguaaauac

SEQ ID NO: 2558528 - RNA, 19 nt, Artificial Sequence
  Description of Artificial Sequence: Synthetic oligonucleotide
  Sense strand starting at position 90 of SEQ ID NO: 1888812
aagacacaugcgcaaguau

SEQ ID NO: 2558529 - RNA, 19 nt, Artificial Sequence
  Description of Artificial Sequence: Synthetic oligonucleotide
  Antisense strand to SEQ ID NO: 2558528
auacuugcgcaugugucuu

SEQ ID NO: 2558530 - RNA, 19 nt, Artificial Sequence
  Description of Artificial Sequence: Synthetic oligonucleotide
  Sense strand starting at position 153 of SEQ ID NO: 1888812
ccagacguccaucagugau

SEQ ID NO: 2558531 - RNA, 19 nt, Artificial Sequence
  Description of Artificial Sequence: Synthetic oligonucleotide
  Antisense strand to SEQ ID NO: 2558530
aucacugauggacgucugg

SEQ ID NO: 2558532 - RNA, 19 nt, Artificial Sequence
  Description of Artificial Sequence: Synthetic oligonucleotide
  Sense strand starting at position 156 of SEQ ID NO: 1888812
gacguccaucagugauaga

SEQ ID NO: 2558533 - RNA, 19 nt, Artificial Sequence
  Description of Artificial Sequence: Synthetic oligonucleotide
  Antisense strand to SEQ ID NO: 2558532
ucuaucacugauggacguc

SEQ ID NO: 2558534 - RNA, 19 nt, Artificial Sequence
  Description of Artificial Sequence: Synthetic oligonucleotide
  Sense strand starting at position 894 of SEQ ID NO: 1888812
cuguguagacauggacaua

SEQ ID NO: 2558535 - RNA, 19 nt, Artificial Sequence
  Description of Artificial Sequence: Synthetic oligonucleotide
  Antisense strand to SEQ ID NO: 2558534
uauguccaugucuacacag

SEQ ID NO: 2558536 - RNA, 19 nt, Artificial Sequence
  Description of Artificial Sequence: Synthetic oligonucleotide
  Sense strand starting at position 977 of SEQ ID NO: 1888812
gaaauuacccaguggauac

SEQ ID NO: 2558537 - RNA, 19 nt, Artificial Sequence
  Description of Artificial Sequence: Synthetic oligonucleotide
  Antisense strand to SEQ ID NO: 2558536
guauccacuggguaauuuc

SEQ ID NO: 2558538 - RNA, 19 nt, Artificial Sequence
  Description of Artificial Sequence: Synthetic oligonucleotide
  Sense strand starting at position 1008 of SEQ ID NO: 1888812
uugagugauaguuacagua

SEQ ID NO: 2558539 - RNA, 19 nt, Artificial Sequence
  Description of Artificial Sequence: Synthetic oligonucleotide
  Antisense strand to SEQ ID NO: 2558538
uacuguaacuaucacucaa

SEQ ID NO: 2558540 - RNA, 19 nt, Artificial Sequence
  Description of Artificial Sequence: Synthetic oligonucleotide
  Sense strand starting at position 1319 of SEQ ID NO: 1888812
gugggaguauuucuuguac

SEQ ID NO: 2558541 - RNA, 19 nt, Artificial Sequence
  Description of Artificial Sequence: Synthetic oligonucleotide
  Antisense strand to SEQ ID NO: 2558540
guacaagaaauacucccac

SEQ ID NO: 2558542 - RNA, 19 nt, Artificial Sequence
  Description of Artificial Sequence: Synthetic oligonucleotide
  Sense strand starting at position 1753 of SEQ ID NO: 1888812
uuuacaguccuggaauguu

SEQ ID NO: 2558543 - RNA, 19 nt, Artificial Sequence
  Description of Artificial Sequence: Synthetic oligonucleotide
  Antisense strand to SEQ ID NO: 2558542
aacauuccaggacuguaaa

SEQ ID NO: 2558544 - RNA, 19 nt, Artificial Sequence
  Description of Artificial Sequence: Synthetic oligonucleotide
  Sense strand starting at position 1756 of SEQ ID NO: 1888812
acaguccuggaauguuauu

SEQ ID NO: 2558545 - RNA, 19 nt, Artificial Sequence
  Description of Artificial Sequence: Synthetic oligonucleotide
  Antisense strand to SEQ ID NO: 2558544
aauaacauuccaggacugu

SEQ ID NO: 2558546 - RNA, 19 nt, Artificial Sequence
  Description of Artificial Sequence: Synthetic oligonucleotide
  Sense strand starting at position 1762 of SEQ ID NO: 1888812
cuggaauguuauucugacu

SEQ ID NO: 2558547 - RNA, 19 nt, Artificial Sequence
  Description of Artificial Sequence: Synthetic oligonucleotide
  Antisense strand to SEQ ID NO: 2558546
agucagaauaacauuccag

SEQ ID NO: 2558548 - RNA, 19 nt, Artificial Sequence
  Description of Artificial Sequence: Synthetic oligonucleotide
  Sense strand starting at position 1767 of SEQ ID NO: 1888812
auguuauucugacuacuca

SEQ ID NO: 2558549 - RNA, 19 nt, Artificial Sequence
  Description of Artificial Sequence: Synthetic oligonucleotide
  Antisense strand to SEQ ID NO: 2558548
ugaguagucagaauaacau

SEQ ID NO: 2558550 - RNA, 19 nt, Artificial Sequence
  Description of Artificial Sequence: Synthetic oligonucleotide
  Sense strand starting at position 1768 of SEQ ID NO: 1888812
uguuauucugacuacucau

SEQ ID NO: 2558551 - RNA, 19 nt, Artificial Sequence
  Description of Artificial Sequence: Synthetic oligonucleotide
  Antisense strand to SEQ ID NO: 2558550
augaguagucagaauaaca

SEQ ID NO: 2558552 - RNA, 19 nt, Artificial Sequence
  Description of Artificial Sequence: Synthetic oligonucleotide
  Sense strand starting at position 1813 of SEQ ID NO: 1888812
acagucauccguuauggaa

SEQ ID NO: 2558553 - RNA, 19 nt, Artificial Sequence
  Description of Artificial Sequence: Synthetic oligonucleotide
  Antisense strand to SEQ ID NO: 2558552
uuccauaacggaugacugu

SEQ ID NO: 2558554 - RNA, 19 nt, Artificial Sequence
  Description of Artificial Sequence: Synthetic oligonucleotide
  Sense strand starting at position 1988 of SEQ ID NO: 1888812
uguccagcugcucugugau

SEQ ID NO: 2558555 - RNA, 19 nt, Artificial Sequence
  Description of Artificial Sequence: Synthetic oligonucleotide
  Antisense strand to SEQ ID NO: 2558554
aucacagagcagcuggaca

SEQ ID NO: 2558556 - RNA, 19 nt, Artificial Sequence
  Description of Artificial Sequence: Synthetic oligonucleotide
  Sense strand starting at position 2249 of SEQ ID NO: 1888812
cugaguggccuugaauuag

SEQ ID NO: 2558557 - RNA, 19 nt, Artificial Sequence
  Description of Artificial Sequence: Synthetic oligonucleotide
  Antisense strand to SEQ ID NO: 2558556
cuaauucaaggccacucag

SEQ ID NO: 2558558 - RNA, 19 nt, Artificial Sequence
  Description of Artificial Sequence: Synthetic oligonucleotide
  Sense strand starting at position 2280 of SEQ ID NO: 1888812
ggcagauguaaggaguuga

SEQ ID NO: 2558559 - RNA, 19 nt, Artificial Sequence
  Description of Artificial Sequence: Synthetic oligonucleotide
  Antisense strand to SEQ ID NO: 2558558
ucaacuccuuacaucugcc

SEQ ID NO: 2558560 - RNA, 19 nt, Artificial Sequence
  Description of Artificial Sequence: Synthetic oligonucleotide
  Sense strand starting at position 2284 of SEQ ID NO: 1888812
gauguaaggaguugacacu

SEQ ID NO: 2558561 - RNA, 19 nt, Artificial Sequence
  Description of Artificial Sequence: Synthetic oligonucleotide
  Antisense strand to SEQ ID NO: 2558560
agugucaacuccuuacauc

SEQ ID NO: 2558562 - RNA, 19 nt, Artificial Sequence
  Description of Artificial Sequence: Synthetic oligonucleotide
  Sense strand starting at position 2369 of SEQ ID NO: 1888812
ggaaauacuggacgcauaa

SEQ ID NO: 2558563 - RNA, 19 nt, Artificial Sequence
  Description of Artificial Sequence: Synthetic oligonucleotide
  Antisense strand to SEQ ID NO: 2558562
uuaugcguccaguauuucc

SEQ ID NO: 2558564 - RNA, 19 nt, Artificial Sequence
  Description of Artificial Sequence: Synthetic oligonucleotide
  Sense strand starting at position 2415 of SEQ ID NO: 1888812
gcuggcagaacucagugau

SEQ ID NO: 2558565 - RNA, 19 nt, Artificial Sequence
  Description of Artificial Sequence: Synthetic oligonucleotide
  Antisense strand to SEQ ID NO: 2558564
aucacugaguucugccagc

SEQ ID NO: 2558566 - RNA, 19 nt, Artificial Sequence
  Description of Artificial Sequence: Synthetic oligonucleotide
  Sense strand starting at position 2465 of SEQ ID NO: 1888812
aagacaugcuauguuggaa

SEQ ID NO: 2558567 - RNA, 19 nt, Artificial Sequence
  Description of Artificial Sequence: Synthetic oligonucleotide
  Antisense strand to SEQ ID NO: 2558566
uuccaacauagcaugucuu

SEQ ID NO: 2558568 - RNA, 19 nt, Artificial Sequence
  Description of Artificial Sequence: Synthetic oligonucleotide
  Sense strand starting at position 2468 of SEQ ID NO: 1888812
acaugcuauguuggaaaga

SEQ ID NO: 2558569 - RNA, 19 nt, Artificial Sequence
  Description of Artificial Sequence: Synthetic oligonucleotide
  Antisense strand to SEQ ID NO: 2558568
ucuuuccaacauagcaugu

SEQ ID NO: 2558570 - RNA, 19 nt, Artificial Sequence
  Description of Artificial Sequence: Synthetic oligonucleotide
  Sense strand starting at position 2516 of SEQ ID NO: 1888812
gagggaugucuguaggcac

SEQ ID NO: 2558571 - RNA, 19 nt, Artificial Sequence
  Description of Artificial Sequence: Synthetic oligonucleotide
  Antisense strand to SEQ ID NO: 2558570
gugccuacagacaucccuc

SEQ ID NO: 2558572 - RNA, 19 nt, Artificial Sequence
  Description of Artificial Sequence: Synthetic oligonucleotide
  Sense strand starting at position 2583 of SEQ ID NO: 1888812
agaggaagcucauuauuag

SEQ ID NO: 2558573 - RNA, 19 nt, Artificial Sequence
  Description of Artificial Sequence: Synthetic oligonucleotide
  Antisense strand to SEQ ID NO: 2558572
cuaauaaugagcuuccucu

SEQ ID NO: 2558574 - RNA, 19 nt, Artificial Sequence
  Description of Artificial Sequence: Synthetic oligonucleotide
  Sense strand starting at position 2586 of SEQ ID NO: 1888812
ggaagcucauuauuagauc

SEQ ID NO: 2558575 - RNA, 19 nt, Artificial Sequence
  Description of Artificial Sequence: Synthetic oligonucleotide
  Antisense strand to SEQ ID NO: 2558574
gaucuaauaaugagcuucc

SEQ ID NO: 2558576 - RNA, 19 nt, Artificial Sequence
  Description of Artificial Sequence: Synthetic oligonucleotide
  Sense strand starting at position 2635 of SEQ ID NO: 1888812
ucuagcaagcucuaaguga

SEQ ID NO: 2558577 - RNA, 19 nt, Artificial Sequence
  Description of Artificial Sequence: Synthetic oligonucleotide
  Antisense strand to SEQ ID NO: 2558576
ucacuuagagcuugcuaga

SEQ ID NO: 2558578 - RNA, 19 nt, Artificial Sequence
  Description of Artificial Sequence: Synthetic oligonucleotide
  Sense strand starting at position 2845 of SEQ ID NO: 1888812
uacugcucagaagguauua

SEQ ID NO: 2558579 - RNA, 19 nt, Artificial Sequence
  Description of Artificial Sequence: Synthetic oligonucleotide
  Antisense strand to SEQ ID NO: 2558578
uaauaccuucugagcagua

SEQ ID NO: 2558580 - RNA, 19 nt, Artificial Sequence
  Description of Artificial Sequence: Synthetic oligonucleotide
  Sense strand starting at position 2855 of SEQ ID NO: 1888812
aagguauuauggucauauu

SEQ ID NO: 2558581 - RNA, 19 nt, Artificial Sequence
  Description of Artificial Sequence: Synthetic oligonucleotide
  Antisense strand to SEQ ID NO: 2558580
aauaugaccauaauaccuu

SEQ ID NO: 2558582 - RNA, 19 nt, Artificial Sequence
  Description of Artificial Sequence: Synthetic oligonucleotide
  Sense strand starting at position 2883 of SEQ ID NO: 1888812
agagucgaucuacauguuu

SEQ ID NO: 2558583 - RNA, 19 nt, Artificial Sequence
  Description of Artificial Sequence: Synthetic oligonucleotide
  Antisense strand to SEQ ID NO: 2558582
aaacauguagaucgacucu

SEQ ID NO: 2558584 - RNA, 19 nt, Artificial Sequence
  Description of Artificial Sequence: Synthetic oligonucleotide
  Sense strand starting at position 2962 of SEQ ID NO: 1888812
acagacucuguuugguaca

SEQ ID NO: 2558585 - RNA, 19 nt, Artificial Sequence
  Description of Artificial Sequence: Synthetic oligonucleotide
  Antisense strand to SEQ ID NO: 2558584
uguaccaaacagagucugu

SEQ ID NO: 2558586 - RNA, 19 nt, Artificial Sequence
  Description of Artificial Sequence: Synthetic oligonucleotide
  Sense strand starting at position 2964 of SEQ ID NO: 1888812
agacucuguuugguacaaa

SEQ ID NO: 2558587 - RNA, 19 nt, Artificial Sequence
  Description of Artificial Sequence: Synthetic oligonucleotide
  Antisense strand to SEQ ID NO: 2558586
uuuguaccaaacagagucu

SEQ ID NO: 2558588 - RNA, 19 nt, Artificial Sequence
  Description of Artificial Sequence: Synthetic oligonucleotide
  Sense strand starting at position 3048 of SEQ ID NO: 1888812
gaugaacuuggcuguuaca

SEQ ID NO: 2558589 - RNA, 19 nt, Artificial Sequence
  Description of Artificial Sequence: Synthetic oligonucleotide
  Antisense strand to SEQ ID NO: 2558588
uguaacagccaaguucauc

SEQ ID NO: 2558590 - RNA, 19 nt, Artificial Sequence
  Description of Artificial Sequence: Synthetic oligonucleotide
  Sense strand starting at position 3057 of SEQ ID NO: 1888812
ggcuguuacaucuaaagag

SEQ ID NO: 2558591 - RNA, 19 nt, Artificial Sequence
  Description of Artificial Sequence: Synthetic oligonucleotide
  Antisense strand to SEQ ID NO: 2558590
cucuuuagauguaacagcc

SEQ ID NO: 2558592 - RNA, 19 nt, Artificial Sequence
  Description of Artificial Sequence: Synthetic oligonucleotide
  Sense strand starting at position 3091 of SEQ ID NO: 1888812
aaaggaaagugcucugaug

SEQ ID NO: 2558593 - RNA, 19 nt, Artificial Sequence
  Description of Artificial Sequence: Synthetic oligonucleotide
  Antisense strand to SEQ ID NO: 2558592
caucagagcacuuuccuuu

SEQ ID NO: 2558594 - RNA, 19 nt, Artificial Sequence
  Description of Artificial Sequence: Synthetic oligonucleotide
  Sense strand starting at position 3156 of SEQ ID NO: 1888812
gggaacugugaguacgaca

SEQ ID NO: 2558595 - RNA, 19 nt, Artificial Sequence
  Description of Artificial Sequence: Synthetic oligonucleotide
  Antisense strand to SEQ ID NO: 2558594
ugucguacucacaguuccc

SEQ ID NO: 2558596 - RNA, 19 nt, Artificial Sequence
  Description of Artificial Sequence: Synthetic oligonucleotide
  Sense strand starting at position 3178 of SEQ ID NO: 1888812
cccacaucucccgaagcua

SEQ ID NO: 2558597 - RNA, 19 nt, Artificial Sequence
  Description of Artificial Sequence: Synthetic oligonucleotide
  Antisense strand to SEQ ID NO: 2558596
uagcuucgggagauguggg

SEQ ID NO: 2558598 - RNA, 19 nt, Artificial Sequence
  Description of Artificial Sequence: Synthetic oligonucleotide
  Sense strand starting at position 3225 of SEQ ID NO: 1888812
caaggagacuuuguucuua

SEQ ID NO: 2558599 - RNA, 19 nt, Artificial Sequence
  Description of Artificial Sequence: Synthetic oligonucleotide
  Antisense strand to SEQ ID NO: 2558598
uaagaacaaagucuccuug

SEQ ID NO: 2558600 - RNA, 19 nt, Artificial Sequence
  Description of Artificial Sequence: Synthetic oligonucleotide
  Sense strand starting at position 3227 of SEQ ID NO: 1888812
aggagacuuuguucuuaua

SEQ ID NO: 2558601 - RNA, 19 nt, Artificial Sequence
  Description of Artificial Sequence: Synthetic oligonucleotide
  Antisense strand to SEQ ID NO: 2558600
uauaagaacaaagucuccu

SEQ ID NO: 2558602 - RNA, 19 nt, Artificial Sequence
  Description of Artificial Sequence: Synthetic oligonucleotide
  Sense strand starting at position 3229 of SEQ ID NO: 1888812
gagacuuuguucuuauaga

SEQ ID NO: 2558603 - RNA, 19 nt, Artificial Sequence
  Description of Artificial Sequence: Synthetic oligonucleotide
  Antisense strand to SEQ ID NO: 2558602
ucuauaagaacaaagucuc

SEQ ID NO: 2558604 - RNA, 19 nt, Artificial Sequence
  Description of Artificial Sequence: Synthetic oligonucleotide
  Sense strand starting at position 3806 of SEQ ID NO: 1888812
auuaguacaucugcuaaag

SEQ ID NO: 2558605 - RNA, 19 nt, Artificial Sequence
  Description of Artificial Sequence: Synthetic oligonucleotide
  Antisense strand to SEQ ID NO: 2558604
cuuuagcagauguacuaau

SEQ ID NO: 2558606 - RNA, 19 nt, Artificial Sequence
  Description of Artificial Sequence: Synthetic oligonucleotide
  Sense strand starting at position 3918 of SEQ ID NO: 1888812
cagacuuguuagguaauua

SEQ ID NO: 2558607 - RNA, 19 nt, Artificial Sequence
  Description of Artificial Sequence: Synthetic oligonucleotide
  Antisense strand to SEQ ID NO: 2558606
uaauuaccuaacaagucug

SEQ ID NO: 2558608 - RNA, 19 nt, Artificial Sequence
  Description of Artificial Sequence: Synthetic oligonucleotide
  Sense strand starting at position 65 of SEQ ID NO: 1888813
guaacugacagaugguuaa

SEQ ID NO: 2558609 - RNA, 19 nt, Artificial Sequence
  Description of Artificial Sequence: Synthetic oligonucleotide
  Antisense strand to SEQ ID NO: 2558608
uuaaccaucugucaguuac

SEQ ID NO: 2558610 - RNA, 19 nt, Artificial Sequence
  Description of Artificial Sequence: Synthetic oligonucleotide
  Sense strand starting at position 68 of SEQ ID NO: 1888813
acugacagaugguuaauau

SEQ ID NO: 2558611 - RNA, 19 nt, Artificial Sequence
  Description of Artificial Sequence: Synthetic oligonucleotide
  Antisense strand to SEQ ID NO: 2558610
auauuaaccaucugucagu

SEQ ID NO: 2558612 - RNA, 19 nt, Artificial Sequence
  Description of Artificial Sequence: Synthetic oligonucleotide
  Sense strand starting at position 117 of SEQ ID NO: 1888813
auguaauaucccuaaugua

SEQ ID NO: 2558613 - RNA, 19 nt, Artificial Sequence
  Description of Artificial Sequence: Synthetic oligonucleotide
  Antisense strand to SEQ ID NO: 2558612
uacauuagggauauuacau

SEQ ID NO: 2558614 - RNA, 19 nt, Artificial Sequence
  Description of Artificial Sequence: Synthetic oligonucleotide
  Sense strand starting at position 138 of SEQ ID NO: 1888813
guguaacugacagacuguu

SEQ ID NO: 2558615 - RNA, 19 nt, Artificial Sequence
  Description of Artificial Sequence: Synthetic oligonucleotide
  Antisense strand to SEQ ID NO: 2558614
aacagucugucaguuacac

SEQ ID NO: 2558616 - RNA, 19 nt, Artificial Sequence
  Description of Artificial Sequence: Synthetic oligonucleotide
  Sense strand starting at position 153 of SEQ ID NO: 1888813
uguuaauaucccuaaugua

SEQ ID NO: 2558617 - RNA, 19 nt, Artificial Sequence
  Description of Artificial Sequence: Synthetic oligonucleotide
  Antisense strand to SEQ ID NO: 2558616
uacauuagggauauuaaca

SEQ ID NO: 2558618 - RNA, 19 nt, Artificial Sequence
  Description of Artificial Sequence: Synthetic oligonucleotide
  Sense strand starting at position 180 of SEQ ID NO: 1888813
uuuguacacuguuuacaaa

SEQ ID NO: 2558619 - RNA, 19 nt, Artificial Sequence
  Description of Artificial Sequence: Synthetic oligonucleotide
  Antisense strand to SEQ ID NO: 2558618
uuuguaaacaguguacaaa

SEQ ID NO: 2558620 - RNA, 19 nt, Artificial Sequence
  Description of Artificial Sequence: Synthetic oligonucleotide
  Sense strand starting at position 181 of SEQ ID NO: 1888813
uuguacacuguuuacaaau

SEQ ID NO: 2558621 - RNA, 19 nt, Artificial Sequence
  Description of Artificial Sequence: Synthetic oligonucleotide
  Antisense strand to SEQ ID NO: 2558620
auuuguaaacaguguacaa

SEQ ID NO: 2558622 - RNA, 19 nt, Artificial Sequence
  Description of Artificial Sequence: Synthetic oligonucleotide
  Sense strand starting at position 303 of SEQ ID NO: 1888813
ugcacaaaguagucagaaa

SEQ ID NO: 2558623 - RNA, 19 nt, Artificial Sequence
  Description of Artificial Sequence: Synthetic oligonucleotide
  Antisense strand to SEQ ID NO: 2558622
uuucugacuacuuugugca

SEQ ID NO: 2558624 - RNA, 19 nt, Artificial Sequence
  Description of Artificial Sequence: Synthetic oligonucleotide
  Sense strand starting at position 646 of SEQ ID NO: 1888813
ccaauagagccgcagagua

SEQ ID NO: 2558625 - RNA, 19 nt, Artificial Sequence
  Description of Artificial Sequence: Synthetic oligonucleotide
  Antisense strand to SEQ ID NO: 2558624
uacucugcggcucuauugg

SEQ ID NO: 2558626 - RNA, 19 nt, Artificial Sequence
  Description of Artificial Sequence: Synthetic oligonucleotide
  Sense strand starting at position 838 of SEQ ID NO: 1888813
guucguuugcggaaaugca

SEQ ID NO: 2558627 - RNA, 19 nt, Artificial Sequence
  Description of Artificial Sequence: Synthetic oligonucleotide
  Antisense strand to SEQ ID NO: 2558626
ugcauuuccgcaaacgaac

SEQ ID NO: 2558628 - RNA, 19 nt, Artificial Sequence
  Description of Artificial Sequence: Synthetic oligonucleotide
  Sense strand starting at position 863 of SEQ ID NO: 1888813
uguuaagaccuguaacauu

SEQ ID NO: 2558629 - RNA, 19 nt, Artificial Sequence
  Description of Artificial Sequence: Synthetic oligonucleotide
  Antisense strand to SEQ ID NO: 2558628
aauguuacaggucuuaaca

SEQ ID NO: 2558630 - RNA, 19 nt, Artificial Sequence
  Description of Artificial Sequence: Synthetic oligonucleotide
  Sense strand starting at position 901 of SEQ ID NO: 1888813
uccuucuuugaauaaucga

SEQ ID NO: 2558631 - RNA, 19 nt, Artificial Sequence
  Description of Artificial Sequence: Synthetic oligonucleotide
  Antisense strand to SEQ ID NO: 2558630
ucgauuauucaaagaagga

SEQ ID NO: 2558632 - RNA, 19 nt, Artificial Sequence
  Description of Artificial Sequence: Synthetic oligonucleotide
  Sense strand starting at position 1210 of SEQ ID NO: 1888813
guuacaaaucagcacuuga

SEQ ID NO: 2558633 - RNA, 19 nt, Artificial Sequence
  Description of Artificial Sequence: Synthetic oligonucleotide
  Antisense strand to SEQ ID NO: 2558632
ucaagugcugauuuguaac

SEQ ID NO: 2558634 - RNA, 19 nt, Artificial Sequence
  Description of Artificial Sequence: Synthetic oligonucleotide
  Sense strand starting at position 2242 of SEQ ID NO: 1888813
gacuuaaggcucugggagu

SEQ ID NO: 2558635 - RNA, 19 nt, Artificial Sequence
  Description of Artificial Sequence: Synthetic oligonucleotide
  Antisense strand to SEQ ID NO: 2558634
acucccagagccuuaaguc

SEQ ID NO: 2558636 - RNA, 19 nt, Artificial Sequence
  Description of Artificial Sequence: Synthetic oligonucleotide
  Sense strand starting at position 2249 of SEQ ID NO: 1888813
ggcucugggagugaguuua

SEQ ID NO: 2558637 - RNA, 19 nt, Artificial Sequence
  Description of Artificial Sequence: Synthetic oligonucleotide
  Antisense strand to SEQ ID NO: 2558636
uaaacucacucccagagcc

SEQ ID NO: 2558638 - RNA, 19 nt, Artificial Sequence
  Description of Artificial Sequence: Synthetic oligonucleotide
  Sense strand starting at position 2284 of SEQ ID NO: 1888813
ccacuuaagcauugagaua

SEQ ID NO: 2558639 - RNA, 19 nt, Artificial Sequence
  Description of Artificial Sequence: Synthetic oligonucleotide
  Antisense strand to SEQ ID NO: 2558638
uaucucaaugcuuaagugg

SEQ ID NO: 2558640 - RNA, 19 nt, Artificial Sequence
  Description of Artificial Sequence: Synthetic oligonucleotide
  Sense strand starting at position 2312 of SEQ ID NO: 1888813
auguuaugacauggaucaa

SEQ ID NO: 2558641 - RNA, 19 nt, Artificial Sequence
  Description of Artificial Sequence: Synthetic oligonucleotide
  Antisense strand to SEQ ID NO: 2558640
uugauccaugucauaacau

SEQ ID NO: 2558642 - RNA, 19 nt, Artificial Sequence
  Description of Artificial Sequence: Synthetic oligonucleotide
  Sense strand starting at position 2448 of SEQ ID NO: 1888813
ggguuugugggugagugau

SEQ ID NO: 2558643 - RNA, 19 nt, Artificial Sequence
  Description of Artificial Sequence: Synthetic oligonucleotide
  Antisense strand to SEQ ID NO: 2558642
aucacucacccacaaaccc

SEQ ID NO: 2558644 - RNA, 19 nt, Artificial Sequence
  Description of Artificial Sequence: Synthetic oligonucleotide
  Sense strand starting at position 2461 of SEQ ID NO: 1888813
agugaugggucacuagaga

SEQ ID NO: 2558645 - RNA, 19 nt, Artificial Sequence
  Description of Artificial Sequence: Synthetic oligonucleotide
  Antisense strand to SEQ ID NO: 2558644
ucucuagugacccaucacu

SEQ ID NO: 2558646 - RNA, 19 nt, Artificial Sequence
  Description of Artificial Sequence: Synthetic oligonucleotide
  Sense strand starting at position 2512 of SEQ ID NO: 1888813
gggacaccggagugaauaa

SEQ ID NO: 2558647 - RNA, 19 nt, Artificial Sequence
  Description of Artificial Sequence: Synthetic oligonucleotide
  Antisense strand to SEQ ID NO: 2558646
uuauucacuccgguguccc

SEQ ID NO: 2558648 - RNA, 19 nt, Artificial Sequence
  Description of Artificial Sequence: Synthetic oligonucleotide
  Sense strand starting at position 2560 of SEQ ID NO: 1888813
ggucucuagggugagugau

SEQ ID NO: 2558649 - RNA, 19 nt, Artificial Sequence
  Description of Artificial Sequence: Synthetic oligonucleotide
  Antisense strand to SEQ ID NO: 2558648
aucacucacccuagagacc

SEQ ID NO: 2558650 - RNA, 19 nt, Artificial Sequence
  Description of Artificial Sequence: Synthetic oligonucleotide
  Sense strand starting at position 2562 of SEQ ID NO: 1888813
ucucuagggugagugauaa

SEQ ID NO: 2558651 - RNA, 19 nt, Artificial Sequence
  Description of Artificial Sequence: Synthetic oligonucleotide
  Antisense strand to SEQ ID NO: 2558650
uuaucacucacccuagaga

SEQ ID NO: 2558652 - RNA, 19 nt, Artificial Sequence
  Description of Artificial Sequence: Synthetic oligonucleotide
  Sense strand starting at position 2573 of SEQ ID NO: 1888813
agugauaagguauauguga

SEQ ID NO: 2558653 - RNA, 19 nt, Artificial Sequence
  Description of Artificial Sequence: Synthetic oligonucleotide
  Antisense strand to SEQ ID NO: 2558652
ucacauauaccuuaucacu

SEQ ID NO: 2558654 - RNA, 19 nt, Artificial Sequence
  Description of Artificial Sequence: Synthetic oligonucleotide
  Sense strand starting at position 2575 of SEQ ID NO: 1888813
ugauaagguauaugugaga

SEQ ID NO: 2558655 - RNA, 19 nt, Artificial Sequence
  Description of Artificial Sequence: Synthetic oligonucleotide
  Antisense strand to SEQ ID NO: 2558654
ucucacauauaccuuauca

SEQ ID NO: 2558656 - RNA, 19 nt, Artificial Sequence
  Description of Artificial Sequence: Synthetic oligonucleotide
  Sense strand starting at position 2582 of SEQ ID NO: 1888813
guauaugugagaugaguga

SEQ ID NO: 2558657 - RNA, 19 nt, Artificial Sequence
  Description of Artificial Sequence: Synthetic oligonucleotide
  Antisense strand to SEQ ID NO: 2558656
ucacucaucucacauauac

SEQ ID NO: 2558658 - RNA, 19 nt, Artificial Sequence
  Description of Artificial Sequence: Synthetic oligonucleotide
  Sense strand starting at position 2669 of SEQ ID NO: 1888813
ggguuuauugggugauuga

SEQ ID NO: 2558659 - RNA, 19 nt, Artificial Sequence
  Description of Artificial Sequence: Synthetic oligonucleotide
  Antisense strand to SEQ ID NO: 2558658
ucaaucacccaauaaaccc

SEQ ID NO: 2558660 - RNA, 19 nt, Artificial Sequence
  Description of Artificial Sequence: Synthetic oligonucleotide
  Sense strand starting at position 2670 of SEQ ID NO: 1888813
gguuuauugggugauugac

SEQ ID NO: 2558661 - RNA, 19 nt, Artificial Sequence
  Description of Artificial Sequence: Synthetic oligonucleotide
  Antisense strand to SEQ ID NO: 2558660
gucaaucacccaauaaacc

SEQ ID NO: 2558662 - RNA, 19 nt, Artificial Sequence
  Description of Artificial Sequence: Synthetic oligonucleotide
  Sense strand starting at position 2704 of SEQ ID NO: 1888813
gugagugaugcguuucuuu

SEQ ID NO: 2558663 - RNA, 19 nt, Artificial Sequence
  Description of Artificial Sequence: Synthetic oligonucleotide
  Antisense strand to SEQ ID NO: 2558662
aaagaaacgcaucacucac

SEQ ID NO: 2558664 - RNA, 19 nt, Artificial Sequence
  Description of Artificial Sequence: Synthetic oligonucleotide
  Sense strand starting at position 2716 of SEQ ID NO: 1888813
uuucuuugggacuagugau

SEQ ID NO: 2558665 - RNA, 19 nt, Artificial Sequence
  Description of Artificial Sequence: Synthetic oligonucleotide
  Antisense strand to SEQ ID NO: 2558664
aucacuagucccaaagaaa

SEQ ID NO: 2558666 - RNA, 19 nt, Artificial Sequence
  Description of Artificial Sequence: Synthetic oligonucleotide
  Sense strand starting at position 2783 of SEQ ID NO: 1888813
ggucuuuaggucugagaug

SEQ ID NO: 2558667 - RNA, 19 nt, Artificial Sequence
  Description of Artificial Sequence: Synthetic oligonucleotide
  Antisense strand to SEQ ID NO: 2558666
caucucagaccuaaagacc

SEQ ID NO: 2558668 - RNA, 19 nt, Artificial Sequence
  Description of Artificial Sequence: Synthetic oligonucleotide
  Sense strand starting at position 2788 of SEQ ID NO: 1888813
uuaggucugagaugagguu

SEQ ID NO: 2558669 - RNA, 19 nt, Artificial Sequence
  Description of Artificial Sequence: Synthetic oligonucleotide
  Antisense strand to SEQ ID NO: 2558668
aaccucaucucagaccuaa

SEQ ID NO: 2558670 - RNA, 19 nt, Artificial Sequence
  Description of Artificial Sequence: Synthetic oligonucleotide
  Sense strand starting at position 2872 of SEQ ID NO: 1888813
gcccuuaacuucguuauuu

SEQ ID NO: 2558671 - RNA, 19 nt, Artificial Sequence
  Description of Artificial Sequence: Synthetic oligonucleotide
  Antisense strand to SEQ ID NO: 2558670
aaauaacgaaguuaagggc

SEQ ID NO: 2558672 - RNA, 19 nt, Artificial Sequence
  Description of Artificial Sequence: Synthetic oligonucleotide
  Sense strand starting at position 3317 of SEQ ID NO: 1888813
cagugaaaccaucauggcu

SEQ ID NO: 2558673 - RNA, 19 nt, Artificial Sequence
  Description of Artificial Sequence: Synthetic oligonucleotide
  Antisense strand to SEQ ID NO: 2558672
agccaugaugguuucacug

SEQ ID NO: 2558674 - RNA, 19 nt, Artificial Sequence
  Description of Artificial Sequence: Synthetic oligonucleotide
  Sense strand starting at position 3554 of SEQ ID NO: 1888813
gcaucugacccacaaguuu

SEQ ID NO: 2558675 - RNA, 19 nt, Artificial Sequence
  Description of Artificial Sequence: Synthetic oligonucleotide
  Antisense strand to SEQ ID NO: 2558674
aaacuugugggucagaugc

SEQ ID NO: 2558676 - RNA, 19 nt, Artificial Sequence
  Description of Artificial Sequence: Synthetic oligonucleotide
  Sense strand starting at position 3645 of SEQ ID NO: 1888813
cuggguuauuuagauauga

SEQ ID NO: 2558677 - RNA, 19 nt, Artificial Sequence
  Description of Artificial Sequence: Synthetic oligonucleotide
  Antisense strand to SEQ ID NO: 2558676
ucauaucuaaauaacccag

SEQ ID NO: 2558678 - RNA, 19 nt, Artificial Sequence
  Description of Artificial Sequence: Synthetic oligonucleotide
  Sense strand starting at position 3705 of SEQ ID NO: 1888813
ucuaaauugugguuagagg

SEQ ID NO: 2558679 - RNA, 19 nt, Artificial Sequence
  Description of Artificial Sequence: Synthetic oligonucleotide
  Antisense strand to SEQ ID NO: 2558678
ccucuaaccacaauuuaga

SEQ ID NO: 2558680 - RNA, 19 nt, Artificial Sequence
  Description of Artificial Sequence: Synthetic oligonucleotide
  Sense strand starting at position 3727 of SEQ ID NO: 1888813
ucaccugagugaucauuac

SEQ ID NO: 2558681 - RNA, 19 nt, Artificial Sequence
  Description of Artificial Sequence: Synthetic oligonucleotide
  Antisense strand to SEQ ID NO: 2558680
guaaugaucacucagguga

SEQ ID NO: 2558682 - RNA, 19 nt, Artificial Sequence
  Description of Artificial Sequence: Synthetic oligonucleotide
  Sense strand starting at position 3737 of SEQ ID NO: 1888813
gaucauuacgugcaggaau

SEQ ID NO: 2558683 - RNA, 19 nt, Artificial Sequence
  Description of Artificial Sequence: Synthetic oligonucleotide
  Antisense strand to SEQ ID NO: 2558682
auuccugcacguaaugauc

SEQ ID NO: 2558684 - RNA, 19 nt, Artificial Sequence
  Description of Artificial Sequence: Synthetic oligonucleotide
  Sense strand starting at position 3969 of SEQ ID NO: 1888813
auucuuauuggccauugaa

SEQ ID NO: 2558685 - RNA, 19 nt, Artificial Sequence
  Description of Artificial Sequence: Synthetic oligonucleotide
  Antisense strand to SEQ ID NO: 2558684
uucaauggccaauaagaau

SEQ ID NO: 2558686 - RNA, 19 nt, Artificial Sequence
  Description of Artificial Sequence: Synthetic oligonucleotide
  Sense strand starting at position 3972 of SEQ ID NO: 1888813
cuuauuggccauugaaaua

SEQ ID NO: 2558687 - RNA, 19 nt, Artificial Sequence
  Description of Artificial Sequence: Synthetic oligonucleotide
  Antisense strand to SEQ ID NO: 2558686
uauuucaauggccaauaag

SEQ ID NO: 2558688 - RNA, 19 nt, Artificial Sequence
  Description of Artificial Sequence: Synthetic oligonucleotide
  Sense strand starting at position 79 of SEQ ID NO: 1888814
aagcauugucuauagguca

SEQ ID NO: 2558689 - RNA, 19 nt, Artificial Sequence
  Description of Artificial Sequence: Synthetic oligonucleotide
  Antisense strand to SEQ ID NO: 2558688
ugaccuauagacaaugcuu

SEQ ID NO: 2558690 - RNA, 19 nt, Artificial Sequence
  Description of Artificial Sequence: Synthetic oligonucleotide
  Sense strand starting at position 158 of SEQ ID NO: 1888814
aguccagauacguauguau

SEQ ID NO: 2558691 - RNA, 19 nt, Artificial Sequence
  Description of Artificial Sequence: Synthetic oligonucleotide
  Antisense strand to SEQ ID NO: 2558690
auacauacguaucuggacu

SEQ ID NO: 2558692 - RNA, 19 nt, Artificial Sequence
  Description of Artificial Sequence: Synthetic oligonucleotide
  Sense strand starting at position 225 of SEQ ID NO: 1888814
uaucuuucucaagaggugu

SEQ ID NO: 2558693 - RNA, 19 nt, Artificial Sequence
  Description of Artificial Sequence: Synthetic oligonucleotide
  Antisense strand to SEQ ID NO: 2558692
acaccucuugagaaagaua

SEQ ID NO: 2558694 - RNA, 19 nt, Artificial Sequence
  Description of Artificial Sequence: Synthetic oligonucleotide
  Sense strand starting at position 556 of SEQ ID NO: 1888814
cuccauugaccuuggugau

SEQ ID NO: 2558695 - RNA, 19 nt, Artificial Sequence
  Description of Artificial Sequence: Synthetic oligonucleotide
  Antisense strand to SEQ ID NO: 2558694
aucaccaaggucaauggag

SEQ ID NO: 2558696 - RNA, 19 nt, Artificial Sequence
  Description of Artificial Sequence: Synthetic oligonucleotide
  Sense strand starting at position 557 of SEQ ID NO: 1888814
uccauugaccuuggugauu

SEQ ID NO: 2558697 - RNA, 19 nt, Artificial Sequence
  Description of Artificial Sequence: Synthetic oligonucleotide
  Antisense strand to SEQ ID NO: 2558696
aaucaccaaggucaaugga

SEQ ID NO: 2558698 - RNA, 19 nt, Artificial Sequence
  Description of Artificial Sequence: Synthetic oligonucleotide
  Sense strand starting at position 941 of SEQ ID NO: 1888814
gauguuauuccgucgucau

SEQ ID NO: 2558699 - RNA, 19 nt, Artificial Sequence
  Description of Artificial Sequence: Synthetic oligonucleotide
  Antisense strand to SEQ ID NO: 2558698
augacgacggaauaacauc

SEQ ID NO: 2558700 - RNA, 19 nt, Artificial Sequence
  Description of Artificial Sequence: Synthetic oligonucleotide
  Sense strand starting at position 952 of SEQ ID NO: 1888814
gucgucauuccugcaugua

SEQ ID NO: 2558701 - RNA, 19 nt, Artificial Sequence
  Description of Artificial Sequence: Synthetic oligonucleotide
  Antisense strand to SEQ ID NO: 2558700
uacaugcaggaaugacgac

SEQ ID NO: 2558702 - RNA, 19 nt, Artificial Sequence
  Description of Artificial Sequence: Synthetic oligonucleotide
  Sense strand starting at position 1511 of SEQ ID NO: 1888814
ccugaaacacuuggugaaa

SEQ ID NO: 2558703 - RNA, 19 nt, Artificial Sequence
  Description of Artificial Sequence: Synthetic oligonucleotide
  Antisense strand to SEQ ID NO: 2558702
uuucaccaaguguuucagg

SEQ ID NO: 2558704 - RNA, 19 nt, Artificial Sequence
  Description of Artificial Sequence: Synthetic oligonucleotide
  Sense strand starting at position 1936 of SEQ ID NO: 1888814
acaggacuucguugaagac

SEQ ID NO: 2558705 - RNA, 19 nt, Artificial Sequence
  Description of Artificial Sequence: Synthetic oligonucleotide
  Antisense strand to SEQ ID NO: 2558704
gucuucaacgaaguccugu

SEQ ID NO: 2558706 - RNA, 19 nt, Artificial Sequence
  Description of Artificial Sequence: Synthetic oligonucleotide
  Sense strand starting at position 2221 of SEQ ID NO: 1888814
gaggguccuccucgagaga

SEQ ID NO: 2558707 - RNA, 19 nt, Artificial Sequence
  Description of Artificial Sequence: Synthetic oligonucleotide
  Antisense strand to SEQ ID NO: 2558706
ucucucgaggaggacccuc

SEQ ID NO: 2558708 - RNA, 19 nt, Artificial Sequence
  Description of Artificial Sequence: Synthetic oligonucleotide
  Sense strand starting at position 2222 of SEQ ID NO: 1888814
aggguccuccucgagagaa

SEQ ID NO: 2558709 - RNA, 19 nt, Artificial Sequence
  Description of Artificial Sequence: Synthetic oligonucleotide
  Antisense strand to SEQ ID NO: 2558708
uucucucgaggaggacccu

SEQ ID NO: 2558710 - RNA, 19 nt, Artificial Sequence
  Description of Artificial Sequence: Synthetic oligonucleotide
  Sense strand starting at position 2224 of SEQ ID NO: 1888814
gguccuccucgagagaaca

SEQ ID NO: 2558711 - RNA, 19 nt, Artificial Sequence
  Description of Artificial Sequence: Synthetic oligonucleotide
  Antisense strand to SEQ ID NO: 2558710
uguucucucgaggaggacc

SEQ ID NO: 2558712 - RNA, 19 nt, Artificial Sequence
  Description of Artificial Sequence: Synthetic oligonucleotide
  Sense strand starting at position 2238 of SEQ ID NO: 1888814
gaacaugauguguagaggu

SEQ ID NO: 2558713 - RNA, 19 nt, Artificial Sequence
  Description of Artificial Sequence: Synthetic oligonucleotide
  Antisense strand to SEQ ID NO: 2558712
accucuacacaucauguuc

SEQ ID NO: 2558714 - RNA, 19 nt, Artificial Sequence
  Description of Artificial Sequence: Synthetic oligonucleotide
  Sense strand starting at position 2423 of SEQ ID NO: 1888814
uggacacuauugucacauu

SEQ ID NO: 2558715 - RNA, 19 nt, Artificial Sequence
  Description of Artificial Sequence: Synthetic oligonucleotide
  Antisense strand to SEQ ID NO: 2558714
aaugugacaauagugucca

SEQ ID NO: 2558716 - RNA, 19 nt, Artificial Sequence
  Description of Artificial Sequence: Synthetic oligonucleotide
  Sense strand starting at position 2468 of SEQ ID NO: 1888814
acaguuggaccuuguagau

SEQ ID NO: 2558717 - RNA, 19 nt, Artificial Sequence
  Description of Artificial Sequence: Synthetic oligonucleotide
  Antisense strand to SEQ ID NO: 2558716
aucuacaagguccaacugu

SEQ ID NO: 2558718 - RNA, 19 nt, Artificial Sequence
  Description of Artificial Sequence: Synthetic oligonucleotide
  Sense strand starting at position 2480 of SEQ ID NO: 1888814
uguagaugaaauuguaaga

SEQ ID NO: 2558719 - RNA, 19 nt, Artificial Sequence
  Description of Artificial Sequence: Synthetic oligonucleotide
  Antisense strand to SEQ ID NO: 2558718
ucuuacaauuucaucuaca

SEQ ID NO: 2558720 - RNA, 19 nt, Artificial Sequence
  Description of Artificial Sequence: Synthetic oligonucleotide
  Sense strand starting at position 2491 of SEQ ID NO: 1888814
uuguaagagugauccugau

SEQ ID NO: 2558721 - RNA, 19 nt, Artificial Sequence
  Description of Artificial Sequence: Synthetic oligonucleotide
  Antisense strand to SEQ ID NO: 2558720
aucaggaucacucuuacaa

SEQ ID NO: 2558722 - RNA, 19 nt, Artificial Sequence
  Description of Artificial Sequence: Synthetic oligonucleotide
  Sense strand starting at position 2519 of SEQ ID NO: 1888814
guagacauuuaugaguaau

SEQ ID NO: 2558723 - RNA, 19 nt, Artificial Sequence
  Description of Artificial Sequence: Synthetic oligonucleotide
  Antisense strand to SEQ ID NO: 2558722
auuacucauaaaugucuac

SEQ ID NO: 2558724 - RNA, 19 nt, Artificial Sequence
  Description of Artificial Sequence: Synthetic oligonucleotide
  Sense strand starting at position 2527 of SEQ ID NO: 1888814
uuaugaguaaucgaugugu

SEQ ID NO: 2558725 - RNA, 19 nt, Artificial Sequence
  Description of Artificial Sequence: Synthetic oligonucleotide
  Antisense strand to SEQ ID NO: 2558724
acacaucgauuacucauaa

SEQ ID NO: 2558726 - RNA, 19 nt, Artificial Sequence
  Description of Artificial Sequence: Synthetic oligonucleotide
  Sense strand starting at position 2533 of SEQ ID NO: 1888814
guaaucgauguguauugaa

SEQ ID NO: 2558727 - RNA, 19 nt, Artificial Sequence
  Description of Artificial Sequence: Synthetic oligonucleotide
  Antisense strand to SEQ ID NO: 2558726
uucaauacacaucgauuac

SEQ ID NO: 2558728 - RNA, 19 nt, Artificial Sequence
  Description of Artificial Sequence: Synthetic oligonucleotide
  Sense strand starting at position 2545 of SEQ ID NO: 1888814
uauugaaggcucuguauau

SEQ ID NO: 2558729 - RNA, 19 nt, Artificial Sequence
  Description of Artificial Sequence: Synthetic oligonucleotide
  Antisense strand to SEQ ID NO: 2558728
auauacagagccuucaaua

SEQ ID NO: 2558730 - RNA, 19 nt, Artificial Sequence
  Description of Artificial Sequence: Synthetic oligonucleotide
  Sense strand starting at position 2546 of SEQ ID NO: 1888814
auugaaggcucuguauauc

SEQ ID NO: 2558731 - RNA, 19 nt, Artificial Sequence
  Description of Artificial Sequence: Synthetic oligonucleotide
  Antisense strand to SEQ ID NO: 2558730
gauauacagagccuucaau

SEQ ID NO: 2558732 - RNA, 19 nt, Artificial Sequence
  Description of Artificial Sequence: Synthetic oligonucleotide
  Sense strand starting at position 2564 of SEQ ID NO: 1888814
cuucauaguguggagguaa

SEQ ID NO: 2558733 - RNA, 19 nt, Artificial Sequence
  Description of Artificial Sequence: Synthetic oligonucleotide
  Antisense strand to SEQ ID NO: 2558732
uuaccuccacacuaugaag

SEQ ID NO: 2558734 - RNA, 19 nt, Artificial Sequence
  Description of Artificial Sequence: Synthetic oligonucleotide
  Sense strand starting at position 2577 of SEQ ID NO: 1888814
agguaaaugcagcauuaug

SEQ ID NO: 2558735 - RNA, 19 nt, Artificial Sequence
  Description of Artificial Sequence: Synthetic oligonucleotide
  Antisense strand to SEQ ID NO: 2558734
cauaaugcugcauuuaccu

SEQ ID NO: 2558736 - RNA, 19 nt, Artificial Sequence
  Description of Artificial Sequence: Synthetic oligonucleotide
  Sense strand starting at position 2799 of SEQ ID NO: 1888814
gccaucgcuggcuuuguaa

SEQ ID NO: 2558737 - RNA, 19 nt, Artificial Sequence
  Description of Artificial Sequence: Synthetic oligonucleotide
  Antisense strand to SEQ ID NO: 2558736
uuacaaagccagcgauggc

SEQ ID NO: 2558738 - RNA, 19 nt, Artificial Sequence
  Description of Artificial Sequence: Synthetic oligonucleotide
  Sense strand starting at position 2808 of SEQ ID NO: 1888814
ggcuuuguaagguaaugag

SEQ ID NO: 2558739 - RNA, 19 nt, Artificial Sequence
  Description of Artificial Sequence: Synthetic oligonucleotide
  Antisense strand to SEQ ID NO: 2558738
cucauuaccuuacaaagcc

SEQ ID NO: 2558740 - RNA, 19 nt, Artificial Sequence
  Description of Artificial Sequence: Synthetic oligonucleotide
  Sense strand starting at position 2929 of SEQ ID NO: 1888814
aggauucgugugcaaauca

SEQ ID NO: 2558741 - RNA, 19 nt, Artificial Sequence
  Description of Artificial Sequence: Synthetic oligonucleotide
  Antisense strand to SEQ ID NO: 2558740
ugauuugcacacgaauccu

SEQ ID NO: 2558742 - RNA, 19 nt, Artificial Sequence
  Description of Artificial Sequence: Synthetic oligonucleotide
  Sense strand starting at position 2938 of SEQ ID NO: 1888814
gugcaaaucagagguaaag

SEQ ID NO: 2558743 - RNA, 19 nt, Artificial Sequence
  Description of Artificial Sequence: Synthetic oligonucleotide
  Antisense strand to SEQ ID NO: 2558742
cuuuaccucugauuugcac

SEQ ID NO: 2558744 - RNA, 19 nt, Artificial Sequence
  Description of Artificial Sequence: Synthetic oligonucleotide
  Sense strand starting at position 3209 of SEQ ID NO: 1888814
cuuauaguuguauaugacu

SEQ ID NO: 2558745 - RNA, 19 nt, Artificial Sequence
  Description of Artificial Sequence: Synthetic oligonucleotide
  Antisense strand to SEQ ID NO: 2558744
agucauauacaacuauaag

SEQ ID NO: 2558746 - RNA, 19 nt, Artificial Sequence
  Description of Artificial Sequence: Synthetic oligonucleotide
  Sense strand starting at position 3215 of SEQ ID NO: 1888814
guuguauaugacuagcuau

SEQ ID NO: 2558747 - RNA, 19 nt, Artificial Sequence
  Description of Artificial Sequence: Synthetic oligonucleotide
  Antisense strand to SEQ ID NO: 2558746
auagcuagucauauacaac

SEQ ID NO: 2558748 - RNA, 19 nt, Artificial Sequence
  Description of Artificial Sequence: Synthetic oligonucleotide
  Sense strand starting at position 3221 of SEQ ID NO: 1888814
uaugacuagcuaugugauu

SEQ ID NO: 2558749 - RNA, 19 nt, Artificial Sequence
  Description of Artificial Sequence: Synthetic oligonucleotide
  Antisense strand to SEQ ID NO: 2558748
aaucacauagcuagucaua

SEQ ID NO: 2558750 - RNA, 19 nt, Artificial Sequence
  Description of Artificial Sequence: Synthetic oligonucleotide
  Sense strand starting at position 3222 of SEQ ID NO: 1888814
augacuagcuaugugauua

SEQ ID NO: 2558751 - RNA, 19 nt, Artificial Sequence
  Description of Artificial Sequence: Synthetic oligonucleotide
  Antisense strand to SEQ ID NO: 2558750
uaaucacauagcuagucau

SEQ ID NO: 2558752 - RNA, 19 nt, Artificial Sequence
  Description of Artificial Sequence: Synthetic oligonucleotide
  Sense strand starting at position 3394 of SEQ ID NO: 1888814
guaggaagguuguuccaaa

SEQ ID NO: 2558753 - RNA, 19 nt, Artificial Sequence
  Description of Artificial Sequence: Synthetic oligonucleotide
  Antisense strand to SEQ ID NO: 2558752
uuuggaacaaccuuccuac

SEQ ID NO: 2558754 - RNA, 19 nt, Artificial Sequence
  Description of Artificial Sequence: Synthetic oligonucleotide
  Sense strand starting at position 3395 of SEQ ID NO: 1888814
uaggaagguuguuccaaac

SEQ ID NO: 2558755 - RNA, 19 nt, Artificial Sequence
  Description of Artificial Sequence: Synthetic oligonucleotide
  Antisense strand to SEQ ID NO: 2558754
guuuggaacaaccuuccua

SEQ ID NO: 2558756 - RNA, 19 nt, Artificial Sequence
  Description of Artificial Sequence: Synthetic oligonucleotide
  Sense strand starting at position 3406 of SEQ ID NO: 1888814
uuccaaacugcuggaaauu

SEQ ID NO: 2558757 - RNA, 19 nt, Artificial Sequence
  Description of Artificial Sequence: Synthetic oligonucleotide
  Antisense strand to SEQ ID NO: 2558756
aauuuccagcaguuuggaa

SEQ ID NO: 2558758 - RNA, 19 nt, Artificial Sequence
  Description of Artificial Sequence: Synthetic oligonucleotide
  Sense strand starting at position 3659 of SEQ ID NO: 1888814
guuucugacgucuaugaug

SEQ ID NO: 2558759 - RNA, 19 nt, Artificial Sequence
  Description of Artificial Sequence: Synthetic oligonucleotide
  Antisense strand to SEQ ID NO: 2558758
caucauagacgucagaaac

SEQ ID NO: 2558760 - RNA, 19 nt, Artificial Sequence
  Description of Artificial Sequence: Synthetic oligonucleotide
  Sense strand starting at position 3741 of SEQ ID NO: 1888814
auuaguaacccugggaugu

SEQ ID NO: 2558761 - RNA, 19 nt, Artificial Sequence
  Description of Artificial Sequence: Synthetic oligonucleotide
  Antisense strand to SEQ ID NO: 2558760
acaucccaggguuacuaau

SEQ ID NO: 2558762 - RNA, 19 nt, Artificial Sequence
  Description of Artificial Sequence: Synthetic oligonucleotide
  Sense strand starting at position 3825 of SEQ ID NO: 1888814
aucugugauucugcaggga

SEQ ID NO: 2558763 - RNA, 19 nt, Artificial Sequence
  Description of Artificial Sequence: Synthetic oligonucleotide
  Antisense strand to SEQ ID NO: 2558762
ucccugcagaaucacagau

SEQ ID NO: 2558764 - RNA, 19 nt, Artificial Sequence
  Description of Artificial Sequence: Synthetic oligonucleotide
  Sense strand starting at position 3828 of SEQ ID NO: 1888814
ugugauucugcagggacau

SEQ ID NO: 2558765 - RNA, 19 nt, Artificial Sequence
  Description of Artificial Sequence: Synthetic oligonucleotide
  Antisense strand to SEQ ID NO: 2558764
augucccugcagaaucaca

SEQ ID NO: 2558766 - RNA, 19 nt, Artificial Sequence
  Description of Artificial Sequence: Synthetic oligonucleotide
  Sense strand starting at position 3829 of SEQ ID NO: 1888814
gugauucugcagggacauu

SEQ ID NO: 2558767 - RNA, 19 nt, Artificial Sequence
  Description of Artificial Sequence: Synthetic oligonucleotide
  Antisense strand to SEQ ID NO: 2558766
aaugucccugcagaaucac

SEQ ID NO: 2558768 - RNA, 19 nt, Artificial Sequence
  Description of Artificial Sequence: Synthetic oligonucleotide
  Sense strand starting at position 80 of SEQ ID NO: 1888815
aagcauugucuauagguca

SEQ ID NO: 2558769 - RNA, 19 nt, Artificial Sequence
  Description of Artificial Sequence: Synthetic oligonucleotide
  Antisense strand to SEQ ID NO: 2558768
ugaccuauagacaaugcuu

SEQ ID NO: 2558770 - RNA, 19 nt, Artificial Sequence
  Description of Artificial Sequence: Synthetic oligonucleotide
  Sense strand starting at position 159 of SEQ ID NO: 1888815
aguccagauacguauguau

SEQ ID NO: 2558771 - RNA, 19 nt, Artificial Sequence
  Description of Artificial Sequence: Synthetic oligonucleotide
  Antisense strand to SEQ ID NO: 2558770
auacauacguaucuggacu

SEQ ID NO: 2558772 - RNA, 19 nt, Artificial Sequence
  Description of Artificial Sequence: Synthetic oligonucleotide
  Sense strand starting at position 226 of SEQ ID NO: 1888815
uaucuuucucaagaggugu

SEQ ID NO: 2558773 - RNA, 19 nt, Artificial Sequence
  Description of Artificial Sequence: Synthetic oligonucleotide
  Antisense strand to SEQ ID NO: 2558772
acaccucuugagaaagaua

SEQ ID NO: 2558774 - RNA, 19 nt, Artificial Sequence
  Description of Artificial Sequence: Synthetic oligonucleotide
  Sense strand starting at position 527 of SEQ ID NO: 1888815
auuacugugugucugaaag

SEQ ID NO: 2558775 - RNA, 19 nt, Artificial Sequence
  Description of Artificial Sequence: Synthetic oligonucleotide
  Antisense strand to SEQ ID NO: 2558774
cuuucagacacacaguaau

SEQ ID NO: 2558776 - RNA, 19 nt, Artificial Sequence
  Description of Artificial Sequence: Synthetic oligonucleotide
  Sense strand starting at position 557 of SEQ ID NO: 1888815
cuccauugaccuuggugau

SEQ ID NO: 2558777 - RNA, 19 nt, Artificial Sequence
  Description of Artificial Sequence: Synthetic oligonucleotide
  Antisense strand to SEQ ID NO: 2558776
aucaccaaggucaauggag

SEQ ID NO: 2558778 - RNA, 19 nt, Artificial Sequence
  Description of Artificial Sequence: Synthetic oligonucleotide
  Sense strand starting at position 558 of SEQ ID NO: 1888815
uccauugaccuuggugauu

SEQ ID NO: 2558779 - RNA, 19 nt, Artificial Sequence
  Description of Artificial Sequence: Synthetic oligonucleotide
  Antisense strand to SEQ ID NO: 2558778
aaucaccaaggucaaugga

SEQ ID NO: 2558780 - RNA, 19 nt, Artificial Sequence
  Description of Artificial Sequence: Synthetic oligonucleotide
  Sense strand starting at position 942 of SEQ ID NO: 1888815
gauguuauuccgucgucau

SEQ ID NO: 2558781 - RNA, 19 nt, Artificial Sequence
  Description of Artificial Sequence: Synthetic oligonucleotide
  Antisense strand to SEQ ID NO: 2558780
augacgacggaauaacauc

SEQ ID NO: 2558782 - RNA, 19 nt, Artificial Sequence
  Description of Artificial Sequence: Synthetic oligonucleotide
  Sense strand starting at position 953 of SEQ ID NO: 1888815
gucgucauuccugcaugua

SEQ ID NO: 2558783 - RNA, 19 nt, Artificial Sequence
  Description of Artificial Sequence: Synthetic oligonucleotide
  Antisense strand to SEQ ID NO: 2558782
uacaugcaggaaugacgac

SEQ ID NO: 2558784 - RNA, 19 nt, Artificial Sequence
  Description of Artificial Sequence: Synthetic oligonucleotide
  Sense strand starting at position 2222 of SEQ ID NO: 1888815
gaggguccuccucgagaga

SEQ ID NO: 2558785 - RNA, 19 nt, Artificial Sequence
  Description of Artificial Sequence: Synthetic oligonucleotide
  Antisense strand to SEQ ID NO: 2558784
ucucucgaggaggacccuc

SEQ ID NO: 2558786 - RNA, 19 nt, Artificial Sequence
  Description of Artificial Sequence: Synthetic oligonucleotide
  Sense strand starting at position 2223 of SEQ ID NO: 1888815
aggguccuccucgagagaa

SEQ ID NO: 2558787 - RNA, 19 nt, Artificial Sequence
  Description of Artificial Sequence: Synthetic oligonucleotide
  Antisense strand to SEQ ID NO: 2558786
uucucucgaggaggacccu

SEQ ID NO: 2558788 - RNA, 19 nt, Artificial Sequence
  Description of Artificial Sequence: Synthetic oligonucleotide
  Sense strand starting at position 2225 of SEQ ID NO: 1888815
gguccuccucgagagaaca

SEQ ID NO: 2558789 - RNA, 19 nt, Artificial Sequence
  Description of Artificial Sequence: Synthetic oligonucleotide
  Antisense strand to SEQ ID NO: 2558788
uguucucucgaggaggacc

SEQ ID NO: 2558790 - RNA, 19 nt, Artificial Sequence
  Description of Artificial Sequence: Synthetic oligonucleotide
  Sense strand starting at position 2239 of SEQ ID NO: 1888815
gaacaugauguguagaggu

SEQ ID NO: 2558791 - RNA, 19 nt, Artificial Sequence
  Description of Artificial Sequence: Synthetic oligonucleotide
  Antisense strand to SEQ ID NO: 2558790
accucuacacaucauguuc

SEQ ID NO: 2558792 - RNA, 19 nt, Artificial Sequence
  Description of Artificial Sequence: Synthetic oligonucleotide
  Sense strand starting at position 2424 of SEQ ID NO: 1888815
uggacacuauugucacauu

SEQ ID NO: 2558793 - RNA, 19 nt, Artificial Sequence
  Description of Artificial Sequence: Synthetic oligonucleotide
  Antisense strand to SEQ ID NO: 2558792
aaugugacaauagugucca

SEQ ID NO: 2558794 - RNA, 19 nt, Artificial Sequence
  Description of Artificial Sequence: Synthetic oligonucleotide
  Sense strand starting at position 2469 of SEQ ID NO: 1888815
acaguuggaccuuguagau

SEQ ID NO: 2558795 - RNA, 19 nt, Artificial Sequence
  Description of Artificial Sequence: Synthetic oligonucleotide
  Antisense strand to SEQ ID NO: 2558794
aucuacaagguccaacugu

SEQ ID NO: 2558796 - RNA, 19 nt, Artificial Sequence
  Description of Artificial Sequence: Synthetic oligonucleotide
  Sense strand starting at position 2475 of SEQ ID NO: 1888815
ggaccuuguagaugaaauu

SEQ ID NO: 2558797 - RNA, 19 nt, Artificial Sequence
  Description of Artificial Sequence: Synthetic oligonucleotide
  Antisense strand to SEQ ID NO: 2558796
aauuucaucuacaaggucc

SEQ ID NO: 2558798 - RNA, 19 nt, Artificial Sequence
  Description of Artificial Sequence: Synthetic oligonucleotide
  Sense strand starting at position 2481 of SEQ ID NO: 1888815
uguagaugaaauuguaaga

SEQ ID NO: 2558799 - RNA, 19 nt, Artificial Sequence
  Description of Artificial Sequence: Synthetic oligonucleotide
  Antisense strand to SEQ ID NO: 2558798
ucuuacaauuucaucuaca

SEQ ID NO: 2558800 - RNA, 19 nt, Artificial Sequence
  Description of Artificial Sequence: Synthetic oligonucleotide
  Sense strand starting at position 2492 of SEQ ID NO: 1888815
uuguaagagugauccugau

SEQ ID NO: 2558801 - RNA, 19 nt, Artificial Sequence
  Description of Artificial Sequence: Synthetic oligonucleotide
  Antisense strand to SEQ ID NO: 2558800
aucaggaucacucuuacaa

SEQ ID NO: 2558802 - RNA, 19 nt, Artificial Sequence
  Description of Artificial Sequence: Synthetic oligonucleotide
  Sense strand starting at position 2520 of SEQ ID NO: 1888815
guagacauuuaugaguaau

SEQ ID NO: 2558803 - RNA, 19 nt, Artificial Sequence
  Description of Artificial Sequence: Synthetic oligonucleotide
  Antisense strand to SEQ ID NO: 2558802
auuacucauaaaugucuac

SEQ ID NO: 2558804 - RNA, 19 nt, Artificial Sequence
  Description of Artificial Sequence: Synthetic oligonucleotide
  Sense strand starting at position 2528 of SEQ ID NO: 1888815
uuaugaguaaucgaugugu

SEQ ID NO: 2558805 - RNA, 19 nt, Artificial Sequence
  Description of Artificial Sequence: Synthetic oligonucleotide
  Antisense strand to SEQ ID NO: 2558804
acacaucgauuacucauaa

SEQ ID NO: 2558806 - RNA, 19 nt, Artificial Sequence
  Description of Artificial Sequence: Synthetic oligonucleotide
  Sense strand starting at position 2534 of SEQ ID NO: 1888815
guaaucgauguguauugaa

SEQ ID NO: 2558807 - RNA, 19 nt, Artificial Sequence
  Description of Artificial Sequence: Synthetic oligonucleotide
  Antisense strand to SEQ ID NO: 2558806
uucaauacacaucgauuac

SEQ ID NO: 2558808 - RNA, 19 nt, Artificial Sequence
  Description of Artificial Sequence: Synthetic oligonucleotide
  Sense strand starting at position 2546 of SEQ ID NO: 1888815
uauugaaggcucuguauau

SEQ ID NO: 2558809 - RNA, 19 nt, Artificial Sequence
  Description of Artificial Sequence: Synthetic oligonucleotide
  Antisense strand to SEQ ID NO: 2558808
auauacagagccuucaaua

SEQ ID NO: 2558810 - RNA, 19 nt, Artificial Sequence
  Description of Artificial Sequence: Synthetic oligonucleotide
  Sense strand starting at position 2547 of SEQ ID NO: 1888815
auugaaggcucuguauauc

SEQ ID NO: 2558811 - RNA, 19 nt, Artificial Sequence
  Description of Artificial Sequence: Synthetic oligonucleotide
  Antisense strand to SEQ ID NO: 2558810
gauauacagagccuucaau

SEQ ID NO: 2558812 - RNA, 19 nt, Artificial Sequence
  Description of Artificial Sequence: Synthetic oligonucleotide
  Sense strand starting at position 2565 of SEQ ID NO: 1888815
cuucauaguguggagguaa

SEQ ID NO: 2558813 - RNA, 19 nt, Artificial Sequence
  Description of Artificial Sequence: Synthetic oligonucleotide
  Antisense strand to SEQ ID NO: 2558812
uuaccuccacacuaugaag

SEQ ID NO: 2558814 - RNA, 19 nt, Artificial Sequence
  Description of Artificial Sequence: Synthetic oligonucleotide
  Sense strand starting at position 2578 of SEQ ID NO: 1888815
agguaaaugcagcauuaug

SEQ ID NO: 2558815 - RNA, 19 nt, Artificial Sequence
  Description of Artificial Sequence: Synthetic oligonucleotide
  Antisense strand to SEQ ID NO: 2558814
cauaaugcugcauuuaccu

SEQ ID NO: 2558816 - RNA, 19 nt, Artificial Sequence
  Description of Artificial Sequence: Synthetic oligonucleotide
  Sense strand starting at position 2800 of SEQ ID NO: 1888815
gccaucgcuggcuuuguaa

SEQ ID NO: 2558817 - RNA, 19 nt, Artificial Sequence
  Description of Artificial Sequence: Synthetic oligonucleotide
  Antisense strand to SEQ ID NO: 2558816
uuacaaagccagcgauggc

SEQ ID NO: 2558818 - RNA, 19 nt, Artificial Sequence
  Description of Artificial Sequence: Synthetic oligonucleotide
  Sense strand starting at position 2809 of SEQ ID NO: 1888815
ggcuuuguaagguaaugag

SEQ ID NO: 2558819 - RNA, 19 nt, Artificial Sequence
  Description of Artificial Sequence: Synthetic oligonucleotide
  Antisense strand to SEQ ID NO: 2558818
cucauuaccuuacaaagcc

SEQ ID NO: 2558820 - RNA, 19 nt, Artificial Sequence
  Description of Artificial Sequence: Synthetic oligonucleotide
  Sense strand starting at position 2930 of SEQ ID NO: 1888815
aggauucgugugcaaauca

SEQ ID NO: 2558821 - RNA, 19 nt, Artificial Sequence
  Description of Artificial Sequence: Synthetic oligonucleotide
  Antisense strand to SEQ ID NO: 2558820
ugauuugcacacgaauccu

SEQ ID NO: 2558822 - RNA, 19 nt, Artificial Sequence
  Description of Artificial Sequence: Synthetic oligonucleotide
  Sense strand starting at position 2939 of SEQ ID NO: 1888815
gugcaaaucagagguaaag

SEQ ID NO: 2558823 - RNA, 19 nt, Artificial Sequence
  Description of Artificial Sequence: Synthetic oligonucleotide
  Antisense strand to SEQ ID NO: 2558822
cuuuaccucugauuugcac

SEQ ID NO: 2558824 - RNA, 19 nt, Artificial Sequence
  Description of Artificial Sequence: Synthetic oligonucleotide
  Sense strand starting at position 3210 of SEQ ID NO: 1888815
cuuauaguuguauaugacu

SEQ ID NO: 2558825 - RNA, 19 nt, Artificial Sequence
  Description of Artificial Sequence: Synthetic oligonucleotide
  Antisense strand to SEQ ID NO: 2558824
agucauauacaacuauaag

SEQ ID NO: 2558826 - RNA, 19 nt, Artificial Sequence
  Description of Artificial Sequence: Synthetic oligonucleotide
  Sense strand starting at position 3216 of SEQ ID NO: 1888815
guuguauaugacuagcuau

SEQ ID NO: 2558827 - RNA, 19 nt, Artificial Sequence
  Description of Artificial Sequence: Synthetic oligonucleotide
  Antisense strand to SEQ ID NO: 2558826
auagcuagucauauacaac

SEQ ID NO: 2558828 - RNA, 19 nt, Artificial Sequence
  Description of Artificial Sequence: Synthetic oligonucleotide
  Sense strand starting at position 3222 of SEQ ID NO: 1888815
uaugacuagcuaugugauu

SEQ ID NO: 2558829 - RNA, 19 nt, Artificial Sequence
  Description of Artificial Sequence: Synthetic oligonucleotide
  Antisense strand to SEQ ID NO: 2558828
aaucacauagcuagucaua

SEQ ID NO: 2558830 - RNA, 19 nt, Artificial Sequence
  Description of Artificial Sequence: Synthetic oligonucleotide
  Sense strand starting at position 3223 of SEQ ID NO: 1888815
augacuagcuaugugauua

SEQ ID NO: 2558831 - RNA, 19 nt, Artificial Sequence
  Description of Artificial Sequence: Synthetic oligonucleotide
  Antisense strand to SEQ ID NO: 2558830
uaaucacauagcuagucau

SEQ ID NO: 2558832 - RNA, 19 nt, Artificial Sequence
  Description of Artificial Sequence: Synthetic oligonucleotide
  Sense strand starting at position 3395 of SEQ ID NO: 1888815
guaggaagguuguuccaaa

SEQ ID NO: 2558833 - RNA, 19 nt, Artificial Sequence
  Description of Artificial Sequence: Synthetic oligonucleotide
  Antisense strand to SEQ ID NO: 2558832
uuuggaacaaccuuccuac

SEQ ID NO: 2558834 - RNA, 19 nt, Artificial Sequence
  Description of Artificial Sequence: Synthetic oligonucleotide
  Sense strand starting at position 3396 of SEQ ID NO: 1888815
uaggaagguuguuccaaac

SEQ ID NO: 2558835 - RNA, 19 nt, Artificial Sequence
  Description of Artificial Sequence: Synthetic oligonucleotide
  Antisense strand to SEQ ID NO: 2558834
guuuggaacaaccuuccua

SEQ ID NO: 2558836 - RNA, 19 nt, Artificial Sequence
  Description of Artificial Sequence: Synthetic oligonucleotide
  Sense strand starting at position 3407 of SEQ ID NO: 1888815
uuccaaacugcuggaaauu

SEQ ID NO: 2558837 - RNA, 19 nt, Artificial Sequence
  Description of Artificial Sequence: Synthetic oligonucleotide
  Antisense strand to SEQ ID NO: 2558836
aauuuccagcaguuuggaa

SEQ ID NO: 2558838 - RNA, 19 nt, Artificial Sequence
  Description of Artificial Sequence: Synthetic oligonucleotide
  Sense strand starting at position 3660 of SEQ ID NO: 1888815
guuucugacgucuaugaug

SEQ ID NO: 2558839 - RNA, 19 nt, Artificial Sequence
  Description of Artificial Sequence: Synthetic oligonucleotide
  Antisense strand to SEQ ID NO: 2558838
caucauagacgucagaaac

SEQ ID NO: 2558840 - RNA, 19 nt, Artificial Sequence
  Description of Artificial Sequence: Synthetic oligonucleotide
  Sense strand starting at position 3742 of SEQ ID NO: 1888815
auuaguaacccugggaugu

SEQ ID NO: 2558841 - RNA, 19 nt, Artificial Sequence
  Description of Artificial Sequence: Synthetic oligonucleotide
  Antisense strand to SEQ ID NO: 2558840
acaucccaggguuacuaau

SEQ ID NO: 2558842 - RNA, 19 nt, Artificial Sequence
  Description of Artificial Sequence: Synthetic oligonucleotide
  Sense strand starting at position 3826 of SEQ ID NO: 1888815
aucugugauucugcaggga

SEQ ID NO: 2558843 - RNA, 19 nt, Artificial Sequence
  Description of Artificial Sequence: Synthetic oligonucleotide
  Antisense strand to SEQ ID NO: 2558842
ucccugcagaaucacagau

SEQ ID NO: 2558844 - RNA, 19 nt, Artificial Sequence
  Description of Artificial Sequence: Synthetic oligonucleotide
  Sense strand starting at position 3829 of SEQ ID NO: 1888815
ugugauucugcagggacau

SEQ ID NO: 2558845 - RNA, 19 nt, Artificial Sequence
  Description of Artificial Sequence: Synthetic oligonucleotide
  Antisense strand to SEQ ID NO: 2558844
augucccugcagaaucaca

SEQ ID NO: 2558846 - RNA, 19 nt, Artificial Sequence
  Description of Artificial Sequence: Synthetic oligonucleotide
  Sense strand starting at position 3830 of SEQ ID NO: 1888815
gugauucugcagggacauu

SEQ ID NO: 2558847 - RNA, 19 nt, Artificial Sequence
  Description of Artificial Sequence: Synthetic oligonucleotide
  Antisense strand to SEQ ID NO: 2558846
aaugucccugcagaaucac

SEQ ID NO: 2558848 - RNA, 19 nt, Artificial Sequence
  Description of Artificial Sequence: Synthetic oligonucleotide
  Sense strand starting at position 406 of SEQ ID NO: 1888816
ucagucuaguuagcauuua

SEQ ID NO: 2558849 - RNA, 19 nt, Artificial Sequence
  Description of Artificial Sequence: Synthetic oligonucleotide
  Antisense strand to SEQ ID NO: 2558848
uaaaugcuaacuagacuga

SEQ ID NO: 2558850 - RNA, 19 nt, Artificial Sequence
  Description of Artificial Sequence: Synthetic oligonucleotide
  Sense strand starting at position 583 of SEQ ID NO: 1888816
ggaauugcucgucaacuga

SEQ ID NO: 2558851 - RNA, 19 nt, Artificial Sequence
  Description of Artificial Sequence: Synthetic oligonucleotide
  Antisense strand to SEQ ID NO: 2558850
ucaguugacgagcaauucc

SEQ ID NO: 2558852 - RNA, 19 nt, Artificial Sequence
  Description of Artificial Sequence: Synthetic oligonucleotide
  Sense strand starting at position 1409 of SEQ ID NO: 1888816
ccuguuuguccucacuaga

SEQ ID NO: 2558853 - RNA, 19 nt, Artificial Sequence
  Description of Artificial Sequence: Synthetic oligonucleotide
  Antisense strand to SEQ ID NO: 2558852
ucuagugaggacaaacagg

SEQ ID NO: 2558854 - RNA, 19 nt, Artificial Sequence
  Description of Artificial Sequence: Synthetic oligonucleotide
  Sense strand starting at position 1514 of SEQ ID NO: 1888816
ggagauaaugggcgaucua

SEQ ID NO: 2558855 - RNA, 19 nt, Artificial Sequence
  Description of Artificial Sequence: Synthetic oligonucleotide
  Antisense strand to SEQ ID NO: 2558854
uagaucgcccauuaucucc

SEQ ID NO: 2558856 - RNA, 19 nt, Artificial Sequence
  Description of Artificial Sequence: Synthetic oligonucleotide
  Sense strand starting at position 2639 of SEQ ID NO: 1888816
cguauauaggcggaaucau

SEQ ID NO: 2558857 - RNA, 19 nt, Artificial Sequence
  Description of Artificial Sequence: Synthetic oligonucleotide
  Antisense strand to SEQ ID NO: 2558856
augauuccgccuauauacg

SEQ ID NO: 2558858 - RNA, 19 nt, Artificial Sequence
  Description of Artificial Sequence: Synthetic oligonucleotide
  Sense strand starting at position 2647 of SEQ ID NO: 1888816
ggcggaaucauguaguauu

SEQ ID NO: 2558859 - RNA, 19 nt, Artificial Sequence
  Description of Artificial Sequence: Synthetic oligonucleotide
  Antisense strand to SEQ ID NO: 2558858
aauacuacaugauuccgcc

SEQ ID NO: 2558860 - RNA, 19 nt, Artificial Sequence
  Description of Artificial Sequence: Synthetic oligonucleotide
  Sense strand starting at position 3172 of SEQ ID NO: 1888816
acaugaugauuugaaauac

SEQ ID NO: 2558861 - RNA, 19 nt, Artificial Sequence
  Description of Artificial Sequence: Synthetic oligonucleotide
  Antisense strand to SEQ ID NO: 2558860
guauuucaaaucaucaugu

SEQ ID NO: 2558862 - RNA, 19 nt, Artificial Sequence
  Description of Artificial Sequence: Synthetic oligonucleotide
  Sense strand starting at position 3323 of SEQ ID NO: 1888816
agucaccaugucuacaaua

SEQ ID NO: 2558863 - RNA, 19 nt, Artificial Sequence
  Description of Artificial Sequence: Synthetic oligonucleotide
  Antisense strand to SEQ ID NO: 2558862
uauuguagacauggugacu

SEQ ID NO: 2558864 - RNA, 19 nt, Artificial Sequence
  Description of Artificial Sequence: Synthetic oligonucleotide
  Sense strand starting at position 3635 of SEQ ID NO: 1888816
acacaugugcuuuacccau

SEQ ID NO: 2558865 - RNA, 19 nt, Artificial Sequence
  Description of Artificial Sequence: Synthetic oligonucleotide
  Antisense strand to SEQ ID NO: 2558864
auggguaaagcacaugugu

SEQ ID NO: 2558866 - RNA, 19 nt, Artificial Sequence
  Description of Artificial Sequence: Synthetic oligonucleotide
  Sense strand starting at position 3769 of SEQ ID NO: 1888816
cuauccaguagugggauua

SEQ ID NO: 2558867 - RNA, 19 nt, Artificial Sequence
  Description of Artificial Sequence: Synthetic oligonucleotide
  Antisense strand to SEQ ID NO: 2558866
uaaucccacuacuggauag

SEQ ID NO: 2558868 - RNA, 19 nt, Artificial Sequence
  Description of Artificial Sequence: Synthetic oligonucleotide
  Sense strand starting at position 3799 of SEQ ID NO: 1888816
gauagugcuauggauaagu

SEQ ID NO: 2558869 - RNA, 19 nt, Artificial Sequence
  Description of Artificial Sequence: Synthetic oligonucleotide
  Antisense strand to SEQ ID NO: 2558868
acuuauccauagcacuauc

SEQ ID NO: 2558870 - RNA, 19 nt, Artificial Sequence
  Description of Artificial Sequence: Synthetic oligonucleotide
  Sense strand starting at position 3801 of SEQ ID NO: 1888816
uagugcuauggauaaguuu

SEQ ID NO: 2558871 - RNA, 19 nt, Artificial Sequence
  Description of Artificial Sequence: Synthetic oligonucleotide
  Antisense strand to SEQ ID NO: 2558870
aaacuuauccauagcacua

SEQ ID NO: 2558872 - RNA, 19 nt, Artificial Sequence
  Description of Artificial Sequence: Synthetic oligonucleotide
  Sense strand starting at position 3897 of SEQ ID NO: 1888816
guguguaaugaucaguuca

SEQ ID NO: 2558873 - RNA, 19 nt, Artificial Sequence
  Description of Artificial Sequence: Synthetic oligonucleotide
  Antisense strand to SEQ ID NO: 2558872
ugaacugaucauuacacac

SEQ ID NO: 2558874 - RNA, 19 nt, Artificial Sequence
  Description of Artificial Sequence: Synthetic oligonucleotide
  Sense strand starting at position 70 of SEQ ID NO: 1888817
agagaaugaccggguggua

SEQ ID NO: 2558875 - RNA, 19 nt, Artificial Sequence
  Description of Artificial Sequence: Synthetic oligonucleotide
  Antisense strand to SEQ ID NO: 2558874
uaccacccggucauucucu

SEQ ID NO: 2558876 - RNA, 19 nt, Artificial Sequence
  Description of Artificial Sequence: Synthetic oligonucleotide
  Sense strand starting at position 184 of SEQ ID NO: 1888817
aacccuguuaggugaggua

SEQ ID NO: 2558877 - RNA, 19 nt, Artificial Sequence
  Description of Artificial Sequence: Synthetic oligonucleotide
  Antisense strand to SEQ ID NO: 2558876
uaccucaccuaacaggguu

SEQ ID NO: 2558878 - RNA, 19 nt, Artificial Sequence
  Description of Artificial Sequence: Synthetic oligonucleotide
  Sense strand starting at position 405 of SEQ ID NO: 1888817
ucagucuaguuagcauuua

SEQ ID NO: 2558879 - RNA, 19 nt, Artificial Sequence
  Description of Artificial Sequence: Synthetic oligonucleotide
  Antisense strand to SEQ ID NO: 2558878
uaaaugcuaacuagacuga

SEQ ID NO: 2558880 - RNA, 19 nt, Artificial Sequence
  Description of Artificial Sequence: Synthetic oligonucleotide
  Sense strand starting at position 582 of SEQ ID NO: 1888817
ggaauugcucgucaacuga

SEQ ID NO: 2558881 - RNA, 19 nt, Artificial Sequence
  Description of Artificial Sequence: Synthetic oligonucleotide
  Antisense strand to SEQ ID NO: 2558880
ucaguugacgagcaauucc

SEQ ID NO: 2558882 - RNA, 19 nt, Artificial Sequence
  Description of Artificial Sequence: Synthetic oligonucleotide
  Sense strand starting at position 885 of SEQ ID NO: 1888817
gcaagaaagcuagagcuau

SEQ ID NO: 2558883 - RNA, 19 nt, Artificial Sequence
  Description of Artificial Sequence: Synthetic oligonucleotide
  Antisense strand to SEQ ID NO: 2558882
auagcucuagcuuucuugc

SEQ ID NO: 2558884 - RNA, 19 nt, Artificial Sequence
  Description of Artificial Sequence: Synthetic oligonucleotide
  Sense strand starting at position 893 of SEQ ID NO: 1888817
gcuagagcuaucugggaua

SEQ ID NO: 2558885 - RNA, 19 nt, Artificial Sequence
  Description of Artificial Sequence: Synthetic oligonucleotide
  Antisense strand to SEQ ID NO: 2558884
uaucccagauagcucuagc

SEQ ID NO: 2558886 - RNA, 19 nt, Artificial Sequence
  Description of Artificial Sequence: Synthetic oligonucleotide
  Sense strand starting at position 895 of SEQ ID NO: 1888817
uagagcuaucugggauaaa

SEQ ID NO: 2558887 - RNA, 19 nt, Artificial Sequence
  Description of Artificial Sequence: Synthetic oligonucleotide
  Antisense strand to SEQ ID NO: 2558886
uuuaucccagauagcucua

SEQ ID NO: 2558888 - RNA, 19 nt, Artificial Sequence
  Description of Artificial Sequence: Synthetic oligonucleotide
  Sense strand starting at position 1019 of SEQ ID NO: 1888817
ggaagacaaucauaaucag

SEQ ID NO: 2558889 - RNA, 19 nt, Artificial Sequence
  Description of Artificial Sequence: Synthetic oligonucleotide
  Antisense strand to SEQ ID NO: 2558888
cugauuaugauugucuucc

SEQ ID NO: 2558890 - RNA, 19 nt, Artificial Sequence
  Description of Artificial Sequence: Synthetic oligonucleotide
  Sense strand starting at position 1408 of SEQ ID NO: 1888817
ccuguuuguccucacuaga

SEQ ID NO: 2558891 - RNA, 19 nt, Artificial Sequence
  Description of Artificial Sequence: Synthetic oligonucleotide
  Antisense strand to SEQ ID NO: 2558890
ucuagugaggacaaacagg

SEQ ID NO: 2558892 - RNA, 19 nt, Artificial Sequence
  Description of Artificial Sequence: Synthetic oligonucleotide
  Sense strand starting at position 1513 of SEQ ID NO: 1888817
ggagauaaugggcgaucua

SEQ ID NO: 2558893 - RNA, 19 nt, Artificial Sequence
  Description of Artificial Sequence: Synthetic oligonucleotide
  Antisense strand to SEQ ID NO: 2558892
uagaucgcccauuaucucc

SEQ ID NO: 2558894 - RNA, 19 nt, Artificial Sequence
  Description of Artificial Sequence: Synthetic oligonucleotide
  Sense strand starting at position 1667 of SEQ ID NO: 1888817
aucuaagguuccuugauca

SEQ ID NO: 2558895 - RNA, 19 nt, Artificial Sequence
  Description of Artificial Sequence: Synthetic oligonucleotide
  Antisense strand to SEQ ID NO: 2558894
ugaucaaggaaccuuagau

SEQ ID NO: 2558896 - RNA, 19 nt, Artificial Sequence
  Description of Artificial Sequence: Synthetic oligonucleotide
  Sense strand starting at position 1671 of SEQ ID NO: 1888817
aagguuccuugaucaggaa

SEQ ID NO: 2558897 - RNA, 19 nt, Artificial Sequence
  Description of Artificial Sequence: Synthetic oligonucleotide
  Antisense strand to SEQ ID NO: 2558896
uuccugaucaaggaaccuu

SEQ ID NO: 2558898 - RNA, 19 nt, Artificial Sequence
  Description of Artificial Sequence: Synthetic oligonucleotide
  Sense strand starting at position 2066 of SEQ ID NO: 1888817
agcaucuguccgccaagua

SEQ ID NO: 2558899 - RNA, 19 nt, Artificial Sequence
  Description of Artificial Sequence: Synthetic oligonucleotide
  Antisense strand to SEQ ID NO: 2558898
uacuuggcggacagaugcu

SEQ ID NO: 2558900 - RNA, 19 nt, Artificial Sequence
  Description of Artificial Sequence: Synthetic oligonucleotide
  Sense strand starting at position 2088 of SEQ ID NO: 1888817
auugaaagggcuuguuaga

SEQ ID NO: 2558901 - RNA, 19 nt, Artificial Sequence
  Description of Artificial Sequence: Synthetic oligonucleotide
  Antisense strand to SEQ ID NO: 2558900
ucuaacaagcccuuucaau

SEQ ID NO: 2558902 - RNA, 19 nt, Artificial Sequence
  Description of Artificial Sequence: Synthetic oligonucleotide
  Sense strand starting at position 2133 of SEQ ID NO: 1888817
uugaggucgggucaugaga

SEQ ID NO: 2558903 - RNA, 19 nt, Artificial Sequence
  Description of Artificial Sequence: Synthetic oligonucleotide
  Antisense strand to SEQ ID NO: 2558902
ucucaugacccgaccucaa

SEQ ID NO: 2558904 - RNA, 19 nt, Artificial Sequence
  Description of Artificial Sequence: Synthetic oligonucleotide
  Sense strand starting at position 2638 of SEQ ID NO: 1888817
cguauauaggcggaaucau

SEQ ID NO: 2558905 - RNA, 19 nt, Artificial Sequence
  Description of Artificial Sequence: Synthetic oligonucleotide
  Antisense strand to SEQ ID NO: 2558904
augauuccgccuauauacg

SEQ ID NO: 2558906 - RNA, 19 nt, Artificial Sequence
  Description of Artificial Sequence: Synthetic oligonucleotide
  Sense strand starting at position 2646 of SEQ ID NO: 1888817
ggcggaaucauguaguauu

SEQ ID NO: 2558907 - RNA, 19 nt, Artificial Sequence
  Description of Artificial Sequence: Synthetic oligonucleotide
  Antisense strand to SEQ ID NO: 2558906
aauacuacaugauuccgcc

SEQ ID NO: 2558908 - RNA, 19 nt, Artificial Sequence
  Description of Artificial Sequence: Synthetic oligonucleotide
  Sense strand starting at position 2882 of SEQ ID NO: 1888817
guacaaauaucucugagac

SEQ ID NO: 2558909 - RNA, 19 nt, Artificial Sequence
  Description of Artificial Sequence: Synthetic oligonucleotide
  Antisense strand to SEQ ID NO: 2558908
gucucagagauauuuguac

SEQ ID NO: 2558910 - RNA, 19 nt, Artificial Sequence
  Description of Artificial Sequence: Synthetic oligonucleotide
  Sense strand starting at position 3171 of SEQ ID NO: 1888817
acaugaugauuugaaauac

SEQ ID NO: 2558911 - RNA, 19 nt, Artificial Sequence
  Description of Artificial Sequence: Synthetic oligonucleotide
  Antisense strand to SEQ ID NO: 2558910
guauuucaaaucaucaugu

SEQ ID NO: 2558912 - RNA, 19 nt, Artificial Sequence
  Description of Artificial Sequence: Synthetic oligonucleotide
  Sense strand starting at position 3197 of SEQ ID NO: 1888817
uugugcaauggcuaaauua

SEQ ID NO: 2558913 - RNA, 19 nt, Artificial Sequence
  Description of Artificial Sequence: Synthetic oligonucleotide
  Antisense strand to SEQ ID NO: 2558912
uaauuuagccauugcacaa

SEQ ID NO: 2558914 - RNA, 19 nt, Artificial Sequence
  Description of Artificial Sequence: Synthetic oligonucleotide
  Sense strand starting at position 3322 of SEQ ID NO: 1888817
agucaccaugucuacaaua

SEQ ID NO: 2558915 - RNA, 19 nt, Artificial Sequence
  Description of Artificial Sequence: Synthetic oligonucleotide
  Antisense strand to SEQ ID NO: 2558914
uauuguagacauggugacu

SEQ ID NO: 2558916 - RNA, 19 nt, Artificial Sequence
  Description of Artificial Sequence: Synthetic oligonucleotide
  Sense strand starting at position 3634 of SEQ ID NO: 1888817
acacaugugcuuuacccau

SEQ ID NO: 2558917 - RNA, 19 nt, Artificial Sequence
  Description of Artificial Sequence: Synthetic oligonucleotide
  Antisense strand to SEQ ID NO: 2558916
auggguaaagcacaugugu

SEQ ID NO: 2558918 - RNA, 19 nt, Artificial Sequence
  Description of Artificial Sequence: Synthetic oligonucleotide
  Sense strand starting at position 3796 of SEQ ID NO: 1888817
augauagugcuauggauaa

SEQ ID NO: 2558919 - RNA, 19 nt, Artificial Sequence
  Description of Artificial Sequence: Synthetic oligonucleotide
  Antisense strand to SEQ ID NO: 2558918
uuauccauagcacuaucau

SEQ ID NO: 2558920 - RNA, 19 nt, Artificial Sequence
  Description of Artificial Sequence: Synthetic oligonucleotide
  Sense strand starting at position 3798 of SEQ ID NO: 1888817
gauagugcuauggauaagu

SEQ ID NO: 2558921 - RNA, 19 nt, Artificial Sequence
  Description of Artificial Sequence: Synthetic oligonucleotide
  Antisense strand to SEQ ID NO: 2558920
acuuauccauagcacuauc

SEQ ID NO: 2558922 - RNA, 19 nt, Artificial Sequence
  Description of Artificial Sequence: Synthetic oligonucleotide
  Sense strand starting at position 3800 of SEQ ID NO: 1888817
uagugcuauggauaaguuu

SEQ ID NO: 2558923 - RNA, 19 nt, Artificial Sequence
  Description of Artificial Sequence: Synthetic oligonucleotide
  Antisense strand to SEQ ID NO: 2558922
aaacuuauccauagcacua

SEQ ID NO: 2558924 - RNA, 19 nt, Artificial Sequence
  Description of Artificial Sequence: Synthetic oligonucleotide
  Sense strand starting at position 3896 of SEQ ID NO: 1888817
guguguaaugaucaguuca

SEQ ID NO: 2558925 - RNA, 19 nt, Artificial Sequence
  Description of Artificial Sequence: Synthetic oligonucleotide
  Antisense strand to SEQ ID NO: 2558924
ugaacugaucauuacacac

SEQ ID NO: 2558926 - RNA, 19 nt, Artificial Sequence
  Description of Artificial Sequence: Synthetic oligonucleotide
  Sense strand starting at position 3898 of SEQ ID NO: 1888817
guguaaugaucaguucagg

SEQ ID NO: 2558927 - RNA, 19 nt, Artificial Sequence
  Description of Artificial Sequence: Synthetic oligonucleotide
  Antisense strand to SEQ ID NO: 2558926
ccugaacugaucauuacac

SEQ ID NO: 2558928 - RNA, 19 nt, Artificial Sequence
  Description of Artificial Sequence: Synthetic oligonucleotide
  Sense strand starting at position 63 of SEQ ID NO: 1888818
auaagugugcuuuaacuuc

SEQ ID NO: 2558929 - RNA, 19 nt, Artificial Sequence
  Description of Artificial Sequence: Synthetic oligonucleotide
  Antisense strand to SEQ ID NO: 2558928
gaaguuaaagcacacuuau

SEQ ID NO: 2558930 - RNA, 19 nt, Artificial Sequence
  Description of Artificial Sequence: Synthetic oligonucleotide
  Sense strand starting at position 126 of SEQ ID NO: 1888818
acauguggcucugcaauga

SEQ ID NO: 2558931 - RNA, 19 nt, Artificial Sequence
  Description of Artificial Sequence: Synthetic oligonucleotide
  Antisense strand to SEQ ID NO: 2558930
ucauugcagagccacaugu

SEQ ID NO: 2558932 - RNA, 19 nt, Artificial Sequence
  Description of Artificial Sequence: Synthetic oligonucleotide
  Sense strand starting at position 355 of SEQ ID NO: 1888818
cccagauugcucuggcuuc

SEQ ID NO: 2558933 - RNA, 19 nt, Artificial Sequence
  Description of Artificial Sequence: Synthetic oligonucleotide
  Antisense strand to SEQ ID NO: 2558932
gaagccagagcaaucuggg

SEQ ID NO: 2558934 - RNA, 19 nt, Artificial Sequence
  Description of Artificial Sequence: Synthetic oligonucleotide
  Sense strand starting at position 456 of SEQ ID NO: 1888818
gggaguucccugugaccca

SEQ ID NO: 2558935 - RNA, 19 nt, Artificial Sequence
  Description of Artificial Sequence: Synthetic oligonucleotide
  Antisense strand to SEQ ID NO: 2558934
ugggucacagggaacuccc

SEQ ID NO: 2558936 - RNA, 19 nt, Artificial Sequence
  Description of Artificial Sequence: Synthetic oligonucleotide
  Sense strand starting at position 538 of SEQ ID NO: 1888818
ggacuuggaucucaguaga

SEQ ID NO: 2558937 - RNA, 19 nt, Artificial Sequence
  Description of Artificial Sequence: Synthetic oligonucleotide
  Antisense strand to SEQ ID NO: 2558936
ucuacugagauccaagucc

SEQ ID NO: 2558938 - RNA, 19 nt, Artificial Sequence
  Description of Artificial Sequence: Synthetic oligonucleotide
  Sense strand starting at position 541 of SEQ ID NO: 1888818
cuuggaucucaguagagcu

SEQ ID NO: 2558939 - RNA, 19 nt, Artificial Sequence
  Description of Artificial Sequence: Synthetic oligonucleotide
  Antisense strand to SEQ ID NO: 2558938
agcucuacugagauccaag

SEQ ID NO: 2558940 - RNA, 19 nt, Artificial Sequence
  Description of Artificial Sequence: Synthetic oligonucleotide
  Sense strand starting at position 543 of SEQ ID NO: 1888818
uggaucucaguagagcuua

SEQ ID NO: 2558941 - RNA, 19 nt, Artificial Sequence
  Description of Artificial Sequence: Synthetic oligonucleotide
  Antisense strand to SEQ ID NO: 2558940
uaagcucuacugagaucca

SEQ ID NO: 2558942 - RNA, 19 nt, Artificial Sequence
  Description of Artificial Sequence: Synthetic oligonucleotide
  Sense strand starting at position 548 of SEQ ID NO: 1888818
cucaguagagcuuaaucca

SEQ ID NO: 2558943 - RNA, 19 nt, Artificial Sequence
  Description of Artificial Sequence: Synthetic oligonucleotide
  Antisense strand to SEQ ID NO: 2558942
uggauuaagcucuacugag

SEQ ID NO: 2558944 - RNA, 19 nt, Artificial Sequence
  Description of Artificial Sequence: Synthetic oligonucleotide
  Sense strand starting at position 556 of SEQ ID NO: 1888818
agcuuaauccauggcaucu

SEQ ID NO: 2558945 - RNA, 19 nt, Artificial Sequence
  Description of Artificial Sequence: Synthetic oligonucleotide
  Antisense strand to SEQ ID NO: 2558944
agaugccauggauuaagcu

SEQ ID NO: 2558946 - RNA, 19 nt, Artificial Sequence
  Description of Artificial Sequence: Synthetic oligonucleotide
  Sense strand starting at position 635 of SEQ ID NO: 1888818
gguggaaucuuggucacug

SEQ ID NO: 2558947 - RNA, 19 nt, Artificial Sequence
  Description of Artificial Sequence: Synthetic oligonucleotide
  Antisense strand to SEQ ID NO: 2558946
cagugaccaagauuccacc

SEQ ID NO: 2558948 - RNA, 19 nt, Artificial Sequence
  Description of Artificial Sequence: Synthetic oligonucleotide
  Sense strand starting at position 685 of SEQ ID NO: 1888818
ucaccuuguucgucacuga

SEQ ID NO: 2558949 - RNA, 19 nt, Artificial Sequence
  Description of Artificial Sequence: Synthetic oligonucleotide
  Antisense strand to SEQ ID NO: 2558948
ucagugacgaacaagguga

SEQ ID NO: 2558950 - RNA, 19 nt, Artificial Sequence
  Description of Artificial Sequence: Synthetic oligonucleotide
  Sense strand starting at position 689 of SEQ ID NO: 1888818
cuuguucgucacugaagca

SEQ ID NO: 2558951 - RNA, 19 nt, Artificial Sequence
  Description of Artificial Sequence: Synthetic oligonucleotide
  Antisense strand to SEQ ID NO: 2558950
ugcuucagugacgaacaag

SEQ ID NO: 2558952 - RNA, 19 nt, Artificial Sequence
  Description of Artificial Sequence: Synthetic oligonucleotide
  Sense strand starting at position 891 of SEQ ID NO: 1888818
cggcgucuggcucuugaga

SEQ ID NO: 2558953 - RNA, 19 nt, Artificial Sequence
  Description of Artificial Sequence: Synthetic oligonucleotide
  Antisense strand to SEQ ID NO: 2558952
ucucaagagccagacgccg

SEQ ID NO: 2558954 - RNA, 19 nt, Artificial Sequence
  Description of Artificial Sequence: Synthetic oligonucleotide
  Sense strand starting at position 1023 of SEQ ID NO: 1888818
aagcgagaaucugcuauuc

SEQ ID NO: 2558955 - RNA, 19 nt, Artificial Sequence
  Description of Artificial Sequence: Synthetic oligonucleotide
  Antisense strand to SEQ ID NO: 2558954
gaauagcagauucucgcuu

SEQ ID NO: 2558956 - RNA, 19 nt, Artificial Sequence
  Description of Artificial Sequence: Synthetic oligonucleotide
  Sense strand starting at position 1028 of SEQ ID NO: 1888818
agaaucugcuauuccagua

SEQ ID NO: 2558957 - RNA, 19 nt, Artificial Sequence
  Description of Artificial Sequence: Synthetic oligonucleotide
  Antisense strand to SEQ ID NO: 2558956
uacuggaauagcagauucu

SEQ ID NO: 2558958 - RNA, 19 nt, Artificial Sequence
  Description of Artificial Sequence: Synthetic oligonucleotide
  Sense strand starting at position 1109 of SEQ ID NO: 1888818
ucugcacagucguuuauuu

SEQ ID NO: 2558959 - RNA, 19 nt, Artificial Sequence
  Description of Artificial Sequence: Synthetic oligonucleotide
  Antisense strand to SEQ ID NO: 2558958
aaauaaacgacugugcaga

SEQ ID NO: 2558960 - RNA, 19 nt, Artificial Sequence
  Description of Artificial Sequence: Synthetic oligonucleotide
  Sense strand starting at position 1140 of SEQ ID NO: 1888818
aucuguugagccgggagau

SEQ ID NO: 2558961 - RNA, 19 nt, Artificial Sequence
  Description of Artificial Sequence: Synthetic oligonucleotide
  Antisense strand to SEQ ID NO: 2558960
aucucccggcucaacagau

SEQ ID NO: 2558962 - RNA, 19 nt, Artificial Sequence
  Description of Artificial Sequence: Synthetic oligonucleotide
  Sense strand starting at position 1233 of SEQ ID NO: 1888818
auguauucgucccugcuga

SEQ ID NO: 2558963 - RNA, 19 nt, Artificial Sequence
  Description of Artificial Sequence: Synthetic oligonucleotide
  Antisense strand to SEQ ID NO: 2558962
ucagcagggacgaauacau

SEQ ID NO: 2558964 - RNA, 19 nt, Artificial Sequence
  Description of Artificial Sequence: Synthetic oligonucleotide
  Sense strand starting at position 1276 of SEQ ID NO: 1888818
agaggucuucaacgugagu

SEQ ID NO: 2558965 - RNA, 19 nt, Artificial Sequence
  Description of Artificial Sequence: Synthetic oligonucleotide
  Antisense strand to SEQ ID NO: 2558964
acucacguugaagaccucu

SEQ ID NO: 2558966 - RNA, 19 nt, Artificial Sequence
  Description of Artificial Sequence: Synthetic oligonucleotide
  Sense strand starting at position 1482 of SEQ ID NO: 1888818
gggucucauuggccaagga

SEQ ID NO: 2558967 - RNA, 19 nt, Artificial Sequence
  Description of Artificial Sequence: Synthetic oligonucleotide
  Antisense strand to SEQ ID NO: 2558966
uccuuggccaaugagaccc

SEQ ID NO: 2558968 - RNA, 19 nt, Artificial Sequence
  Description of Artificial Sequence: Synthetic oligonucleotide
  Sense strand starting at position 1628 of SEQ ID NO: 1888818
gcuucuagucgcucaguaa

SEQ ID NO: 2558969 - RNA, 19 nt, Artificial Sequence
  Description of Artificial Sequence: Synthetic oligonucleotide
  Antisense strand to SEQ ID NO: 2558968
uuacugagcgacuagaagc

SEQ ID NO: 2558970 - RNA, 19 nt, Artificial Sequence
  Description of Artificial Sequence: Synthetic oligonucleotide
  Sense strand starting at position 1629 of SEQ ID NO: 1888818
cuucuagucgcucaguaag

SEQ ID NO: 2558971 - RNA, 19 nt, Artificial Sequence
  Description of Artificial Sequence: Synthetic oligonucleotide
  Antisense strand to SEQ ID NO: 2558970
cuuacugagcgacuagaag

SEQ ID NO: 2558972 - RNA, 19 nt, Artificial Sequence
  Description of Artificial Sequence: Synthetic oligonucleotide
  Sense strand starting at position 1650 of SEQ ID NO: 1888818
ucucaauuuccuggcgcau

SEQ ID NO: 2558973 - RNA, 19 nt, Artificial Sequence
  Description of Artificial Sequence: Synthetic oligonucleotide
  Antisense strand to SEQ ID NO: 2558972
augcgccaggaaauugaga

SEQ ID NO: 2558974 - RNA, 19 nt, Artificial Sequence
  Description of Artificial Sequence: Synthetic oligonucleotide
  Sense strand starting at position 2001 of SEQ ID NO: 1888818
cucuaucuugagggaguuu

SEQ ID NO: 2558975 - RNA, 19 nt, Artificial Sequence
  Description of Artificial Sequence: Synthetic oligonucleotide
  Antisense strand to SEQ ID NO: 2558974
aaacucccucaagauagag

SEQ ID NO: 2558976 - RNA, 19 nt, Artificial Sequence
  Description of Artificial Sequence: Synthetic oligonucleotide
  Sense strand starting at position 2012 of SEQ ID NO: 1888818
gggaguuucucaucgccuc

SEQ ID NO: 2558977 - RNA, 19 nt, Artificial Sequence
  Description of Artificial Sequence: Synthetic oligonucleotide
  Antisense strand to SEQ ID NO: 2558976
gaggcgaugagaaacuccc

SEQ ID NO: 2558978 - RNA, 19 nt, Artificial Sequence
  Description of Artificial Sequence: Synthetic oligonucleotide
  Sense strand starting at position 2034 of SEQ ID NO: 1888818
guuccaaugagguguggga

SEQ ID NO: 2558979 - RNA, 19 nt, Artificial Sequence
  Description of Artificial Sequence: Synthetic oligonucleotide
  Antisense strand to SEQ ID NO: 2558978
ucccacaccucauuggaac

SEQ ID NO: 2558980 - RNA, 19 nt, Artificial Sequence
  Description of Artificial Sequence: Synthetic oligonucleotide
  Sense strand starting at position 2038 of SEQ ID NO: 1888818
caaugaggugugggacuuu

SEQ ID NO: 2558981 - RNA, 19 nt, Artificial Sequence
  Description of Artificial Sequence: Synthetic oligonucleotide
  Antisense strand to SEQ ID NO: 2558980
aaagucccacaccucauug

SEQ ID NO: 2558982 - RNA, 19 nt, Artificial Sequence
  Description of Artificial Sequence: Synthetic oligonucleotide
  Sense strand starting at position 2104 of SEQ ID NO: 1888818
acuacuuagcagcaguaua

SEQ ID NO: 2558983 - RNA, 19 nt, Artificial Sequence
  Description of Artificial Sequence: Synthetic oligonucleotide
  Antisense strand to SEQ ID NO: 2558982
uauacugcugcuaaguagu

SEQ ID NO: 2558984 - RNA, 19 nt, Artificial Sequence
  Description of Artificial Sequence: Synthetic oligonucleotide
  Sense strand starting at position 2474 of SEQ ID NO: 1888818
ugaaaugacuccucagcaa

SEQ ID NO: 2558985 - RNA, 19 nt, Artificial Sequence
  Description of Artificial Sequence: Synthetic oligonucleotide
  Antisense strand to SEQ ID NO: 2558984
uugcugaggagucauuuca

SEQ ID NO: 2558986 - RNA, 19 nt, Artificial Sequence
  Description of Artificial Sequence: Synthetic oligonucleotide
  Sense strand starting at position 2509 of SEQ ID NO: 1888818
ucauguuucuugucauuug

SEQ ID NO: 2558987 - RNA, 19 nt, Artificial Sequence
  Description of Artificial Sequence: Synthetic oligonucleotide
  Antisense strand to SEQ ID NO: 2558986
caaaugacaagaaacauga

SEQ ID NO: 2558988 - RNA, 19 nt, Artificial Sequence
  Description of Artificial Sequence: Synthetic oligonucleotide
  Sense strand starting at position 2627 of SEQ ID NO: 1888818
gaaucuaaucagugcuugu

SEQ ID NO: 2558989 - RNA, 19 nt, Artificial Sequence
  Description of Artificial Sequence: Synthetic oligonucleotide
  Antisense strand to SEQ ID NO: 2558988
acaagcacugauuagauuc

SEQ ID NO: 2558990 - RNA, 19 nt, Artificial Sequence
  Description of Artificial Sequence: Synthetic oligonucleotide
  Sense strand starting at position 2728 of SEQ ID NO: 1888818
cgugcaguggauuacauua

SEQ ID NO: 2558991 - RNA, 19 nt, Artificial Sequence
  Description of Artificial Sequence: Synthetic oligonucleotide
  Antisense strand to SEQ ID NO: 2558990
uaauguaauccacugcacg

SEQ ID NO: 2558992 - RNA, 19 nt, Artificial Sequence
  Description of Artificial Sequence: Synthetic oligonucleotide
  Sense strand starting at position 2735 of SEQ ID NO: 1888818
uggauuacauuauaggaga

SEQ ID NO: 2558993 - RNA, 19 nt, Artificial Sequence
  Description of Artificial Sequence: Synthetic oligonucleotide
  Antisense strand to SEQ ID NO: 2558992
ucuccuauaauguaaucca

SEQ ID NO: 2558994 - RNA, 19 nt, Artificial Sequence
  Description of Artificial Sequence: Synthetic oligonucleotide
  Sense strand starting at position 2738 of SEQ ID NO: 1888818
auuacauuauaggagagaa

SEQ ID NO: 2558995 - RNA, 19 nt, Artificial Sequence
  Description of Artificial Sequence: Synthetic oligonucleotide
  Antisense strand to SEQ ID NO: 2558994
uucucuccuauaauguaau

SEQ ID NO: 2558996 - RNA, 19 nt, Artificial Sequence
  Description of Artificial Sequence: Synthetic oligonucleotide
  Sense strand starting at position 2785 of SEQ ID NO: 1888818
cauaaugggcaguaaucau

SEQ ID NO: 2558997 - RNA, 19 nt, Artificial Sequence
  Description of Artificial Sequence: Synthetic oligonucleotide
  Antisense strand to SEQ ID NO: 2558996
augauuacugcccauuaug

SEQ ID NO: 2558998 - RNA, 19 nt, Artificial Sequence
  Description of Artificial Sequence: Synthetic oligonucleotide
  Sense strand starting at position 2834 of SEQ ID NO: 1888818
uuuauuauaguggacagua

SEQ ID NO: 2558999 - RNA, 19 nt, Artificial Sequence
  Description of Artificial Sequence: Synthetic oligonucleotide
  Antisense strand to SEQ ID NO: 2558998
uacuguccacuauaauaaa

SEQ ID NO: 2559000 - RNA, 19 nt, Artificial Sequence
  Description of Artificial Sequence: Synthetic oligonucleotide
  Sense strand starting at position 2902 of SEQ ID NO: 1888818
ggaugcacuguauacaaau

SEQ ID NO: 2559001 - RNA, 19 nt, Artificial Sequence
  Description of Artificial Sequence: Synthetic oligonucleotide
  Antisense strand to SEQ ID NO: 2559000
auuuguauacagugcaucc

SEQ ID NO: 2559002 - RNA, 19 nt, Artificial Sequence
  Description of Artificial Sequence: Synthetic oligonucleotide
  Sense strand starting at position 3174 of SEQ ID NO: 1888818
guccuuuggcccuauauga

SEQ ID NO: 2559003 - RNA, 19 nt, Artificial Sequence
  Description of Artificial Sequence: Synthetic oligonucleotide
  Antisense strand to SEQ ID NO: 2559002
ucauauagggccaaaggac

SEQ ID NO: 2559004 - RNA, 19 nt, Artificial Sequence
  Description of Artificial Sequence: Synthetic oligonucleotide
  Sense strand starting at position 3215 of SEQ ID NO: 1888818
ggaccucugugauuccgga

SEQ ID NO: 2559005 - RNA, 19 nt, Artificial Sequence
  Description of Artificial Sequence: Synthetic oligonucleotide
  Antisense strand to SEQ ID NO: 2559004
uccggaaucacagaggucc

SEQ ID NO: 2559006 - RNA, 19 nt, Artificial Sequence
  Description of Artificial Sequence: Synthetic oligonucleotide
  Sense strand starting at position 3263 of SEQ ID NO: 1888818
gccuuuggagcgugggaua

SEQ ID NO: 2559007 - RNA, 19 nt, Artificial Sequence
  Description of Artificial Sequence: Synthetic oligonucleotide
  Antisense strand to SEQ ID NO: 2559006
uaucccacgcuccaaaggc

SEQ ID NO: 2559008 - RNA, 19 nt, Artificial Sequence
  Description of Artificial Sequence: Synthetic oligonucleotide
  Sense strand starting at position 239 of SEQ ID NO: 1888819
ggugauugccuuggauuuc

SEQ ID NO: 2559009 - RNA, 19 nt, Artificial Sequence
  Description of Artificial Sequence: Synthetic oligonucleotide
  Antisense strand to SEQ ID NO: 2559008
gaaauccaaggcaaucacc

SEQ ID NO: 2559010 - RNA, 19 nt, Artificial Sequence
  Description of Artificial Sequence: Synthetic oligonucleotide
  Sense strand starting at position 261 of SEQ ID NO: 1888819
gaugucaguuccuuaagag

SEQ ID NO: 2559011 - RNA, 19 nt, Artificial Sequence
  Description of Artificial Sequence: Synthetic oligonucleotide
  Antisense strand to SEQ ID NO: 2559010
cucuuaaggaacugacauc

SEQ ID NO: 2559012 - RNA, 19 nt, Artificial Sequence
  Description of Artificial Sequence: Synthetic oligonucleotide
  Sense strand starting at position 262 of SEQ ID NO: 1888819
augucaguuccuuaagaga

SEQ ID NO: 2559013 - RNA, 19 nt, Artificial Sequence
  Description of Artificial Sequence: Synthetic oligonucleotide
  Antisense strand to SEQ ID NO: 2559012
ucucuuaaggaacugacau

SEQ ID NO: 2559014 - RNA, 19 nt, Artificial Sequence
  Description of Artificial Sequence: Synthetic oligonucleotide
  Sense strand starting at position 344 of SEQ ID NO: 1888819
uguuuaggacaaugaauau

SEQ ID NO: 2559015 - RNA, 19 nt, Artificial Sequence
  Description of Artificial Sequence: Synthetic oligonucleotide
  Antisense strand to SEQ ID NO: 2559014
auauucauuguccuaaaca

SEQ ID NO: 2559016 - RNA, 19 nt, Artificial Sequence
  Description of Artificial Sequence: Synthetic oligonucleotide
  Sense strand starting at position 383 of SEQ ID NO: 1888819
guucuauguggccaggaga

SEQ ID NO: 2559017 - RNA, 19 nt, Artificial Sequence
  Description of Artificial Sequence: Synthetic oligonucleotide
  Antisense strand to SEQ ID NO: 2559016
ucuccuggccacauagaac

SEQ ID NO: 2559018 - RNA, 19 nt, Artificial Sequence
  Description of Artificial Sequence: Synthetic oligonucleotide
  Sense strand starting at position 890 of SEQ ID NO: 1888819
cuaggugauugacuuggau

SEQ ID NO: 2559019 - RNA, 19 nt, Artificial Sequence
  Description of Artificial Sequence: Synthetic oligonucleotide
  Antisense strand to SEQ ID NO: 2559018
auccaagucaaucaccuag

SEQ ID NO: 2559020 - RNA, 19 nt, Artificial Sequence
  Description of Artificial Sequence: Synthetic oligonucleotide
  Sense strand starting at position 1337 of SEQ ID NO: 1888819
cuuuaauggcaacaaugua

SEQ ID NO: 2559021 - RNA, 19 nt, Artificial Sequence
  Description of Artificial Sequence: Synthetic oligonucleotide
  Antisense strand to SEQ ID NO: 2559020
uacauuguugccauuaaag

SEQ ID NO: 2559022 - RNA, 19 nt, Artificial Sequence
  Description of Artificial Sequence: Synthetic oligonucleotide
  Sense strand starting at position 1353 of SEQ ID NO: 1888819
guaguuauucuagaucaga

SEQ ID NO: 2559023 - RNA, 19 nt, Artificial Sequence
  Description of Artificial Sequence: Synthetic oligonucleotide
  Antisense strand to SEQ ID NO: 2559022
ucugaucuagaauaacuac

SEQ ID NO: 2559024 - RNA, 19 nt, Artificial Sequence
  Description of Artificial Sequence: Synthetic oligonucleotide
  Sense strand starting at position 1381 of SEQ ID NO: 1888819
gggaauauggcuugagaca

SEQ ID NO: 2559025 - RNA, 19 nt, Artificial Sequence
  Description of Artificial Sequence: Synthetic oligonucleotide
  Antisense strand to SEQ ID NO: 2559024
ugucucaagccauauuccc

SEQ ID NO: 2559026 - RNA, 19 nt, Artificial Sequence
  Description of Artificial Sequence: Synthetic oligonucleotide
  Sense strand starting at position 1388 of SEQ ID NO: 1888819
uggcuugagacauaugagu

SEQ ID NO: 2559027 - RNA, 19 nt, Artificial Sequence
  Description of Artificial Sequence: Synthetic oligonucleotide
  Antisense strand to SEQ ID NO: 2559026
acucauaugucucaagcca

SEQ ID NO: 2559028 - RNA, 19 nt, Artificial Sequence
  Description of Artificial Sequence: Synthetic oligonucleotide
  Sense strand starting at position 1396 of SEQ ID NO: 1888819
gacauaugaguaugucuca

SEQ ID NO: 2559029 - RNA, 19 nt, Artificial Sequence
  Description of Artificial Sequence: Synthetic oligonucleotide
  Antisense strand to SEQ ID NO: 2559028
ugagacauacucauauguc

SEQ ID NO: 2559030 - RNA, 19 nt, Artificial Sequence
  Description of Artificial Sequence: Synthetic oligonucleotide
  Sense strand starting at position 1397 of SEQ ID NO: 1888819
acauaugaguaugucucaa

SEQ ID NO: 2559031 - RNA, 19 nt, Artificial Sequence
  Description of Artificial Sequence: Synthetic oligonucleotide
  Antisense strand to SEQ ID NO: 2559030
uugagacauacucauaugu

SEQ ID NO: 2559032 - RNA, 19 nt, Artificial Sequence
  Description of Artificial Sequence: Synthetic oligonucleotide
  Sense strand starting at position 1483 of SEQ ID NO: 1888819
agaauaaaggugugaagcu

SEQ ID NO: 2559033 - RNA, 19 nt, Artificial Sequence
  Description of Artificial Sequence: Synthetic oligonucleotide
  Antisense strand to SEQ ID NO: 2559032
agcuucacaccuuuauucu

SEQ ID NO: 2559034 - RNA, 19 nt, Artificial Sequence
  Description of Artificial Sequence: Synthetic oligonucleotide
  Sense strand starting at position 1544 of SEQ ID NO: 1888819
uugggaggguuuagauaag

SEQ ID NO: 2559035 - RNA, 19 nt, Artificial Sequence
  Description of Artificial Sequence: Synthetic oligonucleotide
  Antisense strand to SEQ ID NO: 2559034
cuuaucuaaacccucccaa

SEQ ID NO: 2559036 - RNA, 19 nt, Artificial Sequence
  Description of Artificial Sequence: Synthetic oligonucleotide
  Sense strand starting at position 1553 of SEQ ID NO: 1888819
uuuagauaagugugggaga

SEQ ID NO: 2559037 - RNA, 19 nt, Artificial Sequence
  Description of Artificial Sequence: Synthetic oligonucleotide
  Antisense strand to SEQ ID NO: 2559036
ucucccacacuuaucuaaa

SEQ ID NO: 2559038 - RNA, 19 nt, Artificial Sequence
  Description of Artificial Sequence: Synthetic oligonucleotide
  Sense strand starting at position 1555 of SEQ ID NO: 1888819
uagauaagugugggagaca

SEQ ID NO: 2559039 - RNA, 19 nt, Artificial Sequence
  Description of Artificial Sequence: Synthetic oligonucleotide
  Antisense strand to SEQ ID NO: 2559038
ugucucccacacuuaucua

SEQ ID NO: 2559040 - RNA, 19 nt, Artificial Sequence
  Description of Artificial Sequence: Synthetic oligonucleotide
  Sense strand starting at position 1568 of SEQ ID NO: 1888819
gagacacagcaauguuuaa

SEQ ID NO: 2559041 - RNA, 19 nt, Artificial Sequence
  Description of Artificial Sequence: Synthetic oligonucleotide
  Antisense strand to SEQ ID NO: 2559040
uuaaacauugcugugucuc

SEQ ID NO: 2559042 - RNA, 19 nt, Artificial Sequence
  Description of Artificial Sequence: Synthetic oligonucleotide
  Sense strand starting at position 1646 of SEQ ID NO: 1888819
ggaguacuugcagagucau

SEQ ID NO: 2559043 - RNA, 19 nt, Artificial Sequence
  Description of Artificial Sequence: Synthetic oligonucleotide
  Antisense strand to SEQ ID NO: 2559042
augacucugcaaguacucc

SEQ ID NO: 2559044 - RNA, 19 nt, Artificial Sequence
  Description of Artificial Sequence: Synthetic oligonucleotide
  Sense strand starting at position 1699 of SEQ ID NO: 1888819
ggaaguuugaccuggaacu

SEQ ID NO: 2559045 - RNA, 19 nt, Artificial Sequence
  Description of Artificial Sequence: Synthetic oligonucleotide
  Antisense strand to SEQ ID NO: 2559044
aguuccaggucaaacuucc

SEQ ID NO: 2559046 - RNA, 19 nt, Artificial Sequence
  Description of Artificial Sequence: Synthetic oligonucleotide
  Sense strand starting at position 1700 of SEQ ID NO: 1888819
gaaguuugaccuggaacua

SEQ ID NO: 2559047 - RNA, 19 nt, Artificial Sequence
  Description of Artificial Sequence: Synthetic oligonucleotide
  Antisense strand to SEQ ID NO: 2559046
uaguuccaggucaaacuuc

SEQ ID NO: 2559048 - RNA, 19 nt, Artificial Sequence
  Description of Artificial Sequence: Synthetic oligonucleotide
  Sense strand starting at position 1711 of SEQ ID NO: 1888819
uggaacuaauuccuggauu

SEQ ID NO: 2559049 - RNA, 19 nt, Artificial Sequence
  Description of Artificial Sequence: Synthetic oligonucleotide
  Antisense strand to SEQ ID NO: 2559048
aauccaggaauuaguucca

SEQ ID NO: 2559050 - RNA, 19 nt, Artificial Sequence
  Description of Artificial Sequence: Synthetic oligonucleotide
  Sense strand starting at position 1741 of SEQ ID NO: 1888819
gacaaaguugcugaucacu

SEQ ID NO: 2559051 - RNA, 19 nt, Artificial Sequence
  Description of Artificial Sequence: Synthetic oligonucleotide
  Antisense strand to SEQ ID NO: 2559050
agugaucagcaacuuuguc

SEQ ID NO: 2559052 - RNA, 19 nt, Artificial Sequence
  Description of Artificial Sequence: Synthetic oligonucleotide
  Sense strand starting at position 1787 of SEQ ID NO: 1888819
ggugcuguuuauuuacaga

SEQ ID NO: 2559053 - RNA, 19 nt, Artificial Sequence
  Description of Artificial Sequence: Synthetic oligonucleotide
  Antisense strand to SEQ ID NO: 2559052
ucuguaaauaaacagcacc

SEQ ID NO: 2559054 - RNA, 19 nt, Artificial Sequence
  Description of Artificial Sequence: Synthetic oligonucleotide
  Sense strand starting at position 1868 of SEQ ID NO: 1888819
ggguucugucuaggaagga

SEQ ID NO: 2559055 - RNA, 19 nt, Artificial Sequence
  Description of Artificial Sequence: Synthetic oligonucleotide
  Antisense strand to SEQ ID NO: 2559054
uccuuccuagacagaaccc

SEQ ID NO: 2559056 - RNA, 19 nt, Artificial Sequence
  Description of Artificial Sequence: Synthetic oligonucleotide
  Sense strand starting at position 2159 of SEQ ID NO: 1888819
gaagaaaccugaguggucu

SEQ ID NO: 2559057 - RNA, 19 nt, Artificial Sequence
  Description of Artificial Sequence: Synthetic oligonucleotide
  Antisense strand to SEQ ID NO: 2559056
agaccacucagguuucuuc

SEQ ID NO: 2559058 - RNA, 19 nt, Artificial Sequence
  Description of Artificial Sequence: Synthetic oligonucleotide
  Sense strand starting at position 2163 of SEQ ID NO: 1888819
aaaccugaguggucucaca

SEQ ID NO: 2559059 - RNA, 19 nt, Artificial Sequence
  Description of Artificial Sequence: Synthetic oligonucleotide
  Antisense strand to SEQ ID NO: 2559058
ugugagaccacucagguuu

SEQ ID NO: 2559060 - RNA, 19 nt, Artificial Sequence
  Description of Artificial Sequence: Synthetic oligonucleotide
  Sense strand starting at position 2411 of SEQ ID NO: 1888819
ucucucuugggaggucaaa

SEQ ID NO: 2559061 - RNA, 19 nt, Artificial Sequence
  Description of Artificial Sequence: Synthetic oligonucleotide
  Antisense strand to SEQ ID NO: 2559060
uuugaccucccaagagaga

SEQ ID NO: 2559062 - RNA, 19 nt, Artificial Sequence
  Description of Artificial Sequence: Synthetic oligonucleotide
  Sense strand starting at position 2561 of SEQ ID NO: 1888819
uuacguucccaggauggaa

SEQ ID NO: 2559063 - RNA, 19 nt, Artificial Sequence
  Description of Artificial Sequence: Synthetic oligonucleotide
  Antisense strand to SEQ ID NO: 2559062
uuccauccugggaacguaa

SEQ ID NO: 2559064 - RNA, 19 nt, Artificial Sequence
  Description of Artificial Sequence: Synthetic oligonucleotide
  Sense strand starting at position 2603 of SEQ ID NO: 1888819
acagaaacucgguaguacu

SEQ ID NO: 2559065 - RNA, 19 nt, Artificial Sequence
  Description of Artificial Sequence: Synthetic oligonucleotide
  Antisense strand to SEQ ID NO: 2559064
aguacuaccgaguuucugu

SEQ ID NO: 2559066 - RNA, 19 nt, Artificial Sequence
  Description of Artificial Sequence: Synthetic oligonucleotide
  Sense strand starting at position 2611 of SEQ ID NO: 1888819
ucgguaguacuugagaaug

SEQ ID NO: 2559067 - RNA, 19 nt, Artificial Sequence
  Description of Artificial Sequence: Synthetic oligonucleotide
  Antisense strand to SEQ ID NO: 2559066
cauucucaaguacuaccga

SEQ ID NO: 2559068 - RNA, 19 nt, Artificial Sequence
  Description of Artificial Sequence: Synthetic oligonucleotide
  Sense strand starting at position 2765 of SEQ ID NO: 1888819
cugcaaguuguagaaugaa

SEQ ID NO: 2559069 - RNA, 19 nt, Artificial Sequence
  Description of Artificial Sequence: Synthetic oligonucleotide
  Antisense strand to SEQ ID NO: 2559068
uucauucuacaacuugcag

SEQ ID NO: 2559070 - RNA, 19 nt, Artificial Sequence
  Description of Artificial Sequence: Synthetic oligonucleotide
  Sense strand starting at position 2801 of SEQ ID NO: 1888819
uacugaacuuugucaugga

SEQ ID NO: 2559071 - RNA, 19 nt, Artificial Sequence
  Description of Artificial Sequence: Synthetic oligonucleotide
  Antisense strand to SEQ ID NO: 2559070
uccaugacaaaguucagua

SEQ ID NO: 2559072 - RNA, 19 nt, Artificial Sequence
  Description of Artificial Sequence: Synthetic oligonucleotide
  Sense strand starting at position 2805 of SEQ ID NO: 1888819
gaacuuugucauggaugga

SEQ ID NO: 2559073 - RNA, 19 nt, Artificial Sequence
  Description of Artificial Sequence: Synthetic oligonucleotide
  Antisense strand to SEQ ID NO: 2559072
uccauccaugacaaaguuc

SEQ ID NO: 2559074 - RNA, 19 nt, Artificial Sequence
  Description of Artificial Sequence: Synthetic oligonucleotide
  Sense strand starting at position 2832 of SEQ ID NO: 1888819
agagaauuacucugcauaa

SEQ ID NO: 2559075 - RNA, 19 nt, Artificial Sequence
  Description of Artificial Sequence: Synthetic oligonucleotide
  Antisense strand to SEQ ID NO: 2559074
uuaugcagaguaauucucu

SEQ ID NO: 2559076 - RNA, 19 nt, Artificial Sequence
  Description of Artificial Sequence: Synthetic oligonucleotide
  Sense strand starting at position 3032 of SEQ ID NO: 1888819
gugucagguaaugauuaga

SEQ ID NO: 2559077 - RNA, 19 nt, Artificial Sequence
  Description of Artificial Sequence: Synthetic oligonucleotide
  Antisense strand to SEQ ID NO: 2559076
ucuaaucauuaccugacac

SEQ ID NO: 2559078 - RNA, 19 nt, Artificial Sequence
  Description of Artificial Sequence: Synthetic oligonucleotide
  Sense strand starting at position 3038 of SEQ ID NO: 1888819
gguaaugauuagagggaug

SEQ ID NO: 2559079 - RNA, 19 nt, Artificial Sequence
  Description of Artificial Sequence: Synthetic oligonucleotide
  Antisense strand to SEQ ID NO: 2559078
caucccucuaaucauuacc

SEQ ID NO: 2559080 - RNA, 19 nt, Artificial Sequence
  Description of Artificial Sequence: Synthetic oligonucleotide
  Sense strand starting at position 3273 of SEQ ID NO: 1888819
ggguacacuugauuaccua

SEQ ID NO: 2559081 - RNA, 19 nt, Artificial Sequence
  Description of Artificial Sequence: Synthetic oligonucleotide
  Antisense strand to SEQ ID NO: 2559080
uagguaaucaaguguaccc

SEQ ID NO: 2559082 - RNA, 19 nt, Artificial Sequence
  Description of Artificial Sequence: Synthetic oligonucleotide
  Sense strand starting at position 3554 of SEQ ID NO: 1888819
uggacauggccuuggacaa

SEQ ID NO: 2559083 - RNA, 19 nt, Artificial Sequence
  Description of Artificial Sequence: Synthetic oligonucleotide
  Antisense strand to SEQ ID NO: 2559082
uuguccaaggccaugucca

SEQ ID NO: 2559084 - RNA, 19 nt, Artificial Sequence
  Description of Artificial Sequence: Synthetic oligonucleotide
  Sense strand starting at position 3555 of SEQ ID NO: 1888819
ggacauggccuuggacaaa

SEQ ID NO: 2559085 - RNA, 19 nt, Artificial Sequence
  Description of Artificial Sequence: Synthetic oligonucleotide
  Antisense strand to SEQ ID NO: 2559084
uuuguccaaggccaugucc

SEQ ID NO: 2559086 - RNA, 19 nt, Artificial Sequence
  Description of Artificial Sequence: Synthetic oligonucleotide
  Sense strand starting at position 3862 of SEQ ID NO: 1888819
gauguaguacuuggcauuu

SEQ ID NO: 2559087 - RNA, 19 nt, Artificial Sequence
  Description of Artificial Sequence: Synthetic oligonucleotide
  Antisense strand to SEQ ID NO: 2559086
aaaugccaaguacuacauc

SEQ ID NO: 2559088 - RNA, 19 nt, Artificial Sequence
  Description of Artificial Sequence: Synthetic oligonucleotide
  Sense strand starting at position 36 of SEQ ID NO: 1888820
gugaccaauugcccauaua

SEQ ID NO: 2559089 - RNA, 19 nt, Artificial Sequence
  Description of Artificial Sequence: Synthetic oligonucleotide
  Antisense strand to SEQ ID NO: 2559088
uauaugggcaauuggucac

SEQ ID NO: 2559090 - RNA, 19 nt, Artificial Sequence
  Description of Artificial Sequence: Synthetic oligonucleotide
  Sense strand starting at position 74 of SEQ ID NO: 1888820
uggagugaguaucugacuu

SEQ ID NO: 2559091 - RNA, 19 nt, Artificial Sequence
  Description of Artificial Sequence: Synthetic oligonucleotide
  Antisense strand to SEQ ID NO: 2559090
aagucagauacucacucca

SEQ ID NO: 2559092 - RNA, 19 nt, Artificial Sequence
  Description of Artificial Sequence: Synthetic oligonucleotide
  Sense strand starting at position 139 of SEQ ID NO: 1888820
ucacaugucuuguuggacu

SEQ ID NO: 2559093 - RNA, 19 nt, Artificial Sequence
  Description of Artificial Sequence: Synthetic oligonucleotide
  Antisense strand to SEQ ID NO: 2559092
aguccaacaagacauguga

SEQ ID NO: 2559094 - RNA, 19 nt, Artificial Sequence
  Description of Artificial Sequence: Synthetic oligonucleotide
  Sense strand starting at position 141 of SEQ ID NO: 1888820
acaugucuuguuggacuau

SEQ ID NO: 2559095 - RNA, 19 nt, Artificial Sequence
  Description of Artificial Sequence: Synthetic oligonucleotide
  Antisense strand to SEQ ID NO: 2559094
auaguccaacaagacaugu

SEQ ID NO: 2559096 - RNA, 19 nt, Artificial Sequence
  Description of Artificial Sequence: Synthetic oligonucleotide
  Sense strand starting at position 305 of SEQ ID NO: 1888820
aggcucuguggacaugaua

SEQ ID NO: 2559097 - RNA, 19 nt, Artificial Sequence
  Description of Artificial Sequence: Synthetic oligonucleotide
  Antisense strand to SEQ ID NO: 2559096
uaucauguccacagagccu

SEQ ID NO: 2559098 - RNA, 19 nt, Artificial Sequence
  Description of Artificial Sequence: Synthetic oligonucleotide
  Sense strand starting at position 313 of SEQ ID NO: 1888820
uggacaugauaucugcaau

SEQ ID NO: 2559099 - RNA, 19 nt, Artificial Sequence
  Description of Artificial Sequence: Synthetic oligonucleotide
  Antisense strand to SEQ ID NO: 2559098
auugcagauaucaugucca

SEQ ID NO: 2559100 - RNA, 19 nt, Artificial Sequence
  Description of Artificial Sequence: Synthetic oligonucleotide
  Sense strand starting at position 314 of SEQ ID NO: 1888820
ggacaugauaucugcaaug

SEQ ID NO: 2559101 - RNA, 19 nt, Artificial Sequence
  Description of Artificial Sequence: Synthetic oligonucleotide
  Antisense strand to SEQ ID NO: 2559100
cauugcagauaucaugucc

SEQ ID NO: 2559102 - RNA, 19 nt, Artificial Sequence
  Description of Artificial Sequence: Synthetic oligonucleotide
  Sense strand starting at position 316 of SEQ ID NO: 1888820
acaugauaucugcaauguu

SEQ ID NO: 2559103 - RNA, 19 nt, Artificial Sequence
  Description of Artificial Sequence: Synthetic oligonucleotide
  Antisense strand to SEQ ID NO: 2559102
aacauugcagauaucaugu

SEQ ID NO: 2559104 - RNA, 19 nt, Artificial Sequence
  Description of Artificial Sequence: Synthetic oligonucleotide
  Sense strand starting at position 319 of SEQ ID NO: 1888820
ugauaucugcaauguuaaa

SEQ ID NO: 2559105 - RNA, 19 nt, Artificial Sequence
  Description of Artificial Sequence: Synthetic oligonucleotide
  Antisense strand to SEQ ID NO: 2559104
uuuaacauugcagauauca

SEQ ID NO: 2559106 - RNA, 19 nt, Artificial Sequence
  Description of Artificial Sequence: Synthetic oligonucleotide
  Sense strand starting at position 453 of SEQ ID NO: 1888820
ggagaagagucuuugcucu

SEQ ID NO: 2559107 - RNA, 19 nt, Artificial Sequence
  Description of Artificial Sequence: Synthetic oligonucleotide
  Antisense strand to SEQ ID NO: 2559106
agagcaaagacucuucucc

SEQ ID NO: 2559108 - RNA, 19 nt, Artificial Sequence
  Description of Artificial Sequence: Synthetic oligonucleotide
  Sense strand starting at position 455 of SEQ ID NO: 1888820
agaagagucuuugcucuuu

SEQ ID NO: 2559109 - RNA, 19 nt, Artificial Sequence
  Description of Artificial Sequence: Synthetic oligonucleotide
  Antisense strand to SEQ ID NO: 2559108
aaagagcaaagacucuucu

SEQ ID NO: 2559110 - RNA, 19 nt, Artificial Sequence
  Description of Artificial Sequence: Synthetic oligonucleotide
  Sense strand starting at position 457 of SEQ ID NO: 1888820
aagagucuuugcucuuuga

SEQ ID NO: 2559111 - RNA, 19 nt, Artificial Sequence
  Description of Artificial Sequence: Synthetic oligonucleotide
  Antisense strand to SEQ ID NO: 2559110
ucaaagagcaaagacucuu

SEQ ID NO: 2559112 - RNA, 19 nt, Artificial Sequence
  Description of Artificial Sequence: Synthetic oligonucleotide
  Sense strand starting at position 1048 of SEQ ID NO: 1888820
ugaugaauuccagguaauc

SEQ ID NO: 2559113 - RNA, 19 nt, Artificial Sequence
  Description of Artificial Sequence: Synthetic oligonucleotide
  Antisense strand to SEQ ID NO: 2559112
gauuaccuggaauucauca

SEQ ID NO: 2559114 - RNA, 19 nt, Artificial Sequence
  Description of Artificial Sequence: Synthetic oligonucleotide
  Sense strand starting at position 1453 of SEQ ID NO: 1888820
cuuugaauaucauugguga

SEQ ID NO: 2559115 - RNA, 19 nt, Artificial Sequence
  Description of Artificial Sequence: Synthetic oligonucleotide
  Antisense strand to SEQ ID NO: 2559114
ucaccaaugauauucaaag

SEQ ID NO: 2559116 - RNA, 19 nt, Artificial Sequence
  Description of Artificial Sequence: Synthetic oligonucleotide
  Sense strand starting at position 1454 of SEQ ID NO: 1888820
uuugaauaucauuggugaa

SEQ ID NO: 2559117 - RNA, 19 nt, Artificial Sequence
  Description of Artificial Sequence: Synthetic oligonucleotide
  Antisense strand to SEQ ID NO: 2559116
uucaccaaugauauucaaa

SEQ ID NO: 2559118 - RNA, 19 nt, Artificial Sequence
  Description of Artificial Sequence: Synthetic oligonucleotide
  Sense strand starting at position 1455 of SEQ ID NO: 1888820
uugaauaucauuggugaag

SEQ ID NO: 2559119 - RNA, 19 nt, Artificial Sequence
  Description of Artificial Sequence: Synthetic oligonucleotide
  Antisense strand to SEQ ID NO: 2559118
cuucaccaaugauauucaa

SEQ ID NO: 2559120 - RNA, 19 nt, Artificial Sequence
  Description of Artificial Sequence: Synthetic oligonucleotide
  Sense strand starting at position 1665 of SEQ ID NO: 1888820
auuugaaucuggcacaaug

SEQ ID NO: 2559121 - RNA, 19 nt, Artificial Sequence
  Description of Artificial Sequence: Synthetic oligonucleotide
  Antisense strand to SEQ ID NO: 2559120
cauugugccagauucaaau

SEQ ID NO: 2559122 - RNA, 19 nt, Artificial Sequence
  Description of Artificial Sequence: Synthetic oligonucleotide
  Sense strand starting at position 1831 of SEQ ID NO: 1888820
gucucuguaucacuuugaa

SEQ ID NO: 2559123 - RNA, 19 nt, Artificial Sequence
  Description of Artificial Sequence: Synthetic oligonucleotide
  Antisense strand to SEQ ID NO: 2559122
uucaaagugauacagagac

SEQ ID NO: 2559124 - RNA, 19 nt, Artificial Sequence
  Description of Artificial Sequence: Synthetic oligonucleotide
  Sense strand starting at position 1894 of SEQ ID NO: 1888820
ggguuuaucagauagguua

SEQ ID NO: 2559125 - RNA, 19 nt, Artificial Sequence
  Description of Artificial Sequence: Synthetic oligonucleotide
  Antisense strand to SEQ ID NO: 2559124
uaaccuaucugauaaaccc

SEQ ID NO: 2559126 - RNA, 19 nt, Artificial Sequence
  Description of Artificial Sequence: Synthetic oligonucleotide
  Sense strand starting at position 1896 of SEQ ID NO: 1888820
guuuaucagauagguuagu

SEQ ID NO: 2559127 - RNA, 19 nt, Artificial Sequence
  Description of Artificial Sequence: Synthetic oligonucleotide
  Antisense strand to SEQ ID NO: 2559126
acuaaccuaucugauaaac

SEQ ID NO: 2559128 - RNA, 19 nt, Artificial Sequence
  Description of Artificial Sequence: Synthetic oligonucleotide
  Sense strand starting at position 1897 of SEQ ID NO: 1888820
uuuaucagauagguuaguu

SEQ ID NO: 2559129 - RNA, 19 nt, Artificial Sequence
  Description of Artificial Sequence: Synthetic oligonucleotide
  Antisense strand to SEQ ID NO: 2559128
aacuaaccuaucugauaaa

SEQ ID NO: 2559130 - RNA, 19 nt, Artificial Sequence
  Description of Artificial Sequence: Synthetic oligonucleotide
  Sense strand starting at position 1902 of SEQ ID NO: 1888820
cagauagguuaguuaggua

SEQ ID NO: 2559131 - RNA, 19 nt, Artificial Sequence
  Description of Artificial Sequence: Synthetic oligonucleotide
  Antisense strand to SEQ ID NO: 2559130
uaccuaacuaaccuaucug

SEQ ID NO: 2559132 - RNA, 19 nt, Artificial Sequence
  Description of Artificial Sequence: Synthetic oligonucleotide
  Sense strand starting at position 1933 of SEQ ID NO: 1888820
gaugcucuaugaucuuagu

SEQ ID NO: 2559133 - RNA, 19 nt, Artificial Sequence
  Description of Artificial Sequence: Synthetic oligonucleotide
  Antisense strand to SEQ ID NO: 2559132
acuaagaucauagagcauc

SEQ ID NO: 2559134 - RNA, 19 nt, Artificial Sequence
  Description of Artificial Sequence: Synthetic oligonucleotide
  Sense strand starting at position 2027 of SEQ ID NO: 1888820
gaggaaacauacuuuggca

SEQ ID NO: 2559135 - RNA, 19 nt, Artificial Sequence
  Description of Artificial Sequence: Synthetic oligonucleotide
  Antisense strand to SEQ ID NO: 2559134
ugccaaaguauguuuccuc

SEQ ID NO: 2559136 - RNA, 19 nt, Artificial Sequence
  Description of Artificial Sequence: Synthetic oligonucleotide
  Sense strand starting at position 2091 of SEQ ID NO: 1888820
aagugaagucaugguuacu

SEQ ID NO: 2559137 - RNA, 19 nt, Artificial Sequence
  Description of Artificial Sequence: Synthetic oligonucleotide
  Antisense strand to SEQ ID NO: 2559136
aguaaccaugacuucacuu

SEQ ID NO: 2559138 - RNA, 19 nt, Artificial Sequence
  Description of Artificial Sequence: Synthetic oligonucleotide
  Sense strand starting at position 2268 of SEQ ID NO: 1888820
gucucuuuccuggaugaaa

SEQ ID NO: 2559139 - RNA, 19 nt, Artificial Sequence
  Description of Artificial Sequence: Synthetic oligonucleotide
  Antisense strand to SEQ ID NO: 2559138
uuucauccaggaaagagac

SEQ ID NO: 2559140 - RNA, 19 nt, Artificial Sequence
  Description of Artificial Sequence: Synthetic oligonucleotide
  Sense strand starting at position 2270 of SEQ ID NO: 1888820
cucuuuccuggaugaaaca

SEQ ID NO: 2559141 - RNA, 19 nt, Artificial Sequence
  Description of Artificial Sequence: Synthetic oligonucleotide
  Antisense strand to SEQ ID NO: 2559140
uguuucauccaggaaagag

SEQ ID NO: 2559142 - RNA, 19 nt, Artificial Sequence
  Description of Artificial Sequence: Synthetic oligonucleotide
  Sense strand starting at position 2348 of SEQ ID NO: 1888820
uucuucuuuguguagauaa

SEQ ID NO: 2559143 - RNA, 19 nt, Artificial Sequence
  Description of Artificial Sequence: Synthetic oligonucleotide
  Antisense strand to SEQ ID NO: 2559142
uuaucuacacaaagaagaa

SEQ ID NO: 2559144 - RNA, 19 nt, Artificial Sequence
  Description of Artificial Sequence: Synthetic oligonucleotide
  Sense strand starting at position 2350 of SEQ ID NO: 1888820
cuucuuuguguagauaaac

SEQ ID NO: 2559145 - RNA, 19 nt, Artificial Sequence
  Description of Artificial Sequence: Synthetic oligonucleotide
  Antisense strand to SEQ ID NO: 2559144
guuuaucuacacaaagaag

SEQ ID NO: 2559146 - RNA, 19 nt, Artificial Sequence
  Description of Artificial Sequence: Synthetic oligonucleotide
  Sense strand starting at position 2442 of SEQ ID NO: 1888820
uuagucucaggucgaauuu

SEQ ID NO: 2559147 - RNA, 19 nt, Artificial Sequence
  Description of Artificial Sequence: Synthetic oligonucleotide
  Antisense strand to SEQ ID NO: 2559146
aaauucgaccugagacuaa

SEQ ID NO: 2559148 - RNA, 19 nt, Artificial Sequence
  Description of Artificial Sequence: Synthetic oligonucleotide
  Sense strand starting at position 2551 of SEQ ID NO: 1888820
uguuuagucgcagaaauua

SEQ ID NO: 2559149 - RNA, 19 nt, Artificial Sequence
  Description of Artificial Sequence: Synthetic oligonucleotide
  Antisense strand to SEQ ID NO: 2559148
uaauuucugcgacuaaaca

SEQ ID NO: 2559150 - RNA, 19 nt, Artificial Sequence
  Description of Artificial Sequence: Synthetic oligonucleotide
  Sense strand starting at position 2710 of SEQ ID NO: 1888820
gguccaguuccuugagaca

SEQ ID NO: 2559151 - RNA, 19 nt, Artificial Sequence
  Description of Artificial Sequence: Synthetic oligonucleotide
  Antisense strand to SEQ ID NO: 2559150
ugucucaaggaacuggacc

SEQ ID NO: 2559152 - RNA, 19 nt, Artificial Sequence
  Description of Artificial Sequence: Synthetic oligonucleotide
  Sense strand starting at position 2745 of SEQ ID NO: 1888820
gccguagucccuuccaagu

SEQ ID NO: 2559153 - RNA, 19 nt, Artificial Sequence
  Description of Artificial Sequence: Synthetic oligonucleotide
  Antisense strand to SEQ ID NO: 2559152
acuuggaagggacuacggc

SEQ ID NO: 2559154 - RNA, 19 nt, Artificial Sequence
  Description of Artificial Sequence: Synthetic oligonucleotide
  Sense strand starting at position 2783 of SEQ ID NO: 1888820
uauuguugucauuaaagug

SEQ ID NO: 2559155 - RNA, 19 nt, Artificial Sequence
  Description of Artificial Sequence: Synthetic oligonucleotide
  Antisense strand to SEQ ID NO: 2559154
cacuuuaaugacaacaaua

SEQ ID NO: 2559156 - RNA, 19 nt, Artificial Sequence
  Description of Artificial Sequence: Synthetic oligonucleotide
  Sense strand starting at position 2790 of SEQ ID NO: 1888820
gucauuaaagugugaccca

SEQ ID NO: 2559157 - RNA, 19 nt, Artificial Sequence
  Description of Artificial Sequence: Synthetic oligonucleotide
  Antisense strand to SEQ ID NO: 2559156
ugggucacacuuuaaugac

SEQ ID NO: 2559158 - RNA, 19 nt, Artificial Sequence
  Description of Artificial Sequence: Synthetic oligonucleotide
  Sense strand starting at position 2808 of SEQ ID NO: 1888820
augugaguauugucuagau

SEQ ID NO: 2559159 - RNA, 19 nt, Artificial Sequence
  Description of Artificial Sequence: Synthetic oligonucleotide
  Antisense strand to SEQ ID NO: 2559158
aucuagacaauacucacau

SEQ ID NO: 2559160 - RNA, 19 nt, Artificial Sequence
  Description of Artificial Sequence: Synthetic oligonucleotide
  Sense strand starting at position 2810 of SEQ ID NO: 1888820
gugaguauugucuagaugc

SEQ ID NO: 2559161 - RNA, 19 nt, Artificial Sequence
  Description of Artificial Sequence: Synthetic oligonucleotide
  Antisense strand to SEQ ID NO: 2559160
gcaucuagacaauacucac

SEQ ID NO: 2559162 - RNA, 19 nt, Artificial Sequence
  Description of Artificial Sequence: Synthetic oligonucleotide
  Sense strand starting at position 2812 of SEQ ID NO: 1888820
gaguauugucuagaugcag

SEQ ID NO: 2559163 - RNA, 19 nt, Artificial Sequence
  Description of Artificial Sequence: Synthetic oligonucleotide
  Antisense strand to SEQ ID NO: 2559162
cugcaucuagacaauacuc

SEQ ID NO: 2559164 - RNA, 19 nt, Artificial Sequence
  Description of Artificial Sequence: Synthetic oligonucleotide
  Sense strand starting at position 3758 of SEQ ID NO: 1888820
gacugaaaccuucguuccu

SEQ ID NO: 2559165 - RNA, 19 nt, Artificial Sequence
  Description of Artificial Sequence: Synthetic oligonucleotide
  Antisense strand to SEQ ID NO: 2559164
aggaacgaagguuucaguc

SEQ ID NO: 2559166 - RNA, 19 nt, Artificial Sequence
  Description of Artificial Sequence: Synthetic oligonucleotide
  Sense strand starting at position 3760 of SEQ ID NO: 1888820
cugaaaccuucguuccuga

SEQ ID NO: 2559167 - RNA, 19 nt, Artificial Sequence
  Description of Artificial Sequence: Synthetic oligonucleotide
  Antisense strand to SEQ ID NO: 2559166
ucaggaacgaagguuucag

SEQ ID NO: 2559168 - RNA, 19 nt, Artificial Sequence
  Description of Artificial Sequence: Synthetic oligonucleotide
  Sense strand starting at position 219 of SEQ ID NO: 1888821
ggaguucaauugcagggaa

SEQ ID NO: 2559169 - RNA, 19 nt, Artificial Sequence
  Description of Artificial Sequence: Synthetic oligonucleotide
  Antisense strand to SEQ ID NO: 2559168
uucccugcaauugaacucc

SEQ ID NO: 2559170 - RNA, 19 nt, Artificial Sequence
  Description of Artificial Sequence: Synthetic oligonucleotide
  Sense strand starting at position 355 of SEQ ID NO: 1888821
cugaacuggucugccaaga

SEQ ID NO: 2559171 - RNA, 19 nt, Artificial Sequence
  Description of Artificial Sequence: Synthetic oligonucleotide
  Antisense strand to SEQ ID NO: 2559170
ucuuggcagaccaguucag

SEQ ID NO: 2559172 - RNA, 19 nt, Artificial Sequence
  Description of Artificial Sequence: Synthetic oligonucleotide
  Sense strand starting at position 415 of SEQ ID NO: 1888821
ggagccugccucuagaaau

SEQ ID NO: 2559173 - RNA, 19 nt, Artificial Sequence
  Description of Artificial Sequence: Synthetic oligonucleotide
  Antisense strand to SEQ ID NO: 2559172
auuucuagaggcaggcucc

SEQ ID NO: 2559174 - RNA, 19 nt, Artificial Sequence
  Description of Artificial Sequence: Synthetic oligonucleotide
  Sense strand starting at position 441 of SEQ ID NO: 1888821
uccagagugcacuaccaua

SEQ ID NO: 2559175 - RNA, 19 nt, Artificial Sequence
  Description of Artificial Sequence: Synthetic oligonucleotide
  Antisense strand to SEQ ID NO: 2559174
uaugguagugcacucugga

SEQ ID NO: 2559176 - RNA, 19 nt, Artificial Sequence
  Description of Artificial Sequence: Synthetic oligonucleotide
  Sense strand starting at position 536 of SEQ ID NO: 1888821
acuagaauguuguuacaca

SEQ ID NO: 2559177 - RNA, 19 nt, Artificial Sequence
  Description of Artificial Sequence: Synthetic oligonucleotide
  Antisense strand to SEQ ID NO: 2559176
uguguaacaacauucuagu

SEQ ID NO: 2559178 - RNA, 19 nt, Artificial Sequence
  Description of Artificial Sequence: Synthetic oligonucleotide
  Sense strand starting at position 618 of SEQ ID NO: 1888821
gauugcaucuaacugguga

SEQ ID NO: 2559179 - RNA, 19 nt, Artificial Sequence
  Description of Artificial Sequence: Synthetic oligonucleotide
  Antisense strand to SEQ ID NO: 2559178
ucaccaguuagaugcaauc

SEQ ID NO: 2559180 - RNA, 19 nt, Artificial Sequence
  Description of Artificial Sequence: Synthetic oligonucleotide
  Sense strand starting at position 663 of SEQ ID NO: 1888821
cugcaaaggugucugggaa

SEQ ID NO: 2559181 - RNA, 19 nt, Artificial Sequence
  Description of Artificial Sequence: Synthetic oligonucleotide
  Antisense strand to SEQ ID NO: 2559180
uucccagacaccuuugcag

SEQ ID NO: 2559182 - RNA, 19 nt, Artificial Sequence
  Description of Artificial Sequence: Synthetic oligonucleotide
  Sense strand starting at position 664 of SEQ ID NO: 1888821
ugcaaaggugucugggaaa

SEQ ID NO: 2559183 - RNA, 19 nt, Artificial Sequence
  Description of Artificial Sequence: Synthetic oligonucleotide
  Antisense strand to SEQ ID NO: 2559182
uuucccagacaccuuugca

SEQ ID NO: 2559184 - RNA, 19 nt, Artificial Sequence
  Description of Artificial Sequence: Synthetic oligonucleotide
  Sense strand starting at position 1034 of SEQ ID NO: 1888821
gguugugaauagcuuaucu

SEQ ID NO: 2559185 - RNA, 19 nt, Artificial Sequence
  Description of Artificial Sequence: Synthetic oligonucleotide
  Antisense strand to SEQ ID NO: 2559184
agauaagcuauucacaacc

SEQ ID NO: 2559186 - RNA, 19 nt, Artificial Sequence
  Description of Artificial Sequence: Synthetic oligonucleotide
  Sense strand starting at position 1036 of SEQ ID NO: 1888821
uugugaauagcuuaucuca

SEQ ID NO: 2559187 - RNA, 19 nt, Artificial Sequence
  Description of Artificial Sequence: Synthetic oligonucleotide
  Antisense strand to SEQ ID NO: 2559186
ugagauaagcuauucacaa

SEQ ID NO: 2559188 - RNA, 19 nt, Artificial Sequence
  Description of Artificial Sequence: Synthetic oligonucleotide
  Sense strand starting at position 1046 of SEQ ID NO: 1888821
cuuaucucagguugacaga

SEQ ID NO: 2559189 - RNA, 19 nt, Artificial Sequence
  Description of Artificial Sequence: Synthetic oligonucleotide
  Antisense strand to SEQ ID NO: 2559188
ucugucaaccugagauaag

SEQ ID NO: 2559190 - RNA, 19 nt, Artificial Sequence
  Description of Artificial Sequence: Synthetic oligonucleotide
  Sense strand starting at position 1066 of SEQ ID NO: 1888821
agaggagacucauaaucga

SEQ ID NO: 2559191 - RNA, 19 nt, Artificial Sequence
  Description of Artificial Sequence: Synthetic oligonucleotide
  Antisense strand to SEQ ID NO: 2559190
ucgauuaugagucuccucu

SEQ ID NO: 2559192 - RNA, 19 nt, Artificial Sequence
  Description of Artificial Sequence: Synthetic oligonucleotide
  Sense strand starting at position 1105 of SEQ ID NO: 1888821
cguauacuuccugaccuca

SEQ ID NO: 2559193 - RNA, 19 nt, Artificial Sequence
  Description of Artificial Sequence: Synthetic oligonucleotide
  Antisense strand to SEQ ID NO: 2559192
ugaggucaggaaguauacg

SEQ ID NO: 2559194 - RNA, 19 nt, Artificial Sequence
  Description of Artificial Sequence: Synthetic oligonucleotide
  Sense strand starting at position 1338 of SEQ ID NO: 1888821
cgccauugcaguugguaua

SEQ ID NO: 2559195 - RNA, 19 nt, Artificial Sequence
  Description of Artificial Sequence: Synthetic oligonucleotide
  Antisense strand to SEQ ID NO: 2559194
uauaccaacugcaauggcg

SEQ ID NO: 2559196 - RNA, 19 nt, Artificial Sequence
  Description of Artificial Sequence: Synthetic oligonucleotide
  Sense strand starting at position 1997 of SEQ ID NO: 1888821
aggcuuucucauugaccau

SEQ ID NO: 2559197 - RNA, 19 nt, Artificial Sequence
  Description of Artificial Sequence: Synthetic oligonucleotide
  Antisense strand to SEQ ID NO: 2559196
auggucaaugagaaagccu

SEQ ID NO: 2559198 - RNA, 19 nt, Artificial Sequence
  Description of Artificial Sequence: Synthetic oligonucleotide
  Sense strand starting at position 2209 of SEQ ID NO: 1888821
gggccucugcaagaauaau

SEQ ID NO: 2559199 - RNA, 19 nt, Artificial Sequence
  Description of Artificial Sequence: Synthetic oligonucleotide
  Antisense strand to SEQ ID NO: 2559198
auuauucuugcagaggccc

SEQ ID NO: 2559200 - RNA, 19 nt, Artificial Sequence
  Description of Artificial Sequence: Synthetic oligonucleotide
  Sense strand starting at position 2272 of SEQ ID NO: 1888821
aagauagggugugaauaaa

SEQ ID NO: 2559201 - RNA, 19 nt, Artificial Sequence
  Description of Artificial Sequence: Synthetic oligonucleotide
  Antisense strand to SEQ ID NO: 2559200
uuuauucacacccuaucuu

SEQ ID NO: 2559202 - RNA, 19 nt, Artificial Sequence
  Description of Artificial Sequence: Synthetic oligonucleotide
  Sense strand starting at position 2351 of SEQ ID NO: 1888821
gagcacugcucacugucaa

SEQ ID NO: 2559203 - RNA, 19 nt, Artificial Sequence
  Description of Artificial Sequence: Synthetic oligonucleotide
  Antisense strand to SEQ ID NO: 2559202
uugacagugagcagugcuc

SEQ ID NO: 2559204 - RNA, 19 nt, Artificial Sequence
  Description of Artificial Sequence: Synthetic oligonucleotide
  Sense strand starting at position 2634 of SEQ ID NO: 1888821
gacagcgugcuguaaacuu

SEQ ID NO: 2559205 - RNA, 19 nt, Artificial Sequence
  Description of Artificial Sequence: Synthetic oligonucleotide
  Antisense strand to SEQ ID NO: 2559204
aaguuuacagcacgcuguc

SEQ ID NO: 2559206 - RNA, 19 nt, Artificial Sequence
  Description of Artificial Sequence: Synthetic oligonucleotide
  Sense strand starting at position 2641 of SEQ ID NO: 1888821
ugcuguaaacuugggcuua

SEQ ID NO: 2559207 - RNA, 19 nt, Artificial Sequence
  Description of Artificial Sequence: Synthetic oligonucleotide
  Antisense strand to SEQ ID NO: 2559206
uaagcccaaguuuacagca

SEQ ID NO: 2559208 - RNA, 19 nt, Artificial Sequence
  Description of Artificial Sequence: Synthetic oligonucleotide
  Sense strand starting at position 2643 of SEQ ID NO: 1888821
cuguaaacuugggcuuauc

SEQ ID NO: 2559209 - RNA, 19 nt, Artificial Sequence
  Description of Artificial Sequence: Synthetic oligonucleotide
  Antisense strand to SEQ ID NO: 2559208
gauaagcccaaguuuacag

SEQ ID NO: 2559210 - RNA, 19 nt, Artificial Sequence
  Description of Artificial Sequence: Synthetic oligonucleotide
  Sense strand starting at position 2654 of SEQ ID NO: 1888821
ggcuuaucucaaggauguu

SEQ ID NO: 2559211 - RNA, 19 nt, Artificial Sequence
  Description of Artificial Sequence: Synthetic oligonucleotide
  Antisense strand to SEQ ID NO: 2559210
aacauccuugagauaagcc

SEQ ID NO: 2559212 - RNA, 19 nt, Artificial Sequence
  Description of Artificial Sequence: Synthetic oligonucleotide
  Sense strand starting at position 2663 of SEQ ID NO: 1888821
caaggauguugccuuuguu

SEQ ID NO: 2559213 - RNA, 19 nt, Artificial Sequence
  Description of Artificial Sequence: Synthetic oligonucleotide
  Antisense strand to SEQ ID NO: 2559212
aacaaaggcaacauccuug

SEQ ID NO: 2559214 - RNA, 19 nt, Artificial Sequence
  Description of Artificial Sequence: Synthetic oligonucleotide
  Sense strand starting at position 2681 of SEQ ID NO: 1888821
ucucgugaucccucgcuuu

SEQ ID NO: 2559215 - RNA, 19 nt, Artificial Sequence
  Description of Artificial Sequence: Synthetic oligonucleotide
  Antisense strand to SEQ ID NO: 2559214
aaagcgagggaucacgaga

SEQ ID NO: 2559216 - RNA, 19 nt, Artificial Sequence
  Description of Artificial Sequence: Synthetic oligonucleotide
  Sense strand starting at position 2844 of SEQ ID NO: 1888821
aggaguagcucucugcagu

SEQ ID NO: 2559217 - RNA, 19 nt, Artificial Sequence
  Description of Artificial Sequence: Synthetic oligonucleotide
  Antisense strand to SEQ ID NO: 2559216
acugcagagagcuacuccu

SEQ ID NO: 2559218 - RNA, 19 nt, Artificial Sequence
  Description of Artificial Sequence: Synthetic oligonucleotide
  Sense strand starting at position 3050 of SEQ ID NO: 1888821
accaauacuugaggaagga

SEQ ID NO: 2559219 - RNA, 19 nt, Artificial Sequence
  Description of Artificial Sequence: Synthetic oligonucleotide
  Antisense strand to SEQ ID NO: 2559218
uccuuccucaaguauuggu

SEQ ID NO: 2559220 - RNA, 19 nt, Artificial Sequence
  Description of Artificial Sequence: Synthetic oligonucleotide
  Sense strand starting at position 3203 of SEQ ID NO: 1888821
auguauugacucugaguuu

SEQ ID NO: 2559221 - RNA, 19 nt, Artificial Sequence
  Description of Artificial Sequence: Synthetic oligonucleotide
  Antisense strand to SEQ ID NO: 2559220
aaacucagagucaauacau

SEQ ID NO: 2559222 - RNA, 19 nt, Artificial Sequence
  Description of Artificial Sequence: Synthetic oligonucleotide
  Sense strand starting at position 3231 of SEQ ID NO: 1888821
acuuucuuuggcuaaugga

SEQ ID NO: 2559223 - RNA, 19 nt, Artificial Sequence
  Description of Artificial Sequence: Synthetic oligonucleotide
  Antisense strand to SEQ ID NO: 2559222
uccauuagccaaagaaagu

SEQ ID NO: 2559224 - RNA, 19 nt, Artificial Sequence
  Description of Artificial Sequence: Synthetic oligonucleotide
  Sense strand starting at position 3245 of SEQ ID NO: 1888821
auggaauauuaaugagcau

SEQ ID NO: 2559225 - RNA, 19 nt, Artificial Sequence
  Description of Artificial Sequence: Synthetic oligonucleotide
  Antisense strand to SEQ ID NO: 2559224
augcucauuaauauuccau

SEQ ID NO: 2559226 - RNA, 19 nt, Artificial Sequence
  Description of Artificial Sequence: Synthetic oligonucleotide
  Sense strand starting at position 3251 of SEQ ID NO: 1888821
uauuaaugagcaugacgaa

SEQ ID NO: 2559227 - RNA, 19 nt, Artificial Sequence
  Description of Artificial Sequence: Synthetic oligonucleotide
  Antisense strand to SEQ ID NO: 2559226
uucgucaugcucauuaaua

SEQ ID NO: 2559228 - RNA, 19 nt, Artificial Sequence
  Description of Artificial Sequence: Synthetic oligonucleotide
  Sense strand starting at position 3299 of SEQ ID NO: 1888821
ugaggcuuguccucuugga

SEQ ID NO: 2559229 - RNA, 19 nt, Artificial Sequence
  Description of Artificial Sequence: Synthetic oligonucleotide
  Antisense strand to SEQ ID NO: 2559228
uccaagaggacaagccuca

SEQ ID NO: 2559230 - RNA, 19 nt, Artificial Sequence
  Description of Artificial Sequence: Synthetic oligonucleotide
  Sense strand starting at position 3427 of SEQ ID NO: 1888821
gcccuagucaugugagagg

SEQ ID NO: 2559231 - RNA, 19 nt, Artificial Sequence
  Description of Artificial Sequence: Synthetic oligonucleotide
  Antisense strand to SEQ ID NO: 2559230
ccucucacaugacuagggc

SEQ ID NO: 2559232 - RNA, 19 nt, Artificial Sequence
  Description of Artificial Sequence: Synthetic oligonucleotide
  Sense strand starting at position 3679 of SEQ ID NO: 1888821
gugauaauauuugcugcca

SEQ ID NO: 2559233 - RNA, 19 nt, Artificial Sequence
  Description of Artificial Sequence: Synthetic oligonucleotide
  Antisense strand to SEQ ID NO: 2559232
uggcagcaaauauuaucac

SEQ ID NO: 2559234 - RNA, 19 nt, Artificial Sequence
  Description of Artificial Sequence: Synthetic oligonucleotide
  Sense strand starting at position 3744 of SEQ ID NO: 1888821
gccugcuguguuucaggua

SEQ ID NO: 2559235 - RNA, 19 nt, Artificial Sequence
  Description of Artificial Sequence: Synthetic oligonucleotide
  Antisense strand to SEQ ID NO: 2559234
uaccugaaacacagcaggc

SEQ ID NO: 2559236 - RNA, 19 nt, Artificial Sequence
  Description of Artificial Sequence: Synthetic oligonucleotide
  Sense strand starting at position 3765 of SEQ ID NO: 1888821
gugggagaugcggaaugua

SEQ ID NO: 2559237 - RNA, 19 nt, Artificial Sequence
  Description of Artificial Sequence: Synthetic oligonucleotide
  Antisense strand to SEQ ID NO: 2559236
uacauuccgcaucucccac

SEQ ID NO: 2559238 - RNA, 19 nt, Artificial Sequence
  Description of Artificial Sequence: Synthetic oligonucleotide
  Sense strand starting at position 3773 of SEQ ID NO: 1888821
ugcggaauguaugccauuu

SEQ ID NO: 2559239 - RNA, 19 nt, Artificial Sequence
  Description of Artificial Sequence: Synthetic oligonucleotide
  Antisense strand to SEQ ID NO: 2559238
aaauggcauacauuccgca

SEQ ID NO: 2559240 - RNA, 19 nt, Artificial Sequence
  Description of Artificial Sequence: Synthetic oligonucleotide
  Sense strand starting at position 3775 of SEQ ID NO: 1888821
cggaauguaugccauuuaa

SEQ ID NO: 2559241 - RNA, 19 nt, Artificial Sequence
  Description of Artificial Sequence: Synthetic oligonucleotide
  Antisense strand to SEQ ID NO: 2559240
uuaaauggcauacauuccg

SEQ ID NO: 2559242 - RNA, 19 nt, Artificial Sequence
  Description of Artificial Sequence: Synthetic oligonucleotide
  Sense strand starting at position 3795 of SEQ ID NO: 1888821
gcagaacucagagguguua

SEQ ID NO: 2559243 - RNA, 19 nt, Artificial Sequence
  Description of Artificial Sequence: Synthetic oligonucleotide
  Antisense strand to SEQ ID NO: 2559242
uaacaccucugaguucugc

SEQ ID NO: 2559244 - RNA, 19 nt, Artificial Sequence
  Description of Artificial Sequence: Synthetic oligonucleotide
  Sense strand starting at position 3797 of SEQ ID NO: 1888821
agaacucagagguguuaag

SEQ ID NO: 2559245 - RNA, 19 nt, Artificial Sequence
  Description of Artificial Sequence: Synthetic oligonucleotide
  Antisense strand to SEQ ID NO: 2559244
cuuaacaccucugaguucu

SEQ ID NO: 2559246 - RNA, 19 nt, Artificial Sequence
  Description of Artificial Sequence: Synthetic oligonucleotide
  Sense strand starting at position 3925 of SEQ ID NO: 1888821
uggaucaccuuccaggaaa

SEQ ID NO: 2559247 - RNA, 19 nt, Artificial Sequence
  Description of Artificial Sequence: Synthetic oligonucleotide
  Antisense strand to SEQ ID NO: 2559246
uuuccuggaaggugaucca

SEQ ID NO: 2559248 - RNA, 19 nt, Artificial Sequence
  Description of Artificial Sequence: Synthetic oligonucleotide
  Sense strand starting at position 611 of SEQ ID NO: 1888822
ggaggccuucagcaaaguu

SEQ ID NO: 2559249 - RNA, 19 nt, Artificial Sequence
  Description of Artificial Sequence: Synthetic oligonucleotide
  Antisense strand to SEQ ID NO: 2559248
aacuuugcugaaggccucc

SEQ ID NO: 2559250 - RNA, 19 nt, Artificial Sequence
  Description of Artificial Sequence: Synthetic oligonucleotide
  Sense strand starting at position 668 of SEQ ID NO: 1888822
auguaauccuaggccuaca

SEQ ID NO: 2559251 - RNA, 19 nt, Artificial Sequence
  Description of Artificial Sequence: Synthetic oligonucleotide
  Antisense strand to SEQ ID NO: 2559250
uguaggccuaggauuacau

SEQ ID NO: 2559252 - RNA, 19 nt, Artificial Sequence
  Description of Artificial Sequence: Synthetic oligonucleotide
  Sense strand starting at position 746 of SEQ ID NO: 1888822
ccagauugaguauagcuua

SEQ ID NO: 2559253 - RNA, 19 nt, Artificial Sequence
  Description of Artificial Sequence: Synthetic oligonucleotide
  Antisense strand to SEQ ID NO: 2559252
uaagcuauacucaaucugg

SEQ ID NO: 2559254 - RNA, 19 nt, Artificial Sequence
  Description of Artificial Sequence: Synthetic oligonucleotide
  Sense strand starting at position 749 of SEQ ID NO: 1888822
gauugaguauagcuuaaga

SEQ ID NO: 2559255 - RNA, 19 nt, Artificial Sequence
  Description of Artificial Sequence: Synthetic oligonucleotide
  Antisense strand to SEQ ID NO: 2559254
ucuuaagcuauacucaauc

SEQ ID NO: 2559256 - RNA, 19 nt, Artificial Sequence
  Description of Artificial Sequence: Synthetic oligonucleotide
  Sense strand starting at position 838 of SEQ ID NO: 1888822
gggauccuggccuagucaa

SEQ ID NO: 2559257 - RNA, 19 nt, Artificial Sequence
  Description of Artificial Sequence: Synthetic oligonucleotide
  Antisense strand to SEQ ID NO: 2559256
uugacuaggccaggauccc

SEQ ID NO: 2559258 - RNA, 19 nt, Artificial Sequence
  Description of Artificial Sequence: Synthetic oligonucleotide
  Sense strand starting at position 895 of SEQ ID NO: 1888822
aaaguuaaugccuggccua

SEQ ID NO: 2559259 - RNA, 19 nt, Artificial Sequence
  Description of Artificial Sequence: Synthetic oligonucleotide
  Antisense strand to SEQ ID NO: 2559258
uaggccaggcauuaacuuu

SEQ ID NO: 2559260 - RNA, 19 nt, Artificial Sequence
  Description of Artificial Sequence: Synthetic oligonucleotide
  Sense strand starting at position 945 of SEQ ID NO: 1888822
agaguuggaaaguguauua

SEQ ID NO: 2559261 - RNA, 19 nt, Artificial Sequence
  Description of Artificial Sequence: Synthetic oligonucleotide
  Antisense strand to SEQ ID NO: 2559260
uaauacacuuuccaacucu

SEQ ID NO: 2559262 - RNA, 19 nt, Artificial Sequence
  Description of Artificial Sequence: Synthetic oligonucleotide
  Sense strand starting at position 1245 of SEQ ID NO: 1888822
uuggguauuaugggaacua

SEQ ID NO: 2559263 - RNA, 19 nt, Artificial Sequence
  Description of Artificial Sequence: Synthetic oligonucleotide
  Antisense strand to SEQ ID NO: 2559262
uaguucccauaauacccaa

SEQ ID NO: 2559264 - RNA, 19 nt, Artificial Sequence
  Description of Artificial Sequence: Synthetic oligonucleotide
  Sense strand starting at position 1322 of SEQ ID NO: 1888822
gaaagaacugcuuguucuu

SEQ ID NO: 2559265 - RNA, 19 nt, Artificial Sequence
  Description of Artificial Sequence: Synthetic oligonucleotide
  Antisense strand to SEQ ID NO: 2559264
aagaacaagcaguucuuuc

SEQ ID NO: 2559266 - RNA, 19 nt, Artificial Sequence
  Description of Artificial Sequence: Synthetic oligonucleotide
  Sense strand starting at position 1342 of SEQ ID NO: 1888822
uguaaaugguuucuuccaa

SEQ ID NO: 2559267 - RNA, 19 nt, Artificial Sequence
  Description of Artificial Sequence: Synthetic oligonucleotide
  Antisense strand to SEQ ID NO: 2559266
uuggaagaaaccauuuaca

SEQ ID NO: 2559268 - RNA, 19 nt, Artificial Sequence
  Description of Artificial Sequence: Synthetic oligonucleotide
  Sense strand starting at position 1343 of SEQ ID NO: 1888822
guaaaugguuucuuccaac

SEQ ID NO: 2559269 - RNA, 19 nt, Artificial Sequence
  Description of Artificial Sequence: Synthetic oligonucleotide
  Antisense strand to SEQ ID NO: 2559268
guuggaagaaaccauuuac

SEQ ID NO: 2559270 - RNA, 19 nt, Artificial Sequence
  Description of Artificial Sequence: Synthetic oligonucleotide
  Sense strand starting at position 1703 of SEQ ID NO: 1888822
ggcacaguuuacccucaga

SEQ ID NO: 2559271 - RNA, 19 nt, Artificial Sequence
  Description of Artificial Sequence: Synthetic oligonucleotide
  Antisense strand to SEQ ID NO: 2559270
ucugaggguaaacugugcc

SEQ ID NO: 2559272 - RNA, 19 nt, Artificial Sequence
  Description of Artificial Sequence: Synthetic oligonucleotide
  Sense strand starting at position 2273 of SEQ ID NO: 1888822
agacaaguuuccuuugaag

SEQ ID NO: 2559273 - RNA, 19 nt, Artificial Sequence
  Description of Artificial Sequence: Synthetic oligonucleotide
  Antisense strand to SEQ ID NO: 2559272
cuucaaaggaaacuugucu

SEQ ID NO: 2559274 - RNA, 19 nt, Artificial Sequence
  Description of Artificial Sequence: Synthetic oligonucleotide
  Sense strand starting at position 2275 of SEQ ID NO: 1888822
acaaguuuccuuugaagau

SEQ ID NO: 2559275 - RNA, 19 nt, Artificial Sequence
  Description of Artificial Sequence: Synthetic oligonucleotide
  Antisense strand to SEQ ID NO: 2559274
aucuucaaaggaaacuugu

SEQ ID NO: 2559276 - RNA, 19 nt, Artificial Sequence
  Description of Artificial Sequence: Synthetic oligonucleotide
  Sense strand starting at position 2331 of SEQ ID NO: 1888822
ccgugucuuacaguggcua

SEQ ID NO: 2559277 - RNA, 19 nt, Artificial Sequence
  Description of Artificial Sequence: Synthetic oligonucleotide
  Antisense strand to SEQ ID NO: 2559276
uagccacuguaagacacgg

SEQ ID NO: 2559278 - RNA, 19 nt, Artificial Sequence
  Description of Artificial Sequence: Synthetic oligonucleotide
  Sense strand starting at position 2386 of SEQ ID NO: 1888822
uuuaauucugguuauguca

SEQ ID NO: 2559279 - RNA, 19 nt, Artificial Sequence
  Description of Artificial Sequence: Synthetic oligonucleotide
  Antisense strand to SEQ ID NO: 2559278
ugacauaaccagaauuaaa

SEQ ID NO: 2559280 - RNA, 19 nt, Artificial Sequence
  Description of Artificial Sequence: Synthetic oligonucleotide
  Sense strand starting at position 2393 of SEQ ID NO: 1888822
cugguuaugucacuuucua

SEQ ID NO: 2559281 - RNA, 19 nt, Artificial Sequence
  Description of Artificial Sequence: Synthetic oligonucleotide
  Antisense strand to SEQ ID NO: 2559280
uagaaagugacauaaccag

SEQ ID NO: 2559282 - RNA, 19 nt, Artificial Sequence
  Description of Artificial Sequence: Synthetic oligonucleotide
  Sense strand starting at position 2401 of SEQ ID NO: 1888822
gucacuuucuaauuaugug

SEQ ID NO: 2559283 - RNA, 19 nt, Artificial Sequence
  Description of Artificial Sequence: Synthetic oligonucleotide
  Antisense strand to SEQ ID NO: 2559282
cacauaauuagaaagugac

SEQ ID NO: 2559284 - RNA, 19 nt, Artificial Sequence
  Description of Artificial Sequence: Synthetic oligonucleotide
  Sense strand starting at position 2500 of SEQ ID NO: 1888822
uaagauguuuggccuuuga

SEQ ID NO: 2559285 - RNA, 19 nt, Artificial Sequence
  Description of Artificial Sequence: Synthetic oligonucleotide
  Antisense strand to SEQ ID NO: 2559284
ucaaaggccaaacaucuua

SEQ ID NO: 2559286 - RNA, 19 nt, Artificial Sequence
  Description of Artificial Sequence: Synthetic oligonucleotide
  Sense strand starting at position 2504 of SEQ ID NO: 1888822
auguuuggccuuugaaagu

SEQ ID NO: 2559287 - RNA, 19 nt, Artificial Sequence
  Description of Artificial Sequence: Synthetic oligonucleotide
  Antisense strand to SEQ ID NO: 2559286
acuuucaaaggccaaacau

SEQ ID NO: 2559288 - RNA, 19 nt, Artificial Sequence
  Description of Artificial Sequence: Synthetic oligonucleotide
  Sense strand starting at position 2518 of SEQ ID NO: 1888822
aaaguuucuuaggccauga

SEQ ID NO: 2559289 - RNA, 19 nt, Artificial Sequence
  Description of Artificial Sequence: Synthetic oligonucleotide
  Antisense strand to SEQ ID NO: 2559288
ucauggccuaagaaacuuu

SEQ ID NO: 2559290 - RNA, 19 nt, Artificial Sequence
  Description of Artificial Sequence: Synthetic oligonucleotide
  Sense strand starting at position 2520 of SEQ ID NO: 1888822
aguuucuuaggccaugaga

SEQ ID NO: 2559291 - RNA, 19 nt, Artificial Sequence
  Description of Artificial Sequence: Synthetic oligonucleotide
  Antisense strand to SEQ ID NO: 2559290
ucucauggccuaagaaacu

SEQ ID NO: 2559292 - RNA, 19 nt, Artificial Sequence
  Description of Artificial Sequence: Synthetic oligonucleotide
  Sense strand starting at position 2799 of SEQ ID NO: 1888822
cuaugacaggcauguuaac

SEQ ID NO: 2559293 - RNA, 19 nt, Artificial Sequence
  Description of Artificial Sequence: Synthetic oligonucleotide
  Antisense strand to SEQ ID NO: 2559292
guuaacaugccugucauag

SEQ ID NO: 2559294 - RNA, 19 nt, Artificial Sequence
  Description of Artificial Sequence: Synthetic oligonucleotide
  Sense strand starting at position 2865 of SEQ ID NO: 1888822
accauauaagaauguugua

SEQ ID NO: 2559295 - RNA, 19 nt, Artificial Sequence
  Description of Artificial Sequence: Synthetic oligonucleotide
  Antisense strand to SEQ ID NO: 2559294
uacaacauucuuauauggu

SEQ ID NO: 2559296 - RNA, 19 nt, Artificial Sequence
  Description of Artificial Sequence: Synthetic oligonucleotide
  Sense strand starting at position 2892 of SEQ ID NO: 1888822
auuagaugaugcuuggaaa

SEQ ID NO: 2559297 - RNA, 19 nt, Artificial Sequence
  Description of Artificial Sequence: Synthetic oligonucleotide
  Antisense strand to SEQ ID NO: 2559296
uuuccaagcaucaucuaau

SEQ ID NO: 2559298 - RNA, 19 nt, Artificial Sequence
  Description of Artificial Sequence: Synthetic oligonucleotide
  Sense strand starting at position 2917 of SEQ ID NO: 1888822
cacauaggugcucagugua

SEQ ID NO: 2559299 - RNA, 19 nt, Artificial Sequence
  Description of Artificial Sequence: Synthetic oligonucleotide
  Antisense strand to SEQ ID NO: 2559298
uacacugagcaccuaugug

SEQ ID NO: 2559300 - RNA, 19 nt, Artificial Sequence
  Description of Artificial Sequence: Synthetic oligonucleotide
  Sense strand starting at position 2932 of SEQ ID NO: 1888822
uguauuagcacuggagucu

SEQ ID NO: 2559301 - RNA, 19 nt, Artificial Sequence
  Description of Artificial Sequence: Synthetic oligonucleotide
  Antisense strand to SEQ ID NO: 2559300
agacuccagugcuaauaca

SEQ ID NO: 2559302 - RNA, 19 nt, Artificial Sequence
  Description of Artificial Sequence: Synthetic oligonucleotide
  Sense strand starting at position 2944 of SEQ ID NO: 1888822
ggagucucuuccuuguacu

SEQ ID NO: 2559303 - RNA, 19 nt, Artificial Sequence
  Description of Artificial Sequence: Synthetic oligonucleotide
  Antisense strand to SEQ ID NO: 2559302
aguacaaggaagagacucc

SEQ ID NO: 2559304 - RNA, 19 nt, Artificial Sequence
  Description of Artificial Sequence: Synthetic oligonucleotide
  Sense strand starting at position 2952 of SEQ ID NO: 1888822
uuccuuguacuuugaaaug

SEQ ID NO: 2559305 - RNA, 19 nt, Artificial Sequence
  Description of Artificial Sequence: Synthetic oligonucleotide
  Antisense strand to SEQ ID NO: 2559304
cauuucaaaguacaaggaa

SEQ ID NO: 2559306 - RNA, 19 nt, Artificial Sequence
  Description of Artificial Sequence: Synthetic oligonucleotide
  Sense strand starting at position 2962 of SEQ ID NO: 1888822
uuugaaauguaccugcuau

SEQ ID NO: 2559307 - RNA, 19 nt, Artificial Sequence
  Description of Artificial Sequence: Synthetic oligonucleotide
  Antisense strand to SEQ ID NO: 2559306
auagcagguacauuucaaa

SEQ ID NO: 2559308 - RNA, 19 nt, Artificial Sequence
  Description of Artificial Sequence: Synthetic oligonucleotide
  Sense strand starting at position 3062 of SEQ ID NO: 1888822
aagugauuagggcauguga

SEQ ID NO: 2559309 - RNA, 19 nt, Artificial Sequence
  Description of Artificial Sequence: Synthetic oligonucleotide
  Antisense strand to SEQ ID NO: 2559308
ucacaugcccuaaucacuu

SEQ ID NO: 2559310 - RNA, 19 nt, Artificial Sequence
  Description of Artificial Sequence: Synthetic oligonucleotide
  Sense strand starting at position 3077 of SEQ ID NO: 1888822
gugagcucugcccucguaa

SEQ ID NO: 2559311 - RNA, 19 nt, Artificial Sequence
  Description of Artificial Sequence: Synthetic oligonucleotide
  Antisense strand to SEQ ID NO: 2559310
uuacgagggcagagcucac

SEQ ID NO: 2559312 - RNA, 19 nt, Artificial Sequence
  Description of Artificial Sequence: Synthetic oligonucleotide
  Sense strand starting at position 3080 of SEQ ID NO: 1888822
agcucugcccucguaagua

SEQ ID NO: 2559313 - RNA, 19 nt, Artificial Sequence
  Description of Artificial Sequence: Synthetic oligonucleotide
  Antisense strand to SEQ ID NO: 2559312
uacuuacgagggcagagcu

SEQ ID NO: 2559314 - RNA, 19 nt, Artificial Sequence
  Description of Artificial Sequence: Synthetic oligonucleotide
  Sense strand starting at position 3197 of SEQ ID NO: 1888822
ggcacauuguuauuggacu

SEQ ID NO: 2559315 - RNA, 19 nt, Artificial Sequence
  Description of Artificial Sequence: Synthetic oligonucleotide
  Antisense strand to SEQ ID NO: 2559314
aguccaauaacaaugugcc

SEQ ID NO: 2559316 - RNA, 19 nt, Artificial Sequence
  Description of Artificial Sequence: Synthetic oligonucleotide
  Sense strand starting at position 3326 of SEQ ID NO: 1888822
uguacauaucaugaugcaa

SEQ ID NO: 2559317 - RNA, 19 nt, Artificial Sequence
  Description of Artificial Sequence: Synthetic oligonucleotide
  Antisense strand to SEQ ID NO: 2559316
uugcaucaugauauguaca

SEQ ID NO: 2559318 - RNA, 19 nt, Artificial Sequence
  Description of Artificial Sequence: Synthetic oligonucleotide
  Sense strand starting at position 3337 of SEQ ID NO: 1888822
ugaugcaauaugugagaaa

SEQ ID NO: 2559319 - RNA, 19 nt, Artificial Sequence
  Description of Artificial Sequence: Synthetic oligonucleotide
  Antisense strand to SEQ ID NO: 2559318
uuucucacauauugcauca

SEQ ID NO: 2559320 - RNA, 19 nt, Artificial Sequence
  Description of Artificial Sequence: Synthetic oligonucleotide
  Sense strand starting at position 3397 of SEQ ID NO: 1888822
gagcuaagaucaucugugu

SEQ ID NO: 2559321 - RNA, 19 nt, Artificial Sequence
  Description of Artificial Sequence: Synthetic oligonucleotide
  Antisense strand to SEQ ID NO: 2559320
acacagaugaucuuagcuc

SEQ ID NO: 2559322 - RNA, 19 nt, Artificial Sequence
  Description of Artificial Sequence: Synthetic oligonucleotide
  Sense strand starting at position 3400 of SEQ ID NO: 1888822
cuaagaucaucugugucaa

SEQ ID NO: 2559323 - RNA, 19 nt, Artificial Sequence
  Description of Artificial Sequence: Synthetic oligonucleotide
  Antisense strand to SEQ ID NO: 2559322
uugacacagaugaucuuag

SEQ ID NO: 2559324 - RNA, 19 nt, Artificial Sequence
  Description of Artificial Sequence: Synthetic oligonucleotide
  Sense strand starting at position 3536 of SEQ ID NO: 1888822
acagccugcucuccugaaa

SEQ ID NO: 2559325 - RNA, 19 nt, Artificial Sequence
  Description of Artificial Sequence: Synthetic oligonucleotide
  Antisense strand to SEQ ID NO: 2559324
uuucaggagagcaggcugu

SEQ ID NO: 2559326 - RNA, 19 nt, Artificial Sequence
  Description of Artificial Sequence: Synthetic oligonucleotide
  Sense strand starting at position 3599 of SEQ ID NO: 1888822
agaccuugugucuaccaau

SEQ ID NO: 2559327 - RNA, 19 nt, Artificial Sequence
  Description of Artificial Sequence: Synthetic oligonucleotide
  Antisense strand to SEQ ID NO: 2559326
auugguagacacaaggucu

SEQ ID NO: 2559328 - RNA, 19 nt, Artificial Sequence
  Description of Artificial Sequence: Synthetic oligonucleotide
  Sense strand starting at position 159 of SEQ ID NO: 1888823
aguaaauaccuuugugaac

SEQ ID NO: 2559329 - RNA, 19 nt, Artificial Sequence
  Description of Artificial Sequence: Synthetic oligonucleotide
  Antisense strand to SEQ ID NO: 2559328
guucacaaagguauuuacu

SEQ ID NO: 2559330 - RNA, 19 nt, Artificial Sequence
  Description of Artificial Sequence: Synthetic oligonucleotide
  Sense strand starting at position 160 of SEQ ID NO: 1888823
guaaauaccuuugugaaca

SEQ ID NO: 2559331 - RNA, 19 nt, Artificial Sequence
  Description of Artificial Sequence: Synthetic oligonucleotide
  Antisense strand to SEQ ID NO: 2559330
uguucacaaagguauuuac

SEQ ID NO: 2559332 - RNA, 19 nt, Artificial Sequence
  Description of Artificial Sequence: Synthetic oligonucleotide
  Sense strand starting at position 255 of SEQ ID NO: 1888823
ugcugaguugggcaaacaa

SEQ ID NO: 2559333 - RNA, 19 nt, Artificial Sequence
  Description of Artificial Sequence: Synthetic oligonucleotide
  Antisense strand to SEQ ID NO: 2559332
uuguuugcccaacucagca

SEQ ID NO: 2559334 - RNA, 19 nt, Artificial Sequence
  Description of Artificial Sequence: Synthetic oligonucleotide
  Sense strand starting at position 311 of SEQ ID NO: 1888823
uggacuagagcaugauaca

SEQ ID NO: 2559335 - RNA, 19 nt, Artificial Sequence
  Description of Artificial Sequence: Synthetic oligonucleotide
  Antisense strand to SEQ ID NO: 2559334
uguaucaugcucuagucca

SEQ ID NO: 2559336 - RNA, 19 nt, Artificial Sequence
  Description of Artificial Sequence: Synthetic oligonucleotide
  Sense strand starting at position 396 of SEQ ID NO: 1888823
ucacccucagaauguuaga

SEQ ID NO: 2559337 - RNA, 19 nt, Artificial Sequence
  Description of Artificial Sequence: Synthetic oligonucleotide
  Antisense strand to SEQ ID NO: 2559336
ucuaacauucugaggguga

SEQ ID NO: 2559338 - RNA, 19 nt, Artificial Sequence
  Description of Artificial Sequence: Synthetic oligonucleotide
  Sense strand starting at position 458 of SEQ ID NO: 1888823
auaaaugguuuagcaauga

SEQ ID NO: 2559339 - RNA, 19 nt, Artificial Sequence
  Description of Artificial Sequence: Synthetic oligonucleotide
  Antisense strand to SEQ ID NO: 2559338
ucauugcuaaaccauuuau

SEQ ID NO: 2559340 - RNA, 19 nt, Artificial Sequence
  Description of Artificial Sequence: Synthetic oligonucleotide
  Sense strand starting at position 463 of SEQ ID NO: 1888823
ugguuuagcaaugaugcua

SEQ ID NO: 2559341 - RNA, 19 nt, Artificial Sequence
  Description of Artificial Sequence: Synthetic oligonucleotide
  Antisense strand to SEQ ID NO: 2559340
uagcaucauugcuaaacca

SEQ ID NO: 2559342 - RNA, 19 nt, Artificial Sequence
  Description of Artificial Sequence: Synthetic oligonucleotide
  Sense strand starting at position 767 of SEQ ID NO: 1888823
ugcaacuaacccuagaguu

SEQ ID NO: 2559343 - RNA, 19 nt, Artificial Sequence
  Description of Artificial Sequence: Synthetic oligonucleotide
  Antisense strand to SEQ ID NO: 2559342
aacucuaggguuaguugca

SEQ ID NO: 2559344 - RNA, 19 nt, Artificial Sequence
  Description of Artificial Sequence: Synthetic oligonucleotide
  Sense strand starting at position 777 of SEQ ID NO: 1888823
ccuagaguucucuaagcca

SEQ ID NO: 2559345 - RNA, 19 nt, Artificial Sequence
  Description of Artificial Sequence: Synthetic oligonucleotide
  Antisense strand to SEQ ID NO: 2559344
uggcuuagagaacucuagg

SEQ ID NO: 2559346 - RNA, 19 nt, Artificial Sequence
  Description of Artificial Sequence: Synthetic oligonucleotide
  Sense strand starting at position 780 of SEQ ID NO: 1888823
agaguucucuaagccauag

SEQ ID NO: 2559347 - RNA, 19 nt, Artificial Sequence
  Description of Artificial Sequence: Synthetic oligonucleotide
  Antisense strand to SEQ ID NO: 2559346
cuauggcuuagagaacucu

SEQ ID NO: 2559348 - RNA, 19 nt, Artificial Sequence
  Description of Artificial Sequence: Synthetic oligonucleotide
  Sense strand starting at position 849 of SEQ ID NO: 1888823
uuggcaaccgaauaugauu

SEQ ID NO: 2559349 - RNA, 19 nt, Artificial Sequence
  Description of Artificial Sequence: Synthetic oligonucleotide
  Antisense strand to SEQ ID NO: 2559348
aaucauauucgguugccaa

SEQ ID NO: 2559350 - RNA, 19 nt, Artificial Sequence
  Description of Artificial Sequence: Synthetic oligonucleotide
  Sense strand starting at position 887 of SEQ ID NO: 1888823
ggagauuacugagcucaga

SEQ ID NO: 2559351 - RNA, 19 nt, Artificial Sequence
  Description of Artificial Sequence: Synthetic oligonucleotide
  Antisense strand to SEQ ID NO: 2559350
ucugagcucaguaaucucc

SEQ ID NO: 2559352 - RNA, 19 nt, Artificial Sequence
  Description of Artificial Sequence: Synthetic oligonucleotide
  Sense strand starting at position 1167 of SEQ ID NO: 1888823
acgacaaagucucuaccau

SEQ ID NO: 2559353 - RNA, 19 nt, Artificial Sequence
  Description of Artificial Sequence: Synthetic oligonucleotide
  Antisense strand to SEQ ID NO: 2559352
augguagagacuuugucgu

SEQ ID NO: 2559354 - RNA, 19 nt, Artificial Sequence
  Description of Artificial Sequence: Synthetic oligonucleotide
  Sense strand starting at position 1168 of SEQ ID NO: 1888823
cgacaaagucucuaccauc

SEQ ID NO: 2559355 - RNA, 19 nt, Artificial Sequence
  Description of Artificial Sequence: Synthetic oligonucleotide
  Antisense strand to SEQ ID NO: 2559354
gaugguagagacuuugucg

SEQ ID NO: 2559356 - RNA, 19 nt, Artificial Sequence
  Description of Artificial Sequence: Synthetic oligonucleotide
  Sense strand starting at position 1390 of SEQ ID NO: 1888823
guaacaucuccagaauguu

SEQ ID NO: 2559357 - RNA, 19 nt, Artificial Sequence
  Description of Artificial Sequence: Synthetic oligonucleotide
  Antisense strand to SEQ ID NO: 2559356
aacauucuggagauguuac

SEQ ID NO: 2559358 - RNA, 19 nt, Artificial Sequence
  Description of Artificial Sequence: Synthetic oligonucleotide
  Sense strand starting at position 1652 of SEQ ID NO: 1888823
cugguucugacuugagaag

SEQ ID NO: 2559359 - RNA, 19 nt, Artificial Sequence
  Description of Artificial Sequence: Synthetic oligonucleotide
  Antisense strand to SEQ ID NO: 2559358
cuucucaagucagaaccag

SEQ ID NO: 2559360 - RNA, 19 nt, Artificial Sequence
  Description of Artificial Sequence: Synthetic oligonucleotide
  Sense strand starting at position 1688 of SEQ ID NO: 1888823
aacccucagcgauaguuaa

SEQ ID NO: 2559361 - RNA, 19 nt, Artificial Sequence
  Description of Artificial Sequence: Synthetic oligonucleotide
  Antisense strand to SEQ ID NO: 2559360
uuaacuaucgcugaggguu

SEQ ID NO: 2559362 - RNA, 19 nt, Artificial Sequence
  Description of Artificial Sequence: Synthetic oligonucleotide
  Sense strand starting at position 1824 of SEQ ID NO: 1888823
gggccuucaggugauuaaa

SEQ ID NO: 2559363 - RNA, 19 nt, Artificial Sequence
  Description of Artificial Sequence: Synthetic oligonucleotide
  Antisense strand to SEQ ID NO: 2559362
uuuaaucaccugaaggccc

SEQ ID NO: 2559364 - RNA, 19 nt, Artificial Sequence
  Description of Artificial Sequence: Synthetic oligonucleotide
  Sense strand starting at position 1835 of SEQ ID NO: 1888823
ugauuaaagcucugaagga

SEQ ID NO: 2559365 - RNA, 19 nt, Artificial Sequence
  Description of Artificial Sequence: Synthetic oligonucleotide
  Antisense strand to SEQ ID NO: 2559364
uccuucagagcuuuaauca

SEQ ID NO: 2559366 - RNA, 19 nt, Artificial Sequence
  Description of Artificial Sequence: Synthetic oligonucleotide
  Sense strand starting at position 1839 of SEQ ID NO: 1888823
uaaagcucugaaggaaagu

SEQ ID NO: 2559367 - RNA, 19 nt, Artificial Sequence
  Description of Artificial Sequence: Synthetic oligonucleotide
  Antisense strand to SEQ ID NO: 2559366
acuuuccuucagagcuuua

SEQ ID NO: 2559368 - RNA, 19 nt, Artificial Sequence
  Description of Artificial Sequence: Synthetic oligonucleotide
  Sense strand starting at position 2069 of SEQ ID NO: 1888823
gggaggaagugcuugggaa

SEQ ID NO: 2559369 - RNA, 19 nt, Artificial Sequence
  Description of Artificial Sequence: Synthetic oligonucleotide
  Antisense strand to SEQ ID NO: 2559368
uucccaagcacuuccuccc

SEQ ID NO: 2559370 - RNA, 19 nt, Artificial Sequence
  Description of Artificial Sequence: Synthetic oligonucleotide
  Sense strand starting at position 2070 of SEQ ID NO: 1888823
ggaggaagugcuugggaaa

SEQ ID NO: 2559371 - RNA, 19 nt, Artificial Sequence
  Description of Artificial Sequence: Synthetic oligonucleotide
  Antisense strand to SEQ ID NO: 2559370
uuucccaagcacuuccucc

SEQ ID NO: 2559372 - RNA, 19 nt, Artificial Sequence
  Description of Artificial Sequence: Synthetic oligonucleotide
  Sense strand starting at position 2071 of SEQ ID NO: 1888823
gaggaagugcuugggaaag

SEQ ID NO: 2559373 - RNA, 19 nt, Artificial Sequence
  Description of Artificial Sequence: Synthetic oligonucleotide
  Antisense strand to SEQ ID NO: 2559372
cuuucccaagcacuuccuc

SEQ ID NO: 2559374 - RNA, 19 nt, Artificial Sequence
  Description of Artificial Sequence: Synthetic oligonucleotide
  Sense strand starting at position 2136 of SEQ ID NO: 1888823
uguguauguacagauguga

SEQ ID NO: 2559375 - RNA, 19 nt, Artificial Sequence
  Description of Artificial Sequence: Synthetic oligonucleotide
  Antisense strand to SEQ ID NO: 2559374
ucacaucuguacauacaca

SEQ ID NO: 2559376 - RNA, 19 nt, Artificial Sequence
  Description of Artificial Sequence: Synthetic oligonucleotide
  Sense strand starting at position 2153 of SEQ ID NO: 1888823
gauccuguacgacauacaa

SEQ ID NO: 2559377 - RNA, 19 nt, Artificial Sequence
  Description of Artificial Sequence: Synthetic oligonucleotide
  Antisense strand to SEQ ID NO: 2559376
uuguaugucguacaggauc

SEQ ID NO: 2559378 - RNA, 19 nt, Artificial Sequence
  Description of Artificial Sequence: Synthetic oligonucleotide
  Sense strand starting at position 2179 of SEQ ID NO: 1888823
ugagaacugcacugaguaa

SEQ ID NO: 2559379 - RNA, 19 nt, Artificial Sequence
  Description of Artificial Sequence: Synthetic oligonucleotide
  Antisense strand to SEQ ID NO: 2559378
uuacucagugcaguucuca

SEQ ID NO: 2559380 - RNA, 19 nt, Artificial Sequence
  Description of Artificial Sequence: Synthetic oligonucleotide
  Sense strand starting at position 2227 of SEQ ID NO: 1888823
gcugaucaugcuuaacaga

SEQ ID NO: 2559381 - RNA, 19 nt, Artificial Sequence
  Description of Artificial Sequence: Synthetic oligonucleotide
  Antisense strand to SEQ ID NO: 2559380
ucuguuaagcaugaucagc

SEQ ID NO: 2559382 - RNA, 19 nt, Artificial Sequence
  Description of Artificial Sequence: Synthetic oligonucleotide
  Sense strand starting at position 2257 of SEQ ID NO: 1888823
uugcaaaggcuuugaaaug

SEQ ID NO: 2559383 - RNA, 19 nt, Artificial Sequence
  Description of Artificial Sequence: Synthetic oligonucleotide
  Antisense strand to SEQ ID NO: 2559382
cauuucaaagccuuugcaa

SEQ ID NO: 2559384 - RNA, 19 nt, Artificial Sequence
  Description of Artificial Sequence: Synthetic oligonucleotide
  Sense strand starting at position 2703 of SEQ ID NO: 1888823
gcauaacacuucucaagug

SEQ ID NO: 2559385 - RNA, 19 nt, Artificial Sequence
  Description of Artificial Sequence: Synthetic oligonucleotide
  Antisense strand to SEQ ID NO: 2559384
cacuugagaaguguuaugc

SEQ ID NO: 2559386 - RNA, 19 nt, Artificial Sequence
  Description of Artificial Sequence: Synthetic oligonucleotide
  Sense strand starting at position 2815 of SEQ ID NO: 1888823
gagagauuguugccaucag

SEQ ID NO: 2559387 - RNA, 19 nt, Artificial Sequence
  Description of Artificial Sequence: Synthetic oligonucleotide
  Antisense strand to SEQ ID NO: 2559386
cugauggcaacaaucucuc

SEQ ID NO: 2559388 - RNA, 19 nt, Artificial Sequence
  Description of Artificial Sequence: Synthetic oligonucleotide
  Sense strand starting at position 2819 of SEQ ID NO: 1888823
gauuguugccaucagaccu

SEQ ID NO: 2559389 - RNA, 19 nt, Artificial Sequence
  Description of Artificial Sequence: Synthetic oligonucleotide
  Antisense strand to SEQ ID NO: 2559388
aggucugauggcaacaauc

SEQ ID NO: 2559390 - RNA, 19 nt, Artificial Sequence
  Description of Artificial Sequence: Synthetic oligonucleotide
  Sense strand starting at position 2858 of SEQ ID NO: 1888823
agaagcuuccugcaugaga

SEQ ID NO: 2559391 - RNA, 19 nt, Artificial Sequence
  Description of Artificial Sequence: Synthetic oligonucleotide
  Antisense strand to SEQ ID NO: 2559390
ucucaugcaggaagcuucu

SEQ ID NO: 2559392 - RNA, 19 nt, Artificial Sequence
  Description of Artificial Sequence: Synthetic oligonucleotide
  Sense strand starting at position 2908 of SEQ ID NO: 1888823
gcaugaccugcucaccaau

SEQ ID NO: 2559393 - RNA, 19 nt, Artificial Sequence
  Description of Artificial Sequence: Synthetic oligonucleotide
  Antisense strand to SEQ ID NO: 2559392
auuggugagcaggucaugc

SEQ ID NO: 2559394 - RNA, 19 nt, Artificial Sequence
  Description of Artificial Sequence: Synthetic oligonucleotide
  Sense strand starting at position 2969 of SEQ ID NO: 1888823
agauaugucuuagaauuuc

SEQ ID NO: 2559395 - RNA, 19 nt, Artificial Sequence
  Description of Artificial Sequence: Synthetic oligonucleotide
  Antisense strand to SEQ ID NO: 2559394
gaaauucuaagacauaucu

SEQ ID NO: 2559396 - RNA, 19 nt, Artificial Sequence
  Description of Artificial Sequence: Synthetic oligonucleotide
  Sense strand starting at position 3078 of SEQ ID NO: 1888823
uugcuuaacucagugaaca

SEQ ID NO: 2559397 - RNA, 19 nt, Artificial Sequence
  Description of Artificial Sequence: Synthetic oligonucleotide
  Antisense strand to SEQ ID NO: 2559396
uguucacugaguuaagcaa

SEQ ID NO: 2559398 - RNA, 19 nt, Artificial Sequence
  Description of Artificial Sequence: Synthetic oligonucleotide
  Sense strand starting at position 3079 of SEQ ID NO: 1888823
ugcuuaacucagugaacag

SEQ ID NO: 2559399 - RNA, 19 nt, Artificial Sequence
  Description of Artificial Sequence: Synthetic oligonucleotide
  Antisense strand to SEQ ID NO: 2559398
cuguucacugaguuaagca

SEQ ID NO: 2559400 - RNA, 19 nt, Artificial Sequence
  Description of Artificial Sequence: Synthetic oligonucleotide
  Sense strand starting at position 3239 of SEQ ID NO: 1888823
ccaacuuuaucuguggaga

SEQ ID NO: 2559401 - RNA, 19 nt, Artificial Sequence
  Description of Artificial Sequence: Synthetic oligonucleotide
  Antisense strand to SEQ ID NO: 2559400
ucuccacagauaaaguugg

SEQ ID NO: 2559402 - RNA, 19 nt, Artificial Sequence
  Description of Artificial Sequence: Synthetic oligonucleotide
  Sense strand starting at position 3240 of SEQ ID NO: 1888823
caacuuuaucuguggagac

SEQ ID NO: 2559403 - RNA, 19 nt, Artificial Sequence
  Description of Artificial Sequence: Synthetic oligonucleotide
  Antisense strand to SEQ ID NO: 2559402
gucuccacagauaaaguug

SEQ ID NO: 2559404 - RNA, 19 nt, Artificial Sequence
  Description of Artificial Sequence: Synthetic oligonucleotide
  Sense strand starting at position 3467 of SEQ ID NO: 1888823
cuggauaucccacaggcau

SEQ ID NO: 2559405 - RNA, 19 nt, Artificial Sequence
  Description of Artificial Sequence: Synthetic oligonucleotide
  Antisense strand to SEQ ID NO: 2559404
augccugugggauauccag

SEQ ID NO: 2559406 - RNA, 19 nt, Artificial Sequence
  Description of Artificial Sequence: Synthetic oligonucleotide
  Sense strand starting at position 3604 of SEQ ID NO: 1888823
ggagucaugcuagagcuuu

SEQ ID NO: 2559407 - RNA, 19 nt, Artificial Sequence
  Description of Artificial Sequence: Synthetic oligonucleotide
  Antisense strand to SEQ ID NO: 2559406
aaagcucuagcaugacucc

SEQ ID NO: 2559408 - RNA, 19 nt, Artificial Sequence
  Description of Artificial Sequence: Synthetic oligonucleotide
  Sense strand starting at position 8 of SEQ ID NO: 1888824
gaggauggcugguuuagca

SEQ ID NO: 2559409 - RNA, 19 nt, Artificial Sequence
  Description of Artificial Sequence: Synthetic oligonucleotide
  Antisense strand to SEQ ID NO: 2559408
ugcuaaaccagccauccuc

SEQ ID NO: 2559410 - RNA, 19 nt, Artificial Sequence
  Description of Artificial Sequence: Synthetic oligonucleotide
  Sense strand starting at position 105 of SEQ ID NO: 1888824
auguaaggcucucuaacuu

SEQ ID NO: 2559411 - RNA, 19 nt, Artificial Sequence
  Description of Artificial Sequence: Synthetic oligonucleotide
  Antisense strand to SEQ ID NO: 2559410
aaguuagagagccuuacau

SEQ ID NO: 2559412 - RNA, 19 nt, Artificial Sequence
  Description of Artificial Sequence: Synthetic oligonucleotide
  Sense strand starting at position 158 of SEQ ID NO: 1888824
aguaaauaccuuugugaac

SEQ ID NO: 2559413 - RNA, 19 nt, Artificial Sequence
  Description of Artificial Sequence: Synthetic oligonucleotide
  Antisense strand to SEQ ID NO: 2559412
guucacaaagguauuuacu

SEQ ID NO: 2559414 - RNA, 19 nt, Artificial Sequence
  Description of Artificial Sequence: Synthetic oligonucleotide
  Sense strand starting at position 254 of SEQ ID NO: 1888824
ugcugaguugggcaaacaa

SEQ ID NO: 2559415 - RNA, 19 nt, Artificial Sequence
  Description of Artificial Sequence: Synthetic oligonucleotide
  Antisense strand to SEQ ID NO: 2559414
uuguuugcccaacucagca

SEQ ID NO: 2559416 - RNA, 19 nt, Artificial Sequence
  Description of Artificial Sequence: Synthetic oligonucleotide
  Sense strand starting at position 310 of SEQ ID NO: 1888824
uggacuagagcaugauaca

SEQ ID NO: 2559417 - RNA, 19 nt, Artificial Sequence
  Description of Artificial Sequence: Synthetic oligonucleotide
  Antisense strand to SEQ ID NO: 2559416
uguaucaugcucuagucca

SEQ ID NO: 2559418 - RNA, 19 nt, Artificial Sequence
  Description of Artificial Sequence: Synthetic oligonucleotide
  Sense strand starting at position 395 of SEQ ID NO: 1888824
ucacccucagaauguuaga

SEQ ID NO: 2559419 - RNA, 19 nt, Artificial Sequence
  Description of Artificial Sequence: Synthetic oligonucleotide
  Antisense strand to SEQ ID NO: 2559418
ucuaacauucugaggguga

SEQ ID NO: 2559420 - RNA, 19 nt, Artificial Sequence
  Description of Artificial Sequence: Synthetic oligonucleotide
  Sense strand starting at position 457 of SEQ ID NO: 1888824
auaaaugguuuagcaauga

SEQ ID NO: 2559421 - RNA, 19 nt, Artificial Sequence
  Description of Artificial Sequence: Synthetic oligonucleotide
  Antisense strand to SEQ ID NO: 2559420
ucauugcuaaaccauuuau

SEQ ID NO: 2559422 - RNA, 19 nt, Artificial Sequence
  Description of Artificial Sequence: Synthetic oligonucleotide
  Sense strand starting at position 462 of SEQ ID NO: 1888824
ugguuuagcaaugaugcua

SEQ ID NO: 2559423 - RNA, 19 nt, Artificial Sequence
  Description of Artificial Sequence: Synthetic oligonucleotide
  Antisense strand to SEQ ID NO: 2559422
uagcaucauugcuaaacca

SEQ ID NO: 2559424 - RNA, 19 nt, Artificial Sequence
  Description of Artificial Sequence: Synthetic oligonucleotide
  Sense strand starting at position 766 of SEQ ID NO: 1888824
ugcaacuaacccuagaguu

SEQ ID NO: 2559425 - RNA, 19 nt, Artificial Sequence
  Description of Artificial Sequence: Synthetic oligonucleotide
  Antisense strand to SEQ ID NO: 2559424
aacucuaggguuaguugca

SEQ ID NO: 2559426 - RNA, 19 nt, Artificial Sequence
  Description of Artificial Sequence: Synthetic oligonucleotide
  Sense strand starting at position 776 of SEQ ID NO: 1888824
ccuagaguucucuaagcca

SEQ ID NO: 2559427 - RNA, 19 nt, Artificial Sequence
  Description of Artificial Sequence: Synthetic oligonucleotide
  Antisense strand to SEQ ID NO: 2559426
uggcuuagagaacucuagg

SEQ ID NO: 2559428 - RNA, 19 nt, Artificial Sequence
  Description of Artificial Sequence: Synthetic oligonucleotide
  Sense strand starting at position 779 of SEQ ID NO: 1888824
agaguucucuaagccauag

SEQ ID NO: 2559429 - RNA, 19 nt, Artificial Sequence
  Description of Artificial Sequence: Synthetic oligonucleotide
  Antisense strand to SEQ ID NO: 2559428
cuauggcuuagagaacucu

SEQ ID NO: 2559430 - RNA, 19 nt, Artificial Sequence
  Description of Artificial Sequence: Synthetic oligonucleotide
  Sense strand starting at position 848 of SEQ ID NO: 1888824
uuggcaaccgaauaugauu

SEQ ID NO: 2559431 - RNA, 19 nt, Artificial Sequence
  Description of Artificial Sequence: Synthetic oligonucleotide
  Antisense strand to SEQ ID NO: 2559430
aaucauauucgguugccaa

SEQ ID NO: 2559432 - RNA, 19 nt, Artificial Sequence
  Description of Artificial Sequence: Synthetic oligonucleotide
  Sense strand starting at position 886 of SEQ ID NO: 1888824
ggagauuacugagcucaga

SEQ ID NO: 2559433 - RNA, 19 nt, Artificial Sequence
  Description of Artificial Sequence: Synthetic oligonucleotide
  Antisense strand to SEQ ID NO: 2559432
ucugagcucaguaaucucc

SEQ ID NO: 2559434 - RNA, 19 nt, Artificial Sequence
  Description of Artificial Sequence: Synthetic oligonucleotide
  Sense strand starting at position 1079 of SEQ ID NO: 1888824
ccuaauaaaugggauagaa

SEQ ID NO: 2559435 - RNA, 19 nt, Artificial Sequence
  Description of Artificial Sequence: Synthetic oligonucleotide
  Antisense strand to SEQ ID NO: 2559434
uucuaucccauuuauuagg

SEQ ID NO: 2559436 - RNA, 19 nt, Artificial Sequence
  Description of Artificial Sequence: Synthetic oligonucleotide
  Sense strand starting at position 1166 of SEQ ID NO: 1888824
acgacaaagucucuaccau

SEQ ID NO: 2559437 - RNA, 19 nt, Artificial Sequence
  Description of Artificial Sequence: Synthetic oligonucleotide
  Antisense strand to SEQ ID NO: 2559436
augguagagacuuugucgu

SEQ ID NO: 2559438 - RNA, 19 nt, Artificial Sequence
  Description of Artificial Sequence: Synthetic oligonucleotide
  Sense strand starting at position 1167 of SEQ ID NO: 1888824
cgacaaagucucuaccauc

SEQ ID NO: 2559439 - RNA, 19 nt, Artificial Sequence
  Description of Artificial Sequence: Synthetic oligonucleotide
  Antisense strand to SEQ ID NO: 2559438
gaugguagagacuuugucg

SEQ ID NO: 2559440 - RNA, 19 nt, Artificial Sequence
  Description of Artificial Sequence: Synthetic oligonucleotide
  Sense strand starting at position 1391 of SEQ ID NO: 1888824
guaacaucuccagaauguu

SEQ ID NO: 2559441 - RNA, 19 nt, Artificial Sequence
  Description of Artificial Sequence: Synthetic oligonucleotide
  Antisense strand to SEQ ID NO: 2559440
aacauucuggagauguuac

SEQ ID NO: 2559442 - RNA, 19 nt, Artificial Sequence
  Description of Artificial Sequence: Synthetic oligonucleotide
  Sense strand starting at position 1653 of SEQ ID NO: 1888824
cugguucugacuugagaag

SEQ ID NO: 2559443 - RNA, 19 nt, Artificial Sequence
  Description of Artificial Sequence: Synthetic oligonucleotide
  Antisense strand to SEQ ID NO: 2559442
cuucucaagucagaaccag

SEQ ID NO: 2559444 - RNA, 19 nt, Artificial Sequence
  Description of Artificial Sequence: Synthetic oligonucleotide
  Sense strand starting at position 2070 of SEQ ID NO: 1888824
gggaggaagugcuugggaa

SEQ ID NO: 2559445 - RNA, 19 nt, Artificial Sequence
  Description of Artificial Sequence: Synthetic oligonucleotide
  Antisense strand to SEQ ID NO: 2559444
uucccaagcacuuccuccc

SEQ ID NO: 2559446 - RNA, 19 nt, Artificial Sequence
  Description of Artificial Sequence: Synthetic oligonucleotide
  Sense strand starting at position 2071 of SEQ ID NO: 1888824
ggaggaagugcuugggaaa

SEQ ID NO: 2559447 - RNA, 19 nt, Artificial Sequence
  Description of Artificial Sequence: Synthetic oligonucleotide
  Antisense strand to SEQ ID NO: 2559446
uuucccaagcacuuccucc

SEQ ID NO: 2559448 - RNA, 19 nt, Artificial Sequence
  Description of Artificial Sequence: Synthetic oligonucleotide
  Sense strand starting at position 2072 of SEQ ID NO: 1888824
gaggaagugcuugggaaag

SEQ ID NO: 2559449 - RNA, 19 nt, Artificial Sequence
  Description of Artificial Sequence: Synthetic oligonucleotide
  Antisense strand to SEQ ID NO: 2559448
cuuucccaagcacuuccuc

SEQ ID NO: 2559450 - RNA, 19 nt, Artificial Sequence
  Description of Artificial Sequence: Synthetic oligonucleotide
  Sense strand starting at position 2132 of SEQ ID NO: 1888824
caagguguguauguacaga

SEQ ID NO: 2559451 - RNA, 19 nt, Artificial Sequence
  Description of Artificial Sequence: Synthetic oligonucleotide
  Antisense strand to SEQ ID NO: 2559450
ucuguacauacacaccuug

SEQ ID NO: 2559452 - RNA, 19 nt, Artificial Sequence
  Description of Artificial Sequence: Synthetic oligonucleotide
  Sense strand starting at position 2137 of SEQ ID NO: 1888824
uguguauguacagauguga

SEQ ID NO: 2559453 - RNA, 19 nt, Artificial Sequence
  Description of Artificial Sequence: Synthetic oligonucleotide
  Antisense strand to SEQ ID NO: 2559452
ucacaucuguacauacaca

SEQ ID NO: 2559454 - RNA, 19 nt, Artificial Sequence
  Description of Artificial Sequence: Synthetic oligonucleotide
  Sense strand starting at position 2154 of SEQ ID NO: 1888824
gauccuguacgacauacaa

SEQ ID NO: 2559455 - RNA, 19 nt, Artificial Sequence
  Description of Artificial Sequence: Synthetic oligonucleotide
  Antisense strand to SEQ ID NO: 2559454
uuguaugucguacaggauc

SEQ ID NO: 2559456 - RNA, 19 nt, Artificial Sequence
  Description of Artificial Sequence: Synthetic oligonucleotide
  Sense strand starting at position 2180 of SEQ ID NO: 1888824
ugagaacugcacugaguaa

SEQ ID NO: 2559457 - RNA, 19 nt, Artificial Sequence
  Description of Artificial Sequence: Synthetic oligonucleotide
  Antisense strand to SEQ ID NO: 2559456
uuacucagugcaguucuca

SEQ ID NO: 2559458 - RNA, 19 nt, Artificial Sequence
  Description of Artificial Sequence: Synthetic oligonucleotide
  Sense strand starting at position 2228 of SEQ ID NO: 1888824
gcugaucaugcuuaacaga

SEQ ID NO: 2559459 - RNA, 19 nt, Artificial Sequence
  Description of Artificial Sequence: Synthetic oligonucleotide
  Antisense strand to SEQ ID NO: 2559458
ucuguuaagcaugaucagc

SEQ ID NO: 2559460 - RNA, 19 nt, Artificial Sequence
  Description of Artificial Sequence: Synthetic oligonucleotide
  Sense strand starting at position 2258 of SEQ ID NO: 1888824
uugcaaaggcuuugaaaug

SEQ ID NO: 2559461 - RNA, 19 nt, Artificial Sequence
  Description of Artificial Sequence: Synthetic oligonucleotide
  Antisense strand to SEQ ID NO: 2559460
cauuucaaagccuuugcaa

SEQ ID NO: 2559462 - RNA, 19 nt, Artificial Sequence
  Description of Artificial Sequence: Synthetic oligonucleotide
  Sense strand starting at position 2704 of SEQ ID NO: 1888824
gcauaacacuucucaagug

SEQ ID NO: 2559463 - RNA, 19 nt, Artificial Sequence
  Description of Artificial Sequence: Synthetic oligonucleotide
  Antisense strand to SEQ ID NO: 2559462
cacuugagaaguguuaugc

SEQ ID NO: 2559464 - RNA, 19 nt, Artificial Sequence
  Description of Artificial Sequence: Synthetic oligonucleotide
  Sense strand starting at position 2709 of SEQ ID NO: 1888824
acacuucucaaguggcgaa

SEQ ID NO: 2559465 - RNA, 19 nt, Artificial Sequence
  Description of Artificial Sequence: Synthetic oligonucleotide
  Antisense strand to SEQ ID NO: 2559464
uucgccacuugagaagugu

SEQ ID NO: 2559466 - RNA, 19 nt, Artificial Sequence
  Description of Artificial Sequence: Synthetic oligonucleotide
  Sense strand starting at position 2816 of SEQ ID NO: 1888824
gagagauuguugccaucag

SEQ ID NO: 2559467 - RNA, 19 nt, Artificial Sequence
  Description of Artificial Sequence: Synthetic oligonucleotide
  Antisense strand to SEQ ID NO: 2559466
cugauggcaacaaucucuc

SEQ ID NO: 2559468 - RNA, 19 nt, Artificial Sequence
  Description of Artificial Sequence: Synthetic oligonucleotide
  Sense strand starting at position 2820 of SEQ ID NO: 1888824
gauuguugccaucagaccu

SEQ ID NO: 2559469 - RNA, 19 nt, Artificial Sequence
  Description of Artificial Sequence: Synthetic oligonucleotide
  Antisense strand to SEQ ID NO: 2559468
aggucugauggcaacaauc

SEQ ID NO: 2559470 - RNA, 19 nt, Artificial Sequence
  Description of Artificial Sequence: Synthetic oligonucleotide
  Sense strand starting at position 2859 of SEQ ID NO: 1888824
agaagcuuccugcaugaga

SEQ ID NO: 2559471 - RNA, 19 nt, Artificial Sequence
  Description of Artificial Sequence: Synthetic oligonucleotide
  Antisense strand to SEQ ID NO: 2559470
ucucaugcaggaagcuucu

SEQ ID NO: 2559472 - RNA, 19 nt, Artificial Sequence
  Description of Artificial Sequence: Synthetic oligonucleotide
  Sense strand starting at position 2909 of SEQ ID NO: 1888824
gcaugaccugcucaccaau

SEQ ID NO: 2559473 - RNA, 19 nt, Artificial Sequence
  Description of Artificial Sequence: Synthetic oligonucleotide
  Antisense strand to SEQ ID NO: 2559472
auuggugagcaggucaugc

SEQ ID NO: 2559474 - RNA, 19 nt, Artificial Sequence
  Description of Artificial Sequence: Synthetic oligonucleotide
  Sense strand starting at position 2970 of SEQ ID NO: 1888824
agauaugucuuagaauuuc

SEQ ID NO: 2559475 - RNA, 19 nt, Artificial Sequence
  Description of Artificial Sequence: Synthetic oligonucleotide
  Antisense strand to SEQ ID NO: 2559474
gaaauucuaagacauaucu

SEQ ID NO: 2559476 - RNA, 19 nt, Artificial Sequence
  Description of Artificial Sequence: Synthetic oligonucleotide
  Sense strand starting at position 3079 of SEQ ID NO: 1888824
uugcuuaacucagugaaca

SEQ ID NO: 2559477 - RNA, 19 nt, Artificial Sequence
  Description of Artificial Sequence: Synthetic oligonucleotide
  Antisense strand to SEQ ID NO: 2559476
uguucacugaguuaagcaa

SEQ ID NO: 2559478 - RNA, 19 nt, Artificial Sequence
  Description of Artificial Sequence: Synthetic oligonucleotide
  Sense strand starting at position 3080 of SEQ ID NO: 1888824
ugcuuaacucagugaacag

SEQ ID NO: 2559479 - RNA, 19 nt, Artificial Sequence
  Description of Artificial Sequence: Synthetic oligonucleotide
  Antisense strand to SEQ ID NO: 2559478
cuguucacugaguuaagca

SEQ ID NO: 2559480 - RNA, 19 nt, Artificial Sequence
  Description of Artificial Sequence: Synthetic oligonucleotide
  Sense strand starting at position 3240 of SEQ ID NO: 1888824
ccaacuuuaucuguggaga

SEQ ID NO: 2559481 - RNA, 19 nt, Artificial Sequence
  Description of Artificial Sequence: Synthetic oligonucleotide
  Antisense strand to SEQ ID NO: 2559480
ucuccacagauaaaguugg

SEQ ID NO: 2559482 - RNA, 19 nt, Artificial Sequence
  Description of Artificial Sequence: Synthetic oligonucleotide
  Sense strand starting at position 3241 of SEQ ID NO: 1888824
caacuuuaucuguggagac

SEQ ID NO: 2559483 - RNA, 19 nt, Artificial Sequence
  Description of Artificial Sequence: Synthetic oligonucleotide
  Antisense strand to SEQ ID NO: 2559482
gucuccacagauaaaguug

SEQ ID NO: 2559484 - RNA, 19 nt, Artificial Sequence
  Description of Artificial Sequence: Synthetic oligonucleotide
  Sense strand starting at position 3468 of SEQ ID NO: 1888824
cuggauaucccacaggcau

SEQ ID NO: 2559485 - RNA, 19 nt, Artificial Sequence
  Description of Artificial Sequence: Synthetic oligonucleotide
  Antisense strand to SEQ ID NO: 2559484
augccugugggauauccag

SEQ ID NO: 2559486 - RNA, 19 nt, Artificial Sequence
  Description of Artificial Sequence: Synthetic oligonucleotide
  Sense strand starting at position 3605 of SEQ ID NO: 1888824
ggagucaugcuagagcuuu

SEQ ID NO: 2559487 - RNA, 19 nt, Artificial Sequence
  Description of Artificial Sequence: Synthetic oligonucleotide
  Antisense strand to SEQ ID NO: 2559486
aaagcucuagcaugacucc

SEQ ID NO: 2559488 - RNA, 19 nt, Artificial Sequence
  Description of Artificial Sequence: Synthetic oligonucleotide
  Sense strand starting at position 96 of SEQ ID NO: 1888825
uguuaugaaaucgaauguu

SEQ ID NO: 2559489 - RNA, 19 nt, Artificial Sequence
  Description of Artificial Sequence: Synthetic oligonucleotide
  Antisense strand to SEQ ID NO: 2559488
aacauucgauuucauaaca

SEQ ID NO: 2559490 - RNA, 19 nt, Artificial Sequence
  Description of Artificial Sequence: Synthetic oligonucleotide
  Sense strand starting at position 99 of SEQ ID NO: 1888825
uaugaaaucgaauguuaug

SEQ ID NO: 2559491 - RNA, 19 nt, Artificial Sequence
  Description of Artificial Sequence: Synthetic oligonucleotide
  Antisense strand to SEQ ID NO: 2559490
cauaacauucgauuucaua

SEQ ID NO: 2559492 - RNA, 19 nt, Artificial Sequence
  Description of Artificial Sequence: Synthetic oligonucleotide
  Sense strand starting at position 116 of SEQ ID NO: 1888825
ugacuauauucugugggaa

SEQ ID NO: 2559493 - RNA, 19 nt, Artificial Sequence
  Description of Artificial Sequence: Synthetic oligonucleotide
  Antisense strand to SEQ ID NO: 2559492
uucccacagaauauaguca

SEQ ID NO: 2559494 - RNA, 19 nt, Artificial Sequence
  Description of Artificial Sequence: Synthetic oligonucleotide
  Sense strand starting at position 117 of SEQ ID NO: 1888825
gacuauauucugugggaaa

SEQ ID NO: 2559495 - RNA, 19 nt, Artificial Sequence
  Description of Artificial Sequence: Synthetic oligonucleotide
  Antisense strand to SEQ ID NO: 2559494
uuucccacagaauauaguc

SEQ ID NO: 2559496 - RNA, 19 nt, Artificial Sequence
  Description of Artificial Sequence: Synthetic oligonucleotide
  Sense strand starting at position 124 of SEQ ID NO: 1888825
uucugugggaaacgaauaa

SEQ ID NO: 2559497 - RNA, 19 nt, Artificial Sequence
  Description of Artificial Sequence: Synthetic oligonucleotide
  Antisense strand to SEQ ID NO: 2559496
uuauucguuucccacagaa

SEQ ID NO: 2559498 - RNA, 19 nt, Artificial Sequence
  Description of Artificial Sequence: Synthetic oligonucleotide
  Sense strand starting at position 159 of SEQ ID NO: 1888825
guuacauuagauugacaua

SEQ ID NO: 2559499 - RNA, 19 nt, Artificial Sequence
  Description of Artificial Sequence: Synthetic oligonucleotide
  Antisense strand to SEQ ID NO: 2559498
uaugucaaucuaauguaac

SEQ ID NO: 2559500 - RNA, 19 nt, Artificial Sequence
  Description of Artificial Sequence: Synthetic oligonucleotide
  Sense strand starting at position 255 of SEQ ID NO: 1888825
aaacuaggguucuuguuaa

SEQ ID NO: 2559501 - RNA, 19 nt, Artificial Sequence
  Description of Artificial Sequence: Synthetic oligonucleotide
  Antisense strand to SEQ ID NO: 2559500
uuaacaagaacccuaguuu

SEQ ID NO: 2559502 - RNA, 19 nt, Artificial Sequence
  Description of Artificial Sequence: Synthetic oligonucleotide
  Sense strand starting at position 288 of SEQ ID NO: 1888825
guucuuucucaggaugucu

SEQ ID NO: 2559503 - RNA, 19 nt, Artificial Sequence
  Description of Artificial Sequence: Synthetic oligonucleotide
  Antisense strand to SEQ ID NO: 2559502
agacauccugagaaagaac

SEQ ID NO: 2559504 - RNA, 19 nt, Artificial Sequence
  Description of Artificial Sequence: Synthetic oligonucleotide
  Sense strand starting at position 687 of SEQ ID NO: 1888825
uccagagauucugcacauu

SEQ ID NO: 2559505 - RNA, 19 nt, Artificial Sequence
  Description of Artificial Sequence: Synthetic oligonucleotide
  Antisense strand to SEQ ID NO: 2559504
aaugugcagaaucucugga

SEQ ID NO: 2559506 - RNA, 19 nt, Artificial Sequence
  Description of Artificial Sequence: Synthetic oligonucleotide
  Sense strand starting at position 724 of SEQ ID NO: 1888825
aagaaaugguuagccauga

SEQ ID NO: 2559507 - RNA, 19 nt, Artificial Sequence
  Description of Artificial Sequence: Synthetic oligonucleotide
  Antisense strand to SEQ ID NO: 2559506
ucauggcuaaccauuucuu

SEQ ID NO: 2559508 - RNA, 19 nt, Artificial Sequence
  Description of Artificial Sequence: Synthetic oligonucleotide
  Sense strand starting at position 725 of SEQ ID NO: 1888825
agaaaugguuagccaugau

SEQ ID NO: 2559509 - RNA, 19 nt, Artificial Sequence
  Description of Artificial Sequence: Synthetic oligonucleotide
  Antisense strand to SEQ ID NO: 2559508
aucauggcuaaccauuucu

SEQ ID NO: 2559510 - RNA, 19 nt, Artificial Sequence
  Description of Artificial Sequence: Synthetic oligonucleotide
  Sense strand starting at position 1011 of SEQ ID NO: 1888825
guaagugcaaauugaagau

SEQ ID NO: 2559511 - RNA, 19 nt, Artificial Sequence
  Description of Artificial Sequence: Synthetic oligonucleotide
  Antisense strand to SEQ ID NO: 2559510
aucuucaauuugcacuuac

SEQ ID NO: 2559512 - RNA, 19 nt, Artificial Sequence
  Description of Artificial Sequence: Synthetic oligonucleotide
  Sense strand starting at position 1017 of SEQ ID NO: 1888825
gcaaauugaagauacguuu

SEQ ID NO: 2559513 - RNA, 19 nt, Artificial Sequence
  Description of Artificial Sequence: Synthetic oligonucleotide
  Antisense strand to SEQ ID NO: 2559512
aaacguaucuucaauuugc

SEQ ID NO: 2559514 - RNA, 19 nt, Artificial Sequence
  Description of Artificial Sequence: Synthetic oligonucleotide
  Sense strand starting at position 1043 of SEQ ID NO: 1888825
cacucuaagcaguaaguga

SEQ ID NO: 2559515 - RNA, 19 nt, Artificial Sequence
  Description of Artificial Sequence: Synthetic oligonucleotide
  Antisense strand to SEQ ID NO: 2559514
ucacuuacugcuuagagug

SEQ ID NO: 2559516 - RNA, 19 nt, Artificial Sequence
  Description of Artificial Sequence: Synthetic oligonucleotide
  Sense strand starting at position 1123 of SEQ ID NO: 1888825
cguaucucuagaggaaaca

SEQ ID NO: 2559517 - RNA, 19 nt, Artificial Sequence
  Description of Artificial Sequence: Synthetic oligonucleotide
  Antisense strand to SEQ ID NO: 2559516
uguuuccucuagagauacg

SEQ ID NO: 2559518 - RNA, 19 nt, Artificial Sequence
  Description of Artificial Sequence: Synthetic oligonucleotide
  Sense strand starting at position 1166 of SEQ ID NO: 1888825
gcaaauacuuagguugaau

SEQ ID NO: 2559519 - RNA, 19 nt, Artificial Sequence
  Description of Artificial Sequence: Synthetic oligonucleotide
  Antisense strand to SEQ ID NO: 2559518
auucaaccuaaguauuugc

SEQ ID NO: 2559520 - RNA, 19 nt, Artificial Sequence
  Description of Artificial Sequence: Synthetic oligonucleotide
  Sense strand starting at position 1261 of SEQ ID NO: 1888825
ugauaaagacuugguacuu

SEQ ID NO: 2559521 - RNA, 19 nt, Artificial Sequence
  Description of Artificial Sequence: Synthetic oligonucleotide
  Antisense strand to SEQ ID NO: 2559520
aaguaccaagucuuuauca

SEQ ID NO: 2559522 - RNA, 19 nt, Artificial Sequence
  Description of Artificial Sequence: Synthetic oligonucleotide
  Sense strand starting at position 1262 of SEQ ID NO: 1888825
gauaaagacuugguacuua

SEQ ID NO: 2559523 - RNA, 19 nt, Artificial Sequence
  Description of Artificial Sequence: Synthetic oligonucleotide
  Antisense strand to SEQ ID NO: 2559522
uaaguaccaagucuuuauc

SEQ ID NO: 2559524 - RNA, 19 nt, Artificial Sequence
  Description of Artificial Sequence: Synthetic oligonucleotide
  Sense strand starting at position 1322 of SEQ ID NO: 1888825
gcaagaauaugggcauuga

SEQ ID NO: 2559525 - RNA, 19 nt, Artificial Sequence
  Description of Artificial Sequence: Synthetic oligonucleotide
  Antisense strand to SEQ ID NO: 2559524
ucaaugcccauauucuugc

SEQ ID NO: 2559526 - RNA, 19 nt, Artificial Sequence
  Description of Artificial Sequence: Synthetic oligonucleotide
  Sense strand starting at position 1429 of SEQ ID NO: 1888825
caguuaagaguauguacau

SEQ ID NO: 2559527 - RNA, 19 nt, Artificial Sequence
  Description of Artificial Sequence: Synthetic oligonucleotide
  Antisense strand to SEQ ID NO: 2559526
auguacauacucuuaacug

SEQ ID NO: 2559528 - RNA, 19 nt, Artificial Sequence
  Description of Artificial Sequence: Synthetic oligonucleotide
  Sense strand starting at position 1430 of SEQ ID NO: 1888825
aguuaagaguauguacaua

SEQ ID NO: 2559529 - RNA, 19 nt, Artificial Sequence
  Description of Artificial Sequence: Synthetic oligonucleotide
  Antisense strand to SEQ ID NO: 2559528
uauguacauacucuuaacu

SEQ ID NO: 2559530 - RNA, 19 nt, Artificial Sequence
  Description of Artificial Sequence: Synthetic oligonucleotide
  Sense strand starting at position 1702 of SEQ ID NO: 1888825
agauucuuagauugguaau

SEQ ID NO: 2559531 - RNA, 19 nt, Artificial Sequence
  Description of Artificial Sequence: Synthetic oligonucleotide
  Antisense strand to SEQ ID NO: 2559530
auuaccaaucuaagaaucu

SEQ ID NO: 2559532 - RNA, 19 nt, Artificial Sequence
  Description of Artificial Sequence: Synthetic oligonucleotide
  Sense strand starting at position 1704 of SEQ ID NO: 1888825
auucuuagauugguaauga

SEQ ID NO: 2559533 - RNA, 19 nt, Artificial Sequence
  Description of Artificial Sequence: Synthetic oligonucleotide
  Antisense strand to SEQ ID NO: 2559532
ucauuaccaaucuaagaau

SEQ ID NO: 2559534 - RNA, 19 nt, Artificial Sequence
  Description of Artificial Sequence: Synthetic oligonucleotide
  Sense strand starting at position 1735 of SEQ ID NO: 1888825
gauagagguuaaguauuau

SEQ ID NO: 2559535 - RNA, 19 nt, Artificial Sequence
  Description of Artificial Sequence: Synthetic oligonucleotide
  Antisense strand to SEQ ID NO: 2559534
auaauacuuaaccucuauc

SEQ ID NO: 2559536 - RNA, 19 nt, Artificial Sequence
  Description of Artificial Sequence: Synthetic oligonucleotide
  Sense strand starting at position 1992 of SEQ ID NO: 1888825
cuuugcuuccuguugucau

SEQ ID NO: 2559537 - RNA, 19 nt, Artificial Sequence
  Description of Artificial Sequence: Synthetic oligonucleotide
  Antisense strand to SEQ ID NO: 2559536
augacaacaggaagcaaag

SEQ ID NO: 2559538 - RNA, 19 nt, Artificial Sequence
  Description of Artificial Sequence: Synthetic oligonucleotide
  Sense strand starting at position 2004 of SEQ ID NO: 1888825
uugucauagugggcagaau

SEQ ID NO: 2559539 - RNA, 19 nt, Artificial Sequence
  Description of Artificial Sequence: Synthetic oligonucleotide
  Antisense strand to SEQ ID NO: 2559538
auucugcccacuaugacaa

SEQ ID NO: 2559540 - RNA, 19 nt, Artificial Sequence
  Description of Artificial Sequence: Synthetic oligonucleotide
  Sense strand starting at position 2015 of SEQ ID NO: 1888825
ggcagaaucaaggguucca

SEQ ID NO: 2559541 - RNA, 19 nt, Artificial Sequence
  Description of Artificial Sequence: Synthetic oligonucleotide
  Antisense strand to SEQ ID NO: 2559540
uggaacccuugauucugcc

SEQ ID NO: 2559542 - RNA, 19 nt, Artificial Sequence
  Description of Artificial Sequence: Synthetic oligonucleotide
  Sense strand starting at position 2121 of SEQ ID NO: 1888825
gaaagaguaguauaucugu

SEQ ID NO: 2559543 - RNA, 19 nt, Artificial Sequence
  Description of Artificial Sequence: Synthetic oligonucleotide
  Antisense strand to SEQ ID NO: 2559542
acagauauacuacucuuuc

SEQ ID NO: 2559544 - RNA, 19 nt, Artificial Sequence
  Description of Artificial Sequence: Synthetic oligonucleotide
  Sense strand starting at position 2126 of SEQ ID NO: 1888825
aguaguauaucuguuggga

SEQ ID NO: 2559545 - RNA, 19 nt, Artificial Sequence
  Description of Artificial Sequence: Synthetic oligonucleotide
  Antisense strand to SEQ ID NO: 2559544
ucccaacagauauacuacu

SEQ ID NO: 2559546 - RNA, 19 nt, Artificial Sequence
  Description of Artificial Sequence: Synthetic oligonucleotide
  Sense strand starting at position 2129 of SEQ ID NO: 1888825
aguauaucuguugggauga

SEQ ID NO: 2559547 - RNA, 19 nt, Artificial Sequence
  Description of Artificial Sequence: Synthetic oligonucleotide
  Antisense strand to SEQ ID NO: 2559546
ucaucccaacagauauacu

SEQ ID NO: 2559548 - RNA, 19 nt, Artificial Sequence
  Description of Artificial Sequence: Synthetic oligonucleotide
  Sense strand starting at position 2224 of SEQ ID NO: 1888825
ggaggauuccuuuggaagc

SEQ ID NO: 2559549 - RNA, 19 nt, Artificial Sequence
  Description of Artificial Sequence: Synthetic oligonucleotide
  Antisense strand to SEQ ID NO: 2559548
gcuuccaaaggaauccucc

SEQ ID NO: 2559550 - RNA, 19 nt, Artificial Sequence
  Description of Artificial Sequence: Synthetic oligonucleotide
  Sense strand starting at position 2242 of SEQ ID NO: 1888825
caguaagggucuccaaaug

SEQ ID NO: 2559551 - RNA, 19 nt, Artificial Sequence
  Description of Artificial Sequence: Synthetic oligonucleotide
  Antisense strand to SEQ ID NO: 2559550
cauuuggagacccuuacug

SEQ ID NO: 2559552 - RNA, 19 nt, Artificial Sequence
  Description of Artificial Sequence: Synthetic oligonucleotide
  Sense strand starting at position 2355 of SEQ ID NO: 1888825
ugauccaacuagguagaua

SEQ ID NO: 2559553 - RNA, 19 nt, Artificial Sequence
  Description of Artificial Sequence: Synthetic oligonucleotide
  Antisense strand to SEQ ID NO: 2559552
uaucuaccuaguuggauca

SEQ ID NO: 2559554 - RNA, 19 nt, Artificial Sequence
  Description of Artificial Sequence: Synthetic oligonucleotide
  Sense strand starting at position 2441 of SEQ ID NO: 1888825
aacggcaauggugagauua

SEQ ID NO: 2559555 - RNA, 19 nt, Artificial Sequence
  Description of Artificial Sequence: Synthetic oligonucleotide
  Antisense strand to SEQ ID NO: 2559554
uaaucucaccauugccguu

SEQ ID NO: 2559556 - RNA, 19 nt, Artificial Sequence
  Description of Artificial Sequence: Synthetic oligonucleotide
  Sense strand starting at position 2490 of SEQ ID NO: 1888825
gaugguaguggcuauaaga

SEQ ID NO: 2559557 - RNA, 19 nt, Artificial Sequence
  Description of Artificial Sequence: Synthetic oligonucleotide
  Antisense strand to SEQ ID NO: 2559556
ucuuauagccacuaccauc

SEQ ID NO: 2559558 - RNA, 19 nt, Artificial Sequence
  Description of Artificial Sequence: Synthetic oligonucleotide
  Sense strand starting at position 2574 of SEQ ID NO: 1888825
aaggcagguuucucuggaa

SEQ ID NO: 2559559 - RNA, 19 nt, Artificial Sequence
  Description of Artificial Sequence: Synthetic oligonucleotide
  Antisense strand to SEQ ID NO: 2559558
uuccagagaaaccugccuu

SEQ ID NO: 2559560 - RNA, 19 nt, Artificial Sequence
  Description of Artificial Sequence: Synthetic oligonucleotide
  Sense strand starting at position 2578 of SEQ ID NO: 1888825
cagguuucucuggaaguag

SEQ ID NO: 2559561 - RNA, 19 nt, Artificial Sequence
  Description of Artificial Sequence: Synthetic oligonucleotide
  Antisense strand to SEQ ID NO: 2559560
cuacuuccagagaaaccug

SEQ ID NO: 2559562 - RNA, 19 nt, Artificial Sequence
  Description of Artificial Sequence: Synthetic oligonucleotide
  Sense strand starting at position 2705 of SEQ ID NO: 1888825
gcagaaguguguaaaggga

SEQ ID NO: 2559563 - RNA, 19 nt, Artificial Sequence
  Description of Artificial Sequence: Synthetic oligonucleotide
  Antisense strand to SEQ ID NO: 2559562
ucccuuuacacacuucugc

SEQ ID NO: 2559564 - RNA, 19 nt, Artificial Sequence
  Description of Artificial Sequence: Synthetic oligonucleotide
  Sense strand starting at position 2709 of SEQ ID NO: 1888825
aaguguguaaagggacauu

SEQ ID NO: 2559565 - RNA, 19 nt, Artificial Sequence
  Description of Artificial Sequence: Synthetic oligonucleotide
  Antisense strand to SEQ ID NO: 2559564
aaugucccuuuacacacuu

SEQ ID NO: 2559566 - RNA, 19 nt, Artificial Sequence
  Description of Artificial Sequence: Synthetic oligonucleotide
  Sense strand starting at position 2957 of SEQ ID NO: 1888825
cgcuaacaagacuaguaaa

SEQ ID NO: 2559567 - RNA, 19 nt, Artificial Sequence
  Description of Artificial Sequence: Synthetic oligonucleotide
  Antisense strand to SEQ ID NO: 2559566
uuuacuagucuuguuagcg

SEQ ID NO: 2559568 - RNA, 19 nt, Artificial Sequence
  Description of Artificial Sequence: Synthetic oligonucleotide
  Sense strand starting at position 214 of SEQ ID NO: 1888826
ucaaauaauguguaguaga

SEQ ID NO: 2559569 - RNA, 19 nt, Artificial Sequence
  Description of Artificial Sequence: Synthetic oligonucleotide
  Antisense strand to SEQ ID NO: 2559568
ucuacuacacauuauuuga

SEQ ID NO: 2559570 - RNA, 19 nt, Artificial Sequence
  Description of Artificial Sequence: Synthetic oligonucleotide
  Sense strand starting at position 219 of SEQ ID NO: 1888826
uaauguguaguagaguuua

SEQ ID NO: 2559571 - RNA, 19 nt, Artificial Sequence
  Description of Artificial Sequence: Synthetic oligonucleotide
  Antisense strand to SEQ ID NO: 2559570
uaaacucuacuacacauua

SEQ ID NO: 2559572 - RNA, 19 nt, Artificial Sequence
  Description of Artificial Sequence: Synthetic oligonucleotide
  Sense strand starting at position 224 of SEQ ID NO: 1888826
uguaguagaguuuauucuu

SEQ ID NO: 2559573 - RNA, 19 nt, Artificial Sequence
  Description of Artificial Sequence: Synthetic oligonucleotide
  Antisense strand to SEQ ID NO: 2559572
aagaauaaacucuacuaca

SEQ ID NO: 2559574 - RNA, 19 nt, Artificial Sequence
  Description of Artificial Sequence: Synthetic oligonucleotide
  Sense strand starting at position 561 of SEQ ID NO: 1888826
ccaccacauccgggugaaa

SEQ ID NO: 2559575 - RNA, 19 nt, Artificial Sequence
  Description of Artificial Sequence: Synthetic oligonucleotide
  Antisense strand to SEQ ID NO: 2559574
uuucacccggauguggugg

SEQ ID NO: 2559576 - RNA, 19 nt, Artificial Sequence
  Description of Artificial Sequence: Synthetic oligonucleotide
  Sense strand starting at position 693 of SEQ ID NO: 1888826
uuaagaggacuuuguuaau

SEQ ID NO: 2559577 - RNA, 19 nt, Artificial Sequence
  Description of Artificial Sequence: Synthetic oligonucleotide
  Antisense strand to SEQ ID NO: 2559576
auuaacaaaguccucuuaa

SEQ ID NO: 2559578 - RNA, 19 nt, Artificial Sequence
  Description of Artificial Sequence: Synthetic oligonucleotide
  Sense strand starting at position 696 of SEQ ID NO: 1888826
agaggacuuuguuaauuua

SEQ ID NO: 2559579 - RNA, 19 nt, Artificial Sequence
  Description of Artificial Sequence: Synthetic oligonucleotide
  Antisense strand to SEQ ID NO: 2559578
uaaauuaacaaaguccucu

SEQ ID NO: 2559580 - RNA, 19 nt, Artificial Sequence
  Description of Artificial Sequence: Synthetic oligonucleotide
  Sense strand starting at position 742 of SEQ ID NO: 1888826
ucuugaaaucaaugcagaa

SEQ ID NO: 2559581 - RNA, 19 nt, Artificial Sequence
  Description of Artificial Sequence: Synthetic oligonucleotide
  Antisense strand to SEQ ID NO: 2559580
uucugcauugauuucaaga

SEQ ID NO: 2559582 - RNA, 19 nt, Artificial Sequence
  Description of Artificial Sequence: Synthetic oligonucleotide
  Sense strand starting at position 762 of SEQ ID NO: 1888826
ugcaaauuacauuguagaa

SEQ ID NO: 2559583 - RNA, 19 nt, Artificial Sequence
  Description of Artificial Sequence: Synthetic oligonucleotide
  Antisense strand to SEQ ID NO: 2559582
uucuacaauguaauuugca

SEQ ID NO: 2559584 - RNA, 19 nt, Artificial Sequence
  Description of Artificial Sequence: Synthetic oligonucleotide
  Sense strand starting at position 863 of SEQ ID NO: 1888826
cauucugagcaagaaguuu

SEQ ID NO: 2559585 - RNA, 19 nt, Artificial Sequence
  Description of Artificial Sequence: Synthetic oligonucleotide
  Antisense strand to SEQ ID NO: 2559584
aaacuucuugcucagaaug

SEQ ID NO: 2559586 - RNA, 19 nt, Artificial Sequence
  Description of Artificial Sequence: Synthetic oligonucleotide
  Sense strand starting at position 892 of SEQ ID NO: 1888826
aaguuucugugggcaaaga

SEQ ID NO: 2559587 - RNA, 19 nt, Artificial Sequence
  Description of Artificial Sequence: Synthetic oligonucleotide
  Antisense strand to SEQ ID NO: 2559586
ucuuugcccacagaaacuu

SEQ ID NO: 2559588 - RNA, 19 nt, Artificial Sequence
  Description of Artificial Sequence: Synthetic oligonucleotide
  Sense strand starting at position 893 of SEQ ID NO: 1888826
aguuucugugggcaaagaa

SEQ ID NO: 2559589 - RNA, 19 nt, Artificial Sequence
  Description of Artificial Sequence: Synthetic oligonucleotide
  Antisense strand to SEQ ID NO: 2559588
uucuuugcccacagaaacu

SEQ ID NO: 2559590 - RNA, 19 nt, Artificial Sequence
  Description of Artificial Sequence: Synthetic oligonucleotide
  Sense strand starting at position 958 of SEQ ID NO: 1888826
ggauguuauaauugagacc

SEQ ID NO: 2559591 - RNA, 19 nt, Artificial Sequence
  Description of Artificial Sequence: Synthetic oligonucleotide
  Antisense strand to SEQ ID NO: 2559590
ggucucaauuauaacaucc

SEQ ID NO: 2559592 - RNA, 19 nt, Artificial Sequence
  Description of Artificial Sequence: Synthetic oligonucleotide
  Sense strand starting at position 1202 of SEQ ID NO: 1888826
uuucuuugauaucuaccga

SEQ ID NO: 2559593 - RNA, 19 nt, Artificial Sequence
  Description of Artificial Sequence: Synthetic oligonucleotide
  Antisense strand to SEQ ID NO: 2559592
ucgguagauaucaaagaaa

SEQ ID NO: 2559594 - RNA, 19 nt, Artificial Sequence
  Description of Artificial Sequence: Synthetic oligonucleotide
  Sense strand starting at position 1561 of SEQ ID NO: 1888826
aggugugagccauaaauua

SEQ ID NO: 2559595 - RNA, 19 nt, Artificial Sequence
  Description of Artificial Sequence: Synthetic oligonucleotide
  Antisense strand to SEQ ID NO: 2559594
uaauuuauggcucacaccu

SEQ ID NO: 2559596 - RNA, 19 nt, Artificial Sequence
  Description of Artificial Sequence: Synthetic oligonucleotide
  Sense strand starting at position 1756 of SEQ ID NO: 1888826
ucaugucaugagggaaauu

SEQ ID NO: 2559597 - RNA, 19 nt, Artificial Sequence
  Description of Artificial Sequence: Synthetic oligonucleotide
  Antisense strand to SEQ ID NO: 2559596
aauuucccucaugacauga

SEQ ID NO: 2559598 - RNA, 19 nt, Artificial Sequence
  Description of Artificial Sequence: Synthetic oligonucleotide
  Sense strand starting at position 1848 of SEQ ID NO: 1888826
guugaaggagacuguauua

SEQ ID NO: 2559599 - RNA, 19 nt, Artificial Sequence
  Description of Artificial Sequence: Synthetic oligonucleotide
  Antisense strand to SEQ ID NO: 2559598
uaauacagucuccuucaac

SEQ ID NO: 2559600 - RNA, 19 nt, Artificial Sequence
  Description of Artificial Sequence: Synthetic oligonucleotide
  Sense strand starting at position 2319 of SEQ ID NO: 1888826
ucauuauuauagccuggga

SEQ ID NO: 2559601 - RNA, 19 nt, Artificial Sequence
  Description of Artificial Sequence: Synthetic oligonucleotide
  Antisense strand to SEQ ID NO: 2559600
ucccaggcuauaauaauga

SEQ ID NO: 2559602 - RNA, 19 nt, Artificial Sequence
  Description of Artificial Sequence: Synthetic oligonucleotide
  Sense strand starting at position 2321 of SEQ ID NO: 1888826
auuauuauagccugggaua

SEQ ID NO: 2559603 - RNA, 19 nt, Artificial Sequence
  Description of Artificial Sequence: Synthetic oligonucleotide
  Antisense strand to SEQ ID NO: 2559602
uaucccaggcuauaauaau

SEQ ID NO: 2559604 - RNA, 19 nt, Artificial Sequence
  Description of Artificial Sequence: Synthetic oligonucleotide
  Sense strand starting at position 2322 of SEQ ID NO: 1888826
uuauuauagccugggauac

SEQ ID NO: 2559605 - RNA, 19 nt, Artificial Sequence
  Description of Artificial Sequence: Synthetic oligonucleotide
  Antisense strand to SEQ ID NO: 2559604
guaucccaggcuauaauaa

SEQ ID NO: 2559606 - RNA, 19 nt, Artificial Sequence
  Description of Artificial Sequence: Synthetic oligonucleotide
  Sense strand starting at position 2323 of SEQ ID NO: 1888826
uauuauagccugggauaca

SEQ ID NO: 2559607 - RNA, 19 nt, Artificial Sequence
  Description of Artificial Sequence: Synthetic oligonucleotide
  Antisense strand to SEQ ID NO: 2559606
uguaucccaggcuauaaua

SEQ ID NO: 2559608 - RNA, 19 nt, Artificial Sequence
  Description of Artificial Sequence: Synthetic oligonucleotide
  Sense strand starting at position 2332 of SEQ ID NO: 1888826
cugggauacagaugccuua

SEQ ID NO: 2559609 - RNA, 19 nt, Artificial Sequence
  Description of Artificial Sequence: Synthetic oligonucleotide
  Antisense strand to SEQ ID NO: 2559608
uaaggcaucuguaucccag

SEQ ID NO: 2559610 - RNA, 19 nt, Artificial Sequence
  Description of Artificial Sequence: Synthetic oligonucleotide
  Sense strand starting at position 2577 of SEQ ID NO: 1888826
gauaauggcucacugcaga

SEQ ID NO: 2559611 - RNA, 19 nt, Artificial Sequence
  Description of Artificial Sequence: Synthetic oligonucleotide
  Antisense strand to SEQ ID NO: 2559610
ucugcagugagccauuauc

SEQ ID NO: 2559612 - RNA, 19 nt, Artificial Sequence
  Description of Artificial Sequence: Synthetic oligonucleotide
  Sense strand starting at position 2794 of SEQ ID NO: 1888826
gcuuuaagucuguaauaca

SEQ ID NO: 2559613 - RNA, 19 nt, Artificial Sequence
  Description of Artificial Sequence: Synthetic oligonucleotide
  Antisense strand to SEQ ID NO: 2559612
uguauuacagacuuaaagc

SEQ ID NO: 2559614 - RNA, 19 nt, Artificial Sequence
  Description of Artificial Sequence: Synthetic oligonucleotide
  Sense strand starting at position 2801 of SEQ ID NO: 1888826
gucuguaauacagacaugu

SEQ ID NO: 2559615 - RNA, 19 nt, Artificial Sequence
  Description of Artificial Sequence: Synthetic oligonucleotide
  Antisense strand to SEQ ID NO: 2559614
acaugucuguauuacagac

SEQ ID NO: 2559616 - RNA, 19 nt, Artificial Sequence
  Description of Artificial Sequence: Synthetic oligonucleotide
  Sense strand starting at position 2820 of SEQ ID NO: 1888826
gggucuguuccuuaacuuu

SEQ ID NO: 2559617 - RNA, 19 nt, Artificial Sequence
  Description of Artificial Sequence: Synthetic oligonucleotide
  Antisense strand to SEQ ID NO: 2559616
aaaguuaaggaacagaccc

SEQ ID NO: 2559618 - RNA, 19 nt, Artificial Sequence
  Description of Artificial Sequence: Synthetic oligonucleotide
  Sense strand starting at position 2877 of SEQ ID NO: 1888826
ucuauauugcuauagagau

SEQ ID NO: 2559619 - RNA, 19 nt, Artificial Sequence
  Description of Artificial Sequence: Synthetic oligonucleotide
  Antisense strand to SEQ ID NO: 2559618
aucucuauagcaauauaga

SEQ ID NO: 2559620 - RNA, 19 nt, Artificial Sequence
  Description of Artificial Sequence: Synthetic oligonucleotide
  Sense strand starting at position 2890 of SEQ ID NO: 1888826
agagauagauugcuaauug

SEQ ID NO: 2559621 - RNA, 19 nt, Artificial Sequence
  Description of Artificial Sequence: Synthetic oligonucleotide
  Antisense strand to SEQ ID NO: 2559620
caauuagcaaucuaucucu

SEQ ID NO: 2559622 - RNA, 19 nt, Artificial Sequence
  Description of Artificial Sequence: Synthetic oligonucleotide
  Sense strand starting at position 2900 of SEQ ID NO: 1888826
ugcuaauugguagaugaua

SEQ ID NO: 2559623 - RNA, 19 nt, Artificial Sequence
  Description of Artificial Sequence: Synthetic oligonucleotide
  Antisense strand to SEQ ID NO: 2559622
uaucaucuaccaauuagca

SEQ ID NO: 2559624 - RNA, 19 nt, Artificial Sequence
  Description of Artificial Sequence: Synthetic oligonucleotide
  Sense strand starting at position 2908 of SEQ ID NO: 1888826
gguagaugauaaguauaua

SEQ ID NO: 2559625 - RNA, 19 nt, Artificial Sequence
  Description of Artificial Sequence: Synthetic oligonucleotide
  Antisense strand to SEQ ID NO: 2559624
uauauacuuaucaucuacc

SEQ ID NO: 2559626 - RNA, 19 nt, Artificial Sequence
  Description of Artificial Sequence: Synthetic oligonucleotide
  Sense strand starting at position 2964 of SEQ ID NO: 1888826
acagauacauccuuuaguc

SEQ ID NO: 2559627 - RNA, 19 nt, Artificial Sequence
  Description of Artificial Sequence: Synthetic oligonucleotide
  Antisense strand to SEQ ID NO: 2559626
gacuaaaggauguaucugu

SEQ ID NO: 2559628 - RNA, 19 nt, Artificial Sequence
  Description of Artificial Sequence: Synthetic oligonucleotide
  Sense strand starting at position 3151 of SEQ ID NO: 1888826
guggaaggaugucugauua

SEQ ID NO: 2559629 - RNA, 19 nt, Artificial Sequence
  Description of Artificial Sequence: Synthetic oligonucleotide
  Antisense strand to SEQ ID NO: 2559628
uaaucagacauccuuccac

SEQ ID NO: 2559630 - RNA, 19 nt, Artificial Sequence
  Description of Artificial Sequence: Synthetic oligonucleotide
  Sense strand starting at position 3161 of SEQ ID NO: 1888826
gucugauuacaggguauaa

SEQ ID NO: 2559631 - RNA, 19 nt, Artificial Sequence
  Description of Artificial Sequence: Synthetic oligonucleotide
  Antisense strand to SEQ ID NO: 2559630
uuauacccuguaaucagac

SEQ ID NO: 2559632 - RNA, 19 nt, Artificial Sequence
  Description of Artificial Sequence: Synthetic oligonucleotide
  Sense strand starting at position 3312 of SEQ ID NO: 1888826
uaucuuguauuugagagau

SEQ ID NO: 2559633 - RNA, 19 nt, Artificial Sequence
  Description of Artificial Sequence: Synthetic oligonucleotide
  Antisense strand to SEQ ID NO: 2559632
aucucucaaauacaagaua

SEQ ID NO: 2559634 - RNA, 19 nt, Artificial Sequence
  Description of Artificial Sequence: Synthetic oligonucleotide
  Sense strand starting at position 3314 of SEQ ID NO: 1888826
ucuuguauuugagagauac

SEQ ID NO: 2559635 - RNA, 19 nt, Artificial Sequence
  Description of Artificial Sequence: Synthetic oligonucleotide
  Antisense strand to SEQ ID NO: 2559634
guaucucucaaauacaaga

SEQ ID NO: 2559636 - RNA, 19 nt, Artificial Sequence
  Description of Artificial Sequence: Synthetic oligonucleotide
  Sense strand starting at position 3344 of SEQ ID NO: 1888826
uuuguagauagagguugaa

SEQ ID NO: 2559637 - RNA, 19 nt, Artificial Sequence
  Description of Artificial Sequence: Synthetic oligonucleotide
  Antisense strand to SEQ ID NO: 2559636
uucaaccucuaucuacaaa

SEQ ID NO: 2559638 - RNA, 19 nt, Artificial Sequence
  Description of Artificial Sequence: Synthetic oligonucleotide
  Sense strand starting at position 3577 of SEQ ID NO: 1888826
gaugauuucugcuagagga

SEQ ID NO: 2559639 - RNA, 19 nt, Artificial Sequence
  Description of Artificial Sequence: Synthetic oligonucleotide
  Antisense strand to SEQ ID NO: 2559638
uccucuagcagaaaucauc

SEQ ID NO: 2559640 - RNA, 19 nt, Artificial Sequence
  Description of Artificial Sequence: Synthetic oligonucleotide
  Sense strand starting at position 3587 of SEQ ID NO: 1888826
gcuagaggauaaguagaua

SEQ ID NO: 2559641 - RNA, 19 nt, Artificial Sequence
  Description of Artificial Sequence: Synthetic oligonucleotide
  Antisense strand to SEQ ID NO: 2559640
uaucuacuuauccucuagc

SEQ ID NO: 2559642 - RNA, 19 nt, Artificial Sequence
  Description of Artificial Sequence: Synthetic oligonucleotide
  Sense strand starting at position 3598 of SEQ ID NO: 1888826
aguagauagcuuugacaug

SEQ ID NO: 2559643 - RNA, 19 nt, Artificial Sequence
  Description of Artificial Sequence: Synthetic oligonucleotide
  Antisense strand to SEQ ID NO: 2559642
caugucaaagcuaucuacu

SEQ ID NO: 2559644 - RNA, 19 nt, Artificial Sequence
  Description of Artificial Sequence: Synthetic oligonucleotide
  Sense strand starting at position 3650 of SEQ ID NO: 1888826
aggagugguucagugacaa

SEQ ID NO: 2559645 - RNA, 19 nt, Artificial Sequence
  Description of Artificial Sequence: Synthetic oligonucleotide
  Antisense strand to SEQ ID NO: 2559644
uugucacugaaccacuccu

SEQ ID NO: 2559646 - RNA, 19 nt, Artificial Sequence
  Description of Artificial Sequence: Synthetic oligonucleotide
  Sense strand starting at position 3670 of SEQ ID NO: 1888826
uggaaauaauugucaugcu

SEQ ID NO: 2559647 - RNA, 19 nt, Artificial Sequence
  Description of Artificial Sequence: Synthetic oligonucleotide
  Antisense strand to SEQ ID NO: 2559646
agcaugacaauuauuucca

SEQ ID NO: 2559648 - RNA, 19 nt, Artificial Sequence
  Description of Artificial Sequence: Synthetic oligonucleotide
  Sense strand starting at position 249 of SEQ ID NO: 1888827
acacuauauuagucugcca

SEQ ID NO: 2559649 - RNA, 19 nt, Artificial Sequence
  Description of Artificial Sequence: Synthetic oligonucleotide
  Antisense strand to SEQ ID NO: 2559648
uggcagacuaauauagugu

SEQ ID NO: 2559650 - RNA, 19 nt, Artificial Sequence
  Description of Artificial Sequence: Synthetic oligonucleotide
  Sense strand starting at position 251 of SEQ ID NO: 1888827
acuauauuagucugccaca

SEQ ID NO: 2559651 - RNA, 19 nt, Artificial Sequence
  Description of Artificial Sequence: Synthetic oligonucleotide
  Antisense strand to SEQ ID NO: 2559650
uguggcagacuaauauagu

SEQ ID NO: 2559652 - RNA, 19 nt, Artificial Sequence
  Description of Artificial Sequence: Synthetic oligonucleotide
  Sense strand starting at position 256 of SEQ ID NO: 1888827
auuagucugccacaacaga

SEQ ID NO: 2559653 - RNA, 19 nt, Artificial Sequence
  Description of Artificial Sequence: Synthetic oligonucleotide
  Antisense strand to SEQ ID NO: 2559652
ucuguuguggcagacuaau

SEQ ID NO: 2559654 - RNA, 19 nt, Artificial Sequence
  Description of Artificial Sequence: Synthetic oligonucleotide
  Sense strand starting at position 660 of SEQ ID NO: 1888827
cuggccuuggguuaagaaa

SEQ ID NO: 2559655 - RNA, 19 nt, Artificial Sequence
  Description of Artificial Sequence: Synthetic oligonucleotide
  Antisense strand to SEQ ID NO: 2559654
uuucuuaacccaaggccag

SEQ ID NO: 2559656 - RNA, 19 nt, Artificial Sequence
  Description of Artificial Sequence: Synthetic oligonucleotide
  Sense strand starting at position 1038 of SEQ ID NO: 1888827
ccaucaggaugacuguaau

SEQ ID NO: 2559657 - RNA, 19 nt, Artificial Sequence
  Description of Artificial Sequence: Synthetic oligonucleotide
  Antisense strand to SEQ ID NO: 2559656
auuacagucauccugaugg

SEQ ID NO: 2559658 - RNA, 19 nt, Artificial Sequence
  Description of Artificial Sequence: Synthetic oligonucleotide
  Sense strand starting at position 1365 of SEQ ID NO: 1888827
acaucugcacaauggaauu

SEQ ID NO: 2559659 - RNA, 19 nt, Artificial Sequence
  Description of Artificial Sequence: Synthetic oligonucleotide
  Antisense strand to SEQ ID NO: 2559658
aauuccauugugcagaugu

SEQ ID NO: 2559660 - RNA, 19 nt, Artificial Sequence
  Description of Artificial Sequence: Synthetic oligonucleotide
  Sense strand starting at position 1583 of SEQ ID NO: 1888827
guagauuagugauuacuua

SEQ ID NO: 2559661 - RNA, 19 nt, Artificial Sequence
  Description of Artificial Sequence: Synthetic oligonucleotide
  Antisense strand to SEQ ID NO: 2559660
uaaguaaucacuaaucuac

SEQ ID NO: 2559662 - RNA, 19 nt, Artificial Sequence
  Description of Artificial Sequence: Synthetic oligonucleotide
  Sense strand starting at position 1666 of SEQ ID NO: 1888827
gagugaugacaguguucua

SEQ ID NO: 2559663 - RNA, 19 nt, Artificial Sequence
  Description of Artificial Sequence: Synthetic oligonucleotide
  Antisense strand to SEQ ID NO: 2559662
uagaacacugucaucacuc

SEQ ID NO: 2559664 - RNA, 19 nt, Artificial Sequence
  Description of Artificial Sequence: Synthetic oligonucleotide
  Sense strand starting at position 1770 of SEQ ID NO: 1888827
ucaauaagguuguuucuaa

SEQ ID NO: 2559665 - RNA, 19 nt, Artificial Sequence
  Description of Artificial Sequence: Synthetic oligonucleotide
  Antisense strand to SEQ ID NO: 2559664
uuagaaacaaccuuauuga

SEQ ID NO: 2559666 - RNA, 19 nt, Artificial Sequence
  Description of Artificial Sequence: Synthetic oligonucleotide
  Sense strand starting at position 1820 of SEQ ID NO: 1888827
augagugcagaauauaagu

SEQ ID NO: 2559667 - RNA, 19 nt, Artificial Sequence
  Description of Artificial Sequence: Synthetic oligonucleotide
  Antisense strand to SEQ ID NO: 2559666
acuuauauucugcacucau

SEQ ID NO: 2559668 - RNA, 19 nt, Artificial Sequence
  Description of Artificial Sequence: Synthetic oligonucleotide
  Sense strand starting at position 1825 of SEQ ID NO: 1888827
ugcagaauauaagugcaau

SEQ ID NO: 2559669 - RNA, 19 nt, Artificial Sequence
  Description of Artificial Sequence: Synthetic oligonucleotide
  Antisense strand to SEQ ID NO: 2559668
auugcacuuauauucugca

SEQ ID NO: 2559670 - RNA, 19 nt, Artificial Sequence
  Description of Artificial Sequence: Synthetic oligonucleotide
  Sense strand starting at position 2041 of SEQ ID NO: 1888827
aucccuuuccugugguuaa

SEQ ID NO: 2559671 - RNA, 19 nt, Artificial Sequence
  Description of Artificial Sequence: Synthetic oligonucleotide
  Antisense strand to SEQ ID NO: 2559670
uuaaccacaggaaagggau

SEQ ID NO: 2559672 - RNA, 19 nt, Artificial Sequence
  Description of Artificial Sequence: Synthetic oligonucleotide
  Sense strand starting at position 2045 of SEQ ID NO: 1888827
cuuuccugugguuaacaga

SEQ ID NO: 2559673 - RNA, 19 nt, Artificial Sequence
  Description of Artificial Sequence: Synthetic oligonucleotide
  Antisense strand to SEQ ID NO: 2559672
ucuguuaaccacaggaaag

SEQ ID NO: 2559674 - RNA, 19 nt, Artificial Sequence
  Description of Artificial Sequence: Synthetic oligonucleotide
  Sense strand starting at position 2054 of SEQ ID NO: 1888827
gguuaacagagguguuuaa

SEQ ID NO: 2559675 - RNA, 19 nt, Artificial Sequence
  Description of Artificial Sequence: Synthetic oligonucleotide
  Antisense strand to SEQ ID NO: 2559674
uuaaacaccucuguuaacc

SEQ ID NO: 2559676 - RNA, 19 nt, Artificial Sequence
  Description of Artificial Sequence: Synthetic oligonucleotide
  Sense strand starting at position 2125 of SEQ ID NO: 1888827
ucagaauacuacgugagau

SEQ ID NO: 2559677 - RNA, 19 nt, Artificial Sequence
  Description of Artificial Sequence: Synthetic oligonucleotide
  Antisense strand to SEQ ID NO: 2559676
aucucacguaguauucuga

SEQ ID NO: 2559678 - RNA, 19 nt, Artificial Sequence
  Description of Artificial Sequence: Synthetic oligonucleotide
  Sense strand starting at position 2147 of SEQ ID NO: 1888827
uuuaguggcuaugugagau

SEQ ID NO: 2559679 - RNA, 19 nt, Artificial Sequence
  Description of Artificial Sequence: Synthetic oligonucleotide
  Antisense strand to SEQ ID NO: 2559678
aucucacauagccacuaaa

SEQ ID NO: 2559680 - RNA, 19 nt, Artificial Sequence
  Description of Artificial Sequence: Synthetic oligonucleotide
  Sense strand starting at position 2192 of SEQ ID NO: 1888827
agauguaguucuuuccuua

SEQ ID NO: 2559681 - RNA, 19 nt, Artificial Sequence
  Description of Artificial Sequence: Synthetic oligonucleotide
  Antisense strand to SEQ ID NO: 2559680
uaaggaaagaacuacaucu

SEQ ID NO: 2559682 - RNA, 19 nt, Artificial Sequence
  Description of Artificial Sequence: Synthetic oligonucleotide
  Sense strand starting at position 2336 of SEQ ID NO: 1888827
ugagcugagccuugaaaga

SEQ ID NO: 2559683 - RNA, 19 nt, Artificial Sequence
  Description of Artificial Sequence: Synthetic oligonucleotide
  Antisense strand to SEQ ID NO: 2559682
ucuuucaaggcucagcuca

SEQ ID NO: 2559684 - RNA, 19 nt, Artificial Sequence
  Description of Artificial Sequence: Synthetic oligonucleotide
  Sense strand starting at position 2397 of SEQ ID NO: 1888827
uggagaauauaacaagcaa

SEQ ID NO: 2559685 - RNA, 19 nt, Artificial Sequence
  Description of Artificial Sequence: Synthetic oligonucleotide
  Antisense strand to SEQ ID NO: 2559684
uugcuuguuauauucucca

SEQ ID NO: 2559686 - RNA, 19 nt, Artificial Sequence
  Description of Artificial Sequence: Synthetic oligonucleotide
  Sense strand starting at position 2418 of SEQ ID NO: 1888827
ggacauaaaugguagaaau

SEQ ID NO: 2559687 - RNA, 19 nt, Artificial Sequence
  Description of Artificial Sequence: Synthetic oligonucleotide
  Antisense strand to SEQ ID NO: 2559686
auuucuaccauuuaugucc

SEQ ID NO: 2559688 - RNA, 19 nt, Artificial Sequence
  Description of Artificial Sequence: Synthetic oligonucleotide
  Sense strand starting at position 2428 of SEQ ID NO: 1888827
gguagaaaugucuggcauu

SEQ ID NO: 2559689 - RNA, 19 nt, Artificial Sequence
  Description of Artificial Sequence: Synthetic oligonucleotide
  Antisense strand to SEQ ID NO: 2559688
aaugccagacauuucuacc

SEQ ID NO: 2559690 - RNA, 19 nt, Artificial Sequence
  Description of Artificial Sequence: Synthetic oligonucleotide
  Sense strand starting at position 2440 of SEQ ID NO: 1888827
uggcauuuguaugauauag

SEQ ID NO: 2559691 - RNA, 19 nt, Artificial Sequence
  Description of Artificial Sequence: Synthetic oligonucleotide
  Antisense strand to SEQ ID NO: 2559690
cuauaucauacaaaugcca

SEQ ID NO: 2559692 - RNA, 19 nt, Artificial Sequence
  Description of Artificial Sequence: Synthetic oligonucleotide
  Sense strand starting at position 2448 of SEQ ID NO: 1888827
guaugauauagcugugaug

SEQ ID NO: 2559693 - RNA, 19 nt, Artificial Sequence
  Description of Artificial Sequence: Synthetic oligonucleotide
  Antisense strand to SEQ ID NO: 2559692
caucacagcuauaucauac

SEQ ID NO: 2559694 - RNA, 19 nt, Artificial Sequence
  Description of Artificial Sequence: Synthetic oligonucleotide
  Sense strand starting at position 2450 of SEQ ID NO: 1888827
augauauagcugugaugca

SEQ ID NO: 2559695 - RNA, 19 nt, Artificial Sequence
  Description of Artificial Sequence: Synthetic oligonucleotide
  Antisense strand to SEQ ID NO: 2559694
ugcaucacagcuauaucau

SEQ ID NO: 2559696 - RNA, 19 nt, Artificial Sequence
  Description of Artificial Sequence: Synthetic oligonucleotide
  Sense strand starting at position 2514 of SEQ ID NO: 1888827
gucucugcucaaucgcauu

SEQ ID NO: 2559697 - RNA, 19 nt, Artificial Sequence
  Description of Artificial Sequence: Synthetic oligonucleotide
  Antisense strand to SEQ ID NO: 2559696
aaugcgauugagcagagac

SEQ ID NO: 2559698 - RNA, 19 nt, Artificial Sequence
  Description of Artificial Sequence: Synthetic oligonucleotide
  Sense strand starting at position 2536 of SEQ ID NO: 1888827
acacaaagaugacaagaua

SEQ ID NO: 2559699 - RNA, 19 nt, Artificial Sequence
  Description of Artificial Sequence: Synthetic oligonucleotide
  Antisense strand to SEQ ID NO: 2559698
uaucuugucaucuuugugu

SEQ ID NO: 2559700 - RNA, 19 nt, Artificial Sequence
  Description of Artificial Sequence: Synthetic oligonucleotide
  Sense strand starting at position 2571 of SEQ ID NO: 1888827
gucccaugucacuaucauc

SEQ ID NO: 2559701 - RNA, 19 nt, Artificial Sequence
  Description of Artificial Sequence: Synthetic oligonucleotide
  Antisense strand to SEQ ID NO: 2559700
gaugauagugacaugggac

SEQ ID NO: 2559702 - RNA, 19 nt, Artificial Sequence
  Description of Artificial Sequence: Synthetic oligonucleotide
  Sense strand starting at position 2604 of SEQ ID NO: 1888827
gcgucuuuccaagaaguua

SEQ ID NO: 2559703 - RNA, 19 nt, Artificial Sequence
  Description of Artificial Sequence: Synthetic oligonucleotide
  Antisense strand to SEQ ID NO: 2559702
uaacuucuuggaaagacgc

SEQ ID NO: 2559704 - RNA, 19 nt, Artificial Sequence
  Description of Artificial Sequence: Synthetic oligonucleotide
  Sense strand starting at position 2617 of SEQ ID NO: 1888827
aaguuagugucauuacgau

SEQ ID NO: 2559705 - RNA, 19 nt, Artificial Sequence
  Description of Artificial Sequence: Synthetic oligonucleotide
  Antisense strand to SEQ ID NO: 2559704
aucguaaugacacuaacuu

SEQ ID NO: 2559706 - RNA, 19 nt, Artificial Sequence
  Description of Artificial Sequence: Synthetic oligonucleotide
  Sense strand starting at position 2624 of SEQ ID NO: 1888827
ugucauuacgauugcaaga

SEQ ID NO: 2559707 - RNA, 19 nt, Artificial Sequence
  Description of Artificial Sequence: Synthetic oligonucleotide
  Antisense strand to SEQ ID NO: 2559706
ucuugcaaucguaaugaca

SEQ ID NO: 2559708 - RNA, 19 nt, Artificial Sequence
  Description of Artificial Sequence: Synthetic oligonucleotide
  Sense strand starting at position 2708 of SEQ ID NO: 1888827
cauggaucaggaggaguuu

SEQ ID NO: 2559709 - RNA, 19 nt, Artificial Sequence
  Description of Artificial Sequence: Synthetic oligonucleotide
  Antisense strand to SEQ ID NO: 2559708
aaacuccuccugauccaug

SEQ ID NO: 2559710 - RNA, 19 nt, Artificial Sequence
  Description of Artificial Sequence: Synthetic oligonucleotide
  Sense strand starting at position 3194 of SEQ ID NO: 1888827
ugaugugcaacggacuaau

SEQ ID NO: 2559711 - RNA, 19 nt, Artificial Sequence
  Description of Artificial Sequence: Synthetic oligonucleotide
  Antisense strand to SEQ ID NO: 2559710
auuaguccguugcacauca

SEQ ID NO: 2559712 - RNA, 19 nt, Artificial Sequence
  Description of Artificial Sequence: Synthetic oligonucleotide
  Sense strand starting at position 3265 of SEQ ID NO: 1888827
guuuaaugcugagcaaaua

SEQ ID NO: 2559713 - RNA, 19 nt, Artificial Sequence
  Description of Artificial Sequence: Synthetic oligonucleotide
  Antisense strand to SEQ ID NO: 2559712
uauuugcucagcauuaaac

SEQ ID NO: 2559714 - RNA, 19 nt, Artificial Sequence
  Description of Artificial Sequence: Synthetic oligonucleotide
  Sense strand starting at position 3423 of SEQ ID NO: 1888827
ggccauaugaauggagauu

SEQ ID NO: 2559715 - RNA, 19 nt, Artificial Sequence
  Description of Artificial Sequence: Synthetic oligonucleotide
  Antisense strand to SEQ ID NO: 2559714
aaucuccauucauauggcc

SEQ ID NO: 2559716 - RNA, 19 nt, Artificial Sequence
  Description of Artificial Sequence: Synthetic oligonucleotide
  Sense strand starting at position 3462 of SEQ ID NO: 1888827
gguagaaauauguggcauu

SEQ ID NO: 2559717 - RNA, 19 nt, Artificial Sequence
  Description of Artificial Sequence: Synthetic oligonucleotide
  Antisense strand to SEQ ID NO: 2559716
aaugccacauauuucuacc

SEQ ID NO: 2559718 - RNA, 19 nt, Artificial Sequence
  Description of Artificial Sequence: Synthetic oligonucleotide
  Sense strand starting at position 3473 of SEQ ID NO: 1888827
guggcauuuguaugguaug

SEQ ID NO: 2559719 - RNA, 19 nt, Artificial Sequence
  Description of Artificial Sequence: Synthetic oligonucleotide
  Antisense strand to SEQ ID NO: 2559718
cauaccauacaaaugccac

SEQ ID NO: 2559720 - RNA, 19 nt, Artificial Sequence
  Description of Artificial Sequence: Synthetic oligonucleotide
  Sense strand starting at position 3484 of SEQ ID NO: 1888827
augguauggcugugauaca

SEQ ID NO: 2559721 - RNA, 19 nt, Artificial Sequence
  Description of Artificial Sequence: Synthetic oligonucleotide
  Antisense strand to SEQ ID NO: 2559720
uguaucacagccauaccau

SEQ ID NO: 2559722 - RNA, 19 nt, Artificial Sequence
  Description of Artificial Sequence: Synthetic oligonucleotide
  Sense strand starting at position 3665 of SEQ ID NO: 1888827
acagauggugcauguauau

SEQ ID NO: 2559723 - RNA, 19 nt, Artificial Sequence
  Description of Artificial Sequence: Synthetic oligonucleotide
  Antisense strand to SEQ ID NO: 2559722
auauacaugcaccaucugu

SEQ ID NO: 2559724 - RNA, 19 nt, Artificial Sequence
  Description of Artificial Sequence: Synthetic oligonucleotide
  Sense strand starting at position 3742 of SEQ ID NO: 1888827
auaugcaaagacugguaua

SEQ ID NO: 2559725 - RNA, 19 nt, Artificial Sequence
  Description of Artificial Sequence: Synthetic oligonucleotide
  Antisense strand to SEQ ID NO: 2559724
uauaccagucuuugcauau

SEQ ID NO: 2559726 - RNA, 19 nt, Artificial Sequence
  Description of Artificial Sequence: Synthetic oligonucleotide
  Sense strand starting at position 3753 of SEQ ID NO: 1888827
cugguauauguauguacca

SEQ ID NO: 2559727 - RNA, 19 nt, Artificial Sequence
  Description of Artificial Sequence: Synthetic oligonucleotide
  Antisense strand to SEQ ID NO: 2559726
ugguacauacauauaccag

SEQ ID NO: 2559728 - RNA, 19 nt, Artificial Sequence
  Description of Artificial Sequence: Synthetic oligonucleotide
  Sense strand starting at position 7 of SEQ ID NO: 1888828
agucuuguaccucaucaga

SEQ ID NO: 2559729 - RNA, 19 nt, Artificial Sequence
  Description of Artificial Sequence: Synthetic oligonucleotide
  Antisense strand to SEQ ID NO: 2559728
ucugaugagguacaagacu

SEQ ID NO: 2559730 - RNA, 19 nt, Artificial Sequence
  Description of Artificial Sequence: Synthetic oligonucleotide
  Sense strand starting at position 62 of SEQ ID NO: 1888828
gaaacuugccaagggacau

SEQ ID NO: 2559731 - RNA, 19 nt, Artificial Sequence
  Description of Artificial Sequence: Synthetic oligonucleotide
  Antisense strand to SEQ ID NO: 2559730
augucccuuggcaaguuuc

SEQ ID NO: 2559732 - RNA, 19 nt, Artificial Sequence
  Description of Artificial Sequence: Synthetic oligonucleotide
  Sense strand starting at position 87 of SEQ ID NO: 1888828
gcaagugggagaugaucuu

SEQ ID NO: 2559733 - RNA, 19 nt, Artificial Sequence
  Description of Artificial Sequence: Synthetic oligonucleotide
  Antisense strand to SEQ ID NO: 2559732
aagaucaucucccacuugc

SEQ ID NO: 2559734 - RNA, 19 nt, Artificial Sequence
  Description of Artificial Sequence: Synthetic oligonucleotide
  Sense strand starting at position 137 of SEQ ID NO: 1888828
gugcucuggaaggaucaca

SEQ ID NO: 2559735 - RNA, 19 nt, Artificial Sequence
  Description of Artificial Sequence: Synthetic oligonucleotide
  Antisense strand to SEQ ID NO: 2559734
ugugauccuuccagagcac

SEQ ID NO: 2559736 - RNA, 19 nt, Artificial Sequence
  Description of Artificial Sequence: Synthetic oligonucleotide
  Sense strand starting at position 214 of SEQ ID NO: 1888828
uagauauugccaggugacu

SEQ ID NO: 2559737 - RNA, 19 nt, Artificial Sequence
  Description of Artificial Sequence: Synthetic oligonucleotide
  Antisense strand to SEQ ID NO: 2559736
agucaccuggcaauaucua

SEQ ID NO: 2559738 - RNA, 19 nt, Artificial Sequence
  Description of Artificial Sequence: Synthetic oligonucleotide
  Sense strand starting at position 270 of SEQ ID NO: 1888828
gcugaagguccagguaaau

SEQ ID NO: 2559739 - RNA, 19 nt, Artificial Sequence
  Description of Artificial Sequence: Synthetic oligonucleotide
  Antisense strand to SEQ ID NO: 2559738
auuuaccuggaccuucagc

SEQ ID NO: 2559740 - RNA, 19 nt, Artificial Sequence
  Description of Artificial Sequence: Synthetic oligonucleotide
  Sense strand starting at position 281 of SEQ ID NO: 1888828
agguaaauuccucagggca

SEQ ID NO: 2559741 - RNA, 19 nt, Artificial Sequence
  Description of Artificial Sequence: Synthetic oligonucleotide
  Antisense strand to SEQ ID NO: 2559740
ugcccugaggaauuuaccu

SEQ ID NO: 2559742 - RNA, 19 nt, Artificial Sequence
  Description of Artificial Sequence: Synthetic oligonucleotide
  Sense strand starting at position 310 of SEQ ID NO: 1888828
aaguaaagucagggucuuu

SEQ ID NO: 2559743 - RNA, 19 nt, Artificial Sequence
  Description of Artificial Sequence: Synthetic oligonucleotide
  Antisense strand to SEQ ID NO: 2559742
aaagacccugacuuuacuu

SEQ ID NO: 2559744 - RNA, 19 nt, Artificial Sequence
  Description of Artificial Sequence: Synthetic oligonucleotide
  Sense strand starting at position 582 of SEQ ID NO: 1888828
gcccuaacaguaugaauua

SEQ ID NO: 2559745 - RNA, 19 nt, Artificial Sequence
  Description of Artificial Sequence: Synthetic oligonucleotide
  Antisense strand to SEQ ID NO: 2559744
uaauucauacuguuagggc

SEQ ID NO: 2559746 - RNA, 19 nt, Artificial Sequence
  Description of Artificial Sequence: Synthetic oligonucleotide
  Sense strand starting at position 713 of SEQ ID NO: 1888828
aguggaugacauuacuguu

SEQ ID NO: 2559747 - RNA, 19 nt, Artificial Sequence
  Description of Artificial Sequence: Synthetic oligonucleotide
  Antisense strand to SEQ ID NO: 2559746
aacaguaaugucauccacu

SEQ ID NO: 2559748 - RNA, 19 nt, Artificial Sequence
  Description of Artificial Sequence: Synthetic oligonucleotide
  Sense strand starting at position 929 of SEQ ID NO: 1888828
ucaggucagucaucugaga

SEQ ID NO: 2559749 - RNA, 19 nt, Artificial Sequence
  Description of Artificial Sequence: Synthetic oligonucleotide
  Antisense strand to SEQ ID NO: 2559748
ucucagaugacugaccuga

SEQ ID NO: 2559750 - RNA, 19 nt, Artificial Sequence
  Description of Artificial Sequence: Synthetic oligonucleotide
  Sense strand starting at position 986 of SEQ ID NO: 1888828
ucuacuuuccaagggcaga

SEQ ID NO: 2559751 - RNA, 19 nt, Artificial Sequence
  Description of Artificial Sequence: Synthetic oligonucleotide
  Antisense strand to SEQ ID NO: 2559750
ucugcccuuggaaaguaga

SEQ ID NO: 2559752 - RNA, 19 nt, Artificial Sequence
  Description of Artificial Sequence: Synthetic oligonucleotide
  Sense strand starting at position 1001 of SEQ ID NO: 1888828
cagaguaggucacuugaua

SEQ ID NO: 2559753 - RNA, 19 nt, Artificial Sequence
  Description of Artificial Sequence: Synthetic oligonucleotide
  Antisense strand to SEQ ID NO: 2559752
uaucaagugaccuacucug

SEQ ID NO: 2559754 - RNA, 19 nt, Artificial Sequence
  Description of Artificial Sequence: Synthetic oligonucleotide
  Sense strand starting at position 1313 of SEQ ID NO: 1888828
ggcgcuaucauuuauuggu

SEQ ID NO: 2559755 - RNA, 19 nt, Artificial Sequence
  Description of Artificial Sequence: Synthetic oligonucleotide
  Antisense strand to SEQ ID NO: 2559754
accaauaaaugauagcgcc

SEQ ID NO: 2559756 - RNA, 19 nt, Artificial Sequence
  Description of Artificial Sequence: Synthetic oligonucleotide
  Sense strand starting at position 1319 of SEQ ID NO: 1888828
aucauuuauugguugcuua

SEQ ID NO: 2559757 - RNA, 19 nt, Artificial Sequence
  Description of Artificial Sequence: Synthetic oligonucleotide
  Antisense strand to SEQ ID NO: 2559756
uaagcaaccaauaaaugau

SEQ ID NO: 2559758 - RNA, 19 nt, Artificial Sequence
  Description of Artificial Sequence: Synthetic oligonucleotide
  Sense strand starting at position 1393 of SEQ ID NO: 1888828
ccaggaauccuaugaggua

SEQ ID NO: 2559759 - RNA, 19 nt, Artificial Sequence
  Description of Artificial Sequence: Synthetic oligonucleotide
  Antisense strand to SEQ ID NO: 2559758
uaccucauaggauuccugg

SEQ ID NO: 2559760 - RNA, 19 nt, Artificial Sequence
  Description of Artificial Sequence: Synthetic oligonucleotide
  Sense strand starting at position 1530 of SEQ ID NO: 1888828
uuggguacgagguaaaguu

SEQ ID NO: 2559761 - RNA, 19 nt, Artificial Sequence
  Description of Artificial Sequence: Synthetic oligonucleotide
  Antisense strand to SEQ ID NO: 2559760
aacuuuaccucguacccaa

SEQ ID NO: 2559762 - RNA, 19 nt, Artificial Sequence
  Description of Artificial Sequence: Synthetic oligonucleotide
  Sense strand starting at position 1591 of SEQ ID NO: 1888828
uccugaagucaggguuaac

SEQ ID NO: 2559763 - RNA, 19 nt, Artificial Sequence
  Description of Artificial Sequence: Synthetic oligonucleotide
  Antisense strand to SEQ ID NO: 2559762
guuaacccugacuucagga

SEQ ID NO: 2559764 - RNA, 19 nt, Artificial Sequence
  Description of Artificial Sequence: Synthetic oligonucleotide
  Sense strand starting at position 2324 of SEQ ID NO: 1888828
gggacaugcgaagauguga

SEQ ID NO: 2559765 - RNA, 19 nt, Artificial Sequence
  Description of Artificial Sequence: Synthetic oligonucleotide
  Antisense strand to SEQ ID NO: 2559764
ucacaucuucgcauguccc

SEQ ID NO: 2559766 - RNA, 19 nt, Artificial Sequence
  Description of Artificial Sequence: Synthetic oligonucleotide
  Sense strand starting at position 2399 of SEQ ID NO: 1888828
cgugaagacucaccgagaa

SEQ ID NO: 2559767 - RNA, 19 nt, Artificial Sequence
  Description of Artificial Sequence: Synthetic oligonucleotide
  Antisense strand to SEQ ID NO: 2559766
uucucggugagucuucacg

SEQ ID NO: 2559768 - RNA, 19 nt, Artificial Sequence
  Description of Artificial Sequence: Synthetic oligonucleotide
  Sense strand starting at position 2635 of SEQ ID NO: 1888828
cgcaacugagaguaaagau

SEQ ID NO: 2559769 - RNA, 19 nt, Artificial Sequence
  Description of Artificial Sequence: Synthetic oligonucleotide
  Antisense strand to SEQ ID NO: 2559768
aucuuuacucucaguugcg

SEQ ID NO: 2559770 - RNA, 19 nt, Artificial Sequence
  Description of Artificial Sequence: Synthetic oligonucleotide
  Sense strand starting at position 2644 of SEQ ID NO: 1888828
gaguaaagauggccgagaa

SEQ ID NO: 2559771 - RNA, 19 nt, Artificial Sequence
  Description of Artificial Sequence: Synthetic oligonucleotide
  Antisense strand to SEQ ID NO: 2559770
uucucggccaucuuuacuc

SEQ ID NO: 2559772 - RNA, 19 nt, Artificial Sequence
  Description of Artificial Sequence: Synthetic oligonucleotide
  Sense strand starting at position 2837 of SEQ ID NO: 1888828
cacugauggucaucuguag

SEQ ID NO: 2559773 - RNA, 19 nt, Artificial Sequence
  Description of Artificial Sequence: Synthetic oligonucleotide
  Antisense strand to SEQ ID NO: 2559772
cuacagaugaccaucagug

SEQ ID NO: 2559774 - RNA, 19 nt, Artificial Sequence
  Description of Artificial Sequence: Synthetic oligonucleotide
  Sense strand starting at position 2858 of SEQ ID NO: 1888828
ccuagauuaugguuugaaa

SEQ ID NO: 2559775 - RNA, 19 nt, Artificial Sequence
  Description of Artificial Sequence: Synthetic oligonucleotide
  Antisense strand to SEQ ID NO: 2559774
uuucaaaccauaaucuagg

SEQ ID NO: 2559776 - RNA, 19 nt, Artificial Sequence
  Description of Artificial Sequence: Synthetic oligonucleotide
  Sense strand starting at position 2901 of SEQ ID NO: 1888828
cguugauauccgccauugu

SEQ ID NO: 2559777 - RNA, 19 nt, Artificial Sequence
  Description of Artificial Sequence: Synthetic oligonucleotide
  Antisense strand to SEQ ID NO: 2559776
acaauggcggauaucaacg

SEQ ID NO: 2559778 - RNA, 19 nt, Artificial Sequence
  Description of Artificial Sequence: Synthetic oligonucleotide
  Sense strand starting at position 3039 of SEQ ID NO: 1888828
gggaucacugcccagagua

SEQ ID NO: 2559779 - RNA, 19 nt, Artificial Sequence
  Description of Artificial Sequence: Synthetic oligonucleotide
  Antisense strand to SEQ ID NO: 2559778
uacucugggcagugauccc

SEQ ID NO: 2559780 - RNA, 19 nt, Artificial Sequence
  Description of Artificial Sequence: Synthetic oligonucleotide
  Sense strand starting at position 3136 of SEQ ID NO: 1888828
ggguuaguuccuugauaaa

SEQ ID NO: 2559781 - RNA, 19 nt, Artificial Sequence
  Description of Artificial Sequence: Synthetic oligonucleotide
  Antisense strand to SEQ ID NO: 2559780
uuuaucaaggaacuaaccc

SEQ ID NO: 2559782 - RNA, 19 nt, Artificial Sequence
  Description of Artificial Sequence: Synthetic oligonucleotide
  Sense strand starting at position 3146 of SEQ ID NO: 1888828
cuugauaaaguuggaaagu

SEQ ID NO: 2559783 - RNA, 19 nt, Artificial Sequence
  Description of Artificial Sequence: Synthetic oligonucleotide
  Antisense strand to SEQ ID NO: 2559782
acuuuccaacuuuaucaag

SEQ ID NO: 2559784 - RNA, 19 nt, Artificial Sequence
  Description of Artificial Sequence: Synthetic oligonucleotide
  Sense strand starting at position 3167 of SEQ ID NO: 1888828
agauuuguguugcuuucuu

SEQ ID NO: 2559785 - RNA, 19 nt, Artificial Sequence
  Description of Artificial Sequence: Synthetic oligonucleotide
  Antisense strand to SEQ ID NO: 2559784
aagaaagcaacacaaaucu

SEQ ID NO: 2559786 - RNA, 19 nt, Artificial Sequence
  Description of Artificial Sequence: Synthetic oligonucleotide
  Sense strand starting at position 3174 of SEQ ID NO: 1888828
uguugcuuucuugcgugau

SEQ ID NO: 2559787 - RNA, 19 nt, Artificial Sequence
  Description of Artificial Sequence: Synthetic oligonucleotide
  Antisense strand to SEQ ID NO: 2559786
aucacgcaagaaagcaaca

SEQ ID NO: 2559788 - RNA, 19 nt, Artificial Sequence
  Description of Artificial Sequence: Synthetic oligonucleotide
  Sense strand starting at position 3252 of SEQ ID NO: 1888828
gggugaugucagggaguau

SEQ ID NO: 2559789 - RNA, 19 nt, Artificial Sequence
  Description of Artificial Sequence: Synthetic oligonucleotide
  Antisense strand to SEQ ID NO: 2559788
auacucccugacaucaccc

SEQ ID NO: 2559790 - RNA, 19 nt, Artificial Sequence
  Description of Artificial Sequence: Synthetic oligonucleotide
  Sense strand starting at position 3253 of SEQ ID NO: 1888828
ggugaugucagggaguaug

SEQ ID NO: 2559791 - RNA, 19 nt, Artificial Sequence
  Description of Artificial Sequence: Synthetic oligonucleotide
  Antisense strand to SEQ ID NO: 2559790
cauacucccugacaucacc

SEQ ID NO: 2559792 - RNA, 19 nt, Artificial Sequence
  Description of Artificial Sequence: Synthetic oligonucleotide
  Sense strand starting at position 3256 of SEQ ID NO: 1888828
gaugucagggaguaugagu

SEQ ID NO: 2559793 - RNA, 19 nt, Artificial Sequence
  Description of Artificial Sequence: Synthetic oligonucleotide
  Antisense strand to SEQ ID NO: 2559792
acucauacucccugacauc

SEQ ID NO: 2559794 - RNA, 19 nt, Artificial Sequence
  Description of Artificial Sequence: Synthetic oligonucleotide
  Sense strand starting at position 3267 of SEQ ID NO: 1888828
guaugagucuaacuaaggu

SEQ ID NO: 2559795 - RNA, 19 nt, Artificial Sequence
  Description of Artificial Sequence: Synthetic oligonucleotide
  Antisense strand to SEQ ID NO: 2559794
accuuaguuagacucauac

SEQ ID NO: 2559796 - RNA, 19 nt, Artificial Sequence
  Description of Artificial Sequence: Synthetic oligonucleotide
  Sense strand starting at position 3289 of SEQ ID NO: 1888828
gacuucguuggguaaguga

SEQ ID NO: 2559797 - RNA, 19 nt, Artificial Sequence
  Description of Artificial Sequence: Synthetic oligonucleotide
  Antisense strand to SEQ ID NO: 2559796
ucacuuacccaacgaaguc

SEQ ID NO: 2559798 - RNA, 19 nt, Artificial Sequence
  Description of Artificial Sequence: Synthetic oligonucleotide
  Sense strand starting at position 3336 of SEQ ID NO: 1888828
ugaucccaucuuuacgauu

SEQ ID NO: 2559799 - RNA, 19 nt, Artificial Sequence
  Description of Artificial Sequence: Synthetic oligonucleotide
  Antisense strand to SEQ ID NO: 2559798
aaucguaaagaugggauca

SEQ ID NO: 2559800 - RNA, 19 nt, Artificial Sequence
  Description of Artificial Sequence: Synthetic oligonucleotide
  Sense strand starting at position 3352 of SEQ ID NO: 1888828
auuaacuaacugugugaca

SEQ ID NO: 2559801 - RNA, 19 nt, Artificial Sequence
  Description of Artificial Sequence: Synthetic oligonucleotide
  Antisense strand to SEQ ID NO: 2559800
ugucacacaguuaguuaau

SEQ ID NO: 2559802 - RNA, 19 nt, Artificial Sequence
  Description of Artificial Sequence: Synthetic oligonucleotide
  Sense strand starting at position 3353 of SEQ ID NO: 1888828
uuaacuaacugugugacau

SEQ ID NO: 2559803 - RNA, 19 nt, Artificial Sequence
  Description of Artificial Sequence: Synthetic oligonucleotide
  Antisense strand to SEQ ID NO: 2559802
augucacacaguuaguuaa

SEQ ID NO: 2559804 - RNA, 19 nt, Artificial Sequence
  Description of Artificial Sequence: Synthetic oligonucleotide
  Sense strand starting at position 3809 of SEQ ID NO: 1888828
gcugcauaccuaggaauaa

SEQ ID NO: 2559805 - RNA, 19 nt, Artificial Sequence
  Description of Artificial Sequence: Synthetic oligonucleotide
  Antisense strand to SEQ ID NO: 2559804
uuauuccuagguaugcagc

SEQ ID NO: 2559806 - RNA, 19 nt, Artificial Sequence
  Description of Artificial Sequence: Synthetic oligonucleotide
  Sense strand starting at position 3974 of SEQ ID NO: 1888828
cuaguugugcugucagcca

SEQ ID NO: 2559807 - RNA, 19 nt, Artificial Sequence
  Description of Artificial Sequence: Synthetic oligonucleotide
  Antisense strand to SEQ ID NO: 2559806
uggcugacagcacaacuag

SEQ ID NO: 2559808 - RNA, 19 nt, Artificial Sequence
  Description of Artificial Sequence: Synthetic oligonucleotide
  Sense strand starting at position 9 of SEQ ID NO: 1888829
caugaagagucauuccaug

SEQ ID NO: 2559809 - RNA, 19 nt, Artificial Sequence
  Description of Artificial Sequence: Synthetic oligonucleotide
  Antisense strand to SEQ ID NO: 2559808
cauggaaugacucuucaug

SEQ ID NO: 2559810 - RNA, 19 nt, Artificial Sequence
  Description of Artificial Sequence: Synthetic oligonucleotide
  Sense strand starting at position 14 of SEQ ID NO: 1888829
agagucauuccaugaauga

SEQ ID NO: 2559811 - RNA, 19 nt, Artificial Sequence
  Description of Artificial Sequence: Synthetic oligonucleotide
  Antisense strand to SEQ ID NO: 2559810
ucauucauggaaugacucu

SEQ ID NO: 2559812 - RNA, 19 nt, Artificial Sequence
  Description of Artificial Sequence: Synthetic oligonucleotide
  Sense strand starting at position 45 of SEQ ID NO: 1888829
agcaaauaagcauaguuaa

SEQ ID NO: 2559813 - RNA, 19 nt, Artificial Sequence
  Description of Artificial Sequence: Synthetic oligonucleotide
  Antisense strand to SEQ ID NO: 2559812
uuaacuaugcuuauuugcu

SEQ ID NO: 2559814 - RNA, 19 nt, Artificial Sequence
  Description of Artificial Sequence: Synthetic oligonucleotide
  Sense strand starting at position 101 of SEQ ID NO: 1888829
auugaaguaucacuaugua

SEQ ID NO: 2559815 - RNA, 19 nt, Artificial Sequence
  Description of Artificial Sequence: Synthetic oligonucleotide
  Antisense strand to SEQ ID NO: 2559814
uacauagugauacuucaau

SEQ ID NO: 2559816 - RNA, 19 nt, Artificial Sequence
  Description of Artificial Sequence: Synthetic oligonucleotide
  Sense strand starting at position 179 of SEQ ID NO: 1888829
ggaaucacuuauguacauu

SEQ ID NO: 2559817 - RNA, 19 nt, Artificial Sequence
  Description of Artificial Sequence: Synthetic oligonucleotide
  Antisense strand to SEQ ID NO: 2559816
aauguacauaagugauucc

SEQ ID NO: 2559818 - RNA, 19 nt, Artificial Sequence
  Description of Artificial Sequence: Synthetic oligonucleotide
  Sense strand starting at position 600 of SEQ ID NO: 1888829
accugacuaugguuucuua

SEQ ID NO: 2559819 - RNA, 19 nt, Artificial Sequence
  Description of Artificial Sequence: Synthetic oligonucleotide
  Antisense strand to SEQ ID NO: 2559818
uaagaaaccauagucaggu

SEQ ID NO: 2559820 - RNA, 19 nt, Artificial Sequence
  Description of Artificial Sequence: Synthetic oligonucleotide
  Sense strand starting at position 742 of SEQ ID NO: 1888829
guggacuauacauggacau

SEQ ID NO: 2559821 - RNA, 19 nt, Artificial Sequence
  Description of Artificial Sequence: Synthetic oligonucleotide
  Antisense strand to SEQ ID NO: 2559820
auguccauguauaguccac

SEQ ID NO: 2559822 - RNA, 19 nt, Artificial Sequence
  Description of Artificial Sequence: Synthetic oligonucleotide
  Sense strand starting at position 761 of SEQ ID NO: 1888829
ugagaauuacuaggccuga

SEQ ID NO: 2559823 - RNA, 19 nt, Artificial Sequence
  Description of Artificial Sequence: Synthetic oligonucleotide
  Antisense strand to SEQ ID NO: 2559822
ucaggccuaguaauucuca

SEQ ID NO: 2559824 - RNA, 19 nt, Artificial Sequence
  Description of Artificial Sequence: Synthetic oligonucleotide
  Sense strand starting at position 762 of SEQ ID NO: 1888829
gagaauuacuaggccugaa

SEQ ID NO: 2559825 - RNA, 19 nt, Artificial Sequence
  Description of Artificial Sequence: Synthetic oligonucleotide
  Antisense strand to SEQ ID NO: 2559824
uucaggccuaguaauucuc

SEQ ID NO: 2559826 - RNA, 19 nt, Artificial Sequence
  Description of Artificial Sequence: Synthetic oligonucleotide
  Sense strand starting at position 907 of SEQ ID NO: 1888829
uggcauugugcugaagaag

SEQ ID NO: 2559827 - RNA, 19 nt, Artificial Sequence
  Description of Artificial Sequence: Synthetic oligonucleotide
  Antisense strand to SEQ ID NO: 2559826
cuucuucagcacaaugcca

SEQ ID NO: 2559828 - RNA, 19 nt, Artificial Sequence
  Description of Artificial Sequence: Synthetic oligonucleotide
  Sense strand starting at position 915 of SEQ ID NO: 1888829
ugcugaagaaguugacuuu

SEQ ID NO: 2559829 - RNA, 19 nt, Artificial Sequence
  Description of Artificial Sequence: Synthetic oligonucleotide
  Antisense strand to SEQ ID NO: 2559828
aaagucaacuucuucagca

SEQ ID NO: 2559830 - RNA, 19 nt, Artificial Sequence
  Description of Artificial Sequence: Synthetic oligonucleotide
  Sense strand starting at position 1210 of SEQ ID NO: 1888829
gguugugagccuucgccaa

SEQ ID NO: 2559831 - RNA, 19 nt, Artificial Sequence
  Description of Artificial Sequence: Synthetic oligonucleotide
  Antisense strand to SEQ ID NO: 2559830
uuggcgaaggcucacaacc

SEQ ID NO: 2559832 - RNA, 19 nt, Artificial Sequence
  Description of Artificial Sequence: Synthetic oligonucleotide
  Sense strand starting at position 1312 of SEQ ID NO: 1888829
cagucucuucugggaacuu

SEQ ID NO: 2559833 - RNA, 19 nt, Artificial Sequence
  Description of Artificial Sequence: Synthetic oligonucleotide
  Antisense strand to SEQ ID NO: 2559832
aaguucccagaagagacug

SEQ ID NO: 2559834 - RNA, 19 nt, Artificial Sequence
  Description of Artificial Sequence: Synthetic oligonucleotide
  Sense strand starting at position 1494 of SEQ ID NO: 1888829
gcuauaugcuaacugaauc

SEQ ID NO: 2559835 - RNA, 19 nt, Artificial Sequence
  Description of Artificial Sequence: Synthetic oligonucleotide
  Antisense strand to SEQ ID NO: 2559834
gauucaguuagcauauagc

SEQ ID NO: 2559836 - RNA, 19 nt, Artificial Sequence
  Description of Artificial Sequence: Synthetic oligonucleotide
  Sense strand starting at position 1505 of SEQ ID NO: 1888829
acugaaucugcccacaagu

SEQ ID NO: 2559837 - RNA, 19 nt, Artificial Sequence
  Description of Artificial Sequence: Synthetic oligonucleotide
  Antisense strand to SEQ ID NO: 2559836
acuugugggcagauucagu

SEQ ID NO: 2559838 - RNA, 19 nt, Artificial Sequence
  Description of Artificial Sequence: Synthetic oligonucleotide
  Sense strand starting at position 1518 of SEQ ID NO: 1888829
acaaguagcguacaucuaa

SEQ ID NO: 2559839 - RNA, 19 nt, Artificial Sequence
  Description of Artificial Sequence: Synthetic oligonucleotide
  Antisense strand to SEQ ID NO: 2559838
uuagauguacgcuacuugu

SEQ ID NO: 2559840 - RNA, 19 nt, Artificial Sequence
  Description of Artificial Sequence: Synthetic oligonucleotide
  Sense strand starting at position 1526 of SEQ ID NO: 1888829
cguacaucuaaugggaaga

SEQ ID NO: 2559841 - RNA, 19 nt, Artificial Sequence
  Description of Artificial Sequence: Synthetic oligonucleotide
  Antisense strand to SEQ ID NO: 2559840
ucuucccauuagauguacg

SEQ ID NO: 2559842 - RNA, 19 nt, Artificial Sequence
  Description of Artificial Sequence: Synthetic oligonucleotide
  Sense strand starting at position 1697 of SEQ ID NO: 1888829
cuaaguuuccaucaugucu

SEQ ID NO: 2559843 - RNA, 19 nt, Artificial Sequence
  Description of Artificial Sequence: Synthetic oligonucleotide
  Antisense strand to SEQ ID NO: 2559842
agacaugauggaaacuuag

SEQ ID NO: 2559844 - RNA, 19 nt, Artificial Sequence
  Description of Artificial Sequence: Synthetic oligonucleotide
  Sense strand starting at position 1705 of SEQ ID NO: 1888829
ccaucaugucuguauuaau

SEQ ID NO: 2559845 - RNA, 19 nt, Artificial Sequence
  Description of Artificial Sequence: Synthetic oligonucleotide
  Antisense strand to SEQ ID NO: 2559844
auuaauacagacaugaugg

SEQ ID NO: 2559846 - RNA, 19 nt, Artificial Sequence
  Description of Artificial Sequence: Synthetic oligonucleotide
  Sense strand starting at position 2271 of SEQ ID NO: 1888829
cugaauuucuugcuuguga

SEQ ID NO: 2559847 - RNA, 19 nt, Artificial Sequence
  Description of Artificial Sequence: Synthetic oligonucleotide
  Antisense strand to SEQ ID NO: 2559846
ucacaagcaagaaauucag

SEQ ID NO: 2559848 - RNA, 19 nt, Artificial Sequence
  Description of Artificial Sequence: Synthetic oligonucleotide
  Sense strand starting at position 2409 of SEQ ID NO: 1888829
cuggauaauccgggauaau

SEQ ID NO: 2559849 - RNA, 19 nt, Artificial Sequence
  Description of Artificial Sequence: Synthetic oligonucleotide
  Antisense strand to SEQ ID NO: 2559848
auuaucccggauuauccag

SEQ ID NO: 2559850 - RNA, 19 nt, Artificial Sequence
  Description of Artificial Sequence: Synthetic oligonucleotide
  Sense strand starting at position 2418 of SEQ ID NO: 1888829
ccgggauaaucuucccauc

SEQ ID NO: 2559851 - RNA, 19 nt, Artificial Sequence
  Description of Artificial Sequence: Synthetic oligonucleotide
  Antisense strand to SEQ ID NO: 2559850
gaugggaagauuaucccgg

SEQ ID NO: 2559852 - RNA, 19 nt, Artificial Sequence
  Description of Artificial Sequence: Synthetic oligonucleotide
  Sense strand starting at position 2420 of SEQ ID NO: 1888829
gggauaaucuucccaucuc

SEQ ID NO: 2559853 - RNA, 19 nt, Artificial Sequence
  Description of Artificial Sequence: Synthetic oligonucleotide
  Antisense strand to SEQ ID NO: 2559852
gagaugggaagauuauccc

SEQ ID NO: 2559854 - RNA, 19 nt, Artificial Sequence
  Description of Artificial Sequence: Synthetic oligonucleotide
  Sense strand starting at position 2518 of SEQ ID NO: 1888829
cauagacaucuucgaggau

SEQ ID NO: 2559855 - RNA, 19 nt, Artificial Sequence
  Description of Artificial Sequence: Synthetic oligonucleotide
  Antisense strand to SEQ ID NO: 2559854
auccucgaagaugucuaug

SEQ ID NO: 2559856 - RNA, 19 nt, Artificial Sequence
  Description of Artificial Sequence: Synthetic oligonucleotide
  Sense strand starting at position 2562 of SEQ ID NO: 1888829
cuaucucucuaccuggaga

SEQ ID NO: 2559857 - RNA, 19 nt, Artificial Sequence
  Description of Artificial Sequence: Synthetic oligonucleotide
  Antisense strand to SEQ ID NO: 2559856
ucuccagguagagagauag

SEQ ID NO: 2559858 - RNA, 19 nt, Artificial Sequence
  Description of Artificial Sequence: Synthetic oligonucleotide
  Sense strand starting at position 2564 of SEQ ID NO: 1888829
aucucucuaccuggagaaa

SEQ ID NO: 2559859 - RNA, 19 nt, Artificial Sequence
  Description of Artificial Sequence: Synthetic oligonucleotide
  Antisense strand to SEQ ID NO: 2559858
uuucuccagguagagagau

SEQ ID NO: 2559860 - RNA, 19 nt, Artificial Sequence
  Description of Artificial Sequence: Synthetic oligonucleotide
  Sense strand starting at position 2619 of SEQ ID NO: 1888829
uggcaucucccauaaugca

SEQ ID NO: 2559861 - RNA, 19 nt, Artificial Sequence
  Description of Artificial Sequence: Synthetic oligonucleotide
  Antisense strand to SEQ ID NO: 2559860
ugcauuaugggagaugcca

SEQ ID NO: 2559862 - RNA, 19 nt, Artificial Sequence
  Description of Artificial Sequence: Synthetic oligonucleotide
  Sense strand starting at position 2744 of SEQ ID NO: 1888829
gaaagaaacugucucaguc

SEQ ID NO: 2559863 - RNA, 19 nt, Artificial Sequence
  Description of Artificial Sequence: Synthetic oligonucleotide
  Antisense strand to SEQ ID NO: 2559862
gacugagacaguuucuuuc

SEQ ID NO: 2559864 - RNA, 19 nt, Artificial Sequence
  Description of Artificial Sequence: Synthetic oligonucleotide
  Sense strand starting at position 2769 of SEQ ID NO: 1888829
gguauagaguucuuuaucc

SEQ ID NO: 2559865 - RNA, 19 nt, Artificial Sequence
  Description of Artificial Sequence: Synthetic oligonucleotide
  Antisense strand to SEQ ID NO: 2559864
ggauaaagaacucuauacc

SEQ ID NO: 2559866 - RNA, 19 nt, Artificial Sequence
  Description of Artificial Sequence: Synthetic oligonucleotide
  Sense strand starting at position 2774 of SEQ ID NO: 1888829
agaguucuuuauccuugaa

SEQ ID NO: 2559867 - RNA, 19 nt, Artificial Sequence
  Description of Artificial Sequence: Synthetic oligonucleotide
  Antisense strand to SEQ ID NO: 2559866
uucaaggauaaagaacucu

SEQ ID NO: 2559868 - RNA, 19 nt, Artificial Sequence
  Description of Artificial Sequence: Synthetic oligonucleotide
  Sense strand starting at position 2776 of SEQ ID NO: 1888829
aguucuuuauccuugaaug

SEQ ID NO: 2559869 - RNA, 19 nt, Artificial Sequence
  Description of Artificial Sequence: Synthetic oligonucleotide
  Antisense strand to SEQ ID NO: 2559868
cauucaaggauaaagaacu

SEQ ID NO: 2559870 - RNA, 19 nt, Artificial Sequence
  Description of Artificial Sequence: Synthetic oligonucleotide
  Sense strand starting at position 2874 of SEQ ID NO: 1888829
cugacuaaauguguuaucu

SEQ ID NO: 2559871 - RNA, 19 nt, Artificial Sequence
  Description of Artificial Sequence: Synthetic oligonucleotide
  Antisense strand to SEQ ID NO: 2559870
agauaacacauuuagucag

SEQ ID NO: 2559872 - RNA, 19 nt, Artificial Sequence
  Description of Artificial Sequence: Synthetic oligonucleotide
  Sense strand starting at position 2878 of SEQ ID NO: 1888829
cuaaauguguuaucucaga

SEQ ID NO: 2559873 - RNA, 19 nt, Artificial Sequence
  Description of Artificial Sequence: Synthetic oligonucleotide
  Antisense strand to SEQ ID NO: 2559872
ucugagauaacacauuuag

SEQ ID NO: 2559874 - RNA, 19 nt, Artificial Sequence
  Description of Artificial Sequence: Synthetic oligonucleotide
  Sense strand starting at position 2894 of SEQ ID NO: 1888829
agagaugucugcucuuaaa

SEQ ID NO: 2559875 - RNA, 19 nt, Artificial Sequence
  Description of Artificial Sequence: Synthetic oligonucleotide
  Antisense strand to SEQ ID NO: 2559874
uuuaagagcagacaucucu

SEQ ID NO: 2559876 - RNA, 19 nt, Artificial Sequence
  Description of Artificial Sequence: Synthetic oligonucleotide
  Sense strand starting at position 3176 of SEQ ID NO: 1888829
gcgggaacaccugaaagua

SEQ ID NO: 2559877 - RNA, 19 nt, Artificial Sequence
  Description of Artificial Sequence: Synthetic oligonucleotide
  Antisense strand to SEQ ID NO: 2559876
uacuuucagguguucccgc

SEQ ID NO: 2559878 - RNA, 19 nt, Artificial Sequence
  Description of Artificial Sequence: Synthetic oligonucleotide
  Sense strand starting at position 3184 of SEQ ID NO: 1888829
accugaaaguaaucucaug

SEQ ID NO: 2559879 - RNA, 19 nt, Artificial Sequence
  Description of Artificial Sequence: Synthetic oligonucleotide
  Antisense strand to SEQ ID NO: 2559878
caugagauuacuuucaggu

SEQ ID NO: 2559880 - RNA, 19 nt, Artificial Sequence
  Description of Artificial Sequence: Synthetic oligonucleotide
  Sense strand starting at position 3382 of SEQ ID NO: 1888829
accuguacucuggaucuca

SEQ ID NO: 2559881 - RNA, 19 nt, Artificial Sequence
  Description of Artificial Sequence: Synthetic oligonucleotide
  Antisense strand to SEQ ID NO: 2559880
ugagauccagaguacaggu

SEQ ID NO: 2559882 - RNA, 19 nt, Artificial Sequence
  Description of Artificial Sequence: Synthetic oligonucleotide
  Sense strand starting at position 3889 of SEQ ID NO: 1888829
acagccaaguucuuugaaa

SEQ ID NO: 2559883 - RNA, 19 nt, Artificial Sequence
  Description of Artificial Sequence: Synthetic oligonucleotide
  Antisense strand to SEQ ID NO: 2559882
uuucaaagaacuuggcugu

SEQ ID NO: 2559884 - RNA, 19 nt, Artificial Sequence
  Description of Artificial Sequence: Synthetic oligonucleotide
  Sense strand starting at position 3890 of SEQ ID NO: 1888829
cagccaaguucuuugaaag

SEQ ID NO: 2559885 - RNA, 19 nt, Artificial Sequence
  Description of Artificial Sequence: Synthetic oligonucleotide
  Antisense strand to SEQ ID NO: 2559884
cuuucaaagaacuuggcug

SEQ ID NO: 2559886 - RNA, 19 nt, Artificial Sequence
  Description of Artificial Sequence: Synthetic oligonucleotide
  Sense strand starting at position 3891 of SEQ ID NO: 1888829
agccaaguucuuugaaaga

SEQ ID NO: 2559887 - RNA, 19 nt, Artificial Sequence
  Description of Artificial Sequence: Synthetic oligonucleotide
  Antisense strand to SEQ ID NO: 2559886
ucuuucaaagaacuuggcu

SEQ ID NO: 2559888 - RNA, 19 nt, Artificial Sequence
  Description of Artificial Sequence: Synthetic oligonucleotide
  Sense strand starting at position 105 of SEQ ID NO: 1888830
uccagcaccugugaauaua

SEQ ID NO: 2559889 - RNA, 19 nt, Artificial Sequence
  Description of Artificial Sequence: Synthetic oligonucleotide
  Antisense strand to SEQ ID NO: 2559888
uauauucacaggugcugga

SEQ ID NO: 2559890 - RNA, 19 nt, Artificial Sequence
  Description of Artificial Sequence: Synthetic oligonucleotide
  Sense strand starting at position 150 of SEQ ID NO: 1888830
agggaauguuauugaauau

SEQ ID NO: 2559891 - RNA, 19 nt, Artificial Sequence
  Description of Artificial Sequence: Synthetic oligonucleotide
  Antisense strand to SEQ ID NO: 2559890
auauucaauaacauucccu

SEQ ID NO: 2559892 - RNA, 19 nt, Artificial Sequence
  Description of Artificial Sequence: Synthetic oligonucleotide
  Sense strand starting at position 245 of SEQ ID NO: 1888830
aaauacguguguucuguuu

SEQ ID NO: 2559893 - RNA, 19 nt, Artificial Sequence
  Description of Artificial Sequence: Synthetic oligonucleotide
  Antisense strand to SEQ ID NO: 2559892
aaacagaacacacguauuu

SEQ ID NO: 2559894 - RNA, 19 nt, Artificial Sequence
  Description of Artificial Sequence: Synthetic oligonucleotide
  Sense strand starting at position 249 of SEQ ID NO: 1888830
acguguguucuguuucuaa

SEQ ID NO: 2559895 - RNA, 19 nt, Artificial Sequence
  Description of Artificial Sequence: Synthetic oligonucleotide
  Antisense strand to SEQ ID NO: 2559894
uuagaaacagaacacacgu

SEQ ID NO: 2559896 - RNA, 19 nt, Artificial Sequence
  Description of Artificial Sequence: Synthetic oligonucleotide
  Sense strand starting at position 272 of SEQ ID NO: 1888830
gcaaauucuuaagagggca

SEQ ID NO: 2559897 - RNA, 19 nt, Artificial Sequence
  Description of Artificial Sequence: Synthetic oligonucleotide
  Antisense strand to SEQ ID NO: 2559896
ugcccucuuaagaauuugc

SEQ ID NO: 2559898 - RNA, 19 nt, Artificial Sequence
  Description of Artificial Sequence: Synthetic oligonucleotide
  Sense strand starting at position 314 of SEQ ID NO: 1888830
auacauauugccuaguuua

SEQ ID NO: 2559899 - RNA, 19 nt, Artificial Sequence
  Description of Artificial Sequence: Synthetic oligonucleotide
  Antisense strand to SEQ ID NO: 2559898
uaaacuaggcaauauguau

SEQ ID NO: 2559900 - RNA, 19 nt, Artificial Sequence
  Description of Artificial Sequence: Synthetic oligonucleotide
  Sense strand starting at position 325 of SEQ ID NO: 1888830
cuaguuuacuguuggauuu

SEQ ID NO: 2559901 - RNA, 19 nt, Artificial Sequence
  Description of Artificial Sequence: Synthetic oligonucleotide
  Antisense strand to SEQ ID NO: 2559900
aaauccaacaguaaacuag

SEQ ID NO: 2559902 - RNA, 19 nt, Artificial Sequence
  Description of Artificial Sequence: Synthetic oligonucleotide
  Sense strand starting at position 459 of SEQ ID NO: 1888830
ccuggucacuccuuugaua

SEQ ID NO: 2559903 - RNA, 19 nt, Artificial Sequence
  Description of Artificial Sequence: Synthetic oligonucleotide
  Antisense strand to SEQ ID NO: 2559902
uaucaaaggagugaccagg

SEQ ID NO: 2559904 - RNA, 19 nt, Artificial Sequence
  Description of Artificial Sequence: Synthetic oligonucleotide
  Sense strand starting at position 461 of SEQ ID NO: 1888830
uggucacuccuuugauaau

SEQ ID NO: 2559905 - RNA, 19 nt, Artificial Sequence
  Description of Artificial Sequence: Synthetic oligonucleotide
  Antisense strand to SEQ ID NO: 2559904
auuaucaaaggagugacca

SEQ ID NO: 2559906 - RNA, 19 nt, Artificial Sequence
  Description of Artificial Sequence: Synthetic oligonucleotide
  Sense strand starting at position 462 of SEQ ID NO: 1888830
ggucacuccuuugauaauu

SEQ ID NO: 2559907 - RNA, 19 nt, Artificial Sequence
  Description of Artificial Sequence: Synthetic oligonucleotide
  Antisense strand to SEQ ID NO: 2559906
aauuaucaaaggagugacc

SEQ ID NO: 2559908 - RNA, 19 nt, Artificial Sequence
  Description of Artificial Sequence: Synthetic oligonucleotide
  Sense strand starting at position 1291 of SEQ ID NO: 1888830
gagaauuuaugugauugac

SEQ ID NO: 2559909 - RNA, 19 nt, Artificial Sequence
  Description of Artificial Sequence: Synthetic oligonucleotide
  Antisense strand to SEQ ID NO: 2559908
gucaaucacauaaauucuc

SEQ ID NO: 2559910 - RNA, 19 nt, Artificial Sequence
  Description of Artificial Sequence: Synthetic oligonucleotide
  Sense strand starting at position 1299 of SEQ ID NO: 1888830
augugauugacagggagua

SEQ ID NO: 2559911 - RNA, 19 nt, Artificial Sequence
  Description of Artificial Sequence: Synthetic oligonucleotide
  Antisense strand to SEQ ID NO: 2559910
uacucccugucaaucacau

SEQ ID NO: 2559912 - RNA, 19 nt, Artificial Sequence
  Description of Artificial Sequence: Synthetic oligonucleotide
  Sense strand starting at position 1354 of SEQ ID NO: 1888830
cugggauuugcacgaguuu

SEQ ID NO: 2559913 - RNA, 19 nt, Artificial Sequence
  Description of Artificial Sequence: Synthetic oligonucleotide
  Antisense strand to SEQ ID NO: 2559912
aaacucgugcaaaucccag

SEQ ID NO: 2559914 - RNA, 19 nt, Artificial Sequence
  Description of Artificial Sequence: Synthetic oligonucleotide
  Sense strand starting at position 1366 of SEQ ID NO: 1888830
cgaguuuaccaccaccauu

SEQ ID NO: 2559915 - RNA, 19 nt, Artificial Sequence
  Description of Artificial Sequence: Synthetic oligonucleotide
  Antisense strand to SEQ ID NO: 2559914
aaugguggugguaaacucg

SEQ ID NO: 2559916 - RNA, 19 nt, Artificial Sequence
  Description of Artificial Sequence: Synthetic oligonucleotide
  Sense strand starting at position 1386 of SEQ ID NO: 1888830
acagcuauuugcguaaggu

SEQ ID NO: 2559917 - RNA, 19 nt, Artificial Sequence
  Description of Artificial Sequence: Synthetic oligonucleotide
  Antisense strand to SEQ ID NO: 2559916
accuuacgcaaauagcugu

SEQ ID NO: 2559918 - RNA, 19 nt, Artificial Sequence
  Description of Artificial Sequence: Synthetic oligonucleotide
  Sense strand starting at position 1387 of SEQ ID NO: 1888830
cagcuauuugcguaagguu

SEQ ID NO: 2559919 - RNA, 19 nt, Artificial Sequence
  Description of Artificial Sequence: Synthetic oligonucleotide
  Antisense strand to SEQ ID NO: 2559918
aaccuuacgcaaauagcug

SEQ ID NO: 2559920 - RNA, 19 nt, Artificial Sequence
  Description of Artificial Sequence: Synthetic oligonucleotide
  Sense strand starting at position 1800 of SEQ ID NO: 1888830
uggacucccuguuagaauc

SEQ ID NO: 2559921 - RNA, 19 nt, Artificial Sequence
  Description of Artificial Sequence: Synthetic oligonucleotide
  Antisense strand to SEQ ID NO: 2559920
gauucuaacagggagucca

SEQ ID NO: 2559922 - RNA, 19 nt, Artificial Sequence
  Description of Artificial Sequence: Synthetic oligonucleotide
  Sense strand starting at position 1814 of SEQ ID NO: 1888830
gaaucagcuuggccagaga

SEQ ID NO: 2559923 - RNA, 19 nt, Artificial Sequence
  Description of Artificial Sequence: Synthetic oligonucleotide
  Antisense strand to SEQ ID NO: 2559922
ucucuggccaagcugauuc

SEQ ID NO: 2559924 - RNA, 19 nt, Artificial Sequence
  Description of Artificial Sequence: Synthetic oligonucleotide
  Sense strand starting at position 2043 of SEQ ID NO: 1888830
gcugucgugcgcucagagu

SEQ ID NO: 2559925 - RNA, 19 nt, Artificial Sequence
  Description of Artificial Sequence: Synthetic oligonucleotide
  Antisense strand to SEQ ID NO: 2559924
acucugagcgcacgacagc

SEQ ID NO: 2559926 - RNA, 19 nt, Artificial Sequence
  Description of Artificial Sequence: Synthetic oligonucleotide
  Sense strand starting at position 2293 of SEQ ID NO: 1888830
ccgcuucuuuccucgggaa

SEQ ID NO: 2559927 - RNA, 19 nt, Artificial Sequence
  Description of Artificial Sequence: Synthetic oligonucleotide
  Antisense strand to SEQ ID NO: 2559926
uucccgaggaaagaagcgg

SEQ ID NO: 2559928 - RNA, 19 nt, Artificial Sequence
  Description of Artificial Sequence: Synthetic oligonucleotide
  Sense strand starting at position 2338 of SEQ ID NO: 1888830
ucgucuuguccgggagcca

SEQ ID NO: 2559929 - RNA, 19 nt, Artificial Sequence
  Description of Artificial Sequence: Synthetic oligonucleotide
  Antisense strand to SEQ ID NO: 2559928
uggcucccggacaagacga

SEQ ID NO: 2559930 - RNA, 19 nt, Artificial Sequence
  Description of Artificial Sequence: Synthetic oligonucleotide
  Sense strand starting at position 2339 of SEQ ID NO: 1888830
cgucuuguccgggagccau

SEQ ID NO: 2559931 - RNA, 19 nt, Artificial Sequence
  Description of Artificial Sequence: Synthetic oligonucleotide
  Antisense strand to SEQ ID NO: 2559930
auggcucccggacaagacg

SEQ ID NO: 2559932 - RNA, 19 nt, Artificial Sequence
  Description of Artificial Sequence: Synthetic oligonucleotide
  Sense strand starting at position 2475 of SEQ ID NO: 1888830
gcgcuacuucgugcucaaa

SEQ ID NO: 2559933 - RNA, 19 nt, Artificial Sequence
  Description of Artificial Sequence: Synthetic oligonucleotide
  Antisense strand to SEQ ID NO: 2559932
uuugagcacgaaguagcgc

SEQ ID NO: 2559934 - RNA, 19 nt, Artificial Sequence
  Description of Artificial Sequence: Synthetic oligonucleotide
  Sense strand starting at position 2477 of SEQ ID NO: 1888830
gcuacuucgugcucaaacu

SEQ ID NO: 2559935 - RNA, 19 nt, Artificial Sequence
  Description of Artificial Sequence: Synthetic oligonucleotide
  Antisense strand to SEQ ID NO: 2559934
aguuugagcacgaaguagc

SEQ ID NO: 2559936 - RNA, 19 nt, Artificial Sequence
  Description of Artificial Sequence: Synthetic oligonucleotide
  Sense strand starting at position 2631 of SEQ ID NO: 1888830
gcgcgugaucacccuauac

SEQ ID NO: 2559937 - RNA, 19 nt, Artificial Sequence
  Description of Artificial Sequence: Synthetic oligonucleotide
  Antisense strand to SEQ ID NO: 2559936
guauagggugaucacgcgc

SEQ ID NO: 2559938 - RNA, 19 nt, Artificial Sequence
  Description of Artificial Sequence: Synthetic oligonucleotide
  Sense strand starting at position 2633 of SEQ ID NO: 1888830
gcgugaucacccuauacca

SEQ ID NO: 2559939 - RNA, 19 nt, Artificial Sequence
  Description of Artificial Sequence: Synthetic oligonucleotide
  Antisense strand to SEQ ID NO: 2559938
ugguauagggugaucacgc

SEQ ID NO: 2559940 - RNA, 19 nt, Artificial Sequence
  Description of Artificial Sequence: Synthetic oligonucleotide
  Sense strand starting at position 2715 of SEQ ID NO: 1888830
agacgaauacuucgcgaug

SEQ ID NO: 2559941 - RNA, 19 nt, Artificial Sequence
  Description of Artificial Sequence: Synthetic oligonucleotide
  Antisense strand to SEQ ID NO: 2559940
caucgcgaaguauucgucu

SEQ ID NO: 2559942 - RNA, 19 nt, Artificial Sequence
  Description of Artificial Sequence: Synthetic oligonucleotide
  Sense strand starting at position 2718 of SEQ ID NO: 1888830
cgaauacuucgcgauggug

SEQ ID NO: 2559943 - RNA, 19 nt, Artificial Sequence
  Description of Artificial Sequence: Synthetic oligonucleotide
  Antisense strand to SEQ ID NO: 2559942
caccaucgcgaaguauucg

SEQ ID NO: 2559944 - RNA, 19 nt, Artificial Sequence
  Description of Artificial Sequence: Synthetic oligonucleotide
  Sense strand starting at position 2885 of SEQ ID NO: 1888830
ucuauaaagauguguggca

SEQ ID NO: 2559945 - RNA, 19 nt, Artificial Sequence
  Description of Artificial Sequence: Synthetic oligonucleotide
  Antisense strand to SEQ ID NO: 2559944
ugccacacaucuuuauaga

SEQ ID NO: 2559946 - RNA, 19 nt, Artificial Sequence
  Description of Artificial Sequence: Synthetic oligonucleotide
  Sense strand starting at position 2892 of SEQ ID NO: 1888830
agauguguggcagguaaua

SEQ ID NO: 2559947 - RNA, 19 nt, Artificial Sequence
  Description of Artificial Sequence: Synthetic oligonucleotide
  Antisense strand to SEQ ID NO: 2559946
uauuaccugccacacaucu

SEQ ID NO: 2559948 - RNA, 19 nt, Artificial Sequence
  Description of Artificial Sequence: Synthetic oligonucleotide
  Sense strand starting at position 2894 of SEQ ID NO: 1888830
auguguggcagguaauagu

SEQ ID NO: 2559949 - RNA, 19 nt, Artificial Sequence
  Description of Artificial Sequence: Synthetic oligonucleotide
  Antisense strand to SEQ ID NO: 2559948
acuauuaccugccacacau

SEQ ID NO: 2559950 - RNA, 19 nt, Artificial Sequence
  Description of Artificial Sequence: Synthetic oligonucleotide
  Sense strand starting at position 3052 of SEQ ID NO: 1888830
ggacacucggagcaguauu

SEQ ID NO: 2559951 - RNA, 19 nt, Artificial Sequence
  Description of Artificial Sequence: Synthetic oligonucleotide
  Antisense strand to SEQ ID NO: 2559950
aauacugcuccgagugucc

SEQ ID NO: 2559952 - RNA, 19 nt, Artificial Sequence
  Description of Artificial Sequence: Synthetic oligonucleotide
  Sense strand starting at position 3095 of SEQ ID NO: 1888830
cugucaucgguccgggaga

SEQ ID NO: 2559953 - RNA, 19 nt, Artificial Sequence
  Description of Artificial Sequence: Synthetic oligonucleotide
  Antisense strand to SEQ ID NO: 2559952
ucucccggaccgaugacag

SEQ ID NO: 2559954 - RNA, 19 nt, Artificial Sequence
  Description of Artificial Sequence: Synthetic oligonucleotide
  Sense strand starting at position 3126 of SEQ ID NO: 1888830
ggucgaugacugugugguu

SEQ ID NO: 2559955 - RNA, 19 nt, Artificial Sequence
  Description of Artificial Sequence: Synthetic oligonucleotide
  Antisense strand to SEQ ID NO: 2559954
aaccacacagucaucgacc

SEQ ID NO: 2559956 - RNA, 19 nt, Artificial Sequence
  Description of Artificial Sequence: Synthetic oligonucleotide
  Sense strand starting at position 3650 of SEQ ID NO: 1888830
gugacuacaugccuaugaa

SEQ ID NO: 2559957 - RNA, 19 nt, Artificial Sequence
  Description of Artificial Sequence: Synthetic oligonucleotide
  Antisense strand to SEQ ID NO: 2559956
uucauaggcauguagucac

SEQ ID NO: 2559958 - RNA, 19 nt, Artificial Sequence
  Description of Artificial Sequence: Synthetic oligonucleotide
  Sense strand starting at position 3651 of SEQ ID NO: 1888830
ugacuacaugccuaugaac

SEQ ID NO: 2559959 - RNA, 19 nt, Artificial Sequence
  Description of Artificial Sequence: Synthetic oligonucleotide
  Antisense strand to SEQ ID NO: 2559958
guucauaggcauguaguca

SEQ ID NO: 2559960 - RNA, 19 nt, Artificial Sequence
  Description of Artificial Sequence: Synthetic oligonucleotide
  Sense strand starting at position 3737 of SEQ ID NO: 1888830
gccauagcucgggaggaaa

SEQ ID NO: 2559961 - RNA, 19 nt, Artificial Sequence
  Description of Artificial Sequence: Synthetic oligonucleotide
  Antisense strand to SEQ ID NO: 2559960
uuuccucccgagcuauggc

SEQ ID NO: 2559962 - RNA, 19 nt, Artificial Sequence
  Description of Artificial Sequence: Synthetic oligonucleotide
  Sense strand starting at position 3748 of SEQ ID NO: 1888830
ggaggaaaccaguguucag

SEQ ID NO: 2559963 - RNA, 19 nt, Artificial Sequence
  Description of Artificial Sequence: Synthetic oligonucleotide
  Antisense strand to SEQ ID NO: 2559962
cugaacacugguuuccucc

SEQ ID NO: 2559964 - RNA, 19 nt, Artificial Sequence
  Description of Artificial Sequence: Synthetic oligonucleotide
  Sense strand starting at position 3817 of SEQ ID NO: 1888830
ggaggaaaccagugcucua

SEQ ID NO: 2559965 - RNA, 19 nt, Artificial Sequence
  Description of Artificial Sequence: Synthetic oligonucleotide
  Antisense strand to SEQ ID NO: 2559964
uagagcacugguuuccucc

SEQ ID NO: 2559966 - RNA, 19 nt, Artificial Sequence
  Description of Artificial Sequence: Synthetic oligonucleotide
  Sense strand starting at position 3822 of SEQ ID NO: 1888830
aaaccagugcucuagagau

SEQ ID NO: 2559967 - RNA, 19 nt, Artificial Sequence
  Description of Artificial Sequence: Synthetic oligonucleotide
  Antisense strand to SEQ ID NO: 2559966
aucucuagagcacugguuu

SEQ ID NO: 2559968 - RNA, 19 nt, Artificial Sequence
  Description of Artificial Sequence: Synthetic oligonucleotide
  Sense strand starting at position 179 of SEQ ID NO: 1888831
aguuuauggcaauaagcaa

SEQ ID NO: 2559969 - RNA, 19 nt, Artificial Sequence
  Description of Artificial Sequence: Synthetic oligonucleotide
  Antisense strand to SEQ ID NO: 2559968
uugcuuauugccauaaacu

SEQ ID NO: 2559970 - RNA, 19 nt, Artificial Sequence
  Description of Artificial Sequence: Synthetic oligonucleotide
  Sense strand starting at position 453 of SEQ ID NO: 1888831
aggaguuuaacuuggaccu

SEQ ID NO: 2559971 - RNA, 19 nt, Artificial Sequence
  Description of Artificial Sequence: Synthetic oligonucleotide
  Antisense strand to SEQ ID NO: 2559970
agguccaaguuaaacuccu

SEQ ID NO: 2559972 - RNA, 19 nt, Artificial Sequence
  Description of Artificial Sequence: Synthetic oligonucleotide
  Sense strand starting at position 481 of SEQ ID NO: 1888831
aggccucagugagccauua

SEQ ID NO: 2559973 - RNA, 19 nt, Artificial Sequence
  Description of Artificial Sequence: Synthetic oligonucleotide
  Antisense strand to SEQ ID NO: 2559972
uaauggcucacugaggccu

SEQ ID NO: 2559974 - RNA, 19 nt, Artificial Sequence
  Description of Artificial Sequence: Synthetic oligonucleotide
  Sense strand starting at position 512 of SEQ ID NO: 1888831
acuccagucuagguaaaga

SEQ ID NO: 2559975 - RNA, 19 nt, Artificial Sequence
  Description of Artificial Sequence: Synthetic oligonucleotide
  Antisense strand to SEQ ID NO: 2559974
ucuuuaccuagacuggagu

SEQ ID NO: 2559976 - RNA, 19 nt, Artificial Sequence
  Description of Artificial Sequence: Synthetic oligonucleotide
  Sense strand starting at position 630 of SEQ ID NO: 1888831
ccuguauuacucugauacg

SEQ ID NO: 2559977 - RNA, 19 nt, Artificial Sequence
  Description of Artificial Sequence: Synthetic oligonucleotide
  Antisense strand to SEQ ID NO: 2559976
cguaucagaguaauacagg

SEQ ID NO: 2559978 - RNA, 19 nt, Artificial Sequence
  Description of Artificial Sequence: Synthetic oligonucleotide
  Sense strand starting at position 1366 of SEQ ID NO: 1888831
aagaaauucuauguuugug

SEQ ID NO: 2559979 - RNA, 19 nt, Artificial Sequence
  Description of Artificial Sequence: Synthetic oligonucleotide
  Antisense strand to SEQ ID NO: 2559978
cacaaacauagaauuucuu

SEQ ID NO: 2559980 - RNA, 19 nt, Artificial Sequence
  Description of Artificial Sequence: Synthetic oligonucleotide
  Sense strand starting at position 1368 of SEQ ID NO: 1888831
gaaauucuauguuugugga

SEQ ID NO: 2559981 - RNA, 19 nt, Artificial Sequence
  Description of Artificial Sequence: Synthetic oligonucleotide
  Antisense strand to SEQ ID NO: 2559980
uccacaaacauagaauuuc

SEQ ID NO: 2559982 - RNA, 19 nt, Artificial Sequence
  Description of Artificial Sequence: Synthetic oligonucleotide
  Sense strand starting at position 2436 of SEQ ID NO: 1888831
gagaacaguuuggagguaa

SEQ ID NO: 2559983 - RNA, 19 nt, Artificial Sequence
  Description of Artificial Sequence: Synthetic oligonucleotide
  Antisense strand to SEQ ID NO: 2559982
uuaccuccaaacuguucuc

SEQ ID NO: 2559984 - RNA, 19 nt, Artificial Sequence
  Description of Artificial Sequence: Synthetic oligonucleotide
  Sense strand starting at position 2576 of SEQ ID NO: 1888831
cacuguagcuaagauuuga

SEQ ID NO: 2559985 - RNA, 19 nt, Artificial Sequence
  Description of Artificial Sequence: Synthetic oligonucleotide
  Antisense strand to SEQ ID NO: 2559984
ucaaaucuuagcuacagug

SEQ ID NO: 2559986 - RNA, 19 nt, Artificial Sequence
  Description of Artificial Sequence: Synthetic oligonucleotide
  Sense strand starting at position 2681 of SEQ ID NO: 1888831
aagauccugucguuugcaa

SEQ ID NO: 2559987 - RNA, 19 nt, Artificial Sequence
  Description of Artificial Sequence: Synthetic oligonucleotide
  Antisense strand to SEQ ID NO: 2559986
uugcaaacgacaggaucuu

SEQ ID NO: 2559988 - RNA, 19 nt, Artificial Sequence
  Description of Artificial Sequence: Synthetic oligonucleotide
  Sense strand starting at position 2858 of SEQ ID NO: 1888831
guaguggagggcuggaaau

SEQ ID NO: 2559989 - RNA, 19 nt, Artificial Sequence
  Description of Artificial Sequence: Synthetic oligonucleotide
  Antisense strand to SEQ ID NO: 2559988
auuuccagcccuccacuac

SEQ ID NO: 2559990 - RNA, 19 nt, Artificial Sequence
  Description of Artificial Sequence: Synthetic oligonucleotide
  Sense strand starting at position 2919 of SEQ ID NO: 1888831
gaucuauuaguugauagca

SEQ ID NO: 2559991 - RNA, 19 nt, Artificial Sequence
  Description of Artificial Sequence: Synthetic oligonucleotide
  Antisense strand to SEQ ID NO: 2559990
ugcuaucaacuaauagauc

SEQ ID NO: 2559992 - RNA, 19 nt, Artificial Sequence
  Description of Artificial Sequence: Synthetic oligonucleotide
  Sense strand starting at position 3034 of SEQ ID NO: 1888831
aggugauggauacgccauu

SEQ ID NO: 2559993 - RNA, 19 nt, Artificial Sequence
  Description of Artificial Sequence: Synthetic oligonucleotide
  Antisense strand to SEQ ID NO: 2559992
aauggcguauccaucaccu

SEQ ID NO: 2559994 - RNA, 19 nt, Artificial Sequence
  Description of Artificial Sequence: Synthetic oligonucleotide
  Sense strand starting at position 3065 of SEQ ID NO: 1888831
auuauuacaccugguaugu

SEQ ID NO: 2559995 - RNA, 19 nt, Artificial Sequence
  Description of Artificial Sequence: Synthetic oligonucleotide
  Antisense strand to SEQ ID NO: 2559994
acauaccagguguaauaau

SEQ ID NO: 2559996 - RNA, 19 nt, Artificial Sequence
  Description of Artificial Sequence: Synthetic oligonucleotide
  Sense strand starting at position 3201 of SEQ ID NO: 1888831
cuguguguuccucagugga

SEQ ID NO: 2559997 - RNA, 19 nt, Artificial Sequence
  Description of Artificial Sequence: Synthetic oligonucleotide
  Antisense strand to SEQ ID NO: 2559996
uccacugaggaacacacag

SEQ ID NO: 2559998 - RNA, 19 nt, Artificial Sequence
  Description of Artificial Sequence: Synthetic oligonucleotide
  Sense strand starting at position 3203 of SEQ ID NO: 1888831
guguguuccucaguggaau

SEQ ID NO: 2559999 - RNA, 19 nt, Artificial Sequence
  Description of Artificial Sequence: Synthetic oligonucleotide
  Antisense strand to SEQ ID NO: 2559998
auuccacugaggaacacac

SEQ ID NO: 2560000 - RNA, 19 nt, Artificial Sequence
  Description of Artificial Sequence: Synthetic oligonucleotide
  Sense strand starting at position 3204 of SEQ ID NO: 1888831
uguguuccucaguggaauu

SEQ ID NO: 2560001 - RNA, 19 nt, Artificial Sequence
  Description of Artificial Sequence: Synthetic oligonucleotide
  Antisense strand to SEQ ID NO: 2560000
aauuccacugaggaacaca

SEQ ID NO: 2560002 - RNA, 19 nt, Artificial Sequence
  Description of Artificial Sequence: Synthetic oligonucleotide
  Sense strand starting at position 3205 of SEQ ID NO: 1888831
guguuccucaguggaauua

SEQ ID NO: 2560003 - RNA, 19 nt, Artificial Sequence
  Description of Artificial Sequence: Synthetic oligonucleotide
  Antisense strand to SEQ ID NO: 2560002
uaauuccacugaggaacac

SEQ ID NO: 2560004 - RNA, 19 nt, Artificial Sequence
  Description of Artificial Sequence: Synthetic oligonucleotide
  Sense strand starting at position 3206 of SEQ ID NO: 1888831
uguuccucaguggaauuaa

SEQ ID NO: 2560005 - RNA, 19 nt, Artificial Sequence
  Description of Artificial Sequence: Synthetic oligonucleotide
  Antisense strand to SEQ ID NO: 2560004
uuaauuccacugaggaaca

SEQ ID NO: 2560006 - RNA, 19 nt, Artificial Sequence
  Description of Artificial Sequence: Synthetic oligonucleotide
  Sense strand starting at position 3216 of SEQ ID NO: 1888831
uggaauuaacugugccuua

SEQ ID NO: 2560007 - RNA, 19 nt, Artificial Sequence
  Description of Artificial Sequence: Synthetic oligonucleotide
  Antisense strand to SEQ ID NO: 2560006
uaaggcacaguuaauucca

SEQ ID NO: 2560008 - RNA, 19 nt, Artificial Sequence
  Description of Artificial Sequence: Synthetic oligonucleotide
  Sense strand starting at position 3217 of SEQ ID NO: 1888831
ggaauuaacugugccuuau

SEQ ID NO: 2560009 - RNA, 19 nt, Artificial Sequence
  Description of Artificial Sequence: Synthetic oligonucleotide
  Antisense strand to SEQ ID NO: 2560008
auaaggcacaguuaauucc

SEQ ID NO: 2560010 - RNA, 19 nt, Artificial Sequence
  Description of Artificial Sequence: Synthetic oligonucleotide
  Sense strand starting at position 3221 of SEQ ID NO: 1888831
uuaacugugccuuaugaag

SEQ ID NO: 2560011 - RNA, 19 nt, Artificial Sequence
  Description of Artificial Sequence: Synthetic oligonucleotide
  Antisense strand to SEQ ID NO: 2560010
cuucauaaggcacaguuaa

SEQ ID NO: 2560012 - RNA, 19 nt, Artificial Sequence
  Description of Artificial Sequence: Synthetic oligonucleotide
  Sense strand starting at position 3232 of SEQ ID NO: 1888831
uuaugaaguuuguuuccaa

SEQ ID NO: 2560013 - RNA, 19 nt, Artificial Sequence
  Description of Artificial Sequence: Synthetic oligonucleotide
  Antisense strand to SEQ ID NO: 2560012
uuggaaacaaacuucauaa

SEQ ID NO: 2560014 - RNA, 19 nt, Artificial Sequence
  Description of Artificial Sequence: Synthetic oligonucleotide
  Sense strand starting at position 3233 of SEQ ID NO: 1888831
uaugaaguuuguuuccaag

SEQ ID NO: 2560015 - RNA, 19 nt, Artificial Sequence
  Description of Artificial Sequence: Synthetic oligonucleotide
  Antisense strand to SEQ ID NO: 2560014
cuuggaaacaaacuucaua

SEQ ID NO: 2560016 - RNA, 19 nt, Artificial Sequence
  Description of Artificial Sequence: Synthetic oligonucleotide
  Sense strand starting at position 3235 of SEQ ID NO: 1888831
ugaaguuuguuuccaagca

SEQ ID NO: 2560017 - RNA, 19 nt, Artificial Sequence
  Description of Artificial Sequence: Synthetic oligonucleotide
  Antisense strand to SEQ ID NO: 2560016
ugcuuggaaacaaacuuca

SEQ ID NO: 2560018 - RNA, 19 nt, Artificial Sequence
  Description of Artificial Sequence: Synthetic oligonucleotide
  Sense strand starting at position 3350 of SEQ ID NO: 1888831
gcaucugauguuuacauca

SEQ ID NO: 2560019 - RNA, 19 nt, Artificial Sequence
  Description of Artificial Sequence: Synthetic oligonucleotide
  Antisense strand to SEQ ID NO: 2560018
ugauguaaacaucagaugc

SEQ ID NO: 2560020 - RNA, 19 nt, Artificial Sequence
  Description of Artificial Sequence: Synthetic oligonucleotide
  Sense strand starting at position 3355 of SEQ ID NO: 1888831
ugauguuuacaucaucuua

SEQ ID NO: 2560021 - RNA, 19 nt, Artificial Sequence
  Description of Artificial Sequence: Synthetic oligonucleotide
  Antisense strand to SEQ ID NO: 2560020
uaagaugauguaaacauca

SEQ ID NO: 2560022 - RNA, 19 nt, Artificial Sequence
  Description of Artificial Sequence: Synthetic oligonucleotide
  Sense strand starting at position 3398 of SEQ ID NO: 1888831
agcauauguuuaucaggau

SEQ ID NO: 2560023 - RNA, 19 nt, Artificial Sequence
  Description of Artificial Sequence: Synthetic oligonucleotide
  Antisense strand to SEQ ID NO: 2560022
auccugauaaacauaugcu

SEQ ID NO: 2560024 - RNA, 19 nt, Artificial Sequence
  Description of Artificial Sequence: Synthetic oligonucleotide
  Sense strand starting at position 3429 of SEQ ID NO: 1888831
caguuaauuguguggcaaa

SEQ ID NO: 2560025 - RNA, 19 nt, Artificial Sequence
  Description of Artificial Sequence: Synthetic oligonucleotide
  Antisense strand to SEQ ID NO: 2560024
uuugccacacaauuaacug

SEQ ID NO: 2560026 - RNA, 19 nt, Artificial Sequence
  Description of Artificial Sequence: Synthetic oligonucleotide
  Sense strand starting at position 3440 of SEQ ID NO: 1888831
guggcaaagcauugcauuu

SEQ ID NO: 2560027 - RNA, 19 nt, Artificial Sequence
  Description of Artificial Sequence: Synthetic oligonucleotide
  Antisense strand to SEQ ID NO: 2560026
aaaugcaaugcuuugccac

SEQ ID NO: 2560028 - RNA, 19 nt, Artificial Sequence
  Description of Artificial Sequence: Synthetic oligonucleotide
  Sense strand starting at position 3752 of SEQ ID NO: 1888831
aguggagagcagugauugu

SEQ ID NO: 2560029 - RNA, 19 nt, Artificial Sequence
  Description of Artificial Sequence: Synthetic oligonucleotide
  Antisense strand to SEQ ID NO: 2560028
acaaucacugcucuccacu

SEQ ID NO: 2560030 - RNA, 19 nt, Artificial Sequence
  Description of Artificial Sequence: Synthetic oligonucleotide
  Sense strand starting at position 3756 of SEQ ID NO: 1888831
gagagcagugauuguaaca

SEQ ID NO: 2560031 - RNA, 19 nt, Artificial Sequence
  Description of Artificial Sequence: Synthetic oligonucleotide
  Antisense strand to SEQ ID NO: 2560030
uguuacaaucacugcucuc

SEQ ID NO: 2560032 - RNA, 19 nt, Artificial Sequence
  Description of Artificial Sequence: Synthetic oligonucleotide
  Sense strand starting at position 3787 of SEQ ID NO: 1888831
auuuauucguuggacaaau

SEQ ID NO: 2560033 - RNA, 19 nt, Artificial Sequence
  Description of Artificial Sequence: Synthetic oligonucleotide
  Antisense strand to SEQ ID NO: 2560032
auuuguccaacgaauaaau

SEQ ID NO: 2560034 - RNA, 19 nt, Artificial Sequence
  Description of Artificial Sequence: Synthetic oligonucleotide
  Sense strand starting at position 3789 of SEQ ID NO: 1888831
uuauucguuggacaaauau

SEQ ID NO: 2560035 - RNA, 19 nt, Artificial Sequence
  Description of Artificial Sequence: Synthetic oligonucleotide
  Antisense strand to SEQ ID NO: 2560034
auauuuguccaacgaauaa

SEQ ID NO: 2560036 - RNA, 19 nt, Artificial Sequence
  Description of Artificial Sequence: Synthetic oligonucleotide
  Sense strand starting at position 3820 of SEQ ID NO: 1888831
ugcuauguacaagacuaca

SEQ ID NO: 2560037 - RNA, 19 nt, Artificial Sequence
  Description of Artificial Sequence: Synthetic oligonucleotide
  Antisense strand to SEQ ID NO: 2560036
uguagucuuguacauagca

SEQ ID NO: 2560038 - RNA, 19 nt, Artificial Sequence
  Description of Artificial Sequence: Synthetic oligonucleotide
  Sense strand starting at position 3831 of SEQ ID NO: 1888831
agacuacaauaguaagaaa

SEQ ID NO: 2560039 - RNA, 19 nt, Artificial Sequence
  Description of Artificial Sequence: Synthetic oligonucleotide
  Antisense strand to SEQ ID NO: 2560038
uuucuuacuauuguagucu

SEQ ID NO: 2560040 - RNA, 19 nt, Artificial Sequence
  Description of Artificial Sequence: Synthetic oligonucleotide
  Sense strand starting at position 3884 of SEQ ID NO: 1888831
uaucaucuaguaggaguaa

SEQ ID NO: 2560041 - RNA, 19 nt, Artificial Sequence
  Description of Artificial Sequence: Synthetic oligonucleotide
  Antisense strand to SEQ ID NO: 2560040
uuacuccuacuagaugaua

SEQ ID NO: 2560042 - RNA, 19 nt, Artificial Sequence
  Description of Artificial Sequence: Synthetic oligonucleotide
  Sense strand starting at position 3935 of SEQ ID NO: 1888831
gagaauaguuacugagaag

SEQ ID NO: 2560043 - RNA, 19 nt, Artificial Sequence
  Description of Artificial Sequence: Synthetic oligonucleotide
  Antisense strand to SEQ ID NO: 2560042
cuucucaguaacuauucuc

SEQ ID NO: 2560044 - RNA, 19 nt, Artificial Sequence
  Description of Artificial Sequence: Synthetic oligonucleotide
  Sense strand starting at position 3942 of SEQ ID NO: 1888831
guuacugagaaguguguaa

SEQ ID NO: 2560045 - RNA, 19 nt, Artificial Sequence
  Description of Artificial Sequence: Synthetic oligonucleotide
  Antisense strand to SEQ ID NO: 2560044
uuacacacuucucaguaac

SEQ ID NO: 2560046 - RNA, 19 nt, Artificial Sequence
  Description of Artificial Sequence: Synthetic oligonucleotide
  Sense strand starting at position 3965 of SEQ ID NO: 1888831
ucaucaguuagcugggcau

SEQ ID NO: 2560047 - RNA, 19 nt, Artificial Sequence
  Description of Artificial Sequence: Synthetic oligonucleotide
  Antisense strand to SEQ ID NO: 2560046
augcccagcuaacugauga

SEQ ID NO: 2560048 - RNA, 19 nt, Artificial Sequence
  Description of Artificial Sequence: Synthetic oligonucleotide
  Sense strand starting at position 91 of SEQ ID NO: 1888832
guggaaauguggguuuggu

SEQ ID NO: 2560049 - RNA, 19 nt, Artificial Sequence
  Description of Artificial Sequence: Synthetic oligonucleotide
  Antisense strand to SEQ ID NO: 2560048
accaaacccacauuuccac

SEQ ID NO: 2560050 - RNA, 19 nt, Artificial Sequence
  Description of Artificial Sequence: Synthetic oligonucleotide
  Sense strand starting at position 107 of SEQ ID NO: 1888832
ggugcaaauugggcagauu

SEQ ID NO: 2560051 - RNA, 19 nt, Artificial Sequence
  Description of Artificial Sequence: Synthetic oligonucleotide
  Antisense strand to SEQ ID NO: 2560050
aaucugcccaauuugcacc

SEQ ID NO: 2560052 - RNA, 19 nt, Artificial Sequence
  Description of Artificial Sequence: Synthetic oligonucleotide
  Sense strand starting at position 195 of SEQ ID NO: 1888832
guuguuuguuuccuauaua

SEQ ID NO: 2560053 - RNA, 19 nt, Artificial Sequence
  Description of Artificial Sequence: Synthetic oligonucleotide
  Antisense strand to SEQ ID NO: 2560052
uauauaggaaacaaacaac

SEQ ID NO: 2560054 - RNA, 19 nt, Artificial Sequence
  Description of Artificial Sequence: Synthetic oligonucleotide
  Sense strand starting at position 273 of SEQ ID NO: 1888832
gaaguacaauuugauaugu

SEQ ID NO: 2560055 - RNA, 19 nt, Artificial Sequence
  Description of Artificial Sequence: Synthetic oligonucleotide
  Antisense strand to SEQ ID NO: 2560054
acauaucaaauuguacuuc

SEQ ID NO: 2560056 - RNA, 19 nt, Artificial Sequence
  Description of Artificial Sequence: Synthetic oligonucleotide
  Sense strand starting at position 301 of SEQ ID NO: 1888832
uguauacaacuguguaauc

SEQ ID NO: 2560057 - RNA, 19 nt, Artificial Sequence
  Description of Artificial Sequence: Synthetic oligonucleotide
  Antisense strand to SEQ ID NO: 2560056
gauuacacaguuguauaca

SEQ ID NO: 2560058 - RNA, 19 nt, Artificial Sequence
  Description of Artificial Sequence: Synthetic oligonucleotide
  Sense strand starting at position 302 of SEQ ID NO: 1888832
guauacaacuguguaauca

SEQ ID NO: 2560059 - RNA, 19 nt, Artificial Sequence
  Description of Artificial Sequence: Synthetic oligonucleotide
  Antisense strand to SEQ ID NO: 2560058
ugauuacacaguuguauac

SEQ ID NO: 2560060 - RNA, 19 nt, Artificial Sequence
  Description of Artificial Sequence: Synthetic oligonucleotide
  Sense strand starting at position 543 of SEQ ID NO: 1888832
uagugcaaaucagcagaua

SEQ ID NO: 2560061 - RNA, 19 nt, Artificial Sequence
  Description of Artificial Sequence: Synthetic oligonucleotide
  Antisense strand to SEQ ID NO: 2560060
uaucugcugauuugcacua

SEQ ID NO: 2560062 - RNA, 19 nt, Artificial Sequence
  Description of Artificial Sequence: Synthetic oligonucleotide
  Sense strand starting at position 544 of SEQ ID NO: 1888832
agugcaaaucagcagauaa

SEQ ID NO: 2560063 - RNA, 19 nt, Artificial Sequence
  Description of Artificial Sequence: Synthetic oligonucleotide
  Antisense strand to SEQ ID NO: 2560062
uuaucugcugauuugcacu

SEQ ID NO: 2560064 - RNA, 19 nt, Artificial Sequence
  Description of Artificial Sequence: Synthetic oligonucleotide
  Sense strand starting at position 546 of SEQ ID NO: 1888832
ugcaaaucagcagauaauc

SEQ ID NO: 2560065 - RNA, 19 nt, Artificial Sequence
  Description of Artificial Sequence: Synthetic oligonucleotide
  Antisense strand to SEQ ID NO: 2560064
gauuaucugcugauuugca

SEQ ID NO: 2560066 - RNA, 19 nt, Artificial Sequence
  Description of Artificial Sequence: Synthetic oligonucleotide
  Sense strand starting at position 580 of SEQ ID NO: 1888832
auaguauccgauuguauag

SEQ ID NO: 2560067 - RNA, 19 nt, Artificial Sequence
  Description of Artificial Sequence: Synthetic oligonucleotide
  Antisense strand to SEQ ID NO: 2560066
cuauacaaucggauacuau

SEQ ID NO: 2560068 - RNA, 19 nt, Artificial Sequence
  Description of Artificial Sequence: Synthetic oligonucleotide
  Sense strand starting at position 586 of SEQ ID NO: 1888832
uccgauuguauagauaugu

SEQ ID NO: 2560069 - RNA, 19 nt, Artificial Sequence
  Description of Artificial Sequence: Synthetic oligonucleotide
  Antisense strand to SEQ ID NO: 2560068
acauaucuauacaaucgga

SEQ ID NO: 2560070 - RNA, 19 nt, Artificial Sequence
  Description of Artificial Sequence: Synthetic oligonucleotide
  Sense strand starting at position 591 of SEQ ID NO: 1888832
uuguauagauaugucacaa

SEQ ID NO: 2560071 - RNA, 19 nt, Artificial Sequence
  Description of Artificial Sequence: Synthetic oligonucleotide
  Antisense strand to SEQ ID NO: 2560070
uugugacauaucuauacaa

SEQ ID NO: 2560072 - RNA, 19 nt, Artificial Sequence
  Description of Artificial Sequence: Synthetic oligonucleotide
  Sense strand starting at position 640 of SEQ ID NO: 1888832
uuuaguuugucuccagaua

SEQ ID NO: 2560073 - RNA, 19 nt, Artificial Sequence
  Description of Artificial Sequence: Synthetic oligonucleotide
  Antisense strand to SEQ ID NO: 2560072
uaucuggagacaaacuaaa

SEQ ID NO: 2560074 - RNA, 19 nt, Artificial Sequence
  Description of Artificial Sequence: Synthetic oligonucleotide
  Sense strand starting at position 641 of SEQ ID NO: 1888832
uuaguuugucuccagauau

SEQ ID NO: 2560075 - RNA, 19 nt, Artificial Sequence
  Description of Artificial Sequence: Synthetic oligonucleotide
  Antisense strand to SEQ ID NO: 2560074
auaucuggagacaaacuaa

SEQ ID NO: 2560076 - RNA, 19 nt, Artificial Sequence
  Description of Artificial Sequence: Synthetic oligonucleotide
  Sense strand starting at position 658 of SEQ ID NO: 1888832
auugacuacuaugaauaga

SEQ ID NO: 2560077 - RNA, 19 nt, Artificial Sequence
  Description of Artificial Sequence: Synthetic oligonucleotide
  Antisense strand to SEQ ID NO: 2560076
ucuauucauaguagucaau

SEQ ID NO: 2560078 - RNA, 19 nt, Artificial Sequence
  Description of Artificial Sequence: Synthetic oligonucleotide
  Sense strand starting at position 755 of SEQ ID NO: 1888832
auugaugggucauauagaa

SEQ ID NO: 2560079 - RNA, 19 nt, Artificial Sequence
  Description of Artificial Sequence: Synthetic oligonucleotide
  Antisense strand to SEQ ID NO: 2560078
uucuauaugacccaucaau

SEQ ID NO: 2560080 - RNA, 19 nt, Artificial Sequence
  Description of Artificial Sequence: Synthetic oligonucleotide
  Sense strand starting at position 793 of SEQ ID NO: 1888832
uguaacugucaagaugacu

SEQ ID NO: 2560081 - RNA, 19 nt, Artificial Sequence
  Description of Artificial Sequence: Synthetic oligonucleotide
  Antisense strand to SEQ ID NO: 2560080
agucaucuugacaguuaca

SEQ ID NO: 2560082 - RNA, 19 nt, Artificial Sequence
  Description of Artificial Sequence: Synthetic oligonucleotide
  Sense strand starting at position 804 of SEQ ID NO: 1888832
agaugacucuuagauggag

SEQ ID NO: 2560083 - RNA, 19 nt, Artificial Sequence
  Description of Artificial Sequence: Synthetic oligonucleotide
  Antisense strand to SEQ ID NO: 2560082
cuccaucuaagagucaucu

SEQ ID NO: 2560084 - RNA, 19 nt, Artificial Sequence
  Description of Artificial Sequence: Synthetic oligonucleotide
  Sense strand starting at position 808 of SEQ ID NO: 1888832
gacucuuagauggagugua

SEQ ID NO: 2560085 - RNA, 19 nt, Artificial Sequence
  Description of Artificial Sequence: Synthetic oligonucleotide
  Antisense strand to SEQ ID NO: 2560084
uacacuccaucuaagaguc

SEQ ID NO: 2560086 - RNA, 19 nt, Artificial Sequence
  Description of Artificial Sequence: Synthetic oligonucleotide
  Sense strand starting at position 831 of SEQ ID NO: 1888832
guuagauucccacaagcag

SEQ ID NO: 2560087 - RNA, 19 nt, Artificial Sequence
  Description of Artificial Sequence: Synthetic oligonucleotide
  Antisense strand to SEQ ID NO: 2560086
cugcuugugggaaucuaac

SEQ ID NO: 2560088 - RNA, 19 nt, Artificial Sequence
  Description of Artificial Sequence: Synthetic oligonucleotide
  Sense strand starting at position 842 of SEQ ID NO: 1888832
acaagcaguauaugagaga

SEQ ID NO: 2560089 - RNA, 19 nt, Artificial Sequence
  Description of Artificial Sequence: Synthetic oligonucleotide
  Antisense strand to SEQ ID NO: 2560088
ucucucauauacugcuugu

SEQ ID NO: 2560090 - RNA, 19 nt, Artificial Sequence
  Description of Artificial Sequence: Synthetic oligonucleotide
  Sense strand starting at position 902 of SEQ ID NO: 1888832
ucuugugaacuguagcuuu

SEQ ID NO: 2560091 - RNA, 19 nt, Artificial Sequence
  Description of Artificial Sequence: Synthetic oligonucleotide
  Antisense strand to SEQ ID NO: 2560090
aaagcuacaguucacaaga

SEQ ID NO: 2560092 - RNA, 19 nt, Artificial Sequence
  Description of Artificial Sequence: Synthetic oligonucleotide
  Sense strand starting at position 920 of SEQ ID NO: 1888832
uuccaaugaguauauugua

SEQ ID NO: 2560093 - RNA, 19 nt, Artificial Sequence
  Description of Artificial Sequence: Synthetic oligonucleotide
  Antisense strand to SEQ ID NO: 2560092
uacaauauacucauuggaa

SEQ ID NO: 2560094 - RNA, 19 nt, Artificial Sequence
  Description of Artificial Sequence: Synthetic oligonucleotide
  Sense strand starting at position 928 of SEQ ID NO: 1888832
aguauauuguagucucuaa

SEQ ID NO: 2560095 - RNA, 19 nt, Artificial Sequence
  Description of Artificial Sequence: Synthetic oligonucleotide
  Antisense strand to SEQ ID NO: 2560094
uuagagacuacaauauacu

SEQ ID NO: 2560096 - RNA, 19 nt, Artificial Sequence
  Description of Artificial Sequence: Synthetic oligonucleotide
  Sense strand starting at position 935 of SEQ ID NO: 1888832
uguagucucuaauuaggau

SEQ ID NO: 2560097 - RNA, 19 nt, Artificial Sequence
  Description of Artificial Sequence: Synthetic oligonucleotide
  Antisense strand to SEQ ID NO: 2560096
auccuaauuagagacuaca

SEQ ID NO: 2560098 - RNA, 19 nt, Artificial Sequence
  Description of Artificial Sequence: Synthetic oligonucleotide
  Sense strand starting at position 941 of SEQ ID NO: 1888832
cucuaauuaggauguuaau

SEQ ID NO: 2560099 - RNA, 19 nt, Artificial Sequence
  Description of Artificial Sequence: Synthetic oligonucleotide
  Antisense strand to SEQ ID NO: 2560098
auuaacauccuaauuagag

SEQ ID NO: 2560100 - RNA, 19 nt, Artificial Sequence
  Description of Artificial Sequence: Synthetic oligonucleotide
  Sense strand starting at position 995 of SEQ ID NO: 1888832
uauuguugugcuuauuaag

SEQ ID NO: 2560101 - RNA, 19 nt, Artificial Sequence
  Description of Artificial Sequence: Synthetic oligonucleotide
  Antisense strand to SEQ ID NO: 2560100
cuuaauaagcacaacaaua

SEQ ID NO: 2560102 - RNA, 19 nt, Artificial Sequence
  Description of Artificial Sequence: Synthetic oligonucleotide
  Sense strand starting at position 1091 of SEQ ID NO: 1888832
uuguaagaaucuguuacau

SEQ ID NO: 2560103 - RNA, 19 nt, Artificial Sequence
  Description of Artificial Sequence: Synthetic oligonucleotide
  Antisense strand to SEQ ID NO: 2560102
auguaacagauucuuacaa

SEQ ID NO: 2560104 - RNA, 19 nt, Artificial Sequence
  Description of Artificial Sequence: Synthetic oligonucleotide
  Sense strand starting at position 1100 of SEQ ID NO: 1888832
ucuguuacaugguuuggau

SEQ ID NO: 2560105 - RNA, 19 nt, Artificial Sequence
  Description of Artificial Sequence: Synthetic oligonucleotide
  Antisense strand to SEQ ID NO: 2560104
auccaaaccauguaacaga

SEQ ID NO: 2560106 - RNA, 19 nt, Artificial Sequence
  Description of Artificial Sequence: Synthetic oligonucleotide
  Sense strand starting at position 1102 of SEQ ID NO: 1888832
uguuacaugguuuggauau

SEQ ID NO: 2560107 - RNA, 19 nt, Artificial Sequence
  Description of Artificial Sequence: Synthetic oligonucleotide
  Antisense strand to SEQ ID NO: 2560106
auauccaaaccauguaaca

SEQ ID NO: 2560108 - RNA, 19 nt, Artificial Sequence
  Description of Artificial Sequence: Synthetic oligonucleotide
  Sense strand starting at position 1114 of SEQ ID NO: 1888832
uggauauaaguccgugguu

SEQ ID NO: 2560109 - RNA, 19 nt, Artificial Sequence
  Description of Artificial Sequence: Synthetic oligonucleotide
  Antisense strand to SEQ ID NO: 2560108
aaccacggacuuauaucca

SEQ ID NO: 2560110 - RNA, 19 nt, Artificial Sequence
  Description of Artificial Sequence: Synthetic oligonucleotide
  Sense strand starting at position 1115 of SEQ ID NO: 1888832
ggauauaaguccgugguua

SEQ ID NO: 2560111 - RNA, 19 nt, Artificial Sequence
  Description of Artificial Sequence: Synthetic oligonucleotide
  Antisense strand to SEQ ID NO: 2560110
uaaccacggacuuauaucc

SEQ ID NO: 2560112 - RNA, 19 nt, Artificial Sequence
  Description of Artificial Sequence: Synthetic oligonucleotide
  Sense strand starting at position 1116 of SEQ ID NO: 1888832
gauauaaguccgugguuag

SEQ ID NO: 2560113 - RNA, 19 nt, Artificial Sequence
  Description of Artificial Sequence: Synthetic oligonucleotide
  Antisense strand to SEQ ID NO: 2560112
cuaaccacggacuuauauc

SEQ ID NO: 2560114 - RNA, 19 nt, Artificial Sequence
  Description of Artificial Sequence: Synthetic oligonucleotide
  Sense strand starting at position 1117 of SEQ ID NO: 1888832
auauaaguccgugguuaga

SEQ ID NO: 2560115 - RNA, 19 nt, Artificial Sequence
  Description of Artificial Sequence: Synthetic oligonucleotide
  Antisense strand to SEQ ID NO: 2560114
ucuaaccacggacuuauau

SEQ ID NO: 2560116 - RNA, 19 nt, Artificial Sequence
  Description of Artificial Sequence: Synthetic oligonucleotide
  Sense strand starting at position 1119 of SEQ ID NO: 1888832
auaaguccgugguuagaua

SEQ ID NO: 2560117 - RNA, 19 nt, Artificial Sequence
  Description of Artificial Sequence: Synthetic oligonucleotide
  Antisense strand to SEQ ID NO: 2560116
uaucuaaccacggacuuau

SEQ ID NO: 2560118 - RNA, 19 nt, Artificial Sequence
  Description of Artificial Sequence: Synthetic oligonucleotide
  Sense strand starting at position 1131 of SEQ ID NO: 1888832
uuagauacauguucuacua

SEQ ID NO: 2560119 - RNA, 19 nt, Artificial Sequence
  Description of Artificial Sequence: Synthetic oligonucleotide
  Antisense strand to SEQ ID NO: 2560118
uaguagaacauguaucuaa

SEQ ID NO: 2560120 - RNA, 19 nt, Artificial Sequence
  Description of Artificial Sequence: Synthetic oligonucleotide
  Sense strand starting at position 1306 of SEQ ID NO: 1888832
uuaggaauuuacugaagca

SEQ ID NO: 2560121 - RNA, 19 nt, Artificial Sequence
  Description of Artificial Sequence: Synthetic oligonucleotide
  Antisense strand to SEQ ID NO: 2560120
ugcuucaguaaauuccuaa

SEQ ID NO: 2560122 - RNA, 19 nt, Artificial Sequence
  Description of Artificial Sequence: Synthetic oligonucleotide
  Sense strand starting at position 1560 of SEQ ID NO: 1888832
aggcaaauguauucucuua

SEQ ID NO: 2560123 - RNA, 19 nt, Artificial Sequence
  Description of Artificial Sequence: Synthetic oligonucleotide
  Antisense strand to SEQ ID NO: 2560122
uaagagaauacauuugccu

SEQ ID NO: 2560124 - RNA, 19 nt, Artificial Sequence
  Description of Artificial Sequence: Synthetic oligonucleotide
  Sense strand starting at position 1578 of SEQ ID NO: 1888832
acucuucuguaguuuagaa

SEQ ID NO: 2560125 - RNA, 19 nt, Artificial Sequence
  Description of Artificial Sequence: Synthetic oligonucleotide
  Antisense strand to SEQ ID NO: 2560124
uucuaaacuacagaagagu

SEQ ID NO: 2560126 - RNA, 19 nt, Artificial Sequence
  Description of Artificial Sequence: Synthetic oligonucleotide
  Sense strand starting at position 1580 of SEQ ID NO: 1888832
ucuucuguaguuuagaaau

SEQ ID NO: 2560127 - RNA, 19 nt, Artificial Sequence
  Description of Artificial Sequence: Synthetic oligonucleotide
  Antisense strand to SEQ ID NO: 2560126
auuucuaaacuacagaaga

SEQ ID NO: 2560128 - RNA, 19 nt, Artificial Sequence
  Description of Artificial Sequence: Synthetic oligonucleotide
  Sense strand starting at position 28 of SEQ ID NO: 1888833
gguaguauaaucuagucau

SEQ ID NO: 2560129 - RNA, 19 nt, Artificial Sequence
  Description of Artificial Sequence: Synthetic oligonucleotide
  Antisense strand to SEQ ID NO: 2560128
augacuagauuauacuacc

SEQ ID NO: 2560130 - RNA, 19 nt, Artificial Sequence
  Description of Artificial Sequence: Synthetic oligonucleotide
  Sense strand starting at position 31 of SEQ ID NO: 1888833
aguauaaucuagucauguu

SEQ ID NO: 2560131 - RNA, 19 nt, Artificial Sequence
  Description of Artificial Sequence: Synthetic oligonucleotide
  Antisense strand to SEQ ID NO: 2560130
aacaugacuagauuauacu

SEQ ID NO: 2560132 - RNA, 19 nt, Artificial Sequence
  Description of Artificial Sequence: Synthetic oligonucleotide
  Sense strand starting at position 106 of SEQ ID NO: 1888833
acaugcuagccuugaauaa

SEQ ID NO: 2560133 - RNA, 19 nt, Artificial Sequence
  Description of Artificial Sequence: Synthetic oligonucleotide
  Antisense strand to SEQ ID NO: 2560132
uuauucaaggcuagcaugu

SEQ ID NO: 2560134 - RNA, 19 nt, Artificial Sequence
  Description of Artificial Sequence: Synthetic oligonucleotide
  Sense strand starting at position 369 of SEQ ID NO: 1888833
gcucuuugacaucaaagac

SEQ ID NO: 2560135 - RNA, 19 nt, Artificial Sequence
  Description of Artificial Sequence: Synthetic oligonucleotide
  Antisense strand to SEQ ID NO: 2560134
gucuuugaugucaaagagc

SEQ ID NO: 2560136 - RNA, 19 nt, Artificial Sequence
  Description of Artificial Sequence: Synthetic oligonucleotide
  Sense strand starting at position 429 of SEQ ID NO: 1888833
gagauuagugcauaaugug

SEQ ID NO: 2560137 - RNA, 19 nt, Artificial Sequence
  Description of Artificial Sequence: Synthetic oligonucleotide
  Antisense strand to SEQ ID NO: 2560136
cacauuaugcacuaaucuc

SEQ ID NO: 2560138 - RNA, 19 nt, Artificial Sequence
  Description of Artificial Sequence: Synthetic oligonucleotide
  Sense strand starting at position 438 of SEQ ID NO: 1888833
gcauaaugugaauguugaa

SEQ ID NO: 2560139 - RNA, 19 nt, Artificial Sequence
  Description of Artificial Sequence: Synthetic oligonucleotide
  Antisense strand to SEQ ID NO: 2560138
uucaacauucacauuaugc

SEQ ID NO: 2560140 - RNA, 19 nt, Artificial Sequence
  Description of Artificial Sequence: Synthetic oligonucleotide
  Sense strand starting at position 597 of SEQ ID NO: 1888833
cccagauauuguguuuaaa

SEQ ID NO: 2560141 - RNA, 19 nt, Artificial Sequence
  Description of Artificial Sequence: Synthetic oligonucleotide
  Antisense strand to SEQ ID NO: 2560140
uuuaaacacaauaucuggg

SEQ ID NO: 2560142 - RNA, 19 nt, Artificial Sequence
  Description of Artificial Sequence: Synthetic oligonucleotide
  Sense strand starting at position 833 of SEQ ID NO: 1888833
aucugauaacaguguauau

SEQ ID NO: 2560143 - RNA, 19 nt, Artificial Sequence
  Description of Artificial Sequence: Synthetic oligonucleotide
  Antisense strand to SEQ ID NO: 2560142
auauacacuguuaucagau

SEQ ID NO: 2560144 - RNA, 19 nt, Artificial Sequence
  Description of Artificial Sequence: Synthetic oligonucleotide
  Sense strand starting at position 835 of SEQ ID NO: 1888833
cugauaacaguguauauau

SEQ ID NO: 2560145 - RNA, 19 nt, Artificial Sequence
  Description of Artificial Sequence: Synthetic oligonucleotide
  Antisense strand to SEQ ID NO: 2560144
auauauacacuguuaucag

SEQ ID NO: 2560146 - RNA, 19 nt, Artificial Sequence
  Description of Artificial Sequence: Synthetic oligonucleotide
  Sense strand starting at position 901 of SEQ ID NO: 1888833
agaacacucuagucuuuga

SEQ ID NO: 2560147 - RNA, 19 nt, Artificial Sequence
  Description of Artificial Sequence: Synthetic oligonucleotide
  Antisense strand to SEQ ID NO: 2560146
ucaaagacuagaguguucu

SEQ ID NO: 2560148 - RNA, 19 nt, Artificial Sequence
  Description of Artificial Sequence: Synthetic oligonucleotide
  Sense strand starting at position 981 of SEQ ID NO: 1888833
gccuaauaucaggguaaua

SEQ ID NO: 2560149 - RNA, 19 nt, Artificial Sequence
  Description of Artificial Sequence: Synthetic oligonucleotide
  Antisense strand to SEQ ID NO: 2560148
uauuacccugauauuaggc

SEQ ID NO: 2560150 - RNA, 19 nt, Artificial Sequence
  Description of Artificial Sequence: Synthetic oligonucleotide
  Sense strand starting at position 1560 of SEQ ID NO: 1888833
auaagaaagugccucauau

SEQ ID NO: 2560151 - RNA, 19 nt, Artificial Sequence
  Description of Artificial Sequence: Synthetic oligonucleotide
  Antisense strand to SEQ ID NO: 2560150
auaugaggcacuuucuuau

SEQ ID NO: 2560152 - RNA, 19 nt, Artificial Sequence
  Description of Artificial Sequence: Synthetic oligonucleotide
  Sense strand starting at position 1562 of SEQ ID NO: 1888833
aagaaagugccucauauug

SEQ ID NO: 2560153 - RNA, 19 nt, Artificial Sequence
  Description of Artificial Sequence: Synthetic oligonucleotide
  Antisense strand to SEQ ID NO: 2560152
caauaugaggcacuuucuu

SEQ ID NO: 2560154 - RNA, 19 nt, Artificial Sequence
  Description of Artificial Sequence: Synthetic oligonucleotide
  Sense strand starting at position 1571 of SEQ ID NO: 1888833
ccucauauugauggaaggu

SEQ ID NO: 2560155 - RNA, 19 nt, Artificial Sequence
  Description of Artificial Sequence: Synthetic oligonucleotide
  Antisense strand to SEQ ID NO: 2560154
accuuccaucaauaugagg

SEQ ID NO: 2560156 - RNA, 19 nt, Artificial Sequence
  Description of Artificial Sequence: Synthetic oligonucleotide
  Sense strand starting at position 1868 of SEQ ID NO: 1888833
guagcauuauaccuaccau

SEQ ID NO: 2560157 - RNA, 19 nt, Artificial Sequence
  Description of Artificial Sequence: Synthetic oligonucleotide
  Antisense strand to SEQ ID NO: 2560156
augguagguauaaugcuac

SEQ ID NO: 2560158 - RNA, 19 nt, Artificial Sequence
  Description of Artificial Sequence: Synthetic oligonucleotide
  Sense strand starting at position 2034 of SEQ ID NO: 1888833
ggaacuauuccuugcgaug

SEQ ID NO: 2560159 - RNA, 19 nt, Artificial Sequence
  Description of Artificial Sequence: Synthetic oligonucleotide
  Antisense strand to SEQ ID NO: 2560158
caucgcaaggaauaguucc

SEQ ID NO: 2560160 - RNA, 19 nt, Artificial Sequence
  Description of Artificial Sequence: Synthetic oligonucleotide
  Sense strand starting at position 2039 of SEQ ID NO: 1888833
uauuccuugcgauggaaua

SEQ ID NO: 2560161 - RNA, 19 nt, Artificial Sequence
  Description of Artificial Sequence: Synthetic oligonucleotide
  Antisense strand to SEQ ID NO: 2560160
uauuccaucgcaaggaaua

SEQ ID NO: 2560162 - RNA, 19 nt, Artificial Sequence
  Description of Artificial Sequence: Synthetic oligonucleotide
  Sense strand starting at position 2040 of SEQ ID NO: 1888833
auuccuugcgauggaauaa

SEQ ID NO: 2560163 - RNA, 19 nt, Artificial Sequence
  Description of Artificial Sequence: Synthetic oligonucleotide
  Antisense strand to SEQ ID NO: 2560162
uuauuccaucgcaaggaau

SEQ ID NO: 2560164 - RNA, 19 nt, Artificial Sequence
  Description of Artificial Sequence: Synthetic oligonucleotide
  Sense strand starting at position 2245 of SEQ ID NO: 1888833
guacaaauaguuuggacua

SEQ ID NO: 2560165 - RNA, 19 nt, Artificial Sequence
  Description of Artificial Sequence: Synthetic oligonucleotide
  Antisense strand to SEQ ID NO: 2560164
uaguccaaacuauuuguac

SEQ ID NO: 2560166 - RNA, 19 nt, Artificial Sequence
  Description of Artificial Sequence: Synthetic oligonucleotide
  Sense strand starting at position 2338 of SEQ ID NO: 1888833
gaaguuuauuaucuggagu

SEQ ID NO: 2560167 - RNA, 19 nt, Artificial Sequence
  Description of Artificial Sequence: Synthetic oligonucleotide
  Antisense strand to SEQ ID NO: 2560166
acuccagauaauaaacuuc

SEQ ID NO: 2560168 - RNA, 19 nt, Artificial Sequence
  Description of Artificial Sequence: Synthetic oligonucleotide
  Sense strand starting at position 2341 of SEQ ID NO: 1888833
guuuauuaucuggagugcu

SEQ ID NO: 2560169 - RNA, 19 nt, Artificial Sequence
  Description of Artificial Sequence: Synthetic oligonucleotide
  Antisense strand to SEQ ID NO: 2560168
agcacuccagauaauaaac

SEQ ID NO: 2560170 - RNA, 19 nt, Artificial Sequence
  Description of Artificial Sequence: Synthetic oligonucleotide
  Sense strand starting at position 2387 of SEQ ID NO: 1888833
auauuucuguucgagaaga

SEQ ID NO: 2560171 - RNA, 19 nt, Artificial Sequence
  Description of Artificial Sequence: Synthetic oligonucleotide
  Antisense strand to SEQ ID NO: 2560170
ucuucucgaacagaaauau

SEQ ID NO: 2560172 - RNA, 19 nt, Artificial Sequence
  Description of Artificial Sequence: Synthetic oligonucleotide
  Sense strand starting at position 2437 of SEQ ID NO: 1888833
cugucuuucccugauccua

SEQ ID NO: 2560173 - RNA, 19 nt, Artificial Sequence
  Description of Artificial Sequence: Synthetic oligonucleotide
  Antisense strand to SEQ ID NO: 2560172
uaggaucagggaaagacag

SEQ ID NO: 2560174 - RNA, 19 nt, Artificial Sequence
  Description of Artificial Sequence: Synthetic oligonucleotide
  Sense strand starting at position 2508 of SEQ ID NO: 1888833
uuauuuccuugacagaaag

SEQ ID NO: 2560175 - RNA, 19 nt, Artificial Sequence
  Description of Artificial Sequence: Synthetic oligonucleotide
  Antisense strand to SEQ ID NO: 2560174
cuuucugucaaggaaauaa

SEQ ID NO: 2560176 - RNA, 19 nt, Artificial Sequence
  Description of Artificial Sequence: Synthetic oligonucleotide
  Sense strand starting at position 2629 of SEQ ID NO: 1888833
ugcuuuaagcuagaauaau

SEQ ID NO: 2560177 - RNA, 19 nt, Artificial Sequence
  Description of Artificial Sequence: Synthetic oligonucleotide
  Antisense strand to SEQ ID NO: 2560176
auuauucuagcuuaaagca

SEQ ID NO: 2560178 - RNA, 19 nt, Artificial Sequence
  Description of Artificial Sequence: Synthetic oligonucleotide
  Sense strand starting at position 2689 of SEQ ID NO: 1888833
caaauagacuauguaggua

SEQ ID NO: 2560179 - RNA, 19 nt, Artificial Sequence
  Description of Artificial Sequence: Synthetic oligonucleotide
  Antisense strand to SEQ ID NO: 2560178
uaccuacauagucuauuug

SEQ ID NO: 2560180 - RNA, 19 nt, Artificial Sequence
  Description of Artificial Sequence: Synthetic oligonucleotide
  Sense strand starting at position 2693 of SEQ ID NO: 1888833
uagacuauguagguaagaa

SEQ ID NO: 2560181 - RNA, 19 nt, Artificial Sequence
  Description of Artificial Sequence: Synthetic oligonucleotide
  Antisense strand to SEQ ID NO: 2560180
uucuuaccuacauagucua

SEQ ID NO: 2560182 - RNA, 19 nt, Artificial Sequence
  Description of Artificial Sequence: Synthetic oligonucleotide
  Sense strand starting at position 2766 of SEQ ID NO: 1888833
aagacuuaauuugggcaga

SEQ ID NO: 2560183 - RNA, 19 nt, Artificial Sequence
  Description of Artificial Sequence: Synthetic oligonucleotide
  Antisense strand to SEQ ID NO: 2560182
ucugcccaaauuaagucuu

SEQ ID NO: 2560184 - RNA, 19 nt, Artificial Sequence
  Description of Artificial Sequence: Synthetic oligonucleotide
  Sense strand starting at position 2767 of SEQ ID NO: 1888833
agacuuaauuugggcagaa

SEQ ID NO: 2560185 - RNA, 19 nt, Artificial Sequence
  Description of Artificial Sequence: Synthetic oligonucleotide
  Antisense strand to SEQ ID NO: 2560184
uucugcccaaauuaagucu

SEQ ID NO: 2560186 - RNA, 19 nt, Artificial Sequence
  Description of Artificial Sequence: Synthetic oligonucleotide
  Sense strand starting at position 2955 of SEQ ID NO: 1888833
ccagaauggccuugaucua

SEQ ID NO: 2560187 - RNA, 19 nt, Artificial Sequence
  Description of Artificial Sequence: Synthetic oligonucleotide
  Antisense strand to SEQ ID NO: 2560186
uagaucaaggccauucugg

SEQ ID NO: 2560188 - RNA, 19 nt, Artificial Sequence
  Description of Artificial Sequence: Synthetic oligonucleotide
  Sense strand starting at position 2988 of SEQ ID NO: 1888833
ccaucauggcccugauuac

SEQ ID NO: 2560189 - RNA, 19 nt, Artificial Sequence
  Description of Artificial Sequence: Synthetic oligonucleotide
  Antisense strand to SEQ ID NO: 2560188
guaaucagggccaugaugg

SEQ ID NO: 2560190 - RNA, 19 nt, Artificial Sequence
  Description of Artificial Sequence: Synthetic oligonucleotide
  Sense strand starting at position 3036 of SEQ ID NO: 1888833
cuaaauauggaguguaaca

SEQ ID NO: 2560191 - RNA, 19 nt, Artificial Sequence
  Description of Artificial Sequence: Synthetic oligonucleotide
  Antisense strand to SEQ ID NO: 2560190
uguuacacuccauauuuag

SEQ ID NO: 2560192 - RNA, 19 nt, Artificial Sequence
  Description of Artificial Sequence: Synthetic oligonucleotide
  Sense strand starting at position 3182 of SEQ ID NO: 1888833
acaagaaauuaagaggaca

SEQ ID NO: 2560193 - RNA, 19 nt, Artificial Sequence
  Description of Artificial Sequence: Synthetic oligonucleotide
  Antisense strand to SEQ ID NO: 2560192
uguccucuuaauuucuugu

SEQ ID NO: 2560194 - RNA, 19 nt, Artificial Sequence
  Description of Artificial Sequence: Synthetic oligonucleotide
  Sense strand starting at position 3206 of SEQ ID NO: 1888833
gaugaacuauacucaggua

SEQ ID NO: 2560195 - RNA, 19 nt, Artificial Sequence
  Description of Artificial Sequence: Synthetic oligonucleotide
  Antisense strand to SEQ ID NO: 2560194
uaccugaguauaguucauc

SEQ ID NO: 2560196 - RNA, 19 nt, Artificial Sequence
  Description of Artificial Sequence: Synthetic oligonucleotide
  Sense strand starting at position 3220 of SEQ ID NO: 1888833
agguaaauuuaaugugaag

SEQ ID NO: 2560197 - RNA, 19 nt, Artificial Sequence
  Description of Artificial Sequence: Synthetic oligonucleotide
  Antisense strand to SEQ ID NO: 2560196
cuucacauuaaauuuaccu

SEQ ID NO: 2560198 - RNA, 19 nt, Artificial Sequence
  Description of Artificial Sequence: Synthetic oligonucleotide
  Sense strand starting at position 3392 of SEQ ID NO: 1888833
uuguuaaaccuugagggca

SEQ ID NO: 2560199 - RNA, 19 nt, Artificial Sequence
  Description of Artificial Sequence: Synthetic oligonucleotide
  Antisense strand to SEQ ID NO: 2560198
ugcccucaagguuuaacaa

SEQ ID NO: 2560200 - RNA, 19 nt, Artificial Sequence
  Description of Artificial Sequence: Synthetic oligonucleotide
  Sense strand starting at position 3739 of SEQ ID NO: 1888833
gugauaaucuaguuaagau

SEQ ID NO: 2560201 - RNA, 19 nt, Artificial Sequence
  Description of Artificial Sequence: Synthetic oligonucleotide
  Antisense strand to SEQ ID NO: 2560200
aucuuaacuagauuaucac

SEQ ID NO: 2560202 - RNA, 19 nt, Artificial Sequence
  Description of Artificial Sequence: Synthetic oligonucleotide
  Sense strand starting at position 3920 of SEQ ID NO: 1888833
uuguguacccaguauuaac

SEQ ID NO: 2560203 - RNA, 19 nt, Artificial Sequence
  Description of Artificial Sequence: Synthetic oligonucleotide
  Antisense strand to SEQ ID NO: 2560202
guuaauacuggguacacaa

SEQ ID NO: 2560204 - RNA, 19 nt, Artificial Sequence
  Description of Artificial Sequence: Synthetic oligonucleotide
  Sense strand starting at position 3974 of SEQ ID NO: 1888833
auggucuacuaguccagaa

SEQ ID NO: 2560205 - RNA, 19 nt, Artificial Sequence
  Description of Artificial Sequence: Synthetic oligonucleotide
  Antisense strand to SEQ ID NO: 2560204
uucuggacuaguagaccau

SEQ ID NO: 2560206 - RNA, 19 nt, Artificial Sequence
  Description of Artificial Sequence: Synthetic oligonucleotide
  Sense strand starting at position 3978 of SEQ ID NO: 1888833
ucuacuaguccagaaagug

SEQ ID NO: 2560207 - RNA, 19 nt, Artificial Sequence
  Description of Artificial Sequence: Synthetic oligonucleotide
  Antisense strand to SEQ ID NO: 2560206
cacuuucuggacuaguaga

SEQ ID NO: 2560208 - RNA, 19 nt, Artificial Sequence
  Description of Artificial Sequence: Synthetic oligonucleotide
  Sense strand starting at position 263 of SEQ ID NO: 1888834
gagaguaaagcugaagucu

SEQ ID NO: 2560209 - RNA, 19 nt, Artificial Sequence
  Description of Artificial Sequence: Synthetic oligonucleotide
  Antisense strand to SEQ ID NO: 2560208
agacuucagcuuuacucuc

SEQ ID NO: 2560210 - RNA, 19 nt, Artificial Sequence
  Description of Artificial Sequence: Synthetic oligonucleotide
  Sense strand starting at position 283 of SEQ ID NO: 1888834
acaguuaauugucuuuaag

SEQ ID NO: 2560211 - RNA, 19 nt, Artificial Sequence
  Description of Artificial Sequence: Synthetic oligonucleotide
  Antisense strand to SEQ ID NO: 2560210
cuuaaagacaauuaacugu

SEQ ID NO: 2560212 - RNA, 19 nt, Artificial Sequence
  Description of Artificial Sequence: Synthetic oligonucleotide
  Sense strand starting at position 285 of SEQ ID NO: 1888834
aguuaauugucuuuaagac

SEQ ID NO: 2560213 - RNA, 19 nt, Artificial Sequence
  Description of Artificial Sequence: Synthetic oligonucleotide
  Antisense strand to SEQ ID NO: 2560212
gucuuaaagacaauuaacu

SEQ ID NO: 2560214 - RNA, 19 nt, Artificial Sequence
  Description of Artificial Sequence: Synthetic oligonucleotide
  Sense strand starting at position 286 of SEQ ID NO: 1888834
guuaauugucuuuaagacc

SEQ ID NO: 2560215 - RNA, 19 nt, Artificial Sequence
  Description of Artificial Sequence: Synthetic oligonucleotide
  Antisense strand to SEQ ID NO: 2560214
ggucuuaaagacaauuaac

SEQ ID NO: 2560216 - RNA, 19 nt, Artificial Sequence
  Description of Artificial Sequence: Synthetic oligonucleotide
  Sense strand starting at position 382 of SEQ ID NO: 1888834
gaccucugauguucuugaa

SEQ ID NO: 2560217 - RNA, 19 nt, Artificial Sequence
  Description of Artificial Sequence: Synthetic oligonucleotide
  Antisense strand to SEQ ID NO: 2560216
uucaagaacaucagagguc

SEQ ID NO: 2560218 - RNA, 19 nt, Artificial Sequence
  Description of Artificial Sequence: Synthetic oligonucleotide
  Sense strand starting at position 386 of SEQ ID NO: 1888834
ucugauguucuugaaaucu

SEQ ID NO: 2560219 - RNA, 19 nt, Artificial Sequence
  Description of Artificial Sequence: Synthetic oligonucleotide
  Antisense strand to SEQ ID NO: 2560218
agauuucaagaacaucaga

SEQ ID NO: 2560220 - RNA, 19 nt, Artificial Sequence
  Description of Artificial Sequence: Synthetic oligonucleotide
  Sense strand starting at position 427 of SEQ ID NO: 1888834
gcucccucucccuaggaaa

SEQ ID NO: 2560221 - RNA, 19 nt, Artificial Sequence
  Description of Artificial Sequence: Synthetic oligonucleotide
  Antisense strand to SEQ ID NO: 2560220
uuuccuagggagagggagc

SEQ ID NO: 2560222 - RNA, 19 nt, Artificial Sequence
  Description of Artificial Sequence: Synthetic oligonucleotide
  Sense strand starting at position 455 of SEQ ID NO: 1888834
cccagagauccgcacaacu

SEQ ID NO: 2560223 - RNA, 19 nt, Artificial Sequence
  Description of Artificial Sequence: Synthetic oligonucleotide
  Antisense strand to SEQ ID NO: 2560222
aguugugcggaucucuggg

SEQ ID NO: 2560224 - RNA, 19 nt, Artificial Sequence
  Description of Artificial Sequence: Synthetic oligonucleotide
  Sense strand starting at position 502 of SEQ ID NO: 1888834
aacgucaccuucucagaga

SEQ ID NO: 2560225 - RNA, 19 nt, Artificial Sequence
  Description of Artificial Sequence: Synthetic oligonucleotide
  Antisense strand to SEQ ID NO: 2560224
ucucugagaaggugacguu

SEQ ID NO: 2560226 - RNA, 19 nt, Artificial Sequence
  Description of Artificial Sequence: Synthetic oligonucleotide
  Sense strand starting at position 739 of SEQ ID NO: 1888834
ggacaugaauuguuguuua

SEQ ID NO: 2560227 - RNA, 19 nt, Artificial Sequence
  Description of Artificial Sequence: Synthetic oligonucleotide
  Antisense strand to SEQ ID NO: 2560226
uaaacaacaauucaugucc

SEQ ID NO: 2560228 - RNA, 19 nt, Artificial Sequence
  Description of Artificial Sequence: Synthetic oligonucleotide
  Sense strand starting at position 744 of SEQ ID NO: 1888834
ugaauuguuguuuaccaga

SEQ ID NO: 2560229 - RNA, 19 nt, Artificial Sequence
  Description of Artificial Sequence: Synthetic oligonucleotide
  Antisense strand to SEQ ID NO: 2560228
ucugguaaacaacaauuca

SEQ ID NO: 2560230 - RNA, 19 nt, Artificial Sequence
  Description of Artificial Sequence: Synthetic oligonucleotide
  Sense strand starting at position 749 of SEQ ID NO: 1888834
uguuguuuaccagaggacu

SEQ ID NO: 2560231 - RNA, 19 nt, Artificial Sequence
  Description of Artificial Sequence: Synthetic oligonucleotide
  Antisense strand to SEQ ID NO: 2560230
aguccucugguaaacaaca

SEQ ID NO: 2560232 - RNA, 19 nt, Artificial Sequence
  Description of Artificial Sequence: Synthetic oligonucleotide
  Sense strand starting at position 928 of SEQ ID NO: 1888834
ucugacuuauuccuaguga

SEQ ID NO: 2560233 - RNA, 19 nt, Artificial Sequence
  Description of Artificial Sequence: Synthetic oligonucleotide
  Antisense strand to SEQ ID NO: 2560232
ucacuaggaauaagucaga

SEQ ID NO: 2560234 - RNA, 19 nt, Artificial Sequence
  Description of Artificial Sequence: Synthetic oligonucleotide
  Sense strand starting at position 1324 of SEQ ID NO: 1888834
agguguuaaggucaaacuu

SEQ ID NO: 2560235 - RNA, 19 nt, Artificial Sequence
  Description of Artificial Sequence: Synthetic oligonucleotide
  Antisense strand to SEQ ID NO: 2560234
aaguuugaccuuaacaccu

SEQ ID NO: 2560236 - RNA, 19 nt, Artificial Sequence
  Description of Artificial Sequence: Synthetic oligonucleotide
  Sense strand starting at position 1892 of SEQ ID NO: 1888834
ggaacuuaccuguguagaa

SEQ ID NO: 2560237 - RNA, 19 nt, Artificial Sequence
  Description of Artificial Sequence: Synthetic oligonucleotide
  Antisense strand to SEQ ID NO: 2560236
uucuacacagguaaguucc

SEQ ID NO: 2560238 - RNA, 19 nt, Artificial Sequence
  Description of Artificial Sequence: Synthetic oligonucleotide
  Sense strand starting at position 1893 of SEQ ID NO: 1888834
gaacuuaccuguguagaaa

SEQ ID NO: 2560239 - RNA, 19 nt, Artificial Sequence
  Description of Artificial Sequence: Synthetic oligonucleotide
  Antisense strand to SEQ ID NO: 2560238
uuucuacacagguaaguuc

SEQ ID NO: 2560240 - RNA, 19 nt, Artificial Sequence
  Description of Artificial Sequence: Synthetic oligonucleotide
  Sense strand starting at position 2006 of SEQ ID NO: 1888834
caaggagugaguggaucua

SEQ ID NO: 2560241 - RNA, 19 nt, Artificial Sequence
  Description of Artificial Sequence: Synthetic oligonucleotide
  Antisense strand to SEQ ID NO: 2560240
uagauccacucacuccuug

SEQ ID NO: 2560242 - RNA, 19 nt, Artificial Sequence
  Description of Artificial Sequence: Synthetic oligonucleotide
  Sense strand starting at position 2018 of SEQ ID NO: 1888834
ggaucuagguuuccuggaa

SEQ ID NO: 2560243 - RNA, 19 nt, Artificial Sequence
  Description of Artificial Sequence: Synthetic oligonucleotide
  Antisense strand to SEQ ID NO: 2560242
uuccaggaaaccuagaucc

SEQ ID NO: 2560244 - RNA, 19 nt, Artificial Sequence
  Description of Artificial Sequence: Synthetic oligonucleotide
  Sense strand starting at position 2019 of SEQ ID NO: 1888834
gaucuagguuuccuggaau

SEQ ID NO: 2560245 - RNA, 19 nt, Artificial Sequence
  Description of Artificial Sequence: Synthetic oligonucleotide
  Antisense strand to SEQ ID NO: 2560244
auuccaggaaaccuagauc

SEQ ID NO: 2560246 - RNA, 19 nt, Artificial Sequence
  Description of Artificial Sequence: Synthetic oligonucleotide
  Sense strand starting at position 2022 of SEQ ID NO: 1888834
cuagguuuccuggaaugug

SEQ ID NO: 2560247 - RNA, 19 nt, Artificial Sequence
  Description of Artificial Sequence: Synthetic oligonucleotide
  Antisense strand to SEQ ID NO: 2560246
cacauuccaggaaaccuag

SEQ ID NO: 2560248 - RNA, 19 nt, Artificial Sequence
  Description of Artificial Sequence: Synthetic oligonucleotide
  Sense strand starting at position 2121 of SEQ ID NO: 1888834
uuacuuauauuugugagcu

SEQ ID NO: 2560249 - RNA, 19 nt, Artificial Sequence
  Description of Artificial Sequence: Synthetic oligonucleotide
  Antisense strand to SEQ ID NO: 2560248
agcucacaaauauaaguaa

SEQ ID NO: 2560250 - RNA, 19 nt, Artificial Sequence
  Description of Artificial Sequence: Synthetic oligonucleotide
  Sense strand starting at position 2125 of SEQ ID NO: 1888834
uuauauuugugagcugcuu

SEQ ID NO: 2560251 - RNA, 19 nt, Artificial Sequence
  Description of Artificial Sequence: Synthetic oligonucleotide
  Antisense strand to SEQ ID NO: 2560250
aagcagcucacaaauauaa

SEQ ID NO: 2560252 - RNA, 19 nt, Artificial Sequence
  Description of Artificial Sequence: Synthetic oligonucleotide
  Sense strand starting at position 2205 of SEQ ID NO: 1888834
uuugaugcaguguaacuaa

SEQ ID NO: 2560253 - RNA, 19 nt, Artificial Sequence
  Description of Artificial Sequence: Synthetic oligonucleotide
  Antisense strand to SEQ ID NO: 2560252
uuaguuacacugcaucaaa

SEQ ID NO: 2560254 - RNA, 19 nt, Artificial Sequence
  Description of Artificial Sequence: Synthetic oligonucleotide
  Sense strand starting at position 2290 of SEQ ID NO: 1888834
uagacuguugacuacaagu

SEQ ID NO: 2560255 - RNA, 19 nt, Artificial Sequence
  Description of Artificial Sequence: Synthetic oligonucleotide
  Antisense strand to SEQ ID NO: 2560254
acuuguagucaacagucua

SEQ ID NO: 2560256 - RNA, 19 nt, Artificial Sequence
  Description of Artificial Sequence: Synthetic oligonucleotide
  Sense strand starting at position 2292 of SEQ ID NO: 1888834
gacuguugacuacaaguua

SEQ ID NO: 2560257 - RNA, 19 nt, Artificial Sequence
  Description of Artificial Sequence: Synthetic oligonucleotide
  Antisense strand to SEQ ID NO: 2560256
uaacuuguagucaacaguc

SEQ ID NO: 2560258 - RNA, 19 nt, Artificial Sequence
  Description of Artificial Sequence: Synthetic oligonucleotide
  Sense strand starting at position 2299 of SEQ ID NO: 1888834
gacuacaaguuaguuaaga

SEQ ID NO: 2560259 - RNA, 19 nt, Artificial Sequence
  Description of Artificial Sequence: Synthetic oligonucleotide
  Antisense strand to SEQ ID NO: 2560258
ucuuaacuaacuuguaguc

SEQ ID NO: 2560260 - RNA, 19 nt, Artificial Sequence
  Description of Artificial Sequence: Synthetic oligonucleotide
  Sense strand starting at position 2342 of SEQ ID NO: 1888834
auagauccauguucugauu

SEQ ID NO: 2560261 - RNA, 19 nt, Artificial Sequence
  Description of Artificial Sequence: Synthetic oligonucleotide
  Antisense strand to SEQ ID NO: 2560260
aaucagaacauggaucuau

SEQ ID NO: 2560262 - RNA, 19 nt, Artificial Sequence
  Description of Artificial Sequence: Synthetic oligonucleotide
  Sense strand starting at position 2362 of SEQ ID NO: 1888834
caucauuuguuagcugagu

SEQ ID NO: 2560263 - RNA, 19 nt, Artificial Sequence
  Description of Artificial Sequence: Synthetic oligonucleotide
  Antisense strand to SEQ ID NO: 2560262
acucagcuaacaaaugaug

SEQ ID NO: 2560264 - RNA, 19 nt, Artificial Sequence
  Description of Artificial Sequence: Synthetic oligonucleotide
  Sense strand starting at position 2364 of SEQ ID NO: 1888834
ucauuuguuagcugaguga

SEQ ID NO: 2560265 - RNA, 19 nt, Artificial Sequence
  Description of Artificial Sequence: Synthetic oligonucleotide
  Antisense strand to SEQ ID NO: 2560264
ucacucagcuaacaaauga

SEQ ID NO: 2560266 - RNA, 19 nt, Artificial Sequence
  Description of Artificial Sequence: Synthetic oligonucleotide
  Sense strand starting at position 2373 of SEQ ID NO: 1888834
agcugagugagauauagca

SEQ ID NO: 2560267 - RNA, 19 nt, Artificial Sequence
  Description of Artificial Sequence: Synthetic oligonucleotide
  Antisense strand to SEQ ID NO: 2560266
ugcuauaucucacucagcu

SEQ ID NO: 2560268 - RNA, 19 nt, Artificial Sequence
  Description of Artificial Sequence: Synthetic oligonucleotide
  Sense strand starting at position 2768 of SEQ ID NO: 1888834
ucugaaauuugacaagaua

SEQ ID NO: 2560269 - RNA, 19 nt, Artificial Sequence
  Description of Artificial Sequence: Synthetic oligonucleotide
  Antisense strand to SEQ ID NO: 2560268
uaucuugucaaauuucaga

SEQ ID NO: 2560270 - RNA, 19 nt, Artificial Sequence
  Description of Artificial Sequence: Synthetic oligonucleotide
  Sense strand starting at position 3040 of SEQ ID NO: 1888834
aguggagaguagucauaau

SEQ ID NO: 2560271 - RNA, 19 nt, Artificial Sequence
  Description of Artificial Sequence: Synthetic oligonucleotide
  Antisense strand to SEQ ID NO: 2560270
auuaugacuacucuccacu

SEQ ID NO: 2560272 - RNA, 19 nt, Artificial Sequence
  Description of Artificial Sequence: Synthetic oligonucleotide
  Sense strand starting at position 3470 of SEQ ID NO: 1888834
aguagagaguuucugggaa

SEQ ID NO: 2560273 - RNA, 19 nt, Artificial Sequence
  Description of Artificial Sequence: Synthetic oligonucleotide
  Antisense strand to SEQ ID NO: 2560272
uucccagaaacucucuacu

SEQ ID NO: 2560274 - RNA, 19 nt, Artificial Sequence
  Description of Artificial Sequence: Synthetic oligonucleotide
  Sense strand starting at position 3630 of SEQ ID NO: 1888834
uuuaacagcuuucuaggaa

SEQ ID NO: 2560275 - RNA, 19 nt, Artificial Sequence
  Description of Artificial Sequence: Synthetic oligonucleotide
  Antisense strand to SEQ ID NO: 2560274
uuccuagaaagcuguuaaa

SEQ ID NO: 2560276 - RNA, 19 nt, Artificial Sequence
  Description of Artificial Sequence: Synthetic oligonucleotide
  Sense strand starting at position 3697 of SEQ ID NO: 1888834
gagguaagguucucuagga

SEQ ID NO: 2560277 - RNA, 19 nt, Artificial Sequence
  Description of Artificial Sequence: Synthetic oligonucleotide
  Antisense strand to SEQ ID NO: 2560276
uccuagagaaccuuaccuc

SEQ ID NO: 2560278 - RNA, 19 nt, Artificial Sequence
  Description of Artificial Sequence: Synthetic oligonucleotide
  Sense strand starting at position 3698 of SEQ ID NO: 1888834
agguaagguucucuaggau

SEQ ID NO: 2560279 - RNA, 19 nt, Artificial Sequence
  Description of Artificial Sequence: Synthetic oligonucleotide
  Antisense strand to SEQ ID NO: 2560278
auccuagagaaccuuaccu

SEQ ID NO: 2560280 - RNA, 19 nt, Artificial Sequence
  Description of Artificial Sequence: Synthetic oligonucleotide
  Sense strand starting at position 3701 of SEQ ID NO: 1888834
uaagguucucuaggauuaa

SEQ ID NO: 2560281 - RNA, 19 nt, Artificial Sequence
  Description of Artificial Sequence: Synthetic oligonucleotide
  Antisense strand to SEQ ID NO: 2560280
uuaauccuagagaaccuua

SEQ ID NO: 2560282 - RNA, 19 nt, Artificial Sequence
  Description of Artificial Sequence: Synthetic oligonucleotide
  Sense strand starting at position 3779 of SEQ ID NO: 1888834
cuguccucuccaggaugaa

SEQ ID NO: 2560283 - RNA, 19 nt, Artificial Sequence
  Description of Artificial Sequence: Synthetic oligonucleotide
  Antisense strand to SEQ ID NO: 2560282
uucauccuggagaggacag

SEQ ID NO: 2560284 - RNA, 19 nt, Artificial Sequence
  Description of Artificial Sequence: Synthetic oligonucleotide
  Sense strand starting at position 3799 of SEQ ID NO: 1888834
uuuauauuggcucagcaga

SEQ ID NO: 2560285 - RNA, 19 nt, Artificial Sequence
  Description of Artificial Sequence: Synthetic oligonucleotide
  Antisense strand to SEQ ID NO: 2560284
ucugcugagccaauauaaa

SEQ ID NO: 2560286 - RNA, 19 nt, Artificial Sequence
  Description of Artificial Sequence: Synthetic oligonucleotide
  Sense strand starting at position 3933 of SEQ ID NO: 1888834
agucauucaguggauguga

SEQ ID NO: 2560287 - RNA, 19 nt, Artificial Sequence
  Description of Artificial Sequence: Synthetic oligonucleotide
  Antisense strand to SEQ ID NO: 2560286
ucacauccacugaaugacu

SEQ ID NO: 2560288 - RNA, 19 nt, Artificial Sequence
  Description of Artificial Sequence: Synthetic oligonucleotide
  Sense strand starting at position 469 of SEQ ID NO: 1888835
gcugucaacauuuggugau

SEQ ID NO: 2560289 - RNA, 19 nt, Artificial Sequence
  Description of Artificial Sequence: Synthetic oligonucleotide
  Antisense strand to SEQ ID NO: 2560288
aucaccaaauguugacagc

SEQ ID NO: 2560290 - RNA, 19 nt, Artificial Sequence
  Description of Artificial Sequence: Synthetic oligonucleotide
  Sense strand starting at position 479 of SEQ ID NO: 1888835
uuuggugauugguucaguu

SEQ ID NO: 2560291 - RNA, 19 nt, Artificial Sequence
  Description of Artificial Sequence: Synthetic oligonucleotide
  Antisense strand to SEQ ID NO: 2560290
aacugaaccaaucaccaaa

SEQ ID NO: 2560292 - RNA, 19 nt, Artificial Sequence
  Description of Artificial Sequence: Synthetic oligonucleotide
  Sense strand starting at position 481 of SEQ ID NO: 1888835
uggugauugguucaguuua

SEQ ID NO: 2560293 - RNA, 19 nt, Artificial Sequence
  Description of Artificial Sequence: Synthetic oligonucleotide
  Antisense strand to SEQ ID NO: 2560292
uaaacugaaccaaucacca

SEQ ID NO: 2560294 - RNA, 19 nt, Artificial Sequence
  Description of Artificial Sequence: Synthetic oligonucleotide
  Sense strand starting at position 483 of SEQ ID NO: 1888835
gugauugguucaguuuaga

SEQ ID NO: 2560295 - RNA, 19 nt, Artificial Sequence
  Description of Artificial Sequence: Synthetic oligonucleotide
  Antisense strand to SEQ ID NO: 2560294
ucuaaacugaaccaaucac

SEQ ID NO: 2560296 - RNA, 19 nt, Artificial Sequence
  Description of Artificial Sequence: Synthetic oligonucleotide
  Sense strand starting at position 564 of SEQ ID NO: 1888835
ugucucaaccuuuggaaua

SEQ ID NO: 2560297 - RNA, 19 nt, Artificial Sequence
  Description of Artificial Sequence: Synthetic oligonucleotide
  Antisense strand to SEQ ID NO: 2560296
uauuccaaagguugagaca

SEQ ID NO: 2560298 - RNA, 19 nt, Artificial Sequence
  Description of Artificial Sequence: Synthetic oligonucleotide
  Sense strand starting at position 612 of SEQ ID NO: 1888835
cugcauguccucuagacca

SEQ ID NO: 2560299 - RNA, 19 nt, Artificial Sequence
  Description of Artificial Sequence: Synthetic oligonucleotide
  Antisense strand to SEQ ID NO: 2560298
uggucuagaggacaugcag

SEQ ID NO: 2560300 - RNA, 19 nt, Artificial Sequence
  Description of Artificial Sequence: Synthetic oligonucleotide
  Sense strand starting at position 614 of SEQ ID NO: 1888835
gcauguccucuagaccaaa

SEQ ID NO: 2560301 - RNA, 19 nt, Artificial Sequence
  Description of Artificial Sequence: Synthetic oligonucleotide
  Antisense strand to SEQ ID NO: 2560300
uuuggucuagaggacaugc

SEQ ID NO: 2560302 - RNA, 19 nt, Artificial Sequence
  Description of Artificial Sequence: Synthetic oligonucleotide
  Sense strand starting at position 752 of SEQ ID NO: 1888835
uggguuucuucccuaagca

SEQ ID NO: 2560303 - RNA, 19 nt, Artificial Sequence
  Description of Artificial Sequence: Synthetic oligonucleotide
  Antisense strand to SEQ ID NO: 2560302
ugcuuagggaagaaaccca

SEQ ID NO: 2560304 - RNA, 19 nt, Artificial Sequence
  Description of Artificial Sequence: Synthetic oligonucleotide
  Sense strand starting at position 753 of SEQ ID NO: 1888835
ggguuucuucccuaagcau

SEQ ID NO: 2560305 - RNA, 19 nt, Artificial Sequence
  Description of Artificial Sequence: Synthetic oligonucleotide
  Antisense strand to SEQ ID NO: 2560304
augcuuagggaagaaaccc

SEQ ID NO: 2560306 - RNA, 19 nt, Artificial Sequence
  Description of Artificial Sequence: Synthetic oligonucleotide
  Sense strand starting at position 817 of SEQ ID NO: 1888835
ccgcauuccagaggaagua

SEQ ID NO: 2560307 - RNA, 19 nt, Artificial Sequence
  Description of Artificial Sequence: Synthetic oligonucleotide
  Antisense strand to SEQ ID NO: 2560306
uacuuccucuggaaugcgg

SEQ ID NO: 2560308 - RNA, 19 nt, Artificial Sequence
  Description of Artificial Sequence: Synthetic oligonucleotide
  Sense strand starting at position 818 of SEQ ID NO: 1888835
cgcauuccagaggaaguau

SEQ ID NO: 2560309 - RNA, 19 nt, Artificial Sequence
  Description of Artificial Sequence: Synthetic oligonucleotide
  Antisense strand to SEQ ID NO: 2560308
auacuuccucuggaaugcg

SEQ ID NO: 2560310 - RNA, 19 nt, Artificial Sequence
  Description of Artificial Sequence: Synthetic oligonucleotide
  Sense strand starting at position 902 of SEQ ID NO: 1888835
cuggauucuccugggauac

SEQ ID NO: 2560311 - RNA, 19 nt, Artificial Sequence
  Description of Artificial Sequence: Synthetic oligonucleotide
  Antisense strand to SEQ ID NO: 2560310
guaucccaggagaauccag

SEQ ID NO: 2560312 - RNA, 19 nt, Artificial Sequence
  Description of Artificial Sequence: Synthetic oligonucleotide
  Sense strand starting at position 903 of SEQ ID NO: 1888835
uggauucuccugggauaca

SEQ ID NO: 2560313 - RNA, 19 nt, Artificial Sequence
  Description of Artificial Sequence: Synthetic oligonucleotide
  Antisense strand to SEQ ID NO: 2560312
uguaucccaggagaaucca

SEQ ID NO: 2560314 - RNA, 19 nt, Artificial Sequence
  Description of Artificial Sequence: Synthetic oligonucleotide
  Sense strand starting at position 953 of SEQ ID NO: 1888835
cuaguuaaggccuggaaau

SEQ ID NO: 2560315 - RNA, 19 nt, Artificial Sequence
  Description of Artificial Sequence: Synthetic oligonucleotide
  Antisense strand to SEQ ID NO: 2560314
auuuccaggccuuaacuag

SEQ ID NO: 2560316 - RNA, 19 nt, Artificial Sequence
  Description of Artificial Sequence: Synthetic oligonucleotide
  Sense strand starting at position 954 of SEQ ID NO: 1888835
uaguuaaggccuggaaaug

SEQ ID NO: 2560317 - RNA, 19 nt, Artificial Sequence
  Description of Artificial Sequence: Synthetic oligonucleotide
  Antisense strand to SEQ ID NO: 2560316
cauuuccaggccuuaacua

SEQ ID NO: 2560318 - RNA, 19 nt, Artificial Sequence
  Description of Artificial Sequence: Synthetic oligonucleotide
  Sense strand starting at position 1117 of SEQ ID NO: 1888835
ccacuauccuaguccuagu

SEQ ID NO: 2560319 - RNA, 19 nt, Artificial Sequence
  Description of Artificial Sequence: Synthetic oligonucleotide
  Antisense strand to SEQ ID NO: 2560318
acuaggacuaggauagugg

SEQ ID NO: 2560320 - RNA, 19 nt, Artificial Sequence
  Description of Artificial Sequence: Synthetic oligonucleotide
  Sense strand starting at position 1125 of SEQ ID NO: 1888835
cuaguccuagucugaauca

SEQ ID NO: 2560321 - RNA, 19 nt, Artificial Sequence
  Description of Artificial Sequence: Synthetic oligonucleotide
  Antisense strand to SEQ ID NO: 2560320
ugauucagacuaggacuag

SEQ ID NO: 2560322 - RNA, 19 nt, Artificial Sequence
  Description of Artificial Sequence: Synthetic oligonucleotide
  Sense strand starting at position 1618 of SEQ ID NO: 1888835
cucguucuaagggauuaca

SEQ ID NO: 2560323 - RNA, 19 nt, Artificial Sequence
  Description of Artificial Sequence: Synthetic oligonucleotide
  Antisense strand to SEQ ID NO: 2560322
uguaaucccuuagaacgag

SEQ ID NO: 2560324 - RNA, 19 nt, Artificial Sequence
  Description of Artificial Sequence: Synthetic oligonucleotide
  Sense strand starting at position 2832 of SEQ ID NO: 1888835
ugggaaggccuguaguaaa

SEQ ID NO: 2560325 - RNA, 19 nt, Artificial Sequence
  Description of Artificial Sequence: Synthetic oligonucleotide
  Antisense strand to SEQ ID NO: 2560324
uuuacuacaggccuuccca

SEQ ID NO: 2560326 - RNA, 19 nt, Artificial Sequence
  Description of Artificial Sequence: Synthetic oligonucleotide
  Sense strand starting at position 2865 of SEQ ID NO: 1888835
uggcgacagccucggaaau

SEQ ID NO: 2560327 - RNA, 19 nt, Artificial Sequence
  Description of Artificial Sequence: Synthetic oligonucleotide
  Antisense strand to SEQ ID NO: 2560326
auuuccgaggcugucgcca

SEQ ID NO: 2560328 - RNA, 19 nt, Artificial Sequence
  Description of Artificial Sequence: Synthetic oligonucleotide
  Sense strand starting at position 2948 of SEQ ID NO: 1888835
uuggauaucugacuuaguc

SEQ ID NO: 2560329 - RNA, 19 nt, Artificial Sequence
  Description of Artificial Sequence: Synthetic oligonucleotide
  Antisense strand to SEQ ID NO: 2560328
gacuaagucagauauccaa

SEQ ID NO: 2560330 - RNA, 19 nt, Artificial Sequence
  Description of Artificial Sequence: Synthetic oligonucleotide
  Sense strand starting at position 2958 of SEQ ID NO: 1888835
gacuuaguccaauauggug

SEQ ID NO: 2560331 - RNA, 19 nt, Artificial Sequence
  Description of Artificial Sequence: Synthetic oligonucleotide
  Antisense strand to SEQ ID NO: 2560330
caccauauuggacuaaguc

SEQ ID NO: 2560332 - RNA, 19 nt, Artificial Sequence
  Description of Artificial Sequence: Synthetic oligonucleotide
  Sense strand starting at position 2982 of SEQ ID NO: 1888835
ggauuaucgucccuguuug

SEQ ID NO: 2560333 - RNA, 19 nt, Artificial Sequence
  Description of Artificial Sequence: Synthetic oligonucleotide
  Antisense strand to SEQ ID NO: 2560332
caaacagggacgauaaucc

SEQ ID NO: 2560334 - RNA, 19 nt, Artificial Sequence
  Description of Artificial Sequence: Synthetic oligonucleotide
  Sense strand starting at position 2990 of SEQ ID NO: 1888835
gucccuguuuguuuauaga

SEQ ID NO: 2560335 - RNA, 19 nt, Artificial Sequence
  Description of Artificial Sequence: Synthetic oligonucleotide
  Antisense strand to SEQ ID NO: 2560334
ucuauaaacaaacagggac

SEQ ID NO: 2560336 - RNA, 19 nt, Artificial Sequence
  Description of Artificial Sequence: Synthetic oligonucleotide
  Sense strand starting at position 2997 of SEQ ID NO: 1888835
uuuguuuauagaugagaag

SEQ ID NO: 2560337 - RNA, 19 nt, Artificial Sequence
  Description of Artificial Sequence: Synthetic oligonucleotide
  Antisense strand to SEQ ID NO: 2560336
cuucucaucuauaaacaaa

SEQ ID NO: 2560338 - RNA, 19 nt, Artificial Sequence
  Description of Artificial Sequence: Synthetic oligonucleotide
  Sense strand starting at position 3073 of SEQ ID NO: 1888835
uuguaauucuagcugugau

SEQ ID NO: 2560339 - RNA, 19 nt, Artificial Sequence
  Description of Artificial Sequence: Synthetic oligonucleotide
  Antisense strand to SEQ ID NO: 2560338
aucacagcuagaauuacaa

SEQ ID NO: 2560340 - RNA, 19 nt, Artificial Sequence
  Description of Artificial Sequence: Synthetic oligonucleotide
  Sense strand starting at position 3074 of SEQ ID NO: 1888835
uguaauucuagcugugaug

SEQ ID NO: 2560341 - RNA, 19 nt, Artificial Sequence
  Description of Artificial Sequence: Synthetic oligonucleotide
  Antisense strand to SEQ ID NO: 2560340
caucacagcuagaauuaca

SEQ ID NO: 2560342 - RNA, 19 nt, Artificial Sequence
  Description of Artificial Sequence: Synthetic oligonucleotide
  Sense strand starting at position 3076 of SEQ ID NO: 1888835
uaauucuagcugugaugau

SEQ ID NO: 2560343 - RNA, 19 nt, Artificial Sequence
  Description of Artificial Sequence: Synthetic oligonucleotide
  Antisense strand to SEQ ID NO: 2560342
aucaucacagcuagaauua

SEQ ID NO: 2560344 - RNA, 19 nt, Artificial Sequence
  Description of Artificial Sequence: Synthetic oligonucleotide
  Sense strand starting at position 3080 of SEQ ID NO: 1888835
ucuagcugugaugaucaua

SEQ ID NO: 2560345 - RNA, 19 nt, Artificial Sequence
  Description of Artificial Sequence: Synthetic oligonucleotide
  Antisense strand to SEQ ID NO: 2560344
uaugaucaucacagcuaga

SEQ ID NO: 2560346 - RNA, 19 nt, Artificial Sequence
  Description of Artificial Sequence: Synthetic oligonucleotide
  Sense strand starting at position 3083 of SEQ ID NO: 1888835
agcugugaugaucauaaua

SEQ ID NO: 2560347 - RNA, 19 nt, Artificial Sequence
  Description of Artificial Sequence: Synthetic oligonucleotide
  Antisense strand to SEQ ID NO: 2560346
uauuaugaucaucacagcu

SEQ ID NO: 2560348 - RNA, 19 nt, Artificial Sequence
  Description of Artificial Sequence: Synthetic oligonucleotide
  Sense strand starting at position 3155 of SEQ ID NO: 1888835
ugaugucauuaucuugguu

SEQ ID NO: 2560349 - RNA, 19 nt, Artificial Sequence
  Description of Artificial Sequence: Synthetic oligonucleotide
  Antisense strand to SEQ ID NO: 2560348
aaccaagauaaugacauca

SEQ ID NO: 2560350 - RNA, 19 nt, Artificial Sequence
  Description of Artificial Sequence: Synthetic oligonucleotide
  Sense strand starting at position 3185 of SEQ ID NO: 1888835
gaaaguaagguuugucgag

SEQ ID NO: 2560351 - RNA, 19 nt, Artificial Sequence
  Description of Artificial Sequence: Synthetic oligonucleotide
  Antisense strand to SEQ ID NO: 2560350
cucgacaaaccuuacuuuc

SEQ ID NO: 2560352 - RNA, 19 nt, Artificial Sequence
  Description of Artificial Sequence: Synthetic oligonucleotide
  Sense strand starting at position 3186 of SEQ ID NO: 1888835
aaaguaagguuugucgaga

SEQ ID NO: 2560353 - RNA, 19 nt, Artificial Sequence
  Description of Artificial Sequence: Synthetic oligonucleotide
  Antisense strand to SEQ ID NO: 2560352
ucucgacaaaccuuacuuu

SEQ ID NO: 2560354 - RNA, 19 nt, Artificial Sequence
  Description of Artificial Sequence: Synthetic oligonucleotide
  Sense strand starting at position 3187 of SEQ ID NO: 1888835
aaguaagguuugucgagau

SEQ ID NO: 2560355 - RNA, 19 nt, Artificial Sequence
  Description of Artificial Sequence: Synthetic oligonucleotide
  Antisense strand to SEQ ID NO: 2560354
aucucgacaaaccuuacuu

SEQ ID NO: 2560356 - RNA, 19 nt, Artificial Sequence
  Description of Artificial Sequence: Synthetic oligonucleotide
  Sense strand starting at position 3191 of SEQ ID NO: 1888835
aagguuugucgagauacaa

SEQ ID NO: 2560357 - RNA, 19 nt, Artificial Sequence
  Description of Artificial Sequence: Synthetic oligonucleotide
  Antisense strand to SEQ ID NO: 2560356
uuguaucucgacaaaccuu

SEQ ID NO: 2560358 - RNA, 19 nt, Artificial Sequence
  Description of Artificial Sequence: Synthetic oligonucleotide
  Sense strand starting at position 3406 of SEQ ID NO: 1888835
ggcucauugcccuuguagu

SEQ ID NO: 2560359 - RNA, 19 nt, Artificial Sequence
  Description of Artificial Sequence: Synthetic oligonucleotide
  Antisense strand to SEQ ID NO: 2560358
acuacaagggcaaugagcc

SEQ ID NO: 2560360 - RNA, 19 nt, Artificial Sequence
  Description of Artificial Sequence: Synthetic oligonucleotide
  Sense strand starting at position 3551 of SEQ ID NO: 1888835
aaucuuugugaaugacagu

SEQ ID NO: 2560361 - RNA, 19 nt, Artificial Sequence
  Description of Artificial Sequence: Synthetic oligonucleotide
  Antisense strand to SEQ ID NO: 2560360
acugucauucacaaagauu

SEQ ID NO: 2560362 - RNA, 19 nt, Artificial Sequence
  Description of Artificial Sequence: Synthetic oligonucleotide
  Sense strand starting at position 3600 of SEQ ID NO: 1888835
auaucagagggcugugagu

SEQ ID NO: 2560363 - RNA, 19 nt, Artificial Sequence
  Description of Artificial Sequence: Synthetic oligonucleotide
  Antisense strand to SEQ ID NO: 2560362
acucacagcccucugauau

SEQ ID NO: 2560364 - RNA, 19 nt, Artificial Sequence
  Description of Artificial Sequence: Synthetic oligonucleotide
  Sense strand starting at position 3606 of SEQ ID NO: 1888835
gagggcugugagugggaaa

SEQ ID NO: 2560365 - RNA, 19 nt, Artificial Sequence
  Description of Artificial Sequence: Synthetic oligonucleotide
  Antisense strand to SEQ ID NO: 2560364
uuucccacucacagcccuc

SEQ ID NO: 2560366 - RNA, 19 nt, Artificial Sequence
  Description of Artificial Sequence: Synthetic oligonucleotide
  Sense strand starting at position 3607 of SEQ ID NO: 1888835
agggcugugagugggaaau

SEQ ID NO: 2560367 - RNA, 19 nt, Artificial Sequence
  Description of Artificial Sequence: Synthetic oligonucleotide
  Antisense strand to SEQ ID NO: 2560366
auuucccacucacagcccu

SEQ ID NO: 2560368 - RNA, 19 nt, Artificial Sequence
  Description of Artificial Sequence: Synthetic oligonucleotide
  Sense strand starting at position 98 of SEQ ID NO: 1888836
uugggagucugagaagaaa

SEQ ID NO: 2560369 - RNA, 19 nt, Artificial Sequence
  Description of Artificial Sequence: Synthetic oligonucleotide
  Antisense strand to SEQ ID NO: 2560368
uuucuucucagacucccaa

SEQ ID NO: 2560370 - RNA, 19 nt, Artificial Sequence
  Description of Artificial Sequence: Synthetic oligonucleotide
  Sense strand starting at position 112 of SEQ ID NO: 1888836
agaaauaccucucagagca

SEQ ID NO: 2560371 - RNA, 19 nt, Artificial Sequence
  Description of Artificial Sequence: Synthetic oligonucleotide
  Antisense strand to SEQ ID NO: 2560370
ugcucugagagguauuucu

SEQ ID NO: 2560372 - RNA, 19 nt, Artificial Sequence
  Description of Artificial Sequence: Synthetic oligonucleotide
  Sense strand starting at position 169 of SEQ ID NO: 1888836
cuguacuuuguauaaaggu

SEQ ID NO: 2560373 - RNA, 19 nt, Artificial Sequence
  Description of Artificial Sequence: Synthetic oligonucleotide
  Antisense strand to SEQ ID NO: 2560372
accuuuauacaaaguacag

SEQ ID NO: 2560374 - RNA, 19 nt, Artificial Sequence
  Description of Artificial Sequence: Synthetic oligonucleotide
  Sense strand starting at position 178 of SEQ ID NO: 1888836
guauaaagguggcugauca

SEQ ID NO: 2560375 - RNA, 19 nt, Artificial Sequence
  Description of Artificial Sequence: Synthetic oligonucleotide
  Antisense strand to SEQ ID NO: 2560374
ugaucagccaccuuuauac

SEQ ID NO: 2560376 - RNA, 19 nt, Artificial Sequence
  Description of Artificial Sequence: Synthetic oligonucleotide
  Sense strand starting at position 245 of SEQ ID NO: 1888836
uugggcauuccugaaccuu

SEQ ID NO: 2560377 - RNA, 19 nt, Artificial Sequence
  Description of Artificial Sequence: Synthetic oligonucleotide
  Antisense strand to SEQ ID NO: 2560376
aagguucaggaaugcccaa

SEQ ID NO: 2560378 - RNA, 19 nt, Artificial Sequence
  Description of Artificial Sequence: Synthetic oligonucleotide
  Sense strand starting at position 266 of SEQ ID NO: 1888836
gcuccuuauccucaaagga

SEQ ID NO: 2560379 - RNA, 19 nt, Artificial Sequence
  Description of Artificial Sequence: Synthetic oligonucleotide
  Antisense strand to SEQ ID NO: 2560378
uccuuugaggauaaggagc

SEQ ID NO: 2560380 - RNA, 19 nt, Artificial Sequence
  Description of Artificial Sequence: Synthetic oligonucleotide
  Sense strand starting at position 296 of SEQ ID NO: 1888836
ugggcaaaguaguuaacuu

SEQ ID NO: 2560381 - RNA, 19 nt, Artificial Sequence
  Description of Artificial Sequence: Synthetic oligonucleotide
  Antisense strand to SEQ ID NO: 2560380
aaguuaacuacuuugccca

SEQ ID NO: 2560382 - RNA, 19 nt, Artificial Sequence
  Description of Artificial Sequence: Synthetic oligonucleotide
  Sense strand starting at position 304 of SEQ ID NO: 1888836
guaguuaacuucucugcuu

SEQ ID NO: 2560383 - RNA, 19 nt, Artificial Sequence
  Description of Artificial Sequence: Synthetic oligonucleotide
  Antisense strand to SEQ ID NO: 2560382
aagcagagaaguuaacuac

SEQ ID NO: 2560384 - RNA, 19 nt, Artificial Sequence
  Description of Artificial Sequence: Synthetic oligonucleotide
  Sense strand starting at position 433 of SEQ ID NO: 1888836
cuguaacuacugugccaua

SEQ ID NO: 2560385 - RNA, 19 nt, Artificial Sequence
  Description of Artificial Sequence: Synthetic oligonucleotide
  Antisense strand to SEQ ID NO: 2560384
uauggcacaguaguuacag

SEQ ID NO: 2560386 - RNA, 19 nt, Artificial Sequence
  Description of Artificial Sequence: Synthetic oligonucleotide
  Sense strand starting at position 438 of SEQ ID NO: 1888836
acuacugugccauagaaug

SEQ ID NO: 2560387 - RNA, 19 nt, Artificial Sequence
  Description of Artificial Sequence: Synthetic oligonucleotide
  Antisense strand to SEQ ID NO: 2560386
cauucuauggcacaguagu

SEQ ID NO: 2560388 - RNA, 19 nt, Artificial Sequence
  Description of Artificial Sequence: Synthetic oligonucleotide
  Sense strand starting at position 482 of SEQ ID NO: 1888836
gcuccaaacucucugagca

SEQ ID NO: 2560389 - RNA, 19 nt, Artificial Sequence
  Description of Artificial Sequence: Synthetic oligonucleotide
  Antisense strand to SEQ ID NO: 2560388
ugcucagagaguuuggagc

SEQ ID NO: 2560390 - RNA, 19 nt, Artificial Sequence
  Description of Artificial Sequence: Synthetic oligonucleotide
  Sense strand starting at position 554 of SEQ ID NO: 1888836
ucauuaaagucaguagacu

SEQ ID NO: 2560391 - RNA, 19 nt, Artificial Sequence
  Description of Artificial Sequence: Synthetic oligonucleotide
  Antisense strand to SEQ ID NO: 2560390
agucuacugacuuuaauga

SEQ ID NO: 2560392 - RNA, 19 nt, Artificial Sequence
  Description of Artificial Sequence: Synthetic oligonucleotide
  Sense strand starting at position 675 of SEQ ID NO: 1888836
cagggaugcuugcuuaguu

SEQ ID NO: 2560393 - RNA, 19 nt, Artificial Sequence
  Description of Artificial Sequence: Synthetic oligonucleotide
  Antisense strand to SEQ ID NO: 2560392
aacuaagcaagcaucccug

SEQ ID NO: 2560394 - RNA, 19 nt, Artificial Sequence
  Description of Artificial Sequence: Synthetic oligonucleotide
  Sense strand starting at position 724 of SEQ ID NO: 1888836
cugagauggccuggaccua

SEQ ID NO: 2560395 - RNA, 19 nt, Artificial Sequence
  Description of Artificial Sequence: Synthetic oligonucleotide
  Antisense strand to SEQ ID NO: 2560394
uagguccaggccaucucag

SEQ ID NO: 2560396 - RNA, 19 nt, Artificial Sequence
  Description of Artificial Sequence: Synthetic oligonucleotide
  Sense strand starting at position 745 of SEQ ID NO: 1888836
ggaagagaguagcucaaau

SEQ ID NO: 2560397 - RNA, 19 nt, Artificial Sequence
  Description of Artificial Sequence: Synthetic oligonucleotide
  Antisense strand to SEQ ID NO: 2560396
auuugagcuacucucuucc

SEQ ID NO: 2560398 - RNA, 19 nt, Artificial Sequence
  Description of Artificial Sequence: Synthetic oligonucleotide
  Sense strand starting at position 778 of SEQ ID NO: 1888836
cucagaaacuuugaaggau

SEQ ID NO: 2560399 - RNA, 19 nt, Artificial Sequence
  Description of Artificial Sequence: Synthetic oligonucleotide
  Antisense strand to SEQ ID NO: 2560398
auccuucaaaguuucugag

SEQ ID NO: 2560400 - RNA, 19 nt, Artificial Sequence
  Description of Artificial Sequence: Synthetic oligonucleotide
  Sense strand starting at position 877 of SEQ ID NO: 1888836
uucuaauauucuucugugu

SEQ ID NO: 2560401 - RNA, 19 nt, Artificial Sequence
  Description of Artificial Sequence: Synthetic oligonucleotide
  Antisense strand to SEQ ID NO: 2560400
acacagaagaauauuagaa

SEQ ID NO: 2560402 - RNA, 19 nt, Artificial Sequence
  Description of Artificial Sequence: Synthetic oligonucleotide
  Sense strand starting at position 882 of SEQ ID NO: 1888836
auauucuucuguguaguuu

SEQ ID NO: 2560403 - RNA, 19 nt, Artificial Sequence
  Description of Artificial Sequence: Synthetic oligonucleotide
  Antisense strand to SEQ ID NO: 2560402
aaacuacacagaagaauau

SEQ ID NO: 2560404 - RNA, 19 nt, Artificial Sequence
  Description of Artificial Sequence: Synthetic oligonucleotide
  Sense strand starting at position 890 of SEQ ID NO: 1888836
cuguguaguuugcugauuu

SEQ ID NO: 2560405 - RNA, 19 nt, Artificial Sequence
  Description of Artificial Sequence: Synthetic oligonucleotide
  Antisense strand to SEQ ID NO: 2560404
aaaucagcaaacuacacag

SEQ ID NO: 2560406 - RNA, 19 nt, Artificial Sequence
  Description of Artificial Sequence: Synthetic oligonucleotide
  Sense strand starting at position 897 of SEQ ID NO: 1888836
guuugcugauuuguuuauu

SEQ ID NO: 2560407 - RNA, 19 nt, Artificial Sequence
  Description of Artificial Sequence: Synthetic oligonucleotide
  Antisense strand to SEQ ID NO: 2560406
aauaaacaaaucagcaaac

SEQ ID NO: 2560408 - RNA, 19 nt, Artificial Sequence
  Description of Artificial Sequence: Synthetic oligonucleotide
  Sense strand starting at position 1785 of SEQ ID NO: 1888836
ucuuguaaauugguuaaug

SEQ ID NO: 2560409 - RNA, 19 nt, Artificial Sequence
  Description of Artificial Sequence: Synthetic oligonucleotide
  Antisense strand to SEQ ID NO: 2560408
cauuaaccaauuuacaaga

SEQ ID NO: 2560410 - RNA, 19 nt, Artificial Sequence
  Description of Artificial Sequence: Synthetic oligonucleotide
  Sense strand starting at position 1786 of SEQ ID NO: 1888836
cuuguaaauugguuaaugu

SEQ ID NO: 2560411 - RNA, 19 nt, Artificial Sequence
  Description of Artificial Sequence: Synthetic oligonucleotide
  Antisense strand to SEQ ID NO: 2560410
acauuaaccaauuuacaag

SEQ ID NO: 2560412 - RNA, 19 nt, Artificial Sequence
  Description of Artificial Sequence: Synthetic oligonucleotide
  Sense strand starting at position 2154 of SEQ ID NO: 1888836
uguaacauuguuuagugua

SEQ ID NO: 2560413 - RNA, 19 nt, Artificial Sequence
  Description of Artificial Sequence: Synthetic oligonucleotide
  Antisense strand to SEQ ID NO: 2560412
uacacuaaacaauguuaca

SEQ ID NO: 2560414 - RNA, 19 nt, Artificial Sequence
  Description of Artificial Sequence: Synthetic oligonucleotide
  Sense strand starting at position 2159 of SEQ ID NO: 1888836
cauuguuuaguguagcaca

SEQ ID NO: 2560415 - RNA, 19 nt, Artificial Sequence
  Description of Artificial Sequence: Synthetic oligonucleotide
  Antisense strand to SEQ ID NO: 2560414
ugugcuacacuaaacaaug

SEQ ID NO: 2560416 - RNA, 19 nt, Artificial Sequence
  Description of Artificial Sequence: Synthetic oligonucleotide
  Sense strand starting at position 2661 of SEQ ID NO: 1888836
gcagguacgugguucugau

SEQ ID NO: 2560417 - RNA, 19 nt, Artificial Sequence
  Description of Artificial Sequence: Synthetic oligonucleotide
  Antisense strand to SEQ ID NO: 2560416
aucagaaccacguaccugc

SEQ ID NO: 2560418 - RNA, 19 nt, Artificial Sequence
  Description of Artificial Sequence: Synthetic oligonucleotide
  Sense strand starting at position 2767 of SEQ ID NO: 1888836
guuuaugcucuuuggacca

SEQ ID NO: 2560419 - RNA, 19 nt, Artificial Sequence
  Description of Artificial Sequence: Synthetic oligonucleotide
  Antisense strand to SEQ ID NO: 2560418
ugguccaaagagcauaaac

SEQ ID NO: 2560420 - RNA, 19 nt, Artificial Sequence
  Description of Artificial Sequence: Synthetic oligonucleotide
  Sense strand starting at position 2780 of SEQ ID NO: 1888836
ggaccagcugcuugagagu

SEQ ID NO: 2560421 - RNA, 19 nt, Artificial Sequence
  Description of Artificial Sequence: Synthetic oligonucleotide
  Antisense strand to SEQ ID NO: 2560420
acucucaagcagcuggucc

SEQ ID NO: 2560422 - RNA, 19 nt, Artificial Sequence
  Description of Artificial Sequence: Synthetic oligonucleotide
  Sense strand starting at position 2899 of SEQ ID NO: 1888836
uuuggugcuuuacuugaau

SEQ ID NO: 2560423 - RNA, 19 nt, Artificial Sequence
  Description of Artificial Sequence: Synthetic oligonucleotide
  Antisense strand to SEQ ID NO: 2560422
auucaaguaaagcaccaaa

SEQ ID NO: 2560424 - RNA, 19 nt, Artificial Sequence
  Description of Artificial Sequence: Synthetic oligonucleotide
  Sense strand starting at position 2902 of SEQ ID NO: 1888836
ggugcuuuacuugaauucu

SEQ ID NO: 2560425 - RNA, 19 nt, Artificial Sequence
  Description of Artificial Sequence: Synthetic oligonucleotide
  Antisense strand to SEQ ID NO: 2560424
agaauucaaguaaagcacc

SEQ ID NO: 2560426 - RNA, 19 nt, Artificial Sequence
  Description of Artificial Sequence: Synthetic oligonucleotide
  Sense strand starting at position 2961 of SEQ ID NO: 1888836
acuauuauccuaugugggu

SEQ ID NO: 2560427 - RNA, 19 nt, Artificial Sequence
  Description of Artificial Sequence: Synthetic oligonucleotide
  Antisense strand to SEQ ID NO: 2560426
acccacauaggauaauagu

SEQ ID NO: 2560428 - RNA, 19 nt, Artificial Sequence
  Description of Artificial Sequence: Synthetic oligonucleotide
  Sense strand starting at position 2962 of SEQ ID NO: 1888836
cuauuauccuauguggguu

SEQ ID NO: 2560429 - RNA, 19 nt, Artificial Sequence
  Description of Artificial Sequence: Synthetic oligonucleotide
  Antisense strand to SEQ ID NO: 2560428
aacccacauaggauaauag

SEQ ID NO: 2560430 - RNA, 19 nt, Artificial Sequence
  Description of Artificial Sequence: Synthetic oligonucleotide
  Sense strand starting at position 3005 of SEQ ID NO: 1888836
aagguaaugagugggaagu

SEQ ID NO: 2560431 - RNA, 19 nt, Artificial Sequence
  Description of Artificial Sequence: Synthetic oligonucleotide
  Antisense strand to SEQ ID NO: 2560430
acuucccacucauuaccuu

SEQ ID NO: 2560432 - RNA, 19 nt, Artificial Sequence
  Description of Artificial Sequence: Synthetic oligonucleotide
  Sense strand starting at position 3006 of SEQ ID NO: 1888836
agguaaugagugggaaguu

SEQ ID NO: 2560433 - RNA, 19 nt, Artificial Sequence
  Description of Artificial Sequence: Synthetic oligonucleotide
  Antisense strand to SEQ ID NO: 2560432
aacuucccacucauuaccu

SEQ ID NO: 2560434 - RNA, 19 nt, Artificial Sequence
  Description of Artificial Sequence: Synthetic oligonucleotide
  Sense strand starting at position 3015 of SEQ ID NO: 1888836
gugggaaguuaaggagaaa

SEQ ID NO: 2560435 - RNA, 19 nt, Artificial Sequence
  Description of Artificial Sequence: Synthetic oligonucleotide
  Antisense strand to SEQ ID NO: 2560434
uuucuccuuaacuucccac

SEQ ID NO: 2560436 - RNA, 19 nt, Artificial Sequence
  Description of Artificial Sequence: Synthetic oligonucleotide
  Sense strand starting at position 3175 of SEQ ID NO: 1888836
ggaugaagccacugagagu

SEQ ID NO: 2560437 - RNA, 19 nt, Artificial Sequence
  Description of Artificial Sequence: Synthetic oligonucleotide
  Antisense strand to SEQ ID NO: 2560436
acucucaguggcuucaucc

SEQ ID NO: 2560438 - RNA, 19 nt, Artificial Sequence
  Description of Artificial Sequence: Synthetic oligonucleotide
  Sense strand starting at position 3184 of SEQ ID NO: 1888836
cacugagaguucguaagua

SEQ ID NO: 2560439 - RNA, 19 nt, Artificial Sequence
  Description of Artificial Sequence: Synthetic oligonucleotide
  Antisense strand to SEQ ID NO: 2560438
uacuuacgaacucucagug

SEQ ID NO: 2560440 - RNA, 19 nt, Artificial Sequence
  Description of Artificial Sequence: Synthetic oligonucleotide
  Sense strand starting at position 3188 of SEQ ID NO: 1888836
gagaguucguaaguacauc

SEQ ID NO: 2560441 - RNA, 19 nt, Artificial Sequence
  Description of Artificial Sequence: Synthetic oligonucleotide
  Antisense strand to SEQ ID NO: 2560440
gauguacuuacgaacucuc

SEQ ID NO: 2560442 - RNA, 19 nt, Artificial Sequence
  Description of Artificial Sequence: Synthetic oligonucleotide
  Sense strand starting at position 3272 of SEQ ID NO: 1888836
agugcucagugacugcaaa

SEQ ID NO: 2560443 - RNA, 19 nt, Artificial Sequence
  Description of Artificial Sequence: Synthetic oligonucleotide
  Antisense strand to SEQ ID NO: 2560442
uuugcagucacugagcacu

SEQ ID NO: 2560444 - RNA, 19 nt, Artificial Sequence
  Description of Artificial Sequence: Synthetic oligonucleotide
  Sense strand starting at position 3322 of SEQ ID NO: 1888836
acaguuaucuauggauuua

SEQ ID NO: 2560445 - RNA, 19 nt, Artificial Sequence
  Description of Artificial Sequence: Synthetic oligonucleotide
  Antisense strand to SEQ ID NO: 2560444
uaaauccauagauaacugu

SEQ ID NO: 2560446 - RNA, 19 nt, Artificial Sequence
  Description of Artificial Sequence: Synthetic oligonucleotide
  Sense strand starting at position 3931 of SEQ ID NO: 1888836
aggauuacuugaguccaca

SEQ ID NO: 2560447 - RNA, 19 nt, Artificial Sequence
  Description of Artificial Sequence: Synthetic oligonucleotide
  Antisense strand to SEQ ID NO: 2560446
uguggacucaaguaauccu

SEQ ID NO: 2560448 - RNA, 19 nt, Artificial Sequence
  Description of Artificial Sequence: Synthetic oligonucleotide
  Sense strand starting at position 1107 of SEQ ID NO: 1888837
aggugauccacaggaaguu

SEQ ID NO: 2560449 - RNA, 19 nt, Artificial Sequence
  Description of Artificial Sequence: Synthetic oligonucleotide
  Antisense strand to SEQ ID NO: 2560448
aacuuccuguggaucaccu

SEQ ID NO: 2560450 - RNA, 19 nt, Artificial Sequence
  Description of Artificial Sequence: Synthetic oligonucleotide
  Sense strand starting at position 1108 of SEQ ID NO: 1888837
ggugauccacaggaaguuu

SEQ ID NO: 2560451 - RNA, 19 nt, Artificial Sequence
  Description of Artificial Sequence: Synthetic oligonucleotide
  Antisense strand to SEQ ID NO: 2560450
aaacuuccuguggaucacc

SEQ ID NO: 2560452 - RNA, 19 nt, Artificial Sequence
  Description of Artificial Sequence: Synthetic oligonucleotide
  Sense strand starting at position 140 of SEQ ID NO: 1888838
cagguuuggcuauauuguu

SEQ ID NO: 2560453 - RNA, 19 nt, Artificial Sequence
  Description of Artificial Sequence: Synthetic oligonucleotide
  Antisense strand to SEQ ID NO: 2560452
aacaauauagccaaaccug

SEQ ID NO: 2560454 - RNA, 19 nt, Artificial Sequence
  Description of Artificial Sequence: Synthetic oligonucleotide
  Sense strand starting at position 351 of SEQ ID NO: 1888838
uuguguauaguacacaaua

SEQ ID NO: 2560455 - RNA, 19 nt, Artificial Sequence
  Description of Artificial Sequence: Synthetic oligonucleotide
  Antisense strand to SEQ ID NO: 2560454
uauuguguacuauacacaa

SEQ ID NO: 2560456 - RNA, 19 nt, Artificial Sequence
  Description of Artificial Sequence: Synthetic oligonucleotide
  Sense strand starting at position 498 of SEQ ID NO: 1888838
ugggucuauuucuauucua

SEQ ID NO: 2560457 - RNA, 19 nt, Artificial Sequence
  Description of Artificial Sequence: Synthetic oligonucleotide
  Antisense strand to SEQ ID NO: 2560456
uagaauagaaauagaccca

SEQ ID NO: 2560458 - RNA, 19 nt, Artificial Sequence
  Description of Artificial Sequence: Synthetic oligonucleotide
  Sense strand starting at position 515 of SEQ ID NO: 1888838
uauugauagguaugucugu

SEQ ID NO: 2560459 - RNA, 19 nt, Artificial Sequence
  Description of Artificial Sequence: Synthetic oligonucleotide
  Antisense strand to SEQ ID NO: 2560458
acagacauaccuaucaaua

SEQ ID NO: 2560460 - RNA, 19 nt, Artificial Sequence
  Description of Artificial Sequence: Synthetic oligonucleotide
  Sense strand starting at position 520 of SEQ ID NO: 1888838
auagguaugucuguccuca

SEQ ID NO: 2560461 - RNA, 19 nt, Artificial Sequence
  Description of Artificial Sequence: Synthetic oligonucleotide
  Antisense strand to SEQ ID NO: 2560460
ugaggacagacauaccuau

SEQ ID NO: 2560462 - RNA, 19 nt, Artificial Sequence
  Description of Artificial Sequence: Synthetic oligonucleotide
  Sense strand starting at position 522 of SEQ ID NO: 1888838
agguaugucuguccucaug

SEQ ID NO: 2560463 - RNA, 19 nt, Artificial Sequence
  Description of Artificial Sequence: Synthetic oligonucleotide
  Antisense strand to SEQ ID NO: 2560462
caugaggacagacauaccu

SEQ ID NO: 2560464 - RNA, 19 nt, Artificial Sequence
  Description of Artificial Sequence: Synthetic oligonucleotide
  Sense strand starting at position 589 of SEQ ID NO: 1888838
acuugaagucaguaguuua

SEQ ID NO: 2560465 - RNA, 19 nt, Artificial Sequence
  Description of Artificial Sequence: Synthetic oligonucleotide
  Antisense strand to SEQ ID NO: 2560464
uaaacuacugacuucaagu

SEQ ID NO: 2560466 - RNA, 19 nt, Artificial Sequence
  Description of Artificial Sequence: Synthetic oligonucleotide
  Sense strand starting at position 592 of SEQ ID NO: 1888838
ugaagucaguaguuuaagu

SEQ ID NO: 2560467 - RNA, 19 nt, Artificial Sequence
  Description of Artificial Sequence: Synthetic oligonucleotide
  Antisense strand to SEQ ID NO: 2560466
acuuaaacuacugacuuca

SEQ ID NO: 2560468 - RNA, 19 nt, Artificial Sequence
  Description of Artificial Sequence: Synthetic oligonucleotide
  Sense strand starting at position 600 of SEQ ID NO: 1888838
guaguuuaaguccaucaac

SEQ ID NO: 2560469 - RNA, 19 nt, Artificial Sequence
  Description of Artificial Sequence: Synthetic oligonucleotide
  Antisense strand to SEQ ID NO: 2560468
guugauggacuuaaacuac

SEQ ID NO: 2560470 - RNA, 19 nt, Artificial Sequence
  Description of Artificial Sequence: Synthetic oligonucleotide
  Sense strand starting at position 603 of SEQ ID NO: 1888838
guuuaaguccaucaacuuu

SEQ ID NO: 2560471 - RNA, 19 nt, Artificial Sequence
  Description of Artificial Sequence: Synthetic oligonucleotide
  Antisense strand to SEQ ID NO: 2560470
aaaguugauggacuuaaac

SEQ ID NO: 2560472 - RNA, 19 nt, Artificial Sequence
  Description of Artificial Sequence: Synthetic oligonucleotide
  Sense strand starting at position 719 of SEQ ID NO: 1888838
cacacaugggcuuaguaaa

SEQ ID NO: 2560473 - RNA, 19 nt, Artificial Sequence
  Description of Artificial Sequence: Synthetic oligonucleotide
  Antisense strand to SEQ ID NO: 2560472
uuuacuaagcccaugugug

SEQ ID NO: 2560474 - RNA, 19 nt, Artificial Sequence
  Description of Artificial Sequence: Synthetic oligonucleotide
  Sense strand starting at position 842 of SEQ ID NO: 1888838
cuguacaugugcuuaauga

SEQ ID NO: 2560475 - RNA, 19 nt, Artificial Sequence
  Description of Artificial Sequence: Synthetic oligonucleotide
  Antisense strand to SEQ ID NO: 2560474
ucauuaagcacauguacag

SEQ ID NO: 2560476 - RNA, 19 nt, Artificial Sequence
  Description of Artificial Sequence: Synthetic oligonucleotide
  Sense strand starting at position 843 of SEQ ID NO: 1888838
uguacaugugcuuaaugaa

SEQ ID NO: 2560477 - RNA, 19 nt, Artificial Sequence
  Description of Artificial Sequence: Synthetic oligonucleotide
  Antisense strand to SEQ ID NO: 2560476
uucauuaagcacauguaca

SEQ ID NO: 2560478 - RNA, 19 nt, Artificial Sequence
  Description of Artificial Sequence: Synthetic oligonucleotide
  Sense strand starting at position 852 of SEQ ID NO: 1888838
gcuuaaugaaggugaucau

SEQ ID NO: 2560479 - RNA, 19 nt, Artificial Sequence
  Description of Artificial Sequence: Synthetic oligonucleotide
  Antisense strand to SEQ ID NO: 2560478
augaucaccuucauuaagc

SEQ ID NO: 2560480 - RNA, 19 nt, Artificial Sequence
  Description of Artificial Sequence: Synthetic oligonucleotide
  Sense strand starting at position 873 of SEQ ID NO: 1888838
aauauuaggugguuugauu

SEQ ID NO: 2560481 - RNA, 19 nt, Artificial Sequence
  Description of Artificial Sequence: Synthetic oligonucleotide
  Antisense strand to SEQ ID NO: 2560480
aaucaaaccaccuaauauu

SEQ ID NO: 2560482 - RNA, 19 nt, Artificial Sequence
  Description of Artificial Sequence: Synthetic oligonucleotide
  Sense strand starting at position 933 of SEQ ID NO: 1888838
uguugaaauguaggugcaa

SEQ ID NO: 2560483 - RNA, 19 nt, Artificial Sequence
  Description of Artificial Sequence: Synthetic oligonucleotide
  Antisense strand to SEQ ID NO: 2560482
uugcaccuacauuucaaca

SEQ ID NO: 2560484 - RNA, 19 nt, Artificial Sequence
  Description of Artificial Sequence: Synthetic oligonucleotide
  Sense strand starting at position 934 of SEQ ID NO: 1888838
guugaaauguaggugcaaa

SEQ ID NO: 2560485 - RNA, 19 nt, Artificial Sequence
  Description of Artificial Sequence: Synthetic oligonucleotide
  Antisense strand to SEQ ID NO: 2560484
uuugcaccuacauuucaac

SEQ ID NO: 2560486 - RNA, 19 nt, Artificial Sequence
  Description of Artificial Sequence: Synthetic oligonucleotide
  Sense strand starting at position 1071 of SEQ ID NO: 1888838
agaguuaguugugcagacu

SEQ ID NO: 2560487 - RNA, 19 nt, Artificial Sequence
  Description of Artificial Sequence: Synthetic oligonucleotide
  Antisense strand to SEQ ID NO: 2560486
agucugcacaacuaacucu

SEQ ID NO: 2560488 - RNA, 19 nt, Artificial Sequence
  Description of Artificial Sequence: Synthetic oligonucleotide
  Sense strand starting at position 1072 of SEQ ID NO: 1888838
gaguuaguugugcagacug

SEQ ID NO: 2560489 - RNA, 19 nt, Artificial Sequence
  Description of Artificial Sequence: Synthetic oligonucleotide
  Antisense strand to SEQ ID NO: 2560488
cagucugcacaacuaacuc

SEQ ID NO: 2560490 - RNA, 19 nt, Artificial Sequence
  Description of Artificial Sequence: Synthetic oligonucleotide
  Sense strand starting at position 1074 of SEQ ID NO: 1888838
guuaguugugcagacugau

SEQ ID NO: 2560491 - RNA, 19 nt, Artificial Sequence
  Description of Artificial Sequence: Synthetic oligonucleotide
  Antisense strand to SEQ ID NO: 2560490
aucagucugcacaacuaac

SEQ ID NO: 2560492 - RNA, 19 nt, Artificial Sequence
  Description of Artificial Sequence: Synthetic oligonucleotide
  Sense strand starting at position 1174 of SEQ ID NO: 1888838
uagguauuacugcagaacu

SEQ ID NO: 2560493 - RNA, 19 nt, Artificial Sequence
  Description of Artificial Sequence: Synthetic oligonucleotide
  Antisense strand to SEQ ID NO: 2560492
aguucugcaguaauaccua

SEQ ID NO: 2560494 - RNA, 19 nt, Artificial Sequence
  Description of Artificial Sequence: Synthetic oligonucleotide
  Sense strand starting at position 1255 of SEQ ID NO: 1888838
cccacuucucucuggaaga

SEQ ID NO: 2560495 - RNA, 19 nt, Artificial Sequence
  Description of Artificial Sequence: Synthetic oligonucleotide
  Antisense strand to SEQ ID NO: 2560494
ucuuccagagagaaguggg

SEQ ID NO: 2560496 - RNA, 19 nt, Artificial Sequence
  Description of Artificial Sequence: Synthetic oligonucleotide
  Sense strand starting at position 1993 of SEQ ID NO: 1888838
uuuagugccagagguuuaa

SEQ ID NO: 2560497 - RNA, 19 nt, Artificial Sequence
  Description of Artificial Sequence: Synthetic oligonucleotide
  Antisense strand to SEQ ID NO: 2560496
uuaaaccucuggcacuaaa

SEQ ID NO: 2560498 - RNA, 19 nt, Artificial Sequence
  Description of Artificial Sequence: Synthetic oligonucleotide
  Sense strand starting at position 2069 of SEQ ID NO: 1888838
uguucucugcuguaacaau

SEQ ID NO: 2560499 - RNA, 19 nt, Artificial Sequence
  Description of Artificial Sequence: Synthetic oligonucleotide
  Antisense strand to SEQ ID NO: 2560498
auuguuacagcagagaaca

SEQ ID NO: 2560500 - RNA, 19 nt, Artificial Sequence
  Description of Artificial Sequence: Synthetic oligonucleotide
  Sense strand starting at position 2158 of SEQ ID NO: 1888838
uuugauggugcugacuuaa

SEQ ID NO: 2560501 - RNA, 19 nt, Artificial Sequence
  Description of Artificial Sequence: Synthetic oligonucleotide
  Antisense strand to SEQ ID NO: 2560500
uuaagucagcaccaucaaa

SEQ ID NO: 2560502 - RNA, 19 nt, Artificial Sequence
  Description of Artificial Sequence: Synthetic oligonucleotide
  Sense strand starting at position 2263 of SEQ ID NO: 1888838
ggaagugcuucccuacuca

SEQ ID NO: 2560503 - RNA, 19 nt, Artificial Sequence
  Description of Artificial Sequence: Synthetic oligonucleotide
  Antisense strand to SEQ ID NO: 2560502
ugaguagggaagcacuucc

SEQ ID NO: 2560504 - RNA, 19 nt, Artificial Sequence
  Description of Artificial Sequence: Synthetic oligonucleotide
  Sense strand starting at position 2405 of SEQ ID NO: 1888838
uguagagaguucccaguga

SEQ ID NO: 2560505 - RNA, 19 nt, Artificial Sequence
  Description of Artificial Sequence: Synthetic oligonucleotide
  Antisense strand to SEQ ID NO: 2560504
ucacugggaacucucuaca

SEQ ID NO: 2560506 - RNA, 19 nt, Artificial Sequence
  Description of Artificial Sequence: Synthetic oligonucleotide
  Sense strand starting at position 2438 of SEQ ID NO: 1888838
ggugcucucagagaccauu

SEQ ID NO: 2560507 - RNA, 19 nt, Artificial Sequence
  Description of Artificial Sequence: Synthetic oligonucleotide
  Antisense strand to SEQ ID NO: 2560506
aauggucucugagagcacc

SEQ ID NO: 2560508 - RNA, 19 nt, Artificial Sequence
  Description of Artificial Sequence: Synthetic oligonucleotide
  Sense strand starting at position 2629 of SEQ ID NO: 1888838
ugugucaucucucuaucua

SEQ ID NO: 2560509 - RNA, 19 nt, Artificial Sequence
  Description of Artificial Sequence: Synthetic oligonucleotide
  Antisense strand to SEQ ID NO: 2560508
uagauagagagaugacaca

SEQ ID NO: 2560510 - RNA, 19 nt, Artificial Sequence
  Description of Artificial Sequence: Synthetic oligonucleotide
  Sense strand starting at position 2630 of SEQ ID NO: 1888838
gugucaucucucuaucuau

SEQ ID NO: 2560511 - RNA, 19 nt, Artificial Sequence
  Description of Artificial Sequence: Synthetic oligonucleotide
  Antisense strand to SEQ ID NO: 2560510
auagauagagagaugacac

SEQ ID NO: 2560512 - RNA, 19 nt, Artificial Sequence
  Description of Artificial Sequence: Synthetic oligonucleotide
  Sense strand starting at position 3108 of SEQ ID NO: 1888838
uuaccaucuuucuuaguga

SEQ ID NO: 2560513 - RNA, 19 nt, Artificial Sequence
  Description of Artificial Sequence: Synthetic oligonucleotide
  Antisense strand to SEQ ID NO: 2560512
ucacuaagaaagaugguaa

SEQ ID NO: 2560514 - RNA, 19 nt, Artificial Sequence
  Description of Artificial Sequence: Synthetic oligonucleotide
  Sense strand starting at position 3111 of SEQ ID NO: 1888838
ccaucuuucuuagugagca

SEQ ID NO: 2560515 - RNA, 19 nt, Artificial Sequence
  Description of Artificial Sequence: Synthetic oligonucleotide
  Antisense strand to SEQ ID NO: 2560514
ugcucacuaagaaagaugg

SEQ ID NO: 2560516 - RNA, 19 nt, Artificial Sequence
  Description of Artificial Sequence: Synthetic oligonucleotide
  Sense strand starting at position 3115 of SEQ ID NO: 1888838
cuuucuuagugagcacaua

SEQ ID NO: 2560517 - RNA, 19 nt, Artificial Sequence
  Description of Artificial Sequence: Synthetic oligonucleotide
  Antisense strand to SEQ ID NO: 2560516
uaugugcucacuaagaaag

SEQ ID NO: 2560518 - RNA, 19 nt, Artificial Sequence
  Description of Artificial Sequence: Synthetic oligonucleotide
  Sense strand starting at position 3123 of SEQ ID NO: 1888838
gugagcacauacucuagua

SEQ ID NO: 2560519 - RNA, 19 nt, Artificial Sequence
  Description of Artificial Sequence: Synthetic oligonucleotide
  Antisense strand to SEQ ID NO: 2560518
uacuagaguaugugcucac

SEQ ID NO: 2560520 - RNA, 19 nt, Artificial Sequence
  Description of Artificial Sequence: Synthetic oligonucleotide
  Sense strand starting at position 3125 of SEQ ID NO: 1888838
gagcacauacucuaguagu

SEQ ID NO: 2560521 - RNA, 19 nt, Artificial Sequence
  Description of Artificial Sequence: Synthetic oligonucleotide
  Antisense strand to SEQ ID NO: 2560520
acuacuagaguaugugcuc

SEQ ID NO: 2560522 - RNA, 19 nt, Artificial Sequence
  Description of Artificial Sequence: Synthetic oligonucleotide
  Sense strand starting at position 3584 of SEQ ID NO: 1888838
cuggccuuccuucgaauuu

SEQ ID NO: 2560523 - RNA, 19 nt, Artificial Sequence
  Description of Artificial Sequence: Synthetic oligonucleotide
  Antisense strand to SEQ ID NO: 2560522
aaauucgaaggaaggccag

SEQ ID NO: 2560524 - RNA, 19 nt, Artificial Sequence
  Description of Artificial Sequence: Synthetic oligonucleotide
  Sense strand starting at position 3780 of SEQ ID NO: 1888838
cuaucuuccuucuuuguga

SEQ ID NO: 2560525 - RNA, 19 nt, Artificial Sequence
  Description of Artificial Sequence: Synthetic oligonucleotide
  Antisense strand to SEQ ID NO: 2560524
ucacaaagaaggaagauag

SEQ ID NO: 2560526 - RNA, 19 nt, Artificial Sequence
  Description of Artificial Sequence: Synthetic oligonucleotide
  Sense strand starting at position 3894 of SEQ ID NO: 1888838
uuauguuuguggccacaga

SEQ ID NO: 2560527 - RNA, 19 nt, Artificial Sequence
  Description of Artificial Sequence: Synthetic oligonucleotide
  Antisense strand to SEQ ID NO: 2560526
ucuguggccacaaacauaa

SEQ ID NO: 2560528 - RNA, 19 nt, Artificial Sequence
  Description of Artificial Sequence: Synthetic oligonucleotide
  Sense strand starting at position 3895 of SEQ ID NO: 1888838
uauguuuguggccacagau

SEQ ID NO: 2560529 - RNA, 19 nt, Artificial Sequence
  Description of Artificial Sequence: Synthetic oligonucleotide
  Antisense strand to SEQ ID NO: 2560528
aucuguggccacaaacaua

SEQ ID NO: 2560530 - RNA, 19 nt, Artificial Sequence
  Description of Artificial Sequence: Synthetic oligonucleotide
  Sense strand starting at position 3908 of SEQ ID NO: 1888838
acagauaguuugccucuua

SEQ ID NO: 2560531 - RNA, 19 nt, Artificial Sequence
  Description of Artificial Sequence: Synthetic oligonucleotide
  Antisense strand to SEQ ID NO: 2560530
uaagaggcaaacuaucugu

SEQ ID NO: 2560532 - RNA, 19 nt, Artificial Sequence
  Description of Artificial Sequence: Synthetic oligonucleotide
  Sense strand starting at position 9 of SEQ ID NO: 1888839
auguauuauucgucaacaa

SEQ ID NO: 2560533 - RNA, 19 nt, Artificial Sequence
  Description of Artificial Sequence: Synthetic oligonucleotide
  Antisense strand to SEQ ID NO: 2560532
uuguugacgaauaauacau

SEQ ID NO: 2560534 - RNA, 19 nt, Artificial Sequence
  Description of Artificial Sequence: Synthetic oligonucleotide
  Sense strand starting at position 10 of SEQ ID NO: 1888839
uguauuauucgucaacaau

SEQ ID NO: 2560535 - RNA, 19 nt, Artificial Sequence
  Description of Artificial Sequence: Synthetic oligonucleotide
  Antisense strand to SEQ ID NO: 2560534
auuguugacgaauaauaca

SEQ ID NO: 2560536 - RNA, 19 nt, Artificial Sequence
  Description of Artificial Sequence: Synthetic oligonucleotide
  Sense strand starting at position 13 of SEQ ID NO: 1888839
auuauucgucaacaaugca

SEQ ID NO: 2560537 - RNA, 19 nt, Artificial Sequence
  Description of Artificial Sequence: Synthetic oligonucleotide
  Antisense strand to SEQ ID NO: 2560536
ugcauuguugacgaauaau

SEQ ID NO: 2560538 - RNA, 19 nt, Artificial Sequence
  Description of Artificial Sequence: Synthetic oligonucleotide
  Sense strand starting at position 214 of SEQ ID NO: 1888839
ccacucugagccgaucauu

SEQ ID NO: 2560539 - RNA, 19 nt, Artificial Sequence
  Description of Artificial Sequence: Synthetic oligonucleotide
  Antisense strand to SEQ ID NO: 2560538
aaugaucggcucagagugg

SEQ ID NO: 2560540 - RNA, 19 nt, Artificial Sequence
  Description of Artificial Sequence: Synthetic oligonucleotide
  Sense strand starting at position 217 of SEQ ID NO: 1888839
cucugagccgaucauuaaa

SEQ ID NO: 2560541 - RNA, 19 nt, Artificial Sequence
  Description of Artificial Sequence: Synthetic oligonucleotide
  Antisense strand to SEQ ID NO: 2560540
uuuaaugaucggcucagag

SEQ ID NO: 2560542 - RNA, 19 nt, Artificial Sequence
  Description of Artificial Sequence: Synthetic oligonucleotide
  Sense strand starting at position 219 of SEQ ID NO: 1888839
cugagccgaucauuaaaga

SEQ ID NO: 2560543 - RNA, 19 nt, Artificial Sequence
  Description of Artificial Sequence: Synthetic oligonucleotide
  Antisense strand to SEQ ID NO: 2560542
ucuuuaaugaucggcucag

SEQ ID NO: 2560544 - RNA, 19 nt, Artificial Sequence
  Description of Artificial Sequence: Synthetic oligonucleotide
  Sense strand starting at position 234 of SEQ ID NO: 1888839
aagagauggagucgcagaa

SEQ ID NO: 2560545 - RNA, 19 nt, Artificial Sequence
  Description of Artificial Sequence: Synthetic oligonucleotide
  Antisense strand to SEQ ID NO: 2560544
uucugcgacuccaucucuu

SEQ ID NO: 2560546 - RNA, 19 nt, Artificial Sequence
  Description of Artificial Sequence: Synthetic oligonucleotide
  Sense strand starting at position 238 of SEQ ID NO: 1888839
gauggagucgcagaacuca

SEQ ID NO: 2560547 - RNA, 19 nt, Artificial Sequence
  Description of Artificial Sequence: Synthetic oligonucleotide
  Antisense strand to SEQ ID NO: 2560546
ugaguucugcgacuccauc

SEQ ID NO: 2560548 - RNA, 19 nt, Artificial Sequence
  Description of Artificial Sequence: Synthetic oligonucleotide
  Sense strand starting at position 362 of SEQ ID NO: 1888839
ggcgauucaggcuaagguu

SEQ ID NO: 2560549 - RNA, 19 nt, Artificial Sequence
  Description of Artificial Sequence: Synthetic oligonucleotide
  Antisense strand to SEQ ID NO: 2560548
aaccuuagccugaaucgcc

SEQ ID NO: 2560550 - RNA, 19 nt, Artificial Sequence
  Description of Artificial Sequence: Synthetic oligonucleotide
  Sense strand starting at position 378 of SEQ ID NO: 1888839
guuacuuuaccacaagguu

SEQ ID NO: 2560551 - RNA, 19 nt, Artificial Sequence
  Description of Artificial Sequence: Synthetic oligonucleotide
  Antisense strand to SEQ ID NO: 2560550
aaccuugugguaaaguaac

SEQ ID NO: 2560552 - RNA, 19 nt, Artificial Sequence
  Description of Artificial Sequence: Synthetic oligonucleotide
  Sense strand starting at position 520 of SEQ ID NO: 1888839
gcggaagggucuuucugaa

SEQ ID NO: 2560553 - RNA, 19 nt, Artificial Sequence
  Description of Artificial Sequence: Synthetic oligonucleotide
  Antisense strand to SEQ ID NO: 2560552
uucagaaagacccuuccgc

SEQ ID NO: 2560554 - RNA, 19 nt, Artificial Sequence
  Description of Artificial Sequence: Synthetic oligonucleotide
  Sense strand starting at position 798 of SEQ ID NO: 1888839
ucuggaguuaauugcgaau

SEQ ID NO: 2560555 - RNA, 19 nt, Artificial Sequence
  Description of Artificial Sequence: Synthetic oligonucleotide
  Antisense strand to SEQ ID NO: 2560554
auucgcaauuaacuccaga

SEQ ID NO: 2560556 - RNA, 19 nt, Artificial Sequence
  Description of Artificial Sequence: Synthetic oligonucleotide
  Sense strand starting at position 1081 of SEQ ID NO: 1888839
acggaauugcagcaaauaa

SEQ ID NO: 2560557 - RNA, 19 nt, Artificial Sequence
  Description of Artificial Sequence: Synthetic oligonucleotide
  Antisense strand to SEQ ID NO: 2560556
uuauuugcugcaauuccgu

SEQ ID NO: 2560558 - RNA, 19 nt, Artificial Sequence
  Description of Artificial Sequence: Synthetic oligonucleotide
  Sense strand starting at position 1107 of SEQ ID NO: 1888839
ucaagucuccuugagacac

SEQ ID NO: 2560559 - RNA, 19 nt, Artificial Sequence
  Description of Artificial Sequence: Synthetic oligonucleotide
  Antisense strand to SEQ ID NO: 2560558
gugucucaaggagacuuga

SEQ ID NO: 2560560 - RNA, 19 nt, Artificial Sequence
  Description of Artificial Sequence: Synthetic oligonucleotide
  Sense strand starting at position 1228 of SEQ ID NO: 1888839
gccagagaucgauacugcu

SEQ ID NO: 2560561 - RNA, 19 nt, Artificial Sequence
  Description of Artificial Sequence: Synthetic oligonucleotide
  Antisense strand to SEQ ID NO: 2560560
agcaguaucgaucucuggc

SEQ ID NO: 2560562 - RNA, 19 nt, Artificial Sequence
  Description of Artificial Sequence: Synthetic oligonucleotide
  Sense strand starting at position 1305 of SEQ ID NO: 1888839
agaaucagcccucagagua

SEQ ID NO: 2560563 - RNA, 19 nt, Artificial Sequence
  Description of Artificial Sequence: Synthetic oligonucleotide
  Antisense strand to SEQ ID NO: 2560562
uacucugagggcugauucu

SEQ ID NO: 2560564 - RNA, 19 nt, Artificial Sequence
  Description of Artificial Sequence: Synthetic oligonucleotide
  Sense strand starting at position 2434 of SEQ ID NO: 1888839
guggagugagccugagagu

SEQ ID NO: 2560565 - RNA, 19 nt, Artificial Sequence
  Description of Artificial Sequence: Synthetic oligonucleotide
  Antisense strand to SEQ ID NO: 2560564
acucucaggcucacuccac

SEQ ID NO: 2560566 - RNA, 19 nt, Artificial Sequence
  Description of Artificial Sequence: Synthetic oligonucleotide
  Sense strand starting at position 2549 of SEQ ID NO: 1888839
uugcuacaaccgcaguaau

SEQ ID NO: 2560567 - RNA, 19 nt, Artificial Sequence
  Description of Artificial Sequence: Synthetic oligonucleotide
  Antisense strand to SEQ ID NO: 2560566
auuacugcgguuguagcaa

SEQ ID NO: 2560568 - RNA, 19 nt, Artificial Sequence
  Description of Artificial Sequence: Synthetic oligonucleotide
  Sense strand starting at position 2552 of SEQ ID NO: 1888839
cuacaaccgcaguaauauu

SEQ ID NO: 2560569 - RNA, 19 nt, Artificial Sequence
  Description of Artificial Sequence: Synthetic oligonucleotide
  Antisense strand to SEQ ID NO: 2560568
aauauuacugcgguuguag

SEQ ID NO: 2560570 - RNA, 19 nt, Artificial Sequence
  Description of Artificial Sequence: Synthetic oligonucleotide
  Sense strand starting at position 2634 of SEQ ID NO: 1888839
uaauguaaugauggcagaa

SEQ ID NO: 2560571 - RNA, 19 nt, Artificial Sequence
  Description of Artificial Sequence: Synthetic oligonucleotide
  Antisense strand to SEQ ID NO: 2560570
uucugccaucauuacauua

SEQ ID NO: 2560572 - RNA, 19 nt, Artificial Sequence
  Description of Artificial Sequence: Synthetic oligonucleotide
  Sense strand starting at position 2782 of SEQ ID NO: 1888839
guguauguguuauuuaaac

SEQ ID NO: 2560573 - RNA, 19 nt, Artificial Sequence
  Description of Artificial Sequence: Synthetic oligonucleotide
  Antisense strand to SEQ ID NO: 2560572
guuuaaauaacacauacac

SEQ ID NO: 2560574 - RNA, 19 nt, Artificial Sequence
  Description of Artificial Sequence: Synthetic oligonucleotide
  Sense strand starting at position 2862 of SEQ ID NO: 1888839
cucagaauuuagggauuag

SEQ ID NO: 2560575 - RNA, 19 nt, Artificial Sequence
  Description of Artificial Sequence: Synthetic oligonucleotide
  Antisense strand to SEQ ID NO: 2560574
cuaaucccuaaauucugag

SEQ ID NO: 2560576 - RNA, 19 nt, Artificial Sequence
  Description of Artificial Sequence: Synthetic oligonucleotide
  Sense strand starting at position 2946 of SEQ ID NO: 1888839
aaaugagguuguuuagaaa

SEQ ID NO: 2560577 - RNA, 19 nt, Artificial Sequence
  Description of Artificial Sequence: Synthetic oligonucleotide
  Antisense strand to SEQ ID NO: 2560576
uuucuaaacaaccucauuu

SEQ ID NO: 2560578 - RNA, 19 nt, Artificial Sequence
  Description of Artificial Sequence: Synthetic oligonucleotide
  Sense strand starting at position 3070 of SEQ ID NO: 1888839
gggaauaucuggucuggua

SEQ ID NO: 2560579 - RNA, 19 nt, Artificial Sequence
  Description of Artificial Sequence: Synthetic oligonucleotide
  Antisense strand to SEQ ID NO: 2560578
uaccagaccagauauuccc

SEQ ID NO: 2560580 - RNA, 19 nt, Artificial Sequence
  Description of Artificial Sequence: Synthetic oligonucleotide
  Sense strand starting at position 3264 of SEQ ID NO: 1888839
ggcucaugauacuacauuu

SEQ ID NO: 2560581 - RNA, 19 nt, Artificial Sequence
  Description of Artificial Sequence: Synthetic oligonucleotide
  Antisense strand to SEQ ID NO: 2560580
aaauguaguaucaugagcc

SEQ ID NO: 2560582 - RNA, 19 nt, Artificial Sequence
  Description of Artificial Sequence: Synthetic oligonucleotide
  Sense strand starting at position 3432 of SEQ ID NO: 1888839
aauggaaaguacguuagua

SEQ ID NO: 2560583 - RNA, 19 nt, Artificial Sequence
  Description of Artificial Sequence: Synthetic oligonucleotide
  Antisense strand to SEQ ID NO: 2560582
uacuaacguacuuuccauu

SEQ ID NO: 2560584 - RNA, 19 nt, Artificial Sequence
  Description of Artificial Sequence: Synthetic oligonucleotide
  Sense strand starting at position 3434 of SEQ ID NO: 1888839
uggaaaguacguuaguaca

SEQ ID NO: 2560585 - RNA, 19 nt, Artificial Sequence
  Description of Artificial Sequence: Synthetic oligonucleotide
  Antisense strand to SEQ ID NO: 2560584
uguacuaacguacuuucca

SEQ ID NO: 2560586 - RNA, 19 nt, Artificial Sequence
  Description of Artificial Sequence: Synthetic oligonucleotide
  Sense strand starting at position 3436 of SEQ ID NO: 1888839
gaaaguacguuaguacagu

SEQ ID NO: 2560587 - RNA, 19 nt, Artificial Sequence
  Description of Artificial Sequence: Synthetic oligonucleotide
  Antisense strand to SEQ ID NO: 2560586
acuguacuaacguacuuuc

SEQ ID NO: 2560588 - RNA, 19 nt, Artificial Sequence
  Description of Artificial Sequence: Synthetic oligonucleotide
  Sense strand starting at position 3456 of SEQ ID NO: 1888839
uguguugcuggguaaauga

SEQ ID NO: 2560589 - RNA, 19 nt, Artificial Sequence
  Description of Artificial Sequence: Synthetic oligonucleotide
  Antisense strand to SEQ ID NO: 2560588
ucauuuacccagcaacaca

SEQ ID NO: 2560590 - RNA, 19 nt, Artificial Sequence
  Description of Artificial Sequence: Synthetic oligonucleotide
  Sense strand starting at position 3489 of SEQ ID NO: 1888839
auaaacaguucugaagaaa

SEQ ID NO: 2560591 - RNA, 19 nt, Artificial Sequence
  Description of Artificial Sequence: Synthetic oligonucleotide
  Antisense strand to SEQ ID NO: 2560590
uuucuucagaacuguuuau

SEQ ID NO: 2560592 - RNA, 19 nt, Artificial Sequence
  Description of Artificial Sequence: Synthetic oligonucleotide
  Sense strand starting at position 3578 of SEQ ID NO: 1888839
gccaguaauuaugcaaaga

SEQ ID NO: 2560593 - RNA, 19 nt, Artificial Sequence
  Description of Artificial Sequence: Synthetic oligonucleotide
  Antisense strand to SEQ ID NO: 2560592
ucuuugcauaauuacuggc

SEQ ID NO: 2560594 - RNA, 19 nt, Artificial Sequence
  Description of Artificial Sequence: Synthetic oligonucleotide
  Sense strand starting at position 3628 of SEQ ID NO: 1888839
uggcuaggccugcauuuau

SEQ ID NO: 2560595 - RNA, 19 nt, Artificial Sequence
  Description of Artificial Sequence: Synthetic oligonucleotide
  Antisense strand to SEQ ID NO: 2560594
auaaaugcaggccuagcca

SEQ ID NO: 2560596 - RNA, 19 nt, Artificial Sequence
  Description of Artificial Sequence: Synthetic oligonucleotide
  Sense strand starting at position 3690 of SEQ ID NO: 1888839
ggugacacugcuuaguaaa

SEQ ID NO: 2560597 - RNA, 19 nt, Artificial Sequence
  Description of Artificial Sequence: Synthetic oligonucleotide
  Antisense strand to SEQ ID NO: 2560596
uuuacuaagcagugucacc

SEQ ID NO: 2560598 - RNA, 19 nt, Artificial Sequence
  Description of Artificial Sequence: Synthetic oligonucleotide
  Sense strand starting at position 3692 of SEQ ID NO: 1888839
ugacacugcuuaguaaauu

SEQ ID NO: 2560599 - RNA, 19 nt, Artificial Sequence
  Description of Artificial Sequence: Synthetic oligonucleotide
  Antisense strand to SEQ ID NO: 2560598
aauuuacuaagcaguguca

SEQ ID NO: 2560600 - RNA, 19 nt, Artificial Sequence
  Description of Artificial Sequence: Synthetic oligonucleotide
  Sense strand starting at position 3748 of SEQ ID NO: 1888839
agcaaaugccuucgauaaa

SEQ ID NO: 2560601 - RNA, 19 nt, Artificial Sequence
  Description of Artificial Sequence: Synthetic oligonucleotide
  Antisense strand to SEQ ID NO: 2560600
uuuaucgaaggcauuugcu

SEQ ID NO: 2560602 - RNA, 19 nt, Artificial Sequence
  Description of Artificial Sequence: Synthetic oligonucleotide
  Sense strand starting at position 3859 of SEQ ID NO: 1888839
agauuccuuggguguguga

SEQ ID NO: 2560603 - RNA, 19 nt, Artificial Sequence
  Description of Artificial Sequence: Synthetic oligonucleotide
  Antisense strand to SEQ ID NO: 2560602
ucacacacccaaggaaucu

SEQ ID NO: 2560604 - RNA, 19 nt, Artificial Sequence
  Description of Artificial Sequence: Synthetic oligonucleotide
  Sense strand starting at position 3872 of SEQ ID NO: 1888839
gugugagugcagcaauaga

SEQ ID NO: 2560605 - RNA, 19 nt, Artificial Sequence
  Description of Artificial Sequence: Synthetic oligonucleotide
  Antisense strand to SEQ ID NO: 2560604
ucuauugcugcacucacac

SEQ ID NO: 2560606 - RNA, 19 nt, Artificial Sequence
  Description of Artificial Sequence: Synthetic oligonucleotide
  Sense strand starting at position 3927 of SEQ ID NO: 1888839
aucagauauugguucugag

SEQ ID NO: 2560607 - RNA, 19 nt, Artificial Sequence
  Description of Artificial Sequence: Synthetic oligonucleotide
  Antisense strand to SEQ ID NO: 2560606
cucagaaccaauaucugau

SEQ ID NO: 2560608 - RNA, 19 nt, Artificial Sequence
  Description of Artificial Sequence: Synthetic oligonucleotide
  Sense strand starting at position 3957 of SEQ ID NO: 1888839
caucuucuugagugaguuu

SEQ ID NO: 2560609 - RNA, 19 nt, Artificial Sequence
  Description of Artificial Sequence: Synthetic oligonucleotide
  Antisense strand to SEQ ID NO: 2560608
aaacucacucaagaagaug

SEQ ID NO: 2560610 - RNA, 19 nt, Artificial Sequence
  Description of Artificial Sequence: Synthetic oligonucleotide
  Sense strand starting at position 3982 of SEQ ID NO: 1888839
guuugcuuugccguuuauu

SEQ ID NO: 2560611 - RNA, 19 nt, Artificial Sequence
  Description of Artificial Sequence: Synthetic oligonucleotide
  Antisense strand to SEQ ID NO: 2560610
aauaaacggcaaagcaaac

SEQ ID NO: 2560612 - RNA, 19 nt, Artificial Sequence
  Description of Artificial Sequence: Synthetic oligonucleotide
  Sense strand starting at position 154 of SEQ ID NO: 1888840
guucuuggacuauaauacu

SEQ ID NO: 2560613 - RNA, 19 nt, Artificial Sequence
  Description of Artificial Sequence: Synthetic oligonucleotide
  Antisense strand to SEQ ID NO: 2560612
aguauuauaguccaagaac

SEQ ID NO: 2560614 - RNA, 19 nt, Artificial Sequence
  Description of Artificial Sequence: Synthetic oligonucleotide
  Sense strand starting at position 244 of SEQ ID NO: 1888840
ggugcuuggucagcagaaa

SEQ ID NO: 2560615 - RNA, 19 nt, Artificial Sequence
  Description of Artificial Sequence: Synthetic oligonucleotide
  Antisense strand to SEQ ID NO: 2560614
uuucugcugaccaagcacc

SEQ ID NO: 2560616 - RNA, 19 nt, Artificial Sequence
  Description of Artificial Sequence: Synthetic oligonucleotide
  Sense strand starting at position 245 of SEQ ID NO: 1888840
gugcuuggucagcagaaau

SEQ ID NO: 2560617 - RNA, 19 nt, Artificial Sequence
  Description of Artificial Sequence: Synthetic oligonucleotide
  Antisense strand to SEQ ID NO: 2560616
auuucugcugaccaagcac

SEQ ID NO: 2560618 - RNA, 19 nt, Artificial Sequence
  Description of Artificial Sequence: Synthetic oligonucleotide
  Sense strand starting at position 258 of SEQ ID NO: 1888840
agaaaugggcuuuagcaua

SEQ ID NO: 2560619 - RNA, 19 nt, Artificial Sequence
  Description of Artificial Sequence: Synthetic oligonucleotide
  Antisense strand to SEQ ID NO: 2560618
uaugcuaaagcccauuucu

SEQ ID NO: 2560620 - RNA, 19 nt, Artificial Sequence
  Description of Artificial Sequence: Synthetic oligonucleotide
  Sense strand starting at position 263 of SEQ ID NO: 1888840
ugggcuuuagcauacuuga

SEQ ID NO: 2560621 - RNA, 19 nt, Artificial Sequence
  Description of Artificial Sequence: Synthetic oligonucleotide
  Antisense strand to SEQ ID NO: 2560620
ucaaguaugcuaaagccca

SEQ ID NO: 2560622 - RNA, 19 nt, Artificial Sequence
  Description of Artificial Sequence: Synthetic oligonucleotide
  Sense strand starting at position 266 of SEQ ID NO: 1888840
gcuuuagcauacuugagaa

SEQ ID NO: 2560623 - RNA, 19 nt, Artificial Sequence
  Description of Artificial Sequence: Synthetic oligonucleotide
  Antisense strand to SEQ ID NO: 2560622
uucucaaguaugcuaaagc

SEQ ID NO: 2560624 - RNA, 19 nt, Artificial Sequence
  Description of Artificial Sequence: Synthetic oligonucleotide
  Sense strand starting at position 276 of SEQ ID NO: 1888840
acuugagaauaguugacau

SEQ ID NO: 2560625 - RNA, 19 nt, Artificial Sequence
  Description of Artificial Sequence: Synthetic oligonucleotide
  Antisense strand to SEQ ID NO: 2560624
augucaacuauucucaagu

SEQ ID NO: 2560626 - RNA, 19 nt, Artificial Sequence
  Description of Artificial Sequence: Synthetic oligonucleotide
  Sense strand starting at position 283 of SEQ ID NO: 1888840
aauaguugacaucaggcau

SEQ ID NO: 2560627 - RNA, 19 nt, Artificial Sequence
  Description of Artificial Sequence: Synthetic oligonucleotide
  Antisense strand to SEQ ID NO: 2560626
augccugaugucaacuauu

SEQ ID NO: 2560628 - RNA, 19 nt, Artificial Sequence
  Description of Artificial Sequence: Synthetic oligonucleotide
  Sense strand starting at position 421 of SEQ ID NO: 1888840
uuuauuuagcguuauaccu

SEQ ID NO: 2560629 - RNA, 19 nt, Artificial Sequence
  Description of Artificial Sequence: Synthetic oligonucleotide
  Antisense strand to SEQ ID NO: 2560628
agguauaacgcuaaauaaa

SEQ ID NO: 2560630 - RNA, 19 nt, Artificial Sequence
  Description of Artificial Sequence: Synthetic oligonucleotide
  Sense strand starting at position 429 of SEQ ID NO: 1888840
gcguuauaccugucccucu

SEQ ID NO: 2560631 - RNA, 19 nt, Artificial Sequence
  Description of Artificial Sequence: Synthetic oligonucleotide
  Antisense strand to SEQ ID NO: 2560630
agagggacagguauaacgc

SEQ ID NO: 2560632 - RNA, 19 nt, Artificial Sequence
  Description of Artificial Sequence: Synthetic oligonucleotide
  Sense strand starting at position 688 of SEQ ID NO: 1888840
uuucuaccagaugguaaua

SEQ ID NO: 2560633 - RNA, 19 nt, Artificial Sequence
  Description of Artificial Sequence: Synthetic oligonucleotide
  Antisense strand to SEQ ID NO: 2560632
uauuaccaucugguagaaa

SEQ ID NO: 2560634 - RNA, 19 nt, Artificial Sequence
  Description of Artificial Sequence: Synthetic oligonucleotide
  Sense strand starting at position 870 of SEQ ID NO: 1888840
caagacaaagugugucuaa

SEQ ID NO: 2560635 - RNA, 19 nt, Artificial Sequence
  Description of Artificial Sequence: Synthetic oligonucleotide
  Antisense strand to SEQ ID NO: 2560634
uuagacacacuuugucuug

SEQ ID NO: 2560636 - RNA, 19 nt, Artificial Sequence
  Description of Artificial Sequence: Synthetic oligonucleotide
  Sense strand starting at position 871 of SEQ ID NO: 1888840
aagacaaagugugucuaaa

SEQ ID NO: 2560637 - RNA, 19 nt, Artificial Sequence
  Description of Artificial Sequence: Synthetic oligonucleotide
  Antisense strand to SEQ ID NO: 2560636
uuuagacacacuuugucuu

SEQ ID NO: 2560638 - RNA, 19 nt, Artificial Sequence
  Description of Artificial Sequence: Synthetic oligonucleotide
  Sense strand starting at position 873 of SEQ ID NO: 1888840
gacaaagugugucuaaaug

SEQ ID NO: 2560639 - RNA, 19 nt, Artificial Sequence
  Description of Artificial Sequence: Synthetic oligonucleotide
  Antisense strand to SEQ ID NO: 2560638
cauuuagacacacuuuguc

SEQ ID NO: 2560640 - RNA, 19 nt, Artificial Sequence
  Description of Artificial Sequence: Synthetic oligonucleotide
  Sense strand starting at position 889 of SEQ ID NO: 1888840
auguacuuuccaggaaugu

SEQ ID NO: 2560641 - RNA, 19 nt, Artificial Sequence
  Description of Artificial Sequence: Synthetic oligonucleotide
  Antisense strand to SEQ ID NO: 2560640
acauuccuggaaaguacau

SEQ ID NO: 2560642 - RNA, 19 nt, Artificial Sequence
  Description of Artificial Sequence: Synthetic oligonucleotide
  Sense strand starting at position 890 of SEQ ID NO: 1888840
uguacuuuccaggaauguu

SEQ ID NO: 2560643 - RNA, 19 nt, Artificial Sequence
  Description of Artificial Sequence: Synthetic oligonucleotide
  Antisense strand to SEQ ID NO: 2560642
aacauuccuggaaaguaca

SEQ ID NO: 2560644 - RNA, 19 nt, Artificial Sequence
  Description of Artificial Sequence: Synthetic oligonucleotide
  Sense strand starting at position 1193 of SEQ ID NO: 1888840
aguuguacuugguuggaga

SEQ ID NO: 2560645 - RNA, 19 nt, Artificial Sequence
  Description of Artificial Sequence: Synthetic oligonucleotide
  Antisense strand to SEQ ID NO: 2560644
ucuccaaccaaguacaacu

SEQ ID NO: 2560646 - RNA, 19 nt, Artificial Sequence
  Description of Artificial Sequence: Synthetic oligonucleotide
  Sense strand starting at position 1396 of SEQ ID NO: 1888840
uucuaucaucuaggaaugu

SEQ ID NO: 2560647 - RNA, 19 nt, Artificial Sequence
  Description of Artificial Sequence: Synthetic oligonucleotide
  Antisense strand to SEQ ID NO: 2560646
acauuccuagaugauagaa

SEQ ID NO: 2560648 - RNA, 19 nt, Artificial Sequence
  Description of Artificial Sequence: Synthetic oligonucleotide
  Sense strand starting at position 1698 of SEQ ID NO: 1888840
cagagugagauucgaaagu

SEQ ID NO: 2560649 - RNA, 19 nt, Artificial Sequence
  Description of Artificial Sequence: Synthetic oligonucleotide
  Antisense strand to SEQ ID NO: 2560648
acuuucgaaucucacucug

SEQ ID NO: 2560650 - RNA, 19 nt, Artificial Sequence
  Description of Artificial Sequence: Synthetic oligonucleotide
  Sense strand starting at position 1707 of SEQ ID NO: 1888840
auucgaaaguaaucauaga

SEQ ID NO: 2560651 - RNA, 19 nt, Artificial Sequence
  Description of Artificial Sequence: Synthetic oligonucleotide
  Antisense strand to SEQ ID NO: 2560650
ucuaugauuacuuucgaau

SEQ ID NO: 2560652 - RNA, 19 nt, Artificial Sequence
  Description of Artificial Sequence: Synthetic oligonucleotide
  Sense strand starting at position 1881 of SEQ ID NO: 1888840
guauuaagcucugcauaga

SEQ ID NO: 2560653 - RNA, 19 nt, Artificial Sequence
  Description of Artificial Sequence: Synthetic oligonucleotide
  Antisense strand to SEQ ID NO: 2560652
ucuaugcagagcuuaauac

SEQ ID NO: 2560654 - RNA, 19 nt, Artificial Sequence
  Description of Artificial Sequence: Synthetic oligonucleotide
  Sense strand starting at position 1908 of SEQ ID NO: 1888840
ggagguguauaaccacauu

SEQ ID NO: 2560655 - RNA, 19 nt, Artificial Sequence
  Description of Artificial Sequence: Synthetic oligonucleotide
  Antisense strand to SEQ ID NO: 2560654
aaugugguuauacaccucc

SEQ ID NO: 2560656 - RNA, 19 nt, Artificial Sequence
  Description of Artificial Sequence: Synthetic oligonucleotide
  Sense strand starting at position 1926 of SEQ ID NO: 1888840
ucacaaugguuacuuggaa

SEQ ID NO: 2560657 - RNA, 19 nt, Artificial Sequence
  Description of Artificial Sequence: Synthetic oligonucleotide
  Antisense strand to SEQ ID NO: 2560656
uuccaaguaaccauuguga

SEQ ID NO: 2560658 - RNA, 19 nt, Artificial Sequence
  Description of Artificial Sequence: Synthetic oligonucleotide
  Sense strand starting at position 1927 of SEQ ID NO: 1888840
cacaaugguuacuuggaau

SEQ ID NO: 2560659 - RNA, 19 nt, Artificial Sequence
  Description of Artificial Sequence: Synthetic oligonucleotide
  Antisense strand to SEQ ID NO: 2560658
auuccaaguaaccauugug

SEQ ID NO: 2560660 - RNA, 19 nt, Artificial Sequence
  Description of Artificial Sequence: Synthetic oligonucleotide
  Sense strand starting at position 2028 of SEQ ID NO: 1888840
guguauaaauggcuaaaug

SEQ ID NO: 2560661 - RNA, 19 nt, Artificial Sequence
  Description of Artificial Sequence: Synthetic oligonucleotide
  Antisense strand to SEQ ID NO: 2560660
cauuuagccauuuauacac

SEQ ID NO: 2560662 - RNA, 19 nt, Artificial Sequence
  Description of Artificial Sequence: Synthetic oligonucleotide
  Sense strand starting at position 2029 of SEQ ID NO: 1888840
uguauaaauggcuaaaugu

SEQ ID NO: 2560663 - RNA, 19 nt, Artificial Sequence
  Description of Artificial Sequence: Synthetic oligonucleotide
  Antisense strand to SEQ ID NO: 2560662
acauuuagccauuuauaca

SEQ ID NO: 2560664 - RNA, 19 nt, Artificial Sequence
  Description of Artificial Sequence: Synthetic oligonucleotide
  Sense strand starting at position 2036 of SEQ ID NO: 1888840
auggcuaaauguuccuaua

SEQ ID NO: 2560665 - RNA, 19 nt, Artificial Sequence
  Description of Artificial Sequence: Synthetic oligonucleotide
  Antisense strand to SEQ ID NO: 2560664
uauaggaacauuuagccau

SEQ ID NO: 2560666 - RNA, 19 nt, Artificial Sequence
  Description of Artificial Sequence: Synthetic oligonucleotide
  Sense strand starting at position 2038 of SEQ ID NO: 1888840
ggcuaaauguuccuauaua

SEQ ID NO: 2560667 - RNA, 19 nt, Artificial Sequence
  Description of Artificial Sequence: Synthetic oligonucleotide
  Antisense strand to SEQ ID NO: 2560666
uauauaggaacauuuagcc

SEQ ID NO: 2560668 - RNA, 19 nt, Artificial Sequence
  Description of Artificial Sequence: Synthetic oligonucleotide
  Sense strand starting at position 2202 of SEQ ID NO: 1888840
aaauaaaguccucguuaug

SEQ ID NO: 2560669 - RNA, 19 nt, Artificial Sequence
  Description of Artificial Sequence: Synthetic oligonucleotide
  Antisense strand to SEQ ID NO: 2560668
cauaacgaggacuuuauuu

SEQ ID NO: 2560670 - RNA, 19 nt, Artificial Sequence
  Description of Artificial Sequence: Synthetic oligonucleotide
  Sense strand starting at position 2205 of SEQ ID NO: 1888840
uaaaguccucguuaugaau

SEQ ID NO: 2560671 - RNA, 19 nt, Artificial Sequence
  Description of Artificial Sequence: Synthetic oligonucleotide
  Antisense strand to SEQ ID NO: 2560670
auucauaacgaggacuuua

SEQ ID NO: 2560672 - RNA, 19 nt, Artificial Sequence
  Description of Artificial Sequence: Synthetic oligonucleotide
  Sense strand starting at position 2328 of SEQ ID NO: 1888840
ccugauuucuaccugcagu

SEQ ID NO: 2560673 - RNA, 19 nt, Artificial Sequence
  Description of Artificial Sequence: Synthetic oligonucleotide
  Antisense strand to SEQ ID NO: 2560672
acugcagguagaaaucagg

SEQ ID NO: 2560674 - RNA, 19 nt, Artificial Sequence
  Description of Artificial Sequence: Synthetic oligonucleotide
  Sense strand starting at position 2348 of SEQ ID NO: 1888840
uguaauuuguuccaggaaa

SEQ ID NO: 2560675 - RNA, 19 nt, Artificial Sequence
  Description of Artificial Sequence: Synthetic oligonucleotide
  Antisense strand to SEQ ID NO: 2560674
uuuccuggaacaaauuaca

SEQ ID NO: 2560676 - RNA, 19 nt, Artificial Sequence
  Description of Artificial Sequence: Synthetic oligonucleotide
  Sense strand starting at position 2393 of SEQ ID NO: 1888840
ccuaauagguaguucgaaa

SEQ ID NO: 2560677 - RNA, 19 nt, Artificial Sequence
  Description of Artificial Sequence: Synthetic oligonucleotide
  Antisense strand to SEQ ID NO: 2560676
uuucgaacuaccuauuagg

SEQ ID NO: 2560678 - RNA, 19 nt, Artificial Sequence
  Description of Artificial Sequence: Synthetic oligonucleotide
  Sense strand starting at position 2440 of SEQ ID NO: 1888840
guagguuucucucccauuu

SEQ ID NO: 2560679 - RNA, 19 nt, Artificial Sequence
  Description of Artificial Sequence: Synthetic oligonucleotide
  Antisense strand to SEQ ID NO: 2560678
aaaugggagagaaaccuac

SEQ ID NO: 2560680 - RNA, 19 nt, Artificial Sequence
  Description of Artificial Sequence: Synthetic oligonucleotide
  Sense strand starting at position 2583 of SEQ ID NO: 1888840
cuuuacaaugcaggauaau

SEQ ID NO: 2560681 - RNA, 19 nt, Artificial Sequence
  Description of Artificial Sequence: Synthetic oligonucleotide
  Antisense strand to SEQ ID NO: 2560680
auuauccugcauuguaaag

SEQ ID NO: 2560682 - RNA, 19 nt, Artificial Sequence
  Description of Artificial Sequence: Synthetic oligonucleotide
  Sense strand starting at position 2614 of SEQ ID NO: 1888840
cuacucauucucgacguua

SEQ ID NO: 2560683 - RNA, 19 nt, Artificial Sequence
  Description of Artificial Sequence: Synthetic oligonucleotide
  Antisense strand to SEQ ID NO: 2560682
uaacgucgagaaugaguag

SEQ ID NO: 2560684 - RNA, 19 nt, Artificial Sequence
  Description of Artificial Sequence: Synthetic oligonucleotide
  Sense strand starting at position 2619 of SEQ ID NO: 1888840
cauucucgacguuaacaga

SEQ ID NO: 2560685 - RNA, 19 nt, Artificial Sequence
  Description of Artificial Sequence: Synthetic oligonucleotide
  Antisense strand to SEQ ID NO: 2560684
ucuguuaacgucgagaaug

SEQ ID NO: 2560686 - RNA, 19 nt, Artificial Sequence
  Description of Artificial Sequence: Synthetic oligonucleotide
  Sense strand starting at position 3660 of SEQ ID NO: 1888840
ugugcagaucucuaaccau

SEQ ID NO: 2560687 - RNA, 19 nt, Artificial Sequence
  Description of Artificial Sequence: Synthetic oligonucleotide
  Antisense strand to SEQ ID NO: 2560686
augguuagagaucugcaca

SEQ ID NO: 2560688 - RNA, 19 nt, Artificial Sequence
  Description of Artificial Sequence: Synthetic oligonucleotide
  Sense strand starting at position 3713 of SEQ ID NO: 1888840
uuaagcauauucccggaaa

SEQ ID NO: 2560689 - RNA, 19 nt, Artificial Sequence
  Description of Artificial Sequence: Synthetic oligonucleotide
  Antisense strand to SEQ ID NO: 2560688
uuuccgggaauaugcuuaa

SEQ ID NO: 2560690 - RNA, 19 nt, Artificial Sequence
  Description of Artificial Sequence: Synthetic oligonucleotide
  Sense strand starting at position 3897 of SEQ ID NO: 1888840
uccgcuugacacugauauu

SEQ ID NO: 2560691 - RNA, 19 nt, Artificial Sequence
  Description of Artificial Sequence: Synthetic oligonucleotide
  Antisense strand to SEQ ID NO: 2560690
aauaucagugucaagcgga

SEQ ID NO: 2560692 - RNA, 19 nt, Artificial Sequence
  Description of Artificial Sequence: Synthetic oligonucleotide
  Sense strand starting at position 279 of SEQ ID NO: 1888841
gggaugguuuccgaagcga

SEQ ID NO: 2560693 - RNA, 19 nt, Artificial Sequence
  Description of Artificial Sequence: Synthetic oligonucleotide
  Antisense strand to SEQ ID NO: 2560692
ucgcuucggaaaccauccc

SEQ ID NO: 2560694 - RNA, 19 nt, Artificial Sequence
  Description of Artificial Sequence: Synthetic oligonucleotide
  Sense strand starting at position 313 of SEQ ID NO: 1888841
ucaguuaccucagcgguua

SEQ ID NO: 2560695 - RNA, 19 nt, Artificial Sequence
  Description of Artificial Sequence: Synthetic oligonucleotide
  Antisense strand to SEQ ID NO: 2560694
uaaccgcugagguaacuga

SEQ ID NO: 2560696 - RNA, 19 nt, Artificial Sequence
  Description of Artificial Sequence: Synthetic oligonucleotide
  Sense strand starting at position 400 of SEQ ID NO: 1888841
gugcucuccugaccuaauu

SEQ ID NO: 2560697 - RNA, 19 nt, Artificial Sequence
  Description of Artificial Sequence: Synthetic oligonucleotide
  Antisense strand to SEQ ID NO: 2560696
aauuaggucaggagagcac

SEQ ID NO: 2560698 - RNA, 19 nt, Artificial Sequence
  Description of Artificial Sequence: Synthetic oligonucleotide
  Sense strand starting at position 410 of SEQ ID NO: 1888841
gaccuaauuccaugccgga

SEQ ID NO: 2560699 - RNA, 19 nt, Artificial Sequence
  Description of Artificial Sequence: Synthetic oligonucleotide
  Antisense strand to SEQ ID NO: 2560698
uccggcauggaauuagguc

SEQ ID NO: 2560700 - RNA, 19 nt, Artificial Sequence
  Description of Artificial Sequence: Synthetic oligonucleotide
  Sense strand starting at position 1999 of SEQ ID NO: 1888841
acugucuugucucagcaaa

SEQ ID NO: 2560701 - RNA, 19 nt, Artificial Sequence
  Description of Artificial Sequence: Synthetic oligonucleotide
  Antisense strand to SEQ ID NO: 2560700
uuugcugagacaagacagu

SEQ ID NO: 2560702 - RNA, 19 nt, Artificial Sequence
  Description of Artificial Sequence: Synthetic oligonucleotide
  Sense strand starting at position 2001 of SEQ ID NO: 1888841
ugucuugucucagcaaagu

SEQ ID NO: 2560703 - RNA, 19 nt, Artificial Sequence
  Description of Artificial Sequence: Synthetic oligonucleotide
  Antisense strand to SEQ ID NO: 2560702
acuuugcugagacaagaca

SEQ ID NO: 2560704 - RNA, 19 nt, Artificial Sequence
  Description of Artificial Sequence: Synthetic oligonucleotide
  Sense strand starting at position 2007 of SEQ ID NO: 1888841
gucucagcaaaguguuaua

SEQ ID NO: 2560705 - RNA, 19 nt, Artificial Sequence
  Description of Artificial Sequence: Synthetic oligonucleotide
  Antisense strand to SEQ ID NO: 2560704
uauaacacuuugcugagac

SEQ ID NO: 2560706 - RNA, 19 nt, Artificial Sequence
  Description of Artificial Sequence: Synthetic oligonucleotide
  Sense strand starting at position 2010 of SEQ ID NO: 1888841
ucagcaaaguguuauauaa

SEQ ID NO: 2560707 - RNA, 19 nt, Artificial Sequence
  Description of Artificial Sequence: Synthetic oligonucleotide
  Antisense strand to SEQ ID NO: 2560706
uuauauaacacuuugcuga

SEQ ID NO: 2560708 - RNA, 19 nt, Artificial Sequence
  Description of Artificial Sequence: Synthetic oligonucleotide
  Sense strand starting at position 2156 of SEQ ID NO: 1888841
ugagguuguuuguguuuac

SEQ ID NO: 2560709 - RNA, 19 nt, Artificial Sequence
  Description of Artificial Sequence: Synthetic oligonucleotide
  Antisense strand to SEQ ID NO: 2560708
guaaacacaaacaaccuca

SEQ ID NO: 2560710 - RNA, 19 nt, Artificial Sequence
  Description of Artificial Sequence: Synthetic oligonucleotide
  Sense strand starting at position 2157 of SEQ ID NO: 1888841
gagguuguuuguguuuaca

SEQ ID NO: 2560711 - RNA, 19 nt, Artificial Sequence
  Description of Artificial Sequence: Synthetic oligonucleotide
  Antisense strand to SEQ ID NO: 2560710
uguaaacacaaacaaccuc

SEQ ID NO: 2560712 - RNA, 19 nt, Artificial Sequence
  Description of Artificial Sequence: Synthetic oligonucleotide
  Sense strand starting at position 2159 of SEQ ID NO: 1888841
gguuguuuguguuuacacu

SEQ ID NO: 2560713 - RNA, 19 nt, Artificial Sequence
  Description of Artificial Sequence: Synthetic oligonucleotide
  Antisense strand to SEQ ID NO: 2560712
aguguaaacacaaacaacc

SEQ ID NO: 2560714 - RNA, 19 nt, Artificial Sequence
  Description of Artificial Sequence: Synthetic oligonucleotide
  Sense strand starting at position 2160 of SEQ ID NO: 1888841
guuguuuguguuuacacuu

SEQ ID NO: 2560715 - RNA, 19 nt, Artificial Sequence
  Description of Artificial Sequence: Synthetic oligonucleotide
  Antisense strand to SEQ ID NO: 2560714
aaguguaaacacaaacaac

SEQ ID NO: 2560716 - RNA, 19 nt, Artificial Sequence
  Description of Artificial Sequence: Synthetic oligonucleotide
  Sense strand starting at position 2167 of SEQ ID NO: 1888841
guguuuacacuucgccuua

SEQ ID NO: 2560717 - RNA, 19 nt, Artificial Sequence
  Description of Artificial Sequence: Synthetic oligonucleotide
  Antisense strand to SEQ ID NO: 2560716
uaaggcgaaguguaaacac

SEQ ID NO: 2560718 - RNA, 19 nt, Artificial Sequence
  Description of Artificial Sequence: Synthetic oligonucleotide
  Sense strand starting at position 2169 of SEQ ID NO: 1888841
guuuacacuucgccuuauu

SEQ ID NO: 2560719 - RNA, 19 nt, Artificial Sequence
  Description of Artificial Sequence: Synthetic oligonucleotide
  Antisense strand to SEQ ID NO: 2560718
aauaaggcgaaguguaaac

SEQ ID NO: 2560720 - RNA, 19 nt, Artificial Sequence
  Description of Artificial Sequence: Synthetic oligonucleotide
  Sense strand starting at position 2233 of SEQ ID NO: 1888841
gggagaaacucagugucuu

SEQ ID NO: 2560721 - RNA, 19 nt, Artificial Sequence
  Description of Artificial Sequence: Synthetic oligonucleotide
  Antisense strand to SEQ ID NO: 2560720
aagacacugaguuucuccc

SEQ ID NO: 2560722 - RNA, 19 nt, Artificial Sequence
  Description of Artificial Sequence: Synthetic oligonucleotide
  Sense strand starting at position 2234 of SEQ ID NO: 1888841
ggagaaacucagugucuuc

SEQ ID NO: 2560723 - RNA, 19 nt, Artificial Sequence
  Description of Artificial Sequence: Synthetic oligonucleotide
  Antisense strand to SEQ ID NO: 2560722
gaagacacugaguuucucc

SEQ ID NO: 2560724 - RNA, 19 nt, Artificial Sequence
  Description of Artificial Sequence: Synthetic oligonucleotide
  Sense strand starting at position 2435 of SEQ ID NO: 1888841
gcugcugucagggaaagga

SEQ ID NO: 2560725 - RNA, 19 nt, Artificial Sequence
  Description of Artificial Sequence: Synthetic oligonucleotide
  Antisense strand to SEQ ID NO: 2560724
uccuuucccugacagcagc

SEQ ID NO: 2560726 - RNA, 19 nt, Artificial Sequence
  Description of Artificial Sequence: Synthetic oligonucleotide
  Sense strand starting at position 2598 of SEQ ID NO: 1888841
gguguucugugccaagagu

SEQ ID NO: 2560727 - RNA, 19 nt, Artificial Sequence
  Description of Artificial Sequence: Synthetic oligonucleotide
  Antisense strand to SEQ ID NO: 2560726
acucuuggcacagaacacc

SEQ ID NO: 2560728 - RNA, 19 nt, Artificial Sequence
  Description of Artificial Sequence: Synthetic oligonucleotide
  Sense strand starting at position 2599 of SEQ ID NO: 1888841
guguucugugccaagagug

SEQ ID NO: 2560729 - RNA, 19 nt, Artificial Sequence
  Description of Artificial Sequence: Synthetic oligonucleotide
  Antisense strand to SEQ ID NO: 2560728
cacucuuggcacagaacac

SEQ ID NO: 2560730 - RNA, 19 nt, Artificial Sequence
  Description of Artificial Sequence: Synthetic oligonucleotide
  Sense strand starting at position 2928 of SEQ ID NO: 1888841
agcgcuauucaggagaaag

SEQ ID NO: 2560731 - RNA, 19 nt, Artificial Sequence
  Description of Artificial Sequence: Synthetic oligonucleotide
  Antisense strand to SEQ ID NO: 2560730
cuuucuccugaauagcgcu

SEQ ID NO: 2560732 - RNA, 19 nt, Artificial Sequence
  Description of Artificial Sequence: Synthetic oligonucleotide
  Sense strand starting at position 2978 of SEQ ID NO: 1888841
ccgaauagccuccagguuu

SEQ ID NO: 2560733 - RNA, 19 nt, Artificial Sequence
  Description of Artificial Sequence: Synthetic oligonucleotide
  Antisense strand to SEQ ID NO: 2560732
aaaccuggaggcuauucgg

SEQ ID NO: 2560734 - RNA, 19 nt, Artificial Sequence
  Description of Artificial Sequence: Synthetic oligonucleotide
  Sense strand starting at position 2989 of SEQ ID NO: 1888841
ccagguuugucgcuccuga

SEQ ID NO: 2560735 - RNA, 19 nt, Artificial Sequence
  Description of Artificial Sequence: Synthetic oligonucleotide
  Antisense strand to SEQ ID NO: 2560734
ucaggagcgacaaaccugg

SEQ ID NO: 2560736 - RNA, 19 nt, Artificial Sequence
  Description of Artificial Sequence: Synthetic oligonucleotide
  Sense strand starting at position 3076 of SEQ ID NO: 1888841
gacgguguccuacacacuu

SEQ ID NO: 2560737 - RNA, 19 nt, Artificial Sequence
  Description of Artificial Sequence: Synthetic oligonucleotide
  Antisense strand to SEQ ID NO: 2560736
aaguguguaggacaccguc

SEQ ID NO: 2560738 - RNA, 19 nt, Artificial Sequence
  Description of Artificial Sequence: Synthetic oligonucleotide
  Sense strand starting at position 3388 of SEQ ID NO: 1888841
uuugcuucugaacaaaugu

SEQ ID NO: 2560739 - RNA, 19 nt, Artificial Sequence
  Description of Artificial Sequence: Synthetic oligonucleotide
  Antisense strand to SEQ ID NO: 2560738
acauuuguucagaagcaaa

SEQ ID NO: 2560740 - RNA, 19 nt, Artificial Sequence
  Description of Artificial Sequence: Synthetic oligonucleotide
  Sense strand starting at position 3402 of SEQ ID NO: 1888841
aauguuagagcugaucuua

SEQ ID NO: 2560741 - RNA, 19 nt, Artificial Sequence
  Description of Artificial Sequence: Synthetic oligonucleotide
  Antisense strand to SEQ ID NO: 2560740
uaagaucagcucuaacauu

SEQ ID NO: 2560742 - RNA, 19 nt, Artificial Sequence
  Description of Artificial Sequence: Synthetic oligonucleotide
  Sense strand starting at position 3410 of SEQ ID NO: 1888841
agcugaucuuacuugggau

SEQ ID NO: 2560743 - RNA, 19 nt, Artificial Sequence
  Description of Artificial Sequence: Synthetic oligonucleotide
  Antisense strand to SEQ ID NO: 2560742
aucccaaguaagaucagcu

SEQ ID NO: 2560744 - RNA, 19 nt, Artificial Sequence
  Description of Artificial Sequence: Synthetic oligonucleotide
  Sense strand starting at position 3411 of SEQ ID NO: 1888841
gcugaucuuacuugggauu

SEQ ID NO: 2560745 - RNA, 19 nt, Artificial Sequence
  Description of Artificial Sequence: Synthetic oligonucleotide
  Antisense strand to SEQ ID NO: 2560744
aaucccaaguaagaucagc

SEQ ID NO: 2560746 - RNA, 19 nt, Artificial Sequence
  Description of Artificial Sequence: Synthetic oligonucleotide
  Sense strand starting at position 3412 of SEQ ID NO: 1888841
cugaucuuacuugggauua

SEQ ID NO: 2560747 - RNA, 19 nt, Artificial Sequence
  Description of Artificial Sequence: Synthetic oligonucleotide
  Antisense strand to SEQ ID NO: 2560746
uaaucccaaguaagaucag

SEQ ID NO: 2560748 - RNA, 19 nt, Artificial Sequence
  Description of Artificial Sequence: Synthetic oligonucleotide
  Sense strand starting at position 3413 of SEQ ID NO: 1888841
ugaucuuacuugggauuaa

SEQ ID NO: 2560749 - RNA, 19 nt, Artificial Sequence
  Description of Artificial Sequence: Synthetic oligonucleotide
  Antisense strand to SEQ ID NO: 2560748
uuaaucccaaguaagauca

SEQ ID NO: 2560750 - RNA, 19 nt, Artificial Sequence
  Description of Artificial Sequence: Synthetic oligonucleotide
  Sense strand starting at position 3414 of SEQ ID NO: 1888841
gaucuuacuugggauuaag

SEQ ID NO: 2560751 - RNA, 19 nt, Artificial Sequence
  Description of Artificial Sequence: Synthetic oligonucleotide
  Antisense strand to SEQ ID NO: 2560750
cuuaaucccaaguaagauc

SEQ ID NO: 2560752 - RNA, 19 nt, Artificial Sequence
  Description of Artificial Sequence: Synthetic oligonucleotide
  Sense strand starting at position 3422 of SEQ ID NO: 1888841
uugggauuaagucauguuu

SEQ ID NO: 2560753 - RNA, 19 nt, Artificial Sequence
  Description of Artificial Sequence: Synthetic oligonucleotide
  Antisense strand to SEQ ID NO: 2560752
aaacaugacuuaaucccaa

SEQ ID NO: 2560754 - RNA, 19 nt, Artificial Sequence
  Description of Artificial Sequence: Synthetic oligonucleotide
  Sense strand starting at position 3436 of SEQ ID NO: 1888841
uguuucagaguuggguuau

SEQ ID NO: 2560755 - RNA, 19 nt, Artificial Sequence
  Description of Artificial Sequence: Synthetic oligonucleotide
  Antisense strand to SEQ ID NO: 2560754
auaacccaacucugaaaca

SEQ ID NO: 2560756 - RNA, 19 nt, Artificial Sequence
  Description of Artificial Sequence: Synthetic oligonucleotide
  Sense strand starting at position 3437 of SEQ ID NO: 1888841
guuucagaguuggguuaug

SEQ ID NO: 2560757 - RNA, 19 nt, Artificial Sequence
  Description of Artificial Sequence: Synthetic oligonucleotide
  Antisense strand to SEQ ID NO: 2560756
cauaacccaacucugaaac

SEQ ID NO: 2560758 - RNA, 19 nt, Artificial Sequence
  Description of Artificial Sequence: Synthetic oligonucleotide
  Sense strand starting at position 3472 of SEQ ID NO: 1888841
cucugcuucucuuuaggua

SEQ ID NO: 2560759 - RNA, 19 nt, Artificial Sequence
  Description of Artificial Sequence: Synthetic oligonucleotide
  Antisense strand to SEQ ID NO: 2560758
uaccuaaagagaagcagag

SEQ ID NO: 2560760 - RNA, 19 nt, Artificial Sequence
  Description of Artificial Sequence: Synthetic oligonucleotide
  Sense strand starting at position 3476 of SEQ ID NO: 1888841
gcuucucuuuagguaguua

SEQ ID NO: 2560761 - RNA, 19 nt, Artificial Sequence
  Description of Artificial Sequence: Synthetic oligonucleotide
  Antisense strand to SEQ ID NO: 2560760
uaacuaccuaaagagaagc

SEQ ID NO: 2560762 - RNA, 19 nt, Artificial Sequence
  Description of Artificial Sequence: Synthetic oligonucleotide
  Sense strand starting at position 3737 of SEQ ID NO: 1888841
gcuugaagccuuggauuug

SEQ ID NO: 2560763 - RNA, 19 nt, Artificial Sequence
  Description of Artificial Sequence: Synthetic oligonucleotide
  Antisense strand to SEQ ID NO: 2560762
caaauccaaggcuucaagc

SEQ ID NO: 2560764 - RNA, 19 nt, Artificial Sequence
  Description of Artificial Sequence: Synthetic oligonucleotide
  Sense strand starting at position 3834 of SEQ ID NO: 1888841
aaccuugaguggcuuugau

SEQ ID NO: 2560765 - RNA, 19 nt, Artificial Sequence
  Description of Artificial Sequence: Synthetic oligonucleotide
  Antisense strand to SEQ ID NO: 2560764
aucaaagccacucaagguu

SEQ ID NO: 2560766 - RNA, 19 nt, Artificial Sequence
  Description of Artificial Sequence: Synthetic oligonucleotide
  Sense strand starting at position 3838 of SEQ ID NO: 1888841
uugaguggcuuugauccua

SEQ ID NO: 2560767 - RNA, 19 nt, Artificial Sequence
  Description of Artificial Sequence: Synthetic oligonucleotide
  Antisense strand to SEQ ID NO: 2560766
uaggaucaaagccacucaa

SEQ ID NO: 2560768 - RNA, 19 nt, Artificial Sequence
  Description of Artificial Sequence: Synthetic oligonucleotide
  Sense strand starting at position 3880 of SEQ ID NO: 1888841
ucaguuacuuaaguacaaa

SEQ ID NO: 2560769 - RNA, 19 nt, Artificial Sequence
  Description of Artificial Sequence: Synthetic oligonucleotide
  Antisense strand to SEQ ID NO: 2560768
uuuguacuuaaguaacuga

SEQ ID NO: 2560770 - RNA, 19 nt, Artificial Sequence
  Description of Artificial Sequence: Synthetic oligonucleotide
  Sense strand starting at position 264 of SEQ ID NO: 1888842
auucuaaacuaugugaggu

SEQ ID NO: 2560771 - RNA, 19 nt, Artificial Sequence
  Description of Artificial Sequence: Synthetic oligonucleotide
  Antisense strand to SEQ ID NO: 2560770
accucacauaguuuagaau

SEQ ID NO: 2560772 - RNA, 19 nt, Artificial Sequence
  Description of Artificial Sequence: Synthetic oligonucleotide
  Sense strand starting at position 277 of SEQ ID NO: 1888842
ugagguuuauuugcaagca

SEQ ID NO: 2560773 - RNA, 19 nt, Artificial Sequence
  Description of Artificial Sequence: Synthetic oligonucleotide
  Antisense strand to SEQ ID NO: 2560772
ugcuugcaaauaaaccuca

SEQ ID NO: 2560774 - RNA, 19 nt, Artificial Sequence
  Description of Artificial Sequence: Synthetic oligonucleotide
  Sense strand starting at position 340 of SEQ ID NO: 1888842
ucaaucguuuaacuagauu

SEQ ID NO: 2560775 - RNA, 19 nt, Artificial Sequence
  Description of Artificial Sequence: Synthetic oligonucleotide
  Antisense strand to SEQ ID NO: 2560774
aaucuaguuaaacgauuga

SEQ ID NO: 2560776 - RNA, 19 nt, Artificial Sequence
  Description of Artificial Sequence: Synthetic oligonucleotide
  Sense strand starting at position 343 of SEQ ID NO: 1888842
aucguuuaacuagauuguu

SEQ ID NO: 2560777 - RNA, 19 nt, Artificial Sequence
  Description of Artificial Sequence: Synthetic oligonucleotide
  Antisense strand to SEQ ID NO: 2560776
aacaaucuaguuaaacgau

SEQ ID NO: 2560778 - RNA, 19 nt, Artificial Sequence
  Description of Artificial Sequence: Synthetic oligonucleotide
  Sense strand starting at position 490 of SEQ ID NO: 1888842
agauuuagcuguucccauu

SEQ ID NO: 2560779 - RNA, 19 nt, Artificial Sequence
  Description of Artificial Sequence: Synthetic oligonucleotide
  Antisense strand to SEQ ID NO: 2560778
aaugggaacagcuaaaucu

SEQ ID NO: 2560780 - RNA, 19 nt, Artificial Sequence
  Description of Artificial Sequence: Synthetic oligonucleotide
  Sense strand starting at position 1035 of SEQ ID NO: 1888842
acagaauuccguugacuga

SEQ ID NO: 2560781 - RNA, 19 nt, Artificial Sequence
  Description of Artificial Sequence: Synthetic oligonucleotide
  Antisense strand to SEQ ID NO: 2560780
ucagucaacggaauucugu

SEQ ID NO: 2560782 - RNA, 19 nt, Artificial Sequence
  Description of Artificial Sequence: Synthetic oligonucleotide
  Sense strand starting at position 1038 of SEQ ID NO: 1888842
gaauuccguugacugagaa

SEQ ID NO: 2560783 - RNA, 19 nt, Artificial Sequence
  Description of Artificial Sequence: Synthetic oligonucleotide
  Antisense strand to SEQ ID NO: 2560782
uucucagucaacggaauuc

SEQ ID NO: 2560784 - RNA, 19 nt, Artificial Sequence
  Description of Artificial Sequence: Synthetic oligonucleotide
  Sense strand starting at position 1039 of SEQ ID NO: 1888842
aauuccguugacugagaau

SEQ ID NO: 2560785 - RNA, 19 nt, Artificial Sequence
  Description of Artificial Sequence: Synthetic oligonucleotide
  Antisense strand to SEQ ID NO: 2560784
auucucagucaacggaauu

SEQ ID NO: 2560786 - RNA, 19 nt, Artificial Sequence
  Description of Artificial Sequence: Synthetic oligonucleotide
  Sense strand starting at position 1045 of SEQ ID NO: 1888842
guugacugagaaugguaaa

SEQ ID NO: 2560787 - RNA, 19 nt, Artificial Sequence
  Description of Artificial Sequence: Synthetic oligonucleotide
  Antisense strand to SEQ ID NO: 2560786
uuuaccauucucagucaac

SEQ ID NO: 2560788 - RNA, 19 nt, Artificial Sequence
  Description of Artificial Sequence: Synthetic oligonucleotide
  Sense strand starting at position 1182 of SEQ ID NO: 1888842
gguguauguguauacauau

SEQ ID NO: 2560789 - RNA, 19 nt, Artificial Sequence
  Description of Artificial Sequence: Synthetic oligonucleotide
  Antisense strand to SEQ ID NO: 2560788
auauguauacacauacacc

SEQ ID NO: 2560790 - RNA, 19 nt, Artificial Sequence
  Description of Artificial Sequence: Synthetic oligonucleotide
  Sense strand starting at position 1238 of SEQ ID NO: 1888842
agagaucccuguucugaac

SEQ ID NO: 2560791 - RNA, 19 nt, Artificial Sequence
  Description of Artificial Sequence: Synthetic oligonucleotide
  Antisense strand to SEQ ID NO: 2560790
guucagaacagggaucucu

SEQ ID NO: 2560792 - RNA, 19 nt, Artificial Sequence
  Description of Artificial Sequence: Synthetic oligonucleotide
  Sense strand starting at position 1415 of SEQ ID NO: 1888842
ggauaaacugcugauaguu

SEQ ID NO: 2560793 - RNA, 19 nt, Artificial Sequence
  Description of Artificial Sequence: Synthetic oligonucleotide
  Antisense strand to SEQ ID NO: 2560792
aacuaucagcaguuuaucc

SEQ ID NO: 2560794 - RNA, 19 nt, Artificial Sequence
  Description of Artificial Sequence: Synthetic oligonucleotide
  Sense strand starting at position 1690 of SEQ ID NO: 1888842
gaccaaguccaguagaguu

SEQ ID NO: 2560795 - RNA, 19 nt, Artificial Sequence
  Description of Artificial Sequence: Synthetic oligonucleotide
  Antisense strand to SEQ ID NO: 2560794
aacucuacuggacuugguc

SEQ ID NO: 2560796 - RNA, 19 nt, Artificial Sequence
  Description of Artificial Sequence: Synthetic oligonucleotide
  Sense strand starting at position 1698 of SEQ ID NO: 1888842
ccaguagaguuggccaaau

SEQ ID NO: 2560797 - RNA, 19 nt, Artificial Sequence
  Description of Artificial Sequence: Synthetic oligonucleotide
  Antisense strand to SEQ ID NO: 2560796
auuuggccaacucuacugg

SEQ ID NO: 2560798 - RNA, 19 nt, Artificial Sequence
  Description of Artificial Sequence: Synthetic oligonucleotide
  Sense strand starting at position 1709 of SEQ ID NO: 1888842
ggccaaauccauugggaaa

SEQ ID NO: 2560799 - RNA, 19 nt, Artificial Sequence
  Description of Artificial Sequence: Synthetic oligonucleotide
  Antisense strand to SEQ ID NO: 2560798
uuucccaauggauuuggcc

SEQ ID NO: 2560800 - RNA, 19 nt, Artificial Sequence
  Description of Artificial Sequence: Synthetic oligonucleotide
  Sense strand starting at position 1808 of SEQ ID NO: 1888842
aggauuaccgaguacucua

SEQ ID NO: 2560801 - RNA, 19 nt, Artificial Sequence
  Description of Artificial Sequence: Synthetic oligonucleotide
  Antisense strand to SEQ ID NO: 2560800
uagaguacucgguaauccu

SEQ ID NO: 2560802 - RNA, 19 nt, Artificial Sequence
  Description of Artificial Sequence: Synthetic oligonucleotide
  Sense strand starting at position 1813 of SEQ ID NO: 1888842
uaccgaguacucuauuggu

SEQ ID NO: 2560803 - RNA, 19 nt, Artificial Sequence
  Description of Artificial Sequence: Synthetic oligonucleotide
  Antisense strand to SEQ ID NO: 2560802
accaauagaguacucggua

SEQ ID NO: 2560804 - RNA, 19 nt, Artificial Sequence
  Description of Artificial Sequence: Synthetic oligonucleotide
  Sense strand starting at position 1818 of SEQ ID NO: 1888842
aguacucuauugguaagua

SEQ ID NO: 2560805 - RNA, 19 nt, Artificial Sequence
  Description of Artificial Sequence: Synthetic oligonucleotide
  Antisense strand to SEQ ID NO: 2560804
uacuuaccaauagaguacu

SEQ ID NO: 2560806 - RNA, 19 nt, Artificial Sequence
  Description of Artificial Sequence: Synthetic oligonucleotide
  Sense strand starting at position 1822 of SEQ ID NO: 1888842
cucuauugguaaguagaaa

SEQ ID NO: 2560807 - RNA, 19 nt, Artificial Sequence
  Description of Artificial Sequence: Synthetic oligonucleotide
  Antisense strand to SEQ ID NO: 2560806
uuucuacuuaccaauagag

SEQ ID NO: 2560808 - RNA, 19 nt, Artificial Sequence
  Description of Artificial Sequence: Synthetic oligonucleotide
  Sense strand starting at position 1940 of SEQ ID NO: 1888842
ugaagacuuguuuguacau

SEQ ID NO: 2560809 - RNA, 19 nt, Artificial Sequence
  Description of Artificial Sequence: Synthetic oligonucleotide
  Antisense strand to SEQ ID NO: 2560808
auguacaaacaagucuuca

SEQ ID NO: 2560810 - RNA, 19 nt, Artificial Sequence
  Description of Artificial Sequence: Synthetic oligonucleotide
  Sense strand starting at position 1941 of SEQ ID NO: 1888842
gaagacuuguuuguacauu

SEQ ID NO: 2560811 - RNA, 19 nt, Artificial Sequence
  Description of Artificial Sequence: Synthetic oligonucleotide
  Antisense strand to SEQ ID NO: 2560810
aauguacaaacaagucuuc

SEQ ID NO: 2560812 - RNA, 19 nt, Artificial Sequence
  Description of Artificial Sequence: Synthetic oligonucleotide
  Sense strand starting at position 1977 of SEQ ID NO: 1888842
auguaaagccaacauguua

SEQ ID NO: 2560813 - RNA, 19 nt, Artificial Sequence
  Description of Artificial Sequence: Synthetic oligonucleotide
  Antisense strand to SEQ ID NO: 2560812
uaacauguuggcuuuacau

SEQ ID NO: 2560814 - RNA, 19 nt, Artificial Sequence
  Description of Artificial Sequence: Synthetic oligonucleotide
  Sense strand starting at position 2190 of SEQ ID NO: 1888842
gcauauauuuguguaacuc

SEQ ID NO: 2560815 - RNA, 19 nt, Artificial Sequence
  Description of Artificial Sequence: Synthetic oligonucleotide
  Antisense strand to SEQ ID NO: 2560814
gaguuacacaaauauaugc

SEQ ID NO: 2560816 - RNA, 19 nt, Artificial Sequence
  Description of Artificial Sequence: Synthetic oligonucleotide
  Sense strand starting at position 2321 of SEQ ID NO: 1888842
uuaagaccucuuugccuga

SEQ ID NO: 2560817 - RNA, 19 nt, Artificial Sequence
  Description of Artificial Sequence: Synthetic oligonucleotide
  Antisense strand to SEQ ID NO: 2560816
ucaggcaaagaggucuuaa

SEQ ID NO: 2560818 - RNA, 19 nt, Artificial Sequence
  Description of Artificial Sequence: Synthetic oligonucleotide
  Sense strand starting at position 2411 of SEQ ID NO: 1888842
uaugauccacugugaguua

SEQ ID NO: 2560819 - RNA, 19 nt, Artificial Sequence
  Description of Artificial Sequence: Synthetic oligonucleotide
  Antisense strand to SEQ ID NO: 2560818
uaacucacaguggaucaua

SEQ ID NO: 2560820 - RNA, 19 nt, Artificial Sequence
  Description of Artificial Sequence: Synthetic oligonucleotide
  Sense strand starting at position 2414 of SEQ ID NO: 1888842
gauccacugugaguuaauu

SEQ ID NO: 2560821 - RNA, 19 nt, Artificial Sequence
  Description of Artificial Sequence: Synthetic oligonucleotide
  Antisense strand to SEQ ID NO: 2560820
aauuaacucacaguggauc

SEQ ID NO: 2560822 - RNA, 19 nt, Artificial Sequence
  Description of Artificial Sequence: Synthetic oligonucleotide
  Sense strand starting at position 2494 of SEQ ID NO: 1888842
guuccaauaucacugauug

SEQ ID NO: 2560823 - RNA, 19 nt, Artificial Sequence
  Description of Artificial Sequence: Synthetic oligonucleotide
  Antisense strand to SEQ ID NO: 2560822
caaucagugauauuggaac

SEQ ID NO: 2560824 - RNA, 19 nt, Artificial Sequence
  Description of Artificial Sequence: Synthetic oligonucleotide
  Sense strand starting at position 2624 of SEQ ID NO: 1888842
auguguauccauuagccaa

SEQ ID NO: 2560825 - RNA, 19 nt, Artificial Sequence
  Description of Artificial Sequence: Synthetic oligonucleotide
  Antisense strand to SEQ ID NO: 2560824
uuggcuaauggauacacau

SEQ ID NO: 2560826 - RNA, 19 nt, Artificial Sequence
  Description of Artificial Sequence: Synthetic oligonucleotide
  Sense strand starting at position 2695 of SEQ ID NO: 1888842
guaugauuccaccaugauu

SEQ ID NO: 2560827 - RNA, 19 nt, Artificial Sequence
  Description of Artificial Sequence: Synthetic oligonucleotide
  Antisense strand to SEQ ID NO: 2560826
aaucaugguggaaucauac

SEQ ID NO: 2560828 - RNA, 19 nt, Artificial Sequence
  Description of Artificial Sequence: Synthetic oligonucleotide
  Sense strand starting at position 2841 of SEQ ID NO: 1888842
uacagauagcuuugguaua

SEQ ID NO: 2560829 - RNA, 19 nt, Artificial Sequence
  Description of Artificial Sequence: Synthetic oligonucleotide
  Antisense strand to SEQ ID NO: 2560828
uauaccaaagcuaucugua

SEQ ID NO: 2560830 - RNA, 19 nt, Artificial Sequence
  Description of Artificial Sequence: Synthetic oligonucleotide
  Sense strand starting at position 2851 of SEQ ID NO: 1888842
uuugguauaggucacacau

SEQ ID NO: 2560831 - RNA, 19 nt, Artificial Sequence
  Description of Artificial Sequence: Synthetic oligonucleotide
  Antisense strand to SEQ ID NO: 2560830
augugugaccuauaccaaa

SEQ ID NO: 2560832 - RNA, 19 nt, Artificial Sequence
  Description of Artificial Sequence: Synthetic oligonucleotide
  Sense strand starting at position 2881 of SEQ ID NO: 1888842
cuugcaguccaugaagaua

SEQ ID NO: 2560833 - RNA, 19 nt, Artificial Sequence
  Description of Artificial Sequence: Synthetic oligonucleotide
  Antisense strand to SEQ ID NO: 2560832
uaucuucauggacugcaag

SEQ ID NO: 2560834 - RNA, 19 nt, Artificial Sequence
  Description of Artificial Sequence: Synthetic oligonucleotide
  Sense strand starting at position 2917 of SEQ ID NO: 1888842
cuuggaccucuuugaauug

SEQ ID NO: 2560835 - RNA, 19 nt, Artificial Sequence
  Description of Artificial Sequence: Synthetic oligonucleotide
  Antisense strand to SEQ ID NO: 2560834
caauucaaagagguccaag

SEQ ID NO: 2560836 - RNA, 19 nt, Artificial Sequence
  Description of Artificial Sequence: Synthetic oligonucleotide
  Sense strand starting at position 3102 of SEQ ID NO: 1888842
ugucucuuccauugacaca

SEQ ID NO: 2560837 - RNA, 19 nt, Artificial Sequence
  Description of Artificial Sequence: Synthetic oligonucleotide
  Antisense strand to SEQ ID NO: 2560836
ugugucaauggaagagaca

SEQ ID NO: 2560838 - RNA, 19 nt, Artificial Sequence
  Description of Artificial Sequence: Synthetic oligonucleotide
  Sense strand starting at position 3236 of SEQ ID NO: 1888842
acagucacaccuuggagau

SEQ ID NO: 2560839 - RNA, 19 nt, Artificial Sequence
  Description of Artificial Sequence: Synthetic oligonucleotide
  Antisense strand to SEQ ID NO: 2560838
aucuccaaggugugacugu

SEQ ID NO: 2560840 - RNA, 19 nt, Artificial Sequence
  Description of Artificial Sequence: Synthetic oligonucleotide
  Sense strand starting at position 3237 of SEQ ID NO: 1888842
cagucacaccuuggagaua

SEQ ID NO: 2560841 - RNA, 19 nt, Artificial Sequence
  Description of Artificial Sequence: Synthetic oligonucleotide
  Antisense strand to SEQ ID NO: 2560840
uaucuccaaggugugacug

SEQ ID NO: 2560842 - RNA, 19 nt, Artificial Sequence
  Description of Artificial Sequence: Synthetic oligonucleotide
  Sense strand starting at position 3303 of SEQ ID NO: 1888842
accucaucucuacgagaug

SEQ ID NO: 2560843 - RNA, 19 nt, Artificial Sequence
  Description of Artificial Sequence: Synthetic oligonucleotide
  Antisense strand to SEQ ID NO: 2560842
caucucguagagaugaggu

SEQ ID NO: 2560844 - RNA, 19 nt, Artificial Sequence
  Description of Artificial Sequence: Synthetic oligonucleotide
  Sense strand starting at position 3466 of SEQ ID NO: 1888842
cuguaaggaguuuggaaag

SEQ ID NO: 2560845 - RNA, 19 nt, Artificial Sequence
  Description of Artificial Sequence: Synthetic oligonucleotide
  Antisense strand to SEQ ID NO: 2560844
cuuuccaaacuccuuacag

SEQ ID NO: 2560846 - RNA, 19 nt, Artificial Sequence
  Description of Artificial Sequence: Synthetic oligonucleotide
  Sense strand starting at position 3772 of SEQ ID NO: 1888842
ucaauagggcaaugaaacu

SEQ ID NO: 2560847 - RNA, 19 nt, Artificial Sequence
  Description of Artificial Sequence: Synthetic oligonucleotide
  Antisense strand to SEQ ID NO: 2560846
aguuucauugcccuauuga

SEQ ID NO: 2560848 - RNA, 19 nt, Artificial Sequence
  Description of Artificial Sequence: Synthetic oligonucleotide
  Sense strand starting at position 3945 of SEQ ID NO: 1888842
cgcacuaaaugccuauuua

SEQ ID NO: 2560849 - RNA, 19 nt, Artificial Sequence
  Description of Artificial Sequence: Synthetic oligonucleotide
  Antisense strand to SEQ ID NO: 2560848
uaaauaggcauuuagugcg

SEQ ID NO: 2560850 - RNA, 19 nt, Artificial Sequence
  Description of Artificial Sequence: Synthetic oligonucleotide
  Sense strand starting at position 21 of SEQ ID NO: 1888843
gcaguagucagugaaauac

SEQ ID NO: 2560851 - RNA, 19 nt, Artificial Sequence
  Description of Artificial Sequence: Synthetic oligonucleotide
  Antisense strand to SEQ ID NO: 2560850
guauuucacugacuacugc

SEQ ID NO: 2560852 - RNA, 19 nt, Artificial Sequence
  Description of Artificial Sequence: Synthetic oligonucleotide
  Sense strand starting at position 64 of SEQ ID NO: 1888843
uggaccuucguggauaaga

SEQ ID NO: 2560853 - RNA, 19 nt, Artificial Sequence
  Description of Artificial Sequence: Synthetic oligonucleotide
  Antisense strand to SEQ ID NO: 2560852
ucuuauccacgaaggucca

SEQ ID NO: 2560854 - RNA, 19 nt, Artificial Sequence
  Description of Artificial Sequence: Synthetic oligonucleotide
  Sense strand starting at position 212 of SEQ ID NO: 1888843
auauaugucuugccagaag

SEQ ID NO: 2560855 - RNA, 19 nt, Artificial Sequence
  Description of Artificial Sequence: Synthetic oligonucleotide
  Antisense strand to SEQ ID NO: 2560854
cuucuggcaagacauauau

SEQ ID NO: 2560856 - RNA, 19 nt, Artificial Sequence
  Description of Artificial Sequence: Synthetic oligonucleotide
  Sense strand starting at position 221 of SEQ ID NO: 1888843
uugccagaaggcuauacaa

SEQ ID NO: 2560857 - RNA, 19 nt, Artificial Sequence
  Description of Artificial Sequence: Synthetic oligonucleotide
  Antisense strand to SEQ ID NO: 2560856
uuguauagccuucuggcaa

SEQ ID NO: 2560858 - RNA, 19 nt, Artificial Sequence
  Description of Artificial Sequence: Synthetic oligonucleotide
  Sense strand starting at position 263 of SEQ ID NO: 1888843
auaauuccuggcuaguaga

SEQ ID NO: 2560859 - RNA, 19 nt, Artificial Sequence
  Description of Artificial Sequence: Synthetic oligonucleotide
  Antisense strand to SEQ ID NO: 2560858
ucuacuagccaggaauuau

SEQ ID NO: 2560860 - RNA, 19 nt, Artificial Sequence
  Description of Artificial Sequence: Synthetic oligonucleotide
  Sense strand starting at position 653 of SEQ ID NO: 1888843
ugaugauaaugguuugauu

SEQ ID NO: 2560861 - RNA, 19 nt, Artificial Sequence
  Description of Artificial Sequence: Synthetic oligonucleotide
  Antisense strand to SEQ ID NO: 2560860
aaucaaaccauuaucauca

SEQ ID NO: 2560862 - RNA, 19 nt, Artificial Sequence
  Description of Artificial Sequence: Synthetic oligonucleotide
  Sense strand starting at position 842 of SEQ ID NO: 1888843
guauuagaaugccuggauu

SEQ ID NO: 2560863 - RNA, 19 nt, Artificial Sequence
  Description of Artificial Sequence: Synthetic oligonucleotide
  Antisense strand to SEQ ID NO: 2560862
aauccaggcauucuaauac

SEQ ID NO: 2560864 - RNA, 19 nt, Artificial Sequence
  Description of Artificial Sequence: Synthetic oligonucleotide
  Sense strand starting at position 844 of SEQ ID NO: 1888843
auuagaaugccuggauuac

SEQ ID NO: 2560865 - RNA, 19 nt, Artificial Sequence
  Description of Artificial Sequence: Synthetic oligonucleotide
  Antisense strand to SEQ ID NO: 2560864
guaauccaggcauucuaau

SEQ ID NO: 2560866 - RNA, 19 nt, Artificial Sequence
  Description of Artificial Sequence: Synthetic oligonucleotide
  Sense strand starting at position 892 of SEQ ID NO: 1888843
ugacuuuacugucuuaaug

SEQ ID NO: 2560867 - RNA, 19 nt, Artificial Sequence
  Description of Artificial Sequence: Synthetic oligonucleotide
  Antisense strand to SEQ ID NO: 2560866
cauuaagacaguaaaguca

SEQ ID NO: 2560868 - RNA, 19 nt, Artificial Sequence
  Description of Artificial Sequence: Synthetic oligonucleotide
  Sense strand starting at position 1156 of SEQ ID NO: 1888843
aaauauuguaugugagggu

SEQ ID NO: 2560869 - RNA, 19 nt, Artificial Sequence
  Description of Artificial Sequence: Synthetic oligonucleotide
  Antisense strand to SEQ ID NO: 2560868
acccucacauacaauauuu

SEQ ID NO: 2560870 - RNA, 19 nt, Artificial Sequence
  Description of Artificial Sequence: Synthetic oligonucleotide
  Sense strand starting at position 1196 of SEQ ID NO: 1888843
ggaugauguuaauuaaggu

SEQ ID NO: 2560871 - RNA, 19 nt, Artificial Sequence
  Description of Artificial Sequence: Synthetic oligonucleotide
  Antisense strand to SEQ ID NO: 2560870
accuuaauuaacaucaucc

SEQ ID NO: 2560872 - RNA, 19 nt, Artificial Sequence
  Description of Artificial Sequence: Synthetic oligonucleotide
  Sense strand starting at position 1211 of SEQ ID NO: 1888843
agguuuccuuagguuggaa

SEQ ID NO: 2560873 - RNA, 19 nt, Artificial Sequence
  Description of Artificial Sequence: Synthetic oligonucleotide
  Antisense strand to SEQ ID NO: 2560872
uuccaaccuaaggaaaccu

SEQ ID NO: 2560874 - RNA, 19 nt, Artificial Sequence
  Description of Artificial Sequence: Synthetic oligonucleotide
  Sense strand starting at position 1369 of SEQ ID NO: 1888843
cagcccuuugguuaagagu

SEQ ID NO: 2560875 - RNA, 19 nt, Artificial Sequence
  Description of Artificial Sequence: Synthetic oligonucleotide
  Antisense strand to SEQ ID NO: 2560874
acucuuaaccaaagggcug

SEQ ID NO: 2560876 - RNA, 19 nt, Artificial Sequence
  Description of Artificial Sequence: Synthetic oligonucleotide
  Sense strand starting at position 1532 of SEQ ID NO: 1888843
uaggguugcagaggauuaa

SEQ ID NO: 2560877 - RNA, 19 nt, Artificial Sequence
  Description of Artificial Sequence: Synthetic oligonucleotide
  Antisense strand to SEQ ID NO: 2560876
uuaauccucugcaacccua

SEQ ID NO: 2560878 - RNA, 19 nt, Artificial Sequence
  Description of Artificial Sequence: Synthetic oligonucleotide
  Sense strand starting at position 1575 of SEQ ID NO: 1888843
agcacagucccugaguuaa

SEQ ID NO: 2560879 - RNA, 19 nt, Artificial Sequence
  Description of Artificial Sequence: Synthetic oligonucleotide
  Antisense strand to SEQ ID NO: 2560878
uuaacucagggacugugcu

SEQ ID NO: 2560880 - RNA, 19 nt, Artificial Sequence
  Description of Artificial Sequence: Synthetic oligonucleotide
  Sense strand starting at position 1733 of SEQ ID NO: 1888843
aacguaagggauugguaua

SEQ ID NO: 2560881 - RNA, 19 nt, Artificial Sequence
  Description of Artificial Sequence: Synthetic oligonucleotide
  Antisense strand to SEQ ID NO: 2560880
uauaccaaucccuuacguu

SEQ ID NO: 2560882 - RNA, 19 nt, Artificial Sequence
  Description of Artificial Sequence: Synthetic oligonucleotide
  Sense strand starting at position 1734 of SEQ ID NO: 1888843
acguaagggauugguauau

SEQ ID NO: 2560883 - RNA, 19 nt, Artificial Sequence
  Description of Artificial Sequence: Synthetic oligonucleotide
  Antisense strand to SEQ ID NO: 2560882
auauaccaaucccuuacgu

SEQ ID NO: 2560884 - RNA, 19 nt, Artificial Sequence
  Description of Artificial Sequence: Synthetic oligonucleotide
  Sense strand starting at position 1743 of SEQ ID NO: 1888843
auugguauauaccuugaga

SEQ ID NO: 2560885 - RNA, 19 nt, Artificial Sequence
  Description of Artificial Sequence: Synthetic oligonucleotide
  Antisense strand to SEQ ID NO: 2560884
ucucaagguauauaccaau

SEQ ID NO: 2560886 - RNA, 19 nt, Artificial Sequence
  Description of Artificial Sequence: Synthetic oligonucleotide
  Sense strand starting at position 1745 of SEQ ID NO: 1888843
ugguauauaccuugagaua

SEQ ID NO: 2560887 - RNA, 19 nt, Artificial Sequence
  Description of Artificial Sequence: Synthetic oligonucleotide
  Antisense strand to SEQ ID NO: 2560886
uaucucaagguauauacca

SEQ ID NO: 2560888 - RNA, 19 nt, Artificial Sequence
  Description of Artificial Sequence: Synthetic oligonucleotide
  Sense strand starting at position 1827 of SEQ ID NO: 1888843
guuaauaaugcccagcauu

SEQ ID NO: 2560889 - RNA, 19 nt, Artificial Sequence
  Description of Artificial Sequence: Synthetic oligonucleotide
  Antisense strand to SEQ ID NO: 2560888
aaugcugggcauuauuaac

SEQ ID NO: 2560890 - RNA, 19 nt, Artificial Sequence
  Description of Artificial Sequence: Synthetic oligonucleotide
  Sense strand starting at position 1936 of SEQ ID NO: 1888843
cuggauaacuccuuggagu

SEQ ID NO: 2560891 - RNA, 19 nt, Artificial Sequence
  Description of Artificial Sequence: Synthetic oligonucleotide
  Antisense strand to SEQ ID NO: 2560890
acuccaaggaguuauccag

SEQ ID NO: 2560892 - RNA, 19 nt, Artificial Sequence
  Description of Artificial Sequence: Synthetic oligonucleotide
  Sense strand starting at position 1937 of SEQ ID NO: 1888843
uggauaacuccuuggaguu

SEQ ID NO: 2560893 - RNA, 19 nt, Artificial Sequence
  Description of Artificial Sequence: Synthetic oligonucleotide
  Antisense strand to SEQ ID NO: 2560892
aacuccaaggaguuaucca

SEQ ID NO: 2560894 - RNA, 19 nt, Artificial Sequence
  Description of Artificial Sequence: Synthetic oligonucleotide
  Sense strand starting at position 1938 of SEQ ID NO: 1888843
ggauaacuccuuggaguuc

SEQ ID NO: 2560895 - RNA, 19 nt, Artificial Sequence
  Description of Artificial Sequence: Synthetic oligonucleotide
  Antisense strand to SEQ ID NO: 2560894
gaacuccaaggaguuaucc

SEQ ID NO: 2560896 - RNA, 19 nt, Artificial Sequence
  Description of Artificial Sequence: Synthetic oligonucleotide
  Sense strand starting at position 2509 of SEQ ID NO: 1888843
ggucuugggacuugaaaug

SEQ ID NO: 2560897 - RNA, 19 nt, Artificial Sequence
  Description of Artificial Sequence: Synthetic oligonucleotide
  Antisense strand to SEQ ID NO: 2560896
cauuucaagucccaagacc

SEQ ID NO: 2560898 - RNA, 19 nt, Artificial Sequence
  Description of Artificial Sequence: Synthetic oligonucleotide
  Sense strand starting at position 2518 of SEQ ID NO: 1888843
acuugaaaugccugagauu

SEQ ID NO: 2560899 - RNA, 19 nt, Artificial Sequence
  Description of Artificial Sequence: Synthetic oligonucleotide
  Antisense strand to SEQ ID NO: 2560898
aaucucaggcauuucaagu

SEQ ID NO: 2560900 - RNA, 19 nt, Artificial Sequence
  Description of Artificial Sequence: Synthetic oligonucleotide
  Sense strand starting at position 2619 of SEQ ID NO: 1888843
aaggacaccuggucuaaau

SEQ ID NO: 2560901 - RNA, 19 nt, Artificial Sequence
  Description of Artificial Sequence: Synthetic oligonucleotide
  Antisense strand to SEQ ID NO: 2560900
auuuagaccagguguccuu

SEQ ID NO: 2560902 - RNA, 19 nt, Artificial Sequence
  Description of Artificial Sequence: Synthetic oligonucleotide
  Sense strand starting at position 2650 of SEQ ID NO: 1888843
gguggauacgugugaagga

SEQ ID NO: 2560903 - RNA, 19 nt, Artificial Sequence
  Description of Artificial Sequence: Synthetic oligonucleotide
  Antisense strand to SEQ ID NO: 2560902
uccuucacacguauccacc

SEQ ID NO: 2560904 - RNA, 19 nt, Artificial Sequence
  Description of Artificial Sequence: Synthetic oligonucleotide
  Sense strand starting at position 2701 of SEQ ID NO: 1888843
ccagguaaagagugaguau

SEQ ID NO: 2560905 - RNA, 19 nt, Artificial Sequence
  Description of Artificial Sequence: Synthetic oligonucleotide
  Antisense strand to SEQ ID NO: 2560904
auacucacucuuuaccugg

SEQ ID NO: 2560906 - RNA, 19 nt, Artificial Sequence
  Description of Artificial Sequence: Synthetic oligonucleotide
  Sense strand starting at position 2798 of SEQ ID NO: 1888843
agugaacagucucuaaacu

SEQ ID NO: 2560907 - RNA, 19 nt, Artificial Sequence
  Description of Artificial Sequence: Synthetic oligonucleotide
  Antisense strand to SEQ ID NO: 2560906
aguuuagagacuguucacu

SEQ ID NO: 2560908 - RNA, 19 nt, Artificial Sequence
  Description of Artificial Sequence: Synthetic oligonucleotide
  Sense strand starting at position 2840 of SEQ ID NO: 1888843
ugcugacaagauugauacu

SEQ ID NO: 2560909 - RNA, 19 nt, Artificial Sequence
  Description of Artificial Sequence: Synthetic oligonucleotide
  Antisense strand to SEQ ID NO: 2560908
aguaucaaucuugucagca

SEQ ID NO: 2560910 - RNA, 19 nt, Artificial Sequence
  Description of Artificial Sequence: Synthetic oligonucleotide
  Sense strand starting at position 2849 of SEQ ID NO: 1888843
gauugauacuuugugggaa

SEQ ID NO: 2560911 - RNA, 19 nt, Artificial Sequence
  Description of Artificial Sequence: Synthetic oligonucleotide
  Antisense strand to SEQ ID NO: 2560910
uucccacaaaguaucaauc

SEQ ID NO: 2560912 - RNA, 19 nt, Artificial Sequence
  Description of Artificial Sequence: Synthetic oligonucleotide
  Sense strand starting at position 2852 of SEQ ID NO: 1888843
ugauacuuugugggaaaca

SEQ ID NO: 2560913 - RNA, 19 nt, Artificial Sequence
  Description of Artificial Sequence: Synthetic oligonucleotide
  Antisense strand to SEQ ID NO: 2560912
uguuucccacaaaguauca

SEQ ID NO: 2560914 - RNA, 19 nt, Artificial Sequence
  Description of Artificial Sequence: Synthetic oligonucleotide
  Sense strand starting at position 3008 of SEQ ID NO: 1888843
auaucacucgauuagaggu

SEQ ID NO: 2560915 - RNA, 19 nt, Artificial Sequence
  Description of Artificial Sequence: Synthetic oligonucleotide
  Antisense strand to SEQ ID NO: 2560914
accucuaaucgagugauau

SEQ ID NO: 2560916 - RNA, 19 nt, Artificial Sequence
  Description of Artificial Sequence: Synthetic oligonucleotide
  Sense strand starting at position 3036 of SEQ ID NO: 1888843
gaggcagcuauggaaagua

SEQ ID NO: 2560917 - RNA, 19 nt, Artificial Sequence
  Description of Artificial Sequence: Synthetic oligonucleotide
  Antisense strand to SEQ ID NO: 2560916
uacuuuccauagcugccuc

SEQ ID NO: 2560918 - RNA, 19 nt, Artificial Sequence
  Description of Artificial Sequence: Synthetic oligonucleotide
  Sense strand starting at position 3176 of SEQ ID NO: 1888843
aaaugaaggguuuggagua

SEQ ID NO: 2560919 - RNA, 19 nt, Artificial Sequence
  Description of Artificial Sequence: Synthetic oligonucleotide
  Antisense strand to SEQ ID NO: 2560918
uacuccaaacccuucauuu

SEQ ID NO: 2560920 - RNA, 19 nt, Artificial Sequence
  Description of Artificial Sequence: Synthetic oligonucleotide
  Sense strand starting at position 3188 of SEQ ID NO: 1888843
uggaguagaugguuucuaa

SEQ ID NO: 2560921 - RNA, 19 nt, Artificial Sequence
  Description of Artificial Sequence: Synthetic oligonucleotide
  Antisense strand to SEQ ID NO: 2560920
uuagaaaccaucuacucca

SEQ ID NO: 2560922 - RNA, 19 nt, Artificial Sequence
  Description of Artificial Sequence: Synthetic oligonucleotide
  Sense strand starting at position 3300 of SEQ ID NO: 1888843
uugggagcugagcauaauu

SEQ ID NO: 2560923 - RNA, 19 nt, Artificial Sequence
  Description of Artificial Sequence: Synthetic oligonucleotide
  Antisense strand to SEQ ID NO: 2560922
aauuaugcucagcucccaa

SEQ ID NO: 2560924 - RNA, 19 nt, Artificial Sequence
  Description of Artificial Sequence: Synthetic oligonucleotide
  Sense strand starting at position 3430 of SEQ ID NO: 1888843
uguugaugauucuccggga

SEQ ID NO: 2560925 - RNA, 19 nt, Artificial Sequence
  Description of Artificial Sequence: Synthetic oligonucleotide
  Antisense strand to SEQ ID NO: 2560924
ucccggagaaucaucaaca

SEQ ID NO: 2560926 - RNA, 19 nt, Artificial Sequence
  Description of Artificial Sequence: Synthetic oligonucleotide
  Sense strand starting at position 3431 of SEQ ID NO: 1888843
guugaugauucuccgggau

SEQ ID NO: 2560927 - RNA, 19 nt, Artificial Sequence
  Description of Artificial Sequence: Synthetic oligonucleotide
  Antisense strand to SEQ ID NO: 2560926
aucccggagaaucaucaac

SEQ ID NO: 2560928 - RNA, 19 nt, Artificial Sequence
  Description of Artificial Sequence: Synthetic oligonucleotide
  Sense strand starting at position 3475 of SEQ ID NO: 1888843
uugcuuggaccauaacuau

SEQ ID NO: 2560929 - RNA, 19 nt, Artificial Sequence
  Description of Artificial Sequence: Synthetic oligonucleotide
  Antisense strand to SEQ ID NO: 2560928
auaguuaugguccaagcaa

SEQ ID NO: 2560930 - RNA, 19 nt, Artificial Sequence
  Description of Artificial Sequence: Synthetic oligonucleotide
  Sense strand starting at position 22 of SEQ ID NO: 1888844
gggacaaaguacgcuuuaa

SEQ ID NO: 2560931 - RNA, 19 nt, Artificial Sequence
  Description of Artificial Sequence: Synthetic oligonucleotide
  Antisense strand to SEQ ID NO: 2560930
uuaaagcguacuuuguccc

SEQ ID NO: 2560932 - RNA, 19 nt, Artificial Sequence
  Description of Artificial Sequence: Synthetic oligonucleotide
  Sense strand starting at position 33 of SEQ ID NO: 1888844
cgcuuuaauuuaugagaag

SEQ ID NO: 2560933 - RNA, 19 nt, Artificial Sequence
  Description of Artificial Sequence: Synthetic oligonucleotide
  Antisense strand to SEQ ID NO: 2560932
cuucucauaaauuaaagcg

SEQ ID NO: 2560934 - RNA, 19 nt, Artificial Sequence
  Description of Artificial Sequence: Synthetic oligonucleotide
  Sense strand starting at position 34 of SEQ ID NO: 1888844
gcuuuaauuuaugagaaga

SEQ ID NO: 2560935 - RNA, 19 nt, Artificial Sequence
  Description of Artificial Sequence: Synthetic oligonucleotide
  Antisense strand to SEQ ID NO: 2560934
ucuucucauaaauuaaagc

SEQ ID NO: 2560936 - RNA, 19 nt, Artificial Sequence
  Description of Artificial Sequence: Synthetic oligonucleotide
  Sense strand starting at position 171 of SEQ ID NO: 1888844
ggaucuguggcucaucaua

SEQ ID NO: 2560937 - RNA, 19 nt, Artificial Sequence
  Description of Artificial Sequence: Synthetic oligonucleotide
  Antisense strand to SEQ ID NO: 2560936
uaugaugagccacagaucc

SEQ ID NO: 2560938 - RNA, 19 nt, Artificial Sequence
  Description of Artificial Sequence: Synthetic oligonucleotide
  Sense strand starting at position 397 of SEQ ID NO: 1888844
aaguuucuaugugugcaga

SEQ ID NO: 2560939 - RNA, 19 nt, Artificial Sequence
  Description of Artificial Sequence: Synthetic oligonucleotide
  Antisense strand to SEQ ID NO: 2560938
ucugcacacauagaaacuu

SEQ ID NO: 2560940 - RNA, 19 nt, Artificial Sequence
  Description of Artificial Sequence: Synthetic oligonucleotide
  Sense strand starting at position 399 of SEQ ID NO: 1888844
guuucuaugugugcagaga

SEQ ID NO: 2560941 - RNA, 19 nt, Artificial Sequence
  Description of Artificial Sequence: Synthetic oligonucleotide
  Antisense strand to SEQ ID NO: 2560940
ucucugcacacauagaaac

SEQ ID NO: 2560942 - RNA, 19 nt, Artificial Sequence
  Description of Artificial Sequence: Synthetic oligonucleotide
  Sense strand starting at position 400 of SEQ ID NO: 1888844
uuucuaugugugcagagaa

SEQ ID NO: 2560943 - RNA, 19 nt, Artificial Sequence
  Description of Artificial Sequence: Synthetic oligonucleotide
  Antisense strand to SEQ ID NO: 2560942
uucucugcacacauagaaa

SEQ ID NO: 2560944 - RNA, 19 nt, Artificial Sequence
  Description of Artificial Sequence: Synthetic oligonucleotide
  Sense strand starting at position 505 of SEQ ID NO: 1888844
cccugauaggucuauccca

SEQ ID NO: 2560945 - RNA, 19 nt, Artificial Sequence
  Description of Artificial Sequence: Synthetic oligonucleotide
  Antisense strand to SEQ ID NO: 2560944
ugggauagaccuaucaggg

SEQ ID NO: 2560946 - RNA, 19 nt, Artificial Sequence
  Description of Artificial Sequence: Synthetic oligonucleotide
  Sense strand starting at position 539 of SEQ ID NO: 1888844
aaacaugggcugugaugua

SEQ ID NO: 2560947 - RNA, 19 nt, Artificial Sequence
  Description of Artificial Sequence: Synthetic oligonucleotide
  Antisense strand to SEQ ID NO: 2560946
uacaucacagcccauguuu

SEQ ID NO: 2560948 - RNA, 19 nt, Artificial Sequence
  Description of Artificial Sequence: Synthetic oligonucleotide
  Sense strand starting at position 546 of SEQ ID NO: 1888844
ggcugugauguagagcuaa

SEQ ID NO: 2560949 - RNA, 19 nt, Artificial Sequence
  Description of Artificial Sequence: Synthetic oligonucleotide
  Antisense strand to SEQ ID NO: 2560948
uuagcucuacaucacagcc

SEQ ID NO: 2560950 - RNA, 19 nt, Artificial Sequence
  Description of Artificial Sequence: Synthetic oligonucleotide
  Sense strand starting at position 649 of SEQ ID NO: 1888844
cagauuaguccuuguggca

SEQ ID NO: 2560951 - RNA, 19 nt, Artificial Sequence
  Description of Artificial Sequence: Synthetic oligonucleotide
  Antisense strand to SEQ ID NO: 2560950
ugccacaaggacuaaucug

SEQ ID NO: 2560952 - RNA, 19 nt, Artificial Sequence
  Description of Artificial Sequence: Synthetic oligonucleotide
  Sense strand starting at position 2698 of SEQ ID NO: 1888844
acgagcuguagccagagaa

SEQ ID NO: 2560953 - RNA, 19 nt, Artificial Sequence
  Description of Artificial Sequence: Synthetic oligonucleotide
  Antisense strand to SEQ ID NO: 2560952
uucucuggcuacagcucgu

SEQ ID NO: 2560954 - RNA, 19 nt, Artificial Sequence
  Description of Artificial Sequence: Synthetic oligonucleotide
  Sense strand starting at position 2773 of SEQ ID NO: 1888844
guucuuucgucuccgugua

SEQ ID NO: 2560955 - RNA, 19 nt, Artificial Sequence
  Description of Artificial Sequence: Synthetic oligonucleotide
  Antisense strand to SEQ ID NO: 2560954
uacacggagacgaaagaac

SEQ ID NO: 2560956 - RNA, 19 nt, Artificial Sequence
  Description of Artificial Sequence: Synthetic oligonucleotide
  Sense strand starting at position 2777 of SEQ ID NO: 1888844
uuucgucuccguguaucaa

SEQ ID NO: 2560957 - RNA, 19 nt, Artificial Sequence
  Description of Artificial Sequence: Synthetic oligonucleotide
  Antisense strand to SEQ ID NO: 2560956
uugauacacggagacgaaa

SEQ ID NO: 2560958 - RNA, 19 nt, Artificial Sequence
  Description of Artificial Sequence: Synthetic oligonucleotide
  Sense strand starting at position 2778 of SEQ ID NO: 1888844
uucgucuccguguaucaaa

SEQ ID NO: 2560959 - RNA, 19 nt, Artificial Sequence
  Description of Artificial Sequence: Synthetic oligonucleotide
  Antisense strand to SEQ ID NO: 2560958
uuugauacacggagacgaa

SEQ ID NO: 2560960 - RNA, 19 nt, Artificial Sequence
  Description of Artificial Sequence: Synthetic oligonucleotide
  Sense strand starting at position 124 of SEQ ID NO: 1888845
augguaugugagcacauua

SEQ ID NO: 2560961 - RNA, 19 nt, Artificial Sequence
  Description of Artificial Sequence: Synthetic oligonucleotide
  Antisense strand to SEQ ID NO: 2560960
uaaugugcucacauaccau

SEQ ID NO: 2560962 - RNA, 19 nt, Artificial Sequence
  Description of Artificial Sequence: Synthetic oligonucleotide
  Sense strand starting at position 139 of SEQ ID NO: 1888845
auuagauaacuauggugau

SEQ ID NO: 2560963 - RNA, 19 nt, Artificial Sequence
  Description of Artificial Sequence: Synthetic oligonucleotide
  Antisense strand to SEQ ID NO: 2560962
aucaccauaguuaucuaau

SEQ ID NO: 2560964 - RNA, 19 nt, Artificial Sequence
  Description of Artificial Sequence: Synthetic oligonucleotide
  Sense strand starting at position 149 of SEQ ID NO: 1888845
uauggugaugcacauacaa

SEQ ID NO: 2560965 - RNA, 19 nt, Artificial Sequence
  Description of Artificial Sequence: Synthetic oligonucleotide
  Antisense strand to SEQ ID NO: 2560964
uuguaugugcaucaccaua

SEQ ID NO: 2560966 - RNA, 19 nt, Artificial Sequence
  Description of Artificial Sequence: Synthetic oligonucleotide
  Sense strand starting at position 151 of SEQ ID NO: 1888845
uggugaugcacauacaagu

SEQ ID NO: 2560967 - RNA, 19 nt, Artificial Sequence
  Description of Artificial Sequence: Synthetic oligonucleotide
  Antisense strand to SEQ ID NO: 2560966
acuuguaugugcaucacca

SEQ ID NO: 2560968 - RNA, 19 nt, Artificial Sequence
  Description of Artificial Sequence: Synthetic oligonucleotide
  Sense strand starting at position 162 of SEQ ID NO: 1888845
auacaaguauguuugagga

SEQ ID NO: 2560969 - RNA, 19 nt, Artificial Sequence
  Description of Artificial Sequence: Synthetic oligonucleotide
  Antisense strand to SEQ ID NO: 2560968
uccucaaacauacuuguau

SEQ ID NO: 2560970 - RNA, 19 nt, Artificial Sequence
  Description of Artificial Sequence: Synthetic oligonucleotide
  Sense strand starting at position 185 of SEQ ID NO: 1888845
uuagaaaugguaggucaag

SEQ ID NO: 2560971 - RNA, 19 nt, Artificial Sequence
  Description of Artificial Sequence: Synthetic oligonucleotide
  Antisense strand to SEQ ID NO: 2560970
cuugaccuaccauuucuaa

SEQ ID NO: 2560972 - RNA, 19 nt, Artificial Sequence
  Description of Artificial Sequence: Synthetic oligonucleotide
  Sense strand starting at position 286 of SEQ ID NO: 1888845
uggcaauggcccuauagau

SEQ ID NO: 2560973 - RNA, 19 nt, Artificial Sequence
  Description of Artificial Sequence: Synthetic oligonucleotide
  Antisense strand to SEQ ID NO: 2560972
aucuauagggccauugcca

SEQ ID NO: 2560974 - RNA, 19 nt, Artificial Sequence
  Description of Artificial Sequence: Synthetic oligonucleotide
  Sense strand starting at position 357 of SEQ ID NO: 1888845
gugcuuaaccauuagacua

SEQ ID NO: 2560975 - RNA, 19 nt, Artificial Sequence
  Description of Artificial Sequence: Synthetic oligonucleotide
  Antisense strand to SEQ ID NO: 2560974
uagucuaaugguuaagcac

SEQ ID NO: 2560976 - RNA, 19 nt, Artificial Sequence
  Description of Artificial Sequence: Synthetic oligonucleotide
  Sense strand starting at position 444 of SEQ ID NO: 1888845
guauaauaacgaugauaac

SEQ ID NO: 2560977 - RNA, 19 nt, Artificial Sequence
  Description of Artificial Sequence: Synthetic oligonucleotide
  Antisense strand to SEQ ID NO: 2560976
guuaucaucguuauuauac

SEQ ID NO: 2560978 - RNA, 19 nt, Artificial Sequence
  Description of Artificial Sequence: Synthetic oligonucleotide
  Sense strand starting at position 539 of SEQ ID NO: 1888845
aagcauaugagguagaugu

SEQ ID NO: 2560979 - RNA, 19 nt, Artificial Sequence
  Description of Artificial Sequence: Synthetic oligonucleotide
  Antisense strand to SEQ ID NO: 2560978
acaucuaccucauaugcuu

SEQ ID NO: 2560980 - RNA, 19 nt, Artificial Sequence
  Description of Artificial Sequence: Synthetic oligonucleotide
  Sense strand starting at position 541 of SEQ ID NO: 1888845
gcauaugagguagauguua

SEQ ID NO: 2560981 - RNA, 19 nt, Artificial Sequence
  Description of Artificial Sequence: Synthetic oligonucleotide
  Antisense strand to SEQ ID NO: 2560980
uaacaucuaccucauaugc

SEQ ID NO: 2560982 - RNA, 19 nt, Artificial Sequence
  Description of Artificial Sequence: Synthetic oligonucleotide
  Sense strand starting at position 631 of SEQ ID NO: 1888845
cuaugcuaccucuaaugga

SEQ ID NO: 2560983 - RNA, 19 nt, Artificial Sequence
  Description of Artificial Sequence: Synthetic oligonucleotide
  Antisense strand to SEQ ID NO: 2560982
uccauuagagguagcauag

SEQ ID NO: 2560984 - RNA, 19 nt, Artificial Sequence
  Description of Artificial Sequence: Synthetic oligonucleotide
  Sense strand starting at position 681 of SEQ ID NO: 1888845
aggaauuaauggcuauauu

SEQ ID NO: 2560985 - RNA, 19 nt, Artificial Sequence
  Description of Artificial Sequence: Synthetic oligonucleotide
  Antisense strand to SEQ ID NO: 2560984
aauauagccauuaauuccu

SEQ ID NO: 2560986 - RNA, 19 nt, Artificial Sequence
  Description of Artificial Sequence: Synthetic oligonucleotide
  Sense strand starting at position 691 of SEQ ID NO: 1888845
ggcuauauugcugauagag

SEQ ID NO: 2560987 - RNA, 19 nt, Artificial Sequence
  Description of Artificial Sequence: Synthetic oligonucleotide
  Antisense strand to SEQ ID NO: 2560986
cucuaucagcaauauagcc

SEQ ID NO: 2560988 - RNA, 19 nt, Artificial Sequence
  Description of Artificial Sequence: Synthetic oligonucleotide
  Sense strand starting at position 1034 of SEQ ID NO: 1888845
cucagucuaccauggagaa

SEQ ID NO: 2560989 - RNA, 19 nt, Artificial Sequence
  Description of Artificial Sequence: Synthetic oligonucleotide
  Antisense strand to SEQ ID NO: 2560988
uucuccaugguagacugag

SEQ ID NO: 2560990 - RNA, 19 nt, Artificial Sequence
  Description of Artificial Sequence: Synthetic oligonucleotide
  Sense strand starting at position 1035 of SEQ ID NO: 1888845
ucagucuaccauggagaau

SEQ ID NO: 2560991 - RNA, 19 nt, Artificial Sequence
  Description of Artificial Sequence: Synthetic oligonucleotide
  Antisense strand to SEQ ID NO: 2560990
auucuccaugguagacuga

SEQ ID NO: 2560992 - RNA, 19 nt, Artificial Sequence
  Description of Artificial Sequence: Synthetic oligonucleotide
  Sense strand starting at position 1100 of SEQ ID NO: 1888845
auagccacauaguugaaau

SEQ ID NO: 2560993 - RNA, 19 nt, Artificial Sequence
  Description of Artificial Sequence: Synthetic oligonucleotide
  Antisense strand to SEQ ID NO: 2560992
auuucaacuauguggcuau

SEQ ID NO: 2560994 - RNA, 19 nt, Artificial Sequence
  Description of Artificial Sequence: Synthetic oligonucleotide
  Sense strand starting at position 1118 of SEQ ID NO: 1888845
uuguacagaugaucacaau

SEQ ID NO: 2560995 - RNA, 19 nt, Artificial Sequence
  Description of Artificial Sequence: Synthetic oligonucleotide
  Antisense strand to SEQ ID NO: 2560994
auugugaucaucuguacaa

SEQ ID NO: 2560996 - RNA, 19 nt, Artificial Sequence
  Description of Artificial Sequence: Synthetic oligonucleotide
  Sense strand starting at position 1160 of SEQ ID NO: 1888845
gggaaagaauuccuugguu

SEQ ID NO: 2560997 - RNA, 19 nt, Artificial Sequence
  Description of Artificial Sequence: Synthetic oligonucleotide
  Antisense strand to SEQ ID NO: 2560996
aaccaaggaauucuuuccc

SEQ ID NO: 2560998 - RNA, 19 nt, Artificial Sequence
  Description of Artificial Sequence: Synthetic oligonucleotide
  Sense strand starting at position 1162 of SEQ ID NO: 1888845
gaaagaauuccuugguuua

SEQ ID NO: 2560999 - RNA, 19 nt, Artificial Sequence
  Description of Artificial Sequence: Synthetic oligonucleotide
  Antisense strand to SEQ ID NO: 2560998
uaaaccaaggaauucuuuc

SEQ ID NO: 2561000 - RNA, 19 nt, Artificial Sequence
  Description of Artificial Sequence: Synthetic oligonucleotide
  Sense strand starting at position 1163 of SEQ ID NO: 1888845
aaagaauuccuugguuuag

SEQ ID NO: 2561001 - RNA, 19 nt, Artificial Sequence
  Description of Artificial Sequence: Synthetic oligonucleotide
  Antisense strand to SEQ ID NO: 2561000
cuaaaccaaggaauucuuu

SEQ ID NO: 2561002 - RNA, 19 nt, Artificial Sequence
  Description of Artificial Sequence: Synthetic oligonucleotide
  Sense strand starting at position 1165 of SEQ ID NO: 1888845
agaauuccuugguuuagga

SEQ ID NO: 2561003 - RNA, 19 nt, Artificial Sequence
  Description of Artificial Sequence: Synthetic oligonucleotide
  Antisense strand to SEQ ID NO: 2561002
uccuaaaccaaggaauucu

SEQ ID NO: 2561004 - RNA, 19 nt, Artificial Sequence
  Description of Artificial Sequence: Synthetic oligonucleotide
  Sense strand starting at position 1333 of SEQ ID NO: 1888845
auagaauaguagucaacua

SEQ ID NO: 2561005 - RNA, 19 nt, Artificial Sequence
  Description of Artificial Sequence: Synthetic oligonucleotide
  Antisense strand to SEQ ID NO: 2561004
uaguugacuacuauucuau

SEQ ID NO: 2561006 - RNA, 19 nt, Artificial Sequence
  Description of Artificial Sequence: Synthetic oligonucleotide
  Sense strand starting at position 1405 of SEQ ID NO: 1888845
augaaugacuuugccaaag

SEQ ID NO: 2561007 - RNA, 19 nt, Artificial Sequence
  Description of Artificial Sequence: Synthetic oligonucleotide
  Antisense strand to SEQ ID NO: 2561006
cuuuggcaaagucauucau

SEQ ID NO: 2561008 - RNA, 19 nt, Artificial Sequence
  Description of Artificial Sequence: Synthetic oligonucleotide
  Sense strand starting at position 1506 of SEQ ID NO: 1888845
uuagcaugugacuaaggua

SEQ ID NO: 2561009 - RNA, 19 nt, Artificial Sequence
  Description of Artificial Sequence: Synthetic oligonucleotide
  Antisense strand to SEQ ID NO: 2561008
uaccuuagucacaugcuaa

SEQ ID NO: 2561010 - RNA, 19 nt, Artificial Sequence
  Description of Artificial Sequence: Synthetic oligonucleotide
  Sense strand starting at position 1832 of SEQ ID NO: 1888845
uccucauauggaugugaua

SEQ ID NO: 2561011 - RNA, 19 nt, Artificial Sequence
  Description of Artificial Sequence: Synthetic oligonucleotide
  Antisense strand to SEQ ID NO: 2561010
uaucacauccauaugagga

SEQ ID NO: 2561012 - RNA, 19 nt, Artificial Sequence
  Description of Artificial Sequence: Synthetic oligonucleotide
  Sense strand starting at position 2137 of SEQ ID NO: 1888845
guacaauguagacaacgau

SEQ ID NO: 2561013 - RNA, 19 nt, Artificial Sequence
  Description of Artificial Sequence: Synthetic oligonucleotide
  Antisense strand to SEQ ID NO: 2561012
aucguugucuacauuguac

SEQ ID NO: 2561014 - RNA, 19 nt, Artificial Sequence
  Description of Artificial Sequence: Synthetic oligonucleotide
  Sense strand starting at position 2437 of SEQ ID NO: 1888845
cuguuugaucuugacuuac

SEQ ID NO: 2561015 - RNA, 19 nt, Artificial Sequence
  Description of Artificial Sequence: Synthetic oligonucleotide
  Antisense strand to SEQ ID NO: 2561014
guaagucaagaucaaacag

SEQ ID NO: 2561016 - RNA, 19 nt, Artificial Sequence
  Description of Artificial Sequence: Synthetic oligonucleotide
  Sense strand starting at position 2639 of SEQ ID NO: 1888845
guagaugucagauauguca

SEQ ID NO: 2561017 - RNA, 19 nt, Artificial Sequence
  Description of Artificial Sequence: Synthetic oligonucleotide
  Antisense strand to SEQ ID NO: 2561016
ugacauaucugacaucuac

SEQ ID NO: 2561018 - RNA, 19 nt, Artificial Sequence
  Description of Artificial Sequence: Synthetic oligonucleotide
  Sense strand starting at position 2680 of SEQ ID NO: 1888845
ucagaugaccauugcauga

SEQ ID NO: 2561019 - RNA, 19 nt, Artificial Sequence
  Description of Artificial Sequence: Synthetic oligonucleotide
  Antisense strand to SEQ ID NO: 2561018
ucaugcaauggucaucuga

SEQ ID NO: 2561020 - RNA, 19 nt, Artificial Sequence
  Description of Artificial Sequence: Synthetic oligonucleotide
  Sense strand starting at position 2844 of SEQ ID NO: 1888845
uucuuuagucugggagaag

SEQ ID NO: 2561021 - RNA, 19 nt, Artificial Sequence
  Description of Artificial Sequence: Synthetic oligonucleotide
  Antisense strand to SEQ ID NO: 2561020
cuucucccagacuaaagaa

SEQ ID NO: 2561022 - RNA, 19 nt, Artificial Sequence
  Description of Artificial Sequence: Synthetic oligonucleotide
  Sense strand starting at position 2871 of SEQ ID NO: 1888845
gauuaaacgggugaaguua

SEQ ID NO: 2561023 - RNA, 19 nt, Artificial Sequence
  Description of Artificial Sequence: Synthetic oligonucleotide
  Antisense strand to SEQ ID NO: 2561022
uaacuucacccguuuaauc

SEQ ID NO: 2561024 - RNA, 19 nt, Artificial Sequence
  Description of Artificial Sequence: Synthetic oligonucleotide
  Sense strand starting at position 2972 of SEQ ID NO: 1888845
agcccagugacaugagaua

SEQ ID NO: 2561025 - RNA, 19 nt, Artificial Sequence
  Description of Artificial Sequence: Synthetic oligonucleotide
  Antisense strand to SEQ ID NO: 2561024
uaucucaugucacugggcu

SEQ ID NO: 2561026 - RNA, 19 nt, Artificial Sequence
  Description of Artificial Sequence: Synthetic oligonucleotide
  Sense strand starting at position 3033 of SEQ ID NO: 1888845
gcagaagugaucuaagagu

SEQ ID NO: 2561027 - RNA, 19 nt, Artificial Sequence
  Description of Artificial Sequence: Synthetic oligonucleotide
  Antisense strand to SEQ ID NO: 2561026
acucuuagaucacuucugc

SEQ ID NO: 2561028 - RNA, 19 nt, Artificial Sequence
  Description of Artificial Sequence: Synthetic oligonucleotide
  Sense strand starting at position 3114 of SEQ ID NO: 1888845
ccuguaaagcaguagacaa

SEQ ID NO: 2561029 - RNA, 19 nt, Artificial Sequence
  Description of Artificial Sequence: Synthetic oligonucleotide
  Antisense strand to SEQ ID NO: 2561028
uugucuacugcuuuacagg

SEQ ID NO: 2561030 - RNA, 19 nt, Artificial Sequence
  Description of Artificial Sequence: Synthetic oligonucleotide
  Sense strand starting at position 3122 of SEQ ID NO: 1888845
gcaguagacaaugaagguu

SEQ ID NO: 2561031 - RNA, 19 nt, Artificial Sequence
  Description of Artificial Sequence: Synthetic oligonucleotide
  Antisense strand to SEQ ID NO: 2561030
aaccuucauugucuacugc

SEQ ID NO: 2561032 - RNA, 19 nt, Artificial Sequence
  Description of Artificial Sequence: Synthetic oligonucleotide
  Sense strand starting at position 3135 of SEQ ID NO: 1888845
aagguuccugcucagaaac

SEQ ID NO: 2561033 - RNA, 19 nt, Artificial Sequence
  Description of Artificial Sequence: Synthetic oligonucleotide
  Antisense strand to SEQ ID NO: 2561032
guuucugagcaggaaccuu

SEQ ID NO: 2561034 - RNA, 19 nt, Artificial Sequence
  Description of Artificial Sequence: Synthetic oligonucleotide
  Sense strand starting at position 3263 of SEQ ID NO: 1888845
ugaggaauaugcccagaug

SEQ ID NO: 2561035 - RNA, 19 nt, Artificial Sequence
  Description of Artificial Sequence: Synthetic oligonucleotide
  Antisense strand to SEQ ID NO: 2561034
caucugggcauauuccuca

SEQ ID NO: 2561036 - RNA, 19 nt, Artificial Sequence
  Description of Artificial Sequence: Synthetic oligonucleotide
  Sense strand starting at position 3908 of SEQ ID NO: 1888845
aacugauguguccaagauc

SEQ ID NO: 2561037 - RNA, 19 nt, Artificial Sequence
  Description of Artificial Sequence: Synthetic oligonucleotide
  Antisense strand to SEQ ID NO: 2561036
gaucuuggacacaucaguu

SEQ ID NO: 2561038 - RNA, 19 nt, Artificial Sequence
  Description of Artificial Sequence: Synthetic oligonucleotide
  Sense strand starting at position 3911 of SEQ ID NO: 1888845
ugauguguccaagaucuca

SEQ ID NO: 2561039 - RNA, 19 nt, Artificial Sequence
  Description of Artificial Sequence: Synthetic oligonucleotide
  Antisense strand to SEQ ID NO: 2561038
ugagaucuuggacacauca

SEQ ID NO: 2561040 - RNA, 19 nt, Artificial Sequence
  Description of Artificial Sequence: Synthetic oligonucleotide
  Sense strand starting at position 216 of SEQ ID NO: 1888846
guugaugaaagccauuagu

SEQ ID NO: 2561041 - RNA, 19 nt, Artificial Sequence
  Description of Artificial Sequence: Synthetic oligonucleotide
  Antisense strand to SEQ ID NO: 2561040
acuaauggcuuucaucaac

SEQ ID NO: 2561042 - RNA, 19 nt, Artificial Sequence
  Description of Artificial Sequence: Synthetic oligonucleotide
  Sense strand starting at position 244 of SEQ ID NO: 1888846
cuguuugaucuugacuuac

SEQ ID NO: 2561043 - RNA, 19 nt, Artificial Sequence
  Description of Artificial Sequence: Synthetic oligonucleotide
  Antisense strand to SEQ ID NO: 2561042
guaagucaagaucaaacag

SEQ ID NO: 2561044 - RNA, 19 nt, Artificial Sequence
  Description of Artificial Sequence: Synthetic oligonucleotide
  Sense strand starting at position 446 of SEQ ID NO: 1888846
guagaugucagauauguca

SEQ ID NO: 2561045 - RNA, 19 nt, Artificial Sequence
  Description of Artificial Sequence: Synthetic oligonucleotide
  Antisense strand to SEQ ID NO: 2561044
ugacauaucugacaucuac

SEQ ID NO: 2561046 - RNA, 19 nt, Artificial Sequence
  Description of Artificial Sequence: Synthetic oligonucleotide
  Sense strand starting at position 487 of SEQ ID NO: 1888846
ucagaugaccauugcauga

SEQ ID NO: 2561047 - RNA, 19 nt, Artificial Sequence
  Description of Artificial Sequence: Synthetic oligonucleotide
  Antisense strand to SEQ ID NO: 2561046
ucaugcaauggucaucuga

SEQ ID NO: 2561048 - RNA, 19 nt, Artificial Sequence
  Description of Artificial Sequence: Synthetic oligonucleotide
  Sense strand starting at position 651 of SEQ ID NO: 1888846
uucuuuagucugggagaag

SEQ ID NO: 2561049 - RNA, 19 nt, Artificial Sequence
  Description of Artificial Sequence: Synthetic oligonucleotide
  Antisense strand to SEQ ID NO: 2561048
cuucucccagacuaaagaa

SEQ ID NO: 2561050 - RNA, 19 nt, Artificial Sequence
  Description of Artificial Sequence: Synthetic oligonucleotide
  Sense strand starting at position 678 of SEQ ID NO: 1888846
gauuaaacgggugaaguua

SEQ ID NO: 2561051 - RNA, 19 nt, Artificial Sequence
  Description of Artificial Sequence: Synthetic oligonucleotide
  Antisense strand to SEQ ID NO: 2561050
uaacuucacccguuuaauc

SEQ ID NO: 2561052 - RNA, 19 nt, Artificial Sequence
  Description of Artificial Sequence: Synthetic oligonucleotide
  Sense strand starting at position 779 of SEQ ID NO: 1888846
agcccagugacaugagaua

SEQ ID NO: 2561053 - RNA, 19 nt, Artificial Sequence
  Description of Artificial Sequence: Synthetic oligonucleotide
  Antisense strand to SEQ ID NO: 2561052
uaucucaugucacugggcu

SEQ ID NO: 2561054 - RNA, 19 nt, Artificial Sequence
  Description of Artificial Sequence: Synthetic oligonucleotide
  Sense strand starting at position 840 of SEQ ID NO: 1888846
gcagaagugaucuaagagu

SEQ ID NO: 2561055 - RNA, 19 nt, Artificial Sequence
  Description of Artificial Sequence: Synthetic oligonucleotide
  Antisense strand to SEQ ID NO: 2561054
acucuuagaucacuucugc

SEQ ID NO: 2561056 - RNA, 19 nt, Artificial Sequence
  Description of Artificial Sequence: Synthetic oligonucleotide
  Sense strand starting at position 921 of SEQ ID NO: 1888846
ccuguaaagcaguagacaa

SEQ ID NO: 2561057 - RNA, 19 nt, Artificial Sequence
  Description of Artificial Sequence: Synthetic oligonucleotide
  Antisense strand to SEQ ID NO: 2561056
uugucuacugcuuuacagg

SEQ ID NO: 2561058 - RNA, 19 nt, Artificial Sequence
  Description of Artificial Sequence: Synthetic oligonucleotide
  Sense strand starting at position 929 of SEQ ID NO: 1888846
gcaguagacaaugaagguu

SEQ ID NO: 2561059 - RNA, 19 nt, Artificial Sequence
  Description of Artificial Sequence: Synthetic oligonucleotide
  Antisense strand to SEQ ID NO: 2561058
aaccuucauugucuacugc

SEQ ID NO: 2561060 - RNA, 19 nt, Artificial Sequence
  Description of Artificial Sequence: Synthetic oligonucleotide
  Sense strand starting at position 942 of SEQ ID NO: 1888846
aagguuccugcucagaaac

SEQ ID NO: 2561061 - RNA, 19 nt, Artificial Sequence
  Description of Artificial Sequence: Synthetic oligonucleotide
  Antisense strand to SEQ ID NO: 2561060
guuucugagcaggaaccuu

SEQ ID NO: 2561062 - RNA, 19 nt, Artificial Sequence
  Description of Artificial Sequence: Synthetic oligonucleotide
  Sense strand starting at position 1040 of SEQ ID NO: 1888846
gugggugugauacaagagu

SEQ ID NO: 2561063 - RNA, 19 nt, Artificial Sequence
  Description of Artificial Sequence: Synthetic oligonucleotide
  Antisense strand to SEQ ID NO: 2561062
acucuuguaucacacccac

SEQ ID NO: 2561064 - RNA, 19 nt, Artificial Sequence
  Description of Artificial Sequence: Synthetic oligonucleotide
  Sense strand starting at position 1070 of SEQ ID NO: 1888846
ugaggaauaugcccagaug

SEQ ID NO: 2561065 - RNA, 19 nt, Artificial Sequence
  Description of Artificial Sequence: Synthetic oligonucleotide
  Antisense strand to SEQ ID NO: 2561064
caucugggcauauuccuca

SEQ ID NO: 2561066 - RNA, 19 nt, Artificial Sequence
  Description of Artificial Sequence: Synthetic oligonucleotide
  Sense strand starting at position 1715 of SEQ ID NO: 1888846
aacugauguguccaagauc

SEQ ID NO: 2561067 - RNA, 19 nt, Artificial Sequence
  Description of Artificial Sequence: Synthetic oligonucleotide
  Antisense strand to SEQ ID NO: 2561066
gaucuuggacacaucaguu

SEQ ID NO: 2561068 - RNA, 19 nt, Artificial Sequence
  Description of Artificial Sequence: Synthetic oligonucleotide
  Sense strand starting at position 1718 of SEQ ID NO: 1888846
ugauguguccaagaucuca

SEQ ID NO: 2561069 - RNA, 19 nt, Artificial Sequence
  Description of Artificial Sequence: Synthetic oligonucleotide
  Antisense strand to SEQ ID NO: 2561068
ugagaucuuggacacauca

SEQ ID NO: 2561070 - RNA, 19 nt, Artificial Sequence
  Description of Artificial Sequence: Synthetic oligonucleotide
  Sense strand starting at position 2125 of SEQ ID NO: 1888846
acucauucccaguacaagu

SEQ ID NO: 2561071 - RNA, 19 nt, Artificial Sequence
  Description of Artificial Sequence: Synthetic oligonucleotide
  Antisense strand to SEQ ID NO: 2561070
acuuguacugggaaugagu

SEQ ID NO: 2561072 - RNA, 19 nt, Artificial Sequence
  Description of Artificial Sequence: Synthetic oligonucleotide
  Sense strand starting at position 2175 of SEQ ID NO: 1888846
gguguuuaaguuuaaauac

SEQ ID NO: 2561073 - RNA, 19 nt, Artificial Sequence
  Description of Artificial Sequence: Synthetic oligonucleotide
  Antisense strand to SEQ ID NO: 2561072
guauuuaaacuuaaacacc

SEQ ID NO: 2561074 - RNA, 19 nt, Artificial Sequence
  Description of Artificial Sequence: Synthetic oligonucleotide
  Sense strand starting at position 2213 of SEQ ID NO: 1888846
aguauaugagcacaaauuc

SEQ ID NO: 2561075 - RNA, 19 nt, Artificial Sequence
  Description of Artificial Sequence: Synthetic oligonucleotide
  Antisense strand to SEQ ID NO: 2561074
gaauuugugcucauauacu

SEQ ID NO: 2561076 - RNA, 19 nt, Artificial Sequence
  Description of Artificial Sequence: Synthetic oligonucleotide
  Sense strand starting at position 2496 of SEQ ID NO: 1888846
ugcagauggacaugauaug

SEQ ID NO: 2561077 - RNA, 19 nt, Artificial Sequence
  Description of Artificial Sequence: Synthetic oligonucleotide
  Antisense strand to SEQ ID NO: 2561076
cauaucauguccaucugca

SEQ ID NO: 2561078 - RNA, 19 nt, Artificial Sequence
  Description of Artificial Sequence: Synthetic oligonucleotide
  Sense strand starting at position 2531 of SEQ ID NO: 1888846
ugauucuuacuuggguaga

SEQ ID NO: 2561079 - RNA, 19 nt, Artificial Sequence
  Description of Artificial Sequence: Synthetic oligonucleotide
  Antisense strand to SEQ ID NO: 2561078
ucuacccaaguaagaauca

SEQ ID NO: 2561080 - RNA, 19 nt, Artificial Sequence
  Description of Artificial Sequence: Synthetic oligonucleotide
  Sense strand starting at position 2533 of SEQ ID NO: 1888846
auucuuacuuggguagaua

SEQ ID NO: 2561081 - RNA, 19 nt, Artificial Sequence
  Description of Artificial Sequence: Synthetic oligonucleotide
  Antisense strand to SEQ ID NO: 2561080
uaucuacccaaguaagaau

SEQ ID NO: 2561082 - RNA, 19 nt, Artificial Sequence
  Description of Artificial Sequence: Synthetic oligonucleotide
  Sense strand starting at position 2534 of SEQ ID NO: 1888846
uucuuacuuggguagauau

SEQ ID NO: 2561083 - RNA, 19 nt, Artificial Sequence
  Description of Artificial Sequence: Synthetic oligonucleotide
  Antisense strand to SEQ ID NO: 2561082
auaucuacccaaguaagaa

SEQ ID NO: 2561084 - RNA, 19 nt, Artificial Sequence
  Description of Artificial Sequence: Synthetic oligonucleotide
  Sense strand starting at position 2546 of SEQ ID NO: 1888846
uagauaugguauguaauca

SEQ ID NO: 2561085 - RNA, 19 nt, Artificial Sequence
  Description of Artificial Sequence: Synthetic oligonucleotide
  Antisense strand to SEQ ID NO: 2561084
ugauuacauaccauaucua

SEQ ID NO: 2561086 - RNA, 19 nt, Artificial Sequence
  Description of Artificial Sequence: Synthetic oligonucleotide
  Sense strand starting at position 2666 of SEQ ID NO: 1888846
cauggugauugacucuaca

SEQ ID NO: 2561087 - RNA, 19 nt, Artificial Sequence
  Description of Artificial Sequence: Synthetic oligonucleotide
  Antisense strand to SEQ ID NO: 2561086
uguagagucaaucaccaug

SEQ ID NO: 2561088 - RNA, 19 nt, Artificial Sequence
  Description of Artificial Sequence: Synthetic oligonucleotide
  Sense strand starting at position 2682 of SEQ ID NO: 1888846
acacauuuguguuugggca

SEQ ID NO: 2561089 - RNA, 19 nt, Artificial Sequence
  Description of Artificial Sequence: Synthetic oligonucleotide
  Antisense strand to SEQ ID NO: 2561088
ugcccaaacacaaaugugu

SEQ ID NO: 2561090 - RNA, 19 nt, Artificial Sequence
  Description of Artificial Sequence: Synthetic oligonucleotide
  Sense strand starting at position 2683 of SEQ ID NO: 1888846
cacauuuguguuugggcau

SEQ ID NO: 2561091 - RNA, 19 nt, Artificial Sequence
  Description of Artificial Sequence: Synthetic oligonucleotide
  Antisense strand to SEQ ID NO: 2561090
augcccaaacacaaaugug

SEQ ID NO: 2561092 - RNA, 19 nt, Artificial Sequence
  Description of Artificial Sequence: Synthetic oligonucleotide
  Sense strand starting at position 2686 of SEQ ID NO: 1888846
auuuguguuugggcaugau

SEQ ID NO: 2561093 - RNA, 19 nt, Artificial Sequence
  Description of Artificial Sequence: Synthetic oligonucleotide
  Antisense strand to SEQ ID NO: 2561092
aucaugcccaaacacaaau

SEQ ID NO: 2561094 - RNA, 19 nt, Artificial Sequence
  Description of Artificial Sequence: Synthetic oligonucleotide
  Sense strand starting at position 2870 of SEQ ID NO: 1888846
gaaggagauuauguuuauu

SEQ ID NO: 2561095 - RNA, 19 nt, Artificial Sequence
  Description of Artificial Sequence: Synthetic oligonucleotide
  Antisense strand to SEQ ID NO: 2561094
aauaaacauaaucuccuuc

SEQ ID NO: 2561096 - RNA, 19 nt, Artificial Sequence
  Description of Artificial Sequence: Synthetic oligonucleotide
  Sense strand starting at position 2897 of SEQ ID NO: 1888846
auuaaugaugggugagcaa

SEQ ID NO: 2561097 - RNA, 19 nt, Artificial Sequence
  Description of Artificial Sequence: Synthetic oligonucleotide
  Antisense strand to SEQ ID NO: 2561096
uugcucacccaucauuaau

SEQ ID NO: 2561098 - RNA, 19 nt, Artificial Sequence
  Description of Artificial Sequence: Synthetic oligonucleotide
  Sense strand starting at position 2900 of SEQ ID NO: 1888846
aaugaugggugagcaauau

SEQ ID NO: 2561099 - RNA, 19 nt, Artificial Sequence
  Description of Artificial Sequence: Synthetic oligonucleotide
  Antisense strand to SEQ ID NO: 2561098
auauugcucacccaucauu

SEQ ID NO: 2561100 - RNA, 19 nt, Artificial Sequence
  Description of Artificial Sequence: Synthetic oligonucleotide
  Sense strand starting at position 2904 of SEQ ID NO: 1888846
augggugagcaauaucuau

SEQ ID NO: 2561101 - RNA, 19 nt, Artificial Sequence
  Description of Artificial Sequence: Synthetic oligonucleotide
  Antisense strand to SEQ ID NO: 2561100
auagauauugcucacccau

SEQ ID NO: 2561102 - RNA, 19 nt, Artificial Sequence
  Description of Artificial Sequence: Synthetic oligonucleotide
  Sense strand starting at position 2908 of SEQ ID NO: 1888846
gugagcaauaucuaugaug

SEQ ID NO: 2561103 - RNA, 19 nt, Artificial Sequence
  Description of Artificial Sequence: Synthetic oligonucleotide
  Antisense strand to SEQ ID NO: 2561102
caucauagauauugcucac

SEQ ID NO: 2561104 - RNA, 19 nt, Artificial Sequence
  Description of Artificial Sequence: Synthetic oligonucleotide
  Sense strand starting at position 3125 of SEQ ID NO: 1888846
gaucauggugcacaacuua

SEQ ID NO: 2561105 - RNA, 19 nt, Artificial Sequence
  Description of Artificial Sequence: Synthetic oligonucleotide
  Antisense strand to SEQ ID NO: 2561104
uaaguugugcaccaugauc

SEQ ID NO: 2561106 - RNA, 19 nt, Artificial Sequence
  Description of Artificial Sequence: Synthetic oligonucleotide
  Sense strand starting at position 3284 of SEQ ID NO: 1888846
acugauauaugagcuagua

SEQ ID NO: 2561107 - RNA, 19 nt, Artificial Sequence
  Description of Artificial Sequence: Synthetic oligonucleotide
  Antisense strand to SEQ ID NO: 2561106
uacuagcucauauaucagu

SEQ ID NO: 2561108 - RNA, 19 nt, Artificial Sequence
  Description of Artificial Sequence: Synthetic oligonucleotide
  Sense strand starting at position 3315 of SEQ ID NO: 1888846
gugugauaaccaugacaua

SEQ ID NO: 2561109 - RNA, 19 nt, Artificial Sequence
  Description of Artificial Sequence: Synthetic oligonucleotide
  Antisense strand to SEQ ID NO: 2561108
uaugucaugguuaucacac

SEQ ID NO: 2561110 - RNA, 19 nt, Artificial Sequence
  Description of Artificial Sequence: Synthetic oligonucleotide
  Sense strand starting at position 3327 of SEQ ID NO: 1888846
ugacauagaaguuggucaa

SEQ ID NO: 2561111 - RNA, 19 nt, Artificial Sequence
  Description of Artificial Sequence: Synthetic oligonucleotide
  Antisense strand to SEQ ID NO: 2561110
uugaccaacuucuauguca

SEQ ID NO: 2561112 - RNA, 19 nt, Artificial Sequence
  Description of Artificial Sequence: Synthetic oligonucleotide
  Sense strand starting at position 3328 of SEQ ID NO: 1888846
gacauagaaguuggucaau

SEQ ID NO: 2561113 - RNA, 19 nt, Artificial Sequence
  Description of Artificial Sequence: Synthetic oligonucleotide
  Antisense strand to SEQ ID NO: 2561112
auugaccaacuucuauguc

SEQ ID NO: 2561114 - RNA, 19 nt, Artificial Sequence
  Description of Artificial Sequence: Synthetic oligonucleotide
  Sense strand starting at position 3330 of SEQ ID NO: 1888846
cauagaaguuggucaauca

SEQ ID NO: 2561115 - RNA, 19 nt, Artificial Sequence
  Description of Artificial Sequence: Synthetic oligonucleotide
  Antisense strand to SEQ ID NO: 2561114
ugauugaccaacuucuaug

SEQ ID NO: 2561116 - RNA, 19 nt, Artificial Sequence
  Description of Artificial Sequence: Synthetic oligonucleotide
  Sense strand starting at position 3503 of SEQ ID NO: 1888846
gggcacugaaguuauaacu

SEQ ID NO: 2561117 - RNA, 19 nt, Artificial Sequence
  Description of Artificial Sequence: Synthetic oligonucleotide
  Antisense strand to SEQ ID NO: 2561116
aguuauaacuucagugccc

SEQ ID NO: 2561118 - RNA, 19 nt, Artificial Sequence
  Description of Artificial Sequence: Synthetic oligonucleotide
  Sense strand starting at position 3959 of SEQ ID NO: 1888846
gacugcaugguguauaaau

SEQ ID NO: 2561119 - RNA, 19 nt, Artificial Sequence
  Description of Artificial Sequence: Synthetic oligonucleotide
  Antisense strand to SEQ ID NO: 2561118
auuuauacaccaugcaguc

SEQ ID NO: 2561120 - RNA, 19 nt, Artificial Sequence
  Description of Artificial Sequence: Synthetic oligonucleotide
  Sense strand starting at position 149 of SEQ ID NO: 1888847
gguuguggugaaugagaga

SEQ ID NO: 2561121 - RNA, 19 nt, Artificial Sequence
  Description of Artificial Sequence: Synthetic oligonucleotide
  Antisense strand to SEQ ID NO: 2561120
ucucucauucaccacaacc

SEQ ID NO: 2561122 - RNA, 19 nt, Artificial Sequence
  Description of Artificial Sequence: Synthetic oligonucleotide
  Sense strand starting at position 158 of SEQ ID NO: 1888847
gaaugagagaucgggccau

SEQ ID NO: 2561123 - RNA, 19 nt, Artificial Sequence
  Description of Artificial Sequence: Synthetic oligonucleotide
  Antisense strand to SEQ ID NO: 2561122
auggcccgaucucucauuc

SEQ ID NO: 2561124 - RNA, 19 nt, Artificial Sequence
  Description of Artificial Sequence: Synthetic oligonucleotide
  Sense strand starting at position 162 of SEQ ID NO: 1888847
gagagaucgggccauugca

SEQ ID NO: 2561125 - RNA, 19 nt, Artificial Sequence
  Description of Artificial Sequence: Synthetic oligonucleotide
  Antisense strand to SEQ ID NO: 2561124
ugcaauggcccgaucucuc

SEQ ID NO: 2561126 - RNA, 19 nt, Artificial Sequence
  Description of Artificial Sequence: Synthetic oligonucleotide
  Sense strand starting at position 293 of SEQ ID NO: 1888847
gcuggcugugucuuaguaa

SEQ ID NO: 2561127 - RNA, 19 nt, Artificial Sequence
  Description of Artificial Sequence: Synthetic oligonucleotide
  Antisense strand to SEQ ID NO: 2561126
uuacuaagacacagccagc

SEQ ID NO: 2561128 - RNA, 19 nt, Artificial Sequence
  Description of Artificial Sequence: Synthetic oligonucleotide
  Sense strand starting at position 626 of SEQ ID NO: 1888847
gucccauugguuuacaacu

SEQ ID NO: 2561129 - RNA, 19 nt, Artificial Sequence
  Description of Artificial Sequence: Synthetic oligonucleotide
  Antisense strand to SEQ ID NO: 2561128
aguuguaaaccaaugggac

SEQ ID NO: 2561130 - RNA, 19 nt, Artificial Sequence
  Description of Artificial Sequence: Synthetic oligonucleotide
  Sense strand starting at position 700 of SEQ ID NO: 1888847
auccaaauauugucagggu

SEQ ID NO: 2561131 - RNA, 19 nt, Artificial Sequence
  Description of Artificial Sequence: Synthetic oligonucleotide
  Antisense strand to SEQ ID NO: 2561130
acccugacaauauuuggau

SEQ ID NO: 2561132 - RNA, 19 nt, Artificial Sequence
  Description of Artificial Sequence: Synthetic oligonucleotide
  Sense strand starting at position 704 of SEQ ID NO: 1888847
aaauauugucaggguaaua

SEQ ID NO: 2561133 - RNA, 19 nt, Artificial Sequence
  Description of Artificial Sequence: Synthetic oligonucleotide
  Antisense strand to SEQ ID NO: 2561132
uauuacccugacaauauuu

SEQ ID NO: 2561134 - RNA, 19 nt, Artificial Sequence
  Description of Artificial Sequence: Synthetic oligonucleotide
  Sense strand starting at position 1072 of SEQ ID NO: 1888847
ucaggaaugucgccaacaa

SEQ ID NO: 2561135 - RNA, 19 nt, Artificial Sequence
  Description of Artificial Sequence: Synthetic oligonucleotide
  Antisense strand to SEQ ID NO: 2561134
uuguuggcgacauuccuga

SEQ ID NO: 2561136 - RNA, 19 nt, Artificial Sequence
  Description of Artificial Sequence: Synthetic oligonucleotide
  Sense strand starting at position 1073 of SEQ ID NO: 1888847
caggaaugucgccaacaaa

SEQ ID NO: 2561137 - RNA, 19 nt, Artificial Sequence
  Description of Artificial Sequence: Synthetic oligonucleotide
  Antisense strand to SEQ ID NO: 2561136
uuuguuggcgacauuccug

SEQ ID NO: 2561138 - RNA, 19 nt, Artificial Sequence
  Description of Artificial Sequence: Synthetic oligonucleotide
  Sense strand starting at position 1098 of SEQ ID NO: 1888847
gcgguuuacagauggauac

SEQ ID NO: 2561139 - RNA, 19 nt, Artificial Sequence
  Description of Artificial Sequence: Synthetic oligonucleotide
  Antisense strand to SEQ ID NO: 2561138
guauccaucuguaaaccgc

SEQ ID NO: 2561140 - RNA, 19 nt, Artificial Sequence
  Description of Artificial Sequence: Synthetic oligonucleotide
  Sense strand starting at position 1274 of SEQ ID NO: 1888847
ggacaagugcaauacuuua

SEQ ID NO: 2561141 - RNA, 19 nt, Artificial Sequence
  Description of Artificial Sequence: Synthetic oligonucleotide
  Antisense strand to SEQ ID NO: 2561140
uaaaguauugcacuugucc

SEQ ID NO: 2561142 - RNA, 19 nt, Artificial Sequence
  Description of Artificial Sequence: Synthetic oligonucleotide
  Sense strand starting at position 1279 of SEQ ID NO: 1888847
agugcaauacuuuauauag

SEQ ID NO: 2561143 - RNA, 19 nt, Artificial Sequence
  Description of Artificial Sequence: Synthetic oligonucleotide
  Antisense strand to SEQ ID NO: 2561142
cuauauaaaguauugcacu

SEQ ID NO: 2561144 - RNA, 19 nt, Artificial Sequence
  Description of Artificial Sequence: Synthetic oligonucleotide
  Sense strand starting at position 1339 of SEQ ID NO: 1888847
gcaugagugcuggagauac

SEQ ID NO: 2561145 - RNA, 19 nt, Artificial Sequence
  Description of Artificial Sequence: Synthetic oligonucleotide
  Antisense strand to SEQ ID NO: 2561144
guaucuccagcacucaugc

SEQ ID NO: 2561146 - RNA, 19 nt, Artificial Sequence
  Description of Artificial Sequence: Synthetic oligonucleotide
  Sense strand starting at position 1349 of SEQ ID NO: 1888847
uggagauacgcaugaaggu

SEQ ID NO: 2561147 - RNA, 19 nt, Artificial Sequence
  Description of Artificial Sequence: Synthetic oligonucleotide
  Antisense strand to SEQ ID NO: 2561146
accuucaugcguaucucca

SEQ ID NO: 2561148 - RNA, 19 nt, Artificial Sequence
  Description of Artificial Sequence: Synthetic oligonucleotide
  Sense strand starting at position 1435 of SEQ ID NO: 1888847
auacauauauacgcugaaa

SEQ ID NO: 2561149 - RNA, 19 nt, Artificial Sequence
  Description of Artificial Sequence: Synthetic oligonucleotide
  Antisense strand to SEQ ID NO: 2561148
uuucagcguauauauguau

SEQ ID NO: 2561150 - RNA, 19 nt, Artificial Sequence
  Description of Artificial Sequence: Synthetic oligonucleotide
  Sense strand starting at position 1437 of SEQ ID NO: 1888847
acauauauacgcugaaaug

SEQ ID NO: 2561151 - RNA, 19 nt, Artificial Sequence
  Description of Artificial Sequence: Synthetic oligonucleotide
  Antisense strand to SEQ ID NO: 2561150
cauuucagcguauauaugu

SEQ ID NO: 2561152 - RNA, 19 nt, Artificial Sequence
  Description of Artificial Sequence: Synthetic oligonucleotide
  Sense strand starting at position 1518 of SEQ ID NO: 1888847
uuuguuauccaagaguacu

SEQ ID NO: 2561153 - RNA, 19 nt, Artificial Sequence
  Description of Artificial Sequence: Synthetic oligonucleotide
  Antisense strand to SEQ ID NO: 2561152
aguacucuuggauaacaaa

SEQ ID NO: 2561154 - RNA, 19 nt, Artificial Sequence
  Description of Artificial Sequence: Synthetic oligonucleotide
  Sense strand starting at position 1534 of SEQ ID NO: 1888847
acuggaagugcccauacua

SEQ ID NO: 2561155 - RNA, 19 nt, Artificial Sequence
  Description of Artificial Sequence: Synthetic oligonucleotide
  Antisense strand to SEQ ID NO: 2561154
uaguaugggcacuuccagu

SEQ ID NO: 2561156 - RNA, 19 nt, Artificial Sequence
  Description of Artificial Sequence: Synthetic oligonucleotide
  Sense strand starting at position 1694 of SEQ ID NO: 1888847
acugaaauguguccuauuc

SEQ ID NO: 2561157 - RNA, 19 nt, Artificial Sequence
  Description of Artificial Sequence: Synthetic oligonucleotide
  Antisense strand to SEQ ID NO: 2561156
gaauaggacacauuucagu

SEQ ID NO: 2561158 - RNA, 19 nt, Artificial Sequence
  Description of Artificial Sequence: Synthetic oligonucleotide
  Sense strand starting at position 1901 of SEQ ID NO: 1888847
guagccauugacuaaauca

SEQ ID NO: 2561159 - RNA, 19 nt, Artificial Sequence
  Description of Artificial Sequence: Synthetic oligonucleotide
  Antisense strand to SEQ ID NO: 2561158
ugauuuagucaauggcuac

SEQ ID NO: 2561160 - RNA, 19 nt, Artificial Sequence
  Description of Artificial Sequence: Synthetic oligonucleotide
  Sense strand starting at position 1912 of SEQ ID NO: 1888847
cuaaaucaccaugguaaug

SEQ ID NO: 2561161 - RNA, 19 nt, Artificial Sequence
  Description of Artificial Sequence: Synthetic oligonucleotide
  Antisense strand to SEQ ID NO: 2561160
cauuaccauggugauuuag

SEQ ID NO: 2561162 - RNA, 19 nt, Artificial Sequence
  Description of Artificial Sequence: Synthetic oligonucleotide
  Sense strand starting at position 1930 of SEQ ID NO: 1888847
guaagaagugcuuacauug

SEQ ID NO: 2561163 - RNA, 19 nt, Artificial Sequence
  Description of Artificial Sequence: Synthetic oligonucleotide
  Antisense strand to SEQ ID NO: 2561162
caauguaagcacuucuuac

SEQ ID NO: 2561164 - RNA, 19 nt, Artificial Sequence
  Description of Artificial Sequence: Synthetic oligonucleotide
  Sense strand starting at position 1940 of SEQ ID NO: 1888847
cuuacauugcaguagaucu

SEQ ID NO: 2561165 - RNA, 19 nt, Artificial Sequence
  Description of Artificial Sequence: Synthetic oligonucleotide
  Antisense strand to SEQ ID NO: 2561164
agaucuacugcaauguaag

SEQ ID NO: 2561166 - RNA, 19 nt, Artificial Sequence
  Description of Artificial Sequence: Synthetic oligonucleotide
  Sense strand starting at position 1999 of SEQ ID NO: 1888847
ggccuauuccuguagcaaa

SEQ ID NO: 2561167 - RNA, 19 nt, Artificial Sequence
  Description of Artificial Sequence: Synthetic oligonucleotide
  Antisense strand to SEQ ID NO: 2561166
uuugcuacaggaauaggcc

SEQ ID NO: 2561168 - RNA, 19 nt, Artificial Sequence
  Description of Artificial Sequence: Synthetic oligonucleotide
  Sense strand starting at position 2065 of SEQ ID NO: 1888847
gcagacucaccugguuaaa

SEQ ID NO: 2561169 - RNA, 19 nt, Artificial Sequence
  Description of Artificial Sequence: Synthetic oligonucleotide
  Antisense strand to SEQ ID NO: 2561168
uuuaaccaggugagucugc

SEQ ID NO: 2561170 - RNA, 19 nt, Artificial Sequence
  Description of Artificial Sequence: Synthetic oligonucleotide
  Sense strand starting at position 2163 of SEQ ID NO: 1888847
gcuuacagagucuaagcua

SEQ ID NO: 2561171 - RNA, 19 nt, Artificial Sequence
  Description of Artificial Sequence: Synthetic oligonucleotide
  Antisense strand to SEQ ID NO: 2561170
uagcuuagacucuguaagc

SEQ ID NO: 2561172 - RNA, 19 nt, Artificial Sequence
  Description of Artificial Sequence: Synthetic oligonucleotide
  Sense strand starting at position 2281 of SEQ ID NO: 1888847
ucuuauguauaagcagauu

SEQ ID NO: 2561173 - RNA, 19 nt, Artificial Sequence
  Description of Artificial Sequence: Synthetic oligonucleotide
  Antisense strand to SEQ ID NO: 2561172
aaucugcuuauacauaaga

SEQ ID NO: 2561174 - RNA, 19 nt, Artificial Sequence
  Description of Artificial Sequence: Synthetic oligonucleotide
  Sense strand starting at position 2344 of SEQ ID NO: 1888847
caguaauuugcaggcacau

SEQ ID NO: 2561175 - RNA, 19 nt, Artificial Sequence
  Description of Artificial Sequence: Synthetic oligonucleotide
  Antisense strand to SEQ ID NO: 2561174
augugccugcaaauuacug

SEQ ID NO: 2561176 - RNA, 19 nt, Artificial Sequence
  Description of Artificial Sequence: Synthetic oligonucleotide
  Sense strand starting at position 2467 of SEQ ID NO: 1888847
acggaaagugacuguuaga

SEQ ID NO: 2561177 - RNA, 19 nt, Artificial Sequence
  Description of Artificial Sequence: Synthetic oligonucleotide
  Antisense strand to SEQ ID NO: 2561176
ucuaacagucacuuuccgu

SEQ ID NO: 2561178 - RNA, 19 nt, Artificial Sequence
  Description of Artificial Sequence: Synthetic oligonucleotide
  Sense strand starting at position 2587 of SEQ ID NO: 1888847
auggcugagagaugucaca

SEQ ID NO: 2561179 - RNA, 19 nt, Artificial Sequence
  Description of Artificial Sequence: Synthetic oligonucleotide
  Antisense strand to SEQ ID NO: 2561178
ugugacaucucucagccau

SEQ ID NO: 2561180 - RNA, 19 nt, Artificial Sequence
  Description of Artificial Sequence: Synthetic oligonucleotide
  Sense strand starting at position 2875 of SEQ ID NO: 1888847
ucuguaauacguuaaacga

SEQ ID NO: 2561181 - RNA, 19 nt, Artificial Sequence
  Description of Artificial Sequence: Synthetic oligonucleotide
  Antisense strand to SEQ ID NO: 2561180
ucguuuaacguauuacaga

SEQ ID NO: 2561182 - RNA, 19 nt, Artificial Sequence
  Description of Artificial Sequence: Synthetic oligonucleotide
  Sense strand starting at position 2883 of SEQ ID NO: 1888847
acguuaaacgagugaggga

SEQ ID NO: 2561183 - RNA, 19 nt, Artificial Sequence
  Description of Artificial Sequence: Synthetic oligonucleotide
  Antisense strand to SEQ ID NO: 2561182
ucccucacucguuuaacgu

SEQ ID NO: 2561184 - RNA, 19 nt, Artificial Sequence
  Description of Artificial Sequence: Synthetic oligonucleotide
  Sense strand starting at position 2912 of SEQ ID NO: 1888847
uugaacuuucgucacgaua

SEQ ID NO: 2561185 - RNA, 19 nt, Artificial Sequence
  Description of Artificial Sequence: Synthetic oligonucleotide
  Antisense strand to SEQ ID NO: 2561184
uaucgugacgaaaguucaa

SEQ ID NO: 2561186 - RNA, 19 nt, Artificial Sequence
  Description of Artificial Sequence: Synthetic oligonucleotide
  Sense strand starting at position 2915 of SEQ ID NO: 1888847
aacuuucgucacgauaucu

SEQ ID NO: 2561187 - RNA, 19 nt, Artificial Sequence
  Description of Artificial Sequence: Synthetic oligonucleotide
  Antisense strand to SEQ ID NO: 2561186
agauaucgugacgaaaguu

SEQ ID NO: 2561188 - RNA, 19 nt, Artificial Sequence
  Description of Artificial Sequence: Synthetic oligonucleotide
  Sense strand starting at position 2925 of SEQ ID NO: 1888847
acgauaucuuaugccacua

SEQ ID NO: 2561189 - RNA, 19 nt, Artificial Sequence
  Description of Artificial Sequence: Synthetic oligonucleotide
  Antisense strand to SEQ ID NO: 2561188
uaguggcauaagauaucgu

SEQ ID NO: 2561190 - RNA, 19 nt, Artificial Sequence
  Description of Artificial Sequence: Synthetic oligonucleotide
  Sense strand starting at position 2937 of SEQ ID NO: 1888847
gccacuaaaugagucuuua

SEQ ID NO: 2561191 - RNA, 19 nt, Artificial Sequence
  Description of Artificial Sequence: Synthetic oligonucleotide
  Antisense strand to SEQ ID NO: 2561190
uaaagacucauuuaguggc

SEQ ID NO: 2561192 - RNA, 19 nt, Artificial Sequence
  Description of Artificial Sequence: Synthetic oligonucleotide
  Sense strand starting at position 2941 of SEQ ID NO: 1888847
cuaaaugagucuuuagaag

SEQ ID NO: 2561193 - RNA, 19 nt, Artificial Sequence
  Description of Artificial Sequence: Synthetic oligonucleotide
  Antisense strand to SEQ ID NO: 2561192
cuucuaaagacucauuuag

SEQ ID NO: 2561194 - RNA, 19 nt, Artificial Sequence
  Description of Artificial Sequence: Synthetic oligonucleotide
  Sense strand starting at position 3066 of SEQ ID NO: 1888847
cccuuaaauuggguuucua

SEQ ID NO: 2561195 - RNA, 19 nt, Artificial Sequence
  Description of Artificial Sequence: Synthetic oligonucleotide
  Antisense strand to SEQ ID NO: 2561194
uagaaacccaauuuaaggg

SEQ ID NO: 2561196 - RNA, 19 nt, Artificial Sequence
  Description of Artificial Sequence: Synthetic oligonucleotide
  Sense strand starting at position 3077 of SEQ ID NO: 1888847
gguuucuacaccugugaag

SEQ ID NO: 2561197 - RNA, 19 nt, Artificial Sequence
  Description of Artificial Sequence: Synthetic oligonucleotide
  Antisense strand to SEQ ID NO: 2561196
cuucacagguguagaaacc

SEQ ID NO: 2561198 - RNA, 19 nt, Artificial Sequence
  Description of Artificial Sequence: Synthetic oligonucleotide
  Sense strand starting at position 3079 of SEQ ID NO: 1888847
uuucuacaccugugaagau

SEQ ID NO: 2561199 - RNA, 19 nt, Artificial Sequence
  Description of Artificial Sequence: Synthetic oligonucleotide
  Antisense strand to SEQ ID NO: 2561198
aucuucacagguguagaaa

SEQ ID NO: 2561200 - RNA, 19 nt, Artificial Sequence
  Description of Artificial Sequence: Synthetic oligonucleotide
  Sense strand starting at position 249 of SEQ ID NO: 1888848
gcagucucuccgggugaca

SEQ ID NO: 2561201 - RNA, 19 nt, Artificial Sequence
  Description of Artificial Sequence: Synthetic oligonucleotide
  Antisense strand to SEQ ID NO: 2561200
ugucacccggagagacugc

SEQ ID NO: 2561202 - RNA, 19 nt, Artificial Sequence
  Description of Artificial Sequence: Synthetic oligonucleotide
  Sense strand starting at position 528 of SEQ ID NO: 1888848
ucuagaaaugcgcagacau

SEQ ID NO: 2561203 - RNA, 19 nt, Artificial Sequence
  Description of Artificial Sequence: Synthetic oligonucleotide
  Antisense strand to SEQ ID NO: 2561202
augucugcgcauuucuaga

SEQ ID NO: 2561204 - RNA, 19 nt, Artificial Sequence
  Description of Artificial Sequence: Synthetic oligonucleotide
  Sense strand starting at position 557 of SEQ ID NO: 1888848
ucacgaguuucguuugggu

SEQ ID NO: 2561205 - RNA, 19 nt, Artificial Sequence
  Description of Artificial Sequence: Synthetic oligonucleotide
  Antisense strand to SEQ ID NO: 2561204
acccaaacgaaacucguga

SEQ ID NO: 2561206 - RNA, 19 nt, Artificial Sequence
  Description of Artificial Sequence: Synthetic oligonucleotide
  Sense strand starting at position 559 of SEQ ID NO: 1888848
acgaguuucguuuggguca

SEQ ID NO: 2561207 - RNA, 19 nt, Artificial Sequence
  Description of Artificial Sequence: Synthetic oligonucleotide
  Antisense strand to SEQ ID NO: 2561206
ugacccaaacgaaacucgu

SEQ ID NO: 2561208 - RNA, 19 nt, Artificial Sequence
  Description of Artificial Sequence: Synthetic oligonucleotide
  Sense strand starting at position 560 of SEQ ID NO: 1888848
cgaguuucguuugggucau

SEQ ID NO: 2561209 - RNA, 19 nt, Artificial Sequence
  Description of Artificial Sequence: Synthetic oligonucleotide
  Antisense strand to SEQ ID NO: 2561208
augacccaaacgaaacucg

SEQ ID NO: 2561210 - RNA, 19 nt, Artificial Sequence
  Description of Artificial Sequence: Synthetic oligonucleotide
  Sense strand starting at position 246 of SEQ ID NO: 1888849
gccgucucuccgggugaca

SEQ ID NO: 2561211 - RNA, 19 nt, Artificial Sequence
  Description of Artificial Sequence: Synthetic oligonucleotide
  Antisense strand to SEQ ID NO: 2561210
ugucacccggagagacggc

SEQ ID NO: 2561212 - RNA, 19 nt, Artificial Sequence
  Description of Artificial Sequence: Synthetic oligonucleotide
  Sense strand starting at position 528 of SEQ ID NO: 1888849
uccagaaaugcgcagacau

SEQ ID NO: 2561213 - RNA, 19 nt, Artificial Sequence
  Description of Artificial Sequence: Synthetic oligonucleotide
  Antisense strand to SEQ ID NO: 2561212
augucugcgcauuucugga

SEQ ID NO: 2561214 - RNA, 19 nt, Artificial Sequence
  Description of Artificial Sequence: Synthetic oligonucleotide
  Sense strand starting at position 557 of SEQ ID NO: 1888849
ucacgaguuuccuuugggu

SEQ ID NO: 2561215 - RNA, 19 nt, Artificial Sequence
  Description of Artificial Sequence: Synthetic oligonucleotide
  Antisense strand to SEQ ID NO: 2561214
acccaaaggaaacucguga

SEQ ID NO: 2561216 - RNA, 19 nt, Artificial Sequence
  Description of Artificial Sequence: Synthetic oligonucleotide
  Sense strand starting at position 559 of SEQ ID NO: 1888849
acgaguuuccuuuggguca

SEQ ID NO: 2561217 - RNA, 19 nt, Artificial Sequence
  Description of Artificial Sequence: Synthetic oligonucleotide
  Antisense strand to SEQ ID NO: 2561216
ugacccaaaggaaacucgu

SEQ ID NO: 2561218 - RNA, 19 nt, Artificial Sequence
  Description of Artificial Sequence: Synthetic oligonucleotide
  Sense strand starting at position 306 of SEQ ID NO: 1888850
gcugguucugagcaaguca

SEQ ID NO: 2561219 - RNA, 19 nt, Artificial Sequence
  Description of Artificial Sequence: Synthetic oligonucleotide
  Antisense strand to SEQ ID NO: 2561218
ugacuugcucagaaccagc

SEQ ID NO: 2561220 - RNA, 19 nt, Artificial Sequence
  Description of Artificial Sequence: Synthetic oligonucleotide
  Sense strand starting at position 333 of SEQ ID NO: 1888850
ccgggaaaguccucagcau

SEQ ID NO: 2561221 - RNA, 19 nt, Artificial Sequence
  Description of Artificial Sequence: Synthetic oligonucleotide
  Antisense strand to SEQ ID NO: 2561220
augcugaggacuuucccgg

SEQ ID NO: 2561222 - RNA, 19 nt, Artificial Sequence
  Description of Artificial Sequence: Synthetic oligonucleotide
  Sense strand starting at position 334 of SEQ ID NO: 1888850
cgggaaaguccucagcaug

SEQ ID NO: 2561223 - RNA, 19 nt, Artificial Sequence
  Description of Artificial Sequence: Synthetic oligonucleotide
  Antisense strand to SEQ ID NO: 2561222
caugcugaggacuuucccg

SEQ ID NO: 2561224 - RNA, 19 nt, Artificial Sequence
  Description of Artificial Sequence: Synthetic oligonucleotide
  Sense strand starting at position 337 of SEQ ID NO: 1888850
gaaaguccucagcaugaug

SEQ ID NO: 2561225 - RNA, 19 nt, Artificial Sequence
  Description of Artificial Sequence: Synthetic oligonucleotide
  Antisense strand to SEQ ID NO: 2561224
caucaugcugaggacuuuc

SEQ ID NO: 2561226 - RNA, 19 nt, Artificial Sequence
  Description of Artificial Sequence: Synthetic oligonucleotide
  Sense strand starting at position 529 of SEQ ID NO: 1888850
uccagaaaugcgcagacau

SEQ ID NO: 2561227 - RNA, 19 nt, Artificial Sequence
  Description of Artificial Sequence: Synthetic oligonucleotide
  Antisense strand to SEQ ID NO: 2561226
augucugcgcauuucugga

SEQ ID NO: 2561228 - RNA, 19 nt, Artificial Sequence
  Description of Artificial Sequence: Synthetic oligonucleotide
  Sense strand starting at position 547 of SEQ ID NO: 1888850
uggaauuagggucacgagu

SEQ ID NO: 2561229 - RNA, 19 nt, Artificial Sequence
  Description of Artificial Sequence: Synthetic oligonucleotide
  Antisense strand to SEQ ID NO: 2561228
acucgugacccuaauucca

SEQ ID NO: 2561230 - RNA, 19 nt, Artificial Sequence
  Description of Artificial Sequence: Synthetic oligonucleotide
  Sense strand starting at position 558 of SEQ ID NO: 1888850
ucacgaguuuccuuugggu

SEQ ID NO: 2561231 - RNA, 19 nt, Artificial Sequence
  Description of Artificial Sequence: Synthetic oligonucleotide
  Antisense strand to SEQ ID NO: 2561230
acccaaaggaaacucguga

SEQ ID NO: 2561232 - RNA, 19 nt, Artificial Sequence
  Description of Artificial Sequence: Synthetic oligonucleotide
  Sense strand starting at position 560 of SEQ ID NO: 1888850
acgaguuuccuuuggguca

SEQ ID NO: 2561233 - RNA, 19 nt, Artificial Sequence
  Description of Artificial Sequence: Synthetic oligonucleotide
  Antisense strand to SEQ ID NO: 2561232
ugacccaaaggaaacucgu

SEQ ID NO: 2561234 - RNA, 19 nt, Artificial Sequence
  Description of Artificial Sequence: Synthetic oligonucleotide
  Sense strand starting at position 597 of SEQ ID NO: 1888850
gugggaugccuuuagcaac

SEQ ID NO: 2561235 - RNA, 19 nt, Artificial Sequence
  Description of Artificial Sequence: Synthetic oligonucleotide
  Antisense strand to SEQ ID NO: 2561234
guugcuaaaggcaucccac

SEQ ID NO: 2561236 - RNA, 19 nt, Artificial Sequence
  Description of Artificial Sequence: Synthetic oligonucleotide
  Sense strand starting at position 1985 of SEQ ID NO: 1888850
ucaccucguucugcaagaa

SEQ ID NO: 2561237 - RNA, 19 nt, Artificial Sequence
  Description of Artificial Sequence: Synthetic oligonucleotide
  Antisense strand to SEQ ID NO: 2561236
uucuugcagaacgagguga

SEQ ID NO: 2561238 - RNA, 19 nt, Artificial Sequence
  Description of Artificial Sequence: Synthetic oligonucleotide
  Sense strand starting at position 1986 of SEQ ID NO: 1888850
caccucguucugcaagaaa

SEQ ID NO: 2561239 - RNA, 19 nt, Artificial Sequence
  Description of Artificial Sequence: Synthetic oligonucleotide
  Antisense strand to SEQ ID NO: 2561238
uuucuugcagaacgaggug

SEQ ID NO: 2561240 - RNA, 19 nt, Artificial Sequence
  Description of Artificial Sequence: Synthetic oligonucleotide
  Sense strand starting at position 2090 of SEQ ID NO: 1888850
ucacguuaaccagaugacu

SEQ ID NO: 2561241 - RNA, 19 nt, Artificial Sequence
  Description of Artificial Sequence: Synthetic oligonucleotide
  Antisense strand to SEQ ID NO: 2561240
agucaucugguuaacguga

SEQ ID NO: 2561242 - RNA, 19 nt, Artificial Sequence
  Description of Artificial Sequence: Synthetic oligonucleotide
  Sense strand starting at position 2208 of SEQ ID NO: 1888850
aggaauuauuucguuggcu

SEQ ID NO: 2561243 - RNA, 19 nt, Artificial Sequence
  Description of Artificial Sequence: Synthetic oligonucleotide
  Antisense strand to SEQ ID NO: 2561242
agccaacgaaauaauuccu

SEQ ID NO: 2561244 - RNA, 19 nt, Artificial Sequence
  Description of Artificial Sequence: Synthetic oligonucleotide
  Sense strand starting at position 2209 of SEQ ID NO: 1888850
ggaauuauuucguuggcug

SEQ ID NO: 2561245 - RNA, 19 nt, Artificial Sequence
  Description of Artificial Sequence: Synthetic oligonucleotide
  Antisense strand to SEQ ID NO: 2561244
cagccaacgaaauaauucc

SEQ ID NO: 2561246 - RNA, 19 nt, Artificial Sequence
  Description of Artificial Sequence: Synthetic oligonucleotide
  Sense strand starting at position 2210 of SEQ ID NO: 1888850
gaauuauuucguuggcuga

SEQ ID NO: 2561247 - RNA, 19 nt, Artificial Sequence
  Description of Artificial Sequence: Synthetic oligonucleotide
  Antisense strand to SEQ ID NO: 2561246
ucagccaacgaaauaauuc

SEQ ID NO: 2561248 - RNA, 19 nt, Artificial Sequence
  Description of Artificial Sequence: Synthetic oligonucleotide
  Sense strand starting at position 2211 of SEQ ID NO: 1888850
aauuauuucguuggcugaa

SEQ ID NO: 2561249 - RNA, 19 nt, Artificial Sequence
  Description of Artificial Sequence: Synthetic oligonucleotide
  Antisense strand to SEQ ID NO: 2561248
uucagccaacgaaauaauu

SEQ ID NO: 2561250 - RNA, 19 nt, Artificial Sequence
  Description of Artificial Sequence: Synthetic oligonucleotide
  Sense strand starting at position 2275 of SEQ ID NO: 1888850
ggacauggcugucuucuaa

SEQ ID NO: 2561251 - RNA, 19 nt, Artificial Sequence
  Description of Artificial Sequence: Synthetic oligonucleotide
  Antisense strand to SEQ ID NO: 2561250
uuagaagacagccaugucc

SEQ ID NO: 2561252 - RNA, 19 nt, Artificial Sequence
  Description of Artificial Sequence: Synthetic oligonucleotide
  Sense strand starting at position 2464 of SEQ ID NO: 1888850
auauuccugugucuuugua

SEQ ID NO: 2561253 - RNA, 19 nt, Artificial Sequence
  Description of Artificial Sequence: Synthetic oligonucleotide
  Antisense strand to SEQ ID NO: 2561252
uacaaagacacaggaauau

SEQ ID NO: 2561254 - RNA, 19 nt, Artificial Sequence
  Description of Artificial Sequence: Synthetic oligonucleotide
  Sense strand starting at position 2579 of SEQ ID NO: 1888850
ugauaaagcuacucuugua

SEQ ID NO: 2561255 - RNA, 19 nt, Artificial Sequence
  Description of Artificial Sequence: Synthetic oligonucleotide
  Antisense strand to SEQ ID NO: 2561254
uacaagaguagcuuuauca

SEQ ID NO: 2561256 - RNA, 19 nt, Artificial Sequence
  Description of Artificial Sequence: Synthetic oligonucleotide
  Sense strand starting at position 2616 of SEQ ID NO: 1888850
gguguccgucgucuauaaa

SEQ ID NO: 2561257 - RNA, 19 nt, Artificial Sequence
  Description of Artificial Sequence: Synthetic oligonucleotide
  Antisense strand to SEQ ID NO: 2561256
uuuauagacgacggacacc

SEQ ID NO: 2561258 - RNA, 19 nt, Artificial Sequence
  Description of Artificial Sequence: Synthetic oligonucleotide
  Sense strand starting at position 2701 of SEQ ID NO: 1888850
auguauucguuccuuugaa

SEQ ID NO: 2561259 - RNA, 19 nt, Artificial Sequence
  Description of Artificial Sequence: Synthetic oligonucleotide
  Antisense strand to SEQ ID NO: 2561258
uucaaaggaacgaauacau

SEQ ID NO: 2561260 - RNA, 19 nt, Artificial Sequence
  Description of Artificial Sequence: Synthetic oligonucleotide
  Sense strand starting at position 2702 of SEQ ID NO: 1888850
uguauucguuccuuugaaa

SEQ ID NO: 2561261 - RNA, 19 nt, Artificial Sequence
  Description of Artificial Sequence: Synthetic oligonucleotide
  Antisense strand to SEQ ID NO: 2561260
uuucaaaggaacgaauaca

SEQ ID NO: 2561262 - RNA, 19 nt, Artificial Sequence
  Description of Artificial Sequence: Synthetic oligonucleotide
  Sense strand starting at position 2716 of SEQ ID NO: 1888850
ugaaauuugcgcuaugccu

SEQ ID NO: 2561263 - RNA, 19 nt, Artificial Sequence
  Description of Artificial Sequence: Synthetic oligonucleotide
  Antisense strand to SEQ ID NO: 2561262
aggcauagcgcaaauuuca

SEQ ID NO: 2561264 - RNA, 19 nt, Artificial Sequence
  Description of Artificial Sequence: Synthetic oligonucleotide
  Sense strand starting at position 2751 of SEQ ID NO: 1888850
accugcagagaucaucuau

SEQ ID NO: 2561265 - RNA, 19 nt, Artificial Sequence
  Description of Artificial Sequence: Synthetic oligonucleotide
  Antisense strand to SEQ ID NO: 2561264
auagaugaucucugcaggu

SEQ ID NO: 2561266 - RNA, 19 nt, Artificial Sequence
  Description of Artificial Sequence: Synthetic oligonucleotide
  Sense strand starting at position 2757 of SEQ ID NO: 1888850
agagaucaucuaugaugug

SEQ ID NO: 2561267 - RNA, 19 nt, Artificial Sequence
  Description of Artificial Sequence: Synthetic oligonucleotide
  Antisense strand to SEQ ID NO: 2561266
cacaucauagaugaucucu

SEQ ID NO: 2561268 - RNA, 19 nt, Artificial Sequence
  Description of Artificial Sequence: Synthetic oligonucleotide
  Sense strand starting at position 2786 of SEQ ID NO: 1888850
gggugacugcaaugcagau

SEQ ID NO: 2561269 - RNA, 19 nt, Artificial Sequence
  Description of Artificial Sequence: Synthetic oligonucleotide
  Antisense strand to SEQ ID NO: 2561268
aucugcauugcagucaccc

SEQ ID NO: 2561270 - RNA, 19 nt, Artificial Sequence
  Description of Artificial Sequence: Synthetic oligonucleotide
  Sense strand starting at position 2865 of SEQ ID NO: 1888850
guuccauucgcagagguau

SEQ ID NO: 2561271 - RNA, 19 nt, Artificial Sequence
  Description of Artificial Sequence: Synthetic oligonucleotide
  Antisense strand to SEQ ID NO: 2561270
auaccucugcgaauggaac

SEQ ID NO: 2561272 - RNA, 19 nt, Artificial Sequence
  Description of Artificial Sequence: Synthetic oligonucleotide
  Sense strand starting at position 2867 of SEQ ID NO: 1888850
uccauucgcagagguauau

SEQ ID NO: 2561273 - RNA, 19 nt, Artificial Sequence
  Description of Artificial Sequence: Synthetic oligonucleotide
  Antisense strand to SEQ ID NO: 2561272
auauaccucugcgaaugga

SEQ ID NO: 2561274 - RNA, 19 nt, Artificial Sequence
  Description of Artificial Sequence: Synthetic oligonucleotide
  Sense strand starting at position 2880 of SEQ ID NO: 1888850
guauaugcagucuggauca

SEQ ID NO: 2561275 - RNA, 19 nt, Artificial Sequence
  Description of Artificial Sequence: Synthetic oligonucleotide
  Antisense strand to SEQ ID NO: 2561274
ugauccagacugcauauac

SEQ ID NO: 2561276 - RNA, 19 nt, Artificial Sequence
  Description of Artificial Sequence: Synthetic oligonucleotide
  Sense strand starting at position 3259 of SEQ ID NO: 1888850
uuuaguuaaguaggugaaa

SEQ ID NO: 2561277 - RNA, 19 nt, Artificial Sequence
  Description of Artificial Sequence: Synthetic oligonucleotide
  Antisense strand to SEQ ID NO: 2561276
uuucaccuacuuaacuaaa

SEQ ID NO: 2561278 - RNA, 19 nt, Artificial Sequence
  Description of Artificial Sequence: Synthetic oligonucleotide
  Sense strand starting at position 3260 of SEQ ID NO: 1888850
uuaguuaaguaggugaaau

SEQ ID NO: 2561279 - RNA, 19 nt, Artificial Sequence
  Description of Artificial Sequence: Synthetic oligonucleotide
  Antisense strand to SEQ ID NO: 2561278
auuucaccuacuuaacuaa

SEQ ID NO: 2561280 - RNA, 19 nt, Artificial Sequence
  Description of Artificial Sequence: Synthetic oligonucleotide
  Sense strand starting at position 3346 of SEQ ID NO: 1888850
gcaggauggcguuccguuu

SEQ ID NO: 2561281 - RNA, 19 nt, Artificial Sequence
  Description of Artificial Sequence: Synthetic oligonucleotide
  Antisense strand to SEQ ID NO: 2561280
aaacggaacgccauccugc

SEQ ID NO: 2561282 - RNA, 19 nt, Artificial Sequence
  Description of Artificial Sequence: Synthetic oligonucleotide
  Sense strand starting at position 3358 of SEQ ID NO: 1888850
uccguuugagaacacuuaa

SEQ ID NO: 2561283 - RNA, 19 nt, Artificial Sequence
  Description of Artificial Sequence: Synthetic oligonucleotide
  Antisense strand to SEQ ID NO: 2561282
uuaaguguucucaaacgga

SEQ ID NO: 2561284 - RNA, 19 nt, Artificial Sequence
  Description of Artificial Sequence: Synthetic oligonucleotide
  Sense strand starting at position 3639 of SEQ ID NO: 1888850
uugucacugugaguugagu

SEQ ID NO: 2561285 - RNA, 19 nt, Artificial Sequence
  Description of Artificial Sequence: Synthetic oligonucleotide
  Antisense strand to SEQ ID NO: 2561284
acucaacucacagugacaa

SEQ ID NO: 2561286 - RNA, 19 nt, Artificial Sequence
  Description of Artificial Sequence: Synthetic oligonucleotide
  Sense strand starting at position 3648 of SEQ ID NO: 1888850
ugaguugagugccuccaaa

SEQ ID NO: 2561287 - RNA, 19 nt, Artificial Sequence
  Description of Artificial Sequence: Synthetic oligonucleotide
  Antisense strand to SEQ ID NO: 2561286
uuuggaggcacucaacuca

SEQ ID NO: 2561288 - RNA, 19 nt, Artificial Sequence
  Description of Artificial Sequence: Synthetic oligonucleotide
  Sense strand starting at position 3673 of SEQ ID NO: 1888850
ggacuuguaggguguucuu

SEQ ID NO: 2561289 - RNA, 19 nt, Artificial Sequence
  Description of Artificial Sequence: Synthetic oligonucleotide
  Antisense strand to SEQ ID NO: 2561288
aagaacacccuacaagucc

SEQ ID NO: 2561290 - RNA, 19 nt, Artificial Sequence
  Description of Artificial Sequence: Synthetic oligonucleotide
  Sense strand starting at position 3700 of SEQ ID NO: 1888850
cuauuucuauuucgacagu

SEQ ID NO: 2561291 - RNA, 19 nt, Artificial Sequence
  Description of Artificial Sequence: Synthetic oligonucleotide
  Antisense strand to SEQ ID NO: 2561290
acugucgaaauagaaauag

SEQ ID NO: 2561292 - RNA, 19 nt, Artificial Sequence
  Description of Artificial Sequence: Synthetic oligonucleotide
  Sense strand starting at position 3877 of SEQ ID NO: 1888850
cugguaugcuccucuuaac

SEQ ID NO: 2561293 - RNA, 19 nt, Artificial Sequence
  Description of Artificial Sequence: Synthetic oligonucleotide
  Antisense strand to SEQ ID NO: 2561292
guuaagaggagcauaccag

SEQ ID NO: 2561294 - RNA, 19 nt, Artificial Sequence
  Description of Artificial Sequence: Synthetic oligonucleotide
  Sense strand starting at position 3937 of SEQ ID NO: 1888850
ggaguuacggagcaugacu

SEQ ID NO: 2561295 - RNA, 19 nt, Artificial Sequence
  Description of Artificial Sequence: Synthetic oligonucleotide
  Antisense strand to SEQ ID NO: 2561294
agucaugcuccguaacucc

SEQ ID NO: 2561296 - RNA, 19 nt, Artificial Sequence
  Description of Artificial Sequence: Synthetic oligonucleotide
  Sense strand starting at position 3955 of SEQ ID NO: 1888850
uggugaccaguuugggauu

SEQ ID NO: 2561297 - RNA, 19 nt, Artificial Sequence
  Description of Artificial Sequence: Synthetic oligonucleotide
  Antisense strand to SEQ ID NO: 2561296
aaucccaaacuggucacca

SEQ ID NO: 2561298 - RNA, 19 nt, Artificial Sequence
  Description of Artificial Sequence: Synthetic oligonucleotide
  Sense strand starting at position 249 of SEQ ID NO: 1888851
gcagucucuccgggugaca

SEQ ID NO: 2561299 - RNA, 19 nt, Artificial Sequence
  Description of Artificial Sequence: Synthetic oligonucleotide
  Antisense strand to SEQ ID NO: 2561298
ugucacccggagagacugc

SEQ ID NO: 2561300 - RNA, 19 nt, Artificial Sequence
  Description of Artificial Sequence: Synthetic oligonucleotide
  Sense strand starting at position 528 of SEQ ID NO: 1888851
ucuagaaaugcgcagacau

SEQ ID NO: 2561301 - RNA, 19 nt, Artificial Sequence
  Description of Artificial Sequence: Synthetic oligonucleotide
  Antisense strand to SEQ ID NO: 2561300
augucugcgcauuucuaga

SEQ ID NO: 2561302 - RNA, 19 nt, Artificial Sequence
  Description of Artificial Sequence: Synthetic oligonucleotide
  Sense strand starting at position 557 of SEQ ID NO: 1888851
ucacgaguuucguuugggu

SEQ ID NO: 2561303 - RNA, 19 nt, Artificial Sequence
  Description of Artificial Sequence: Synthetic oligonucleotide
  Antisense strand to SEQ ID NO: 2561302
acccaaacgaaacucguga

SEQ ID NO: 2561304 - RNA, 19 nt, Artificial Sequence
  Description of Artificial Sequence: Synthetic oligonucleotide
  Sense strand starting at position 559 of SEQ ID NO: 1888851
acgaguuucguuuggguca

SEQ ID NO: 2561305 - RNA, 19 nt, Artificial Sequence
  Description of Artificial Sequence: Synthetic oligonucleotide
  Antisense strand to SEQ ID NO: 2561304
ugacccaaacgaaacucgu

SEQ ID NO: 2561306 - RNA, 19 nt, Artificial Sequence
  Description of Artificial Sequence: Synthetic oligonucleotide
  Sense strand starting at position 560 of SEQ ID NO: 1888851
cgaguuucguuugggucau

SEQ ID NO: 2561307 - RNA, 19 nt, Artificial Sequence
  Description of Artificial Sequence: Synthetic oligonucleotide
  Antisense strand to SEQ ID NO: 2561306
augacccaaacgaaacucg

SEQ ID NO: 2561308 - RNA, 19 nt, Artificial Sequence
  Description of Artificial Sequence: Synthetic oligonucleotide
  Sense strand starting at position 246 of SEQ ID NO: 1888852
gccgucucuccgggugaca

SEQ ID NO: 2561309 - RNA, 19 nt, Artificial Sequence
  Description of Artificial Sequence: Synthetic oligonucleotide
  Antisense strand to SEQ ID NO: 2561308
ugucacccggagagacggc

SEQ ID NO: 2561310 - RNA, 19 nt, Artificial Sequence
  Description of Artificial Sequence: Synthetic oligonucleotide
  Sense strand starting at position 528 of SEQ ID NO: 1888852
uccagaaaugcgcagacau

SEQ ID NO: 2561311 - RNA, 19 nt, Artificial Sequence
  Description of Artificial Sequence: Synthetic oligonucleotide
  Antisense strand to SEQ ID NO: 2561310
augucugcgcauuucugga

SEQ ID NO: 2561312 - RNA, 19 nt, Artificial Sequence
  Description of Artificial Sequence: Synthetic oligonucleotide
  Sense strand starting at position 557 of SEQ ID NO: 1888852
ucacgaguuuccuuugggu

SEQ ID NO: 2561313 - RNA, 19 nt, Artificial Sequence
  Description of Artificial Sequence: Synthetic oligonucleotide
  Antisense strand to SEQ ID NO: 2561312
acccaaaggaaacucguga

SEQ ID NO: 2561314 - RNA, 19 nt, Artificial Sequence
  Description of Artificial Sequence: Synthetic oligonucleotide
  Sense strand starting at position 559 of SEQ ID NO: 1888852
acgaguuuccuuuggguca

SEQ ID NO: 2561315 - RNA, 19 nt, Artificial Sequence
  Description of Artificial Sequence: Synthetic oligonucleotide
  Antisense strand to SEQ ID NO: 2561314
ugacccaaaggaaacucgu

SEQ ID NO: 2561316 - RNA, 19 nt, Artificial Sequence
  Description of Artificial Sequence: Synthetic oligonucleotide
  Sense strand starting at position 306 of SEQ ID NO: 1888853
gcugguucugagcaaguca

SEQ ID NO: 2561317 - RNA, 19 nt, Artificial Sequence
  Description of Artificial Sequence: Synthetic oligonucleotide
  Antisense strand to SEQ ID NO: 2561316
ugacuugcucagaaccagc

SEQ ID NO: 2561318 - RNA, 19 nt, Artificial Sequence
  Description of Artificial Sequence: Synthetic oligonucleotide
  Sense strand starting at position 333 of SEQ ID NO: 1888853
ccgggaaaguccucagcau

SEQ ID NO: 2561319 - RNA, 19 nt, Artificial Sequence
  Description of Artificial Sequence: Synthetic oligonucleotide
  Antisense strand to SEQ ID NO: 2561318
augcugaggacuuucccgg

SEQ ID NO: 2561320 - RNA, 19 nt, Artificial Sequence
  Description of Artificial Sequence: Synthetic oligonucleotide
  Sense strand starting at position 334 of SEQ ID NO: 1888853
cgggaaaguccucagcaug

SEQ ID NO: 2561321 - RNA, 19 nt, Artificial Sequence
  Description of Artificial Sequence: Synthetic oligonucleotide
  Antisense strand to SEQ ID NO: 2561320
caugcugaggacuuucccg

SEQ ID NO: 2561322 - RNA, 19 nt, Artificial Sequence
  Description of Artificial Sequence: Synthetic oligonucleotide
  Sense strand starting at position 337 of SEQ ID NO: 1888853
gaaaguccucagcaugaug

SEQ ID NO: 2561323 - RNA, 19 nt, Artificial Sequence
  Description of Artificial Sequence: Synthetic oligonucleotide
  Antisense strand to SEQ ID NO: 2561322
caucaugcugaggacuuuc

SEQ ID NO: 2561324 - RNA, 19 nt, Artificial Sequence
  Description of Artificial Sequence: Synthetic oligonucleotide
  Sense strand starting at position 529 of SEQ ID NO: 1888853
uccagaaaugcgcagacau

SEQ ID NO: 2561325 - RNA, 19 nt, Artificial Sequence
  Description of Artificial Sequence: Synthetic oligonucleotide
  Antisense strand to SEQ ID NO: 2561324
augucugcgcauuucugga

SEQ ID NO: 2561326 - RNA, 19 nt, Artificial Sequence
  Description of Artificial Sequence: Synthetic oligonucleotide
  Sense strand starting at position 547 of SEQ ID NO: 1888853
uggaauuagggucacgagu

SEQ ID NO: 2561327 - RNA, 19 nt, Artificial Sequence
  Description of Artificial Sequence: Synthetic oligonucleotide
  Antisense strand to SEQ ID NO: 2561326
acucgugacccuaauucca

SEQ ID NO: 2561328 - RNA, 19 nt, Artificial Sequence
  Description of Artificial Sequence: Synthetic oligonucleotide
  Sense strand starting at position 558 of SEQ ID NO: 1888853
ucacgaguuuccuuugggu

SEQ ID NO: 2561329 - RNA, 19 nt, Artificial Sequence
  Description of Artificial Sequence: Synthetic oligonucleotide
  Antisense strand to SEQ ID NO: 2561328
acccaaaggaaacucguga

SEQ ID NO: 2561330 - RNA, 19 nt, Artificial Sequence
  Description of Artificial Sequence: Synthetic oligonucleotide
  Sense strand starting at position 560 of SEQ ID NO: 1888853
acgaguuuccuuuggguca

SEQ ID NO: 2561331 - RNA, 19 nt, Artificial Sequence
  Description of Artificial Sequence: Synthetic oligonucleotide
  Antisense strand to SEQ ID NO: 2561330
ugacccaaaggaaacucgu

SEQ ID NO: 2561332 - RNA, 19 nt, Artificial Sequence
  Description of Artificial Sequence: Synthetic oligonucleotide
  Sense strand starting at position 597 of SEQ ID NO: 1888853
gugggaugccuuuagcaac

SEQ ID NO: 2561333 - RNA, 19 nt, Artificial Sequence
  Description of Artificial Sequence: Synthetic oligonucleotide
  Antisense strand to SEQ ID NO: 2561332
guugcuaaaggcaucccac

SEQ ID NO: 2561334 - RNA, 19 nt, Artificial Sequence
  Description of Artificial Sequence: Synthetic oligonucleotide
  Sense strand starting at position 1985 of SEQ ID NO: 1888853
ucaccucguucugcaagaa

SEQ ID NO: 2561335 - RNA, 19 nt, Artificial Sequence
  Description of Artificial Sequence: Synthetic oligonucleotide
  Antisense strand to SEQ ID NO: 2561334
uucuugcagaacgagguga

SEQ ID NO: 2561336 - RNA, 19 nt, Artificial Sequence
  Description of Artificial Sequence: Synthetic oligonucleotide
  Sense strand starting at position 1986 of SEQ ID NO: 1888853
caccucguucugcaagaaa

SEQ ID NO: 2561337 - RNA, 19 nt, Artificial Sequence
  Description of Artificial Sequence: Synthetic oligonucleotide
  Antisense strand to SEQ ID NO: 2561336
uuucuugcagaacgaggug

SEQ ID NO: 2561338 - RNA, 19 nt, Artificial Sequence
  Description of Artificial Sequence: Synthetic oligonucleotide
  Sense strand starting at position 2090 of SEQ ID NO: 1888853
ucacguuaaccagaugacu

SEQ ID NO: 2561339 - RNA, 19 nt, Artificial Sequence
  Description of Artificial Sequence: Synthetic oligonucleotide
  Antisense strand to SEQ ID NO: 2561338
agucaucugguuaacguga

SEQ ID NO: 2561340 - RNA, 19 nt, Artificial Sequence
  Description of Artificial Sequence: Synthetic oligonucleotide
  Sense strand starting at position 2208 of SEQ ID NO: 1888853
aggaauuauuucguuggcu

SEQ ID NO: 2561341 - RNA, 19 nt, Artificial Sequence
  Description of Artificial Sequence: Synthetic oligonucleotide
  Antisense strand to SEQ ID NO: 2561340
agccaacgaaauaauuccu

SEQ ID NO: 2561342 - RNA, 19 nt, Artificial Sequence
  Description of Artificial Sequence: Synthetic oligonucleotide
  Sense strand starting at position 2209 of SEQ ID NO: 1888853
ggaauuauuucguuggcug

SEQ ID NO: 2561343 - RNA, 19 nt, Artificial Sequence
  Description of Artificial Sequence: Synthetic oligonucleotide
  Antisense strand to SEQ ID NO: 2561342
cagccaacgaaauaauucc

SEQ ID NO: 2561344 - RNA, 19 nt, Artificial Sequence
  Description of Artificial Sequence: Synthetic oligonucleotide
  Sense strand starting at position 2210 of SEQ ID NO: 1888853
gaauuauuucguuggcuga

SEQ ID NO: 2561345 - RNA, 19 nt, Artificial Sequence
  Description of Artificial Sequence: Synthetic oligonucleotide
  Antisense strand to SEQ ID NO: 2561344
ucagccaacgaaauaauuc

SEQ ID NO: 2561346 - RNA, 19 nt, Artificial Sequence
  Description of Artificial Sequence: Synthetic oligonucleotide
  Sense strand starting at position 2211 of SEQ ID NO: 1888853
aauuauuucguuggcugaa

SEQ ID NO: 2561347 - RNA, 19 nt, Artificial Sequence
  Description of Artificial Sequence: Synthetic oligonucleotide
  Antisense strand to SEQ ID NO: 2561346
uucagccaacgaaauaauu

SEQ ID NO: 2561348 - RNA, 19 nt, Artificial Sequence
  Description of Artificial Sequence: Synthetic oligonucleotide
  Sense strand starting at position 2275 of SEQ ID NO: 1888853
ggacauggcugucuucuaa

SEQ ID NO: 2561349 - RNA, 19 nt, Artificial Sequence
  Description of Artificial Sequence: Synthetic oligonucleotide
  Antisense strand to SEQ ID NO: 2561348
uuagaagacagccaugucc

SEQ ID NO: 2561350 - RNA, 19 nt, Artificial Sequence
  Description of Artificial Sequence: Synthetic oligonucleotide
  Sense strand starting at position 2464 of SEQ ID NO: 1888853
auauuccugugucuuugua

SEQ ID NO: 2561351 - RNA, 19 nt, Artificial Sequence
  Description of Artificial Sequence: Synthetic oligonucleotide
  Antisense strand to SEQ ID NO: 2561350
uacaaagacacaggaauau

SEQ ID NO: 2561352 - RNA, 19 nt, Artificial Sequence
  Description of Artificial Sequence: Synthetic oligonucleotide
  Sense strand starting at position 2579 of SEQ ID NO: 1888853
ugauaaagcuacucuugua

SEQ ID NO: 2561353 - RNA, 19 nt, Artificial Sequence
  Description of Artificial Sequence: Synthetic oligonucleotide
  Antisense strand to SEQ ID NO: 2561352
uacaagaguagcuuuauca

SEQ ID NO: 2561354 - RNA, 19 nt, Artificial Sequence
  Description of Artificial Sequence: Synthetic oligonucleotide
  Sense strand starting at position 2616 of SEQ ID NO: 1888853
gguguccgucgucuauaaa

SEQ ID NO: 2561355 - RNA, 19 nt, Artificial Sequence
  Description of Artificial Sequence: Synthetic oligonucleotide
  Antisense strand to SEQ ID NO: 2561354
uuuauagacgacggacacc

SEQ ID NO: 2561356 - RNA, 19 nt, Artificial Sequence
  Description of Artificial Sequence: Synthetic oligonucleotide
  Sense strand starting at position 2701 of SEQ ID NO: 1888853
auguauucguuccuuugaa

SEQ ID NO: 2561357 - RNA, 19 nt, Artificial Sequence
  Description of Artificial Sequence: Synthetic oligonucleotide
  Antisense strand to SEQ ID NO: 2561356
uucaaaggaacgaauacau

SEQ ID NO: 2561358 - RNA, 19 nt, Artificial Sequence
  Description of Artificial Sequence: Synthetic oligonucleotide
  Sense strand starting at position 2702 of SEQ ID NO: 1888853
uguauucguuccuuugaaa

SEQ ID NO: 2561359 - RNA, 19 nt, Artificial Sequence
  Description of Artificial Sequence: Synthetic oligonucleotide
  Antisense strand to SEQ ID NO: 2561358
uuucaaaggaacgaauaca

SEQ ID NO: 2561360 - RNA, 19 nt, Artificial Sequence
  Description of Artificial Sequence: Synthetic oligonucleotide
  Sense strand starting at position 2716 of SEQ ID NO: 1888853
ugaaauuugcgcuaugccu

SEQ ID NO: 2561361 - RNA, 19 nt, Artificial Sequence
  Description of Artificial Sequence: Synthetic oligonucleotide
  Antisense strand to SEQ ID NO: 2561360
aggcauagcgcaaauuuca

SEQ ID NO: 2561362 - RNA, 19 nt, Artificial Sequence
  Description of Artificial Sequence: Synthetic oligonucleotide
  Sense strand starting at position 2751 of SEQ ID NO: 1888853
accugcagagaucaucuau

SEQ ID NO: 2561363 - RNA, 19 nt, Artificial Sequence
  Description of Artificial Sequence: Synthetic oligonucleotide
  Antisense strand to SEQ ID NO: 2561362
auagaugaucucugcaggu

SEQ ID NO: 2561364 - RNA, 19 nt, Artificial Sequence
  Description of Artificial Sequence: Synthetic oligonucleotide
  Sense strand starting at position 2757 of SEQ ID NO: 1888853
agagaucaucuaugaugug

SEQ ID NO: 2561365 - RNA, 19 nt, Artificial Sequence
  Description of Artificial Sequence: Synthetic oligonucleotide
  Antisense strand to SEQ ID NO: 2561364
cacaucauagaugaucucu

SEQ ID NO: 2561366 - RNA, 19 nt, Artificial Sequence
  Description of Artificial Sequence: Synthetic oligonucleotide
  Sense strand starting at position 2786 of SEQ ID NO: 1888853
gggugacugcaaugcagau

SEQ ID NO: 2561367 - RNA, 19 nt, Artificial Sequence
  Description of Artificial Sequence: Synthetic oligonucleotide
  Antisense strand to SEQ ID NO: 2561366
aucugcauugcagucaccc

SEQ ID NO: 2561368 - RNA, 19 nt, Artificial Sequence
  Description of Artificial Sequence: Synthetic oligonucleotide
  Sense strand starting at position 2865 of SEQ ID NO: 1888853
guuccauucgcagagguau

SEQ ID NO: 2561369 - RNA, 19 nt, Artificial Sequence
  Description of Artificial Sequence: Synthetic oligonucleotide
  Antisense strand to SEQ ID NO: 2561368
auaccucugcgaauggaac

SEQ ID NO: 2561370 - RNA, 19 nt, Artificial Sequence
  Description of Artificial Sequence: Synthetic oligonucleotide
  Sense strand starting at position 2867 of SEQ ID NO: 1888853
uccauucgcagagguauau

SEQ ID NO: 2561371 - RNA, 19 nt, Artificial Sequence
  Description of Artificial Sequence: Synthetic oligonucleotide
  Antisense strand to SEQ ID NO: 2561370
auauaccucugcgaaugga

SEQ ID NO: 2561372 - RNA, 19 nt, Artificial Sequence
  Description of Artificial Sequence: Synthetic oligonucleotide
  Sense strand starting at position 2880 of SEQ ID NO: 1888853
guauaugcagucuggauca

SEQ ID NO: 2561373 - RNA, 19 nt, Artificial Sequence
  Description of Artificial Sequence: Synthetic oligonucleotide
  Antisense strand to SEQ ID NO: 2561372
ugauccagacugcauauac

SEQ ID NO: 2561374 - RNA, 19 nt, Artificial Sequence
  Description of Artificial Sequence: Synthetic oligonucleotide
  Sense strand starting at position 3259 of SEQ ID NO: 1888853
uuuaguuaaguaggugaaa

SEQ ID NO: 2561375 - RNA, 19 nt, Artificial Sequence
  Description of Artificial Sequence: Synthetic oligonucleotide
  Antisense strand to SEQ ID NO: 2561374
uuucaccuacuuaacuaaa

SEQ ID NO: 2561376 - RNA, 19 nt, Artificial Sequence
  Description of Artificial Sequence: Synthetic oligonucleotide
  Sense strand starting at position 3260 of SEQ ID NO: 1888853
uuaguuaaguaggugaaau

SEQ ID NO: 2561377 - RNA, 19 nt, Artificial Sequence
  Description of Artificial Sequence: Synthetic oligonucleotide
  Antisense strand to SEQ ID NO: 2561376
auuucaccuacuuaacuaa

SEQ ID NO: 2561378 - RNA, 19 nt, Artificial Sequence
  Description of Artificial Sequence: Synthetic oligonucleotide
  Sense strand starting at position 3346 of SEQ ID NO: 1888853
gcaggauggcguuccguuu

SEQ ID NO: 2561379 - RNA, 19 nt, Artificial Sequence
  Description of Artificial Sequence: Synthetic oligonucleotide
  Antisense strand to SEQ ID NO: 2561378
aaacggaacgccauccugc

SEQ ID NO: 2561380 - RNA, 19 nt, Artificial Sequence
  Description of Artificial Sequence: Synthetic oligonucleotide
  Sense strand starting at position 3358 of SEQ ID NO: 1888853
uccguuugagaacacuuaa

SEQ ID NO: 2561381 - RNA, 19 nt, Artificial Sequence
  Description of Artificial Sequence: Synthetic oligonucleotide
  Antisense strand to SEQ ID NO: 2561380
uuaaguguucucaaacgga

SEQ ID NO: 2561382 - RNA, 19 nt, Artificial Sequence
  Description of Artificial Sequence: Synthetic oligonucleotide
  Sense strand starting at position 3639 of SEQ ID NO: 1888853
uugucacugugaguugagu

SEQ ID NO: 2561383 - RNA, 19 nt, Artificial Sequence
  Description of Artificial Sequence: Synthetic oligonucleotide
  Antisense strand to SEQ ID NO: 2561382
acucaacucacagugacaa

SEQ ID NO: 2561384 - RNA, 19 nt, Artificial Sequence
  Description of Artificial Sequence: Synthetic oligonucleotide
  Sense strand starting at position 3648 of SEQ ID NO: 1888853
ugaguugagugccuccaaa

SEQ ID NO: 2561385 - RNA, 19 nt, Artificial Sequence
  Description of Artificial Sequence: Synthetic oligonucleotide
  Antisense strand to SEQ ID NO: 2561384
uuuggaggcacucaacuca

SEQ ID NO: 2561386 - RNA, 19 nt, Artificial Sequence
  Description of Artificial Sequence: Synthetic oligonucleotide
  Sense strand starting at position 3673 of SEQ ID NO: 1888853
ggacuuguaggguguucuu

SEQ ID NO: 2561387 - RNA, 19 nt, Artificial Sequence
  Description of Artificial Sequence: Synthetic oligonucleotide
  Antisense strand to SEQ ID NO: 2561386
aagaacacccuacaagucc

SEQ ID NO: 2561388 - RNA, 19 nt, Artificial Sequence
  Description of Artificial Sequence: Synthetic oligonucleotide
  Sense strand starting at position 3700 of SEQ ID NO: 1888853
cuauuucuauuucgacagu

SEQ ID NO: 2561389 - RNA, 19 nt, Artificial Sequence
  Description of Artificial Sequence: Synthetic oligonucleotide
  Antisense strand to SEQ ID NO: 2561388
acugucgaaauagaaauag

SEQ ID NO: 2561390 - RNA, 19 nt, Artificial Sequence
  Description of Artificial Sequence: Synthetic oligonucleotide
  Sense strand starting at position 3877 of SEQ ID NO: 1888853
cugguaugcuccucuuaac

SEQ ID NO: 2561391 - RNA, 19 nt, Artificial Sequence
  Description of Artificial Sequence: Synthetic oligonucleotide
  Antisense strand to SEQ ID NO: 2561390
guuaagaggagcauaccag

SEQ ID NO: 2561392 - RNA, 19 nt, Artificial Sequence
  Description of Artificial Sequence: Synthetic oligonucleotide
  Sense strand starting at position 3937 of SEQ ID NO: 1888853
ggaguuacggagcaugacu

SEQ ID NO: 2561393 - RNA, 19 nt, Artificial Sequence
  Description of Artificial Sequence: Synthetic oligonucleotide
  Antisense strand to SEQ ID NO: 2561392
agucaugcuccguaacucc

SEQ ID NO: 2561394 - RNA, 19 nt, Artificial Sequence
  Description of Artificial Sequence: Synthetic oligonucleotide
  Sense strand starting at position 3955 of SEQ ID NO: 1888853
uggugaccaguuugggauu

SEQ ID NO: 2561395 - RNA, 19 nt, Artificial Sequence
  Description of Artificial Sequence: Synthetic oligonucleotide
  Antisense strand to SEQ ID NO: 2561394
aaucccaaacuggucacca

SEQ ID NO: 2561396 - RNA, 19 nt, Artificial Sequence
  Description of Artificial Sequence: Synthetic oligonucleotide
  Sense strand starting at position 249 of SEQ ID NO: 1888854
gcagucucuccgggugaca

SEQ ID NO: 2561397 - RNA, 19 nt, Artificial Sequence
  Description of Artificial Sequence: Synthetic oligonucleotide
  Antisense strand to SEQ ID NO: 2561396
ugucacccggagagacugc

SEQ ID NO: 2561398 - RNA, 19 nt, Artificial Sequence
  Description of Artificial Sequence: Synthetic oligonucleotide
  Sense strand starting at position 528 of SEQ ID NO: 1888854
ucuagaaaugcgcagacau

SEQ ID NO: 2561399 - RNA, 19 nt, Artificial Sequence
  Description of Artificial Sequence: Synthetic oligonucleotide
  Antisense strand to SEQ ID NO: 2561398
augucugcgcauuucuaga

SEQ ID NO: 2561400 - RNA, 19 nt, Artificial Sequence
  Description of Artificial Sequence: Synthetic oligonucleotide
  Sense strand starting at position 557 of SEQ ID NO: 1888854
ucacgaguuucguuugggu

SEQ ID NO: 2561401 - RNA, 19 nt, Artificial Sequence
  Description of Artificial Sequence: Synthetic oligonucleotide
  Antisense strand to SEQ ID NO: 2561400
acccaaacgaaacucguga

SEQ ID NO: 2561402 - RNA, 19 nt, Artificial Sequence
  Description of Artificial Sequence: Synthetic oligonucleotide
  Sense strand starting at position 559 of SEQ ID NO: 1888854
acgaguuucguuuggguca

SEQ ID NO: 2561403 - RNA, 19 nt, Artificial Sequence
  Description of Artificial Sequence: Synthetic oligonucleotide
  Antisense strand to SEQ ID NO: 2561402
ugacccaaacgaaacucgu

SEQ ID NO: 2561404 - RNA, 19 nt, Artificial Sequence
  Description of Artificial Sequence: Synthetic oligonucleotide
  Sense strand starting at position 560 of SEQ ID NO: 1888854
cgaguuucguuugggucau

SEQ ID NO: 2561405 - RNA, 19 nt, Artificial Sequence
  Description of Artificial Sequence: Synthetic oligonucleotide
  Antisense strand to SEQ ID NO: 2561404
augacccaaacgaaacucg

SEQ ID NO: 2561406 - RNA, 19 nt, Artificial Sequence
  Description of Artificial Sequence: Synthetic oligonucleotide
  Sense strand starting at position 246 of SEQ ID NO: 1888855
gccgucucuccgggugaca

SEQ ID NO: 2561407 - RNA, 19 nt, Artificial Sequence
  Description of Artificial Sequence: Synthetic oligonucleotide
  Antisense strand to SEQ ID NO: 2561406
ugucacccggagagacggc

SEQ ID NO: 2561408 - RNA, 19 nt, Artificial Sequence
  Description of Artificial Sequence: Synthetic oligonucleotide
  Sense strand starting at position 528 of SEQ ID NO: 1888855
uccagaaaugcgcagacau

SEQ ID NO: 2561409 - RNA, 19 nt, Artificial Sequence
  Description of Artificial Sequence: Synthetic oligonucleotide
  Antisense strand to SEQ ID NO: 2561408
augucugcgcauuucugga

SEQ ID NO: 2561410 - RNA, 19 nt, Artificial Sequence
  Description of Artificial Sequence: Synthetic oligonucleotide
  Sense strand starting at position 557 of SEQ ID NO: 1888855
ucacgaguuuccuuugggu

SEQ ID NO: 2561411 - RNA, 19 nt, Artificial Sequence
  Description of Artificial Sequence: Synthetic oligonucleotide
  Antisense strand to SEQ ID NO: 2561410
acccaaaggaaacucguga

SEQ ID NO: 2561412 - RNA, 19 nt, Artificial Sequence
  Description of Artificial Sequence: Synthetic oligonucleotide
  Sense strand starting at position 559 of SEQ ID NO: 1888855
acgaguuuccuuuggguca

SEQ ID NO: 2561413 - RNA, 19 nt, Artificial Sequence
  Description of Artificial Sequence: Synthetic oligonucleotide
  Antisense strand to SEQ ID NO: 2561412
ugacccaaaggaaacucgu

SEQ ID NO: 2561414 - RNA, 19 nt, Artificial Sequence
  Description of Artificial Sequence: Synthetic oligonucleotide
  Sense strand starting at position 306 of SEQ ID NO: 1888856
gcugguucugagcaaguca

SEQ ID NO: 2561415 - RNA, 19 nt, Artificial Sequence
  Description of Artificial Sequence: Synthetic oligonucleotide
  Antisense strand to SEQ ID NO: 2561414
ugacuugcucagaaccagc

SEQ ID NO: 2561416 - RNA, 19 nt, Artificial Sequence
  Description of Artificial Sequence: Synthetic oligonucleotide
  Sense strand starting at position 333 of SEQ ID NO: 1888856
ccgggaaaguccucagcau

SEQ ID NO: 2561417 - RNA, 19 nt, Artificial Sequence
  Description of Artificial Sequence: Synthetic oligonucleotide
  Antisense strand to SEQ ID NO: 2561416
augcugaggacuuucccgg

SEQ ID NO: 2561418 - RNA, 19 nt, Artificial Sequence
  Description of Artificial Sequence: Synthetic oligonucleotide
  Sense strand starting at position 334 of SEQ ID NO: 1888856
cgggaaaguccucagcaug

SEQ ID NO: 2561419 - RNA, 19 nt, Artificial Sequence
  Description of Artificial Sequence: Synthetic oligonucleotide
  Antisense strand to SEQ ID NO: 2561418
caugcugaggacuuucccg

SEQ ID NO: 2561420 - RNA, 19 nt, Artificial Sequence
  Description of Artificial Sequence: Synthetic oligonucleotide
  Sense strand starting at position 337 of SEQ ID NO: 1888856
gaaaguccucagcaugaug

SEQ ID NO: 2561421 - RNA, 19 nt, Artificial Sequence
  Description of Artificial Sequence: Synthetic oligonucleotide
  Antisense strand to SEQ ID NO: 2561420
caucaugcugaggacuuuc

SEQ ID NO: 2561422 - RNA, 19 nt, Artificial Sequence
  Description of Artificial Sequence: Synthetic oligonucleotide
  Sense strand starting at position 529 of SEQ ID NO: 1888856
uccagaaaugcgcagacau

SEQ ID NO: 2561423 - RNA, 19 nt, Artificial Sequence
  Description of Artificial Sequence: Synthetic oligonucleotide
  Antisense strand to SEQ ID NO: 2561422
augucugcgcauuucugga

SEQ ID NO: 2561424 - RNA, 19 nt, Artificial Sequence
  Description of Artificial Sequence: Synthetic oligonucleotide
  Sense strand starting at position 547 of SEQ ID NO: 1888856
uggaauuagggucacgagu

SEQ ID NO: 2561425 - RNA, 19 nt, Artificial Sequence
  Description of Artificial Sequence: Synthetic oligonucleotide
  Antisense strand to SEQ ID NO: 2561424
acucgugacccuaauucca

SEQ ID NO: 2561426 - RNA, 19 nt, Artificial Sequence
  Description of Artificial Sequence: Synthetic oligonucleotide
  Sense strand starting at position 558 of SEQ ID NO: 1888856
ucacgaguuuccuuugggu

SEQ ID NO: 2561427 - RNA, 19 nt, Artificial Sequence
  Description of Artificial Sequence: Synthetic oligonucleotide
  Antisense strand to SEQ ID NO: 2561426
acccaaaggaaacucguga

SEQ ID NO: 2561428 - RNA, 19 nt, Artificial Sequence
  Description of Artificial Sequence: Synthetic oligonucleotide
  Sense strand starting at position 560 of SEQ ID NO: 1888856
acgaguuuccuuuggguca

SEQ ID NO: 2561429 - RNA, 19 nt, Artificial Sequence
  Description of Artificial Sequence: Synthetic oligonucleotide
  Antisense strand to SEQ ID NO: 2561428
ugacccaaaggaaacucgu

SEQ ID NO: 2561430 - RNA, 19 nt, Artificial Sequence
  Description of Artificial Sequence: Synthetic oligonucleotide
  Sense strand starting at position 597 of SEQ ID NO: 1888856
gugggaugccuuuagcaac

SEQ ID NO: 2561431 - RNA, 19 nt, Artificial Sequence
  Description of Artificial Sequence: Synthetic oligonucleotide
  Antisense strand to SEQ ID NO: 2561430
guugcuaaaggcaucccac

SEQ ID NO: 2561432 - RNA, 19 nt, Artificial Sequence
  Description of Artificial Sequence: Synthetic oligonucleotide
  Sense strand starting at position 1985 of SEQ ID NO: 1888856
ucaccucguucugcaagaa

SEQ ID NO: 2561433 - RNA, 19 nt, Artificial Sequence
  Description of Artificial Sequence: Synthetic oligonucleotide
  Antisense strand to SEQ ID NO: 2561432
uucuugcagaacgagguga

SEQ ID NO: 2561434 - RNA, 19 nt, Artificial Sequence
  Description of Artificial Sequence: Synthetic oligonucleotide
  Sense strand starting at position 1986 of SEQ ID NO: 1888856
caccucguucugcaagaaa

SEQ ID NO: 2561435 - RNA, 19 nt, Artificial Sequence
  Description of Artificial Sequence: Synthetic oligonucleotide
  Antisense strand to SEQ ID NO: 2561434
uuucuugcagaacgaggug

SEQ ID NO: 2561436 - RNA, 19 nt, Artificial Sequence
  Description of Artificial Sequence: Synthetic oligonucleotide
  Sense strand starting at position 2090 of SEQ ID NO: 1888856
ucacguuaaccagaugacu

SEQ ID NO: 2561437 - RNA, 19 nt, Artificial Sequence
  Description of Artificial Sequence: Synthetic oligonucleotide
  Antisense strand to SEQ ID NO: 2561436
agucaucugguuaacguga

SEQ ID NO: 2561438 - RNA, 19 nt, Artificial Sequence
  Description of Artificial Sequence: Synthetic oligonucleotide
  Sense strand starting at position 2208 of SEQ ID NO: 1888856
aggaauuauuucguuggcu

SEQ ID NO: 2561439 - RNA, 19 nt, Artificial Sequence
  Description of Artificial Sequence: Synthetic oligonucleotide
  Antisense strand to SEQ ID NO: 2561438
agccaacgaaauaauuccu

SEQ ID NO: 2561440 - RNA, 19 nt, Artificial Sequence
  Description of Artificial Sequence: Synthetic oligonucleotide
  Sense strand starting at position 2209 of SEQ ID NO: 1888856
ggaauuauuucguuggcug

SEQ ID NO: 2561441 - RNA, 19 nt, Artificial Sequence
  Description of Artificial Sequence: Synthetic oligonucleotide
  Antisense strand to SEQ ID NO: 2561440
cagccaacgaaauaauucc

SEQ ID NO: 2561442 - RNA, 19 nt, Artificial Sequence
  Description of Artificial Sequence: Synthetic oligonucleotide
  Sense strand starting at position 2210 of SEQ ID NO: 1888856
gaauuauuucguuggcuga

SEQ ID NO: 2561443 - RNA, 19 nt, Artificial Sequence
  Description of Artificial Sequence: Synthetic oligonucleotide
  Antisense strand to SEQ ID NO: 2561442
ucagccaacgaaauaauuc

SEQ ID NO: 2561444 - RNA, 19 nt, Artificial Sequence
  Description of Artificial Sequence: Synthetic oligonucleotide
  Sense strand starting at position 2211 of SEQ ID NO: 1888856
aauuauuucguuggcugaa

SEQ ID NO: 2561445 - RNA, 19 nt, Artificial Sequence
  Description of Artificial Sequence: Synthetic oligonucleotide
  Antisense strand to SEQ ID NO: 2561444
uucagccaacgaaauaauu

SEQ ID NO: 2561446 - RNA, 19 nt, Artificial Sequence
  Description of Artificial Sequence: Synthetic oligonucleotide
  Sense strand starting at position 2275 of SEQ ID NO: 1888856
ggacauggcugucuucuaa

SEQ ID NO: 2561447 - RNA, 19 nt, Artificial Sequence
  Description of Artificial Sequence: Synthetic oligonucleotide
  Antisense strand to SEQ ID NO: 2561446
uuagaagacagccaugucc

SEQ ID NO: 2561448 - RNA, 19 nt, Artificial Sequence
  Description of Artificial Sequence: Synthetic oligonucleotide
  Sense strand starting at position 2464 of SEQ ID NO: 1888856
auauuccugugucuuugua

SEQ ID NO: 2561449 - RNA, 19 nt, Artificial Sequence
  Description of Artificial Sequence: Synthetic oligonucleotide
  Antisense strand to SEQ ID NO: 2561448
uacaaagacacaggaauau

SEQ ID NO: 2561450 - RNA, 19 nt, Artificial Sequence
  Description of Artificial Sequence: Synthetic oligonucleotide
  Sense strand starting at position 2579 of SEQ ID NO: 1888856
ugauaaagcuacucuugua

SEQ ID NO: 2561451 - RNA, 19 nt, Artificial Sequence
  Description of Artificial Sequence: Synthetic oligonucleotide
  Antisense strand to SEQ ID NO: 2561450
uacaagaguagcuuuauca

SEQ ID NO: 2561452 - RNA, 19 nt, Artificial Sequence
  Description of Artificial Sequence: Synthetic oligonucleotide
  Sense strand starting at position 2616 of SEQ ID NO: 1888856
gguguccgucgucuauaaa

SEQ ID NO: 2561453 - RNA, 19 nt, Artificial Sequence
  Description of Artificial Sequence: Synthetic oligonucleotide
  Antisense strand to SEQ ID NO: 2561452
uuuauagacgacggacacc

SEQ ID NO: 2561454 - RNA, 19 nt, Artificial Sequence
  Description of Artificial Sequence: Synthetic oligonucleotide
  Sense strand starting at position 2701 of SEQ ID NO: 1888856
auguauucguuccuuugaa

SEQ ID NO: 2561455 - RNA, 19 nt, Artificial Sequence
  Description of Artificial Sequence: Synthetic oligonucleotide
  Antisense strand to SEQ ID NO: 2561454
uucaaaggaacgaauacau

SEQ ID NO: 2561456 - RNA, 19 nt, Artificial Sequence
  Description of Artificial Sequence: Synthetic oligonucleotide
  Sense strand starting at position 2702 of SEQ ID NO: 1888856
uguauucguuccuuugaaa

SEQ ID NO: 2561457 - RNA, 19 nt, Artificial Sequence
  Description of Artificial Sequence: Synthetic oligonucleotide
  Antisense strand to SEQ ID NO: 2561456
uuucaaaggaacgaauaca

SEQ ID NO: 2561458 - RNA, 19 nt, Artificial Sequence
  Description of Artificial Sequence: Synthetic oligonucleotide
  Sense strand starting at position 2716 of SEQ ID NO: 1888856
ugaaauuugcgcuaugccu

SEQ ID NO: 2561459 - RNA, 19 nt, Artificial Sequence
  Description of Artificial Sequence: Synthetic oligonucleotide
  Antisense strand to SEQ ID NO: 2561458
aggcauagcgcaaauuuca

SEQ ID NO: 2561460 - RNA, 19 nt, Artificial Sequence
  Description of Artificial Sequence: Synthetic oligonucleotide
  Sense strand starting at position 2751 of SEQ ID NO: 1888856
accugcagagaucaucuau

SEQ ID NO: 2561461 - RNA, 19 nt, Artificial Sequence
  Description of Artificial Sequence: Synthetic oligonucleotide
  Antisense strand to SEQ ID NO: 2561460
auagaugaucucugcaggu

SEQ ID NO: 2561462 - RNA, 19 nt, Artificial Sequence
  Description of Artificial Sequence: Synthetic oligonucleotide
  Sense strand starting at position 2757 of SEQ ID NO: 1888856
agagaucaucuaugaugug

SEQ ID NO: 2561463 - RNA, 19 nt, Artificial Sequence
  Description of Artificial Sequence: Synthetic oligonucleotide
  Antisense strand to SEQ ID NO: 2561462
cacaucauagaugaucucu

SEQ ID NO: 2561464 - RNA, 19 nt, Artificial Sequence
  Description of Artificial Sequence: Synthetic oligonucleotide
  Sense strand starting at position 2786 of SEQ ID NO: 1888856
gggugacugcaaugcagau

SEQ ID NO: 2561465 - RNA, 19 nt, Artificial Sequence
  Description of Artificial Sequence: Synthetic oligonucleotide
  Antisense strand to SEQ ID NO: 2561464
aucugcauugcagucaccc

SEQ ID NO: 2561466 - RNA, 19 nt, Artificial Sequence
  Description of Artificial Sequence: Synthetic oligonucleotide
  Sense strand starting at position 2865 of SEQ ID NO: 1888856
guuccauucgcagagguau

SEQ ID NO: 2561467 - RNA, 19 nt, Artificial Sequence
  Description of Artificial Sequence: Synthetic oligonucleotide
  Antisense strand to SEQ ID NO: 2561466
auaccucugcgaauggaac

SEQ ID NO: 2561468 - RNA, 19 nt, Artificial Sequence
  Description of Artificial Sequence: Synthetic oligonucleotide
  Sense strand starting at position 2867 of SEQ ID NO: 1888856
uccauucgcagagguauau

SEQ ID NO: 2561469 - RNA, 19 nt, Artificial Sequence
  Description of Artificial Sequence: Synthetic oligonucleotide
  Antisense strand to SEQ ID NO: 2561468
auauaccucugcgaaugga

SEQ ID NO: 2561470 - RNA, 19 nt, Artificial Sequence
  Description of Artificial Sequence: Synthetic oligonucleotide
  Sense strand starting at position 2880 of SEQ ID NO: 1888856
guauaugcagucuggauca

SEQ ID NO: 2561471 - RNA, 19 nt, Artificial Sequence
  Description of Artificial Sequence: Synthetic oligonucleotide
  Antisense strand to SEQ ID NO: 2561470
ugauccagacugcauauac

SEQ ID NO: 2561472 - RNA, 19 nt, Artificial Sequence
  Description of Artificial Sequence: Synthetic oligonucleotide
  Sense strand starting at position 3259 of SEQ ID NO: 1888856
uuuaguuaaguaggugaaa

SEQ ID NO: 2561473 - RNA, 19 nt, Artificial Sequence
  Description of Artificial Sequence: Synthetic oligonucleotide
  Antisense strand to SEQ ID NO: 2561472
uuucaccuacuuaacuaaa

SEQ ID NO: 2561474 - RNA, 19 nt, Artificial Sequence
  Description of Artificial Sequence: Synthetic oligonucleotide
  Sense strand starting at position 3260 of SEQ ID NO: 1888856
uuaguuaaguaggugaaau

SEQ ID NO: 2561475 - RNA, 19 nt, Artificial Sequence
  Description of Artificial Sequence: Synthetic oligonucleotide
  Antisense strand to SEQ ID NO: 2561474
auuucaccuacuuaacuaa

SEQ ID NO: 2561476 - RNA, 19 nt, Artificial Sequence
  Description of Artificial Sequence: Synthetic oligonucleotide
  Sense strand starting at position 3346 of SEQ ID NO: 1888856
gcaggauggcguuccguuu

SEQ ID NO: 2561477 - RNA, 19 nt, Artificial Sequence
  Description of Artificial Sequence: Synthetic oligonucleotide
  Antisense strand to SEQ ID NO: 2561476
aaacggaacgccauccugc

SEQ ID NO: 2561478 - RNA, 19 nt, Artificial Sequence
  Description of Artificial Sequence: Synthetic oligonucleotide
  Sense strand starting at position 3358 of SEQ ID NO: 1888856
uccguuugagaacacuuaa

SEQ ID NO: 2561479 - RNA, 19 nt, Artificial Sequence
  Description of Artificial Sequence: Synthetic oligonucleotide
  Antisense strand to SEQ ID NO: 2561478
uuaaguguucucaaacgga

SEQ ID NO: 2561480 - RNA, 19 nt, Artificial Sequence
  Description of Artificial Sequence: Synthetic oligonucleotide
  Sense strand starting at position 3639 of SEQ ID NO: 1888856
uugucacugugaguugagu

SEQ ID NO: 2561481 - RNA, 19 nt, Artificial Sequence
  Description of Artificial Sequence: Synthetic oligonucleotide
  Antisense strand to SEQ ID NO: 2561480
acucaacucacagugacaa

SEQ ID NO: 2561482 - RNA, 19 nt, Artificial Sequence
  Description of Artificial Sequence: Synthetic oligonucleotide
  Sense strand starting at position 3648 of SEQ ID NO: 1888856
ugaguugagugccuccaaa

SEQ ID NO: 2561483 - RNA, 19 nt, Artificial Sequence
  Description of Artificial Sequence: Synthetic oligonucleotide
  Antisense strand to SEQ ID NO: 2561482
uuuggaggcacucaacuca

SEQ ID NO: 2561484 - RNA, 19 nt, Artificial Sequence
  Description of Artificial Sequence: Synthetic oligonucleotide
  Sense strand starting at position 3673 of SEQ ID NO: 1888856
ggacuuguaggguguucuu

SEQ ID NO: 2561485 - RNA, 19 nt, Artificial Sequence
  Description of Artificial Sequence: Synthetic oligonucleotide
  Antisense strand to SEQ ID NO: 2561484
aagaacacccuacaagucc

SEQ ID NO: 2561486 - RNA, 19 nt, Artificial Sequence
  Description of Artificial Sequence: Synthetic oligonucleotide
  Sense strand starting at position 3700 of SEQ ID NO: 1888856
cuauuucuauuucgacagu

SEQ ID NO: 2561487 - RNA, 19 nt, Artificial Sequence
  Description of Artificial Sequence: Synthetic oligonucleotide
  Antisense strand to SEQ ID NO: 2561486
acugucgaaauagaaauag

SEQ ID NO: 2561488 - RNA, 19 nt, Artificial Sequence
  Description of Artificial Sequence: Synthetic oligonucleotide
  Sense strand starting at position 3877 of SEQ ID NO: 1888856
cugguaugcuccucuuaac

SEQ ID NO: 2561489 - RNA, 19 nt, Artificial Sequence
  Description of Artificial Sequence: Synthetic oligonucleotide
  Antisense strand to SEQ ID NO: 2561488
guuaagaggagcauaccag

SEQ ID NO: 2561490 - RNA, 19 nt, Artificial Sequence
  Description of Artificial Sequence: Synthetic oligonucleotide
  Sense strand starting at position 3937 of SEQ ID NO: 1888856
ggaguuacggagcaugacu

SEQ ID NO: 2561491 - RNA, 19 nt, Artificial Sequence
  Description of Artificial Sequence: Synthetic oligonucleotide
  Antisense strand to SEQ ID NO: 2561490
agucaugcuccguaacucc

SEQ ID NO: 2561492 - RNA, 19 nt, Artificial Sequence
  Description of Artificial Sequence: Synthetic oligonucleotide
  Sense strand starting at position 3955 of SEQ ID NO: 1888856
uggugaccaguuugggauu

SEQ ID NO: 2561493 - RNA, 19 nt, Artificial Sequence
  Description of Artificial Sequence: Synthetic oligonucleotide
  Antisense strand to SEQ ID NO: 2561492
aaucccaaacuggucacca

SEQ ID NO: 2561494 - RNA, 19 nt, Artificial Sequence
  Description of Artificial Sequence: Synthetic oligonucleotide
  Sense strand starting at position 44 of SEQ ID NO: 1888857
gguacaacuuuaguuaaug

SEQ ID NO: 2561495 - RNA, 19 nt, Artificial Sequence
  Description of Artificial Sequence: Synthetic oligonucleotide
  Antisense strand to SEQ ID NO: 2561494
cauuaacuaaaguuguacc

SEQ ID NO: 2561496 - RNA, 19 nt, Artificial Sequence
  Description of Artificial Sequence: Synthetic oligonucleotide
  Sense strand starting at position 45 of SEQ ID NO: 1888857
guacaacuuuaguuaauga

SEQ ID NO: 2561497 - RNA, 19 nt, Artificial Sequence
  Description of Artificial Sequence: Synthetic oligonucleotide
  Antisense strand to SEQ ID NO: 2561496
ucauuaacuaaaguuguac

SEQ ID NO: 2561498 - RNA, 19 nt, Artificial Sequence
  Description of Artificial Sequence: Synthetic oligonucleotide
  Sense strand starting at position 165 of SEQ ID NO: 1888857
acuggugaugguuacguaa

SEQ ID NO: 2561499 - RNA, 19 nt, Artificial Sequence
  Description of Artificial Sequence: Synthetic oligonucleotide
  Antisense strand to SEQ ID NO: 2561498
uuacguaaccaucaccagu

SEQ ID NO: 2561500 - RNA, 19 nt, Artificial Sequence
  Description of Artificial Sequence: Synthetic oligonucleotide
  Sense strand starting at position 291 of SEQ ID NO: 1888857
caccauuacuagguaggua

SEQ ID NO: 2561501 - RNA, 19 nt, Artificial Sequence
  Description of Artificial Sequence: Synthetic oligonucleotide
  Antisense strand to SEQ ID NO: 2561500
uaccuaccuaguaauggug

SEQ ID NO: 2561502 - RNA, 19 nt, Artificial Sequence
  Description of Artificial Sequence: Synthetic oligonucleotide
  Sense strand starting at position 538 of SEQ ID NO: 1888857
uuaucauaaguuggaucaa

SEQ ID NO: 2561503 - RNA, 19 nt, Artificial Sequence
  Description of Artificial Sequence: Synthetic oligonucleotide
  Antisense strand to SEQ ID NO: 2561502
uugauccaacuuaugauaa

SEQ ID NO: 2561504 - RNA, 19 nt, Artificial Sequence
  Description of Artificial Sequence: Synthetic oligonucleotide
  Sense strand starting at position 667 of SEQ ID NO: 1888857
auaagugcugaaggaguau

SEQ ID NO: 2561505 - RNA, 19 nt, Artificial Sequence
  Description of Artificial Sequence: Synthetic oligonucleotide
  Antisense strand to SEQ ID NO: 2561504
auacuccuucagcacuuau

SEQ ID NO: 2561506 - RNA, 19 nt, Artificial Sequence
  Description of Artificial Sequence: Synthetic oligonucleotide
  Sense strand starting at position 879 of SEQ ID NO: 1888857
agcaaacauuuauauggau

SEQ ID NO: 2561507 - RNA, 19 nt, Artificial Sequence
  Description of Artificial Sequence: Synthetic oligonucleotide
  Antisense strand to SEQ ID NO: 2561506
auccauauaaauguuugcu

SEQ ID NO: 2561508 - RNA, 19 nt, Artificial Sequence
  Description of Artificial Sequence: Synthetic oligonucleotide
  Sense strand starting at position 943 of SEQ ID NO: 1888857
gugaacaaagccugcauaa

SEQ ID NO: 2561509 - RNA, 19 nt, Artificial Sequence
  Description of Artificial Sequence: Synthetic oligonucleotide
  Antisense strand to SEQ ID NO: 2561508
uuaugcaggcuuuguucac

SEQ ID NO: 2561510 - RNA, 19 nt, Artificial Sequence
  Description of Artificial Sequence: Synthetic oligonucleotide
  Sense strand starting at position 1042 of SEQ ID NO: 1888857
uaauaagguucugucugau

SEQ ID NO: 2561511 - RNA, 19 nt, Artificial Sequence
  Description of Artificial Sequence: Synthetic oligonucleotide
  Antisense strand to SEQ ID NO: 2561510
aucagacagaaccuuauua

SEQ ID NO: 2561512 - RNA, 19 nt, Artificial Sequence
  Description of Artificial Sequence: Synthetic oligonucleotide
  Sense strand starting at position 1045 of SEQ ID NO: 1888857
uaagguucugucugauaaa

SEQ ID NO: 2561513 - RNA, 19 nt, Artificial Sequence
  Description of Artificial Sequence: Synthetic oligonucleotide
  Antisense strand to SEQ ID NO: 2561512
uuuaucagacagaaccuua

SEQ ID NO: 2561514 - RNA, 19 nt, Artificial Sequence
  Description of Artificial Sequence: Synthetic oligonucleotide
  Sense strand starting at position 1063 of SEQ ID NO: 1888857
auggcaaagucaguaagaa

SEQ ID NO: 2561515 - RNA, 19 nt, Artificial Sequence
  Description of Artificial Sequence: Synthetic oligonucleotide
  Antisense strand to SEQ ID NO: 2561514
uucuuacugacuuugccau

SEQ ID NO: 2561516 - RNA, 19 nt, Artificial Sequence
  Description of Artificial Sequence: Synthetic oligonucleotide
  Sense strand starting at position 1119 of SEQ ID NO: 1888857
gagucaaagugaucugcau

SEQ ID NO: 2561517 - RNA, 19 nt, Artificial Sequence
  Description of Artificial Sequence: Synthetic oligonucleotide
  Antisense strand to SEQ ID NO: 2561516
augcagaucacuuugacuc

SEQ ID NO: 2561518 - RNA, 19 nt, Artificial Sequence
  Description of Artificial Sequence: Synthetic oligonucleotide
  Sense strand starting at position 1282 of SEQ ID NO: 1888857
augcuaagaucuuugaucu

SEQ ID NO: 2561519 - RNA, 19 nt, Artificial Sequence
  Description of Artificial Sequence: Synthetic oligonucleotide
  Antisense strand to SEQ ID NO: 2561518
agaucaaagaucuuagcau

SEQ ID NO: 2561520 - RNA, 19 nt, Artificial Sequence
  Description of Artificial Sequence: Synthetic oligonucleotide
  Sense strand starting at position 1283 of SEQ ID NO: 1888857
ugcuaagaucuuugaucuu

SEQ ID NO: 2561521 - RNA, 19 nt, Artificial Sequence
  Description of Artificial Sequence: Synthetic oligonucleotide
  Antisense strand to SEQ ID NO: 2561520
aagaucaaagaucuuagca

SEQ ID NO: 2561522 - RNA, 19 nt, Artificial Sequence
  Description of Artificial Sequence: Synthetic oligonucleotide
  Sense strand starting at position 1408 of SEQ ID NO: 1888857
uuaauaacuuaggcuagaa

SEQ ID NO: 2561523 - RNA, 19 nt, Artificial Sequence
  Description of Artificial Sequence: Synthetic oligonucleotide
  Antisense strand to SEQ ID NO: 2561522
uucuagccuaaguuauuaa

SEQ ID NO: 2561524 - RNA, 19 nt, Artificial Sequence
  Description of Artificial Sequence: Synthetic oligonucleotide
  Sense strand starting at position 1477 of SEQ ID NO: 1888857
ggauacgcugccuauaaau

SEQ ID NO: 2561525 - RNA, 19 nt, Artificial Sequence
  Description of Artificial Sequence: Synthetic oligonucleotide
  Antisense strand to SEQ ID NO: 2561524
auuuauaggcagcguaucc

SEQ ID NO: 2561526 - RNA, 19 nt, Artificial Sequence
  Description of Artificial Sequence: Synthetic oligonucleotide
  Sense strand starting at position 1479 of SEQ ID NO: 1888857
auacgcugccuauaaauua

SEQ ID NO: 2561527 - RNA, 19 nt, Artificial Sequence
  Description of Artificial Sequence: Synthetic oligonucleotide
  Antisense strand to SEQ ID NO: 2561526
uaauuuauaggcagcguau

SEQ ID NO: 2561528 - RNA, 19 nt, Artificial Sequence
  Description of Artificial Sequence: Synthetic oligonucleotide
  Sense strand starting at position 1571 of SEQ ID NO: 1888857
caauguaaugugcaaauga

SEQ ID NO: 2561529 - RNA, 19 nt, Artificial Sequence
  Description of Artificial Sequence: Synthetic oligonucleotide
  Antisense strand to SEQ ID NO: 2561528
ucauuugcacauuacauug

SEQ ID NO: 2561530 - RNA, 19 nt, Artificial Sequence
  Description of Artificial Sequence: Synthetic oligonucleotide
  Sense strand starting at position 1919 of SEQ ID NO: 1888857
aggauuguauccuccacau

SEQ ID NO: 2561531 - RNA, 19 nt, Artificial Sequence
  Description of Artificial Sequence: Synthetic oligonucleotide
  Antisense strand to SEQ ID NO: 2561530
auguggaggauacaauccu

SEQ ID NO: 2561532 - RNA, 19 nt, Artificial Sequence
  Description of Artificial Sequence: Synthetic oligonucleotide
  Sense strand starting at position 2021 of SEQ ID NO: 1888857
gaaacacaauguguugaau

SEQ ID NO: 2561533 - RNA, 19 nt, Artificial Sequence
  Description of Artificial Sequence: Synthetic oligonucleotide
  Antisense strand to SEQ ID NO: 2561532
auucaacacauuguguuuc

SEQ ID NO: 2561534 - RNA, 19 nt, Artificial Sequence
  Description of Artificial Sequence: Synthetic oligonucleotide
  Sense strand starting at position 2027 of SEQ ID NO: 1888857
caauguguugaauauguua

SEQ ID NO: 2561535 - RNA, 19 nt, Artificial Sequence
  Description of Artificial Sequence: Synthetic oligonucleotide
  Antisense strand to SEQ ID NO: 2561534
uaacauauucaacacauug

SEQ ID NO: 2561536 - RNA, 19 nt, Artificial Sequence
  Description of Artificial Sequence: Synthetic oligonucleotide
  Sense strand starting at position 2030 of SEQ ID NO: 1888857
uguguugaauauguuauga

SEQ ID NO: 2561537 - RNA, 19 nt, Artificial Sequence
  Description of Artificial Sequence: Synthetic oligonucleotide
  Antisense strand to SEQ ID NO: 2561536
ucauaacauauucaacaca

SEQ ID NO: 2561538 - RNA, 19 nt, Artificial Sequence
  Description of Artificial Sequence: Synthetic oligonucleotide
  Sense strand starting at position 2105 of SEQ ID NO: 1888857
gccgcaauauuucuaauca

SEQ ID NO: 2561539 - RNA, 19 nt, Artificial Sequence
  Description of Artificial Sequence: Synthetic oligonucleotide
  Antisense strand to SEQ ID NO: 2561538
ugauuagaaauauugcggc

SEQ ID NO: 2561540 - RNA, 19 nt, Artificial Sequence
  Description of Artificial Sequence: Synthetic oligonucleotide
  Sense strand starting at position 2278 of SEQ ID NO: 1888857
uuggcuauuaggugacuaa

SEQ ID NO: 2561541 - RNA, 19 nt, Artificial Sequence
  Description of Artificial Sequence: Synthetic oligonucleotide
  Antisense strand to SEQ ID NO: 2561540
uuagucaccuaauagccaa

SEQ ID NO: 2561542 - RNA, 19 nt, Artificial Sequence
  Description of Artificial Sequence: Synthetic oligonucleotide
  Sense strand starting at position 2282 of SEQ ID NO: 1888857
cuauuaggugacuaaguuu

SEQ ID NO: 2561543 - RNA, 19 nt, Artificial Sequence
  Description of Artificial Sequence: Synthetic oligonucleotide
  Antisense strand to SEQ ID NO: 2561542
aaacuuagucaccuaauag

SEQ ID NO: 2561544 - RNA, 19 nt, Artificial Sequence
  Description of Artificial Sequence: Synthetic oligonucleotide
  Sense strand starting at position 2400 of SEQ ID NO: 1888857
uuggaauuauaugcagaga

SEQ ID NO: 2561545 - RNA, 19 nt, Artificial Sequence
  Description of Artificial Sequence: Synthetic oligonucleotide
  Antisense strand to SEQ ID NO: 2561544
ucucugcauauaauuccaa

SEQ ID NO: 2561546 - RNA, 19 nt, Artificial Sequence
  Description of Artificial Sequence: Synthetic oligonucleotide
  Sense strand starting at position 2449 of SEQ ID NO: 1888857
ucuaacagucuaggaaauu

SEQ ID NO: 2561547 - RNA, 19 nt, Artificial Sequence
  Description of Artificial Sequence: Synthetic oligonucleotide
  Antisense strand to SEQ ID NO: 2561546
aauuuccuagacuguuaga

SEQ ID NO: 2561548 - RNA, 19 nt, Artificial Sequence
  Description of Artificial Sequence: Synthetic oligonucleotide
  Sense strand starting at position 2450 of SEQ ID NO: 1888857
cuaacagucuaggaaauuu

SEQ ID NO: 2561549 - RNA, 19 nt, Artificial Sequence
  Description of Artificial Sequence: Synthetic oligonucleotide
  Antisense strand to SEQ ID NO: 2561548
aaauuuccuagacuguuag

SEQ ID NO: 2561550 - RNA, 19 nt, Artificial Sequence
  Description of Artificial Sequence: Synthetic oligonucleotide
  Sense strand starting at position 2501 of SEQ ID NO: 1888857
uacuuagaauuguugaagu

SEQ ID NO: 2561551 - RNA, 19 nt, Artificial Sequence
  Description of Artificial Sequence: Synthetic oligonucleotide
  Antisense strand to SEQ ID NO: 2561550
acuucaacaauucuaagua

SEQ ID NO: 2561552 - RNA, 19 nt, Artificial Sequence
  Description of Artificial Sequence: Synthetic oligonucleotide
  Sense strand starting at position 2547 of SEQ ID NO: 1888857
ccuggaaauuaugugaaau

SEQ ID NO: 2561553 - RNA, 19 nt, Artificial Sequence
  Description of Artificial Sequence: Synthetic oligonucleotide
  Antisense strand to SEQ ID NO: 2561552
auuucacauaauuuccagg

SEQ ID NO: 2561554 - RNA, 19 nt, Artificial Sequence
  Description of Artificial Sequence: Synthetic oligonucleotide
  Sense strand starting at position 2592 of SEQ ID NO: 1888857
ccaguuagcugaucacaag

SEQ ID NO: 2561555 - RNA, 19 nt, Artificial Sequence
  Description of Artificial Sequence: Synthetic oligonucleotide
  Antisense strand to SEQ ID NO: 2561554
cuugugaucagcuaacugg

SEQ ID NO: 2561556 - RNA, 19 nt, Artificial Sequence
  Description of Artificial Sequence: Synthetic oligonucleotide
  Sense strand starting at position 2593 of SEQ ID NO: 1888857
caguuagcugaucacaaga

SEQ ID NO: 2561557 - RNA, 19 nt, Artificial Sequence
  Description of Artificial Sequence: Synthetic oligonucleotide
  Antisense strand to SEQ ID NO: 2561556
ucuugugaucagcuaacug

SEQ ID NO: 2561558 - RNA, 19 nt, Artificial Sequence
  Description of Artificial Sequence: Synthetic oligonucleotide
  Sense strand starting at position 2881 of SEQ ID NO: 1888857
gcaaauuuaaguugugagu

SEQ ID NO: 2561559 - RNA, 19 nt, Artificial Sequence
  Description of Artificial Sequence: Synthetic oligonucleotide
  Antisense strand to SEQ ID NO: 2561558
acucacaacuuaaauuugc

SEQ ID NO: 2561560 - RNA, 19 nt, Artificial Sequence
  Description of Artificial Sequence: Synthetic oligonucleotide
  Sense strand starting at position 2916 of SEQ ID NO: 1888857
ggaauagaauuuggaagca

SEQ ID NO: 2561561 - RNA, 19 nt, Artificial Sequence
  Description of Artificial Sequence: Synthetic oligonucleotide
  Antisense strand to SEQ ID NO: 2561560
ugcuuccaaauucuauucc

SEQ ID NO: 2561562 - RNA, 19 nt, Artificial Sequence
  Description of Artificial Sequence: Synthetic oligonucleotide
  Sense strand starting at position 2926 of SEQ ID NO: 1888857
uuggaagcauaguuaguaa

SEQ ID NO: 2561563 - RNA, 19 nt, Artificial Sequence
  Description of Artificial Sequence: Synthetic oligonucleotide
  Antisense strand to SEQ ID NO: 2561562
uuacuaacuaugcuuccaa

SEQ ID NO: 2561564 - RNA, 19 nt, Artificial Sequence
  Description of Artificial Sequence: Synthetic oligonucleotide
  Sense strand starting at position 2929 of SEQ ID NO: 1888857
gaagcauaguuaguaaaca

SEQ ID NO: 2561565 - RNA, 19 nt, Artificial Sequence
  Description of Artificial Sequence: Synthetic oligonucleotide
  Antisense strand to SEQ ID NO: 2561564
uguuuacuaacuaugcuuc

SEQ ID NO: 2561566 - RNA, 19 nt, Artificial Sequence
  Description of Artificial Sequence: Synthetic oligonucleotide
  Sense strand starting at position 3252 of SEQ ID NO: 1888857
auaucuaaguagucucuua

SEQ ID NO: 2561567 - RNA, 19 nt, Artificial Sequence
  Description of Artificial Sequence: Synthetic oligonucleotide
  Antisense strand to SEQ ID NO: 2561566
uaagagacuacuuagauau

SEQ ID NO: 2561568 - RNA, 19 nt, Artificial Sequence
  Description of Artificial Sequence: Synthetic oligonucleotide
  Sense strand starting at position 3340 of SEQ ID NO: 1888857
ccaaauuuaucugggaaca

SEQ ID NO: 2561569 - RNA, 19 nt, Artificial Sequence
  Description of Artificial Sequence: Synthetic oligonucleotide
  Antisense strand to SEQ ID NO: 2561568
uguucccagauaaauuugg

SEQ ID NO: 2561570 - RNA, 19 nt, Artificial Sequence
  Description of Artificial Sequence: Synthetic oligonucleotide
  Sense strand starting at position 3518 of SEQ ID NO: 1888857
ucugucuuugaacaaguca

SEQ ID NO: 2561571 - RNA, 19 nt, Artificial Sequence
  Description of Artificial Sequence: Synthetic oligonucleotide
  Antisense strand to SEQ ID NO: 2561570
ugacuuguucaaagacaga

SEQ ID NO: 2561572 - RNA, 19 nt, Artificial Sequence
  Description of Artificial Sequence: Synthetic oligonucleotide
  Sense strand starting at position 3649 of SEQ ID NO: 1888857
gcaagaagugagcaaauau

SEQ ID NO: 2561573 - RNA, 19 nt, Artificial Sequence
  Description of Artificial Sequence: Synthetic oligonucleotide
  Antisense strand to SEQ ID NO: 2561572
auauuugcucacuucuugc

SEQ ID NO: 2561574 - RNA, 19 nt, Artificial Sequence
  Description of Artificial Sequence: Synthetic oligonucleotide
  Sense strand starting at position 213 of SEQ ID NO: 1888858
gguugucauaauugggagu

SEQ ID NO: 2561575 - RNA, 19 nt, Artificial Sequence
  Description of Artificial Sequence: Synthetic oligonucleotide
  Antisense strand to SEQ ID NO: 2561574
acucccaauuaugacaacc

SEQ ID NO: 2561576 - RNA, 19 nt, Artificial Sequence
  Description of Artificial Sequence: Synthetic oligonucleotide
  Sense strand starting at position 214 of SEQ ID NO: 1888858
guugucauaauugggaguu

SEQ ID NO: 2561577 - RNA, 19 nt, Artificial Sequence
  Description of Artificial Sequence: Synthetic oligonucleotide
  Antisense strand to SEQ ID NO: 2561576
aacucccaauuaugacaac

SEQ ID NO: 2561578 - RNA, 19 nt, Artificial Sequence
  Description of Artificial Sequence: Synthetic oligonucleotide
  Sense strand starting at position 226 of SEQ ID NO: 1888858
gggaguugaggaugcuauu

SEQ ID NO: 2561579 - RNA, 19 nt, Artificial Sequence
  Description of Artificial Sequence: Synthetic oligonucleotide
  Antisense strand to SEQ ID NO: 2561578
aauagcauccucaacuccc

SEQ ID NO: 2561580 - RNA, 19 nt, Artificial Sequence
  Description of Artificial Sequence: Synthetic oligonucleotide
  Sense strand starting at position 338 of SEQ ID NO: 1888858
agugccaguacuggagaaa

SEQ ID NO: 2561581 - RNA, 19 nt, Artificial Sequence
  Description of Artificial Sequence: Synthetic oligonucleotide
  Antisense strand to SEQ ID NO: 2561580
uuucuccaguacuggcacu

SEQ ID NO: 2561582 - RNA, 19 nt, Artificial Sequence
  Description of Artificial Sequence: Synthetic oligonucleotide
  Sense strand starting at position 380 of SEQ ID NO: 1888858
uuuguuagccucuggaaac

SEQ ID NO: 2561583 - RNA, 19 nt, Artificial Sequence
  Description of Artificial Sequence: Synthetic oligonucleotide
  Antisense strand to SEQ ID NO: 2561582
guuuccagaggcuaacaaa

SEQ ID NO: 2561584 - RNA, 19 nt, Artificial Sequence
  Description of Artificial Sequence: Synthetic oligonucleotide
  Sense strand starting at position 409 of SEQ ID NO: 1888858
gaacauugccuagggcaca

SEQ ID NO: 2561585 - RNA, 19 nt, Artificial Sequence
  Description of Artificial Sequence: Synthetic oligonucleotide
  Antisense strand to SEQ ID NO: 2561584
ugugcccuaggcaauguuc

SEQ ID NO: 2561586 - RNA, 19 nt, Artificial Sequence
  Description of Artificial Sequence: Synthetic oligonucleotide
  Sense strand starting at position 471 of SEQ ID NO: 1888858
cugucuuucuccuugaguu

SEQ ID NO: 2561587 - RNA, 19 nt, Artificial Sequence
  Description of Artificial Sequence: Synthetic oligonucleotide
  Antisense strand to SEQ ID NO: 2561586
aacucaaggagaaagacag

SEQ ID NO: 2561588 - RNA, 19 nt, Artificial Sequence
  Description of Artificial Sequence: Synthetic oligonucleotide
  Sense strand starting at position 472 of SEQ ID NO: 1888858
ugucuuucuccuugaguuu

SEQ ID NO: 2561589 - RNA, 19 nt, Artificial Sequence
  Description of Artificial Sequence: Synthetic oligonucleotide
  Antisense strand to SEQ ID NO: 2561588
aaacucaaggagaaagaca

SEQ ID NO: 2561590 - RNA, 19 nt, Artificial Sequence
  Description of Artificial Sequence: Synthetic oligonucleotide
  Sense strand starting at position 524 of SEQ ID NO: 1888858
uacugaucuugugcucagu

SEQ ID NO: 2561591 - RNA, 19 nt, Artificial Sequence
  Description of Artificial Sequence: Synthetic oligonucleotide
  Antisense strand to SEQ ID NO: 2561590
acugagcacaagaucagua

SEQ ID NO: 2561592 - RNA, 19 nt, Artificial Sequence
  Description of Artificial Sequence: Synthetic oligonucleotide
  Sense strand starting at position 535 of SEQ ID NO: 1888858
ugcucagucucuucuagua

SEQ ID NO: 2561593 - RNA, 19 nt, Artificial Sequence
  Description of Artificial Sequence: Synthetic oligonucleotide
  Antisense strand to SEQ ID NO: 2561592
uacuagaagagacugagca

SEQ ID NO: 2561594 - RNA, 19 nt, Artificial Sequence
  Description of Artificial Sequence: Synthetic oligonucleotide
  Sense strand starting at position 598 of SEQ ID NO: 1888858
cagguacuaucagaguaag

SEQ ID NO: 2561595 - RNA, 19 nt, Artificial Sequence
  Description of Artificial Sequence: Synthetic oligonucleotide
  Antisense strand to SEQ ID NO: 2561594
cuuacucugauaguaccug

SEQ ID NO: 2561596 - RNA, 19 nt, Artificial Sequence
  Description of Artificial Sequence: Synthetic oligonucleotide
  Sense strand starting at position 679 of SEQ ID NO: 1888858
cccauaacuccugguagua

SEQ ID NO: 2561597 - RNA, 19 nt, Artificial Sequence
  Description of Artificial Sequence: Synthetic oligonucleotide
  Antisense strand to SEQ ID NO: 2561596
uacuaccaggaguuauggg

SEQ ID NO: 2561598 - RNA, 19 nt, Artificial Sequence
  Description of Artificial Sequence: Synthetic oligonucleotide
  Sense strand starting at position 776 of SEQ ID NO: 1888858
aggauaaauuaccaauuag

SEQ ID NO: 2561599 - RNA, 19 nt, Artificial Sequence
  Description of Artificial Sequence: Synthetic oligonucleotide
  Antisense strand to SEQ ID NO: 2561598
cuaauugguaauuuauccu

SEQ ID NO: 2561600 - RNA, 19 nt, Artificial Sequence
  Description of Artificial Sequence: Synthetic oligonucleotide
  Sense strand starting at position 835 of SEQ ID NO: 1888858
ccacaaaugugacagauuc

SEQ ID NO: 2561601 - RNA, 19 nt, Artificial Sequence
  Description of Artificial Sequence: Synthetic oligonucleotide
  Antisense strand to SEQ ID NO: 2561600
gaaucugucacauuugugg

SEQ ID NO: 2561602 - RNA, 19 nt, Artificial Sequence
  Description of Artificial Sequence: Synthetic oligonucleotide
  Sense strand starting at position 855 of SEQ ID NO: 1888858
ugaaacauuugcugaacau

SEQ ID NO: 2561603 - RNA, 19 nt, Artificial Sequence
  Description of Artificial Sequence: Synthetic oligonucleotide
  Antisense strand to SEQ ID NO: 2561602
auguucagcaaauguuuca

SEQ ID NO: 2561604 - RNA, 19 nt, Artificial Sequence
  Description of Artificial Sequence: Synthetic oligonucleotide
  Sense strand starting at position 877 of SEQ ID NO: 1888858
ccauguacagagcgcuaua

SEQ ID NO: 2561605 - RNA, 19 nt, Artificial Sequence
  Description of Artificial Sequence: Synthetic oligonucleotide
  Antisense strand to SEQ ID NO: 2561604
uauagcgcucuguacaugg

SEQ ID NO: 2561606 - RNA, 19 nt, Artificial Sequence
  Description of Artificial Sequence: Synthetic oligonucleotide
  Sense strand starting at position 880 of SEQ ID NO: 1888858
uguacagagcgcuauacua

SEQ ID NO: 2561607 - RNA, 19 nt, Artificial Sequence
  Description of Artificial Sequence: Synthetic oligonucleotide
  Antisense strand to SEQ ID NO: 2561606
uaguauagcgcucuguaca

SEQ ID NO: 2561608 - RNA, 19 nt, Artificial Sequence
  Description of Artificial Sequence: Synthetic oligonucleotide
  Sense strand starting at position 938 of SEQ ID NO: 1888858
ugaugucugcuauaaacua

SEQ ID NO: 2561609 - RNA, 19 nt, Artificial Sequence
  Description of Artificial Sequence: Synthetic oligonucleotide
  Antisense strand to SEQ ID NO: 2561608
uaguuuauagcagacauca

SEQ ID NO: 2561610 - RNA, 19 nt, Artificial Sequence
  Description of Artificial Sequence: Synthetic oligonucleotide
  Sense strand starting at position 1501 of SEQ ID NO: 1888858
ggcuuagauuucugaauac

SEQ ID NO: 2561611 - RNA, 19 nt, Artificial Sequence
  Description of Artificial Sequence: Synthetic oligonucleotide
  Antisense strand to SEQ ID NO: 2561610
guauucagaaaucuaagcc

SEQ ID NO: 2561612 - RNA, 19 nt, Artificial Sequence
  Description of Artificial Sequence: Synthetic oligonucleotide
  Sense strand starting at position 1508 of SEQ ID NO: 1888858
auuucugaauacugauaga

SEQ ID NO: 2561613 - RNA, 19 nt, Artificial Sequence
  Description of Artificial Sequence: Synthetic oligonucleotide
  Antisense strand to SEQ ID NO: 2561612
ucuaucaguauucagaaau

SEQ ID NO: 2561614 - RNA, 19 nt, Artificial Sequence
  Description of Artificial Sequence: Synthetic oligonucleotide
  Sense strand starting at position 1660 of SEQ ID NO: 1888858
aacuguaauggacgauaag

SEQ ID NO: 2561615 - RNA, 19 nt, Artificial Sequence
  Description of Artificial Sequence: Synthetic oligonucleotide
  Antisense strand to SEQ ID NO: 2561614
cuuaucguccauuacaguu

SEQ ID NO: 2561616 - RNA, 19 nt, Artificial Sequence
  Description of Artificial Sequence: Synthetic oligonucleotide
  Sense strand starting at position 2124 of SEQ ID NO: 1888858
uuugaaugcuacucuugau

SEQ ID NO: 2561617 - RNA, 19 nt, Artificial Sequence
  Description of Artificial Sequence: Synthetic oligonucleotide
  Antisense strand to SEQ ID NO: 2561616
aucaagaguagcauucaaa

SEQ ID NO: 2561618 - RNA, 19 nt, Artificial Sequence
  Description of Artificial Sequence: Synthetic oligonucleotide
  Sense strand starting at position 2163 of SEQ ID NO: 1888858
auucuuugugcacaucaca

SEQ ID NO: 2561619 - RNA, 19 nt, Artificial Sequence
  Description of Artificial Sequence: Synthetic oligonucleotide
  Antisense strand to SEQ ID NO: 2561618
ugugaugugcacaaagaau

SEQ ID NO: 2561620 - RNA, 19 nt, Artificial Sequence
  Description of Artificial Sequence: Synthetic oligonucleotide
  Sense strand starting at position 2175 of SEQ ID NO: 1888858
caucacagaguuuguuaga

SEQ ID NO: 2561621 - RNA, 19 nt, Artificial Sequence
  Description of Artificial Sequence: Synthetic oligonucleotide
  Antisense strand to SEQ ID NO: 2561620
ucuaacaaacucugugaug

SEQ ID NO: 2561622 - RNA, 19 nt, Artificial Sequence
  Description of Artificial Sequence: Synthetic oligonucleotide
  Sense strand starting at position 2180 of SEQ ID NO: 1888858
cagaguuuguuagaggaag

SEQ ID NO: 2561623 - RNA, 19 nt, Artificial Sequence
  Description of Artificial Sequence: Synthetic oligonucleotide
  Antisense strand to SEQ ID NO: 2561622
cuuccucuaacaaacucug

SEQ ID NO: 2561624 - RNA, 19 nt, Artificial Sequence
  Description of Artificial Sequence: Synthetic oligonucleotide
  Sense strand starting at position 2182 of SEQ ID NO: 1888858
gaguuuguuagaggaaggu

SEQ ID NO: 2561625 - RNA, 19 nt, Artificial Sequence
  Description of Artificial Sequence: Synthetic oligonucleotide
  Antisense strand to SEQ ID NO: 2561624
accuuccucuaacaaacuc

SEQ ID NO: 2561626 - RNA, 19 nt, Artificial Sequence
  Description of Artificial Sequence: Synthetic oligonucleotide
  Sense strand starting at position 2260 of SEQ ID NO: 1888858
uuauacaaguaucaggaua

SEQ ID NO: 2561627 - RNA, 19 nt, Artificial Sequence
  Description of Artificial Sequence: Synthetic oligonucleotide
  Antisense strand to SEQ ID NO: 2561626
uauccugauacuuguauaa

SEQ ID NO: 2561628 - RNA, 19 nt, Artificial Sequence
  Description of Artificial Sequence: Synthetic oligonucleotide
  Sense strand starting at position 2268 of SEQ ID NO: 1888858
guaucaggauaugaucaca

SEQ ID NO: 2561629 - RNA, 19 nt, Artificial Sequence
  Description of Artificial Sequence: Synthetic oligonucleotide
  Antisense strand to SEQ ID NO: 2561628
ugugaucauauccugauac

SEQ ID NO: 2561630 - RNA, 19 nt, Artificial Sequence
  Description of Artificial Sequence: Synthetic oligonucleotide
  Sense strand starting at position 2333 of SEQ ID NO: 1888858
gauuuaacgugccagugaa

SEQ ID NO: 2561631 - RNA, 19 nt, Artificial Sequence
  Description of Artificial Sequence: Synthetic oligonucleotide
  Antisense strand to SEQ ID NO: 2561630
uucacuggcacguuaaauc

SEQ ID NO: 2561632 - RNA, 19 nt, Artificial Sequence
  Description of Artificial Sequence: Synthetic oligonucleotide
  Sense strand starting at position 2345 of SEQ ID NO: 1888858
cagugaaauuucuguagga

SEQ ID NO: 2561633 - RNA, 19 nt, Artificial Sequence
  Description of Artificial Sequence: Synthetic oligonucleotide
  Antisense strand to SEQ ID NO: 2561632
uccuacagaaauuucacug

SEQ ID NO: 2561634 - RNA, 19 nt, Artificial Sequence
  Description of Artificial Sequence: Synthetic oligonucleotide
  Sense strand starting at position 2364 of SEQ ID NO: 1888858
cuugcaauaucuucgagca

SEQ ID NO: 2561635 - RNA, 19 nt, Artificial Sequence
  Description of Artificial Sequence: Synthetic oligonucleotide
  Antisense strand to SEQ ID NO: 2561634
ugcucgaagauauugcaag

SEQ ID NO: 2561636 - RNA, 19 nt, Artificial Sequence
  Description of Artificial Sequence: Synthetic oligonucleotide
  Sense strand starting at position 2365 of SEQ ID NO: 1888858
uugcaauaucuucgagcac

SEQ ID NO: 2561637 - RNA, 19 nt, Artificial Sequence
  Description of Artificial Sequence: Synthetic oligonucleotide
  Antisense strand to SEQ ID NO: 2561636
gugcucgaagauauugcaa

SEQ ID NO: 2561638 - RNA, 19 nt, Artificial Sequence
  Description of Artificial Sequence: Synthetic oligonucleotide
  Sense strand starting at position 2402 of SEQ ID NO: 1888858
uuuggagaauacuaccaau

SEQ ID NO: 2561639 - RNA, 19 nt, Artificial Sequence
  Description of Artificial Sequence: Synthetic oligonucleotide
  Antisense strand to SEQ ID NO: 2561638
auugguaguauucuccaaa

SEQ ID NO: 2561640 - RNA, 19 nt, Artificial Sequence
  Description of Artificial Sequence: Synthetic oligonucleotide
  Sense strand starting at position 2405 of SEQ ID NO: 1888858
ggagaauacuaccaaucuu

SEQ ID NO: 2561641 - RNA, 19 nt, Artificial Sequence
  Description of Artificial Sequence: Synthetic oligonucleotide
  Antisense strand to SEQ ID NO: 2561640
aagauugguaguauucucc

SEQ ID NO: 2561642 - RNA, 19 nt, Artificial Sequence
  Description of Artificial Sequence: Synthetic oligonucleotide
  Sense strand starting at position 2603 of SEQ ID NO: 1888858
auaggaugauuccuugcca

SEQ ID NO: 2561643 - RNA, 19 nt, Artificial Sequence
  Description of Artificial Sequence: Synthetic oligonucleotide
  Antisense strand to SEQ ID NO: 2561642
uggcaaggaaucauccuau

SEQ ID NO: 2561644 - RNA, 19 nt, Artificial Sequence
  Description of Artificial Sequence: Synthetic oligonucleotide
  Sense strand starting at position 2604 of SEQ ID NO: 1888858
uaggaugauuccuugccau

SEQ ID NO: 2561645 - RNA, 19 nt, Artificial Sequence
  Description of Artificial Sequence: Synthetic oligonucleotide
  Antisense strand to SEQ ID NO: 2561644
auggcaaggaaucauccua

SEQ ID NO: 2561646 - RNA, 19 nt, Artificial Sequence
  Description of Artificial Sequence: Synthetic oligonucleotide
  Sense strand starting at position 2607 of SEQ ID NO: 1888858
gaugauuccuugccauuag

SEQ ID NO: 2561647 - RNA, 19 nt, Artificial Sequence
  Description of Artificial Sequence: Synthetic oligonucleotide
  Antisense strand to SEQ ID NO: 2561646
cuaauggcaaggaaucauc

SEQ ID NO: 2561648 - RNA, 19 nt, Artificial Sequence
  Description of Artificial Sequence: Synthetic oligonucleotide
  Sense strand starting at position 2836 of SEQ ID NO: 1888858
ccuaguacacauuagucau

SEQ ID NO: 2561649 - RNA, 19 nt, Artificial Sequence
  Description of Artificial Sequence: Synthetic oligonucleotide
  Antisense strand to SEQ ID NO: 2561648
augacuaauguguacuagg

SEQ ID NO: 2561650 - RNA, 19 nt, Artificial Sequence
  Description of Artificial Sequence: Synthetic oligonucleotide
  Sense strand starting at position 3258 of SEQ ID NO: 1888858
aggagaggaugucaaacua

SEQ ID NO: 2561651 - RNA, 19 nt, Artificial Sequence
  Description of Artificial Sequence: Synthetic oligonucleotide
  Antisense strand to SEQ ID NO: 2561650
uaguuugacauccucuccu

SEQ ID NO: 2561652 - RNA, 19 nt, Artificial Sequence
  Description of Artificial Sequence: Synthetic oligonucleotide
  Sense strand starting at position 3461 of SEQ ID NO: 1888858
auuugcaauugccacgaaa

SEQ ID NO: 2561653 - RNA, 19 nt, Artificial Sequence
  Description of Artificial Sequence: Synthetic oligonucleotide
  Antisense strand to SEQ ID NO: 2561652
uuucguggcaauugcaaau

SEQ ID NO: 2561654 - RNA, 19 nt, Artificial Sequence
  Description of Artificial Sequence: Synthetic oligonucleotide
  Sense strand starting at position 154 of SEQ ID NO: 1888859
uguagaauauagucaacua

SEQ ID NO: 2561655 - RNA, 19 nt, Artificial Sequence
  Description of Artificial Sequence: Synthetic oligonucleotide
  Antisense strand to SEQ ID NO: 2561654
uaguugacuauauucuaca

SEQ ID NO: 2561656 - RNA, 19 nt, Artificial Sequence
  Description of Artificial Sequence: Synthetic oligonucleotide
  Sense strand starting at position 326 of SEQ ID NO: 1888859
uuagcagaugucuaaauca

SEQ ID NO: 2561657 - RNA, 19 nt, Artificial Sequence
  Description of Artificial Sequence: Synthetic oligonucleotide
  Antisense strand to SEQ ID NO: 2561656
ugauuuagacaucugcuaa

SEQ ID NO: 2561658 - RNA, 19 nt, Artificial Sequence
  Description of Artificial Sequence: Synthetic oligonucleotide
  Sense strand starting at position 348 of SEQ ID NO: 1888859
augaauuagccauaaaugu

SEQ ID NO: 2561659 - RNA, 19 nt, Artificial Sequence
  Description of Artificial Sequence: Synthetic oligonucleotide
  Antisense strand to SEQ ID NO: 2561658
acauuuauggcuaauucau

SEQ ID NO: 2561660 - RNA, 19 nt, Artificial Sequence
  Description of Artificial Sequence: Synthetic oligonucleotide
  Sense strand starting at position 399 of SEQ ID NO: 1888859
ggcacagauuuacaauaau

SEQ ID NO: 2561661 - RNA, 19 nt, Artificial Sequence
  Description of Artificial Sequence: Synthetic oligonucleotide
  Antisense strand to SEQ ID NO: 2561660
auuauuguaaaucugugcc

SEQ ID NO: 2561662 - RNA, 19 nt, Artificial Sequence
  Description of Artificial Sequence: Synthetic oligonucleotide
  Sense strand starting at position 460 of SEQ ID NO: 1888859
augaauauuguaggaaguu

SEQ ID NO: 2561663 - RNA, 19 nt, Artificial Sequence
  Description of Artificial Sequence: Synthetic oligonucleotide
  Antisense strand to SEQ ID NO: 2561662
aacuuccuacaauauucau

SEQ ID NO: 2561664 - RNA, 19 nt, Artificial Sequence
  Description of Artificial Sequence: Synthetic oligonucleotide
  Sense strand starting at position 491 of SEQ ID NO: 1888859
ucaaauguacucuagcgau

SEQ ID NO: 2561665 - RNA, 19 nt, Artificial Sequence
  Description of Artificial Sequence: Synthetic oligonucleotide
  Antisense strand to SEQ ID NO: 2561664
aucgcuagaguacauuuga

SEQ ID NO: 2561666 - RNA, 19 nt, Artificial Sequence
  Description of Artificial Sequence: Synthetic oligonucleotide
  Sense strand starting at position 632 of SEQ ID NO: 1888859
cuacucuuccaccagugau

SEQ ID NO: 2561667 - RNA, 19 nt, Artificial Sequence
  Description of Artificial Sequence: Synthetic oligonucleotide
  Antisense strand to SEQ ID NO: 2561666
aucacugguggaagaguag

SEQ ID NO: 2561668 - RNA, 19 nt, Artificial Sequence
  Description of Artificial Sequence: Synthetic oligonucleotide
  Sense strand starting at position 635 of SEQ ID NO: 1888859
cucuuccaccagugauuau

SEQ ID NO: 2561669 - RNA, 19 nt, Artificial Sequence
  Description of Artificial Sequence: Synthetic oligonucleotide
  Antisense strand to SEQ ID NO: 2561668
auaaucacugguggaagag

SEQ ID NO: 2561670 - RNA, 19 nt, Artificial Sequence
  Description of Artificial Sequence: Synthetic oligonucleotide
  Sense strand starting at position 999 of SEQ ID NO: 1888859
ucacucuaugaugguagua

SEQ ID NO: 2561671 - RNA, 19 nt, Artificial Sequence
  Description of Artificial Sequence: Synthetic oligonucleotide
  Antisense strand to SEQ ID NO: 2561670
uacuaccaucauagaguga

SEQ ID NO: 2561672 - RNA, 19 nt, Artificial Sequence
  Description of Artificial Sequence: Synthetic oligonucleotide
  Sense strand starting at position 1104 of SEQ ID NO: 1888859
ggaauuaucucaguguuag

SEQ ID NO: 2561673 - RNA, 19 nt, Artificial Sequence
  Description of Artificial Sequence: Synthetic oligonucleotide
  Antisense strand to SEQ ID NO: 2561672
cuaacacugagauaauucc

SEQ ID NO: 2561674 - RNA, 19 nt, Artificial Sequence
  Description of Artificial Sequence: Synthetic oligonucleotide
  Sense strand starting at position 1170 of SEQ ID NO: 1888859
uggagcaaaccauaugcua

SEQ ID NO: 2561675 - RNA, 19 nt, Artificial Sequence
  Description of Artificial Sequence: Synthetic oligonucleotide
  Antisense strand to SEQ ID NO: 2561674
uagcauaugguuugcucca

SEQ ID NO: 2561676 - RNA, 19 nt, Artificial Sequence
  Description of Artificial Sequence: Synthetic oligonucleotide
  Sense strand starting at position 1186 of SEQ ID NO: 1888859
cuaaauaucuguguuggag

SEQ ID NO: 2561677 - RNA, 19 nt, Artificial Sequence
  Description of Artificial Sequence: Synthetic oligonucleotide
  Antisense strand to SEQ ID NO: 2561676
cuccaacacagauauuuag

SEQ ID NO: 2561678 - RNA, 19 nt, Artificial Sequence
  Description of Artificial Sequence: Synthetic oligonucleotide
  Sense strand starting at position 1315 of SEQ ID NO: 1888859
uguaguaguaaacaaggua

SEQ ID NO: 2561679 - RNA, 19 nt, Artificial Sequence
  Description of Artificial Sequence: Synthetic oligonucleotide
  Antisense strand to SEQ ID NO: 2561678
uaccuuguuuacuacuaca

SEQ ID NO: 2561680 - RNA, 19 nt, Artificial Sequence
  Description of Artificial Sequence: Synthetic oligonucleotide
  Sense strand starting at position 1358 of SEQ ID NO: 1888859
cuuacauucuagcuggaga

SEQ ID NO: 2561681 - RNA, 19 nt, Artificial Sequence
  Description of Artificial Sequence: Synthetic oligonucleotide
  Antisense strand to SEQ ID NO: 2561680
ucuccagcuagaauguaag

SEQ ID NO: 2561682 - RNA, 19 nt, Artificial Sequence
  Description of Artificial Sequence: Synthetic oligonucleotide
  Sense strand starting at position 1360 of SEQ ID NO: 1888859
uacauucuagcuggagaua

SEQ ID NO: 2561683 - RNA, 19 nt, Artificial Sequence
  Description of Artificial Sequence: Synthetic oligonucleotide
  Antisense strand to SEQ ID NO: 2561682
uaucuccagcuagaaugua

SEQ ID NO: 2561684 - RNA, 19 nt, Artificial Sequence
  Description of Artificial Sequence: Synthetic oligonucleotide
  Sense strand starting at position 1506 of SEQ ID NO: 1888859
uagccauagcuugagguua

SEQ ID NO: 2561685 - RNA, 19 nt, Artificial Sequence
  Description of Artificial Sequence: Synthetic oligonucleotide
  Antisense strand to SEQ ID NO: 2561684
uaaccucaagcuauggcua

SEQ ID NO: 2561686 - RNA, 19 nt, Artificial Sequence
  Description of Artificial Sequence: Synthetic oligonucleotide
  Sense strand starting at position 1511 of SEQ ID NO: 1888859
auagcuugagguuagauau

SEQ ID NO: 2561687 - RNA, 19 nt, Artificial Sequence
  Description of Artificial Sequence: Synthetic oligonucleotide
  Antisense strand to SEQ ID NO: 2561686
auaucuaaccucaagcuau

SEQ ID NO: 2561688 - RNA, 19 nt, Artificial Sequence
  Description of Artificial Sequence: Synthetic oligonucleotide
  Sense strand starting at position 1576 of SEQ ID NO: 1888859
gcuacucuccaucacagua

SEQ ID NO: 2561689 - RNA, 19 nt, Artificial Sequence
  Description of Artificial Sequence: Synthetic oligonucleotide
  Antisense strand to SEQ ID NO: 2561688
uacugugauggagaguagc

SEQ ID NO: 2561690 - RNA, 19 nt, Artificial Sequence
  Description of Artificial Sequence: Synthetic oligonucleotide
  Sense strand starting at position 1614 of SEQ ID NO: 1888859
cggugaguuaaguacacga

SEQ ID NO: 2561691 - RNA, 19 nt, Artificial Sequence
  Description of Artificial Sequence: Synthetic oligonucleotide
  Antisense strand to SEQ ID NO: 2561690
ucguguacuuaacucaccg

SEQ ID NO: 2561692 - RNA, 19 nt, Artificial Sequence
  Description of Artificial Sequence: Synthetic oligonucleotide
  Sense strand starting at position 1616 of SEQ ID NO: 1888859
gugaguuaaguacacgaca

SEQ ID NO: 2561693 - RNA, 19 nt, Artificial Sequence
  Description of Artificial Sequence: Synthetic oligonucleotide
  Antisense strand to SEQ ID NO: 2561692
ugucguguacuuaacucac

SEQ ID NO: 2561694 - RNA, 19 nt, Artificial Sequence
  Description of Artificial Sequence: Synthetic oligonucleotide
  Sense strand starting at position 1619 of SEQ ID NO: 1888859
aguuaaguacacgacaagu

SEQ ID NO: 2561695 - RNA, 19 nt, Artificial Sequence
  Description of Artificial Sequence: Synthetic oligonucleotide
  Antisense strand to SEQ ID NO: 2561694
acuugucguguacuuaacu

SEQ ID NO: 2561696 - RNA, 19 nt, Artificial Sequence
  Description of Artificial Sequence: Synthetic oligonucleotide
  Sense strand starting at position 2182 of SEQ ID NO: 1888859
uguagaaauagcuagaagu

SEQ ID NO: 2561697 - RNA, 19 nt, Artificial Sequence
  Description of Artificial Sequence: Synthetic oligonucleotide
  Antisense strand to SEQ ID NO: 2561696
acuucuagcuauuucuaca

SEQ ID NO: 2561698 - RNA, 19 nt, Artificial Sequence
  Description of Artificial Sequence: Synthetic oligonucleotide
  Sense strand starting at position 2328 of SEQ ID NO: 1888859
guuaaauaugugugauuag

SEQ ID NO: 2561699 - RNA, 19 nt, Artificial Sequence
  Description of Artificial Sequence: Synthetic oligonucleotide
  Antisense strand to SEQ ID NO: 2561698
cuaaucacacauauuuaac

SEQ ID NO: 2561700 - RNA, 19 nt, Artificial Sequence
  Description of Artificial Sequence: Synthetic oligonucleotide
  Sense strand starting at position 2331 of SEQ ID NO: 1888859
aaauaugugugauuagcau

SEQ ID NO: 2561701 - RNA, 19 nt, Artificial Sequence
  Description of Artificial Sequence: Synthetic oligonucleotide
  Antisense strand to SEQ ID NO: 2561700
augcuaaucacacauauuu

SEQ ID NO: 2561702 - RNA, 19 nt, Artificial Sequence
  Description of Artificial Sequence: Synthetic oligonucleotide
  Sense strand starting at position 2337 of SEQ ID NO: 1888859
gugugauuagcauaaagga

SEQ ID NO: 2561703 - RNA, 19 nt, Artificial Sequence
  Description of Artificial Sequence: Synthetic oligonucleotide
  Antisense strand to SEQ ID NO: 2561702
uccuuuaugcuaaucacac

SEQ ID NO: 2561704 - RNA, 19 nt, Artificial Sequence
  Description of Artificial Sequence: Synthetic oligonucleotide
  Sense strand starting at position 2408 of SEQ ID NO: 1888859
cuugaugugucacucaaac

SEQ ID NO: 2561705 - RNA, 19 nt, Artificial Sequence
  Description of Artificial Sequence: Synthetic oligonucleotide
  Antisense strand to SEQ ID NO: 2561704
guuugagugacacaucaag

SEQ ID NO: 2561706 - RNA, 19 nt, Artificial Sequence
  Description of Artificial Sequence: Synthetic oligonucleotide
  Sense strand starting at position 2494 of SEQ ID NO: 1888859
ucugaaaugcugugaauug

SEQ ID NO: 2561707 - RNA, 19 nt, Artificial Sequence
  Description of Artificial Sequence: Synthetic oligonucleotide
  Antisense strand to SEQ ID NO: 2561706
caauucacagcauuucaga

SEQ ID NO: 2561708 - RNA, 19 nt, Artificial Sequence
  Description of Artificial Sequence: Synthetic oligonucleotide
  Sense strand starting at position 2521 of SEQ ID NO: 1888859
ugcuaaauuguugacauua

SEQ ID NO: 2561709 - RNA, 19 nt, Artificial Sequence
  Description of Artificial Sequence: Synthetic oligonucleotide
  Antisense strand to SEQ ID NO: 2561708
uaaugucaacaauuuagca

SEQ ID NO: 2561710 - RNA, 19 nt, Artificial Sequence
  Description of Artificial Sequence: Synthetic oligonucleotide
  Sense strand starting at position 2656 of SEQ ID NO: 1888859
guuugaaaggaaugcgaaa

SEQ ID NO: 2561711 - RNA, 19 nt, Artificial Sequence
  Description of Artificial Sequence: Synthetic oligonucleotide
  Antisense strand to SEQ ID NO: 2561710
uuucgcauuccuuucaaac

SEQ ID NO: 2561712 - RNA, 19 nt, Artificial Sequence
  Description of Artificial Sequence: Synthetic oligonucleotide
  Sense strand starting at position 2732 of SEQ ID NO: 1888859
guagguauucuguaccaug

SEQ ID NO: 2561713 - RNA, 19 nt, Artificial Sequence
  Description of Artificial Sequence: Synthetic oligonucleotide
  Antisense strand to SEQ ID NO: 2561712
caugguacagaauaccuac

SEQ ID NO: 2561714 - RNA, 19 nt, Artificial Sequence
  Description of Artificial Sequence: Synthetic oligonucleotide
  Sense strand starting at position 2743 of SEQ ID NO: 1888859
guaccaugccuuuaucuac

SEQ ID NO: 2561715 - RNA, 19 nt, Artificial Sequence
  Description of Artificial Sequence: Synthetic oligonucleotide
  Antisense strand to SEQ ID NO: 2561714
guagauaaaggcaugguac

SEQ ID NO: 2561716 - RNA, 19 nt, Artificial Sequence
  Description of Artificial Sequence: Synthetic oligonucleotide
  Sense strand starting at position 2954 of SEQ ID NO: 1888859
acuuuagugguuuaauucu

SEQ ID NO: 2561717 - RNA, 19 nt, Artificial Sequence
  Description of Artificial Sequence: Synthetic oligonucleotide
  Antisense strand to SEQ ID NO: 2561716
agaauuaaaccacuaaagu

SEQ ID NO: 2561718 - RNA, 19 nt, Artificial Sequence
  Description of Artificial Sequence: Synthetic oligonucleotide
  Sense strand starting at position 2973 of SEQ ID NO: 1888859
cagguagaaucuguuuaug

SEQ ID NO: 2561719 - RNA, 19 nt, Artificial Sequence
  Description of Artificial Sequence: Synthetic oligonucleotide
  Antisense strand to SEQ ID NO: 2561718
cauaaacagauucuaccug

SEQ ID NO: 2561720 - RNA, 19 nt, Artificial Sequence
  Description of Artificial Sequence: Synthetic oligonucleotide
  Sense strand starting at position 2976 of SEQ ID NO: 1888859
guagaaucuguuuaugguu

SEQ ID NO: 2561721 - RNA, 19 nt, Artificial Sequence
  Description of Artificial Sequence: Synthetic oligonucleotide
  Antisense strand to SEQ ID NO: 2561720
aaccauaaacagauucuac

SEQ ID NO: 2561722 - RNA, 19 nt, Artificial Sequence
  Description of Artificial Sequence: Synthetic oligonucleotide
  Sense strand starting at position 3103 of SEQ ID NO: 1888859
uggugucaauauuuagcga

SEQ ID NO: 2561723 - RNA, 19 nt, Artificial Sequence
  Description of Artificial Sequence: Synthetic oligonucleotide
  Antisense strand to SEQ ID NO: 2561722
ucgcuaaauauugacacca

SEQ ID NO: 2561724 - RNA, 19 nt, Artificial Sequence
  Description of Artificial Sequence: Synthetic oligonucleotide
  Sense strand starting at position 3119 of SEQ ID NO: 1888859
cgaaacugauaugccuauu

SEQ ID NO: 2561725 - RNA, 19 nt, Artificial Sequence
  Description of Artificial Sequence: Synthetic oligonucleotide
  Antisense strand to SEQ ID NO: 2561724
aauaggcauaucaguuucg

SEQ ID NO: 2561726 - RNA, 19 nt, Artificial Sequence
  Description of Artificial Sequence: Synthetic oligonucleotide
  Sense strand starting at position 3493 of SEQ ID NO: 1888859
aagcccuuugaauguuuga

SEQ ID NO: 2561727 - RNA, 19 nt, Artificial Sequence
  Description of Artificial Sequence: Synthetic oligonucleotide
  Antisense strand to SEQ ID NO: 2561726
ucaaacauucaaagggcuu

SEQ ID NO: 2561728 - RNA, 19 nt, Artificial Sequence
  Description of Artificial Sequence: Synthetic oligonucleotide
  Sense strand starting at position 3496 of SEQ ID NO: 1888859
cccuuugaauguuugaaua

SEQ ID NO: 2561729 - RNA, 19 nt, Artificial Sequence
  Description of Artificial Sequence: Synthetic oligonucleotide
  Antisense strand to SEQ ID NO: 2561728
uauucaaacauucaaaggg

SEQ ID NO: 2561730 - RNA, 19 nt, Artificial Sequence
  Description of Artificial Sequence: Synthetic oligonucleotide
  Sense strand starting at position 3921 of SEQ ID NO: 1888859
ugguaauugcaucaugguu

SEQ ID NO: 2561731 - RNA, 19 nt, Artificial Sequence
  Description of Artificial Sequence: Synthetic oligonucleotide
  Antisense strand to SEQ ID NO: 2561730
aaccaugaugcaauuacca

SEQ ID NO: 2561732 - RNA, 19 nt, Artificial Sequence
  Description of Artificial Sequence: Synthetic oligonucleotide
  Sense strand starting at position 3974 of SEQ ID NO: 1888859
acugaagcaaugugaaaug

SEQ ID NO: 2561733 - RNA, 19 nt, Artificial Sequence
  Description of Artificial Sequence: Synthetic oligonucleotide
  Antisense strand to SEQ ID NO: 2561732
cauuucacauugcuucagu

SEQ ID NO: 2561734 - RNA, 19 nt, Artificial Sequence
  Description of Artificial Sequence: Synthetic oligonucleotide
  Sense strand starting at position 15 of SEQ ID NO: 1888860
ggauuuaugugagauagaa

SEQ ID NO: 2561735 - RNA, 19 nt, Artificial Sequence
  Description of Artificial Sequence: Synthetic oligonucleotide
  Antisense strand to SEQ ID NO: 2561734
uucuaucucacauaaaucc

SEQ ID NO: 2561736 - RNA, 19 nt, Artificial Sequence
  Description of Artificial Sequence: Synthetic oligonucleotide
  Sense strand starting at position 147 of SEQ ID NO: 1888860
caugaaaucuguuucugga

SEQ ID NO: 2561737 - RNA, 19 nt, Artificial Sequence
  Description of Artificial Sequence: Synthetic oligonucleotide
  Antisense strand to SEQ ID NO: 2561736
uccagaaacagauuucaug

SEQ ID NO: 2561738 - RNA, 19 nt, Artificial Sequence
  Description of Artificial Sequence: Synthetic oligonucleotide
  Sense strand starting at position 149 of SEQ ID NO: 1888860
ugaaaucuguuucuggacu

SEQ ID NO: 2561739 - RNA, 19 nt, Artificial Sequence
  Description of Artificial Sequence: Synthetic oligonucleotide
  Antisense strand to SEQ ID NO: 2561738
aguccagaaacagauuuca

SEQ ID NO: 2561740 - RNA, 19 nt, Artificial Sequence
  Description of Artificial Sequence: Synthetic oligonucleotide
  Sense strand starting at position 506 of SEQ ID NO: 1888860
acugauaguguccaccaaa

SEQ ID NO: 2561741 - RNA, 19 nt, Artificial Sequence
  Description of Artificial Sequence: Synthetic oligonucleotide
  Antisense strand to SEQ ID NO: 2561740
uuugguggacacuaucagu

SEQ ID NO: 2561742 - RNA, 19 nt, Artificial Sequence
  Description of Artificial Sequence: Synthetic oligonucleotide
  Sense strand starting at position 593 of SEQ ID NO: 1888860
gccaguuugccucuugcau

SEQ ID NO: 2561743 - RNA, 19 nt, Artificial Sequence
  Description of Artificial Sequence: Synthetic oligonucleotide
  Antisense strand to SEQ ID NO: 2561742
augcaagaggcaaacuggc

SEQ ID NO: 2561744 - RNA, 19 nt, Artificial Sequence
  Description of Artificial Sequence: Synthetic oligonucleotide
  Sense strand starting at position 632 of SEQ ID NO: 1888860
acuaacuaguaguccagau

SEQ ID NO: 2561745 - RNA, 19 nt, Artificial Sequence
  Description of Artificial Sequence: Synthetic oligonucleotide
  Antisense strand to SEQ ID NO: 2561744
aucuggacuacuaguuagu

SEQ ID NO: 2561746 - RNA, 19 nt, Artificial Sequence
  Description of Artificial Sequence: Synthetic oligonucleotide
  Sense strand starting at position 636 of SEQ ID NO: 1888860
acuaguaguccagauggca

SEQ ID NO: 2561747 - RNA, 19 nt, Artificial Sequence
  Description of Artificial Sequence: Synthetic oligonucleotide
  Antisense strand to SEQ ID NO: 2561746
ugccaucuggacuacuagu

SEQ ID NO: 2561748 - RNA, 19 nt, Artificial Sequence
  Description of Artificial Sequence: Synthetic oligonucleotide
  Sense strand starting at position 678 of SEQ ID NO: 1888860
ggaaucuugagucagcucu

SEQ ID NO: 2561749 - RNA, 19 nt, Artificial Sequence
  Description of Artificial Sequence: Synthetic oligonucleotide
  Antisense strand to SEQ ID NO: 2561748
agagcugacucaagauucc

SEQ ID NO: 2561750 - RNA, 19 nt, Artificial Sequence
  Description of Artificial Sequence: Synthetic oligonucleotide
  Sense strand starting at position 789 of SEQ ID NO: 1888860
cagggauuauguguuacca

SEQ ID NO: 2561751 - RNA, 19 nt, Artificial Sequence
  Description of Artificial Sequence: Synthetic oligonucleotide
  Antisense strand to SEQ ID NO: 2561750
ugguaacacauaaucccug

SEQ ID NO: 2561752 - RNA, 19 nt, Artificial Sequence
  Description of Artificial Sequence: Synthetic oligonucleotide
  Sense strand starting at position 911 of SEQ ID NO: 1888860
gcuguugauguauaggaaa

SEQ ID NO: 2561753 - RNA, 19 nt, Artificial Sequence
  Description of Artificial Sequence: Synthetic oligonucleotide
  Antisense strand to SEQ ID NO: 2561752
uuuccuauacaucaacagc

SEQ ID NO: 2561754 - RNA, 19 nt, Artificial Sequence
  Description of Artificial Sequence: Synthetic oligonucleotide
  Sense strand starting at position 1035 of SEQ ID NO: 1888860
aucugugaucaaugacagu

SEQ ID NO: 2561755 - RNA, 19 nt, Artificial Sequence
  Description of Artificial Sequence: Synthetic oligonucleotide
  Antisense strand to SEQ ID NO: 2561754
acugucauugaucacagau

SEQ ID NO: 2561756 - RNA, 19 nt, Artificial Sequence
  Description of Artificial Sequence: Synthetic oligonucleotide
  Sense strand starting at position 1133 of SEQ ID NO: 1888860
cuaaacagaaguggugaua

SEQ ID NO: 2561757 - RNA, 19 nt, Artificial Sequence
  Description of Artificial Sequence: Synthetic oligonucleotide
  Antisense strand to SEQ ID NO: 2561756
uaucaccacuucuguuuag

SEQ ID NO: 2561758 - RNA, 19 nt, Artificial Sequence
  Description of Artificial Sequence: Synthetic oligonucleotide
  Sense strand starting at position 1249 of SEQ ID NO: 1888860
gcugacuucuauuucuagu

SEQ ID NO: 2561759 - RNA, 19 nt, Artificial Sequence
  Description of Artificial Sequence: Synthetic oligonucleotide
  Antisense strand to SEQ ID NO: 2561758
acuagaaauagaagucagc

SEQ ID NO: 2561760 - RNA, 19 nt, Artificial Sequence
  Description of Artificial Sequence: Synthetic oligonucleotide
  Sense strand starting at position 1283 of SEQ ID NO: 1888860
uaucaugaaugggucuaga

SEQ ID NO: 2561761 - RNA, 19 nt, Artificial Sequence
  Description of Artificial Sequence: Synthetic oligonucleotide
  Antisense strand to SEQ ID NO: 2561760
ucuagacccauucaugaua

SEQ ID NO: 2561762 - RNA, 19 nt, Artificial Sequence
  Description of Artificial Sequence: Synthetic oligonucleotide
  Sense strand starting at position 1319 of SEQ ID NO: 1888860
uuccgcaucuauuuauuga

SEQ ID NO: 2561763 - RNA, 19 nt, Artificial Sequence
  Description of Artificial Sequence: Synthetic oligonucleotide
  Antisense strand to SEQ ID NO: 2561762
ucaauaaauagaugcggaa

SEQ ID NO: 2561764 - RNA, 19 nt, Artificial Sequence
  Description of Artificial Sequence: Synthetic oligonucleotide
  Sense strand starting at position 1349 of SEQ ID NO: 1888860
gggcuaagcacugaucaug

SEQ ID NO: 2561765 - RNA, 19 nt, Artificial Sequence
  Description of Artificial Sequence: Synthetic oligonucleotide
  Antisense strand to SEQ ID NO: 2561764
caugaucagugcuuagccc

SEQ ID NO: 2561766 - RNA, 19 nt, Artificial Sequence
  Description of Artificial Sequence: Synthetic oligonucleotide
  Sense strand starting at position 1606 of SEQ ID NO: 1888860
ccaguagcagaauacuaua

SEQ ID NO: 2561767 - RNA, 19 nt, Artificial Sequence
  Description of Artificial Sequence: Synthetic oligonucleotide
  Antisense strand to SEQ ID NO: 2561766
uauaguauucugcuacugg

SEQ ID NO: 2561768 - RNA, 19 nt, Artificial Sequence
  Description of Artificial Sequence: Synthetic oligonucleotide
  Sense strand starting at position 1660 of SEQ ID NO: 1888860
ggcagacaugcucaaccaa

SEQ ID NO: 2561769 - RNA, 19 nt, Artificial Sequence
  Description of Artificial Sequence: Synthetic oligonucleotide
  Antisense strand to SEQ ID NO: 2561768
uugguugagcaugucugcc

SEQ ID NO: 2561770 - RNA, 19 nt, Artificial Sequence
  Description of Artificial Sequence: Synthetic oligonucleotide
  Sense strand starting at position 2000 of SEQ ID NO: 1888860
guugcuauauuugcauuaa

SEQ ID NO: 2561771 - RNA, 19 nt, Artificial Sequence
  Description of Artificial Sequence: Synthetic oligonucleotide
  Antisense strand to SEQ ID NO: 2561770
uuaaugcaaauauagcaac

SEQ ID NO: 2561772 - RNA, 19 nt, Artificial Sequence
  Description of Artificial Sequence: Synthetic oligonucleotide
  Sense strand starting at position 2126 of SEQ ID NO: 1888860
uuaauaugucgagaauucu

SEQ ID NO: 2561773 - RNA, 19 nt, Artificial Sequence
  Description of Artificial Sequence: Synthetic oligonucleotide
  Antisense strand to SEQ ID NO: 2561772
agaauucucgacauauuaa

SEQ ID NO: 2561774 - RNA, 19 nt, Artificial Sequence
  Description of Artificial Sequence: Synthetic oligonucleotide
  Sense strand starting at position 2581 of SEQ ID NO: 1888860
cucaaauguguuuggaaua

SEQ ID NO: 2561775 - RNA, 19 nt, Artificial Sequence
  Description of Artificial Sequence: Synthetic oligonucleotide
  Antisense strand to SEQ ID NO: 2561774
uauuccaaacacauuugag

SEQ ID NO: 2561776 - RNA, 19 nt, Artificial Sequence
  Description of Artificial Sequence: Synthetic oligonucleotide
  Sense strand starting at position 2659 of SEQ ID NO: 1888860
gaaccaaggucucuauaga

SEQ ID NO: 2561777 - RNA, 19 nt, Artificial Sequence
  Description of Artificial Sequence: Synthetic oligonucleotide
  Antisense strand to SEQ ID NO: 2561776
ucuauagagaccuugguuc

SEQ ID NO: 2561778 - RNA, 19 nt, Artificial Sequence
  Description of Artificial Sequence: Synthetic oligonucleotide
  Sense strand starting at position 2907 of SEQ ID NO: 1888860
cuauguggucucuauauua

SEQ ID NO: 2561779 - RNA, 19 nt, Artificial Sequence
  Description of Artificial Sequence: Synthetic oligonucleotide
  Antisense strand to SEQ ID NO: 2561778
uaauauagagaccacauag

SEQ ID NO: 2561780 - RNA, 19 nt, Artificial Sequence
  Description of Artificial Sequence: Synthetic oligonucleotide
  Sense strand starting at position 2914 of SEQ ID NO: 1888860
gucucuauauuacuuggaa

SEQ ID NO: 2561781 - RNA, 19 nt, Artificial Sequence
  Description of Artificial Sequence: Synthetic oligonucleotide
  Antisense strand to SEQ ID NO: 2561780
uuccaaguaauauagagac

SEQ ID NO: 2561782 - RNA, 19 nt, Artificial Sequence
  Description of Artificial Sequence: Synthetic oligonucleotide
  Sense strand starting at position 2956 of SEQ ID NO: 1888860
augacauuagacuguacau

SEQ ID NO: 2561783 - RNA, 19 nt, Artificial Sequence
  Description of Artificial Sequence: Synthetic oligonucleotide
  Antisense strand to SEQ ID NO: 2561782
auguacagucuaaugucau

SEQ ID NO: 2561784 - RNA, 19 nt, Artificial Sequence
  Description of Artificial Sequence: Synthetic oligonucleotide
  Sense strand starting at position 2978 of SEQ ID NO: 1888860
uagauugaucugcacaguu

SEQ ID NO: 2561785 - RNA, 19 nt, Artificial Sequence
  Description of Artificial Sequence: Synthetic oligonucleotide
  Antisense strand to SEQ ID NO: 2561784
aacugugcagaucaaucua

SEQ ID NO: 2561786 - RNA, 19 nt, Artificial Sequence
  Description of Artificial Sequence: Synthetic oligonucleotide
  Sense strand starting at position 2980 of SEQ ID NO: 1888860
gauugaucugcacaguucu

SEQ ID NO: 2561787 - RNA, 19 nt, Artificial Sequence
  Description of Artificial Sequence: Synthetic oligonucleotide
  Antisense strand to SEQ ID NO: 2561786
agaacugugcagaucaauc

SEQ ID NO: 2561788 - RNA, 19 nt, Artificial Sequence
  Description of Artificial Sequence: Synthetic oligonucleotide
  Sense strand starting at position 3016 of SEQ ID NO: 1888860
ucaaucuauguugaguuaa

SEQ ID NO: 2561789 - RNA, 19 nt, Artificial Sequence
  Description of Artificial Sequence: Synthetic oligonucleotide
  Antisense strand to SEQ ID NO: 2561788
uuaacucaacauagauuga

SEQ ID NO: 2561790 - RNA, 19 nt, Artificial Sequence
  Description of Artificial Sequence: Synthetic oligonucleotide
  Sense strand starting at position 3166 of SEQ ID NO: 1888860
uaacuuauugaagguauga

SEQ ID NO: 2561791 - RNA, 19 nt, Artificial Sequence
  Description of Artificial Sequence: Synthetic oligonucleotide
  Antisense strand to SEQ ID NO: 2561790
ucauaccuucaauaaguua

SEQ ID NO: 2561792 - RNA, 19 nt, Artificial Sequence
  Description of Artificial Sequence: Synthetic oligonucleotide
  Sense strand starting at position 3209 of SEQ ID NO: 1888860
aagugacaggcuuacaguu

SEQ ID NO: 2561793 - RNA, 19 nt, Artificial Sequence
  Description of Artificial Sequence: Synthetic oligonucleotide
  Antisense strand to SEQ ID NO: 2561792
aacuguaagccugucacuu

SEQ ID NO: 2561794 - RNA, 19 nt, Artificial Sequence
  Description of Artificial Sequence: Synthetic oligonucleotide
  Sense strand starting at position 3300 of SEQ ID NO: 1888860
ggucaugugagcuaauaug

SEQ ID NO: 2561795 - RNA, 19 nt, Artificial Sequence
  Description of Artificial Sequence: Synthetic oligonucleotide
  Antisense strand to SEQ ID NO: 2561794
cauauuagcucacaugacc

SEQ ID NO: 2561796 - RNA, 19 nt, Artificial Sequence
  Description of Artificial Sequence: Synthetic oligonucleotide
  Sense strand starting at position 3394 of SEQ ID NO: 1888860
gucucacaugcagauaaga

SEQ ID NO: 2561797 - RNA, 19 nt, Artificial Sequence
  Description of Artificial Sequence: Synthetic oligonucleotide
  Antisense strand to SEQ ID NO: 2561796
ucuuaucugcaugugagac

SEQ ID NO: 2561798 - RNA, 19 nt, Artificial Sequence
  Description of Artificial Sequence: Synthetic oligonucleotide
  Sense strand starting at position 3402 of SEQ ID NO: 1888860
ugcagauaagagugauuau

SEQ ID NO: 2561799 - RNA, 19 nt, Artificial Sequence
  Description of Artificial Sequence: Synthetic oligonucleotide
  Antisense strand to SEQ ID NO: 2561798
auaaucacucuuaucugca

SEQ ID NO: 2561800 - RNA, 19 nt, Artificial Sequence
  Description of Artificial Sequence: Synthetic oligonucleotide
  Sense strand starting at position 3405 of SEQ ID NO: 1888860
agauaagagugauuaugug

SEQ ID NO: 2561801 - RNA, 19 nt, Artificial Sequence
  Description of Artificial Sequence: Synthetic oligonucleotide
  Antisense strand to SEQ ID NO: 2561800
cacauaaucacucuuaucu

SEQ ID NO: 2561802 - RNA, 19 nt, Artificial Sequence
  Description of Artificial Sequence: Synthetic oligonucleotide
  Sense strand starting at position 3409 of SEQ ID NO: 1888860
aagagugauuaugugacau

SEQ ID NO: 2561803 - RNA, 19 nt, Artificial Sequence
  Description of Artificial Sequence: Synthetic oligonucleotide
  Antisense strand to SEQ ID NO: 2561802
augucacauaaucacucuu

SEQ ID NO: 2561804 - RNA, 19 nt, Artificial Sequence
  Description of Artificial Sequence: Synthetic oligonucleotide
  Sense strand starting at position 3435 of SEQ ID NO: 1888860
gccaauacugaguauucuu

SEQ ID NO: 2561805 - RNA, 19 nt, Artificial Sequence
  Description of Artificial Sequence: Synthetic oligonucleotide
  Antisense strand to SEQ ID NO: 2561804
aagaauacucaguauuggc

SEQ ID NO: 2561806 - RNA, 19 nt, Artificial Sequence
  Description of Artificial Sequence: Synthetic oligonucleotide
  Sense strand starting at position 3464 of SEQ ID NO: 1888860
ugcaauuuccuuuggugau

SEQ ID NO: 2561807 - RNA, 19 nt, Artificial Sequence
  Description of Artificial Sequence: Synthetic oligonucleotide
  Antisense strand to SEQ ID NO: 2561806
aucaccaaaggaaauugca

SEQ ID NO: 2561808 - RNA, 19 nt, Artificial Sequence
  Description of Artificial Sequence: Synthetic oligonucleotide
  Sense strand starting at position 3674 of SEQ ID NO: 1888860
auuaguauauaucuccuga

SEQ ID NO: 2561809 - RNA, 19 nt, Artificial Sequence
  Description of Artificial Sequence: Synthetic oligonucleotide
  Antisense strand to SEQ ID NO: 2561808
ucaggagauauauacuaau

SEQ ID NO: 2561810 - RNA, 19 nt, Artificial Sequence
  Description of Artificial Sequence: Synthetic oligonucleotide
  Sense strand starting at position 3764 of SEQ ID NO: 1888860
uaguaaacucaagguagga

SEQ ID NO: 2561811 - RNA, 19 nt, Artificial Sequence
  Description of Artificial Sequence: Synthetic oligonucleotide
  Antisense strand to SEQ ID NO: 2561810
uccuaccuugaguuuacua

SEQ ID NO: 2561812 - RNA, 19 nt, Artificial Sequence
  Description of Artificial Sequence: Synthetic oligonucleotide
  Sense strand starting at position 3882 of SEQ ID NO: 1888860
uuaugcaauguugaaauca

SEQ ID NO: 2561813 - RNA, 19 nt, Artificial Sequence
  Description of Artificial Sequence: Synthetic oligonucleotide
  Antisense strand to SEQ ID NO: 2561812
ugauuucaacauugcauaa

SEQ ID NO: 2561814 - RNA, 19 nt, Artificial Sequence
  Description of Artificial Sequence: Synthetic oligonucleotide
  Sense strand starting at position 186 of SEQ ID NO: 1888861
ggcuaagucagagaggcau

SEQ ID NO: 2561815 - RNA, 19 nt, Artificial Sequence
  Description of Artificial Sequence: Synthetic oligonucleotide
  Antisense strand to SEQ ID NO: 2561814
augccucucugacuuagcc

SEQ ID NO: 2561816 - RNA, 19 nt, Artificial Sequence
  Description of Artificial Sequence: Synthetic oligonucleotide
  Sense strand starting at position 249 of SEQ ID NO: 1888861
aaggucuccagguggagaa

SEQ ID NO: 2561817 - RNA, 19 nt, Artificial Sequence
  Description of Artificial Sequence: Synthetic oligonucleotide
  Antisense strand to SEQ ID NO: 2561816
uucuccaccuggagaccuu

SEQ ID NO: 2561818 - RNA, 19 nt, Artificial Sequence
  Description of Artificial Sequence: Synthetic oligonucleotide
  Sense strand starting at position 288 of SEQ ID NO: 1888861
ugaacuguuggaggauuau

SEQ ID NO: 2561819 - RNA, 19 nt, Artificial Sequence
  Description of Artificial Sequence: Synthetic oligonucleotide
  Antisense strand to SEQ ID NO: 2561818
auaauccuccaacaguuca

SEQ ID NO: 2561820 - RNA, 19 nt, Artificial Sequence
  Description of Artificial Sequence: Synthetic oligonucleotide
  Sense strand starting at position 297 of SEQ ID NO: 1888861
ggaggauuauacuaaacac

SEQ ID NO: 2561821 - RNA, 19 nt, Artificial Sequence
  Description of Artificial Sequence: Synthetic oligonucleotide
  Antisense strand to SEQ ID NO: 2561820
guguuuaguauaauccucc

SEQ ID NO: 2561822 - RNA, 19 nt, Artificial Sequence
  Description of Artificial Sequence: Synthetic oligonucleotide
  Sense strand starting at position 344 of SEQ ID NO: 1888861
agagaagagcucuguuaac

SEQ ID NO: 2561823 - RNA, 19 nt, Artificial Sequence
  Description of Artificial Sequence: Synthetic oligonucleotide
  Antisense strand to SEQ ID NO: 2561822
guuaacagagcucuucucu

SEQ ID NO: 2561824 - RNA, 19 nt, Artificial Sequence
  Description of Artificial Sequence: Synthetic oligonucleotide
  Sense strand starting at position 404 of SEQ ID NO: 1888861
agcugucucuccuugacaa

SEQ ID NO: 2561825 - RNA, 19 nt, Artificial Sequence
  Description of Artificial Sequence: Synthetic oligonucleotide
  Antisense strand to SEQ ID NO: 2561824
uugucaaggagagacagcu

SEQ ID NO: 2561826 - RNA, 19 nt, Artificial Sequence
  Description of Artificial Sequence: Synthetic oligonucleotide
  Sense strand starting at position 745 of SEQ ID NO: 1888861
ugggauguuccugggcaca

SEQ ID NO: 2561827 - RNA, 19 nt, Artificial Sequence
  Description of Artificial Sequence: Synthetic oligonucleotide
  Antisense strand to SEQ ID NO: 2561826
ugugcccaggaacauccca

SEQ ID NO: 2561828 - RNA, 19 nt, Artificial Sequence
  Description of Artificial Sequence: Synthetic oligonucleotide
  Sense strand starting at position 747 of SEQ ID NO: 1888861
ggauguuccugggcacaua

SEQ ID NO: 2561829 - RNA, 19 nt, Artificial Sequence
  Description of Artificial Sequence: Synthetic oligonucleotide
  Antisense strand to SEQ ID NO: 2561828
uaugugcccaggaacaucc

SEQ ID NO: 2561830 - RNA, 19 nt, Artificial Sequence
  Description of Artificial Sequence: Synthetic oligonucleotide
  Sense strand starting at position 748 of SEQ ID NO: 1888861
gauguuccugggcacauaa

SEQ ID NO: 2561831 - RNA, 19 nt, Artificial Sequence
  Description of Artificial Sequence: Synthetic oligonucleotide
  Antisense strand to SEQ ID NO: 2561830
uuaugugcccaggaacauc

SEQ ID NO: 2561832 - RNA, 19 nt, Artificial Sequence
  Description of Artificial Sequence: Synthetic oligonucleotide
  Sense strand starting at position 1496 of SEQ ID NO: 1888861
agcggaaaguccuuuccaa

SEQ ID NO: 2561833 - RNA, 19 nt, Artificial Sequence
  Description of Artificial Sequence: Synthetic oligonucleotide
  Antisense strand to SEQ ID NO: 2561832
uuggaaaggacuuuccgcu

SEQ ID NO: 2561834 - RNA, 19 nt, Artificial Sequence
  Description of Artificial Sequence: Synthetic oligonucleotide
  Sense strand starting at position 1530 of SEQ ID NO: 1888861
ugugccaaucuccagaaua

SEQ ID NO: 2561835 - RNA, 19 nt, Artificial Sequence
  Description of Artificial Sequence: Synthetic oligonucleotide
  Antisense strand to SEQ ID NO: 2561834
uauucuggagauuggcaca

SEQ ID NO: 2561836 - RNA, 19 nt, Artificial Sequence
  Description of Artificial Sequence: Synthetic oligonucleotide
  Sense strand starting at position 1705 of SEQ ID NO: 1888861
ccauuaguaucuccaaguu

SEQ ID NO: 2561837 - RNA, 19 nt, Artificial Sequence
  Description of Artificial Sequence: Synthetic oligonucleotide
  Antisense strand to SEQ ID NO: 2561836
aacuuggagauacuaaugg

SEQ ID NO: 2561838 - RNA, 19 nt, Artificial Sequence
  Description of Artificial Sequence: Synthetic oligonucleotide
  Sense strand starting at position 1906 of SEQ ID NO: 1888861
uagcuuguugauggacgaa

SEQ ID NO: 2561839 - RNA, 19 nt, Artificial Sequence
  Description of Artificial Sequence: Synthetic oligonucleotide
  Antisense strand to SEQ ID NO: 2561838
uucguccaucaacaagcua

SEQ ID NO: 2561840 - RNA, 19 nt, Artificial Sequence
  Description of Artificial Sequence: Synthetic oligonucleotide
  Sense strand starting at position 1949 of SEQ ID NO: 1888861
gaaugaguugaaugcacau

SEQ ID NO: 2561841 - RNA, 19 nt, Artificial Sequence
  Description of Artificial Sequence: Synthetic oligonucleotide
  Antisense strand to SEQ ID NO: 2561840
augugcauucaacucauuc

SEQ ID NO: 2561842 - RNA, 19 nt, Artificial Sequence
  Description of Artificial Sequence: Synthetic oligonucleotide
  Sense strand starting at position 2114 of SEQ ID NO: 1888861
acaguaacucuaugagaug

SEQ ID NO: 2561843 - RNA, 19 nt, Artificial Sequence
  Description of Artificial Sequence: Synthetic oligonucleotide
  Antisense strand to SEQ ID NO: 2561842
caucucauagaguuacugu

SEQ ID NO: 2561844 - RNA, 19 nt, Artificial Sequence
  Description of Artificial Sequence: Synthetic oligonucleotide
  Sense strand starting at position 2290 of SEQ ID NO: 1888861
agagguugcaaccaaagua

SEQ ID NO: 2561845 - RNA, 19 nt, Artificial Sequence
  Description of Artificial Sequence: Synthetic oligonucleotide
  Antisense strand to SEQ ID NO: 2561844
uacuuugguugcaaccucu

SEQ ID NO: 2561846 - RNA, 19 nt, Artificial Sequence
  Description of Artificial Sequence: Synthetic oligonucleotide
  Sense strand starting at position 2312 of SEQ ID NO: 1888861
ggaguuacaguaugauauu

SEQ ID NO: 2561847 - RNA, 19 nt, Artificial Sequence
  Description of Artificial Sequence: Synthetic oligonucleotide
  Antisense strand to SEQ ID NO: 2561846
aauaucauacuguaacucc

SEQ ID NO: 2561848 - RNA, 19 nt, Artificial Sequence
  Description of Artificial Sequence: Synthetic oligonucleotide
  Sense strand starting at position 2345 of SEQ ID NO: 1888861
ggagauaauugacaugaag

SEQ ID NO: 2561849 - RNA, 19 nt, Artificial Sequence
  Description of Artificial Sequence: Synthetic oligonucleotide
  Antisense strand to SEQ ID NO: 2561848
cuucaugucaauuaucucc

SEQ ID NO: 2561850 - RNA, 19 nt, Artificial Sequence
  Description of Artificial Sequence: Synthetic oligonucleotide
  Sense strand starting at position 2362 of SEQ ID NO: 1888861
agacaucacuggccuguua

SEQ ID NO: 2561851 - RNA, 19 nt, Artificial Sequence
  Description of Artificial Sequence: Synthetic oligonucleotide
  Antisense strand to SEQ ID NO: 2561850
uaacaggccagugaugucu

SEQ ID NO: 2561852 - RNA, 19 nt, Artificial Sequence
  Description of Artificial Sequence: Synthetic oligonucleotide
  Sense strand starting at position 2364 of SEQ ID NO: 1888861
acaucacuggccuguuaca

SEQ ID NO: 2561853 - RNA, 19 nt, Artificial Sequence
  Description of Artificial Sequence: Synthetic oligonucleotide
  Antisense strand to SEQ ID NO: 2561852
uguaacaggccagugaugu

SEQ ID NO: 2561854 - RNA, 19 nt, Artificial Sequence
  Description of Artificial Sequence: Synthetic oligonucleotide
  Sense strand starting at position 2384 of SEQ ID NO: 1888861
guacuuuauuuguccucuu

SEQ ID NO: 2561855 - RNA, 19 nt, Artificial Sequence
  Description of Artificial Sequence: Synthetic oligonucleotide
  Antisense strand to SEQ ID NO: 2561854
aagaggacaaauaaaguac

SEQ ID NO: 2561856 - RNA, 19 nt, Artificial Sequence
  Description of Artificial Sequence: Synthetic oligonucleotide
  Sense strand starting at position 2494 of SEQ ID NO: 1888861
caucaugggagguguacaa

SEQ ID NO: 2561857 - RNA, 19 nt, Artificial Sequence
  Description of Artificial Sequence: Synthetic oligonucleotide
  Antisense strand to SEQ ID NO: 2561856
uuguacaccucccaugaug

SEQ ID NO: 2561858 - RNA, 19 nt, Artificial Sequence
  Description of Artificial Sequence: Synthetic oligonucleotide
  Sense strand starting at position 2807 of SEQ ID NO: 1888861
uuccuauagcacuacgauu

SEQ ID NO: 2561859 - RNA, 19 nt, Artificial Sequence
  Description of Artificial Sequence: Synthetic oligonucleotide
  Antisense strand to SEQ ID NO: 2561858
aaucguagugcuauaggaa

SEQ ID NO: 2561860 - RNA, 19 nt, Artificial Sequence
  Description of Artificial Sequence: Synthetic oligonucleotide
  Sense strand starting at position 2860 of SEQ ID NO: 1888861
cuggauguuacgggcugaa

SEQ ID NO: 2561861 - RNA, 19 nt, Artificial Sequence
  Description of Artificial Sequence: Synthetic oligonucleotide
  Antisense strand to SEQ ID NO: 2561860
uucagcccguaacauccag

SEQ ID NO: 2561862 - RNA, 19 nt, Artificial Sequence
  Description of Artificial Sequence: Synthetic oligonucleotide
  Sense strand starting at position 2999 of SEQ ID NO: 1888861
cugauaccuuguucucaga

SEQ ID NO: 2561863 - RNA, 19 nt, Artificial Sequence
  Description of Artificial Sequence: Synthetic oligonucleotide
  Antisense strand to SEQ ID NO: 2561862
ucugagaacaagguaucag

SEQ ID NO: 2561864 - RNA, 19 nt, Artificial Sequence
  Description of Artificial Sequence: Synthetic oligonucleotide
  Sense strand starting at position 3148 of SEQ ID NO: 1888861
cuuaaauggcauuaugugu

SEQ ID NO: 2561865 - RNA, 19 nt, Artificial Sequence
  Description of Artificial Sequence: Synthetic oligonucleotide
  Antisense strand to SEQ ID NO: 2561864
acacauaaugccauuuaag

SEQ ID NO: 2561866 - RNA, 19 nt, Artificial Sequence
  Description of Artificial Sequence: Synthetic oligonucleotide
  Sense strand starting at position 3310 of SEQ ID NO: 1888861
ugugacagaugcucaggau

SEQ ID NO: 2561867 - RNA, 19 nt, Artificial Sequence
  Description of Artificial Sequence: Synthetic oligonucleotide
  Antisense strand to SEQ ID NO: 2561866
auccugagcaucugucaca

SEQ ID NO: 2561868 - RNA, 19 nt, Artificial Sequence
  Description of Artificial Sequence: Synthetic oligonucleotide
  Sense strand starting at position 3332 of SEQ ID NO: 1888861
agacaaaguuccucaugga

SEQ ID NO: 2561869 - RNA, 19 nt, Artificial Sequence
  Description of Artificial Sequence: Synthetic oligonucleotide
  Antisense strand to SEQ ID NO: 2561868
uccaugaggaacuuugucu

SEQ ID NO: 2561870 - RNA, 19 nt, Artificial Sequence
  Description of Artificial Sequence: Synthetic oligonucleotide
  Sense strand starting at position 3418 of SEQ ID NO: 1888861
uguaauaugugcucugaag

SEQ ID NO: 2561871 - RNA, 19 nt, Artificial Sequence
  Description of Artificial Sequence: Synthetic oligonucleotide
  Antisense strand to SEQ ID NO: 2561870
cuucagagcacauauuaca

SEQ ID NO: 2561872 - RNA, 19 nt, Artificial Sequence
  Description of Artificial Sequence: Synthetic oligonucleotide
  Sense strand starting at position 3420 of SEQ ID NO: 1888861
uaauaugugcucugaagga

SEQ ID NO: 2561873 - RNA, 19 nt, Artificial Sequence
  Description of Artificial Sequence: Synthetic oligonucleotide
  Antisense strand to SEQ ID NO: 2561872
uccuucagagcacauauua

SEQ ID NO: 2561874 - RNA, 19 nt, Artificial Sequence
  Description of Artificial Sequence: Synthetic oligonucleotide
  Sense strand starting at position 3424 of SEQ ID NO: 1888861
augugcucugaaggauaua

SEQ ID NO: 2561875 - RNA, 19 nt, Artificial Sequence
  Description of Artificial Sequence: Synthetic oligonucleotide
  Antisense strand to SEQ ID NO: 2561874
uauauccuucagagcacau

SEQ ID NO: 2561876 - RNA, 19 nt, Artificial Sequence
  Description of Artificial Sequence: Synthetic oligonucleotide
  Sense strand starting at position 3425 of SEQ ID NO: 1888861
ugugcucugaaggauauaa

SEQ ID NO: 2561877 - RNA, 19 nt, Artificial Sequence
  Description of Artificial Sequence: Synthetic oligonucleotide
  Antisense strand to SEQ ID NO: 2561876
uuauauccuucagagcaca

SEQ ID NO: 2561878 - RNA, 19 nt, Artificial Sequence
  Description of Artificial Sequence: Synthetic oligonucleotide
  Sense strand starting at position 3444 of SEQ ID NO: 1888861
accaauuuaugugauguga

SEQ ID NO: 2561879 - RNA, 19 nt, Artificial Sequence
  Description of Artificial Sequence: Synthetic oligonucleotide
  Antisense strand to SEQ ID NO: 2561878
ucacaucacauaaauuggu

SEQ ID NO: 2561880 - RNA, 19 nt, Artificial Sequence
  Description of Artificial Sequence: Synthetic oligonucleotide
  Sense strand starting at position 3459 of SEQ ID NO: 1888861
gugaguagcccuggaauug

SEQ ID NO: 2561881 - RNA, 19 nt, Artificial Sequence
  Description of Artificial Sequence: Synthetic oligonucleotide
  Antisense strand to SEQ ID NO: 2561880
caauuccagggcuacucac

SEQ ID NO: 2561882 - RNA, 19 nt, Artificial Sequence
  Description of Artificial Sequence: Synthetic oligonucleotide
  Sense strand starting at position 3460 of SEQ ID NO: 1888861
ugaguagcccuggaauugu

SEQ ID NO: 2561883 - RNA, 19 nt, Artificial Sequence
  Description of Artificial Sequence: Synthetic oligonucleotide
  Antisense strand to SEQ ID NO: 2561882
acaauuccagggcuacuca

SEQ ID NO: 2561884 - RNA, 19 nt, Artificial Sequence
  Description of Artificial Sequence: Synthetic oligonucleotide
  Sense strand starting at position 3718 of SEQ ID NO: 1888861
gugccaugaauggaagagu

SEQ ID NO: 2561885 - RNA, 19 nt, Artificial Sequence
  Description of Artificial Sequence: Synthetic oligonucleotide
  Antisense strand to SEQ ID NO: 2561884
acucuuccauucauggcac

SEQ ID NO: 2561886 - RNA, 19 nt, Artificial Sequence
  Description of Artificial Sequence: Synthetic oligonucleotide
  Sense strand starting at position 3727 of SEQ ID NO: 1888861
auggaagaguuguucaaga

SEQ ID NO: 2561887 - RNA, 19 nt, Artificial Sequence
  Description of Artificial Sequence: Synthetic oligonucleotide
  Antisense strand to SEQ ID NO: 2561886
ucuugaacaacucuuccau

SEQ ID NO: 2561888 - RNA, 19 nt, Artificial Sequence
  Description of Artificial Sequence: Synthetic oligonucleotide
  Sense strand starting at position 3808 of SEQ ID NO: 1888861
ggagaaauacccuggguuc

SEQ ID NO: 2561889 - RNA, 19 nt, Artificial Sequence
  Description of Artificial Sequence: Synthetic oligonucleotide
  Antisense strand to SEQ ID NO: 2561888
gaacccaggguauuucucc

SEQ ID NO: 2561890 - RNA, 19 nt, Artificial Sequence
  Description of Artificial Sequence: Synthetic oligonucleotide
  Sense strand starting at position 3809 of SEQ ID NO: 1888861
gagaaauacccuggguucu

SEQ ID NO: 2561891 - RNA, 19 nt, Artificial Sequence
  Description of Artificial Sequence: Synthetic oligonucleotide
  Antisense strand to SEQ ID NO: 2561890
agaacccaggguauuucuc

SEQ ID NO: 2561892 - RNA, 19 nt, Artificial Sequence
  Description of Artificial Sequence: Synthetic oligonucleotide
  Sense strand starting at position 3946 of SEQ ID NO: 1888861
caaacaggccaguguuaau

SEQ ID NO: 2561893 - RNA, 19 nt, Artificial Sequence
  Description of Artificial Sequence: Synthetic oligonucleotide
  Antisense strand to SEQ ID NO: 2561892
auuaacacuggccuguuug

SEQ ID NO: 2561894 - RNA, 19 nt, Artificial Sequence
  Description of Artificial Sequence: Synthetic oligonucleotide
  Sense strand starting at position 84 of SEQ ID NO: 1888862
ggaggaugcugggugguaa

SEQ ID NO: 2561895 - RNA, 19 nt, Artificial Sequence
  Description of Artificial Sequence: Synthetic oligonucleotide
  Antisense strand to SEQ ID NO: 2561894
uuaccacccagcauccucc

SEQ ID NO: 2561896 - RNA, 19 nt, Artificial Sequence
  Description of Artificial Sequence: Synthetic oligonucleotide
  Sense strand starting at position 85 of SEQ ID NO: 1888862
gaggaugcugggugguaaa

SEQ ID NO: 2561897 - RNA, 19 nt, Artificial Sequence
  Description of Artificial Sequence: Synthetic oligonucleotide
  Antisense strand to SEQ ID NO: 2561896
uuuaccacccagcauccuc

SEQ ID NO: 2561898 - RNA, 19 nt, Artificial Sequence
  Description of Artificial Sequence: Synthetic oligonucleotide
  Sense strand starting at position 173 of SEQ ID NO: 1888862
uugaaagaaucagucauug

SEQ ID NO: 2561899 - RNA, 19 nt, Artificial Sequence
  Description of Artificial Sequence: Synthetic oligonucleotide
  Antisense strand to SEQ ID NO: 2561898
caaugacugauucuuucaa

SEQ ID NO: 2561900 - RNA, 19 nt, Artificial Sequence
  Description of Artificial Sequence: Synthetic oligonucleotide
  Sense strand starting at position 177 of SEQ ID NO: 1888862
aagaaucagucauugguuu

SEQ ID NO: 2561901 - RNA, 19 nt, Artificial Sequence
  Description of Artificial Sequence: Synthetic oligonucleotide
  Antisense strand to SEQ ID NO: 2561900
aaaccaaugacugauucuu

SEQ ID NO: 2561902 - RNA, 19 nt, Artificial Sequence
  Description of Artificial Sequence: Synthetic oligonucleotide
  Sense strand starting at position 185 of SEQ ID NO: 1888862
gucauugguuuccuaagga

SEQ ID NO: 2561903 - RNA, 19 nt, Artificial Sequence
  Description of Artificial Sequence: Synthetic oligonucleotide
  Antisense strand to SEQ ID NO: 2561902
uccuuaggaaaccaaugac

SEQ ID NO: 2561904 - RNA, 19 nt, Artificial Sequence
  Description of Artificial Sequence: Synthetic oligonucleotide
  Sense strand starting at position 396 of SEQ ID NO: 1888862
uucugaaaccugcaaggua

SEQ ID NO: 2561905 - RNA, 19 nt, Artificial Sequence
  Description of Artificial Sequence: Synthetic oligonucleotide
  Antisense strand to SEQ ID NO: 2561904
uaccuugcagguuucagaa

SEQ ID NO: 2561906 - RNA, 19 nt, Artificial Sequence
  Description of Artificial Sequence: Synthetic oligonucleotide
  Sense strand starting at position 533 of SEQ ID NO: 1888862
acacaauguuagguggaga

SEQ ID NO: 2561907 - RNA, 19 nt, Artificial Sequence
  Description of Artificial Sequence: Synthetic oligonucleotide
  Antisense strand to SEQ ID NO: 2561906
ucuccaccuaacauugugu

SEQ ID NO: 2561908 - RNA, 19 nt, Artificial Sequence
  Description of Artificial Sequence: Synthetic oligonucleotide
  Sense strand starting at position 536 of SEQ ID NO: 1888862
caauguuagguggagacuu

SEQ ID NO: 2561909 - RNA, 19 nt, Artificial Sequence
  Description of Artificial Sequence: Synthetic oligonucleotide
  Antisense strand to SEQ ID NO: 2561908
aagucuccaccuaacauug

SEQ ID NO: 2561910 - RNA, 19 nt, Artificial Sequence
  Description of Artificial Sequence: Synthetic oligonucleotide
  Sense strand starting at position 623 of SEQ ID NO: 1888862
gaucaagcccuuuggauga

SEQ ID NO: 2561911 - RNA, 19 nt, Artificial Sequence
  Description of Artificial Sequence: Synthetic oligonucleotide
  Antisense strand to SEQ ID NO: 2561910
ucauccaaagggcuugauc

SEQ ID NO: 2561912 - RNA, 19 nt, Artificial Sequence
  Description of Artificial Sequence: Synthetic oligonucleotide
  Sense strand starting at position 641 of SEQ ID NO: 1888862
aaaggagggcugugagauu

SEQ ID NO: 2561913 - RNA, 19 nt, Artificial Sequence
  Description of Artificial Sequence: Synthetic oligonucleotide
  Antisense strand to SEQ ID NO: 2561912
aaucucacagcccuccuuu

SEQ ID NO: 2561914 - RNA, 19 nt, Artificial Sequence
  Description of Artificial Sequence: Synthetic oligonucleotide
  Sense strand starting at position 873 of SEQ ID NO: 1888862
guugcacuucuaugaggaa

SEQ ID NO: 2561915 - RNA, 19 nt, Artificial Sequence
  Description of Artificial Sequence: Synthetic oligonucleotide
  Antisense strand to SEQ ID NO: 2561914
uuccucauagaagugcaac

SEQ ID NO: 2561916 - RNA, 19 nt, Artificial Sequence
  Description of Artificial Sequence: Synthetic oligonucleotide
  Sense strand starting at position 1026 of SEQ ID NO: 1888862
auucuugauuugcucagua

SEQ ID NO: 2561917 - RNA, 19 nt, Artificial Sequence
  Description of Artificial Sequence: Synthetic oligonucleotide
  Antisense strand to SEQ ID NO: 2561916
uacugagcaaaucaagaau

SEQ ID NO: 2561918 - RNA, 19 nt, Artificial Sequence
  Description of Artificial Sequence: Synthetic oligonucleotide
  Sense strand starting at position 1079 of SEQ ID NO: 1888862
aaggaaaguugagcucauu

SEQ ID NO: 2561919 - RNA, 19 nt, Artificial Sequence
  Description of Artificial Sequence: Synthetic oligonucleotide
  Antisense strand to SEQ ID NO: 2561918
aaugagcucaacuuuccuu

SEQ ID NO: 2561920 - RNA, 19 nt, Artificial Sequence
  Description of Artificial Sequence: Synthetic oligonucleotide
  Sense strand starting at position 1420 of SEQ ID NO: 1888862
gacgucaugcuagaauguu

SEQ ID NO: 2561921 - RNA, 19 nt, Artificial Sequence
  Description of Artificial Sequence: Synthetic oligonucleotide
  Antisense strand to SEQ ID NO: 2561920
aacauucuagcaugacguc

SEQ ID NO: 2561922 - RNA, 19 nt, Artificial Sequence
  Description of Artificial Sequence: Synthetic oligonucleotide
  Sense strand starting at position 1631 of SEQ ID NO: 1888862
gcucacaccuccuuggauu

SEQ ID NO: 2561923 - RNA, 19 nt, Artificial Sequence
  Description of Artificial Sequence: Synthetic oligonucleotide
  Antisense strand to SEQ ID NO: 2561922
aauccaaggaggugugagc

SEQ ID NO: 2561924 - RNA, 19 nt, Artificial Sequence
  Description of Artificial Sequence: Synthetic oligonucleotide
  Sense strand starting at position 1729 of SEQ ID NO: 1888862
ccaugauuagcagagguuu

SEQ ID NO: 2561925 - RNA, 19 nt, Artificial Sequence
  Description of Artificial Sequence: Synthetic oligonucleotide
  Antisense strand to SEQ ID NO: 2561924
aaaccucugcuaaucaugg

SEQ ID NO: 2561926 - RNA, 19 nt, Artificial Sequence
  Description of Artificial Sequence: Synthetic oligonucleotide
  Sense strand starting at position 1731 of SEQ ID NO: 1888862
augauuagcagagguuuga

SEQ ID NO: 2561927 - RNA, 19 nt, Artificial Sequence
  Description of Artificial Sequence: Synthetic oligonucleotide
  Antisense strand to SEQ ID NO: 2561926
ucaaaccucugcuaaucau

SEQ ID NO: 2561928 - RNA, 19 nt, Artificial Sequence
  Description of Artificial Sequence: Synthetic oligonucleotide
  Sense strand starting at position 2003 of SEQ ID NO: 1888862
ugcagaucugcagaaucau

SEQ ID NO: 2561929 - RNA, 19 nt, Artificial Sequence
  Description of Artificial Sequence: Synthetic oligonucleotide
  Antisense strand to SEQ ID NO: 2561928
augauucugcagaucugca

SEQ ID NO: 2561930 - RNA, 19 nt, Artificial Sequence
  Description of Artificial Sequence: Synthetic oligonucleotide
  Sense strand starting at position 2011 of SEQ ID NO: 1888862
ugcagaaucaugggcugau

SEQ ID NO: 2561931 - RNA, 19 nt, Artificial Sequence
  Description of Artificial Sequence: Synthetic oligonucleotide
  Antisense strand to SEQ ID NO: 2561930
aucagcccaugauucugca

SEQ ID NO: 2561932 - RNA, 19 nt, Artificial Sequence
  Description of Artificial Sequence: Synthetic oligonucleotide
  Sense strand starting at position 2012 of SEQ ID NO: 1888862
gcagaaucaugggcugaua

SEQ ID NO: 2561933 - RNA, 19 nt, Artificial Sequence
  Description of Artificial Sequence: Synthetic oligonucleotide
  Antisense strand to SEQ ID NO: 2561932
uaucagcccaugauucugc

SEQ ID NO: 2561934 - RNA, 19 nt, Artificial Sequence
  Description of Artificial Sequence: Synthetic oligonucleotide
  Sense strand starting at position 2025 of SEQ ID NO: 1888862
cugauaaaugauugcucuu

SEQ ID NO: 2561935 - RNA, 19 nt, Artificial Sequence
  Description of Artificial Sequence: Synthetic oligonucleotide
  Antisense strand to SEQ ID NO: 2561934
aagagcaaucauuuaucag

SEQ ID NO: 2561936 - RNA, 19 nt, Artificial Sequence
  Description of Artificial Sequence: Synthetic oligonucleotide
  Sense strand starting at position 2176 of SEQ ID NO: 1888862
cagccaucugcagaaguuu

SEQ ID NO: 2561937 - RNA, 19 nt, Artificial Sequence
  Description of Artificial Sequence: Synthetic oligonucleotide
  Antisense strand to SEQ ID NO: 2561936
aaacuucugcagauggcug

SEQ ID NO: 2561938 - RNA, 19 nt, Artificial Sequence
  Description of Artificial Sequence: Synthetic oligonucleotide
  Sense strand starting at position 2534 of SEQ ID NO: 1888862
gggacuugcuguuuaaaga

SEQ ID NO: 2561939 - RNA, 19 nt, Artificial Sequence
  Description of Artificial Sequence: Synthetic oligonucleotide
  Antisense strand to SEQ ID NO: 2561938
ucuuuaaacagcaaguccc

SEQ ID NO: 2561940 - RNA, 19 nt, Artificial Sequence
  Description of Artificial Sequence: Synthetic oligonucleotide
  Sense strand starting at position 2535 of SEQ ID NO: 1888862
ggacuugcuguuuaaagag

SEQ ID NO: 2561941 - RNA, 19 nt, Artificial Sequence
  Description of Artificial Sequence: Synthetic oligonucleotide
  Antisense strand to SEQ ID NO: 2561940
cucuuuaaacagcaagucc

SEQ ID NO: 2561942 - RNA, 19 nt, Artificial Sequence
  Description of Artificial Sequence: Synthetic oligonucleotide
  Sense strand starting at position 2655 of SEQ ID NO: 1888862
gggugagucacuuaagcuu

SEQ ID NO: 2561943 - RNA, 19 nt, Artificial Sequence
  Description of Artificial Sequence: Synthetic oligonucleotide
  Antisense strand to SEQ ID NO: 2561942
aagcuuaagugacucaccc

SEQ ID NO: 2561944 - RNA, 19 nt, Artificial Sequence
  Description of Artificial Sequence: Synthetic oligonucleotide
  Sense strand starting at position 2698 of SEQ ID NO: 1888862
cugcuaacugaauguaauc

SEQ ID NO: 2561945 - RNA, 19 nt, Artificial Sequence
  Description of Artificial Sequence: Synthetic oligonucleotide
  Antisense strand to SEQ ID NO: 2561944
gauuacauucaguuagcag

SEQ ID NO: 2561946 - RNA, 19 nt, Artificial Sequence
  Description of Artificial Sequence: Synthetic oligonucleotide
  Sense strand starting at position 2750 of SEQ ID NO: 1888862
gccaguguuggacacacua

SEQ ID NO: 2561947 - RNA, 19 nt, Artificial Sequence
  Description of Artificial Sequence: Synthetic oligonucleotide
  Antisense strand to SEQ ID NO: 2561946
uaguguguccaacacuggc

SEQ ID NO: 2561948 - RNA, 19 nt, Artificial Sequence
  Description of Artificial Sequence: Synthetic oligonucleotide
  Sense strand starting at position 3186 of SEQ ID NO: 1888862
gagaaagacuuuguuagca

SEQ ID NO: 2561949 - RNA, 19 nt, Artificial Sequence
  Description of Artificial Sequence: Synthetic oligonucleotide
  Antisense strand to SEQ ID NO: 2561948
ugcuaacaaagucuuucuc

SEQ ID NO: 2561950 - RNA, 19 nt, Artificial Sequence
  Description of Artificial Sequence: Synthetic oligonucleotide
  Sense strand starting at position 3194 of SEQ ID NO: 1888862
cuuuguuagcaucagaaau

SEQ ID NO: 2561951 - RNA, 19 nt, Artificial Sequence
  Description of Artificial Sequence: Synthetic oligonucleotide
  Antisense strand to SEQ ID NO: 2561950
auuucugaugcuaacaaag

SEQ ID NO: 2561952 - RNA, 19 nt, Artificial Sequence
  Description of Artificial Sequence: Synthetic oligonucleotide
  Sense strand starting at position 3214 of SEQ ID NO: 1888862
augcuuugagagggaucuu

SEQ ID NO: 2561953 - RNA, 19 nt, Artificial Sequence
  Description of Artificial Sequence: Synthetic oligonucleotide
  Antisense strand to SEQ ID NO: 2561952
aagaucccucucaaagcau

SEQ ID NO: 2561954 - RNA, 19 nt, Artificial Sequence
  Description of Artificial Sequence: Synthetic oligonucleotide
  Sense strand starting at position 3232 of SEQ ID NO: 1888862
ucaguauuagcuggagaaa

SEQ ID NO: 2561955 - RNA, 19 nt, Artificial Sequence
  Description of Artificial Sequence: Synthetic oligonucleotide
  Antisense strand to SEQ ID NO: 2561954
uuucuccagcuaauacuga

SEQ ID NO: 2561956 - RNA, 19 nt, Artificial Sequence
  Description of Artificial Sequence: Synthetic oligonucleotide
  Sense strand starting at position 3309 of SEQ ID NO: 1888862
gcugacaguguauauaaau

SEQ ID NO: 2561957 - RNA, 19 nt, Artificial Sequence
  Description of Artificial Sequence: Synthetic oligonucleotide
  Antisense strand to SEQ ID NO: 2561956
auuuauauacacugucagc

SEQ ID NO: 2561958 - RNA, 19 nt, Artificial Sequence
  Description of Artificial Sequence: Synthetic oligonucleotide
  Sense strand starting at position 3445 of SEQ ID NO: 1888862
ggcauacacucaucuggaa

SEQ ID NO: 2561959 - RNA, 19 nt, Artificial Sequence
  Description of Artificial Sequence: Synthetic oligonucleotide
  Antisense strand to SEQ ID NO: 2561958
uuccagaugaguguaugcc

SEQ ID NO: 2561960 - RNA, 19 nt, Artificial Sequence
  Description of Artificial Sequence: Synthetic oligonucleotide
  Sense strand starting at position 3467 of SEQ ID NO: 1888862
agacaauguuucccagcuu

SEQ ID NO: 2561961 - RNA, 19 nt, Artificial Sequence
  Description of Artificial Sequence: Synthetic oligonucleotide
  Antisense strand to SEQ ID NO: 2561960
aagcugggaaacauugucu

SEQ ID NO: 2561962 - RNA, 19 nt, Artificial Sequence
  Description of Artificial Sequence: Synthetic oligonucleotide
  Sense strand starting at position 3496 of SEQ ID NO: 1888862
uagguauggcuacaugacu

SEQ ID NO: 2561963 - RNA, 19 nt, Artificial Sequence
  Description of Artificial Sequence: Synthetic oligonucleotide
  Antisense strand to SEQ ID NO: 2561962
agucauguagccauaccua

SEQ ID NO: 2561964 - RNA, 19 nt, Artificial Sequence
  Description of Artificial Sequence: Synthetic oligonucleotide
  Sense strand starting at position 3501 of SEQ ID NO: 1888862
auggcuacaugacuaaaua

SEQ ID NO: 2561965 - RNA, 19 nt, Artificial Sequence
  Description of Artificial Sequence: Synthetic oligonucleotide
  Antisense strand to SEQ ID NO: 2561964
uauuuagucauguagccau

SEQ ID NO: 2561966 - RNA, 19 nt, Artificial Sequence
  Description of Artificial Sequence: Synthetic oligonucleotide
  Sense strand starting at position 3634 of SEQ ID NO: 1888862
ugcagauguaauggcugaa

SEQ ID NO: 2561967 - RNA, 19 nt, Artificial Sequence
  Description of Artificial Sequence: Synthetic oligonucleotide
  Antisense strand to SEQ ID NO: 2561966
uucagccauuacaucugca

SEQ ID NO: 2561968 - RNA, 19 nt, Artificial Sequence
  Description of Artificial Sequence: Synthetic oligonucleotide
  Sense strand starting at position 3637 of SEQ ID NO: 1888862
agauguaauggcugaagcu

SEQ ID NO: 2561969 - RNA, 19 nt, Artificial Sequence
  Description of Artificial Sequence: Synthetic oligonucleotide
  Antisense strand to SEQ ID NO: 2561968
agcuucagccauuacaucu

SEQ ID NO: 2561970 - RNA, 19 nt, Artificial Sequence
  Description of Artificial Sequence: Synthetic oligonucleotide
  Sense strand starting at position 3693 of SEQ ID NO: 1888862
cuagcuguggcagaacaau

SEQ ID NO: 2561971 - RNA, 19 nt, Artificial Sequence
  Description of Artificial Sequence: Synthetic oligonucleotide
  Antisense strand to SEQ ID NO: 2561970
auuguucugccacagcuag

SEQ ID NO: 2561972 - RNA, 19 nt, Artificial Sequence
  Description of Artificial Sequence: Synthetic oligonucleotide
  Sense strand starting at position 3745 of SEQ ID NO: 1888862
acuuucgguguguaacaaa

SEQ ID NO: 2561973 - RNA, 19 nt, Artificial Sequence
  Description of Artificial Sequence: Synthetic oligonucleotide
  Antisense strand to SEQ ID NO: 2561972
uuuguuacacaccgaaagu

SEQ ID NO: 2561974 - RNA, 19 nt, Artificial Sequence
  Description of Artificial Sequence: Synthetic oligonucleotide
  Sense strand starting at position 14 of SEQ ID NO: 1888863
ggcaacacugggugaucaa

SEQ ID NO: 2561975 - RNA, 19 nt, Artificial Sequence
  Description of Artificial Sequence: Synthetic oligonucleotide
  Antisense strand to SEQ ID NO: 2561974
uugaucacccaguguugcc

SEQ ID NO: 2561976 - RNA, 19 nt, Artificial Sequence
  Description of Artificial Sequence: Synthetic oligonucleotide
  Sense strand starting at position 86 of SEQ ID NO: 1888863
agagaauaaugggauuaga

SEQ ID NO: 2561977 - RNA, 19 nt, Artificial Sequence
  Description of Artificial Sequence: Synthetic oligonucleotide
  Antisense strand to SEQ ID NO: 2561976
ucuaaucccauuauucucu

SEQ ID NO: 2561978 - RNA, 19 nt, Artificial Sequence
  Description of Artificial Sequence: Synthetic oligonucleotide
  Sense strand starting at position 142 of SEQ ID NO: 1888863
cuaagaauugagcaucggu

SEQ ID NO: 2561979 - RNA, 19 nt, Artificial Sequence
  Description of Artificial Sequence: Synthetic oligonucleotide
  Antisense strand to SEQ ID NO: 2561978
accgaugcucaauucuuag

SEQ ID NO: 2561980 - RNA, 19 nt, Artificial Sequence
  Description of Artificial Sequence: Synthetic oligonucleotide
  Sense strand starting at position 513 of SEQ ID NO: 1888863
ugauauuucugagacaagu

SEQ ID NO: 2561981 - RNA, 19 nt, Artificial Sequence
  Description of Artificial Sequence: Synthetic oligonucleotide
  Antisense strand to SEQ ID NO: 2561980
acuugucucagaaauauca

SEQ ID NO: 2561982 - RNA, 19 nt, Artificial Sequence
  Description of Artificial Sequence: Synthetic oligonucleotide
  Sense strand starting at position 892 of SEQ ID NO: 1888863
aagugugauaaugguauga

SEQ ID NO: 2561983 - RNA, 19 nt, Artificial Sequence
  Description of Artificial Sequence: Synthetic oligonucleotide
  Antisense strand to SEQ ID NO: 2561982
ucauaccauuaucacacuu

SEQ ID NO: 2561984 - RNA, 19 nt, Artificial Sequence
  Description of Artificial Sequence: Synthetic oligonucleotide
  Sense strand starting at position 1137 of SEQ ID NO: 1888863
gccuuauuauucuccagag

SEQ ID NO: 2561985 - RNA, 19 nt, Artificial Sequence
  Description of Artificial Sequence: Synthetic oligonucleotide
  Antisense strand to SEQ ID NO: 2561984
cucuggagaauaauaaggc

SEQ ID NO: 2561986 - RNA, 19 nt, Artificial Sequence
  Description of Artificial Sequence: Synthetic oligonucleotide
  Sense strand starting at position 1320 of SEQ ID NO: 1888863
augaguggcucaccaaaug

SEQ ID NO: 2561987 - RNA, 19 nt, Artificial Sequence
  Description of Artificial Sequence: Synthetic oligonucleotide
  Antisense strand to SEQ ID NO: 2561986
cauuuggugagccacucau

SEQ ID NO: 2561988 - RNA, 19 nt, Artificial Sequence
  Description of Artificial Sequence: Synthetic oligonucleotide
  Sense strand starting at position 1396 of SEQ ID NO: 1888863
auaucuacaugagugucua

SEQ ID NO: 2561989 - RNA, 19 nt, Artificial Sequence
  Description of Artificial Sequence: Synthetic oligonucleotide
  Antisense strand to SEQ ID NO: 2561988
uagacacucauguagauau

SEQ ID NO: 2561990 - RNA, 19 nt, Artificial Sequence
  Description of Artificial Sequence: Synthetic oligonucleotide
  Sense strand starting at position 1400 of SEQ ID NO: 1888863
cuacaugagugucuaagaa

SEQ ID NO: 2561991 - RNA, 19 nt, Artificial Sequence
  Description of Artificial Sequence: Synthetic oligonucleotide
  Antisense strand to SEQ ID NO: 2561990
uucuuagacacucauguag

SEQ ID NO: 2561992 - RNA, 19 nt, Artificial Sequence
  Description of Artificial Sequence: Synthetic oligonucleotide
  Sense strand starting at position 1481 of SEQ ID NO: 1888863
aguggauucuacuuucuga

SEQ ID NO: 2561993 - RNA, 19 nt, Artificial Sequence
  Description of Artificial Sequence: Synthetic oligonucleotide
  Antisense strand to SEQ ID NO: 2561992
ucagaaaguagaauccacu

SEQ ID NO: 2561994 - RNA, 19 nt, Artificial Sequence
  Description of Artificial Sequence: Synthetic oligonucleotide
  Sense strand starting at position 1563 of SEQ ID NO: 1888863
acaaacuggguuugugaga

SEQ ID NO: 2561995 - RNA, 19 nt, Artificial Sequence
  Description of Artificial Sequence: Synthetic oligonucleotide
  Antisense strand to SEQ ID NO: 2561994
ucucacaaacccaguuugu

SEQ ID NO: 2561996 - RNA, 19 nt, Artificial Sequence
  Description of Artificial Sequence: Synthetic oligonucleotide
  Sense strand starting at position 1564 of SEQ ID NO: 1888863
caaacuggguuugugagaa

SEQ ID NO: 2561997 - RNA, 19 nt, Artificial Sequence
  Description of Artificial Sequence: Synthetic oligonucleotide
  Antisense strand to SEQ ID NO: 2561996
uucucacaaacccaguuug

SEQ ID NO: 2561998 - RNA, 19 nt, Artificial Sequence
  Description of Artificial Sequence: Synthetic oligonucleotide
  Sense strand starting at position 1572 of SEQ ID NO: 1888863
guuugugagaauuagcuag

SEQ ID NO: 2561999 - RNA, 19 nt, Artificial Sequence
  Description of Artificial Sequence: Synthetic oligonucleotide
  Antisense strand to SEQ ID NO: 2561998
cuagcuaauucucacaaac

SEQ ID NO: 2562000 - RNA, 19 nt, Artificial Sequence
  Description of Artificial Sequence: Synthetic oligonucleotide
  Sense strand starting at position 1574 of SEQ ID NO: 1888863
uugugagaauuagcuagaa

SEQ ID NO: 2562001 - RNA, 19 nt, Artificial Sequence
  Description of Artificial Sequence: Synthetic oligonucleotide
  Antisense strand to SEQ ID NO: 2562000
uucuagcuaauucucacaa

SEQ ID NO: 2562002 - RNA, 19 nt, Artificial Sequence
  Description of Artificial Sequence: Synthetic oligonucleotide
  Sense strand starting at position 2014 of SEQ ID NO: 1888863
cucucuuggcacgacauau

SEQ ID NO: 2562003 - RNA, 19 nt, Artificial Sequence
  Description of Artificial Sequence: Synthetic oligonucleotide
  Antisense strand to SEQ ID NO: 2562002
auaugucgugccaagagag

SEQ ID NO: 2562004 - RNA, 19 nt, Artificial Sequence
  Description of Artificial Sequence: Synthetic oligonucleotide
  Sense strand starting at position 2026 of SEQ ID NO: 1888863
gacauauggguaugcucua

SEQ ID NO: 2562005 - RNA, 19 nt, Artificial Sequence
  Description of Artificial Sequence: Synthetic oligonucleotide
  Antisense strand to SEQ ID NO: 2562004
uagagcauacccauauguc

SEQ ID NO: 2562006 - RNA, 19 nt, Artificial Sequence
  Description of Artificial Sequence: Synthetic oligonucleotide
  Sense strand starting at position 2073 of SEQ ID NO: 1888863
gcaagugggcagcaagaua

SEQ ID NO: 2562007 - RNA, 19 nt, Artificial Sequence
  Description of Artificial Sequence: Synthetic oligonucleotide
  Antisense strand to SEQ ID NO: 2562006
uaucuugcugcccacuugc

SEQ ID NO: 2562008 - RNA, 19 nt, Artificial Sequence
  Description of Artificial Sequence: Synthetic oligonucleotide
  Sense strand starting at position 2084 of SEQ ID NO: 1888863
gcaagauagccacaggagu

SEQ ID NO: 2562009 - RNA, 19 nt, Artificial Sequence
  Description of Artificial Sequence: Synthetic oligonucleotide
  Antisense strand to SEQ ID NO: 2562008
acuccuguggcuaucuugc

SEQ ID NO: 2562010 - RNA, 19 nt, Artificial Sequence
  Description of Artificial Sequence: Synthetic oligonucleotide
  Sense strand starting at position 2100 of SEQ ID NO: 1888863
agugcugauggguaaacua

SEQ ID NO: 2562011 - RNA, 19 nt, Artificial Sequence
  Description of Artificial Sequence: Synthetic oligonucleotide
  Antisense strand to SEQ ID NO: 2562010
uaguuuacccaucagcacu

SEQ ID NO: 2562012 - RNA, 19 nt, Artificial Sequence
  Description of Artificial Sequence: Synthetic oligonucleotide
  Sense strand starting at position 2137 of SEQ ID NO: 1888863
gcaggacagucauccagau

SEQ ID NO: 2562013 - RNA, 19 nt, Artificial Sequence
  Description of Artificial Sequence: Synthetic oligonucleotide
  Antisense strand to SEQ ID NO: 2562012
aucuggaugacuguccugc

SEQ ID NO: 2562014 - RNA, 19 nt, Artificial Sequence
  Description of Artificial Sequence: Synthetic oligonucleotide
  Sense strand starting at position 2403 of SEQ ID NO: 1888863
cuuggacuucuaugacugu

SEQ ID NO: 2562015 - RNA, 19 nt, Artificial Sequence
  Description of Artificial Sequence: Synthetic oligonucleotide
  Antisense strand to SEQ ID NO: 2562014
acagucauagaaguccaag

SEQ ID NO: 2562016 - RNA, 19 nt, Artificial Sequence
  Description of Artificial Sequence: Synthetic oligonucleotide
  Sense strand starting at position 2542 of SEQ ID NO: 1888863
uccuaacaccaguauagua

SEQ ID NO: 2562017 - RNA, 19 nt, Artificial Sequence
  Description of Artificial Sequence: Synthetic oligonucleotide
  Antisense strand to SEQ ID NO: 2562016
uacuauacugguguuagga

SEQ ID NO: 2562018 - RNA, 19 nt, Artificial Sequence
  Description of Artificial Sequence: Synthetic oligonucleotide
  Sense strand starting at position 2631 of SEQ ID NO: 1888863
aggugaucauuaucccuau

SEQ ID NO: 2562019 - RNA, 19 nt, Artificial Sequence
  Description of Artificial Sequence: Synthetic oligonucleotide
  Antisense strand to SEQ ID NO: 2562018
auagggauaaugaucaccu

SEQ ID NO: 2562020 - RNA, 19 nt, Artificial Sequence
  Description of Artificial Sequence: Synthetic oligonucleotide
  Sense strand starting at position 2632 of SEQ ID NO: 1888863
ggugaucauuaucccuauu

SEQ ID NO: 2562021 - RNA, 19 nt, Artificial Sequence
  Description of Artificial Sequence: Synthetic oligonucleotide
  Antisense strand to SEQ ID NO: 2562020
aauagggauaaugaucacc

SEQ ID NO: 2562022 - RNA, 19 nt, Artificial Sequence
  Description of Artificial Sequence: Synthetic oligonucleotide
  Sense strand starting at position 2675 of SEQ ID NO: 1888863
gagaacagaugguaagaaa

SEQ ID NO: 2562023 - RNA, 19 nt, Artificial Sequence
  Description of Artificial Sequence: Synthetic oligonucleotide
  Antisense strand to SEQ ID NO: 2562022
uuucuuaccaucuguucuc

SEQ ID NO: 2562024 - RNA, 19 nt, Artificial Sequence
  Description of Artificial Sequence: Synthetic oligonucleotide
  Sense strand starting at position 2965 of SEQ ID NO: 1888863
ggcuguguggucagauuag

SEQ ID NO: 2562025 - RNA, 19 nt, Artificial Sequence
  Description of Artificial Sequence: Synthetic oligonucleotide
  Antisense strand to SEQ ID NO: 2562024
cuaaucugaccacacagcc

SEQ ID NO: 2562026 - RNA, 19 nt, Artificial Sequence
  Description of Artificial Sequence: Synthetic oligonucleotide
  Sense strand starting at position 3094 of SEQ ID NO: 1888863
uccauauccuuggcauaug

SEQ ID NO: 2562027 - RNA, 19 nt, Artificial Sequence
  Description of Artificial Sequence: Synthetic oligonucleotide
  Antisense strand to SEQ ID NO: 2562026
cauaugccaaggauaugga

SEQ ID NO: 2562028 - RNA, 19 nt, Artificial Sequence
  Description of Artificial Sequence: Synthetic oligonucleotide
  Sense strand starting at position 3097 of SEQ ID NO: 1888863
auauccuuggcauaugcaa

SEQ ID NO: 2562029 - RNA, 19 nt, Artificial Sequence
  Description of Artificial Sequence: Synthetic oligonucleotide
  Antisense strand to SEQ ID NO: 2562028
uugcauaugccaaggauau

SEQ ID NO: 2562030 - RNA, 19 nt, Artificial Sequence
  Description of Artificial Sequence: Synthetic oligonucleotide
  Sense strand starting at position 3105 of SEQ ID NO: 1888863
ggcauaugcaauugggaaa

SEQ ID NO: 2562031 - RNA, 19 nt, Artificial Sequence
  Description of Artificial Sequence: Synthetic oligonucleotide
  Antisense strand to SEQ ID NO: 2562030
uuucccaauugcauaugcc

SEQ ID NO: 2562032 - RNA, 19 nt, Artificial Sequence
  Description of Artificial Sequence: Synthetic oligonucleotide
  Sense strand starting at position 3243 of SEQ ID NO: 1888863
gcagauguccaguacauag

SEQ ID NO: 2562033 - RNA, 19 nt, Artificial Sequence
  Description of Artificial Sequence: Synthetic oligonucleotide
  Antisense strand to SEQ ID NO: 2562032
cuauguacuggacaucugc

SEQ ID NO: 2562034 - RNA, 19 nt, Artificial Sequence
  Description of Artificial Sequence: Synthetic oligonucleotide
  Sense strand starting at position 3252 of SEQ ID NO: 1888863
caguacauaguuggacaua

SEQ ID NO: 2562035 - RNA, 19 nt, Artificial Sequence
  Description of Artificial Sequence: Synthetic oligonucleotide
  Antisense strand to SEQ ID NO: 2562034
uauguccaacuauguacug

SEQ ID NO: 2562036 - RNA, 19 nt, Artificial Sequence
  Description of Artificial Sequence: Synthetic oligonucleotide
  Sense strand starting at position 3287 of SEQ ID NO: 1888863
gagagaaguccaggcugga

SEQ ID NO: 2562037 - RNA, 19 nt, Artificial Sequence
  Description of Artificial Sequence: Synthetic oligonucleotide
  Antisense strand to SEQ ID NO: 2562036
uccagccuggacuucucuc

SEQ ID NO: 2562038 - RNA, 19 nt, Artificial Sequence
  Description of Artificial Sequence: Synthetic oligonucleotide
  Sense strand starting at position 3290 of SEQ ID NO: 1888863
agaaguccaggcuggaaau

SEQ ID NO: 2562039 - RNA, 19 nt, Artificial Sequence
  Description of Artificial Sequence: Synthetic oligonucleotide
  Antisense strand to SEQ ID NO: 2562038
auuuccagccuggacuucu

SEQ ID NO: 2562040 - RNA, 19 nt, Artificial Sequence
  Description of Artificial Sequence: Synthetic oligonucleotide
  Sense strand starting at position 3291 of SEQ ID NO: 1888863
gaaguccaggcuggaaaua

SEQ ID NO: 2562041 - RNA, 19 nt, Artificial Sequence
  Description of Artificial Sequence: Synthetic oligonucleotide
  Antisense strand to SEQ ID NO: 2562040
uauuuccagccuggacuuc

SEQ ID NO: 2562042 - RNA, 19 nt, Artificial Sequence
  Description of Artificial Sequence: Synthetic oligonucleotide
  Sense strand starting at position 3487 of SEQ ID NO: 1888863
aggcuugugagguaagaag

SEQ ID NO: 2562043 - RNA, 19 nt, Artificial Sequence
  Description of Artificial Sequence: Synthetic oligonucleotide
  Antisense strand to SEQ ID NO: 2562042
cuucuuaccucacaagccu

SEQ ID NO: 2562044 - RNA, 19 nt, Artificial Sequence
  Description of Artificial Sequence: Synthetic oligonucleotide
  Sense strand starting at position 3507 of SEQ ID NO: 1888863
caaccucaugaguguggaa

SEQ ID NO: 2562045 - RNA, 19 nt, Artificial Sequence
  Description of Artificial Sequence: Synthetic oligonucleotide
  Antisense strand to SEQ ID NO: 2562044
uuccacacucaugagguug

SEQ ID NO: 2562046 - RNA, 19 nt, Artificial Sequence
  Description of Artificial Sequence: Synthetic oligonucleotide
  Sense strand starting at position 3594 of SEQ ID NO: 1888863
ugacaacauugcccaguaa

SEQ ID NO: 2562047 - RNA, 19 nt, Artificial Sequence
  Description of Artificial Sequence: Synthetic oligonucleotide
  Antisense strand to SEQ ID NO: 2562046
uuacugggcaauguuguca

SEQ ID NO: 2562048 - RNA, 19 nt, Artificial Sequence
  Description of Artificial Sequence: Synthetic oligonucleotide
  Sense strand starting at position 3603 of SEQ ID NO: 1888863
ugcccaguaaauugggaaa

SEQ ID NO: 2562049 - RNA, 19 nt, Artificial Sequence
  Description of Artificial Sequence: Synthetic oligonucleotide
  Antisense strand to SEQ ID NO: 2562048
uuucccaauuuacugggca

SEQ ID NO: 2562050 - RNA, 19 nt, Artificial Sequence
  Description of Artificial Sequence: Synthetic oligonucleotide
  Sense strand starting at position 3638 of SEQ ID NO: 1888863
gaccuugaccagggucauu

SEQ ID NO: 2562051 - RNA, 19 nt, Artificial Sequence
  Description of Artificial Sequence: Synthetic oligonucleotide
  Antisense strand to SEQ ID NO: 2562050
aaugacccuggucaagguc

SEQ ID NO: 2562052 - RNA, 19 nt, Artificial Sequence
  Description of Artificial Sequence: Synthetic oligonucleotide
  Sense strand starting at position 3649 of SEQ ID NO: 1888863
gggucauuuaagugcugca

SEQ ID NO: 2562053 - RNA, 19 nt, Artificial Sequence
  Description of Artificial Sequence: Synthetic oligonucleotide
  Antisense strand to SEQ ID NO: 2562052
ugcagcacuuaaaugaccc

SEQ ID NO: 2562054 - RNA, 19 nt, Artificial Sequence
  Description of Artificial Sequence: Synthetic oligonucleotide
  Sense strand starting at position 6 of SEQ ID NO: 1888864
uguuaacuuuguccuagaa

SEQ ID NO: 2562055 - RNA, 19 nt, Artificial Sequence
  Description of Artificial Sequence: Synthetic oligonucleotide
  Antisense strand to SEQ ID NO: 2562054
uucuaggacaaaguuaaca

SEQ ID NO: 2562056 - RNA, 19 nt, Artificial Sequence
  Description of Artificial Sequence: Synthetic oligonucleotide
  Sense strand starting at position 316 of SEQ ID NO: 1888864
gguuguggugaaugagaga

SEQ ID NO: 2562057 - RNA, 19 nt, Artificial Sequence
  Description of Artificial Sequence: Synthetic oligonucleotide
  Antisense strand to SEQ ID NO: 2562056
ucucucauucaccacaacc

SEQ ID NO: 2562058 - RNA, 19 nt, Artificial Sequence
  Description of Artificial Sequence: Synthetic oligonucleotide
  Sense strand starting at position 325 of SEQ ID NO: 1888864
gaaugagagaucgggccau

SEQ ID NO: 2562059 - RNA, 19 nt, Artificial Sequence
  Description of Artificial Sequence: Synthetic oligonucleotide
  Antisense strand to SEQ ID NO: 2562058
auggcccgaucucucauuc

SEQ ID NO: 2562060 - RNA, 19 nt, Artificial Sequence
  Description of Artificial Sequence: Synthetic oligonucleotide
  Sense strand starting at position 329 of SEQ ID NO: 1888864
gagagaucgggccauugca

SEQ ID NO: 2562061 - RNA, 19 nt, Artificial Sequence
  Description of Artificial Sequence: Synthetic oligonucleotide
  Antisense strand to SEQ ID NO: 2562060
ugcaauggcccgaucucuc

SEQ ID NO: 2562062 - RNA, 19 nt, Artificial Sequence
  Description of Artificial Sequence: Synthetic oligonucleotide
  Sense strand starting at position 460 of SEQ ID NO: 1888864
gcuggcugugucuuaguaa

SEQ ID NO: 2562063 - RNA, 19 nt, Artificial Sequence
  Description of Artificial Sequence: Synthetic oligonucleotide
  Antisense strand to SEQ ID NO: 2562062
uuacuaagacacagccagc

SEQ ID NO: 2562064 - RNA, 19 nt, Artificial Sequence
  Description of Artificial Sequence: Synthetic oligonucleotide
  Sense strand starting at position 793 of SEQ ID NO: 1888864
gucccauugguuuacaacu

SEQ ID NO: 2562065 - RNA, 19 nt, Artificial Sequence
  Description of Artificial Sequence: Synthetic oligonucleotide
  Antisense strand to SEQ ID NO: 2562064
aguuguaaaccaaugggac

SEQ ID NO: 2562066 - RNA, 19 nt, Artificial Sequence
  Description of Artificial Sequence: Synthetic oligonucleotide
  Sense strand starting at position 867 of SEQ ID NO: 1888864
auccaaauauugucagggu

SEQ ID NO: 2562067 - RNA, 19 nt, Artificial Sequence
  Description of Artificial Sequence: Synthetic oligonucleotide
  Antisense strand to SEQ ID NO: 2562066
acccugacaauauuuggau

SEQ ID NO: 2562068 - RNA, 19 nt, Artificial Sequence
  Description of Artificial Sequence: Synthetic oligonucleotide
  Sense strand starting at position 871 of SEQ ID NO: 1888864
aaauauugucaggguaaua

SEQ ID NO: 2562069 - RNA, 19 nt, Artificial Sequence
  Description of Artificial Sequence: Synthetic oligonucleotide
  Antisense strand to SEQ ID NO: 2562068
uauuacccugacaauauuu

SEQ ID NO: 2562070 - RNA, 19 nt, Artificial Sequence
  Description of Artificial Sequence: Synthetic oligonucleotide
  Sense strand starting at position 1239 of SEQ ID NO: 1888864
ucaggaaugucgccaacaa

SEQ ID NO: 2562071 - RNA, 19 nt, Artificial Sequence
  Description of Artificial Sequence: Synthetic oligonucleotide
  Antisense strand to SEQ ID NO: 2562070
uuguuggcgacauuccuga

SEQ ID NO: 2562072 - RNA, 19 nt, Artificial Sequence
  Description of Artificial Sequence: Synthetic oligonucleotide
  Sense strand starting at position 1240 of SEQ ID NO: 1888864
caggaaugucgccaacaaa

SEQ ID NO: 2562073 - RNA, 19 nt, Artificial Sequence
  Description of Artificial Sequence: Synthetic oligonucleotide
  Antisense strand to SEQ ID NO: 2562072
uuuguuggcgacauuccug

SEQ ID NO: 2562074 - RNA, 19 nt, Artificial Sequence
  Description of Artificial Sequence: Synthetic oligonucleotide
  Sense strand starting at position 1441 of SEQ ID NO: 1888864
ggacaagugcaauacuuua

SEQ ID NO: 2562075 - RNA, 19 nt, Artificial Sequence
  Description of Artificial Sequence: Synthetic oligonucleotide
  Antisense strand to SEQ ID NO: 2562074
uaaaguauugcacuugucc

SEQ ID NO: 2562076 - RNA, 19 nt, Artificial Sequence
  Description of Artificial Sequence: Synthetic oligonucleotide
  Sense strand starting at position 1446 of SEQ ID NO: 1888864
agugcaauacuuuauauag

SEQ ID NO: 2562077 - RNA, 19 nt, Artificial Sequence
  Description of Artificial Sequence: Synthetic oligonucleotide
  Antisense strand to SEQ ID NO: 2562076
cuauauaaaguauugcacu

SEQ ID NO: 2562078 - RNA, 19 nt, Artificial Sequence
  Description of Artificial Sequence: Synthetic oligonucleotide
  Sense strand starting at position 1506 of SEQ ID NO: 1888864
gcaugagugcuggagauac

SEQ ID NO: 2562079 - RNA, 19 nt, Artificial Sequence
  Description of Artificial Sequence: Synthetic oligonucleotide
  Antisense strand to SEQ ID NO: 2562078
guaucuccagcacucaugc

SEQ ID NO: 2562080 - RNA, 19 nt, Artificial Sequence
  Description of Artificial Sequence: Synthetic oligonucleotide
  Sense strand starting at position 1516 of SEQ ID NO: 1888864
uggagauacgcaugaaggu

SEQ ID NO: 2562081 - RNA, 19 nt, Artificial Sequence
  Description of Artificial Sequence: Synthetic oligonucleotide
  Antisense strand to SEQ ID NO: 2562080
accuucaugcguaucucca

SEQ ID NO: 2562082 - RNA, 19 nt, Artificial Sequence
  Description of Artificial Sequence: Synthetic oligonucleotide
  Sense strand starting at position 1602 of SEQ ID NO: 1888864
auacauauauacgcugaaa

SEQ ID NO: 2562083 - RNA, 19 nt, Artificial Sequence
  Description of Artificial Sequence: Synthetic oligonucleotide
  Antisense strand to SEQ ID NO: 2562082
uuucagcguauauauguau

SEQ ID NO: 2562084 - RNA, 19 nt, Artificial Sequence
  Description of Artificial Sequence: Synthetic oligonucleotide
  Sense strand starting at position 1604 of SEQ ID NO: 1888864
acauauauacgcugaaaug

SEQ ID NO: 2562085 - RNA, 19 nt, Artificial Sequence
  Description of Artificial Sequence: Synthetic oligonucleotide
  Antisense strand to SEQ ID NO: 2562084
cauuucagcguauauaugu

SEQ ID NO: 2562086 - RNA, 19 nt, Artificial Sequence
  Description of Artificial Sequence: Synthetic oligonucleotide
  Sense strand starting at position 1685 of SEQ ID NO: 1888864
uuuguuauccaagaguacu

SEQ ID NO: 2562087 - RNA, 19 nt, Artificial Sequence
  Description of Artificial Sequence: Synthetic oligonucleotide
  Antisense strand to SEQ ID NO: 2562086
aguacucuuggauaacaaa

SEQ ID NO: 2562088 - RNA, 19 nt, Artificial Sequence
  Description of Artificial Sequence: Synthetic oligonucleotide
  Sense strand starting at position 1701 of SEQ ID NO: 1888864
acuggaagugcccauacua

SEQ ID NO: 2562089 - RNA, 19 nt, Artificial Sequence
  Description of Artificial Sequence: Synthetic oligonucleotide
  Antisense strand to SEQ ID NO: 2562088
uaguaugggcacuuccagu

SEQ ID NO: 2562090 - RNA, 19 nt, Artificial Sequence
  Description of Artificial Sequence: Synthetic oligonucleotide
  Sense strand starting at position 1861 of SEQ ID NO: 1888864
acugaaauguguccuauuc

SEQ ID NO: 2562091 - RNA, 19 nt, Artificial Sequence
  Description of Artificial Sequence: Synthetic oligonucleotide
  Antisense strand to SEQ ID NO: 2562090
gaauaggacacauuucagu

SEQ ID NO: 2562092 - RNA, 19 nt, Artificial Sequence
  Description of Artificial Sequence: Synthetic oligonucleotide
  Sense strand starting at position 2068 of SEQ ID NO: 1888864
guagccauugacuaaauca

SEQ ID NO: 2562093 - RNA, 19 nt, Artificial Sequence
  Description of Artificial Sequence: Synthetic oligonucleotide
  Antisense strand to SEQ ID NO: 2562092
ugauuuagucaauggcuac

SEQ ID NO: 2562094 - RNA, 19 nt, Artificial Sequence
  Description of Artificial Sequence: Synthetic oligonucleotide
  Sense strand starting at position 2079 of SEQ ID NO: 1888864
cuaaaucaccaugguaaug

SEQ ID NO: 2562095 - RNA, 19 nt, Artificial Sequence
  Description of Artificial Sequence: Synthetic oligonucleotide
  Antisense strand to SEQ ID NO: 2562094
cauuaccauggugauuuag

SEQ ID NO: 2562096 - RNA, 19 nt, Artificial Sequence
  Description of Artificial Sequence: Synthetic oligonucleotide
  Sense strand starting at position 2097 of SEQ ID NO: 1888864
guaagaagugcuuacauug

SEQ ID NO: 2562097 - RNA, 19 nt, Artificial Sequence
  Description of Artificial Sequence: Synthetic oligonucleotide
  Antisense strand to SEQ ID NO: 2562096
caauguaagcacuucuuac

SEQ ID NO: 2562098 - RNA, 19 nt, Artificial Sequence
  Description of Artificial Sequence: Synthetic oligonucleotide
  Sense strand starting at position 2107 of SEQ ID NO: 1888864
cuuacauugcaguagaucu

SEQ ID NO: 2562099 - RNA, 19 nt, Artificial Sequence
  Description of Artificial Sequence: Synthetic oligonucleotide
  Antisense strand to SEQ ID NO: 2562098
agaucuacugcaauguaag

SEQ ID NO: 2562100 - RNA, 19 nt, Artificial Sequence
  Description of Artificial Sequence: Synthetic oligonucleotide
  Sense strand starting at position 2166 of SEQ ID NO: 1888864
ggccuauuccuguagcaaa

SEQ ID NO: 2562101 - RNA, 19 nt, Artificial Sequence
  Description of Artificial Sequence: Synthetic oligonucleotide
  Antisense strand to SEQ ID NO: 2562100
uuugcuacaggaauaggcc

SEQ ID NO: 2562102 - RNA, 19 nt, Artificial Sequence
  Description of Artificial Sequence: Synthetic oligonucleotide
  Sense strand starting at position 2232 of SEQ ID NO: 1888864
gcagacucaccugguuaaa

SEQ ID NO: 2562103 - RNA, 19 nt, Artificial Sequence
  Description of Artificial Sequence: Synthetic oligonucleotide
  Antisense strand to SEQ ID NO: 2562102
uuuaaccaggugagucugc

SEQ ID NO: 2562104 - RNA, 19 nt, Artificial Sequence
  Description of Artificial Sequence: Synthetic oligonucleotide
  Sense strand starting at position 2330 of SEQ ID NO: 1888864
gcuuacagagucuaagcua

SEQ ID NO: 2562105 - RNA, 19 nt, Artificial Sequence
  Description of Artificial Sequence: Synthetic oligonucleotide
  Antisense strand to SEQ ID NO: 2562104
uagcuuagacucuguaagc

SEQ ID NO: 2562106 - RNA, 19 nt, Artificial Sequence
  Description of Artificial Sequence: Synthetic oligonucleotide
  Sense strand starting at position 2448 of SEQ ID NO: 1888864
ucuuauguauaagcagauu

SEQ ID NO: 2562107 - RNA, 19 nt, Artificial Sequence
  Description of Artificial Sequence: Synthetic oligonucleotide
  Antisense strand to SEQ ID NO: 2562106
aaucugcuuauacauaaga

SEQ ID NO: 2562108 - RNA, 19 nt, Artificial Sequence
  Description of Artificial Sequence: Synthetic oligonucleotide
  Sense strand starting at position 2511 of SEQ ID NO: 1888864
caguaauuugcaggcacau

SEQ ID NO: 2562109 - RNA, 19 nt, Artificial Sequence
  Description of Artificial Sequence: Synthetic oligonucleotide
  Antisense strand to SEQ ID NO: 2562108
augugccugcaaauuacug

SEQ ID NO: 2562110 - RNA, 19 nt, Artificial Sequence
  Description of Artificial Sequence: Synthetic oligonucleotide
  Sense strand starting at position 2634 of SEQ ID NO: 1888864
acggaaagugacuguuaga

SEQ ID NO: 2562111 - RNA, 19 nt, Artificial Sequence
  Description of Artificial Sequence: Synthetic oligonucleotide
  Antisense strand to SEQ ID NO: 2562110
ucuaacagucacuuuccgu

SEQ ID NO: 2562112 - RNA, 19 nt, Artificial Sequence
  Description of Artificial Sequence: Synthetic oligonucleotide
  Sense strand starting at position 2754 of SEQ ID NO: 1888864
auggcugagagaugucaca

SEQ ID NO: 2562113 - RNA, 19 nt, Artificial Sequence
  Description of Artificial Sequence: Synthetic oligonucleotide
  Antisense strand to SEQ ID NO: 2562112
ugugacaucucucagccau

SEQ ID NO: 2562114 - RNA, 19 nt, Artificial Sequence
  Description of Artificial Sequence: Synthetic oligonucleotide
  Sense strand starting at position 3042 of SEQ ID NO: 1888864
ucuguaauacguuaaacga

SEQ ID NO: 2562115 - RNA, 19 nt, Artificial Sequence
  Description of Artificial Sequence: Synthetic oligonucleotide
  Antisense strand to SEQ ID NO: 2562114
ucguuuaacguauuacaga

SEQ ID NO: 2562116 - RNA, 19 nt, Artificial Sequence
  Description of Artificial Sequence: Synthetic oligonucleotide
  Sense strand starting at position 3050 of SEQ ID NO: 1888864
acguuaaacgagugaggga

SEQ ID NO: 2562117 - RNA, 19 nt, Artificial Sequence
  Description of Artificial Sequence: Synthetic oligonucleotide
  Antisense strand to SEQ ID NO: 2562116
ucccucacucguuuaacgu

SEQ ID NO: 2562118 - RNA, 19 nt, Artificial Sequence
  Description of Artificial Sequence: Synthetic oligonucleotide
  Sense strand starting at position 3079 of SEQ ID NO: 1888864
uugaacuuucgucacgaua

SEQ ID NO: 2562119 - RNA, 19 nt, Artificial Sequence
  Description of Artificial Sequence: Synthetic oligonucleotide
  Antisense strand to SEQ ID NO: 2562118
uaucgugacgaaaguucaa

SEQ ID NO: 2562120 - RNA, 19 nt, Artificial Sequence
  Description of Artificial Sequence: Synthetic oligonucleotide
  Sense strand starting at position 3082 of SEQ ID NO: 1888864
aacuuucgucacgauaucu

SEQ ID NO: 2562121 - RNA, 19 nt, Artificial Sequence
  Description of Artificial Sequence: Synthetic oligonucleotide
  Antisense strand to SEQ ID NO: 2562120
agauaucgugacgaaaguu

SEQ ID NO: 2562122 - RNA, 19 nt, Artificial Sequence
  Description of Artificial Sequence: Synthetic oligonucleotide
  Sense strand starting at position 3092 of SEQ ID NO: 1888864
acgauaucuuaugccacua

SEQ ID NO: 2562123 - RNA, 19 nt, Artificial Sequence
  Description of Artificial Sequence: Synthetic oligonucleotide
  Antisense strand to SEQ ID NO: 2562122
uaguggcauaagauaucgu

SEQ ID NO: 2562124 - RNA, 19 nt, Artificial Sequence
  Description of Artificial Sequence: Synthetic oligonucleotide
  Sense strand starting at position 3104 of SEQ ID NO: 1888864
gccacuaaaugagucuuua

SEQ ID NO: 2562125 - RNA, 19 nt, Artificial Sequence
  Description of Artificial Sequence: Synthetic oligonucleotide
  Antisense strand to SEQ ID NO: 2562124
uaaagacucauuuaguggc

SEQ ID NO: 2562126 - RNA, 19 nt, Artificial Sequence
  Description of Artificial Sequence: Synthetic oligonucleotide
  Sense strand starting at position 3108 of SEQ ID NO: 1888864
cuaaaugagucuuuagaag

SEQ ID NO: 2562127 - RNA, 19 nt, Artificial Sequence
  Description of Artificial Sequence: Synthetic oligonucleotide
  Antisense strand to SEQ ID NO: 2562126
cuucuaaagacucauuuag

SEQ ID NO: 2562128 - RNA, 19 nt, Artificial Sequence
  Description of Artificial Sequence: Synthetic oligonucleotide
  Sense strand starting at position 3233 of SEQ ID NO: 1888864
cccuuaaauuggguuucua

SEQ ID NO: 2562129 - RNA, 19 nt, Artificial Sequence
  Description of Artificial Sequence: Synthetic oligonucleotide
  Antisense strand to SEQ ID NO: 2562128
uagaaacccaauuuaaggg

SEQ ID NO: 2562130 - RNA, 19 nt, Artificial Sequence
  Description of Artificial Sequence: Synthetic oligonucleotide
  Sense strand starting at position 3244 of SEQ ID NO: 1888864
gguuucuacaccugugaag

SEQ ID NO: 2562131 - RNA, 19 nt, Artificial Sequence
  Description of Artificial Sequence: Synthetic oligonucleotide
  Antisense strand to SEQ ID NO: 2562130
cuucacagguguagaaacc

SEQ ID NO: 2562132 - RNA, 19 nt, Artificial Sequence
  Description of Artificial Sequence: Synthetic oligonucleotide
  Sense strand starting at position 3246 of SEQ ID NO: 1888864
uuucuacaccugugaagau

SEQ ID NO: 2562133 - RNA, 19 nt, Artificial Sequence
  Description of Artificial Sequence: Synthetic oligonucleotide
  Antisense strand to SEQ ID NO: 2562132
aucuucacagguguagaaa

SEQ ID NO: 2562134 - RNA, 19 nt, Artificial Sequence
  Description of Artificial Sequence: Synthetic oligonucleotide
  Sense strand starting at position 401 of SEQ ID NO: 1888865
agggaauucuaaucuuucu

SEQ ID NO: 2562135 - RNA, 19 nt, Artificial Sequence
  Description of Artificial Sequence: Synthetic oligonucleotide
  Antisense strand to SEQ ID NO: 2562134
agaaagauuagaauucccu

SEQ ID NO: 2562136 - RNA, 19 nt, Artificial Sequence
  Description of Artificial Sequence: Synthetic oligonucleotide
  Sense strand starting at position 430 of SEQ ID NO: 1888865
gaggaugucuccucuuaag

SEQ ID NO: 2562137 - RNA, 19 nt, Artificial Sequence
  Description of Artificial Sequence: Synthetic oligonucleotide
  Antisense strand to SEQ ID NO: 2562136
cuuaagaggagacauccuc

SEQ ID NO: 2562138 - RNA, 19 nt, Artificial Sequence
  Description of Artificial Sequence: Synthetic oligonucleotide
  Sense strand starting at position 473 of SEQ ID NO: 1888865
cauuguuggcaguagaaua

SEQ ID NO: 2562139 - RNA, 19 nt, Artificial Sequence
  Description of Artificial Sequence: Synthetic oligonucleotide
  Antisense strand to SEQ ID NO: 2562138
uauucuacugccaacaaug

SEQ ID NO: 2562140 - RNA, 19 nt, Artificial Sequence
  Description of Artificial Sequence: Synthetic oligonucleotide
  Sense strand starting at position 540 of SEQ ID NO: 1888865
agggauaguacauguauaa

SEQ ID NO: 2562141 - RNA, 19 nt, Artificial Sequence
  Description of Artificial Sequence: Synthetic oligonucleotide
  Antisense strand to SEQ ID NO: 2562140
uuauacauguacuaucccu

SEQ ID NO: 2562142 - RNA, 19 nt, Artificial Sequence
  Description of Artificial Sequence: Synthetic oligonucleotide
  Sense strand starting at position 608 of SEQ ID NO: 1888865
guuauuuagcuuugacagu

SEQ ID NO: 2562143 - RNA, 19 nt, Artificial Sequence
  Description of Artificial Sequence: Synthetic oligonucleotide
  Antisense strand to SEQ ID NO: 2562142
acugucaaagcuaaauaac

SEQ ID NO: 2562144 - RNA, 19 nt, Artificial Sequence
  Description of Artificial Sequence: Synthetic oligonucleotide
  Sense strand starting at position 663 of SEQ ID NO: 1888865
ccagaacuggaauguuaac

SEQ ID NO: 2562145 - RNA, 19 nt, Artificial Sequence
  Description of Artificial Sequence: Synthetic oligonucleotide
  Antisense strand to SEQ ID NO: 2562144
guuaacauuccaguucugg

SEQ ID NO: 2562146 - RNA, 19 nt, Artificial Sequence
  Description of Artificial Sequence: Synthetic oligonucleotide
  Sense strand starting at position 1164 of SEQ ID NO: 1888865
uggacuguauucuuccaca

SEQ ID NO: 2562147 - RNA, 19 nt, Artificial Sequence
  Description of Artificial Sequence: Synthetic oligonucleotide
  Antisense strand to SEQ ID NO: 2562146
uguggaagaauacagucca

SEQ ID NO: 2562148 - RNA, 19 nt, Artificial Sequence
  Description of Artificial Sequence: Synthetic oligonucleotide
  Sense strand starting at position 1235 of SEQ ID NO: 1888865
auggaaacuuacccgguaa

SEQ ID NO: 2562149 - RNA, 19 nt, Artificial Sequence
  Description of Artificial Sequence: Synthetic oligonucleotide
  Antisense strand to SEQ ID NO: 2562148
uuaccggguaaguuuccau

SEQ ID NO: 2562150 - RNA, 19 nt, Artificial Sequence
  Description of Artificial Sequence: Synthetic oligonucleotide
  Sense strand starting at position 1236 of SEQ ID NO: 1888865
uggaaacuuacccgguaaa

SEQ ID NO: 2562151 - RNA, 19 nt, Artificial Sequence
  Description of Artificial Sequence: Synthetic oligonucleotide
  Antisense strand to SEQ ID NO: 2562150
uuuaccggguaaguuucca

SEQ ID NO: 2562152 - RNA, 19 nt, Artificial Sequence
  Description of Artificial Sequence: Synthetic oligonucleotide
  Sense strand starting at position 1237 of SEQ ID NO: 1888865
ggaaacuuacccgguaaag

SEQ ID NO: 2562153 - RNA, 19 nt, Artificial Sequence
  Description of Artificial Sequence: Synthetic oligonucleotide
  Antisense strand to SEQ ID NO: 2562152
cuuuaccggguaaguuucc

SEQ ID NO: 2562154 - RNA, 19 nt, Artificial Sequence
  Description of Artificial Sequence: Synthetic oligonucleotide
  Sense strand starting at position 1372 of SEQ ID NO: 1888865
auaugugggccugggaauu

SEQ ID NO: 2562155 - RNA, 19 nt, Artificial Sequence
  Description of Artificial Sequence: Synthetic oligonucleotide
  Antisense strand to SEQ ID NO: 2562154
aauucccaggcccacauau

SEQ ID NO: 2562156 - RNA, 19 nt, Artificial Sequence
  Description of Artificial Sequence: Synthetic oligonucleotide
  Sense strand starting at position 1477 of SEQ ID NO: 1888865
guagaugcuagguauauac

SEQ ID NO: 2562157 - RNA, 19 nt, Artificial Sequence
  Description of Artificial Sequence: Synthetic oligonucleotide
  Antisense strand to SEQ ID NO: 2562156
guauauaccuagcaucuac

SEQ ID NO: 2562158 - RNA, 19 nt, Artificial Sequence
  Description of Artificial Sequence: Synthetic oligonucleotide
  Sense strand starting at position 1569 of SEQ ID NO: 1888865
gaauuaaggcaucagugua

SEQ ID NO: 2562159 - RNA, 19 nt, Artificial Sequence
  Description of Artificial Sequence: Synthetic oligonucleotide
  Antisense strand to SEQ ID NO: 2562158
uacacugaugccuuaauuc

SEQ ID NO: 2562160 - RNA, 19 nt, Artificial Sequence
  Description of Artificial Sequence: Synthetic oligonucleotide
  Sense strand starting at position 1594 of SEQ ID NO: 1888865
caagaucagcccuguggaa

SEQ ID NO: 2562161 - RNA, 19 nt, Artificial Sequence
  Description of Artificial Sequence: Synthetic oligonucleotide
  Antisense strand to SEQ ID NO: 2562160
uuccacagggcugaucuug

SEQ ID NO: 2562162 - RNA, 19 nt, Artificial Sequence
  Description of Artificial Sequence: Synthetic oligonucleotide
  Sense strand starting at position 1596 of SEQ ID NO: 1888865
agaucagcccuguggaaua

SEQ ID NO: 2562163 - RNA, 19 nt, Artificial Sequence
  Description of Artificial Sequence: Synthetic oligonucleotide
  Antisense strand to SEQ ID NO: 2562162
uauuccacagggcugaucu

SEQ ID NO: 2562164 - RNA, 19 nt, Artificial Sequence
  Description of Artificial Sequence: Synthetic oligonucleotide
  Sense strand starting at position 1601 of SEQ ID NO: 1888865
agcccuguggaauauguaa

SEQ ID NO: 2562165 - RNA, 19 nt, Artificial Sequence
  Description of Artificial Sequence: Synthetic oligonucleotide
  Antisense strand to SEQ ID NO: 2562164
uuacauauuccacagggcu

SEQ ID NO: 2562166 - RNA, 19 nt, Artificial Sequence
  Description of Artificial Sequence: Synthetic oligonucleotide
  Sense strand starting at position 1616 of SEQ ID NO: 1888865
guaagcccuguggaugaua

SEQ ID NO: 2562167 - RNA, 19 nt, Artificial Sequence
  Description of Artificial Sequence: Synthetic oligonucleotide
  Antisense strand to SEQ ID NO: 2562166
uaucauccacagggcuuac

SEQ ID NO: 2562168 - RNA, 19 nt, Artificial Sequence
  Description of Artificial Sequence: Synthetic oligonucleotide
  Sense strand starting at position 1863 of SEQ ID NO: 1888865
gugacagcacucuggagaa

SEQ ID NO: 2562169 - RNA, 19 nt, Artificial Sequence
  Description of Artificial Sequence: Synthetic oligonucleotide
  Antisense strand to SEQ ID NO: 2562168
uucuccagagugcugucac

SEQ ID NO: 2562170 - RNA, 19 nt, Artificial Sequence
  Description of Artificial Sequence: Synthetic oligonucleotide
  Sense strand starting at position 2082 of SEQ ID NO: 1888865
cccagugguagaugaugaa

SEQ ID NO: 2562171 - RNA, 19 nt, Artificial Sequence
  Description of Artificial Sequence: Synthetic oligonucleotide
  Antisense strand to SEQ ID NO: 2562170
uucaucaucuaccacuggg

SEQ ID NO: 2562172 - RNA, 19 nt, Artificial Sequence
  Description of Artificial Sequence: Synthetic oligonucleotide
  Sense strand starting at position 2127 of SEQ ID NO: 1888865
cgggugaugguggauacau

SEQ ID NO: 2562173 - RNA, 19 nt, Artificial Sequence
  Description of Artificial Sequence: Synthetic oligonucleotide
  Antisense strand to SEQ ID NO: 2562172
auguauccaccaucacccg

SEQ ID NO: 2562174 - RNA, 19 nt, Artificial Sequence
  Description of Artificial Sequence: Synthetic oligonucleotide
  Sense strand starting at position 2142 of SEQ ID NO: 1888865
acaugugugcuccaugaaa

SEQ ID NO: 2562175 - RNA, 19 nt, Artificial Sequence
  Description of Artificial Sequence: Synthetic oligonucleotide
  Antisense strand to SEQ ID NO: 2562174
uuucauggagcacacaugu

SEQ ID NO: 2562176 - RNA, 19 nt, Artificial Sequence
  Description of Artificial Sequence: Synthetic oligonucleotide
  Sense strand starting at position 2226 of SEQ ID NO: 1888865
uggugacuucuagaaguac

SEQ ID NO: 2562177 - RNA, 19 nt, Artificial Sequence
  Description of Artificial Sequence: Synthetic oligonucleotide
  Antisense strand to SEQ ID NO: 2562176
guacuucuagaagucacca

SEQ ID NO: 2562178 - RNA, 19 nt, Artificial Sequence
  Description of Artificial Sequence: Synthetic oligonucleotide
  Sense strand starting at position 2303 of SEQ ID NO: 1888865
gugaauguggaguaucaac

SEQ ID NO: 2562179 - RNA, 19 nt, Artificial Sequence
  Description of Artificial Sequence: Synthetic oligonucleotide
  Antisense strand to SEQ ID NO: 2562178
guugauacuccacauucac

SEQ ID NO: 2562180 - RNA, 19 nt, Artificial Sequence
  Description of Artificial Sequence: Synthetic oligonucleotide
  Sense strand starting at position 2311 of SEQ ID NO: 1888865
ggaguaucaacaugaaagc

SEQ ID NO: 2562181 - RNA, 19 nt, Artificial Sequence
  Description of Artificial Sequence: Synthetic oligonucleotide
  Antisense strand to SEQ ID NO: 2562180
gcuuucauguugauacucc

SEQ ID NO: 2562182 - RNA, 19 nt, Artificial Sequence
  Description of Artificial Sequence: Synthetic oligonucleotide
  Sense strand starting at position 2351 of SEQ ID NO: 1888865
ugugaugcccaucacaaau

SEQ ID NO: 2562183 - RNA, 19 nt, Artificial Sequence
  Description of Artificial Sequence: Synthetic oligonucleotide
  Antisense strand to SEQ ID NO: 2562182
auuugugaugggcaucaca

SEQ ID NO: 2562184 - RNA, 19 nt, Artificial Sequence
  Description of Artificial Sequence: Synthetic oligonucleotide
  Sense strand starting at position 2393 of SEQ ID NO: 1888865
agguaauaucaguggguag

SEQ ID NO: 2562185 - RNA, 19 nt, Artificial Sequence
  Description of Artificial Sequence: Synthetic oligonucleotide
  Antisense strand to SEQ ID NO: 2562184
cuacccacugauauuaccu

SEQ ID NO: 2562186 - RNA, 19 nt, Artificial Sequence
  Description of Artificial Sequence: Synthetic oligonucleotide
  Sense strand starting at position 2395 of SEQ ID NO: 1888865
guaauaucaguggguagga

SEQ ID NO: 2562187 - RNA, 19 nt, Artificial Sequence
  Description of Artificial Sequence: Synthetic oligonucleotide
  Antisense strand to SEQ ID NO: 2562186
uccuacccacugauauuac

SEQ ID NO: 2562188 - RNA, 19 nt, Artificial Sequence
  Description of Artificial Sequence: Synthetic oligonucleotide
  Sense strand starting at position 2408 of SEQ ID NO: 1888865
guaggacagcuggguauaa

SEQ ID NO: 2562189 - RNA, 19 nt, Artificial Sequence
  Description of Artificial Sequence: Synthetic oligonucleotide
  Antisense strand to SEQ ID NO: 2562188
uuauacccagcuguccuac

SEQ ID NO: 2562190 - RNA, 19 nt, Artificial Sequence
  Description of Artificial Sequence: Synthetic oligonucleotide
  Sense strand starting at position 2597 of SEQ ID NO: 1888865
gccaucuaucuagggauau

SEQ ID NO: 2562191 - RNA, 19 nt, Artificial Sequence
  Description of Artificial Sequence: Synthetic oligonucleotide
  Antisense strand to SEQ ID NO: 2562190
auaucccuagauagauggc

SEQ ID NO: 2562192 - RNA, 19 nt, Artificial Sequence
  Description of Artificial Sequence: Synthetic oligonucleotide
  Sense strand starting at position 2812 of SEQ ID NO: 1888865
cuuggacuccagugaguaa

SEQ ID NO: 2562193 - RNA, 19 nt, Artificial Sequence
  Description of Artificial Sequence: Synthetic oligonucleotide
  Antisense strand to SEQ ID NO: 2562192
uuacucacuggaguccaag

SEQ ID NO: 2562194 - RNA, 19 nt, Artificial Sequence
  Description of Artificial Sequence: Synthetic oligonucleotide
  Sense strand starting at position 2816 of SEQ ID NO: 1888865
gacuccagugaguaacuuu

SEQ ID NO: 2562195 - RNA, 19 nt, Artificial Sequence
  Description of Artificial Sequence: Synthetic oligonucleotide
  Antisense strand to SEQ ID NO: 2562194
aaaguuacucacuggaguc

SEQ ID NO: 2562196 - RNA, 19 nt, Artificial Sequence
  Description of Artificial Sequence: Synthetic oligonucleotide
  Sense strand starting at position 2969 of SEQ ID NO: 1888865
aggcauaaaucucuagcaa

SEQ ID NO: 2562197 - RNA, 19 nt, Artificial Sequence
  Description of Artificial Sequence: Synthetic oligonucleotide
  Antisense strand to SEQ ID NO: 2562196
uugcuagagauuuaugccu

SEQ ID NO: 2562198 - RNA, 19 nt, Artificial Sequence
  Description of Artificial Sequence: Synthetic oligonucleotide
  Sense strand starting at position 2970 of SEQ ID NO: 1888865
ggcauaaaucucuagcaaa

SEQ ID NO: 2562199 - RNA, 19 nt, Artificial Sequence
  Description of Artificial Sequence: Synthetic oligonucleotide
  Antisense strand to SEQ ID NO: 2562198
uuugcuagagauuuaugcc

SEQ ID NO: 2562200 - RNA, 19 nt, Artificial Sequence
  Description of Artificial Sequence: Synthetic oligonucleotide
  Sense strand starting at position 3144 of SEQ ID NO: 1888865
acacauauauguguacaaa

SEQ ID NO: 2562201 - RNA, 19 nt, Artificial Sequence
  Description of Artificial Sequence: Synthetic oligonucleotide
  Antisense strand to SEQ ID NO: 2562200
uuuguacacauauaugugu

SEQ ID NO: 2562202 - RNA, 19 nt, Artificial Sequence
  Description of Artificial Sequence: Synthetic oligonucleotide
  Sense strand starting at position 3395 of SEQ ID NO: 1888865
ggagcauucuaagugacau

SEQ ID NO: 2562203 - RNA, 19 nt, Artificial Sequence
  Description of Artificial Sequence: Synthetic oligonucleotide
  Antisense strand to SEQ ID NO: 2562202
augucacuuagaaugcucc

SEQ ID NO: 2562204 - RNA, 19 nt, Artificial Sequence
  Description of Artificial Sequence: Synthetic oligonucleotide
  Sense strand starting at position 3495 of SEQ ID NO: 1888865
uucuaaggucuuggacaca

SEQ ID NO: 2562205 - RNA, 19 nt, Artificial Sequence
  Description of Artificial Sequence: Synthetic oligonucleotide
  Antisense strand to SEQ ID NO: 2562204
uguguccaagaccuuagaa

SEQ ID NO: 2562206 - RNA, 19 nt, Artificial Sequence
  Description of Artificial Sequence: Synthetic oligonucleotide
  Sense strand starting at position 3599 of SEQ ID NO: 1888865
aguuaaaugaguuaacgca

SEQ ID NO: 2562207 - RNA, 19 nt, Artificial Sequence
  Description of Artificial Sequence: Synthetic oligonucleotide
  Antisense strand to SEQ ID NO: 2562206
ugcguuaacucauuuaacu

SEQ ID NO: 2562208 - RNA, 19 nt, Artificial Sequence
  Description of Artificial Sequence: Synthetic oligonucleotide
  Sense strand starting at position 3650 of SEQ ID NO: 1888865
aguauauucucaguuaaug

SEQ ID NO: 2562209 - RNA, 19 nt, Artificial Sequence
  Description of Artificial Sequence: Synthetic oligonucleotide
  Antisense strand to SEQ ID NO: 2562208
cauuaacugagaauauacu

SEQ ID NO: 2562210 - RNA, 19 nt, Artificial Sequence
  Description of Artificial Sequence: Synthetic oligonucleotide
  Sense strand starting at position 3689 of SEQ ID NO: 1888865
gaugaaauggguugauugu

SEQ ID NO: 2562211 - RNA, 19 nt, Artificial Sequence
  Description of Artificial Sequence: Synthetic oligonucleotide
  Antisense strand to SEQ ID NO: 2562210
acaaucaacccauuucauc

SEQ ID NO: 2562212 - RNA, 19 nt, Artificial Sequence
  Description of Artificial Sequence: Synthetic oligonucleotide
  Sense strand starting at position 3690 of SEQ ID NO: 1888865
augaaauggguugauuguu

SEQ ID NO: 2562213 - RNA, 19 nt, Artificial Sequence
  Description of Artificial Sequence: Synthetic oligonucleotide
  Antisense strand to SEQ ID NO: 2562212
aacaaucaacccauuucau

SEQ ID NO: 2562214 - RNA, 19 nt, Artificial Sequence
  Description of Artificial Sequence: Synthetic oligonucleotide
  Sense strand starting at position 171 of SEQ ID NO: 1888866
augcuaagaucuuugaucu

SEQ ID NO: 2562215 - RNA, 19 nt, Artificial Sequence
  Description of Artificial Sequence: Synthetic oligonucleotide
  Antisense strand to SEQ ID NO: 2562214
agaucaaagaucuuagcau

SEQ ID NO: 2562216 - RNA, 19 nt, Artificial Sequence
  Description of Artificial Sequence: Synthetic oligonucleotide
  Sense strand starting at position 297 of SEQ ID NO: 1888866
uuaauaacuuaggcuagaa

SEQ ID NO: 2562217 - RNA, 19 nt, Artificial Sequence
  Description of Artificial Sequence: Synthetic oligonucleotide
  Antisense strand to SEQ ID NO: 2562216
uucuagccuaaguuauuaa

SEQ ID NO: 2562218 - RNA, 19 nt, Artificial Sequence
  Description of Artificial Sequence: Synthetic oligonucleotide
  Sense strand starting at position 366 of SEQ ID NO: 1888866
ggauacgcugccuauaaau

SEQ ID NO: 2562219 - RNA, 19 nt, Artificial Sequence
  Description of Artificial Sequence: Synthetic oligonucleotide
  Antisense strand to SEQ ID NO: 2562218
auuuauaggcagcguaucc

SEQ ID NO: 2562220 - RNA, 19 nt, Artificial Sequence
  Description of Artificial Sequence: Synthetic oligonucleotide
  Sense strand starting at position 368 of SEQ ID NO: 1888866
auacgcugccuauaaauua

SEQ ID NO: 2562221 - RNA, 19 nt, Artificial Sequence
  Description of Artificial Sequence: Synthetic oligonucleotide
  Antisense strand to SEQ ID NO: 2562220
uaauuuauaggcagcguau

SEQ ID NO: 2562222 - RNA, 19 nt, Artificial Sequence
  Description of Artificial Sequence: Synthetic oligonucleotide
  Sense strand starting at position 460 of SEQ ID NO: 1888866
caauguaaugugcaaauga

SEQ ID NO: 2562223 - RNA, 19 nt, Artificial Sequence
  Description of Artificial Sequence: Synthetic oligonucleotide
  Antisense strand to SEQ ID NO: 2562222
ucauuugcacauuacauug

SEQ ID NO: 2562224 - RNA, 19 nt, Artificial Sequence
  Description of Artificial Sequence: Synthetic oligonucleotide
  Sense strand starting at position 808 of SEQ ID NO: 1888866
aggauuguauccuccacau

SEQ ID NO: 2562225 - RNA, 19 nt, Artificial Sequence
  Description of Artificial Sequence: Synthetic oligonucleotide
  Antisense strand to SEQ ID NO: 2562224
auguggaggauacaauccu

SEQ ID NO: 2562226 - RNA, 19 nt, Artificial Sequence
  Description of Artificial Sequence: Synthetic oligonucleotide
  Sense strand starting at position 910 of SEQ ID NO: 1888866
gaaacacaauguguugaau

SEQ ID NO: 2562227 - RNA, 19 nt, Artificial Sequence
  Description of Artificial Sequence: Synthetic oligonucleotide
  Antisense strand to SEQ ID NO: 2562226
auucaacacauuguguuuc

SEQ ID NO: 2562228 - RNA, 19 nt, Artificial Sequence
  Description of Artificial Sequence: Synthetic oligonucleotide
  Sense strand starting at position 916 of SEQ ID NO: 1888866
caauguguugaauauguua

SEQ ID NO: 2562229 - RNA, 19 nt, Artificial Sequence
  Description of Artificial Sequence: Synthetic oligonucleotide
  Antisense strand to SEQ ID NO: 2562228
uaacauauucaacacauug

SEQ ID NO: 2562230 - RNA, 19 nt, Artificial Sequence
  Description of Artificial Sequence: Synthetic oligonucleotide
  Sense strand starting at position 994 of SEQ ID NO: 1888866
gccgcaauauuucuaauca

SEQ ID NO: 2562231 - RNA, 19 nt, Artificial Sequence
  Description of Artificial Sequence: Synthetic oligonucleotide
  Antisense strand to SEQ ID NO: 2562230
ugauuagaaauauugcggc

SEQ ID NO: 2562232 - RNA, 19 nt, Artificial Sequence
  Description of Artificial Sequence: Synthetic oligonucleotide
  Sense strand starting at position 1167 of SEQ ID NO: 1888866
uuggcuauuaggugacuaa

SEQ ID NO: 2562233 - RNA, 19 nt, Artificial Sequence
  Description of Artificial Sequence: Synthetic oligonucleotide
  Antisense strand to SEQ ID NO: 2562232
uuagucaccuaauagccaa

SEQ ID NO: 2562234 - RNA, 19 nt, Artificial Sequence
  Description of Artificial Sequence: Synthetic oligonucleotide
  Sense strand starting at position 1171 of SEQ ID NO: 1888866
cuauuaggugacuaaguuu

SEQ ID NO: 2562235 - RNA, 19 nt, Artificial Sequence
  Description of Artificial Sequence: Synthetic oligonucleotide
  Antisense strand to SEQ ID NO: 2562234
aaacuuagucaccuaauag

SEQ ID NO: 2562236 - RNA, 19 nt, Artificial Sequence
  Description of Artificial Sequence: Synthetic oligonucleotide
  Sense strand starting at position 1289 of SEQ ID NO: 1888866
uuggaauuauaugcagaga

SEQ ID NO: 2562237 - RNA, 19 nt, Artificial Sequence
  Description of Artificial Sequence: Synthetic oligonucleotide
  Antisense strand to SEQ ID NO: 2562236
ucucugcauauaauuccaa

SEQ ID NO: 2562238 - RNA, 19 nt, Artificial Sequence
  Description of Artificial Sequence: Synthetic oligonucleotide
  Sense strand starting at position 1338 of SEQ ID NO: 1888866
ucuaacagucuaggaaauu

SEQ ID NO: 2562239 - RNA, 19 nt, Artificial Sequence
  Description of Artificial Sequence: Synthetic oligonucleotide
  Antisense strand to SEQ ID NO: 2562238
aauuuccuagacuguuaga

SEQ ID NO: 2562240 - RNA, 19 nt, Artificial Sequence
  Description of Artificial Sequence: Synthetic oligonucleotide
  Sense strand starting at position 1339 of SEQ ID NO: 1888866
cuaacagucuaggaaauuu

SEQ ID NO: 2562241 - RNA, 19 nt, Artificial Sequence
  Description of Artificial Sequence: Synthetic oligonucleotide
  Antisense strand to SEQ ID NO: 2562240
aaauuuccuagacuguuag

SEQ ID NO: 2562242 - RNA, 19 nt, Artificial Sequence
  Description of Artificial Sequence: Synthetic oligonucleotide
  Sense strand starting at position 1390 of SEQ ID NO: 1888866
uacuuagaauuguugaagu

SEQ ID NO: 2562243 - RNA, 19 nt, Artificial Sequence
  Description of Artificial Sequence: Synthetic oligonucleotide
  Antisense strand to SEQ ID NO: 2562242
acuucaacaauucuaagua

SEQ ID NO: 2562244 - RNA, 19 nt, Artificial Sequence
  Description of Artificial Sequence: Synthetic oligonucleotide
  Sense strand starting at position 1436 of SEQ ID NO: 1888866
ccuggaaauuaugugaaau

SEQ ID NO: 2562245 - RNA, 19 nt, Artificial Sequence
  Description of Artificial Sequence: Synthetic oligonucleotide
  Antisense strand to SEQ ID NO: 2562244
auuucacauaauuuccagg

SEQ ID NO: 2562246 - RNA, 19 nt, Artificial Sequence
  Description of Artificial Sequence: Synthetic oligonucleotide
  Sense strand starting at position 1481 of SEQ ID NO: 1888866
ccaguuagcugaucacaag

SEQ ID NO: 2562247 - RNA, 19 nt, Artificial Sequence
  Description of Artificial Sequence: Synthetic oligonucleotide
  Antisense strand to SEQ ID NO: 2562246
cuugugaucagcuaacugg

SEQ ID NO: 2562248 - RNA, 19 nt, Artificial Sequence
  Description of Artificial Sequence: Synthetic oligonucleotide
  Sense strand starting at position 1482 of SEQ ID NO: 1888866
caguuagcugaucacaaga

SEQ ID NO: 2562249 - RNA, 19 nt, Artificial Sequence
  Description of Artificial Sequence: Synthetic oligonucleotide
  Antisense strand to SEQ ID NO: 2562248
ucuugugaucagcuaacug

SEQ ID NO: 2562250 - RNA, 19 nt, Artificial Sequence
  Description of Artificial Sequence: Synthetic oligonucleotide
  Sense strand starting at position 1770 of SEQ ID NO: 1888866
gcaaauuuaaguugugagu

SEQ ID NO: 2562251 - RNA, 19 nt, Artificial Sequence
  Description of Artificial Sequence: Synthetic oligonucleotide
  Antisense strand to SEQ ID NO: 2562250
acucacaacuuaaauuugc

SEQ ID NO: 2562252 - RNA, 19 nt, Artificial Sequence
  Description of Artificial Sequence: Synthetic oligonucleotide
  Sense strand starting at position 1805 of SEQ ID NO: 1888866
ggaauagaauuuggaagca

SEQ ID NO: 2562253 - RNA, 19 nt, Artificial Sequence
  Description of Artificial Sequence: Synthetic oligonucleotide
  Antisense strand to SEQ ID NO: 2562252
ugcuuccaaauucuauucc

SEQ ID NO: 2562254 - RNA, 19 nt, Artificial Sequence
  Description of Artificial Sequence: Synthetic oligonucleotide
  Sense strand starting at position 1815 of SEQ ID NO: 1888866
uuggaagcauaguuaguaa

SEQ ID NO: 2562255 - RNA, 19 nt, Artificial Sequence
  Description of Artificial Sequence: Synthetic oligonucleotide
  Antisense strand to SEQ ID NO: 2562254
uuacuaacuaugcuuccaa

SEQ ID NO: 2562256 - RNA, 19 nt, Artificial Sequence
  Description of Artificial Sequence: Synthetic oligonucleotide
  Sense strand starting at position 1818 of SEQ ID NO: 1888866
gaagcauaguuaguaaaca

SEQ ID NO: 2562257 - RNA, 19 nt, Artificial Sequence
  Description of Artificial Sequence: Synthetic oligonucleotide
  Antisense strand to SEQ ID NO: 2562256
uguuuacuaacuaugcuuc

SEQ ID NO: 2562258 - RNA, 19 nt, Artificial Sequence
  Description of Artificial Sequence: Synthetic oligonucleotide
  Sense strand starting at position 2141 of SEQ ID NO: 1888866
auaucuaaguagucucuua

SEQ ID NO: 2562259 - RNA, 19 nt, Artificial Sequence
  Description of Artificial Sequence: Synthetic oligonucleotide
  Antisense strand to SEQ ID NO: 2562258
uaagagacuacuuagauau

SEQ ID NO: 2562260 - RNA, 19 nt, Artificial Sequence
  Description of Artificial Sequence: Synthetic oligonucleotide
  Sense strand starting at position 2229 of SEQ ID NO: 1888866
ccaaauuuaucugggaaca

SEQ ID NO: 2562261 - RNA, 19 nt, Artificial Sequence
  Description of Artificial Sequence: Synthetic oligonucleotide
  Antisense strand to SEQ ID NO: 2562260
uguucccagauaaauuugg

SEQ ID NO: 2562262 - RNA, 19 nt, Artificial Sequence
  Description of Artificial Sequence: Synthetic oligonucleotide
  Sense strand starting at position 2407 of SEQ ID NO: 1888866
ucugucuuugaacaaguca

SEQ ID NO: 2562263 - RNA, 19 nt, Artificial Sequence
  Description of Artificial Sequence: Synthetic oligonucleotide
  Antisense strand to SEQ ID NO: 2562262
ugacuuguucaaagacaga

SEQ ID NO: 2562264 - RNA, 19 nt, Artificial Sequence
  Description of Artificial Sequence: Synthetic oligonucleotide
  Sense strand starting at position 2538 of SEQ ID NO: 1888866
gcaagaagugagcaaauau

SEQ ID NO: 2562265 - RNA, 19 nt, Artificial Sequence
  Description of Artificial Sequence: Synthetic oligonucleotide
  Antisense strand to SEQ ID NO: 2562264
auauuugcucacuucuugc

SEQ ID NO: 2562266 - RNA, 19 nt, Artificial Sequence
  Description of Artificial Sequence: Synthetic oligonucleotide
  Sense strand starting at position 2892 of SEQ ID NO: 1888866
guaauaaugcugugaaaga

SEQ ID NO: 2562267 - RNA, 19 nt, Artificial Sequence
  Description of Artificial Sequence: Synthetic oligonucleotide
  Antisense strand to SEQ ID NO: 2562266
ucuuucacagcauuauuac

SEQ ID NO: 2562268 - RNA, 19 nt, Artificial Sequence
  Description of Artificial Sequence: Synthetic oligonucleotide
  Sense strand starting at position 2934 of SEQ ID NO: 1888866
gggagugaguaguuuggau

SEQ ID NO: 2562269 - RNA, 19 nt, Artificial Sequence
  Description of Artificial Sequence: Synthetic oligonucleotide
  Antisense strand to SEQ ID NO: 2562268
auccaaacuacucacuccc

SEQ ID NO: 2562270 - RNA, 19 nt, Artificial Sequence
  Description of Artificial Sequence: Synthetic oligonucleotide
  Sense strand starting at position 2954 of SEQ ID NO: 1888866
gcaugaucaggauggaacu

SEQ ID NO: 2562271 - RNA, 19 nt, Artificial Sequence
  Description of Artificial Sequence: Synthetic oligonucleotide
  Antisense strand to SEQ ID NO: 2562270
aguuccauccugaucaugc

SEQ ID NO: 2562272 - RNA, 19 nt, Artificial Sequence
  Description of Artificial Sequence: Synthetic oligonucleotide
  Sense strand starting at position 3077 of SEQ ID NO: 1888866
acuuuaaggugagugugaa

SEQ ID NO: 2562273 - RNA, 19 nt, Artificial Sequence
  Description of Artificial Sequence: Synthetic oligonucleotide
  Antisense strand to SEQ ID NO: 2562272
uucacacucaccuuaaagu

SEQ ID NO: 2562274 - RNA, 19 nt, Artificial Sequence
  Description of Artificial Sequence: Synthetic oligonucleotide
  Sense strand starting at position 3090 of SEQ ID NO: 1888866
ugugaaccacugugacaaa

SEQ ID NO: 2562275 - RNA, 19 nt, Artificial Sequence
  Description of Artificial Sequence: Synthetic oligonucleotide
  Antisense strand to SEQ ID NO: 2562274
uuugucacagugguucaca

SEQ ID NO: 2562276 - RNA, 19 nt, Artificial Sequence
  Description of Artificial Sequence: Synthetic oligonucleotide
  Sense strand starting at position 3206 of SEQ ID NO: 1888866
cagucuuaagcauggaaug

SEQ ID NO: 2562277 - RNA, 19 nt, Artificial Sequence
  Description of Artificial Sequence: Synthetic oligonucleotide
  Antisense strand to SEQ ID NO: 2562276
cauuccaugcuuaagacug

SEQ ID NO: 2562278 - RNA, 19 nt, Artificial Sequence
  Description of Artificial Sequence: Synthetic oligonucleotide
  Sense strand starting at position 3207 of SEQ ID NO: 1888866
agucuuaagcauggaauga

SEQ ID NO: 2562279 - RNA, 19 nt, Artificial Sequence
  Description of Artificial Sequence: Synthetic oligonucleotide
  Antisense strand to SEQ ID NO: 2562278
ucauuccaugcuuaagacu

SEQ ID NO: 2562280 - RNA, 19 nt, Artificial Sequence
  Description of Artificial Sequence: Synthetic oligonucleotide
  Sense strand starting at position 3208 of SEQ ID NO: 1888866
gucuuaagcauggaaugau

SEQ ID NO: 2562281 - RNA, 19 nt, Artificial Sequence
  Description of Artificial Sequence: Synthetic oligonucleotide
  Antisense strand to SEQ ID NO: 2562280
aucauuccaugcuuaagac

SEQ ID NO: 2562282 - RNA, 19 nt, Artificial Sequence
  Description of Artificial Sequence: Synthetic oligonucleotide
  Sense strand starting at position 3309 of SEQ ID NO: 1888866
cuauaugaucugcaaauug

SEQ ID NO: 2562283 - RNA, 19 nt, Artificial Sequence
  Description of Artificial Sequence: Synthetic oligonucleotide
  Antisense strand to SEQ ID NO: 2562282
caauuugcagaucauauag

SEQ ID NO: 2562284 - RNA, 19 nt, Artificial Sequence
  Description of Artificial Sequence: Synthetic oligonucleotide
  Sense strand starting at position 3320 of SEQ ID NO: 1888866
gcaaauuggacuugggaau

SEQ ID NO: 2562285 - RNA, 19 nt, Artificial Sequence
  Description of Artificial Sequence: Synthetic oligonucleotide
  Antisense strand to SEQ ID NO: 2562284
auucccaaguccaauuugc

SEQ ID NO: 2562286 - RNA, 19 nt, Artificial Sequence
  Description of Artificial Sequence: Synthetic oligonucleotide
  Sense strand starting at position 3381 of SEQ ID NO: 1888866
gguacuuugcaauaaagua

SEQ ID NO: 2562287 - RNA, 19 nt, Artificial Sequence
  Description of Artificial Sequence: Synthetic oligonucleotide
  Antisense strand to SEQ ID NO: 2562286
uacuuuauugcaaaguacc

SEQ ID NO: 2562288 - RNA, 19 nt, Artificial Sequence
  Description of Artificial Sequence: Synthetic oligonucleotide
  Sense strand starting at position 3418 of SEQ ID NO: 1888866
guagucaaauuagagauuu

SEQ ID NO: 2562289 - RNA, 19 nt, Artificial Sequence
  Description of Artificial Sequence: Synthetic oligonucleotide
  Antisense strand to SEQ ID NO: 2562288
aaaucucuaauuugacuac

SEQ ID NO: 2562290 - RNA, 19 nt, Artificial Sequence
  Description of Artificial Sequence: Synthetic oligonucleotide
  Sense strand starting at position 3532 of SEQ ID NO: 1888866
ucuguauacggaugaaacu

SEQ ID NO: 2562291 - RNA, 19 nt, Artificial Sequence
  Description of Artificial Sequence: Synthetic oligonucleotide
  Antisense strand to SEQ ID NO: 2562290
aguuucauccguauacaga

SEQ ID NO: 2562292 - RNA, 19 nt, Artificial Sequence
  Description of Artificial Sequence: Synthetic oligonucleotide
  Sense strand starting at position 3541 of SEQ ID NO: 1888866
ggaugaaacuauguuuccu

SEQ ID NO: 2562293 - RNA, 19 nt, Artificial Sequence
  Description of Artificial Sequence: Synthetic oligonucleotide
  Antisense strand to SEQ ID NO: 2562292
aggaaacauaguuucaucc

SEQ ID NO: 2562294 - RNA, 19 nt, Artificial Sequence
  Description of Artificial Sequence: Synthetic oligonucleotide
  Sense strand starting at position 233 of SEQ ID NO: 1888867
ugccaaauacaugauguua

SEQ ID NO: 2562295 - RNA, 19 nt, Artificial Sequence
  Description of Artificial Sequence: Synthetic oligonucleotide
  Antisense strand to SEQ ID NO: 2562294
uaacaucauguauuuggca

SEQ ID NO: 2562296 - RNA, 19 nt, Artificial Sequence
  Description of Artificial Sequence: Synthetic oligonucleotide
  Sense strand starting at position 351 of SEQ ID NO: 1888867
uguuaacuuuguccuagaa

SEQ ID NO: 2562297 - RNA, 19 nt, Artificial Sequence
  Description of Artificial Sequence: Synthetic oligonucleotide
  Antisense strand to SEQ ID NO: 2562296
uucuaggacaaaguuaaca

SEQ ID NO: 2562298 - RNA, 19 nt, Artificial Sequence
  Description of Artificial Sequence: Synthetic oligonucleotide
  Sense strand starting at position 661 of SEQ ID NO: 1888867
gguuguggugaaugagaga

SEQ ID NO: 2562299 - RNA, 19 nt, Artificial Sequence
  Description of Artificial Sequence: Synthetic oligonucleotide
  Antisense strand to SEQ ID NO: 2562298
ucucucauucaccacaacc

SEQ ID NO: 2562300 - RNA, 19 nt, Artificial Sequence
  Description of Artificial Sequence: Synthetic oligonucleotide
  Sense strand starting at position 670 of SEQ ID NO: 1888867
gaaugagagaucgggccau

SEQ ID NO: 2562301 - RNA, 19 nt, Artificial Sequence
  Description of Artificial Sequence: Synthetic oligonucleotide
  Antisense strand to SEQ ID NO: 2562300
auggcccgaucucucauuc

SEQ ID NO: 2562302 - RNA, 19 nt, Artificial Sequence
  Description of Artificial Sequence: Synthetic oligonucleotide
  Sense strand starting at position 674 of SEQ ID NO: 1888867
gagagaucgggccauugca

SEQ ID NO: 2562303 - RNA, 19 nt, Artificial Sequence
  Description of Artificial Sequence: Synthetic oligonucleotide
  Antisense strand to SEQ ID NO: 2562302
ugcaauggcccgaucucuc

SEQ ID NO: 2562304 - RNA, 19 nt, Artificial Sequence
  Description of Artificial Sequence: Synthetic oligonucleotide
  Sense strand starting at position 805 of SEQ ID NO: 1888867
gcuggcugugucuuaguaa

SEQ ID NO: 2562305 - RNA, 19 nt, Artificial Sequence
  Description of Artificial Sequence: Synthetic oligonucleotide
  Antisense strand to SEQ ID NO: 2562304
uuacuaagacacagccagc

SEQ ID NO: 2562306 - RNA, 19 nt, Artificial Sequence
  Description of Artificial Sequence: Synthetic oligonucleotide
  Sense strand starting at position 1138 of SEQ ID NO: 1888867
gucccauugguuuacaacu

SEQ ID NO: 2562307 - RNA, 19 nt, Artificial Sequence
  Description of Artificial Sequence: Synthetic oligonucleotide
  Antisense strand to SEQ ID NO: 2562306
aguuguaaaccaaugggac

SEQ ID NO: 2562308 - RNA, 19 nt, Artificial Sequence
  Description of Artificial Sequence: Synthetic oligonucleotide
  Sense strand starting at position 1212 of SEQ ID NO: 1888867
auccaaauauugucagggu

SEQ ID NO: 2562309 - RNA, 19 nt, Artificial Sequence
  Description of Artificial Sequence: Synthetic oligonucleotide
  Antisense strand to SEQ ID NO: 2562308
acccugacaauauuuggau

SEQ ID NO: 2562310 - RNA, 19 nt, Artificial Sequence
  Description of Artificial Sequence: Synthetic oligonucleotide
  Sense strand starting at position 1216 of SEQ ID NO: 1888867
aaauauugucaggguaaua

SEQ ID NO: 2562311 - RNA, 19 nt, Artificial Sequence
  Description of Artificial Sequence: Synthetic oligonucleotide
  Antisense strand to SEQ ID NO: 2562310
uauuacccugacaauauuu

SEQ ID NO: 2562312 - RNA, 19 nt, Artificial Sequence
  Description of Artificial Sequence: Synthetic oligonucleotide
  Sense strand starting at position 1584 of SEQ ID NO: 1888867
ucaggaaugucgccaacaa

SEQ ID NO: 2562313 - RNA, 19 nt, Artificial Sequence
  Description of Artificial Sequence: Synthetic oligonucleotide
  Antisense strand to SEQ ID NO: 2562312
uuguuggcgacauuccuga

SEQ ID NO: 2562314 - RNA, 19 nt, Artificial Sequence
  Description of Artificial Sequence: Synthetic oligonucleotide
  Sense strand starting at position 1585 of SEQ ID NO: 1888867
caggaaugucgccaacaaa

SEQ ID NO: 2562315 - RNA, 19 nt, Artificial Sequence
  Description of Artificial Sequence: Synthetic oligonucleotide
  Antisense strand to SEQ ID NO: 2562314
uuuguuggcgacauuccug

SEQ ID NO: 2562316 - RNA, 19 nt, Artificial Sequence
  Description of Artificial Sequence: Synthetic oligonucleotide
  Sense strand starting at position 1786 of SEQ ID NO: 1888867
ggacaagugcaauacuuua

SEQ ID NO: 2562317 - RNA, 19 nt, Artificial Sequence
  Description of Artificial Sequence: Synthetic oligonucleotide
  Antisense strand to SEQ ID NO: 2562316
uaaaguauugcacuugucc

SEQ ID NO: 2562318 - RNA, 19 nt, Artificial Sequence
  Description of Artificial Sequence: Synthetic oligonucleotide
  Sense strand starting at position 1791 of SEQ ID NO: 1888867
agugcaauacuuuauauag

SEQ ID NO: 2562319 - RNA, 19 nt, Artificial Sequence
  Description of Artificial Sequence: Synthetic oligonucleotide
  Antisense strand to SEQ ID NO: 2562318
cuauauaaaguauugcacu

SEQ ID NO: 2562320 - RNA, 19 nt, Artificial Sequence
  Description of Artificial Sequence: Synthetic oligonucleotide
  Sense strand starting at position 1851 of SEQ ID NO: 1888867
gcaugagugcuggagauac

SEQ ID NO: 2562321 - RNA, 19 nt, Artificial Sequence
  Description of Artificial Sequence: Synthetic oligonucleotide
  Antisense strand to SEQ ID NO: 2562320
guaucuccagcacucaugc

SEQ ID NO: 2562322 - RNA, 19 nt, Artificial Sequence
  Description of Artificial Sequence: Synthetic oligonucleotide
  Sense strand starting at position 1861 of SEQ ID NO: 1888867
uggagauacgcaugaaggu

SEQ ID NO: 2562323 - RNA, 19 nt, Artificial Sequence
  Description of Artificial Sequence: Synthetic oligonucleotide
  Antisense strand to SEQ ID NO: 2562322
accuucaugcguaucucca

SEQ ID NO: 2562324 - RNA, 19 nt, Artificial Sequence
  Description of Artificial Sequence: Synthetic oligonucleotide
  Sense strand starting at position 1947 of SEQ ID NO: 1888867
auacauauauacgcugaaa

SEQ ID NO: 2562325 - RNA, 19 nt, Artificial Sequence
  Description of Artificial Sequence: Synthetic oligonucleotide
  Antisense strand to SEQ ID NO: 2562324
uuucagcguauauauguau

SEQ ID NO: 2562326 - RNA, 19 nt, Artificial Sequence
  Description of Artificial Sequence: Synthetic oligonucleotide
  Sense strand starting at position 1949 of SEQ ID NO: 1888867
acauauauacgcugaaaug

SEQ ID NO: 2562327 - RNA, 19 nt, Artificial Sequence
  Description of Artificial Sequence: Synthetic oligonucleotide
  Antisense strand to SEQ ID NO: 2562326
cauuucagcguauauaugu

SEQ ID NO: 2562328 - RNA, 19 nt, Artificial Sequence
  Description of Artificial Sequence: Synthetic oligonucleotide
  Sense strand starting at position 2030 of SEQ ID NO: 1888867
uuuguuauccaagaguacu

SEQ ID NO: 2562329 - RNA, 19 nt, Artificial Sequence
  Description of Artificial Sequence: Synthetic oligonucleotide
  Antisense strand to SEQ ID NO: 2562328
aguacucuuggauaacaaa

SEQ ID NO: 2562330 - RNA, 19 nt, Artificial Sequence
  Description of Artificial Sequence: Synthetic oligonucleotide
  Sense strand starting at position 2046 of SEQ ID NO: 1888867
acuggaagugcccauacua

SEQ ID NO: 2562331 - RNA, 19 nt, Artificial Sequence
  Description of Artificial Sequence: Synthetic oligonucleotide
  Antisense strand to SEQ ID NO: 2562330
uaguaugggcacuuccagu

SEQ ID NO: 2562332 - RNA, 19 nt, Artificial Sequence
  Description of Artificial Sequence: Synthetic oligonucleotide
  Sense strand starting at position 2206 of SEQ ID NO: 1888867
acugaaauguguccuauuc

SEQ ID NO: 2562333 - RNA, 19 nt, Artificial Sequence
  Description of Artificial Sequence: Synthetic oligonucleotide
  Antisense strand to SEQ ID NO: 2562332
gaauaggacacauuucagu

SEQ ID NO: 2562334 - RNA, 19 nt, Artificial Sequence
  Description of Artificial Sequence: Synthetic oligonucleotide
  Sense strand starting at position 2413 of SEQ ID NO: 1888867
guagccauugacuaaauca

SEQ ID NO: 2562335 - RNA, 19 nt, Artificial Sequence
  Description of Artificial Sequence: Synthetic oligonucleotide
  Antisense strand to SEQ ID NO: 2562334
ugauuuagucaauggcuac

SEQ ID NO: 2562336 - RNA, 19 nt, Artificial Sequence
  Description of Artificial Sequence: Synthetic oligonucleotide
  Sense strand starting at position 2424 of SEQ ID NO: 1888867
cuaaaucaccaugguaaug

SEQ ID NO: 2562337 - RNA, 19 nt, Artificial Sequence
  Description of Artificial Sequence: Synthetic oligonucleotide
  Antisense strand to SEQ ID NO: 2562336
cauuaccauggugauuuag

SEQ ID NO: 2562338 - RNA, 19 nt, Artificial Sequence
  Description of Artificial Sequence: Synthetic oligonucleotide
  Sense strand starting at position 2442 of SEQ ID NO: 1888867
guaagaagugcuuacauug

SEQ ID NO: 2562339 - RNA, 19 nt, Artificial Sequence
  Description of Artificial Sequence: Synthetic oligonucleotide
  Antisense strand to SEQ ID NO: 2562338
caauguaagcacuucuuac

SEQ ID NO: 2562340 - RNA, 19 nt, Artificial Sequence
  Description of Artificial Sequence: Synthetic oligonucleotide
  Sense strand starting at position 2452 of SEQ ID NO: 1888867
cuuacauugcaguagaucu

SEQ ID NO: 2562341 - RNA, 19 nt, Artificial Sequence
  Description of Artificial Sequence: Synthetic oligonucleotide
  Antisense strand to SEQ ID NO: 2562340
agaucuacugcaauguaag

SEQ ID NO: 2562342 - RNA, 19 nt, Artificial Sequence
  Description of Artificial Sequence: Synthetic oligonucleotide
  Sense strand starting at position 2511 of SEQ ID NO: 1888867
ggccuauuccuguagcaaa

SEQ ID NO: 2562343 - RNA, 19 nt, Artificial Sequence
  Description of Artificial Sequence: Synthetic oligonucleotide
  Antisense strand to SEQ ID NO: 2562342
uuugcuacaggaauaggcc

SEQ ID NO: 2562344 - RNA, 19 nt, Artificial Sequence
  Description of Artificial Sequence: Synthetic oligonucleotide
  Sense strand starting at position 2577 of SEQ ID NO: 1888867
gcagacucaccugguuaaa

SEQ ID NO: 2562345 - RNA, 19 nt, Artificial Sequence
  Description of Artificial Sequence: Synthetic oligonucleotide
  Antisense strand to SEQ ID NO: 2562344
uuuaaccaggugagucugc

SEQ ID NO: 2562346 - RNA, 19 nt, Artificial Sequence
  Description of Artificial Sequence: Synthetic oligonucleotide
  Sense strand starting at position 2675 of SEQ ID NO: 1888867
gcuuacagagucuaagcua

SEQ ID NO: 2562347 - RNA, 19 nt, Artificial Sequence
  Description of Artificial Sequence: Synthetic oligonucleotide
  Antisense strand to SEQ ID NO: 2562346
uagcuuagacucuguaagc

SEQ ID NO: 2562348 - RNA, 19 nt, Artificial Sequence
  Description of Artificial Sequence: Synthetic oligonucleotide
  Sense strand starting at position 2793 of SEQ ID NO: 1888867
ucuuauguauaagcagauu

SEQ ID NO: 2562349 - RNA, 19 nt, Artificial Sequence
  Description of Artificial Sequence: Synthetic oligonucleotide
  Antisense strand to SEQ ID NO: 2562348
aaucugcuuauacauaaga

SEQ ID NO: 2562350 - RNA, 19 nt, Artificial Sequence
  Description of Artificial Sequence: Synthetic oligonucleotide
  Sense strand starting at position 2856 of SEQ ID NO: 1888867
caguaauuugcaggcacau

SEQ ID NO: 2562351 - RNA, 19 nt, Artificial Sequence
  Description of Artificial Sequence: Synthetic oligonucleotide
  Antisense strand to SEQ ID NO: 2562350
augugccugcaaauuacug

SEQ ID NO: 2562352 - RNA, 19 nt, Artificial Sequence
  Description of Artificial Sequence: Synthetic oligonucleotide
  Sense strand starting at position 2979 of SEQ ID NO: 1888867
acggaaagugacuguuaga

SEQ ID NO: 2562353 - RNA, 19 nt, Artificial Sequence
  Description of Artificial Sequence: Synthetic oligonucleotide
  Antisense strand to SEQ ID NO: 2562352
ucuaacagucacuuuccgu

SEQ ID NO: 2562354 - RNA, 19 nt, Artificial Sequence
  Description of Artificial Sequence: Synthetic oligonucleotide
  Sense strand starting at position 3099 of SEQ ID NO: 1888867
auggcugagagaugucaca

SEQ ID NO: 2562355 - RNA, 19 nt, Artificial Sequence
  Description of Artificial Sequence: Synthetic oligonucleotide
  Antisense strand to SEQ ID NO: 2562354
ugugacaucucucagccau

SEQ ID NO: 2562356 - RNA, 19 nt, Artificial Sequence
  Description of Artificial Sequence: Synthetic oligonucleotide
  Sense strand starting at position 3387 of SEQ ID NO: 1888867
ucuguaauacguuaaacga

SEQ ID NO: 2562357 - RNA, 19 nt, Artificial Sequence
  Description of Artificial Sequence: Synthetic oligonucleotide
  Antisense strand to SEQ ID NO: 2562356
ucguuuaacguauuacaga

SEQ ID NO: 2562358 - RNA, 19 nt, Artificial Sequence
  Description of Artificial Sequence: Synthetic oligonucleotide
  Sense strand starting at position 3395 of SEQ ID NO: 1888867
acguuaaacgagugaggga

SEQ ID NO: 2562359 - RNA, 19 nt, Artificial Sequence
  Description of Artificial Sequence: Synthetic oligonucleotide
  Antisense strand to SEQ ID NO: 2562358
ucccucacucguuuaacgu

SEQ ID NO: 2562360 - RNA, 19 nt, Artificial Sequence
  Description of Artificial Sequence: Synthetic oligonucleotide
  Sense strand starting at position 3424 of SEQ ID NO: 1888867
uugaacuuucgucacgaua

SEQ ID NO: 2562361 - RNA, 19 nt, Artificial Sequence
  Description of Artificial Sequence: Synthetic oligonucleotide
  Antisense strand to SEQ ID NO: 2562360
uaucgugacgaaaguucaa

SEQ ID NO: 2562362 - RNA, 19 nt, Artificial Sequence
  Description of Artificial Sequence: Synthetic oligonucleotide
  Sense strand starting at position 3427 of SEQ ID NO: 1888867
aacuuucgucacgauaucu

SEQ ID NO: 2562363 - RNA, 19 nt, Artificial Sequence
  Description of Artificial Sequence: Synthetic oligonucleotide
  Antisense strand to SEQ ID NO: 2562362
agauaucgugacgaaaguu

SEQ ID NO: 2562364 - RNA, 19 nt, Artificial Sequence
  Description of Artificial Sequence: Synthetic oligonucleotide
  Sense strand starting at position 3449 of SEQ ID NO: 1888867
gccacuaaaugagucuuua

SEQ ID NO: 2562365 - RNA, 19 nt, Artificial Sequence
  Description of Artificial Sequence: Synthetic oligonucleotide
  Antisense strand to SEQ ID NO: 2562364
uaaagacucauuuaguggc

SEQ ID NO: 2562366 - RNA, 19 nt, Artificial Sequence
  Description of Artificial Sequence: Synthetic oligonucleotide
  Sense strand starting at position 3453 of SEQ ID NO: 1888867
cuaaaugagucuuuagaag

SEQ ID NO: 2562367 - RNA, 19 nt, Artificial Sequence
  Description of Artificial Sequence: Synthetic oligonucleotide
  Antisense strand to SEQ ID NO: 2562366
cuucuaaagacucauuuag

SEQ ID NO: 2562368 - RNA, 19 nt, Artificial Sequence
  Description of Artificial Sequence: Synthetic oligonucleotide
  Sense strand starting at position 3578 of SEQ ID NO: 1888867
cccuuaaauuggguuucua

SEQ ID NO: 2562369 - RNA, 19 nt, Artificial Sequence
  Description of Artificial Sequence: Synthetic oligonucleotide
  Antisense strand to SEQ ID NO: 2562368
uagaaacccaauuuaaggg

SEQ ID NO: 2562370 - RNA, 19 nt, Artificial Sequence
  Description of Artificial Sequence: Synthetic oligonucleotide
  Sense strand starting at position 3589 of SEQ ID NO: 1888867
gguuucuacaccugugaag

SEQ ID NO: 2562371 - RNA, 19 nt, Artificial Sequence
  Description of Artificial Sequence: Synthetic oligonucleotide
  Antisense strand to SEQ ID NO: 2562370
cuucacagguguagaaacc

SEQ ID NO: 2562372 - RNA, 19 nt, Artificial Sequence
  Description of Artificial Sequence: Synthetic oligonucleotide
  Sense strand starting at position 3591 of SEQ ID NO: 1888867
uuucuacaccugugaagau

SEQ ID NO: 2562373 - RNA, 19 nt, Artificial Sequence
  Description of Artificial Sequence: Synthetic oligonucleotide
  Antisense strand to SEQ ID NO: 2562372
aucuucacagguguagaaa

SEQ ID NO: 2562374 - RNA, 19 nt, Artificial Sequence
  Description of Artificial Sequence: Synthetic oligonucleotide
  Sense strand starting at position 122 of SEQ ID NO: 1888868
ugccaaauacaugauguua

SEQ ID NO: 2562375 - RNA, 19 nt, Artificial Sequence
  Description of Artificial Sequence: Synthetic oligonucleotide
  Antisense strand to SEQ ID NO: 2562374
uaacaucauguauuuggca

SEQ ID NO: 2562376 - RNA, 19 nt, Artificial Sequence
  Description of Artificial Sequence: Synthetic oligonucleotide
  Sense strand starting at position 240 of SEQ ID NO: 1888868
uguuaacuuuguccuagaa

SEQ ID NO: 2562377 - RNA, 19 nt, Artificial Sequence
  Description of Artificial Sequence: Synthetic oligonucleotide
  Antisense strand to SEQ ID NO: 2562376
uucuaggacaaaguuaaca

SEQ ID NO: 2562378 - RNA, 19 nt, Artificial Sequence
  Description of Artificial Sequence: Synthetic oligonucleotide
  Sense strand starting at position 550 of SEQ ID NO: 1888868
gguuguggugaaugagaga

SEQ ID NO: 2562379 - RNA, 19 nt, Artificial Sequence
  Description of Artificial Sequence: Synthetic oligonucleotide
  Antisense strand to SEQ ID NO: 2562378
ucucucauucaccacaacc

SEQ ID NO: 2562380 - RNA, 19 nt, Artificial Sequence
  Description of Artificial Sequence: Synthetic oligonucleotide
  Sense strand starting at position 559 of SEQ ID NO: 1888868
gaaugagagaucgggccau

SEQ ID NO: 2562381 - RNA, 19 nt, Artificial Sequence
  Description of Artificial Sequence: Synthetic oligonucleotide
  Antisense strand to SEQ ID NO: 2562380
auggcccgaucucucauuc

SEQ ID NO: 2562382 - RNA, 19 nt, Artificial Sequence
  Description of Artificial Sequence: Synthetic oligonucleotide
  Sense strand starting at position 563 of SEQ ID NO: 1888868
gagagaucgggccauugca

SEQ ID NO: 2562383 - RNA, 19 nt, Artificial Sequence
  Description of Artificial Sequence: Synthetic oligonucleotide
  Antisense strand to SEQ ID NO: 2562382
ugcaauggcccgaucucuc

SEQ ID NO: 2562384 - RNA, 19 nt, Artificial Sequence
  Description of Artificial Sequence: Synthetic oligonucleotide
  Sense strand starting at position 694 of SEQ ID NO: 1888868
gcuggcugugucuuaguaa

SEQ ID NO: 2562385 - RNA, 19 nt, Artificial Sequence
  Description of Artificial Sequence: Synthetic oligonucleotide
  Antisense strand to SEQ ID NO: 2562384
uuacuaagacacagccagc

SEQ ID NO: 2562386 - RNA, 19 nt, Artificial Sequence
  Description of Artificial Sequence: Synthetic oligonucleotide
  Sense strand starting at position 1027 of SEQ ID NO: 1888868
gucccauugguuuacaacu

SEQ ID NO: 2562387 - RNA, 19 nt, Artificial Sequence
  Description of Artificial Sequence: Synthetic oligonucleotide
  Antisense strand to SEQ ID NO: 2562386
aguuguaaaccaaugggac

SEQ ID NO: 2562388 - RNA, 19 nt, Artificial Sequence
  Description of Artificial Sequence: Synthetic oligonucleotide
  Sense strand starting at position 1101 of SEQ ID NO: 1888868
auccaaauauugucagggu

SEQ ID NO: 2562389 - RNA, 19 nt, Artificial Sequence
  Description of Artificial Sequence: Synthetic oligonucleotide
  Antisense strand to SEQ ID NO: 2562388
acccugacaauauuuggau

SEQ ID NO: 2562390 - RNA, 19 nt, Artificial Sequence
  Description of Artificial Sequence: Synthetic oligonucleotide
  Sense strand starting at position 1105 of SEQ ID NO: 1888868
aaauauugucaggguaaua

SEQ ID NO: 2562391 - RNA, 19 nt, Artificial Sequence
  Description of Artificial Sequence: Synthetic oligonucleotide
  Antisense strand to SEQ ID NO: 2562390
uauuacccugacaauauuu

SEQ ID NO: 2562392 - RNA, 19 nt, Artificial Sequence
  Description of Artificial Sequence: Synthetic oligonucleotide
  Sense strand starting at position 1473 of SEQ ID NO: 1888868
ucaggaaugucgccaacaa

SEQ ID NO: 2562393 - RNA, 19 nt, Artificial Sequence
  Description of Artificial Sequence: Synthetic oligonucleotide
  Antisense strand to SEQ ID NO: 2562392
uuguuggcgacauuccuga

SEQ ID NO: 2562394 - RNA, 19 nt, Artificial Sequence
  Description of Artificial Sequence: Synthetic oligonucleotide
  Sense strand starting at position 1474 of SEQ ID NO: 1888868
caggaaugucgccaacaaa

SEQ ID NO: 2562395 - RNA, 19 nt, Artificial Sequence
  Description of Artificial Sequence: Synthetic oligonucleotide
  Antisense strand to SEQ ID NO: 2562394
uuuguuggcgacauuccug

SEQ ID NO: 2562396 - RNA, 19 nt, Artificial Sequence
  Description of Artificial Sequence: Synthetic oligonucleotide
  Sense strand starting at position 1675 of SEQ ID NO: 1888868
ggacaagugcaauacuuua

SEQ ID NO: 2562397 - RNA, 19 nt, Artificial Sequence
  Description of Artificial Sequence: Synthetic oligonucleotide
  Antisense strand to SEQ ID NO: 2562396
uaaaguauugcacuugucc

SEQ ID NO: 2562398 - RNA, 19 nt, Artificial Sequence
  Description of Artificial Sequence: Synthetic oligonucleotide
  Sense strand starting at position 1680 of SEQ ID NO: 1888868
agugcaauacuuuauauag

SEQ ID NO: 2562399 - RNA, 19 nt, Artificial Sequence
  Description of Artificial Sequence: Synthetic oligonucleotide
  Antisense strand to SEQ ID NO: 2562398
cuauauaaaguauugcacu

SEQ ID NO: 2562400 - RNA, 19 nt, Artificial Sequence
  Description of Artificial Sequence: Synthetic oligonucleotide
  Sense strand starting at position 1740 of SEQ ID NO: 1888868
gcaugagugcuggagauac

SEQ ID NO: 2562401 - RNA, 19 nt, Artificial Sequence
  Description of Artificial Sequence: Synthetic oligonucleotide
  Antisense strand to SEQ ID NO: 2562400
guaucuccagcacucaugc

SEQ ID NO: 2562402 - RNA, 19 nt, Artificial Sequence
  Description of Artificial Sequence: Synthetic oligonucleotide
  Sense strand starting at position 1750 of SEQ ID NO: 1888868
uggagauacgcaugaaggu

SEQ ID NO: 2562403 - RNA, 19 nt, Artificial Sequence
  Description of Artificial Sequence: Synthetic oligonucleotide
  Antisense strand to SEQ ID NO: 2562402
accuucaugcguaucucca

SEQ ID NO: 2562404 - RNA, 19 nt, Artificial Sequence
  Description of Artificial Sequence: Synthetic oligonucleotide
  Sense strand starting at position 1836 of SEQ ID NO: 1888868
auacauauauacgcugaaa

SEQ ID NO: 2562405 - RNA, 19 nt, Artificial Sequence
  Description of Artificial Sequence: Synthetic oligonucleotide
  Antisense strand to SEQ ID NO: 2562404
uuucagcguauauauguau

SEQ ID NO: 2562406 - RNA, 19 nt, Artificial Sequence
  Description of Artificial Sequence: Synthetic oligonucleotide
  Sense strand starting at position 1838 of SEQ ID NO: 1888868
acauauauacgcugaaaug

SEQ ID NO: 2562407 - RNA, 19 nt, Artificial Sequence
  Description of Artificial Sequence: Synthetic oligonucleotide
  Antisense strand to SEQ ID NO: 2562406
cauuucagcguauauaugu

SEQ ID NO: 2562408 - RNA, 19 nt, Artificial Sequence
  Description of Artificial Sequence: Synthetic oligonucleotide
  Sense strand starting at position 1919 of SEQ ID NO: 1888868
uuuguuauccaagaguacu

SEQ ID NO: 2562409 - RNA, 19 nt, Artificial Sequence
  Description of Artificial Sequence: Synthetic oligonucleotide
  Antisense strand to SEQ ID NO: 2562408
aguacucuuggauaacaaa

SEQ ID NO: 2562410 - RNA, 19 nt, Artificial Sequence
  Description of Artificial Sequence: Synthetic oligonucleotide
  Sense strand starting at position 1935 of SEQ ID NO: 1888868
acuggaagugcccauacua

SEQ ID NO: 2562411 - RNA, 19 nt, Artificial Sequence
  Description of Artificial Sequence: Synthetic oligonucleotide
  Antisense strand to SEQ ID NO: 2562410
uaguaugggcacuuccagu

SEQ ID NO: 2562412 - RNA, 19 nt, Artificial Sequence
  Description of Artificial Sequence: Synthetic oligonucleotide
  Sense strand starting at position 2095 of SEQ ID NO: 1888868
acugaaauguguccuauuc

SEQ ID NO: 2562413 - RNA, 19 nt, Artificial Sequence
  Description of Artificial Sequence: Synthetic oligonucleotide
  Antisense strand to SEQ ID NO: 2562412
gaauaggacacauuucagu

SEQ ID NO: 2562414 - RNA, 19 nt, Artificial Sequence
  Description of Artificial Sequence: Synthetic oligonucleotide
  Sense strand starting at position 2302 of SEQ ID NO: 1888868
guagccauugacuaaauca

SEQ ID NO: 2562415 - RNA, 19 nt, Artificial Sequence
  Description of Artificial Sequence: Synthetic oligonucleotide
  Antisense strand to SEQ ID NO: 2562414
ugauuuagucaauggcuac

SEQ ID NO: 2562416 - RNA, 19 nt, Artificial Sequence
  Description of Artificial Sequence: Synthetic oligonucleotide
  Sense strand starting at position 2313 of SEQ ID NO: 1888868
cuaaaucaccaugguaaug

SEQ ID NO: 2562417 - RNA, 19 nt, Artificial Sequence
  Description of Artificial Sequence: Synthetic oligonucleotide
  Antisense strand to SEQ ID NO: 2562416
cauuaccauggugauuuag

SEQ ID NO: 2562418 - RNA, 19 nt, Artificial Sequence
  Description of Artificial Sequence: Synthetic oligonucleotide
  Sense strand starting at position 2331 of SEQ ID NO: 1888868
guaagaagugcuuacauug

SEQ ID NO: 2562419 - RNA, 19 nt, Artificial Sequence
  Description of Artificial Sequence: Synthetic oligonucleotide
  Antisense strand to SEQ ID NO: 2562418
caauguaagcacuucuuac

SEQ ID NO: 2562420 - RNA, 19 nt, Artificial Sequence
  Description of Artificial Sequence: Synthetic oligonucleotide
  Sense strand starting at position 2341 of SEQ ID NO: 1888868
cuuacauugcaguagaucu

SEQ ID NO: 2562421 - RNA, 19 nt, Artificial Sequence
  Description of Artificial Sequence: Synthetic oligonucleotide
  Antisense strand to SEQ ID NO: 2562420
agaucuacugcaauguaag

SEQ ID NO: 2562422 - RNA, 19 nt, Artificial Sequence
  Description of Artificial Sequence: Synthetic oligonucleotide
  Sense strand starting at position 2400 of SEQ ID NO: 1888868
ggccuauuccuguagcaaa

SEQ ID NO: 2562423 - RNA, 19 nt, Artificial Sequence
  Description of Artificial Sequence: Synthetic oligonucleotide
  Antisense strand to SEQ ID NO: 2562422
uuugcuacaggaauaggcc

SEQ ID NO: 2562424 - RNA, 19 nt, Artificial Sequence
  Description of Artificial Sequence: Synthetic oligonucleotide
  Sense strand starting at position 2466 of SEQ ID NO: 1888868
gcagacucaccugguuaaa

SEQ ID NO: 2562425 - RNA, 19 nt, Artificial Sequence
  Description of Artificial Sequence: Synthetic oligonucleotide
  Antisense strand to SEQ ID NO: 2562424
uuuaaccaggugagucugc

SEQ ID NO: 2562426 - RNA, 19 nt, Artificial Sequence
  Description of Artificial Sequence: Synthetic oligonucleotide
  Sense strand starting at position 2564 of SEQ ID NO: 1888868
gcuuacagagucuaagcua

SEQ ID NO: 2562427 - RNA, 19 nt, Artificial Sequence
  Description of Artificial Sequence: Synthetic oligonucleotide
  Antisense strand to SEQ ID NO: 2562426
uagcuuagacucuguaagc

SEQ ID NO: 2562428 - RNA, 19 nt, Artificial Sequence
  Description of Artificial Sequence: Synthetic oligonucleotide
  Sense strand starting at position 2682 of SEQ ID NO: 1888868
ucuuauguauaagcagauu

SEQ ID NO: 2562429 - RNA, 19 nt, Artificial Sequence
  Description of Artificial Sequence: Synthetic oligonucleotide
  Antisense strand to SEQ ID NO: 2562428
aaucugcuuauacauaaga

SEQ ID NO: 2562430 - RNA, 19 nt, Artificial Sequence
  Description of Artificial Sequence: Synthetic oligonucleotide
  Sense strand starting at position 2745 of SEQ ID NO: 1888868
caguaauuugcaggcacau

SEQ ID NO: 2562431 - RNA, 19 nt, Artificial Sequence
  Description of Artificial Sequence: Synthetic oligonucleotide
  Antisense strand to SEQ ID NO: 2562430
augugccugcaaauuacug

SEQ ID NO: 2562432 - RNA, 19 nt, Artificial Sequence
  Description of Artificial Sequence: Synthetic oligonucleotide
  Sense strand starting at position 2868 of SEQ ID NO: 1888868
acggaaagugacuguuaga

SEQ ID NO: 2562433 - RNA, 19 nt, Artificial Sequence
  Description of Artificial Sequence: Synthetic oligonucleotide
  Antisense strand to SEQ ID NO: 2562432
ucuaacagucacuuuccgu

SEQ ID NO: 2562434 - RNA, 19 nt, Artificial Sequence
  Description of Artificial Sequence: Synthetic oligonucleotide
  Sense strand starting at position 2988 of SEQ ID NO: 1888868
auggcugagagaugucaca

SEQ ID NO: 2562435 - RNA, 19 nt, Artificial Sequence
  Description of Artificial Sequence: Synthetic oligonucleotide
  Antisense strand to SEQ ID NO: 2562434
ugugacaucucucagccau

SEQ ID NO: 2562436 - RNA, 19 nt, Artificial Sequence
  Description of Artificial Sequence: Synthetic oligonucleotide
  Sense strand starting at position 3276 of SEQ ID NO: 1888868
ucuguaauacguuaaacga

SEQ ID NO: 2562437 - RNA, 19 nt, Artificial Sequence
  Description of Artificial Sequence: Synthetic oligonucleotide
  Antisense strand to SEQ ID NO: 2562436
ucguuuaacguauuacaga

SEQ ID NO: 2562438 - RNA, 19 nt, Artificial Sequence
  Description of Artificial Sequence: Synthetic oligonucleotide
  Sense strand starting at position 3284 of SEQ ID NO: 1888868
acguuaaacgagugaggga

SEQ ID NO: 2562439 - RNA, 19 nt, Artificial Sequence
  Description of Artificial Sequence: Synthetic oligonucleotide
  Antisense strand to SEQ ID NO: 2562438
ucccucacucguuuaacgu

SEQ ID NO: 2562440 - RNA, 19 nt, Artificial Sequence
  Description of Artificial Sequence: Synthetic oligonucleotide
  Sense strand starting at position 3313 of SEQ ID NO: 1888868
uugaacuuucgucacgaua

SEQ ID NO: 2562441 - RNA, 19 nt, Artificial Sequence
  Description of Artificial Sequence: Synthetic oligonucleotide
  Antisense strand to SEQ ID NO: 2562440
uaucgugacgaaaguucaa

SEQ ID NO: 2562442 - RNA, 19 nt, Artificial Sequence
  Description of Artificial Sequence: Synthetic oligonucleotide
  Sense strand starting at position 3316 of SEQ ID NO: 1888868
aacuuucgucacgauaucu

SEQ ID NO: 2562443 - RNA, 19 nt, Artificial Sequence
  Description of Artificial Sequence: Synthetic oligonucleotide
  Antisense strand to SEQ ID NO: 2562442
agauaucgugacgaaaguu

SEQ ID NO: 2562444 - RNA, 19 nt, Artificial Sequence
  Description of Artificial Sequence: Synthetic oligonucleotide
  Sense strand starting at position 3338 of SEQ ID NO: 1888868
gccacuaaaugagucuuua

SEQ ID NO: 2562445 - RNA, 19 nt, Artificial Sequence
  Description of Artificial Sequence: Synthetic oligonucleotide
  Antisense strand to SEQ ID NO: 2562444
uaaagacucauuuaguggc

SEQ ID NO: 2562446 - RNA, 19 nt, Artificial Sequence
  Description of Artificial Sequence: Synthetic oligonucleotide
  Sense strand starting at position 3342 of SEQ ID NO: 1888868
cuaaaugagucuuuagaag

SEQ ID NO: 2562447 - RNA, 19 nt, Artificial Sequence
  Description of Artificial Sequence: Synthetic oligonucleotide
  Antisense strand to SEQ ID NO: 2562446
cuucuaaagacucauuuag

SEQ ID NO: 2562448 - RNA, 19 nt, Artificial Sequence
  Description of Artificial Sequence: Synthetic oligonucleotide
  Sense strand starting at position 3467 of SEQ ID NO: 1888868
cccuuaaauuggguuucua

SEQ ID NO: 2562449 - RNA, 19 nt, Artificial Sequence
  Description of Artificial Sequence: Synthetic oligonucleotide
  Antisense strand to SEQ ID NO: 2562448
uagaaacccaauuuaaggg

SEQ ID NO: 2562450 - RNA, 19 nt, Artificial Sequence
  Description of Artificial Sequence: Synthetic oligonucleotide
  Sense strand starting at position 3478 of SEQ ID NO: 1888868
gguuucuacaccugugaag

SEQ ID NO: 2562451 - RNA, 19 nt, Artificial Sequence
  Description of Artificial Sequence: Synthetic oligonucleotide
  Antisense strand to SEQ ID NO: 2562450
cuucacagguguagaaacc

SEQ ID NO: 2562452 - RNA, 19 nt, Artificial Sequence
  Description of Artificial Sequence: Synthetic oligonucleotide
  Sense strand starting at position 3480 of SEQ ID NO: 1888868
uuucuacaccugugaagau

SEQ ID NO: 2562453 - RNA, 19 nt, Artificial Sequence
  Description of Artificial Sequence: Synthetic oligonucleotide
  Antisense strand to SEQ ID NO: 2562452
aucuucacagguguagaaa

SEQ ID NO: 2562454 - RNA, 19 nt, Artificial Sequence
  Description of Artificial Sequence: Synthetic oligonucleotide
  Sense strand starting at position 146 of SEQ ID NO: 1888869
cugaguuugguagaggcaa

SEQ ID NO: 2562455 - RNA, 19 nt, Artificial Sequence
  Description of Artificial Sequence: Synthetic oligonucleotide
  Antisense strand to SEQ ID NO: 2562454
uugccucuaccaaacucag

SEQ ID NO: 2562456 - RNA, 19 nt, Artificial Sequence
  Description of Artificial Sequence: Synthetic oligonucleotide
  Sense strand starting at position 164 of SEQ ID NO: 1888869
agcauuucccuuugaaagc

SEQ ID NO: 2562457 - RNA, 19 nt, Artificial Sequence
  Description of Artificial Sequence: Synthetic oligonucleotide
  Antisense strand to SEQ ID NO: 2562456
gcuuucaaagggaaaugcu

SEQ ID NO: 2562458 - RNA, 19 nt, Artificial Sequence
  Description of Artificial Sequence: Synthetic oligonucleotide
  Sense strand starting at position 224 of SEQ ID NO: 1888869
aagagucauccagggccau

SEQ ID NO: 2562459 - RNA, 19 nt, Artificial Sequence
  Description of Artificial Sequence: Synthetic oligonucleotide
  Antisense strand to SEQ ID NO: 2562458
auggcccuggaugacucuu

SEQ ID NO: 2562460 - RNA, 19 nt, Artificial Sequence
  Description of Artificial Sequence: Synthetic oligonucleotide
  Sense strand starting at position 302 of SEQ ID NO: 1888869
uuaucagcuguugaacaaa

SEQ ID NO: 2562461 - RNA, 19 nt, Artificial Sequence
  Description of Artificial Sequence: Synthetic oligonucleotide
  Antisense strand to SEQ ID NO: 2562460
uuuguucaacagcugauaa

SEQ ID NO: 2562462 - RNA, 19 nt, Artificial Sequence
  Description of Artificial Sequence: Synthetic oligonucleotide
  Sense strand starting at position 323 of SEQ ID NO: 1888869
gugaccugucuccaagaau

SEQ ID NO: 2562463 - RNA, 19 nt, Artificial Sequence
  Description of Artificial Sequence: Synthetic oligonucleotide
  Antisense strand to SEQ ID NO: 2562462
auucuuggagacaggucac

SEQ ID NO: 2562464 - RNA, 19 nt, Artificial Sequence
  Description of Artificial Sequence: Synthetic oligonucleotide
  Sense strand starting at position 494 of SEQ ID NO: 1888869
gguaaaggauggucccaga

SEQ ID NO: 2562465 - RNA, 19 nt, Artificial Sequence
  Description of Artificial Sequence: Synthetic oligonucleotide
  Antisense strand to SEQ ID NO: 2562464
ucugggaccauccuuuacc

SEQ ID NO: 2562466 - RNA, 19 nt, Artificial Sequence
  Description of Artificial Sequence: Synthetic oligonucleotide
  Sense strand starting at position 734 of SEQ ID NO: 1888869
acgcucaaucauugggaga

SEQ ID NO: 2562467 - RNA, 19 nt, Artificial Sequence
  Description of Artificial Sequence: Synthetic oligonucleotide
  Antisense strand to SEQ ID NO: 2562466
ucucccaaugauugagcgu

SEQ ID NO: 2562468 - RNA, 19 nt, Artificial Sequence
  Description of Artificial Sequence: Synthetic oligonucleotide
  Sense strand starting at position 782 of SEQ ID NO: 1888869
acauuuaacuuggaguaca

SEQ ID NO: 2562469 - RNA, 19 nt, Artificial Sequence
  Description of Artificial Sequence: Synthetic oligonucleotide
  Antisense strand to SEQ ID NO: 2562468
uguacuccaaguuaaaugu

SEQ ID NO: 2562470 - RNA, 19 nt, Artificial Sequence
  Description of Artificial Sequence: Synthetic oligonucleotide
  Sense strand starting at position 849 of SEQ ID NO: 1888869
ggaagauagcacuggguga

SEQ ID NO: 2562471 - RNA, 19 nt, Artificial Sequence
  Description of Artificial Sequence: Synthetic oligonucleotide
  Antisense strand to SEQ ID NO: 2562470
ucacccagugcuaucuucc

SEQ ID NO: 2562472 - RNA, 19 nt, Artificial Sequence
  Description of Artificial Sequence: Synthetic oligonucleotide
  Sense strand starting at position 1067 of SEQ ID NO: 1888869
ugacuuuacuugccaaaga

SEQ ID NO: 2562473 - RNA, 19 nt, Artificial Sequence
  Description of Artificial Sequence: Synthetic oligonucleotide
  Antisense strand to SEQ ID NO: 2562472
ucuuuggcaaguaaaguca

SEQ ID NO: 2562474 - RNA, 19 nt, Artificial Sequence
  Description of Artificial Sequence: Synthetic oligonucleotide
  Sense strand starting at position 1151 of SEQ ID NO: 1888869
cugugaauaugacuuuaua

SEQ ID NO: 2562475 - RNA, 19 nt, Artificial Sequence
  Description of Artificial Sequence: Synthetic oligonucleotide
  Antisense strand to SEQ ID NO: 2562474
uauaaagucauauucacag

SEQ ID NO: 2562476 - RNA, 19 nt, Artificial Sequence
  Description of Artificial Sequence: Synthetic oligonucleotide
  Sense strand starting at position 1177 of SEQ ID NO: 1888869
agggacuuuguguauguaa

SEQ ID NO: 2562477 - RNA, 19 nt, Artificial Sequence
  Description of Artificial Sequence: Synthetic oligonucleotide
  Antisense strand to SEQ ID NO: 2562476
uuacauacacaaagucccu

SEQ ID NO: 2562478 - RNA, 19 nt, Artificial Sequence
  Description of Artificial Sequence: Synthetic oligonucleotide
  Sense strand starting at position 1216 of SEQ ID NO: 1888869
ugagaagguuguccuagau

SEQ ID NO: 2562479 - RNA, 19 nt, Artificial Sequence
  Description of Artificial Sequence: Synthetic oligonucleotide
  Antisense strand to SEQ ID NO: 2562478
aucuaggacaaccuucuca

SEQ ID NO: 2562480 - RNA, 19 nt, Artificial Sequence
  Description of Artificial Sequence: Synthetic oligonucleotide
  Sense strand starting at position 1220 of SEQ ID NO: 1888869
aagguuguccuagauuauc

SEQ ID NO: 2562481 - RNA, 19 nt, Artificial Sequence
  Description of Artificial Sequence: Synthetic oligonucleotide
  Antisense strand to SEQ ID NO: 2562480
gauaaucuaggacaaccuu

SEQ ID NO: 2562482 - RNA, 19 nt, Artificial Sequence
  Description of Artificial Sequence: Synthetic oligonucleotide
  Sense strand starting at position 1226 of SEQ ID NO: 1888869
guccuagauuaucugggaa

SEQ ID NO: 2562483 - RNA, 19 nt, Artificial Sequence
  Description of Artificial Sequence: Synthetic oligonucleotide
  Antisense strand to SEQ ID NO: 2562482
uucccagauaaucuaggac

SEQ ID NO: 2562484 - RNA, 19 nt, Artificial Sequence
  Description of Artificial Sequence: Synthetic oligonucleotide
  Sense strand starting at position 1326 of SEQ ID NO: 1888869
ugacaagagcuccaugugu

SEQ ID NO: 2562485 - RNA, 19 nt, Artificial Sequence
  Description of Artificial Sequence: Synthetic oligonucleotide
  Antisense strand to SEQ ID NO: 2562484
acacauggagcucuuguca

SEQ ID NO: 2562486 - RNA, 19 nt, Artificial Sequence
  Description of Artificial Sequence: Synthetic oligonucleotide
  Sense strand starting at position 1341 of SEQ ID NO: 1888869
guguauaucaaggauugug

SEQ ID NO: 2562487 - RNA, 19 nt, Artificial Sequence
  Description of Artificial Sequence: Synthetic oligonucleotide
  Antisense strand to SEQ ID NO: 2562486
cacaauccuugauauacac

SEQ ID NO: 2562488 - RNA, 19 nt, Artificial Sequence
  Description of Artificial Sequence: Synthetic oligonucleotide
  Sense strand starting at position 1344 of SEQ ID NO: 1888869
uauaucaaggauugugagu

SEQ ID NO: 2562489 - RNA, 19 nt, Artificial Sequence
  Description of Artificial Sequence: Synthetic oligonucleotide
  Antisense strand to SEQ ID NO: 2562488
acucacaauccuugauaua

SEQ ID NO: 2562490 - RNA, 19 nt, Artificial Sequence
  Description of Artificial Sequence: Synthetic oligonucleotide
  Sense strand starting at position 1349 of SEQ ID NO: 1888869
caaggauugugaguguaaa

SEQ ID NO: 2562491 - RNA, 19 nt, Artificial Sequence
  Description of Artificial Sequence: Synthetic oligonucleotide
  Antisense strand to SEQ ID NO: 2562490
uuuacacucacaauccuug

SEQ ID NO: 2562492 - RNA, 19 nt, Artificial Sequence
  Description of Artificial Sequence: Synthetic oligonucleotide
  Sense strand starting at position 1350 of SEQ ID NO: 1888869
aaggauugugaguguaaag

SEQ ID NO: 2562493 - RNA, 19 nt, Artificial Sequence
  Description of Artificial Sequence: Synthetic oligonucleotide
  Antisense strand to SEQ ID NO: 2562492
cuuuacacucacaauccuu

SEQ ID NO: 2562494 - RNA, 19 nt, Artificial Sequence
  Description of Artificial Sequence: Synthetic oligonucleotide
  Sense strand starting at position 1391 of SEQ ID NO: 1888869
agagucauucucugaguag

SEQ ID NO: 2562495 - RNA, 19 nt, Artificial Sequence
  Description of Artificial Sequence: Synthetic oligonucleotide
  Antisense strand to SEQ ID NO: 2562494
cuacucagagaaugacucu

SEQ ID NO: 2562496 - RNA, 19 nt, Artificial Sequence
  Description of Artificial Sequence: Synthetic oligonucleotide
  Sense strand starting at position 1452 of SEQ ID NO: 1888869
ggaccuccuccgcaagaua

SEQ ID NO: 2562497 - RNA, 19 nt, Artificial Sequence
  Description of Artificial Sequence: Synthetic oligonucleotide
  Antisense strand to SEQ ID NO: 2562496
uaucuugcggaggaggucc

SEQ ID NO: 2562498 - RNA, 19 nt, Artificial Sequence
  Description of Artificial Sequence: Synthetic oligonucleotide
  Sense strand starting at position 1460 of SEQ ID NO: 1888869
uccgcaagauaccuuaaga

SEQ ID NO: 2562499 - RNA, 19 nt, Artificial Sequence
  Description of Artificial Sequence: Synthetic oligonucleotide
  Antisense strand to SEQ ID NO: 2562498
ucuuaagguaucuugcgga

SEQ ID NO: 2562500 - RNA, 19 nt, Artificial Sequence
  Description of Artificial Sequence: Synthetic oligonucleotide
  Sense strand starting at position 1838 of SEQ ID NO: 1888869
ccuggauagaugugggagu

SEQ ID NO: 2562501 - RNA, 19 nt, Artificial Sequence
  Description of Artificial Sequence: Synthetic oligonucleotide
  Antisense strand to SEQ ID NO: 2562500
acucccacaucuauccagg

SEQ ID NO: 2562502 - RNA, 19 nt, Artificial Sequence
  Description of Artificial Sequence: Synthetic oligonucleotide
  Sense strand starting at position 2067 of SEQ ID NO: 1888869
gcugauugagauggagagu

SEQ ID NO: 2562503 - RNA, 19 nt, Artificial Sequence
  Description of Artificial Sequence: Synthetic oligonucleotide
  Antisense strand to SEQ ID NO: 2562502
acucuccaucucaaucagc

SEQ ID NO: 2562504 - RNA, 19 nt, Artificial Sequence
  Description of Artificial Sequence: Synthetic oligonucleotide
  Sense strand starting at position 2159 of SEQ ID NO: 1888869
uggaauccuaggugccaaa

SEQ ID NO: 2562505 - RNA, 19 nt, Artificial Sequence
  Description of Artificial Sequence: Synthetic oligonucleotide
  Antisense strand to SEQ ID NO: 2562504
uuuggcaccuaggauucca

SEQ ID NO: 2562506 - RNA, 19 nt, Artificial Sequence
  Description of Artificial Sequence: Synthetic oligonucleotide
  Sense strand starting at position 2250 of SEQ ID NO: 1888869
gaguaagcauaaucccaga

SEQ ID NO: 2562507 - RNA, 19 nt, Artificial Sequence
  Description of Artificial Sequence: Synthetic oligonucleotide
  Antisense strand to SEQ ID NO: 2562506
ucugggauuaugcuuacuc

SEQ ID NO: 2562508 - RNA, 19 nt, Artificial Sequence
  Description of Artificial Sequence: Synthetic oligonucleotide
  Sense strand starting at position 2255 of SEQ ID NO: 1888869
agcauaaucccagagggca

SEQ ID NO: 2562509 - RNA, 19 nt, Artificial Sequence
  Description of Artificial Sequence: Synthetic oligonucleotide
  Antisense strand to SEQ ID NO: 2562508
ugcccucugggauuaugcu

SEQ ID NO: 2562510 - RNA, 19 nt, Artificial Sequence
  Description of Artificial Sequence: Synthetic oligonucleotide
  Sense strand starting at position 2453 of SEQ ID NO: 1888869
acuccauguggucacagaa

SEQ ID NO: 2562511 - RNA, 19 nt, Artificial Sequence
  Description of Artificial Sequence: Synthetic oligonucleotide
  Antisense strand to SEQ ID NO: 2562510
uucugugaccacauggagu

SEQ ID NO: 2562512 - RNA, 19 nt, Artificial Sequence
  Description of Artificial Sequence: Synthetic oligonucleotide
  Sense strand starting at position 2483 of SEQ ID NO: 1888869
aaauauaacgguugacaga

SEQ ID NO: 2562513 - RNA, 19 nt, Artificial Sequence
  Description of Artificial Sequence: Synthetic oligonucleotide
  Antisense strand to SEQ ID NO: 2562512
ucugucaaccguuauauuu

SEQ ID NO: 2562514 - RNA, 19 nt, Artificial Sequence
  Description of Artificial Sequence: Synthetic oligonucleotide
  Sense strand starting at position 2827 of SEQ ID NO: 1888869
ccauaaaguuaagugacaa

SEQ ID NO: 2562515 - RNA, 19 nt, Artificial Sequence
  Description of Artificial Sequence: Synthetic oligonucleotide
  Antisense strand to SEQ ID NO: 2562514
uugucacuuaacuuuaugg

SEQ ID NO: 2562516 - RNA, 19 nt, Artificial Sequence
  Description of Artificial Sequence: Synthetic oligonucleotide
  Sense strand starting at position 2959 of SEQ ID NO: 1888869
caaacuucgguuuaguuaa

SEQ ID NO: 2562517 - RNA, 19 nt, Artificial Sequence
  Description of Artificial Sequence: Synthetic oligonucleotide
  Antisense strand to SEQ ID NO: 2562516
uuaacuaaaccgaaguuug

SEQ ID NO: 2562518 - RNA, 19 nt, Artificial Sequence
  Description of Artificial Sequence: Synthetic oligonucleotide
  Sense strand starting at position 3132 of SEQ ID NO: 1888869
auauguucugaaugagcag

SEQ ID NO: 2562519 - RNA, 19 nt, Artificial Sequence
  Description of Artificial Sequence: Synthetic oligonucleotide
  Antisense strand to SEQ ID NO: 2562518
cugcucauucagaacauau

SEQ ID NO: 2562520 - RNA, 19 nt, Artificial Sequence
  Description of Artificial Sequence: Synthetic oligonucleotide
  Sense strand starting at position 3154 of SEQ ID NO: 1888869
ucagaaagcugagcacuua

SEQ ID NO: 2562521 - RNA, 19 nt, Artificial Sequence
  Description of Artificial Sequence: Synthetic oligonucleotide
  Antisense strand to SEQ ID NO: 2562520
uaagugcucagcuuucuga

SEQ ID NO: 2562522 - RNA, 19 nt, Artificial Sequence
  Description of Artificial Sequence: Synthetic oligonucleotide
  Sense strand starting at position 3328 of SEQ ID NO: 1888869
aggcaaugucccuaucuua

SEQ ID NO: 2562523 - RNA, 19 nt, Artificial Sequence
  Description of Artificial Sequence: Synthetic oligonucleotide
  Antisense strand to SEQ ID NO: 2562522
uaagauagggacauugccu

SEQ ID NO: 2562524 - RNA, 19 nt, Artificial Sequence
  Description of Artificial Sequence: Synthetic oligonucleotide
  Sense strand starting at position 3377 of SEQ ID NO: 1888869
cccagcaaugccuaggaau

SEQ ID NO: 2562525 - RNA, 19 nt, Artificial Sequence
  Description of Artificial Sequence: Synthetic oligonucleotide
  Antisense strand to SEQ ID NO: 2562524
auuccuaggcauugcuggg

SEQ ID NO: 2562526 - RNA, 19 nt, Artificial Sequence
  Description of Artificial Sequence: Synthetic oligonucleotide
  Sense strand starting at position 3379 of SEQ ID NO: 1888869
cagcaaugccuaggaauga

SEQ ID NO: 2562527 - RNA, 19 nt, Artificial Sequence
  Description of Artificial Sequence: Synthetic oligonucleotide
  Antisense strand to SEQ ID NO: 2562526
ucauuccuaggcauugcug

SEQ ID NO: 2562528 - RNA, 19 nt, Artificial Sequence
  Description of Artificial Sequence: Synthetic oligonucleotide
  Sense strand starting at position 3419 of SEQ ID NO: 1888869
uugggagauucuucuauca

SEQ ID NO: 2562529 - RNA, 19 nt, Artificial Sequence
  Description of Artificial Sequence: Synthetic oligonucleotide
  Antisense strand to SEQ ID NO: 2562528
ugauagaagaaucucccaa

SEQ ID NO: 2562530 - RNA, 19 nt, Artificial Sequence
  Description of Artificial Sequence: Synthetic oligonucleotide
  Sense strand starting at position 3462 of SEQ ID NO: 1888869
gacacucaggccugaaaga

SEQ ID NO: 2562531 - RNA, 19 nt, Artificial Sequence
  Description of Artificial Sequence: Synthetic oligonucleotide
  Antisense strand to SEQ ID NO: 2562530
ucuuucaggccugaguguc

SEQ ID NO: 2562532 - RNA, 19 nt, Artificial Sequence
  Description of Artificial Sequence: Synthetic oligonucleotide
  Sense strand starting at position 3686 of SEQ ID NO: 1888869
auguauccuuugguaaaca

SEQ ID NO: 2562533 - RNA, 19 nt, Artificial Sequence
  Description of Artificial Sequence: Synthetic oligonucleotide
  Antisense strand to SEQ ID NO: 2562532
uguuuaccaaaggauacau

SEQ ID NO: 2562534 - RNA, 19 nt, Artificial Sequence
  Description of Artificial Sequence: Synthetic oligonucleotide
  Sense strand starting at position 16 of SEQ ID NO: 1888870
uuguuauaccagcaugaau

SEQ ID NO: 2562535 - RNA, 19 nt, Artificial Sequence
  Description of Artificial Sequence: Synthetic oligonucleotide
  Antisense strand to SEQ ID NO: 2562534
auucaugcugguauaacaa

SEQ ID NO: 2562536 - RNA, 19 nt, Artificial Sequence
  Description of Artificial Sequence: Synthetic oligonucleotide
  Sense strand starting at position 194 of SEQ ID NO: 1888870
auuaucuuguuagcauaca

SEQ ID NO: 2562537 - RNA, 19 nt, Artificial Sequence
  Description of Artificial Sequence: Synthetic oligonucleotide
  Antisense strand to SEQ ID NO: 2562536
uguaugcuaacaagauaau

SEQ ID NO: 2562538 - RNA, 19 nt, Artificial Sequence
  Description of Artificial Sequence: Synthetic oligonucleotide
  Sense strand starting at position 231 of SEQ ID NO: 1888870
cagagaguccaaggaucuu

SEQ ID NO: 2562539 - RNA, 19 nt, Artificial Sequence
  Description of Artificial Sequence: Synthetic oligonucleotide
  Antisense strand to SEQ ID NO: 2562538
aagauccuuggacucucug

SEQ ID NO: 2562540 - RNA, 19 nt, Artificial Sequence
  Description of Artificial Sequence: Synthetic oligonucleotide
  Sense strand starting at position 303 of SEQ ID NO: 1888870
ugcuaucaccucuauuagu

SEQ ID NO: 2562541 - RNA, 19 nt, Artificial Sequence
  Description of Artificial Sequence: Synthetic oligonucleotide
  Antisense strand to SEQ ID NO: 2562540
acuaauagaggugauagca

SEQ ID NO: 2562542 - RNA, 19 nt, Artificial Sequence
  Description of Artificial Sequence: Synthetic oligonucleotide
  Sense strand starting at position 518 of SEQ ID NO: 1888870
cucauuuaaugauaggcaa

SEQ ID NO: 2562543 - RNA, 19 nt, Artificial Sequence
  Description of Artificial Sequence: Synthetic oligonucleotide
  Antisense strand to SEQ ID NO: 2562542
uugccuaucauuaaaugag

SEQ ID NO: 2562544 - RNA, 19 nt, Artificial Sequence
  Description of Artificial Sequence: Synthetic oligonucleotide
  Sense strand starting at position 642 of SEQ ID NO: 1888870
ccaagaguucuguaccagu

SEQ ID NO: 2562545 - RNA, 19 nt, Artificial Sequence
  Description of Artificial Sequence: Synthetic oligonucleotide
  Antisense strand to SEQ ID NO: 2562544
acugguacagaacucuugg

SEQ ID NO: 2562546 - RNA, 19 nt, Artificial Sequence
  Description of Artificial Sequence: Synthetic oligonucleotide
  Sense strand starting at position 740 of SEQ ID NO: 1888870
gagaaacugucccuuuggu

SEQ ID NO: 2562547 - RNA, 19 nt, Artificial Sequence
  Description of Artificial Sequence: Synthetic oligonucleotide
  Antisense strand to SEQ ID NO: 2562546
accaaagggacaguuucuc

SEQ ID NO: 2562548 - RNA, 19 nt, Artificial Sequence
  Description of Artificial Sequence: Synthetic oligonucleotide
  Sense strand starting at position 749 of SEQ ID NO: 1888870
ucccuuugguaauuaugau

SEQ ID NO: 2562549 - RNA, 19 nt, Artificial Sequence
  Description of Artificial Sequence: Synthetic oligonucleotide
  Antisense strand to SEQ ID NO: 2562548
aucauaauuaccaaaggga

SEQ ID NO: 2562550 - RNA, 19 nt, Artificial Sequence
  Description of Artificial Sequence: Synthetic oligonucleotide
  Sense strand starting at position 892 of SEQ ID NO: 1888870
auagaacugauuggugagu

SEQ ID NO: 2562551 - RNA, 19 nt, Artificial Sequence
  Description of Artificial Sequence: Synthetic oligonucleotide
  Antisense strand to SEQ ID NO: 2562550
acucaccaaucaguucuau

SEQ ID NO: 2562552 - RNA, 19 nt, Artificial Sequence
  Description of Artificial Sequence: Synthetic oligonucleotide
  Sense strand starting at position 893 of SEQ ID NO: 1888870
uagaacugauuggugagua

SEQ ID NO: 2562553 - RNA, 19 nt, Artificial Sequence
  Description of Artificial Sequence: Synthetic oligonucleotide
  Antisense strand to SEQ ID NO: 2562552
uacucaccaaucaguucua

SEQ ID NO: 2562554 - RNA, 19 nt, Artificial Sequence
  Description of Artificial Sequence: Synthetic oligonucleotide
  Sense strand starting at position 897 of SEQ ID NO: 1888870
acugauuggugaguaggaa

SEQ ID NO: 2562555 - RNA, 19 nt, Artificial Sequence
  Description of Artificial Sequence: Synthetic oligonucleotide
  Antisense strand to SEQ ID NO: 2562554
uuccuacucaccaaucagu

SEQ ID NO: 2562556 - RNA, 19 nt, Artificial Sequence
  Description of Artificial Sequence: Synthetic oligonucleotide
  Sense strand starting at position 1051 of SEQ ID NO: 1888870
ccuuguauucuuuauaugu

SEQ ID NO: 2562557 - RNA, 19 nt, Artificial Sequence
  Description of Artificial Sequence: Synthetic oligonucleotide
  Antisense strand to SEQ ID NO: 2562556
acauauaaagaauacaagg

SEQ ID NO: 2562558 - RNA, 19 nt, Artificial Sequence
  Description of Artificial Sequence: Synthetic oligonucleotide
  Sense strand starting at position 1246 of SEQ ID NO: 1888870
aaguuuauuuaagagagca

SEQ ID NO: 2562559 - RNA, 19 nt, Artificial Sequence
  Description of Artificial Sequence: Synthetic oligonucleotide
  Antisense strand to SEQ ID NO: 2562558
ugcucucuuaaauaaacuu

SEQ ID NO: 2562560 - RNA, 19 nt, Artificial Sequence
  Description of Artificial Sequence: Synthetic oligonucleotide
  Sense strand starting at position 1377 of SEQ ID NO: 1888870
aaagcugaacagugguuaa

SEQ ID NO: 2562561 - RNA, 19 nt, Artificial Sequence
  Description of Artificial Sequence: Synthetic oligonucleotide
  Antisense strand to SEQ ID NO: 2562560
uuaaccacuguucagcuuu

SEQ ID NO: 2562562 - RNA, 19 nt, Artificial Sequence
  Description of Artificial Sequence: Synthetic oligonucleotide
  Sense strand starting at position 1408 of SEQ ID NO: 1888870
gcuugaauuccugagugau

SEQ ID NO: 2562563 - RNA, 19 nt, Artificial Sequence
  Description of Artificial Sequence: Synthetic oligonucleotide
  Antisense strand to SEQ ID NO: 2562562
aucacucaggaauucaagc

SEQ ID NO: 2562564 - RNA, 19 nt, Artificial Sequence
  Description of Artificial Sequence: Synthetic oligonucleotide
  Sense strand starting at position 1410 of SEQ ID NO: 1888870
uugaauuccugagugauuc

SEQ ID NO: 2562565 - RNA, 19 nt, Artificial Sequence
  Description of Artificial Sequence: Synthetic oligonucleotide
  Antisense strand to SEQ ID NO: 2562564
gaaucacucaggaauucaa

SEQ ID NO: 2562566 - RNA, 19 nt, Artificial Sequence
  Description of Artificial Sequence: Synthetic oligonucleotide
  Sense strand starting at position 1504 of SEQ ID NO: 1888870
gguuucugcagguaaguga

SEQ ID NO: 2562567 - RNA, 19 nt, Artificial Sequence
  Description of Artificial Sequence: Synthetic oligonucleotide
  Antisense strand to SEQ ID NO: 2562566
ucacuuaccugcagaaacc

SEQ ID NO: 2562568 - RNA, 19 nt, Artificial Sequence
  Description of Artificial Sequence: Synthetic oligonucleotide
  Sense strand starting at position 1547 of SEQ ID NO: 1888870
guuguaaggcaguaugauu

SEQ ID NO: 2562569 - RNA, 19 nt, Artificial Sequence
  Description of Artificial Sequence: Synthetic oligonucleotide
  Antisense strand to SEQ ID NO: 2562568
aaucauacugccuuacaac

SEQ ID NO: 2562570 - RNA, 19 nt, Artificial Sequence
  Description of Artificial Sequence: Synthetic oligonucleotide
  Sense strand starting at position 1690 of SEQ ID NO: 1888870
acaccuuaucucugguuua

SEQ ID NO: 2562571 - RNA, 19 nt, Artificial Sequence
  Description of Artificial Sequence: Synthetic oligonucleotide
  Antisense strand to SEQ ID NO: 2562570
uaaaccagagauaaggugu

SEQ ID NO: 2562572 - RNA, 19 nt, Artificial Sequence
  Description of Artificial Sequence: Synthetic oligonucleotide
  Sense strand starting at position 1722 of SEQ ID NO: 1888870
ugagaccauuugggugaaa

SEQ ID NO: 2562573 - RNA, 19 nt, Artificial Sequence
  Description of Artificial Sequence: Synthetic oligonucleotide
  Antisense strand to SEQ ID NO: 2562572
uuucacccaaauggucuca

SEQ ID NO: 2562574 - RNA, 19 nt, Artificial Sequence
  Description of Artificial Sequence: Synthetic oligonucleotide
  Sense strand starting at position 1891 of SEQ ID NO: 1888870
gagaacauguuuccaggua

SEQ ID NO: 2562575 - RNA, 19 nt, Artificial Sequence
  Description of Artificial Sequence: Synthetic oligonucleotide
  Antisense strand to SEQ ID NO: 2562574
uaccuggaaacauguucuc

SEQ ID NO: 2562576 - RNA, 19 nt, Artificial Sequence
  Description of Artificial Sequence: Synthetic oligonucleotide
  Sense strand starting at position 2106 of SEQ ID NO: 1888870
gucagaaaugcugggacuu

SEQ ID NO: 2562577 - RNA, 19 nt, Artificial Sequence
  Description of Artificial Sequence: Synthetic oligonucleotide
  Antisense strand to SEQ ID NO: 2562576
aagucccagcauuucugac

SEQ ID NO: 2562578 - RNA, 19 nt, Artificial Sequence
  Description of Artificial Sequence: Synthetic oligonucleotide
  Sense strand starting at position 2107 of SEQ ID NO: 1888870
ucagaaaugcugggacuua

SEQ ID NO: 2562579 - RNA, 19 nt, Artificial Sequence
  Description of Artificial Sequence: Synthetic oligonucleotide
  Antisense strand to SEQ ID NO: 2562578
uaagucccagcauuucuga

SEQ ID NO: 2562580 - RNA, 19 nt, Artificial Sequence
  Description of Artificial Sequence: Synthetic oligonucleotide
  Sense strand starting at position 2159 of SEQ ID NO: 1888870
aucaucaaguugucaucau

SEQ ID NO: 2562581 - RNA, 19 nt, Artificial Sequence
  Description of Artificial Sequence: Synthetic oligonucleotide
  Antisense strand to SEQ ID NO: 2562580
augaugacaacuugaugau

SEQ ID NO: 2562582 - RNA, 19 nt, Artificial Sequence
  Description of Artificial Sequence: Synthetic oligonucleotide
  Sense strand starting at position 2250 of SEQ ID NO: 1888870
gauagauaaacugguaggu

SEQ ID NO: 2562583 - RNA, 19 nt, Artificial Sequence
  Description of Artificial Sequence: Synthetic oligonucleotide
  Antisense strand to SEQ ID NO: 2562582
accuaccaguuuaucuauc

SEQ ID NO: 2562584 - RNA, 19 nt, Artificial Sequence
  Description of Artificial Sequence: Synthetic oligonucleotide
  Sense strand starting at position 2534 of SEQ ID NO: 1888870
gcugauaauguuggacuua

SEQ ID NO: 2562585 - RNA, 19 nt, Artificial Sequence
  Description of Artificial Sequence: Synthetic oligonucleotide
  Antisense strand to SEQ ID NO: 2562584
uaaguccaacauuaucagc

SEQ ID NO: 2562586 - RNA, 19 nt, Artificial Sequence
  Description of Artificial Sequence: Synthetic oligonucleotide
  Sense strand starting at position 3017 of SEQ ID NO: 1888870
gauacugacugagugacau

SEQ ID NO: 2562587 - RNA, 19 nt, Artificial Sequence
  Description of Artificial Sequence: Synthetic oligonucleotide
  Antisense strand to SEQ ID NO: 2562586
augucacucagucaguauc

SEQ ID NO: 2562588 - RNA, 19 nt, Artificial Sequence
  Description of Artificial Sequence: Synthetic oligonucleotide
  Sense strand starting at position 3119 of SEQ ID NO: 1888870
auacaugauuccuugugac

SEQ ID NO: 2562589 - RNA, 19 nt, Artificial Sequence
  Description of Artificial Sequence: Synthetic oligonucleotide
  Antisense strand to SEQ ID NO: 2562588
gucacaaggaaucauguau

SEQ ID NO: 2562590 - RNA, 19 nt, Artificial Sequence
  Description of Artificial Sequence: Synthetic oligonucleotide
  Sense strand starting at position 3255 of SEQ ID NO: 1888870
uguugcuuccugucacuuu

SEQ ID NO: 2562591 - RNA, 19 nt, Artificial Sequence
  Description of Artificial Sequence: Synthetic oligonucleotide
  Antisense strand to SEQ ID NO: 2562590
aaagugacaggaagcaaca

SEQ ID NO: 2562592 - RNA, 19 nt, Artificial Sequence
  Description of Artificial Sequence: Synthetic oligonucleotide
  Sense strand starting at position 3269 of SEQ ID NO: 1888870
acuuuaacuuggguaaucu

SEQ ID NO: 2562593 - RNA, 19 nt, Artificial Sequence
  Description of Artificial Sequence: Synthetic oligonucleotide
  Antisense strand to SEQ ID NO: 2562592
agauuacccaaguuaaagu

SEQ ID NO: 2562594 - RNA, 19 nt, Artificial Sequence
  Description of Artificial Sequence: Synthetic oligonucleotide
  Sense strand starting at position 3270 of SEQ ID NO: 1888870
cuuuaacuuggguaaucua

SEQ ID NO: 2562595 - RNA, 19 nt, Artificial Sequence
  Description of Artificial Sequence: Synthetic oligonucleotide
  Antisense strand to SEQ ID NO: 2562594
uagauuacccaaguuaaag

SEQ ID NO: 2562596 - RNA, 19 nt, Artificial Sequence
  Description of Artificial Sequence: Synthetic oligonucleotide
  Sense strand starting at position 3336 of SEQ ID NO: 1888870
guguuacgaacugaggaua

SEQ ID NO: 2562597 - RNA, 19 nt, Artificial Sequence
  Description of Artificial Sequence: Synthetic oligonucleotide
  Antisense strand to SEQ ID NO: 2562596
uauccucaguucguaacac

SEQ ID NO: 2562598 - RNA, 19 nt, Artificial Sequence
  Description of Artificial Sequence: Synthetic oligonucleotide
  Sense strand starting at position 3589 of SEQ ID NO: 1888870
auacuucugcgugcuuuau

SEQ ID NO: 2562599 - RNA, 19 nt, Artificial Sequence
  Description of Artificial Sequence: Synthetic oligonucleotide
  Antisense strand to SEQ ID NO: 2562598
auaaagcacgcagaaguau

SEQ ID NO: 2562600 - RNA, 19 nt, Artificial Sequence
  Description of Artificial Sequence: Synthetic oligonucleotide
  Sense strand starting at position 3590 of SEQ ID NO: 1888870
uacuucugcgugcuuuauu

SEQ ID NO: 2562601 - RNA, 19 nt, Artificial Sequence
  Description of Artificial Sequence: Synthetic oligonucleotide
  Antisense strand to SEQ ID NO: 2562600
aauaaagcacgcagaagua

SEQ ID NO: 2562602 - RNA, 19 nt, Artificial Sequence
  Description of Artificial Sequence: Synthetic oligonucleotide
  Sense strand starting at position 3597 of SEQ ID NO: 1888870
gcgugcuuuauuccaggca

SEQ ID NO: 2562603 - RNA, 19 nt, Artificial Sequence
  Description of Artificial Sequence: Synthetic oligonucleotide
  Antisense strand to SEQ ID NO: 2562602
ugccuggaauaaagcacgc

SEQ ID NO: 2562604 - RNA, 19 nt, Artificial Sequence
  Description of Artificial Sequence: Synthetic oligonucleotide
  Sense strand starting at position 3708 of SEQ ID NO: 1888870
cauagauauggacggucau

SEQ ID NO: 2562605 - RNA, 19 nt, Artificial Sequence
  Description of Artificial Sequence: Synthetic oligonucleotide
  Antisense strand to SEQ ID NO: 2562604
augaccguccauaucuaug

SEQ ID NO: 2562606 - RNA, 19 nt, Artificial Sequence
  Description of Artificial Sequence: Synthetic oligonucleotide
  Sense strand starting at position 3709 of SEQ ID NO: 1888870
auagauauggacggucauu

SEQ ID NO: 2562607 - RNA, 19 nt, Artificial Sequence
  Description of Artificial Sequence: Synthetic oligonucleotide
  Antisense strand to SEQ ID NO: 2562606
aaugaccguccauaucuau

SEQ ID NO: 2562608 - RNA, 19 nt, Artificial Sequence
  Description of Artificial Sequence: Synthetic oligonucleotide
  Sense strand starting at position 3745 of SEQ ID NO: 1888870
aguuaagaggaaugcuauu

SEQ ID NO: 2562609 - RNA, 19 nt, Artificial Sequence
  Description of Artificial Sequence: Synthetic oligonucleotide
  Antisense strand to SEQ ID NO: 2562608
aauagcauuccucuuaacu

SEQ ID NO: 2562610 - RNA, 19 nt, Artificial Sequence
  Description of Artificial Sequence: Synthetic oligonucleotide
  Sense strand starting at position 3766 of SEQ ID NO: 1888870
cgauaagguggcuaggaaa

SEQ ID NO: 2562611 - RNA, 19 nt, Artificial Sequence
  Description of Artificial Sequence: Synthetic oligonucleotide
  Antisense strand to SEQ ID NO: 2562610
uuuccuagccaccuuaucg

SEQ ID NO: 2562612 - RNA, 19 nt, Artificial Sequence
  Description of Artificial Sequence: Synthetic oligonucleotide
  Sense strand starting at position 3807 of SEQ ID NO: 1888870
uugaguggauuccugaagu

SEQ ID NO: 2562613 - RNA, 19 nt, Artificial Sequence
  Description of Artificial Sequence: Synthetic oligonucleotide
  Antisense strand to SEQ ID NO: 2562612
acuucaggaauccacucaa

SEQ ID NO: 2562614 - RNA, 19 nt, Artificial Sequence
  Description of Artificial Sequence: Synthetic oligonucleotide
  Sense strand starting at position 34 of SEQ ID NO: 1888871
auagaacugauuggugagu

SEQ ID NO: 2562615 - RNA, 19 nt, Artificial Sequence
  Description of Artificial Sequence: Synthetic oligonucleotide
  Antisense strand to SEQ ID NO: 2562614
acucaccaaucaguucuau

SEQ ID NO: 2562616 - RNA, 19 nt, Artificial Sequence
  Description of Artificial Sequence: Synthetic oligonucleotide
  Sense strand starting at position 35 of SEQ ID NO: 1888871
uagaacugauuggugagua

SEQ ID NO: 2562617 - RNA, 19 nt, Artificial Sequence
  Description of Artificial Sequence: Synthetic oligonucleotide
  Antisense strand to SEQ ID NO: 2562616
uacucaccaaucaguucua

SEQ ID NO: 2562618 - RNA, 19 nt, Artificial Sequence
  Description of Artificial Sequence: Synthetic oligonucleotide
  Sense strand starting at position 39 of SEQ ID NO: 1888871
acugauuggugaguaggaa

SEQ ID NO: 2562619 - RNA, 19 nt, Artificial Sequence
  Description of Artificial Sequence: Synthetic oligonucleotide
  Antisense strand to SEQ ID NO: 2562618
uuccuacucaccaaucagu

SEQ ID NO: 2562620 - RNA, 19 nt, Artificial Sequence
  Description of Artificial Sequence: Synthetic oligonucleotide
  Sense strand starting at position 193 of SEQ ID NO: 1888871
ccuuguauucuuuauaugu

SEQ ID NO: 2562621 - RNA, 19 nt, Artificial Sequence
  Description of Artificial Sequence: Synthetic oligonucleotide
  Antisense strand to SEQ ID NO: 2562620
acauauaaagaauacaagg

SEQ ID NO: 2562622 - RNA, 19 nt, Artificial Sequence
  Description of Artificial Sequence: Synthetic oligonucleotide
  Sense strand starting at position 388 of SEQ ID NO: 1888871
aaguuuauuuaagagagca

SEQ ID NO: 2562623 - RNA, 19 nt, Artificial Sequence
  Description of Artificial Sequence: Synthetic oligonucleotide
  Antisense strand to SEQ ID NO: 2562622
ugcucucuuaaauaaacuu

SEQ ID NO: 2562624 - RNA, 19 nt, Artificial Sequence
  Description of Artificial Sequence: Synthetic oligonucleotide
  Sense strand starting at position 519 of SEQ ID NO: 1888871
aaagcugaacagugguuaa

SEQ ID NO: 2562625 - RNA, 19 nt, Artificial Sequence
  Description of Artificial Sequence: Synthetic oligonucleotide
  Antisense strand to SEQ ID NO: 2562624
uuaaccacuguucagcuuu

SEQ ID NO: 2562626 - RNA, 19 nt, Artificial Sequence
  Description of Artificial Sequence: Synthetic oligonucleotide
  Sense strand starting at position 550 of SEQ ID NO: 1888871
gcuugaauuccugagugau

SEQ ID NO: 2562627 - RNA, 19 nt, Artificial Sequence
  Description of Artificial Sequence: Synthetic oligonucleotide
  Antisense strand to SEQ ID NO: 2562626
aucacucaggaauucaagc

SEQ ID NO: 2562628 - RNA, 19 nt, Artificial Sequence
  Description of Artificial Sequence: Synthetic oligonucleotide
  Sense strand starting at position 552 of SEQ ID NO: 1888871
uugaauuccugagugauuc

SEQ ID NO: 2562629 - RNA, 19 nt, Artificial Sequence
  Description of Artificial Sequence: Synthetic oligonucleotide
  Antisense strand to SEQ ID NO: 2562628
gaaucacucaggaauucaa

SEQ ID NO: 2562630 - RNA, 19 nt, Artificial Sequence
  Description of Artificial Sequence: Synthetic oligonucleotide
  Sense strand starting at position 689 of SEQ ID NO: 1888871
guuguaaggcaguaugauu

SEQ ID NO: 2562631 - RNA, 19 nt, Artificial Sequence
  Description of Artificial Sequence: Synthetic oligonucleotide
  Antisense strand to SEQ ID NO: 2562630
aaucauacugccuuacaac

SEQ ID NO: 2562632 - RNA, 19 nt, Artificial Sequence
  Description of Artificial Sequence: Synthetic oligonucleotide
  Sense strand starting at position 832 of SEQ ID NO: 1888871
acaccuuaucucugguuua

SEQ ID NO: 2562633 - RNA, 19 nt, Artificial Sequence
  Description of Artificial Sequence: Synthetic oligonucleotide
  Antisense strand to SEQ ID NO: 2562632
uaaaccagagauaaggugu

SEQ ID NO: 2562634 - RNA, 19 nt, Artificial Sequence
  Description of Artificial Sequence: Synthetic oligonucleotide
  Sense strand starting at position 864 of SEQ ID NO: 1888871
ugagaccauuugggugaaa

SEQ ID NO: 2562635 - RNA, 19 nt, Artificial Sequence
  Description of Artificial Sequence: Synthetic oligonucleotide
  Antisense strand to SEQ ID NO: 2562634
uuucacccaaauggucuca

SEQ ID NO: 2562636 - RNA, 19 nt, Artificial Sequence
  Description of Artificial Sequence: Synthetic oligonucleotide
  Sense strand starting at position 1033 of SEQ ID NO: 1888871
gagaacauguuuccaggua

SEQ ID NO: 2562637 - RNA, 19 nt, Artificial Sequence
  Description of Artificial Sequence: Synthetic oligonucleotide
  Antisense strand to SEQ ID NO: 2562636
uaccuggaaacauguucuc

SEQ ID NO: 2562638 - RNA, 19 nt, Artificial Sequence
  Description of Artificial Sequence: Synthetic oligonucleotide
  Sense strand starting at position 1248 of SEQ ID NO: 1888871
gucagaaaugcugggacuu

SEQ ID NO: 2562639 - RNA, 19 nt, Artificial Sequence
  Description of Artificial Sequence: Synthetic oligonucleotide
  Antisense strand to SEQ ID NO: 2562638
aagucccagcauuucugac

SEQ ID NO: 2562640 - RNA, 19 nt, Artificial Sequence
  Description of Artificial Sequence: Synthetic oligonucleotide
  Sense strand starting at position 1249 of SEQ ID NO: 1888871
ucagaaaugcugggacuua

SEQ ID NO: 2562641 - RNA, 19 nt, Artificial Sequence
  Description of Artificial Sequence: Synthetic oligonucleotide
  Antisense strand to SEQ ID NO: 2562640
uaagucccagcauuucuga

SEQ ID NO: 2562642 - RNA, 19 nt, Artificial Sequence
  Description of Artificial Sequence: Synthetic oligonucleotide
  Sense strand starting at position 1301 of SEQ ID NO: 1888871
aucaucaaguugucaucau

SEQ ID NO: 2562643 - RNA, 19 nt, Artificial Sequence
  Description of Artificial Sequence: Synthetic oligonucleotide
  Antisense strand to SEQ ID NO: 2562642
augaugacaacuugaugau

SEQ ID NO: 2562644 - RNA, 19 nt, Artificial Sequence
  Description of Artificial Sequence: Synthetic oligonucleotide
  Sense strand starting at position 1392 of SEQ ID NO: 1888871
gauagauaaacugguaggu

SEQ ID NO: 2562645 - RNA, 19 nt, Artificial Sequence
  Description of Artificial Sequence: Synthetic oligonucleotide
  Antisense strand to SEQ ID NO: 2562644
accuaccaguuuaucuauc

SEQ ID NO: 2562646 - RNA, 19 nt, Artificial Sequence
  Description of Artificial Sequence: Synthetic oligonucleotide
  Sense strand starting at position 1676 of SEQ ID NO: 1888871
gcugauaauguuggacuua

SEQ ID NO: 2562647 - RNA, 19 nt, Artificial Sequence
  Description of Artificial Sequence: Synthetic oligonucleotide
  Antisense strand to SEQ ID NO: 2562646
uaaguccaacauuaucagc

SEQ ID NO: 2562648 - RNA, 19 nt, Artificial Sequence
  Description of Artificial Sequence: Synthetic oligonucleotide
  Sense strand starting at position 2159 of SEQ ID NO: 1888871
gauacugacugagugacau

SEQ ID NO: 2562649 - RNA, 19 nt, Artificial Sequence
  Description of Artificial Sequence: Synthetic oligonucleotide
  Antisense strand to SEQ ID NO: 2562648
augucacucagucaguauc

SEQ ID NO: 2562650 - RNA, 19 nt, Artificial Sequence
  Description of Artificial Sequence: Synthetic oligonucleotide
  Sense strand starting at position 2261 of SEQ ID NO: 1888871
auacaugauuccuugugac

SEQ ID NO: 2562651 - RNA, 19 nt, Artificial Sequence
  Description of Artificial Sequence: Synthetic oligonucleotide
  Antisense strand to SEQ ID NO: 2562650
gucacaaggaaucauguau

SEQ ID NO: 2562652 - RNA, 19 nt, Artificial Sequence
  Description of Artificial Sequence: Synthetic oligonucleotide
  Sense strand starting at position 2397 of SEQ ID NO: 1888871
uguugcuuccugucacuuu

SEQ ID NO: 2562653 - RNA, 19 nt, Artificial Sequence
  Description of Artificial Sequence: Synthetic oligonucleotide
  Antisense strand to SEQ ID NO: 2562652
aaagugacaggaagcaaca

SEQ ID NO: 2562654 - RNA, 19 nt, Artificial Sequence
  Description of Artificial Sequence: Synthetic oligonucleotide
  Sense strand starting at position 2411 of SEQ ID NO: 1888871
acuuuaacuuggguaaucu

SEQ ID NO: 2562655 - RNA, 19 nt, Artificial Sequence
  Description of Artificial Sequence: Synthetic oligonucleotide
  Antisense strand to SEQ ID NO: 2562654
agauuacccaaguuaaagu

SEQ ID NO: 2562656 - RNA, 19 nt, Artificial Sequence
  Description of Artificial Sequence: Synthetic oligonucleotide
  Sense strand starting at position 2412 of SEQ ID NO: 1888871
cuuuaacuuggguaaucua

SEQ ID NO: 2562657 - RNA, 19 nt, Artificial Sequence
  Description of Artificial Sequence: Synthetic oligonucleotide
  Antisense strand to SEQ ID NO: 2562656
uagauuacccaaguuaaag

SEQ ID NO: 2562658 - RNA, 19 nt, Artificial Sequence
  Description of Artificial Sequence: Synthetic oligonucleotide
  Sense strand starting at position 2478 of SEQ ID NO: 1888871
guguuacgaacugaggaua

SEQ ID NO: 2562659 - RNA, 19 nt, Artificial Sequence
  Description of Artificial Sequence: Synthetic oligonucleotide
  Antisense strand to SEQ ID NO: 2562658
uauccucaguucguaacac

SEQ ID NO: 2562660 - RNA, 19 nt, Artificial Sequence
  Description of Artificial Sequence: Synthetic oligonucleotide
  Sense strand starting at position 2731 of SEQ ID NO: 1888871
auacuucugcgugcuuuau

SEQ ID NO: 2562661 - RNA, 19 nt, Artificial Sequence
  Description of Artificial Sequence: Synthetic oligonucleotide
  Antisense strand to SEQ ID NO: 2562660
auaaagcacgcagaaguau

SEQ ID NO: 2562662 - RNA, 19 nt, Artificial Sequence
  Description of Artificial Sequence: Synthetic oligonucleotide
  Sense strand starting at position 2732 of SEQ ID NO: 1888871
uacuucugcgugcuuuauu

SEQ ID NO: 2562663 - RNA, 19 nt, Artificial Sequence
  Description of Artificial Sequence: Synthetic oligonucleotide
  Antisense strand to SEQ ID NO: 2562662
aauaaagcacgcagaagua

SEQ ID NO: 2562664 - RNA, 19 nt, Artificial Sequence
  Description of Artificial Sequence: Synthetic oligonucleotide
  Sense strand starting at position 2739 of SEQ ID NO: 1888871
gcgugcuuuauuccaggca

SEQ ID NO: 2562665 - RNA, 19 nt, Artificial Sequence
  Description of Artificial Sequence: Synthetic oligonucleotide
  Antisense strand to SEQ ID NO: 2562664
ugccuggaauaaagcacgc

SEQ ID NO: 2562666 - RNA, 19 nt, Artificial Sequence
  Description of Artificial Sequence: Synthetic oligonucleotide
  Sense strand starting at position 2850 of SEQ ID NO: 1888871
cauagauauggacggucau

SEQ ID NO: 2562667 - RNA, 19 nt, Artificial Sequence
  Description of Artificial Sequence: Synthetic oligonucleotide
  Antisense strand to SEQ ID NO: 2562666
augaccguccauaucuaug

SEQ ID NO: 2562668 - RNA, 19 nt, Artificial Sequence
  Description of Artificial Sequence: Synthetic oligonucleotide
  Sense strand starting at position 2851 of SEQ ID NO: 1888871
auagauauggacggucauu

SEQ ID NO: 2562669 - RNA, 19 nt, Artificial Sequence
  Description of Artificial Sequence: Synthetic oligonucleotide
  Antisense strand to SEQ ID NO: 2562668
aaugaccguccauaucuau

SEQ ID NO: 2562670 - RNA, 19 nt, Artificial Sequence
  Description of Artificial Sequence: Synthetic oligonucleotide
  Sense strand starting at position 2887 of SEQ ID NO: 1888871
aguuaagaggaaugcuauu

SEQ ID NO: 2562671 - RNA, 19 nt, Artificial Sequence
  Description of Artificial Sequence: Synthetic oligonucleotide
  Antisense strand to SEQ ID NO: 2562670
aauagcauuccucuuaacu

SEQ ID NO: 2562672 - RNA, 19 nt, Artificial Sequence
  Description of Artificial Sequence: Synthetic oligonucleotide
  Sense strand starting at position 2908 of SEQ ID NO: 1888871
cgauaagguggcuaggaaa

SEQ ID NO: 2562673 - RNA, 19 nt, Artificial Sequence
  Description of Artificial Sequence: Synthetic oligonucleotide
  Antisense strand to SEQ ID NO: 2562672
uuuccuagccaccuuaucg

SEQ ID NO: 2562674 - RNA, 19 nt, Artificial Sequence
  Description of Artificial Sequence: Synthetic oligonucleotide
  Sense strand starting at position 2949 of SEQ ID NO: 1888871
uugaguggauuccugaagu

SEQ ID NO: 2562675 - RNA, 19 nt, Artificial Sequence
  Description of Artificial Sequence: Synthetic oligonucleotide
  Antisense strand to SEQ ID NO: 2562674
acuucaggaauccacucaa

SEQ ID NO: 2562676 - RNA, 19 nt, Artificial Sequence
  Description of Artificial Sequence: Synthetic oligonucleotide
  Sense strand starting at position 3146 of SEQ ID NO: 1888871
gguaaaugacuaugcaacu

SEQ ID NO: 2562677 - RNA, 19 nt, Artificial Sequence
  Description of Artificial Sequence: Synthetic oligonucleotide
  Antisense strand to SEQ ID NO: 2562676
aguugcauagucauuuacc

SEQ ID NO: 2562678 - RNA, 19 nt, Artificial Sequence
  Description of Artificial Sequence: Synthetic oligonucleotide
  Sense strand starting at position 3147 of SEQ ID NO: 1888871
guaaaugacuaugcaacuu

SEQ ID NO: 2562679 - RNA, 19 nt, Artificial Sequence
  Description of Artificial Sequence: Synthetic oligonucleotide
  Antisense strand to SEQ ID NO: 2562678
aaguugcauagucauuuac

SEQ ID NO: 2562680 - RNA, 19 nt, Artificial Sequence
  Description of Artificial Sequence: Synthetic oligonucleotide
  Sense strand starting at position 3257 of SEQ ID NO: 1888871
ggaaacuaguaccauuuga

SEQ ID NO: 2562681 - RNA, 19 nt, Artificial Sequence
  Description of Artificial Sequence: Synthetic oligonucleotide
  Antisense strand to SEQ ID NO: 2562680
ucaaaugguacuaguuucc

SEQ ID NO: 2562682 - RNA, 19 nt, Artificial Sequence
  Description of Artificial Sequence: Synthetic oligonucleotide
  Sense strand starting at position 3287 of SEQ ID NO: 1888871
gcuauaccacaguaugaca

SEQ ID NO: 2562683 - RNA, 19 nt, Artificial Sequence
  Description of Artificial Sequence: Synthetic oligonucleotide
  Antisense strand to SEQ ID NO: 2562682
ugucauacugugguauagc

SEQ ID NO: 2562684 - RNA, 19 nt, Artificial Sequence
  Description of Artificial Sequence: Synthetic oligonucleotide
  Sense strand starting at position 3346 of SEQ ID NO: 1888871
auguguuagcuauaagaaa

SEQ ID NO: 2562685 - RNA, 19 nt, Artificial Sequence
  Description of Artificial Sequence: Synthetic oligonucleotide
  Antisense strand to SEQ ID NO: 2562684
uuucuuauagcuaacacau

SEQ ID NO: 2562686 - RNA, 19 nt, Artificial Sequence
  Description of Artificial Sequence: Synthetic oligonucleotide
  Sense strand starting at position 3668 of SEQ ID NO: 1888871
uuuauauagguuuggcuaa

SEQ ID NO: 2562687 - RNA, 19 nt, Artificial Sequence
  Description of Artificial Sequence: Synthetic oligonucleotide
  Antisense strand to SEQ ID NO: 2562686
uuagccaaaccuauauaaa

SEQ ID NO: 2562688 - RNA, 19 nt, Artificial Sequence
  Description of Artificial Sequence: Synthetic oligonucleotide
  Sense strand starting at position 3864 of SEQ ID NO: 1888871
ucuuuacauuuagaugaga

SEQ ID NO: 2562689 - RNA, 19 nt, Artificial Sequence
  Description of Artificial Sequence: Synthetic oligonucleotide
  Antisense strand to SEQ ID NO: 2562688
ucucaucuaaauguaaaga

SEQ ID NO: 2562690 - RNA, 19 nt, Artificial Sequence
  Description of Artificial Sequence: Synthetic oligonucleotide
  Sense strand starting at position 3906 of SEQ ID NO: 1888871
agguaucuauucuccacau

SEQ ID NO: 2562691 - RNA, 19 nt, Artificial Sequence
  Description of Artificial Sequence: Synthetic oligonucleotide
  Antisense strand to SEQ ID NO: 2562690
auguggagaauagauaccu

SEQ ID NO: 2562692 - RNA, 19 nt, Artificial Sequence
  Description of Artificial Sequence: Synthetic oligonucleotide
  Sense strand starting at position 3907 of SEQ ID NO: 1888871
gguaucuauucuccacauc

SEQ ID NO: 2562693 - RNA, 19 nt, Artificial Sequence
  Description of Artificial Sequence: Synthetic oligonucleotide
  Antisense strand to SEQ ID NO: 2562692
gauguggagaauagauacc

SEQ ID NO: 2562694 - RNA, 19 nt, Artificial Sequence
  Description of Artificial Sequence: Synthetic oligonucleotide
  Sense strand starting at position 339 of SEQ ID NO: 1888872
ccuagagaucacugauucu

SEQ ID NO: 2562695 - RNA, 19 nt, Artificial Sequence
  Description of Artificial Sequence: Synthetic oligonucleotide
  Antisense strand to SEQ ID NO: 2562694
agaaucagugaucucuagg

SEQ ID NO: 2562696 - RNA, 19 nt, Artificial Sequence
  Description of Artificial Sequence: Synthetic oligonucleotide
  Sense strand starting at position 356 of SEQ ID NO: 1888872
cuaauacuuccguauugga

SEQ ID NO: 2562697 - RNA, 19 nt, Artificial Sequence
  Description of Artificial Sequence: Synthetic oligonucleotide
  Antisense strand to SEQ ID NO: 2562696
uccaauacggaaguauuag

SEQ ID NO: 2562698 - RNA, 19 nt, Artificial Sequence
  Description of Artificial Sequence: Synthetic oligonucleotide
  Sense strand starting at position 363 of SEQ ID NO: 1888872
uuccguauuggagaugaga

SEQ ID NO: 2562699 - RNA, 19 nt, Artificial Sequence
  Description of Artificial Sequence: Synthetic oligonucleotide
  Antisense strand to SEQ ID NO: 2562698
ucucaucuccaauacggaa

SEQ ID NO: 2562700 - RNA, 19 nt, Artificial Sequence
  Description of Artificial Sequence: Synthetic oligonucleotide
  Sense strand starting at position 365 of SEQ ID NO: 1888872
ccguauuggagaugagaaa

SEQ ID NO: 2562701 - RNA, 19 nt, Artificial Sequence
  Description of Artificial Sequence: Synthetic oligonucleotide
  Antisense strand to SEQ ID NO: 2562700
uuucucaucuccaauacgg

SEQ ID NO: 2562702 - RNA, 19 nt, Artificial Sequence
  Description of Artificial Sequence: Synthetic oligonucleotide
  Sense strand starting at position 532 of SEQ ID NO: 1888872
aguaaagaauuccuaugua

SEQ ID NO: 2562703 - RNA, 19 nt, Artificial Sequence
  Description of Artificial Sequence: Synthetic oligonucleotide
  Antisense strand to SEQ ID NO: 2562702
uacauaggaauucuuuacu

SEQ ID NO: 2562704 - RNA, 19 nt, Artificial Sequence
  Description of Artificial Sequence: Synthetic oligonucleotide
  Sense strand starting at position 604 of SEQ ID NO: 1888872
gaccuuucuuaggcagaug

SEQ ID NO: 2562705 - RNA, 19 nt, Artificial Sequence
  Description of Artificial Sequence: Synthetic oligonucleotide
  Antisense strand to SEQ ID NO: 2562704
caucugccuaagaaagguc

SEQ ID NO: 2562706 - RNA, 19 nt, Artificial Sequence
  Description of Artificial Sequence: Synthetic oligonucleotide
  Sense strand starting at position 681 of SEQ ID NO: 1888872
guauaaaguuucucuagga

SEQ ID NO: 2562707 - RNA, 19 nt, Artificial Sequence
  Description of Artificial Sequence: Synthetic oligonucleotide
  Antisense strand to SEQ ID NO: 2562706
uccuagagaaacuuuauac

SEQ ID NO: 2562708 - RNA, 19 nt, Artificial Sequence
  Description of Artificial Sequence: Synthetic oligonucleotide
  Sense strand starting at position 685 of SEQ ID NO: 1888872
aaaguuucucuaggacagu

SEQ ID NO: 2562709 - RNA, 19 nt, Artificial Sequence
  Description of Artificial Sequence: Synthetic oligonucleotide
  Antisense strand to SEQ ID NO: 2562708
acuguccuagagaaacuuu

SEQ ID NO: 2562710 - RNA, 19 nt, Artificial Sequence
  Description of Artificial Sequence: Synthetic oligonucleotide
  Sense strand starting at position 694 of SEQ ID NO: 1888872
cuaggacaguuucccaaau

SEQ ID NO: 2562711 - RNA, 19 nt, Artificial Sequence
  Description of Artificial Sequence: Synthetic oligonucleotide
  Antisense strand to SEQ ID NO: 2562710
auuugggaaacuguccuag

SEQ ID NO: 2562712 - RNA, 19 nt, Artificial Sequence
  Description of Artificial Sequence: Synthetic oligonucleotide
  Sense strand starting at position 769 of SEQ ID NO: 1888872
aucagauagguauggcaaa

SEQ ID NO: 2562713 - RNA, 19 nt, Artificial Sequence
  Description of Artificial Sequence: Synthetic oligonucleotide
  Antisense strand to SEQ ID NO: 2562712
uuugccauaccuaucugau

SEQ ID NO: 2562714 - RNA, 19 nt, Artificial Sequence
  Description of Artificial Sequence: Synthetic oligonucleotide
  Sense strand starting at position 781 of SEQ ID NO: 1888872
uggcaaaugccucauucua

SEQ ID NO: 2562715 - RNA, 19 nt, Artificial Sequence
  Description of Artificial Sequence: Synthetic oligonucleotide
  Antisense strand to SEQ ID NO: 2562714
uagaaugaggcauuugcca

SEQ ID NO: 2562716 - RNA, 19 nt, Artificial Sequence
  Description of Artificial Sequence: Synthetic oligonucleotide
  Sense strand starting at position 914 of SEQ ID NO: 1888872
cccucugagucugcuauuu

SEQ ID NO: 2562717 - RNA, 19 nt, Artificial Sequence
  Description of Artificial Sequence: Synthetic oligonucleotide
  Antisense strand to SEQ ID NO: 2562716
aaauagcagacucagaggg

SEQ ID NO: 2562718 - RNA, 19 nt, Artificial Sequence
  Description of Artificial Sequence: Synthetic oligonucleotide
  Sense strand starting at position 953 of SEQ ID NO: 1888872
ugacacuguuucucaggaa

SEQ ID NO: 2562719 - RNA, 19 nt, Artificial Sequence
  Description of Artificial Sequence: Synthetic oligonucleotide
  Antisense strand to SEQ ID NO: 2562718
uuccugagaaacaguguca

SEQ ID NO: 2562720 - RNA, 19 nt, Artificial Sequence
  Description of Artificial Sequence: Synthetic oligonucleotide
  Sense strand starting at position 1196 of SEQ ID NO: 1888872
cucacaaucuaguugggaa

SEQ ID NO: 2562721 - RNA, 19 nt, Artificial Sequence
  Description of Artificial Sequence: Synthetic oligonucleotide
  Antisense strand to SEQ ID NO: 2562720
uucccaacuagauugugag

SEQ ID NO: 2562722 - RNA, 19 nt, Artificial Sequence
  Description of Artificial Sequence: Synthetic oligonucleotide
  Sense strand starting at position 1198 of SEQ ID NO: 1888872
cacaaucuaguugggaauu

SEQ ID NO: 2562723 - RNA, 19 nt, Artificial Sequence
  Description of Artificial Sequence: Synthetic oligonucleotide
  Antisense strand to SEQ ID NO: 2562722
aauucccaacuagauugug

SEQ ID NO: 2562724 - RNA, 19 nt, Artificial Sequence
  Description of Artificial Sequence: Synthetic oligonucleotide
  Sense strand starting at position 1304 of SEQ ID NO: 1888872
gaagaagagcuuugugaau

SEQ ID NO: 2562725 - RNA, 19 nt, Artificial Sequence
  Description of Artificial Sequence: Synthetic oligonucleotide
  Antisense strand to SEQ ID NO: 2562724
auucacaaagcucuucuuc

SEQ ID NO: 2562726 - RNA, 19 nt, Artificial Sequence
  Description of Artificial Sequence: Synthetic oligonucleotide
  Sense strand starting at position 1310 of SEQ ID NO: 1888872
gagcuuugugaaugaagaa

SEQ ID NO: 2562727 - RNA, 19 nt, Artificial Sequence
  Description of Artificial Sequence: Synthetic oligonucleotide
  Antisense strand to SEQ ID NO: 2562726
uucuucauucacaaagcuc

SEQ ID NO: 2562728 - RNA, 19 nt, Artificial Sequence
  Description of Artificial Sequence: Synthetic oligonucleotide
  Sense strand starting at position 1376 of SEQ ID NO: 1888872
uuagcugguccaggaaaua

SEQ ID NO: 2562729 - RNA, 19 nt, Artificial Sequence
  Description of Artificial Sequence: Synthetic oligonucleotide
  Antisense strand to SEQ ID NO: 2562728
uauuuccuggaccagcuaa

SEQ ID NO: 2562730 - RNA, 19 nt, Artificial Sequence
  Description of Artificial Sequence: Synthetic oligonucleotide
  Sense strand starting at position 1424 of SEQ ID NO: 1888872
uggagaaaguguuccuaca

SEQ ID NO: 2562731 - RNA, 19 nt, Artificial Sequence
  Description of Artificial Sequence: Synthetic oligonucleotide
  Antisense strand to SEQ ID NO: 2562730
uguaggaacacuuucucca

SEQ ID NO: 2562732 - RNA, 19 nt, Artificial Sequence
  Description of Artificial Sequence: Synthetic oligonucleotide
  Sense strand starting at position 1426 of SEQ ID NO: 1888872
gagaaaguguuccuacagg

SEQ ID NO: 2562733 - RNA, 19 nt, Artificial Sequence
  Description of Artificial Sequence: Synthetic oligonucleotide
  Antisense strand to SEQ ID NO: 2562732
ccuguaggaacacuuucuc

SEQ ID NO: 2562734 - RNA, 19 nt, Artificial Sequence
  Description of Artificial Sequence: Synthetic oligonucleotide
  Sense strand starting at position 1485 of SEQ ID NO: 1888872
gaguguuuagaaggcaaga

SEQ ID NO: 2562735 - RNA, 19 nt, Artificial Sequence
  Description of Artificial Sequence: Synthetic oligonucleotide
  Antisense strand to SEQ ID NO: 2562734
ucuugccuucuaaacacuc

SEQ ID NO: 2562736 - RNA, 19 nt, Artificial Sequence
  Description of Artificial Sequence: Synthetic oligonucleotide
  Sense strand starting at position 1487 of SEQ ID NO: 1888872
guguuuagaaggcaagacu

SEQ ID NO: 2562737 - RNA, 19 nt, Artificial Sequence
  Description of Artificial Sequence: Synthetic oligonucleotide
  Antisense strand to SEQ ID NO: 2562736
agucuugccuucuaaacac

SEQ ID NO: 2562738 - RNA, 19 nt, Artificial Sequence
  Description of Artificial Sequence: Synthetic oligonucleotide
  Sense strand starting at position 1496 of SEQ ID NO: 1888872
aggcaagacugaguaucaa

SEQ ID NO: 2562739 - RNA, 19 nt, Artificial Sequence
  Description of Artificial Sequence: Synthetic oligonucleotide
  Antisense strand to SEQ ID NO: 2562738
uugauacucagucuugccu

SEQ ID NO: 2562740 - RNA, 19 nt, Artificial Sequence
  Description of Artificial Sequence: Synthetic oligonucleotide
  Sense strand starting at position 1572 of SEQ ID NO: 1888872
gcugauguccuagauagga

SEQ ID NO: 2562741 - RNA, 19 nt, Artificial Sequence
  Description of Artificial Sequence: Synthetic oligonucleotide
  Antisense strand to SEQ ID NO: 2562740
uccuaucuaggacaucagc

SEQ ID NO: 2562742 - RNA, 19 nt, Artificial Sequence
  Description of Artificial Sequence: Synthetic oligonucleotide
  Sense strand starting at position 1760 of SEQ ID NO: 1888872
gguguccucagauauaaug

SEQ ID NO: 2562743 - RNA, 19 nt, Artificial Sequence
  Description of Artificial Sequence: Synthetic oligonucleotide
  Antisense strand to SEQ ID NO: 2562742
cauuauaucugaggacacc

SEQ ID NO: 2562744 - RNA, 19 nt, Artificial Sequence
  Description of Artificial Sequence: Synthetic oligonucleotide
  Sense strand starting at position 2435 of SEQ ID NO: 1888872
aggcuuugagguuaaacau

SEQ ID NO: 2562745 - RNA, 19 nt, Artificial Sequence
  Description of Artificial Sequence: Synthetic oligonucleotide
  Antisense strand to SEQ ID NO: 2562744
auguuuaaccucaaagccu

SEQ ID NO: 2562746 - RNA, 19 nt, Artificial Sequence
  Description of Artificial Sequence: Synthetic oligonucleotide
  Sense strand starting at position 2441 of SEQ ID NO: 1888872
ugagguuaaacaugagcuu

SEQ ID NO: 2562747 - RNA, 19 nt, Artificial Sequence
  Description of Artificial Sequence: Synthetic oligonucleotide
  Antisense strand to SEQ ID NO: 2562746
aagcucauguuuaaccuca

SEQ ID NO: 2562748 - RNA, 19 nt, Artificial Sequence
  Description of Artificial Sequence: Synthetic oligonucleotide
  Sense strand starting at position 2444 of SEQ ID NO: 1888872
gguuaaacaugagcuuaaa

SEQ ID NO: 2562749 - RNA, 19 nt, Artificial Sequence
  Description of Artificial Sequence: Synthetic oligonucleotide
  Antisense strand to SEQ ID NO: 2562748
uuuaagcucauguuuaacc

SEQ ID NO: 2562750 - RNA, 19 nt, Artificial Sequence
  Description of Artificial Sequence: Synthetic oligonucleotide
  Sense strand starting at position 2964 of SEQ ID NO: 1888872
uguauaucccucugggaaa

SEQ ID NO: 2562751 - RNA, 19 nt, Artificial Sequence
  Description of Artificial Sequence: Synthetic oligonucleotide
  Antisense strand to SEQ ID NO: 2562750
uuucccagagggauauaca

SEQ ID NO: 2562752 - RNA, 19 nt, Artificial Sequence
  Description of Artificial Sequence: Synthetic oligonucleotide
  Sense strand starting at position 3091 of SEQ ID NO: 1888872
cagggucaggucugaaacu

SEQ ID NO: 2562753 - RNA, 19 nt, Artificial Sequence
  Description of Artificial Sequence: Synthetic oligonucleotide
  Antisense strand to SEQ ID NO: 2562752
aguuucagaccugacccug

SEQ ID NO: 2562754 - RNA, 19 nt, Artificial Sequence
  Description of Artificial Sequence: Synthetic oligonucleotide
  Sense strand starting at position 3114 of SEQ ID NO: 1888872
ggagaauucccuuggcaac

SEQ ID NO: 2562755 - RNA, 19 nt, Artificial Sequence
  Description of Artificial Sequence: Synthetic oligonucleotide
  Antisense strand to SEQ ID NO: 2562754
guugccaagggaauucucc

SEQ ID NO: 2562756 - RNA, 19 nt, Artificial Sequence
  Description of Artificial Sequence: Synthetic oligonucleotide
  Sense strand starting at position 3116 of SEQ ID NO: 1888872
agaauucccuuggcaacaa

SEQ ID NO: 2562757 - RNA, 19 nt, Artificial Sequence
  Description of Artificial Sequence: Synthetic oligonucleotide
  Antisense strand to SEQ ID NO: 2562756
uuguugccaagggaauucu

SEQ ID NO: 2562758 - RNA, 19 nt, Artificial Sequence
  Description of Artificial Sequence: Synthetic oligonucleotide
  Sense strand starting at position 3216 of SEQ ID NO: 1888872
guagcuggucuacauuaaa

SEQ ID NO: 2562759 - RNA, 19 nt, Artificial Sequence
  Description of Artificial Sequence: Synthetic oligonucleotide
  Antisense strand to SEQ ID NO: 2562758
uuuaauguagaccagcuac

SEQ ID NO: 2562760 - RNA, 19 nt, Artificial Sequence
  Description of Artificial Sequence: Synthetic oligonucleotide
  Sense strand starting at position 3219 of SEQ ID NO: 1888872
gcuggucuacauuaaauau

SEQ ID NO: 2562761 - RNA, 19 nt, Artificial Sequence
  Description of Artificial Sequence: Synthetic oligonucleotide
  Antisense strand to SEQ ID NO: 2562760
auauuuaauguagaccagc

SEQ ID NO: 2562762 - RNA, 19 nt, Artificial Sequence
  Description of Artificial Sequence: Synthetic oligonucleotide
  Sense strand starting at position 3265 of SEQ ID NO: 1888872
gguuaccagaaaugguaaa

SEQ ID NO: 2562763 - RNA, 19 nt, Artificial Sequence
  Description of Artificial Sequence: Synthetic oligonucleotide
  Antisense strand to SEQ ID NO: 2562762
uuuaccauuucugguaacc

SEQ ID NO: 2562764 - RNA, 19 nt, Artificial Sequence
  Description of Artificial Sequence: Synthetic oligonucleotide
  Sense strand starting at position 3525 of SEQ ID NO: 1888872
agcagucauggucaccaaa

SEQ ID NO: 2562765 - RNA, 19 nt, Artificial Sequence
  Description of Artificial Sequence: Synthetic oligonucleotide
  Antisense strand to SEQ ID NO: 2562764
uuuggugaccaugacugcu

SEQ ID NO: 2562766 - RNA, 19 nt, Artificial Sequence
  Description of Artificial Sequence: Synthetic oligonucleotide
  Sense strand starting at position 3528 of SEQ ID NO: 1888872
agucauggucaccaaauau

SEQ ID NO: 2562767 - RNA, 19 nt, Artificial Sequence
  Description of Artificial Sequence: Synthetic oligonucleotide
  Antisense strand to SEQ ID NO: 2562766
auauuuggugaccaugacu

SEQ ID NO: 2562768 - RNA, 19 nt, Artificial Sequence
  Description of Artificial Sequence: Synthetic oligonucleotide
  Sense strand starting at position 3539 of SEQ ID NO: 1888872
ccaaauauggcaugacaga

SEQ ID NO: 2562769 - RNA, 19 nt, Artificial Sequence
  Description of Artificial Sequence: Synthetic oligonucleotide
  Antisense strand to SEQ ID NO: 2562768
ucugucaugccauauuugg

SEQ ID NO: 2562770 - RNA, 19 nt, Artificial Sequence
  Description of Artificial Sequence: Synthetic oligonucleotide
  Sense strand starting at position 3562 of SEQ ID NO: 1888872
acaaacuuguguucuaaug

SEQ ID NO: 2562771 - RNA, 19 nt, Artificial Sequence
  Description of Artificial Sequence: Synthetic oligonucleotide
  Antisense strand to SEQ ID NO: 2562770
cauuagaacacaaguuugu

SEQ ID NO: 2562772 - RNA, 19 nt, Artificial Sequence
  Description of Artificial Sequence: Synthetic oligonucleotide
  Sense strand starting at position 3832 of SEQ ID NO: 1888872
agaaauggauuguuaccuu

SEQ ID NO: 2562773 - RNA, 19 nt, Artificial Sequence
  Description of Artificial Sequence: Synthetic oligonucleotide
  Antisense strand to SEQ ID NO: 2562772
aagguaacaauccauuucu

SEQ ID NO: 2562774 - RNA, 19 nt, Artificial Sequence
  Description of Artificial Sequence: Synthetic oligonucleotide
  Sense strand starting at position 63 of SEQ ID NO: 1888873
aggucuguggcauacacau

SEQ ID NO: 2562775 - RNA, 19 nt, Artificial Sequence
  Description of Artificial Sequence: Synthetic oligonucleotide
  Antisense strand to SEQ ID NO: 2562774
auguguaugccacagaccu

SEQ ID NO: 2562776 - RNA, 19 nt, Artificial Sequence
  Description of Artificial Sequence: Synthetic oligonucleotide
  Sense strand starting at position 688 of SEQ ID NO: 1888873
cgaccuguugucaguggga

SEQ ID NO: 2562777 - RNA, 19 nt, Artificial Sequence
  Description of Artificial Sequence: Synthetic oligonucleotide
  Antisense strand to SEQ ID NO: 2562776
ucccacugacaacaggucg

SEQ ID NO: 2562778 - RNA, 19 nt, Artificial Sequence
  Description of Artificial Sequence: Synthetic oligonucleotide
  Sense strand starting at position 718 of SEQ ID NO: 1888873
ugaguauagcuuugggaua

SEQ ID NO: 2562779 - RNA, 19 nt, Artificial Sequence
  Description of Artificial Sequence: Synthetic oligonucleotide
  Antisense strand to SEQ ID NO: 2562778
uaucccaaagcuauacuca

SEQ ID NO: 2562780 - RNA, 19 nt, Artificial Sequence
  Description of Artificial Sequence: Synthetic oligonucleotide
  Sense strand starting at position 818 of SEQ ID NO: 1888873
ugggaucuugacugcaauu

SEQ ID NO: 2562781 - RNA, 19 nt, Artificial Sequence
  Description of Artificial Sequence: Synthetic oligonucleotide
  Antisense strand to SEQ ID NO: 2562780
aauugcagucaagauccca

SEQ ID NO: 2562782 - RNA, 19 nt, Artificial Sequence
  Description of Artificial Sequence: Synthetic oligonucleotide
  Sense strand starting at position 874 of SEQ ID NO: 1888873
aauugcuggguuuauauaa

SEQ ID NO: 2562783 - RNA, 19 nt, Artificial Sequence
  Description of Artificial Sequence: Synthetic oligonucleotide
  Antisense strand to SEQ ID NO: 2562782
uuauauaaacccagcaauu

SEQ ID NO: 2562784 - RNA, 19 nt, Artificial Sequence
  Description of Artificial Sequence: Synthetic oligonucleotide
  Sense strand starting at position 916 of SEQ ID NO: 1888873
uauuauucuguuggaugau

SEQ ID NO: 2562785 - RNA, 19 nt, Artificial Sequence
  Description of Artificial Sequence: Synthetic oligonucleotide
  Antisense strand to SEQ ID NO: 2562784
aucauccaacagaauaaua

SEQ ID NO: 2562786 - RNA, 19 nt, Artificial Sequence
  Description of Artificial Sequence: Synthetic oligonucleotide
  Sense strand starting at position 1034 of SEQ ID NO: 1888873
acuuucuucuucuugagga

SEQ ID NO: 2562787 - RNA, 19 nt, Artificial Sequence
  Description of Artificial Sequence: Synthetic oligonucleotide
  Antisense strand to SEQ ID NO: 2562786
uccucaagaagaagaaagu

SEQ ID NO: 2562788 - RNA, 19 nt, Artificial Sequence
  Description of Artificial Sequence: Synthetic oligonucleotide
  Sense strand starting at position 1036 of SEQ ID NO: 1888873
uuucuucuucuugaggagu

SEQ ID NO: 2562789 - RNA, 19 nt, Artificial Sequence
  Description of Artificial Sequence: Synthetic oligonucleotide
  Antisense strand to SEQ ID NO: 2562788
acuccucaagaagaagaaa

SEQ ID NO: 2562790 - RNA, 19 nt, Artificial Sequence
  Description of Artificial Sequence: Synthetic oligonucleotide
  Sense strand starting at position 1042 of SEQ ID NO: 1888873
cuucuugaggagugagaga

SEQ ID NO: 2562791 - RNA, 19 nt, Artificial Sequence
  Description of Artificial Sequence: Synthetic oligonucleotide
  Antisense strand to SEQ ID NO: 2562790
ucucucacuccucaagaag

SEQ ID NO: 2562792 - RNA, 19 nt, Artificial Sequence
  Description of Artificial Sequence: Synthetic oligonucleotide
  Sense strand starting at position 1284 of SEQ ID NO: 1888873
ggcuauguagacuacaaca

SEQ ID NO: 2562793 - RNA, 19 nt, Artificial Sequence
  Description of Artificial Sequence: Synthetic oligonucleotide
  Antisense strand to SEQ ID NO: 2562792
uguuguagucuacauagcc

SEQ ID NO: 2562794 - RNA, 19 nt, Artificial Sequence
  Description of Artificial Sequence: Synthetic oligonucleotide
  Sense strand starting at position 1308 of SEQ ID NO: 1888873
ugauccaugccgggaauga

SEQ ID NO: 2562795 - RNA, 19 nt, Artificial Sequence
  Description of Artificial Sequence: Synthetic oligonucleotide
  Antisense strand to SEQ ID NO: 2562794
ucauucccggcauggauca

SEQ ID NO: 2562796 - RNA, 19 nt, Artificial Sequence
  Description of Artificial Sequence: Synthetic oligonucleotide
  Sense strand starting at position 1309 of SEQ ID NO: 1888873
gauccaugccgggaaugau

SEQ ID NO: 2562797 - RNA, 19 nt, Artificial Sequence
  Description of Artificial Sequence: Synthetic oligonucleotide
  Antisense strand to SEQ ID NO: 2562796
aucauucccggcauggauc

SEQ ID NO: 2562798 - RNA, 19 nt, Artificial Sequence
  Description of Artificial Sequence: Synthetic oligonucleotide
  Sense strand starting at position 1372 of SEQ ID NO: 1888873
uaauguaaccuggacaguu

SEQ ID NO: 2562799 - RNA, 19 nt, Artificial Sequence
  Description of Artificial Sequence: Synthetic oligonucleotide
  Antisense strand to SEQ ID NO: 2562798
aacuguccagguuacauua

SEQ ID NO: 2562800 - RNA, 19 nt, Artificial Sequence
  Description of Artificial Sequence: Synthetic oligonucleotide
  Sense strand starting at position 1501 of SEQ ID NO: 1888873
cuuguaagacagugaauuc

SEQ ID NO: 2562801 - RNA, 19 nt, Artificial Sequence
  Description of Artificial Sequence: Synthetic oligonucleotide
  Antisense strand to SEQ ID NO: 2562800
gaauucacugucuuacaag

SEQ ID NO: 2562802 - RNA, 19 nt, Artificial Sequence
  Description of Artificial Sequence: Synthetic oligonucleotide
  Sense strand starting at position 1508 of SEQ ID NO: 1888873
gacagugaauuccugacca

SEQ ID NO: 2562803 - RNA, 19 nt, Artificial Sequence
  Description of Artificial Sequence: Synthetic oligonucleotide
  Antisense strand to SEQ ID NO: 2562802
uggucaggaauucacuguc

SEQ ID NO: 2562804 - RNA, 19 nt, Artificial Sequence
  Description of Artificial Sequence: Synthetic oligonucleotide
  Sense strand starting at position 1510 of SEQ ID NO: 1888873
cagugaauuccugaccagc

SEQ ID NO: 2562805 - RNA, 19 nt, Artificial Sequence
  Description of Artificial Sequence: Synthetic oligonucleotide
  Antisense strand to SEQ ID NO: 2562804
gcuggucaggaauucacug

SEQ ID NO: 2562806 - RNA, 19 nt, Artificial Sequence
  Description of Artificial Sequence: Synthetic oligonucleotide
  Sense strand starting at position 1512 of SEQ ID NO: 1888873
gugaauuccugaccagcaa

SEQ ID NO: 2562807 - RNA, 19 nt, Artificial Sequence
  Description of Artificial Sequence: Synthetic oligonucleotide
  Antisense strand to SEQ ID NO: 2562806
uugcuggucaggaauucac

SEQ ID NO: 2562808 - RNA, 19 nt, Artificial Sequence
  Description of Artificial Sequence: Synthetic oligonucleotide
  Sense strand starting at position 1513 of SEQ ID NO: 1888873
ugaauuccugaccagcaau

SEQ ID NO: 2562809 - RNA, 19 nt, Artificial Sequence
  Description of Artificial Sequence: Synthetic oligonucleotide
  Antisense strand to SEQ ID NO: 2562808
auugcuggucaggaauuca

SEQ ID NO: 2562810 - RNA, 19 nt, Artificial Sequence
  Description of Artificial Sequence: Synthetic oligonucleotide
  Sense strand starting at position 1802 of SEQ ID NO: 1888873
ucaacuagucuccagcaga

SEQ ID NO: 2562811 - RNA, 19 nt, Artificial Sequence
  Description of Artificial Sequence: Synthetic oligonucleotide
  Antisense strand to SEQ ID NO: 2562810
ucugcuggagacuaguuga

SEQ ID NO: 2562812 - RNA, 19 nt, Artificial Sequence
  Description of Artificial Sequence: Synthetic oligonucleotide
  Sense strand starting at position 2202 of SEQ ID NO: 1888873
ccuaauacugugcaagcaa

SEQ ID NO: 2562813 - RNA, 19 nt, Artificial Sequence
  Description of Artificial Sequence: Synthetic oligonucleotide
  Antisense strand to SEQ ID NO: 2562812
uugcuugcacaguauuagg

SEQ ID NO: 2562814 - RNA, 19 nt, Artificial Sequence
  Description of Artificial Sequence: Synthetic oligonucleotide
  Sense strand starting at position 2401 of SEQ ID NO: 1888873
cccugaacuuggucaggau

SEQ ID NO: 2562815 - RNA, 19 nt, Artificial Sequence
  Description of Artificial Sequence: Synthetic oligonucleotide
  Antisense strand to SEQ ID NO: 2562814
auccugaccaaguucaggg

SEQ ID NO: 2562816 - RNA, 19 nt, Artificial Sequence
  Description of Artificial Sequence: Synthetic oligonucleotide
  Sense strand starting at position 2527 of SEQ ID NO: 1888873
ggagcugaaguguaagaua

SEQ ID NO: 2562817 - RNA, 19 nt, Artificial Sequence
  Description of Artificial Sequence: Synthetic oligonucleotide
  Antisense strand to SEQ ID NO: 2562816
uaucuuacacuucagcucc

SEQ ID NO: 2562818 - RNA, 19 nt, Artificial Sequence
  Description of Artificial Sequence: Synthetic oligonucleotide
  Sense strand starting at position 2538 of SEQ ID NO: 1888873
guaagauacccaggaccuu

SEQ ID NO: 2562819 - RNA, 19 nt, Artificial Sequence
  Description of Artificial Sequence: Synthetic oligonucleotide
  Antisense strand to SEQ ID NO: 2562818
aagguccuggguaucuuac

SEQ ID NO: 2562820 - RNA, 19 nt, Artificial Sequence
  Description of Artificial Sequence: Synthetic oligonucleotide
  Sense strand starting at position 2622 of SEQ ID NO: 1888873
ccaugaagccuuugauaag

SEQ ID NO: 2562821 - RNA, 19 nt, Artificial Sequence
  Description of Artificial Sequence: Synthetic oligonucleotide
  Antisense strand to SEQ ID NO: 2562820
cuuaucaaaggcuucaugg

SEQ ID NO: 2562822 - RNA, 19 nt, Artificial Sequence
  Description of Artificial Sequence: Synthetic oligonucleotide
  Sense strand starting at position 2653 of SEQ ID NO: 1888873
ucagacuuguuccuuuaag

SEQ ID NO: 2562823 - RNA, 19 nt, Artificial Sequence
  Description of Artificial Sequence: Synthetic oligonucleotide
  Antisense strand to SEQ ID NO: 2562822
cuuaaaggaacaagucuga

SEQ ID NO: 2562824 - RNA, 19 nt, Artificial Sequence
  Description of Artificial Sequence: Synthetic oligonucleotide
  Sense strand starting at position 2693 of SEQ ID NO: 1888873
aguguagcugcuguaacuu

SEQ ID NO: 2562825 - RNA, 19 nt, Artificial Sequence
  Description of Artificial Sequence: Synthetic oligonucleotide
  Antisense strand to SEQ ID NO: 2562824
aaguuacagcagcuacacu

SEQ ID NO: 2562826 - RNA, 19 nt, Artificial Sequence
  Description of Artificial Sequence: Synthetic oligonucleotide
  Sense strand starting at position 2809 of SEQ ID NO: 1888873
ugguucuggguauggagaa

SEQ ID NO: 2562827 - RNA, 19 nt, Artificial Sequence
  Description of Artificial Sequence: Synthetic oligonucleotide
  Antisense strand to SEQ ID NO: 2562826
uucuccauacccagaacca

SEQ ID NO: 2562828 - RNA, 19 nt, Artificial Sequence
  Description of Artificial Sequence: Synthetic oligonucleotide
  Sense strand starting at position 2870 of SEQ ID NO: 1888873
aguuguaaccucgaaacug

SEQ ID NO: 2562829 - RNA, 19 nt, Artificial Sequence
  Description of Artificial Sequence: Synthetic oligonucleotide
  Antisense strand to SEQ ID NO: 2562828
caguuucgagguuacaacu

SEQ ID NO: 2562830 - RNA, 19 nt, Artificial Sequence
  Description of Artificial Sequence: Synthetic oligonucleotide
  Sense strand starting at position 2884 of SEQ ID NO: 1888873
aacugaagggucugcauga

SEQ ID NO: 2562831 - RNA, 19 nt, Artificial Sequence
  Description of Artificial Sequence: Synthetic oligonucleotide
  Antisense strand to SEQ ID NO: 2562830
ucaugcagacccuucaguu

SEQ ID NO: 2562832 - RNA, 19 nt, Artificial Sequence
  Description of Artificial Sequence: Synthetic oligonucleotide
  Sense strand starting at position 2885 of SEQ ID NO: 1888873
acugaagggucugcaugaa

SEQ ID NO: 2562833 - RNA, 19 nt, Artificial Sequence
  Description of Artificial Sequence: Synthetic oligonucleotide
  Antisense strand to SEQ ID NO: 2562832
uucaugcagacccuucagu

SEQ ID NO: 2562834 - RNA, 19 nt, Artificial Sequence
  Description of Artificial Sequence: Synthetic oligonucleotide
  Sense strand starting at position 2927 of SEQ ID NO: 1888873
gcagcagaacuuuaucuac

SEQ ID NO: 2562835 - RNA, 19 nt, Artificial Sequence
  Description of Artificial Sequence: Synthetic oligonucleotide
  Antisense strand to SEQ ID NO: 2562834
guagauaaaguucugcugc

SEQ ID NO: 2562836 - RNA, 19 nt, Artificial Sequence
  Description of Artificial Sequence: Synthetic oligonucleotide
  Sense strand starting at position 2980 of SEQ ID NO: 1888873
uacuucuuugcagaugaga

SEQ ID NO: 2562837 - RNA, 19 nt, Artificial Sequence
  Description of Artificial Sequence: Synthetic oligonucleotide
  Antisense strand to SEQ ID NO: 2562836
ucucaucugcaaagaagua

SEQ ID NO: 2562838 - RNA, 19 nt, Artificial Sequence
  Description of Artificial Sequence: Synthetic oligonucleotide
  Sense strand starting at position 3286 of SEQ ID NO: 1888873
acuuguagaucaucucauu

SEQ ID NO: 2562839 - RNA, 19 nt, Artificial Sequence
  Description of Artificial Sequence: Synthetic oligonucleotide
  Antisense strand to SEQ ID NO: 2562838
aaugagaugaucuacaagu

SEQ ID NO: 2562840 - RNA, 19 nt, Artificial Sequence
  Description of Artificial Sequence: Synthetic oligonucleotide
  Sense strand starting at position 3368 of SEQ ID NO: 1888873
ugaggucuccaauagcaug

SEQ ID NO: 2562841 - RNA, 19 nt, Artificial Sequence
  Description of Artificial Sequence: Synthetic oligonucleotide
  Antisense strand to SEQ ID NO: 2562840
caugcuauuggagaccuca

SEQ ID NO: 2562842 - RNA, 19 nt, Artificial Sequence
  Description of Artificial Sequence: Synthetic oligonucleotide
  Sense strand starting at position 3746 of SEQ ID NO: 1888873
ucucaauaagaaugagguu

SEQ ID NO: 2562843 - RNA, 19 nt, Artificial Sequence
  Description of Artificial Sequence: Synthetic oligonucleotide
  Antisense strand to SEQ ID NO: 2562842
aaccucauucuuauugaga

SEQ ID NO: 2562844 - RNA, 19 nt, Artificial Sequence
  Description of Artificial Sequence: Synthetic oligonucleotide
  Sense strand starting at position 3779 of SEQ ID NO: 1888873
gcaguauagaaaggugaaa

SEQ ID NO: 2562845 - RNA, 19 nt, Artificial Sequence
  Description of Artificial Sequence: Synthetic oligonucleotide
  Antisense strand to SEQ ID NO: 2562844
uuucaccuuucuauacugc

SEQ ID NO: 2562846 - RNA, 19 nt, Artificial Sequence
  Description of Artificial Sequence: Synthetic oligonucleotide
  Sense strand starting at position 3802 of SEQ ID NO: 1888873
ugguguauuguggaaagga

SEQ ID NO: 2562847 - RNA, 19 nt, Artificial Sequence
  Description of Artificial Sequence: Synthetic oligonucleotide
  Antisense strand to SEQ ID NO: 2562846
uccuuuccacaauacacca

SEQ ID NO: 2562848 - RNA, 19 nt, Artificial Sequence
  Description of Artificial Sequence: Synthetic oligonucleotide
  Sense strand starting at position 3920 of SEQ ID NO: 1888873
caaauugauccaugagagu

SEQ ID NO: 2562849 - RNA, 19 nt, Artificial Sequence
  Description of Artificial Sequence: Synthetic oligonucleotide
  Antisense strand to SEQ ID NO: 2562848
acucucauggaucaauuug

SEQ ID NO: 2562850 - RNA, 19 nt, Artificial Sequence
  Description of Artificial Sequence: Synthetic oligonucleotide
  Sense strand starting at position 3931 of SEQ ID NO: 1888873
augagaguuaacggcagau

SEQ ID NO: 2562851 - RNA, 19 nt, Artificial Sequence
  Description of Artificial Sequence: Synthetic oligonucleotide
  Antisense strand to SEQ ID NO: 2562850
aucugccguuaacucucau

SEQ ID NO: 2562852 - RNA, 19 nt, Artificial Sequence
  Description of Artificial Sequence: Synthetic oligonucleotide
  Sense strand starting at position 3933 of SEQ ID NO: 1888873
gagaguuaacggcagauuc

SEQ ID NO: 2562853 - RNA, 19 nt, Artificial Sequence
  Description of Artificial Sequence: Synthetic oligonucleotide
  Antisense strand to SEQ ID NO: 2562852
gaaucugccguuaacucuc

SEQ ID NO: 2562854 - RNA, 19 nt, Artificial Sequence
  Description of Artificial Sequence: Synthetic oligonucleotide
  Sense strand starting at position 353 of SEQ ID NO: 1888874
ugcagacaguucucacaca

SEQ ID NO: 2562855 - RNA, 19 nt, Artificial Sequence
  Description of Artificial Sequence: Synthetic oligonucleotide
  Antisense strand to SEQ ID NO: 2562854
ugugugagaacugucugca

SEQ ID NO: 2562856 - RNA, 19 nt, Artificial Sequence
  Description of Artificial Sequence: Synthetic oligonucleotide
  Sense strand starting at position 556 of SEQ ID NO: 1888874
agagguucccaaugggacu

SEQ ID NO: 2562857 - RNA, 19 nt, Artificial Sequence
  Description of Artificial Sequence: Synthetic oligonucleotide
  Antisense strand to SEQ ID NO: 2562856
agucccauugggaaccucu

SEQ ID NO: 2562858 - RNA, 19 nt, Artificial Sequence
  Description of Artificial Sequence: Synthetic oligonucleotide
  Sense strand starting at position 1148 of SEQ ID NO: 1888874
auacaacuguuguuagaag

SEQ ID NO: 2562859 - RNA, 19 nt, Artificial Sequence
  Description of Artificial Sequence: Synthetic oligonucleotide
  Antisense strand to SEQ ID NO: 2562858
cuucuaacaacaguuguau

SEQ ID NO: 2562860 - RNA, 19 nt, Artificial Sequence
  Description of Artificial Sequence: Synthetic oligonucleotide
  Sense strand starting at position 1193 of SEQ ID NO: 1888874
agagaacugugugcugaca

SEQ ID NO: 2562861 - RNA, 19 nt, Artificial Sequence
  Description of Artificial Sequence: Synthetic oligonucleotide
  Antisense strand to SEQ ID NO: 2562860
ugucagcacacaguucucu

SEQ ID NO: 2562862 - RNA, 19 nt, Artificial Sequence
  Description of Artificial Sequence: Synthetic oligonucleotide
  Sense strand starting at position 1205 of SEQ ID NO: 1888874
gcugacagccgagaauaau

SEQ ID NO: 2562863 - RNA, 19 nt, Artificial Sequence
  Description of Artificial Sequence: Synthetic oligonucleotide
  Antisense strand to SEQ ID NO: 2562862
auuauucucggcugucagc

SEQ ID NO: 2562864 - RNA, 19 nt, Artificial Sequence
  Description of Artificial Sequence: Synthetic oligonucleotide
  Sense strand starting at position 1214 of SEQ ID NO: 1888874
cgagaauaaugcuccacau

SEQ ID NO: 2562865 - RNA, 19 nt, Artificial Sequence
  Description of Artificial Sequence: Synthetic oligonucleotide
  Antisense strand to SEQ ID NO: 2562864
auguggagcauuauucucg

SEQ ID NO: 2562866 - RNA, 19 nt, Artificial Sequence
  Description of Artificial Sequence: Synthetic oligonucleotide
  Sense strand starting at position 1298 of SEQ ID NO: 1888874
uccacucugguccauauau

SEQ ID NO: 2562867 - RNA, 19 nt, Artificial Sequence
  Description of Artificial Sequence: Synthetic oligonucleotide
  Antisense strand to SEQ ID NO: 2562866
auauauggaccagagugga

SEQ ID NO: 2562868 - RNA, 19 nt, Artificial Sequence
  Description of Artificial Sequence: Synthetic oligonucleotide
  Sense strand starting at position 1352 of SEQ ID NO: 1888874
ucuguaauacagcaaugaa

SEQ ID NO: 2562869 - RNA, 19 nt, Artificial Sequence
  Description of Artificial Sequence: Synthetic oligonucleotide
  Antisense strand to SEQ ID NO: 2562868
uucauugcuguauuacaga

SEQ ID NO: 2562870 - RNA, 19 nt, Artificial Sequence
  Description of Artificial Sequence: Synthetic oligonucleotide
  Sense strand starting at position 1365 of SEQ ID NO: 1888874
aaugaaugauguguugaug

SEQ ID NO: 2562871 - RNA, 19 nt, Artificial Sequence
  Description of Artificial Sequence: Synthetic oligonucleotide
  Antisense strand to SEQ ID NO: 2562870
caucaacacaucauucauu

SEQ ID NO: 2562872 - RNA, 19 nt, Artificial Sequence
  Description of Artificial Sequence: Synthetic oligonucleotide
  Sense strand starting at position 1368 of SEQ ID NO: 1888874
gaaugauguguugaugugu

SEQ ID NO: 2562873 - RNA, 19 nt, Artificial Sequence
  Description of Artificial Sequence: Synthetic oligonucleotide
  Antisense strand to SEQ ID NO: 2562872
acacaucaacacaucauuc

SEQ ID NO: 2562874 - RNA, 19 nt, Artificial Sequence
  Description of Artificial Sequence: Synthetic oligonucleotide
  Sense strand starting at position 1386 of SEQ ID NO: 1888874
uaacgcauacuguauugaa

SEQ ID NO: 2562875 - RNA, 19 nt, Artificial Sequence
  Description of Artificial Sequence: Synthetic oligonucleotide
  Antisense strand to SEQ ID NO: 2562874
uucaauacaguaugcguua

SEQ ID NO: 2562876 - RNA, 19 nt, Artificial Sequence
  Description of Artificial Sequence: Synthetic oligonucleotide
  Sense strand starting at position 1406 of SEQ ID NO: 1888874
acagaugcuccucagucaa

SEQ ID NO: 2562877 - RNA, 19 nt, Artificial Sequence
  Description of Artificial Sequence: Synthetic oligonucleotide
  Antisense strand to SEQ ID NO: 2562876
uugacugaggagcaucugu

SEQ ID NO: 2562878 - RNA, 19 nt, Artificial Sequence
  Description of Artificial Sequence: Synthetic oligonucleotide
  Sense strand starting at position 1538 of SEQ ID NO: 1888874
ugucucaauggccacaaau

SEQ ID NO: 2562879 - RNA, 19 nt, Artificial Sequence
  Description of Artificial Sequence: Synthetic oligonucleotide
  Antisense strand to SEQ ID NO: 2562878
auuuguggccauugagaca

SEQ ID NO: 2562880 - RNA, 19 nt, Artificial Sequence
  Description of Artificial Sequence: Synthetic oligonucleotide
  Sense strand starting at position 1556 of SEQ ID NO: 1888874
ugugccagucagcaauuua

SEQ ID NO: 2562881 - RNA, 19 nt, Artificial Sequence
  Description of Artificial Sequence: Synthetic oligonucleotide
  Antisense strand to SEQ ID NO: 2562880
uaaauugcugacuggcaca

SEQ ID NO: 2562882 - RNA, 19 nt, Artificial Sequence
  Description of Artificial Sequence: Synthetic oligonucleotide
  Sense strand starting at position 1615 of SEQ ID NO: 1888874
uucuaauugguaugugacu

SEQ ID NO: 2562883 - RNA, 19 nt, Artificial Sequence
  Description of Artificial Sequence: Synthetic oligonucleotide
  Antisense strand to SEQ ID NO: 2562882
agucacauaccaauuagaa

SEQ ID NO: 2562884 - RNA, 19 nt, Artificial Sequence
  Description of Artificial Sequence: Synthetic oligonucleotide
  Sense strand starting at position 1616 of SEQ ID NO: 1888874
ucuaauugguaugugacuu

SEQ ID NO: 2562885 - RNA, 19 nt, Artificial Sequence
  Description of Artificial Sequence: Synthetic oligonucleotide
  Antisense strand to SEQ ID NO: 2562884
aagucacauaccaauuaga

SEQ ID NO: 2562886 - RNA, 19 nt, Artificial Sequence
  Description of Artificial Sequence: Synthetic oligonucleotide
  Sense strand starting at position 1622 of SEQ ID NO: 1888874
ugguaugugacuuaugaag

SEQ ID NO: 2562887 - RNA, 19 nt, Artificial Sequence
  Description of Artificial Sequence: Synthetic oligonucleotide
  Antisense strand to SEQ ID NO: 2562886
cuucauaagucacauacca

SEQ ID NO: 2562888 - RNA, 19 nt, Artificial Sequence
  Description of Artificial Sequence: Synthetic oligonucleotide
  Sense strand starting at position 1710 of SEQ ID NO: 1888874
uuuggcaaucuuuagaaau

SEQ ID NO: 2562889 - RNA, 19 nt, Artificial Sequence
  Description of Artificial Sequence: Synthetic oligonucleotide
  Antisense strand to SEQ ID NO: 2562888
auuucuaaagauugccaaa

SEQ ID NO: 2562890 - RNA, 19 nt, Artificial Sequence
  Description of Artificial Sequence: Synthetic oligonucleotide
  Sense strand starting at position 1798 of SEQ ID NO: 1888874
ugguucaugguguaauggu

SEQ ID NO: 2562891 - RNA, 19 nt, Artificial Sequence
  Description of Artificial Sequence: Synthetic oligonucleotide
  Antisense strand to SEQ ID NO: 2562890
accauuacaccaugaacca

SEQ ID NO: 2562892 - RNA, 19 nt, Artificial Sequence
  Description of Artificial Sequence: Synthetic oligonucleotide
  Sense strand starting at position 1912 of SEQ ID NO: 1888874
uuggguaaucacuggcaau

SEQ ID NO: 2562893 - RNA, 19 nt, Artificial Sequence
  Description of Artificial Sequence: Synthetic oligonucleotide
  Antisense strand to SEQ ID NO: 2562892
auugccagugauuacccaa

SEQ ID NO: 2562894 - RNA, 19 nt, Artificial Sequence
  Description of Artificial Sequence: Synthetic oligonucleotide
  Sense strand starting at position 1913 of SEQ ID NO: 1888874
uggguaaucacuggcaaug

SEQ ID NO: 2562895 - RNA, 19 nt, Artificial Sequence
  Description of Artificial Sequence: Synthetic oligonucleotide
  Antisense strand to SEQ ID NO: 2562894
cauugccagugauuaccca

SEQ ID NO: 2562896 - RNA, 19 nt, Artificial Sequence
  Description of Artificial Sequence: Synthetic oligonucleotide
  Sense strand starting at position 1927 of SEQ ID NO: 1888874
caaugugauguaugggcau

SEQ ID NO: 2562897 - RNA, 19 nt, Artificial Sequence
  Description of Artificial Sequence: Synthetic oligonucleotide
  Antisense strand to SEQ ID NO: 2562896
augcccauacaucacauug

SEQ ID NO: 2562898 - RNA, 19 nt, Artificial Sequence
  Description of Artificial Sequence: Synthetic oligonucleotide
  Sense strand starting at position 1929 of SEQ ID NO: 1888874
augugauguaugggcauga

SEQ ID NO: 2562899 - RNA, 19 nt, Artificial Sequence
  Description of Artificial Sequence: Synthetic oligonucleotide
  Antisense strand to SEQ ID NO: 2562898
ucaugcccauacaucacau

SEQ ID NO: 2562900 - RNA, 19 nt, Artificial Sequence
  Description of Artificial Sequence: Synthetic oligonucleotide
  Sense strand starting at position 1933 of SEQ ID NO: 1888874
gauguaugggcaugacuca

SEQ ID NO: 2562901 - RNA, 19 nt, Artificial Sequence
  Description of Artificial Sequence: Synthetic oligonucleotide
  Antisense strand to SEQ ID NO: 2562900
ugagucaugcccauacauc

SEQ ID NO: 2562902 - RNA, 19 nt, Artificial Sequence
  Description of Artificial Sequence: Synthetic oligonucleotide
  Sense strand starting at position 1977 of SEQ ID NO: 1888874
cugugugacaccuggaaag

SEQ ID NO: 2562903 - RNA, 19 nt, Artificial Sequence
  Description of Artificial Sequence: Synthetic oligonucleotide
  Antisense strand to SEQ ID NO: 2562902
cuuuccaggugucacacag

SEQ ID NO: 2562904 - RNA, 19 nt, Artificial Sequence
  Description of Artificial Sequence: Synthetic oligonucleotide
  Sense strand starting at position 1987 of SEQ ID NO: 1888874
ccuggaaagucacucaaug

SEQ ID NO: 2562905 - RNA, 19 nt, Artificial Sequence
  Description of Artificial Sequence: Synthetic oligonucleotide
  Antisense strand to SEQ ID NO: 2562904
cauugagugacuuuccagg

SEQ ID NO: 2562906 - RNA, 19 nt, Artificial Sequence
  Description of Artificial Sequence: Synthetic oligonucleotide
  Sense strand starting at position 2004 of SEQ ID NO: 1888874
uguucuugaugcccauuua

SEQ ID NO: 2562907 - RNA, 19 nt, Artificial Sequence
  Description of Artificial Sequence: Synthetic oligonucleotide
  Antisense strand to SEQ ID NO: 2562906
uaaaugggcaucaagaaca

SEQ ID NO: 2562908 - RNA, 19 nt, Artificial Sequence
  Description of Artificial Sequence: Synthetic oligonucleotide
  Sense strand starting at position 2052 of SEQ ID NO: 1888874
auggcuuuacugugagaau

SEQ ID NO: 2562909 - RNA, 19 nt, Artificial Sequence
  Description of Artificial Sequence: Synthetic oligonucleotide
  Antisense strand to SEQ ID NO: 2562908
auucucacaguaaagccau

SEQ ID NO: 2562910 - RNA, 19 nt, Artificial Sequence
  Description of Artificial Sequence: Synthetic oligonucleotide
  Sense strand starting at position 2144 of SEQ ID NO: 1888874
cccaauguccuuuaaagug

SEQ ID NO: 2562911 - RNA, 19 nt, Artificial Sequence
  Description of Artificial Sequence: Synthetic oligonucleotide
  Antisense strand to SEQ ID NO: 2562910
cacuuuaaaggacauuggg

SEQ ID NO: 2562912 - RNA, 19 nt, Artificial Sequence
  Description of Artificial Sequence: Synthetic oligonucleotide
  Sense strand starting at position 2172 of SEQ ID NO: 1888874
aucuguauguccuuuagaa

SEQ ID NO: 2562913 - RNA, 19 nt, Artificial Sequence
  Description of Artificial Sequence: Synthetic oligonucleotide
  Antisense strand to SEQ ID NO: 2562912
uucuaaaggacauacagau

SEQ ID NO: 2562914 - RNA, 19 nt, Artificial Sequence
  Description of Artificial Sequence: Synthetic oligonucleotide
  Sense strand starting at position 2174 of SEQ ID NO: 1888874
cuguauguccuuuagaaau

SEQ ID NO: 2562915 - RNA, 19 nt, Artificial Sequence
  Description of Artificial Sequence: Synthetic oligonucleotide
  Antisense strand to SEQ ID NO: 2562914
auuucuaaaggacauacag

SEQ ID NO: 2562916 - RNA, 19 nt, Artificial Sequence
  Description of Artificial Sequence: Synthetic oligonucleotide
  Sense strand starting at position 2214 of SEQ ID NO: 1888874
gccaaugacuuacugggau

SEQ ID NO: 2562917 - RNA, 19 nt, Artificial Sequence
  Description of Artificial Sequence: Synthetic oligonucleotide
  Antisense strand to SEQ ID NO: 2562916
aucccaguaagucauuggc

SEQ ID NO: 2562918 - RNA, 19 nt, Artificial Sequence
  Description of Artificial Sequence: Synthetic oligonucleotide
  Sense strand starting at position 2306 of SEQ ID NO: 1888874
aggcuaacagccuauguau

SEQ ID NO: 2562919 - RNA, 19 nt, Artificial Sequence
  Description of Artificial Sequence: Synthetic oligonucleotide
  Antisense strand to SEQ ID NO: 2562918
auacauaggcuguuagccu

SEQ ID NO: 2562920 - RNA, 19 nt, Artificial Sequence
  Description of Artificial Sequence: Synthetic oligonucleotide
  Sense strand starting at position 2409 of SEQ ID NO: 1888874
cuguaacaauacgugauaa

SEQ ID NO: 2562921 - RNA, 19 nt, Artificial Sequence
  Description of Artificial Sequence: Synthetic oligonucleotide
  Antisense strand to SEQ ID NO: 2562920
uuaucacguauuguuacag

SEQ ID NO: 2562922 - RNA, 19 nt, Artificial Sequence
  Description of Artificial Sequence: Synthetic oligonucleotide
  Sense strand starting at position 2411 of SEQ ID NO: 1888874
guaacaauacgugauaaca

SEQ ID NO: 2562923 - RNA, 19 nt, Artificial Sequence
  Description of Artificial Sequence: Synthetic oligonucleotide
  Antisense strand to SEQ ID NO: 2562922
uguuaucacguauuguuac

SEQ ID NO: 2562924 - RNA, 19 nt, Artificial Sequence
  Description of Artificial Sequence: Synthetic oligonucleotide
  Sense strand starting at position 2437 of SEQ ID NO: 1888874
aggucacaaugccuauaaa

SEQ ID NO: 2562925 - RNA, 19 nt, Artificial Sequence
  Description of Artificial Sequence: Synthetic oligonucleotide
  Antisense strand to SEQ ID NO: 2562924
uuuauaggcauugugaccu

SEQ ID NO: 2562926 - RNA, 19 nt, Artificial Sequence
  Description of Artificial Sequence: Synthetic oligonucleotide
  Sense strand starting at position 2694 of SEQ ID NO: 1888874
aggauacauuguguauuaa

SEQ ID NO: 2562927 - RNA, 19 nt, Artificial Sequence
  Description of Artificial Sequence: Synthetic oligonucleotide
  Antisense strand to SEQ ID NO: 2562926
uuaauacacaauguauccu

SEQ ID NO: 2562928 - RNA, 19 nt, Artificial Sequence
  Description of Artificial Sequence: Synthetic oligonucleotide
  Sense strand starting at position 2695 of SEQ ID NO: 1888874
ggauacauuguguauuaau

SEQ ID NO: 2562929 - RNA, 19 nt, Artificial Sequence
  Description of Artificial Sequence: Synthetic oligonucleotide
  Antisense strand to SEQ ID NO: 2562928
auuaauacacaauguaucc

SEQ ID NO: 2562930 - RNA, 19 nt, Artificial Sequence
  Description of Artificial Sequence: Synthetic oligonucleotide
  Sense strand starting at position 3228 of SEQ ID NO: 1888874
auagcaccuccagggaaau

SEQ ID NO: 2562931 - RNA, 19 nt, Artificial Sequence
  Description of Artificial Sequence: Synthetic oligonucleotide
  Antisense strand to SEQ ID NO: 2562930
auuucccuggaggugcuau

SEQ ID NO: 2562932 - RNA, 19 nt, Artificial Sequence
  Description of Artificial Sequence: Synthetic oligonucleotide
  Sense strand starting at position 3700 of SEQ ID NO: 1888874
ucugucucugcucaaagaa

SEQ ID NO: 2562933 - RNA, 19 nt, Artificial Sequence
  Description of Artificial Sequence: Synthetic oligonucleotide
  Antisense strand to SEQ ID NO: 2562932
uucuuugagcagagacaga

SEQ ID NO: 2562934 - RNA, 19 nt, Artificial Sequence
  Description of Artificial Sequence: Synthetic oligonucleotide
  Sense strand starting at position 1245 of SEQ ID NO: 1888875
uuuccuuugugguuacaaa

SEQ ID NO: 2562935 - RNA, 19 nt, Artificial Sequence
  Description of Artificial Sequence: Synthetic oligonucleotide
  Antisense strand to SEQ ID NO: 2562934
uuuguaaccacaaaggaaa

SEQ ID NO: 2562936 - RNA, 19 nt, Artificial Sequence
  Description of Artificial Sequence: Synthetic oligonucleotide
  Sense strand starting at position 1262 of SEQ ID NO: 1888875
aaaggagugugguuagaaa

SEQ ID NO: 2562937 - RNA, 19 nt, Artificial Sequence
  Description of Artificial Sequence: Synthetic oligonucleotide
  Antisense strand to SEQ ID NO: 2562936
uuucuaaccacacuccuuu

SEQ ID NO: 2562938 - RNA, 19 nt, Artificial Sequence
  Description of Artificial Sequence: Synthetic oligonucleotide
  Sense strand starting at position 1450 of SEQ ID NO: 1888875
ucguccuaguuuccuuaaa

SEQ ID NO: 2562939 - RNA, 19 nt, Artificial Sequence
  Description of Artificial Sequence: Synthetic oligonucleotide
  Antisense strand to SEQ ID NO: 2562938
uuuaaggaaacuaggacga

SEQ ID NO: 2562940 - RNA, 19 nt, Artificial Sequence
  Description of Artificial Sequence: Synthetic oligonucleotide
  Sense strand starting at position 1452 of SEQ ID NO: 1888875
guccuaguuuccuuaaagc

SEQ ID NO: 2562941 - RNA, 19 nt, Artificial Sequence
  Description of Artificial Sequence: Synthetic oligonucleotide
  Antisense strand to SEQ ID NO: 2562940
gcuuuaaggaaacuaggac

SEQ ID NO: 2562942 - RNA, 19 nt, Artificial Sequence
  Description of Artificial Sequence: Synthetic oligonucleotide
  Sense strand starting at position 1491 of SEQ ID NO: 1888875
ccugucuagcucugucauu

SEQ ID NO: 2562943 - RNA, 19 nt, Artificial Sequence
  Description of Artificial Sequence: Synthetic oligonucleotide
  Antisense strand to SEQ ID NO: 2562942
aaugacagagcuagacagg

SEQ ID NO: 2562944 - RNA, 19 nt, Artificial Sequence
  Description of Artificial Sequence: Synthetic oligonucleotide
  Sense strand starting at position 1492 of SEQ ID NO: 1888875
cugucuagcucugucauua

SEQ ID NO: 2562945 - RNA, 19 nt, Artificial Sequence
  Description of Artificial Sequence: Synthetic oligonucleotide
  Antisense strand to SEQ ID NO: 2562944
uaaugacagagcuagacag

SEQ ID NO: 2562946 - RNA, 19 nt, Artificial Sequence
  Description of Artificial Sequence: Synthetic oligonucleotide
  Sense strand starting at position 1527 of SEQ ID NO: 1888875
uucccaugucaguguguua

SEQ ID NO: 2562947 - RNA, 19 nt, Artificial Sequence
  Description of Artificial Sequence: Synthetic oligonucleotide
  Antisense strand to SEQ ID NO: 2562946
uaacacacugacaugggaa

SEQ ID NO: 2562948 - RNA, 19 nt, Artificial Sequence
  Description of Artificial Sequence: Synthetic oligonucleotide
  Sense strand starting at position 1530 of SEQ ID NO: 1888875
ccaugucaguguguuauaa

SEQ ID NO: 2562949 - RNA, 19 nt, Artificial Sequence
  Description of Artificial Sequence: Synthetic oligonucleotide
  Antisense strand to SEQ ID NO: 2562948
uuauaacacacugacaugg

SEQ ID NO: 2562950 - RNA, 19 nt, Artificial Sequence
  Description of Artificial Sequence: Synthetic oligonucleotide
  Sense strand starting at position 1900 of SEQ ID NO: 1888875
agcccuaguagcugagaaa

SEQ ID NO: 2562951 - RNA, 19 nt, Artificial Sequence
  Description of Artificial Sequence: Synthetic oligonucleotide
  Antisense strand to SEQ ID NO: 2562950
uuucucagcuacuagggcu

SEQ ID NO: 2562952 - RNA, 19 nt, Artificial Sequence
  Description of Artificial Sequence: Synthetic oligonucleotide
  Sense strand starting at position 1901 of SEQ ID NO: 1888875
gcccuaguagcugagaaau

SEQ ID NO: 2562953 - RNA, 19 nt, Artificial Sequence
  Description of Artificial Sequence: Synthetic oligonucleotide
  Antisense strand to SEQ ID NO: 2562952
auuucucagcuacuagggc

SEQ ID NO: 2562954 - RNA, 19 nt, Artificial Sequence
  Description of Artificial Sequence: Synthetic oligonucleotide
  Sense strand starting at position 1903 of SEQ ID NO: 1888875
ccuaguagcugagaaauac

SEQ ID NO: 2562955 - RNA, 19 nt, Artificial Sequence
  Description of Artificial Sequence: Synthetic oligonucleotide
  Antisense strand to SEQ ID NO: 2562954
guauuucucagcuacuagg

SEQ ID NO: 2562956 - RNA, 19 nt, Artificial Sequence
  Description of Artificial Sequence: Synthetic oligonucleotide
  Sense strand starting at position 2285 of SEQ ID NO: 1888875
ccuaguagcggugauuaga

SEQ ID NO: 2562957 - RNA, 19 nt, Artificial Sequence
  Description of Artificial Sequence: Synthetic oligonucleotide
  Antisense strand to SEQ ID NO: 2562956
ucuaaucaccgcuacuagg

SEQ ID NO: 2562958 - RNA, 19 nt, Artificial Sequence
  Description of Artificial Sequence: Synthetic oligonucleotide
  Sense strand starting at position 2296 of SEQ ID NO: 1888875
ugauuagaggcguguacca

SEQ ID NO: 2562959 - RNA, 19 nt, Artificial Sequence
  Description of Artificial Sequence: Synthetic oligonucleotide
  Antisense strand to SEQ ID NO: 2562958
ugguacacgccucuaauca

SEQ ID NO: 2562960 - RNA, 19 nt, Artificial Sequence
  Description of Artificial Sequence: Synthetic oligonucleotide
  Sense strand starting at position 2462 of SEQ ID NO: 1888875
ccgguuagcucaccuuuga

SEQ ID NO: 2562961 - RNA, 19 nt, Artificial Sequence
  Description of Artificial Sequence: Synthetic oligonucleotide
  Antisense strand to SEQ ID NO: 2562960
ucaaaggugagcuaaccgg

SEQ ID NO: 2562962 - RNA, 19 nt, Artificial Sequence
  Description of Artificial Sequence: Synthetic oligonucleotide
  Sense strand starting at position 2477 of SEQ ID NO: 1888875
uugaccuaaucgcuuagaa

SEQ ID NO: 2562963 - RNA, 19 nt, Artificial Sequence
  Description of Artificial Sequence: Synthetic oligonucleotide
  Antisense strand to SEQ ID NO: 2562962
uucuaagcgauuaggucaa

SEQ ID NO: 2562964 - RNA, 19 nt, Artificial Sequence
  Description of Artificial Sequence: Synthetic oligonucleotide
  Sense strand starting at position 2479 of SEQ ID NO: 1888875
gaccuaaucgcuuagaagu

SEQ ID NO: 2562965 - RNA, 19 nt, Artificial Sequence
  Description of Artificial Sequence: Synthetic oligonucleotide
  Antisense strand to SEQ ID NO: 2562964
acuucuaagcgauuagguc

SEQ ID NO: 2562966 - RNA, 19 nt, Artificial Sequence
  Description of Artificial Sequence: Synthetic oligonucleotide
  Sense strand starting at position 2572 of SEQ ID NO: 1888875
agcaguuugacuuggcuga

SEQ ID NO: 2562967 - RNA, 19 nt, Artificial Sequence
  Description of Artificial Sequence: Synthetic oligonucleotide
  Antisense strand to SEQ ID NO: 2562966
ucagccaagucaaacugcu

SEQ ID NO: 2562968 - RNA, 19 nt, Artificial Sequence
  Description of Artificial Sequence: Synthetic oligonucleotide
  Sense strand starting at position 2574 of SEQ ID NO: 1888875
caguuugacuuggcugaaa

SEQ ID NO: 2562969 - RNA, 19 nt, Artificial Sequence
  Description of Artificial Sequence: Synthetic oligonucleotide
  Antisense strand to SEQ ID NO: 2562968
uuucagccaagucaaacug

SEQ ID NO: 2562970 - RNA, 19 nt, Artificial Sequence
  Description of Artificial Sequence: Synthetic oligonucleotide
  Sense strand starting at position 2576 of SEQ ID NO: 1888875
guuugacuuggcugaaagu

SEQ ID NO: 2562971 - RNA, 19 nt, Artificial Sequence
  Description of Artificial Sequence: Synthetic oligonucleotide
  Antisense strand to SEQ ID NO: 2562970
acuuucagccaagucaaac

SEQ ID NO: 2562972 - RNA, 19 nt, Artificial Sequence
  Description of Artificial Sequence: Synthetic oligonucleotide
  Sense strand starting at position 3532 of SEQ ID NO: 1888875
auggguuuaucuggacauu

SEQ ID NO: 2562973 - RNA, 19 nt, Artificial Sequence
  Description of Artificial Sequence: Synthetic oligonucleotide
  Antisense strand to SEQ ID NO: 2562972
aauguccagauaaacccau

SEQ ID NO: 2562974 - RNA, 19 nt, Artificial Sequence
  Description of Artificial Sequence: Synthetic oligonucleotide
  Sense strand starting at position 3543 of SEQ ID NO: 1888875
uggacauuacccuguuaua

SEQ ID NO: 2562975 - RNA, 19 nt, Artificial Sequence
  Description of Artificial Sequence: Synthetic oligonucleotide
  Antisense strand to SEQ ID NO: 2562974
uauaacaggguaaugucca

SEQ ID NO: 2562976 - RNA, 19 nt, Artificial Sequence
  Description of Artificial Sequence: Synthetic oligonucleotide
  Sense strand starting at position 356 of SEQ ID NO: 1888876
ugauguauaacaggguaau

SEQ ID NO: 2562977 - RNA, 19 nt, Artificial Sequence
  Description of Artificial Sequence: Synthetic oligonucleotide
  Antisense strand to SEQ ID NO: 2562976
auuacccuguuauacauca

SEQ ID NO: 2562978 - RNA, 19 nt, Artificial Sequence
  Description of Artificial Sequence: Synthetic oligonucleotide
  Sense strand starting at position 357 of SEQ ID NO: 1888876
gauguauaacaggguaaug

SEQ ID NO: 2562979 - RNA, 19 nt, Artificial Sequence
  Description of Artificial Sequence: Synthetic oligonucleotide
  Antisense strand to SEQ ID NO: 2562978
cauuacccuguuauacauc

SEQ ID NO: 2562980 - RNA, 19 nt, Artificial Sequence
  Description of Artificial Sequence: Synthetic oligonucleotide
  Sense strand starting at position 1039 of SEQ ID NO: 1888876
gggcaagguggugguauau

SEQ ID NO: 2562981 - RNA, 19 nt, Artificial Sequence
  Description of Artificial Sequence: Synthetic oligonucleotide
  Antisense strand to SEQ ID NO: 2562980
auauaccaccaccuugccc

SEQ ID NO: 2562982 - RNA, 19 nt, Artificial Sequence
  Description of Artificial Sequence: Synthetic oligonucleotide
  Sense strand starting at position 1050 of SEQ ID NO: 1888876
ugguauaucccugguccca

SEQ ID NO: 2562983 - RNA, 19 nt, Artificial Sequence
  Description of Artificial Sequence: Synthetic oligonucleotide
  Antisense strand to SEQ ID NO: 2562982
ugggaccagggauauacca

SEQ ID NO: 2562984 - RNA, 19 nt, Artificial Sequence
  Description of Artificial Sequence: Synthetic oligonucleotide
  Sense strand starting at position 1250 of SEQ ID NO: 1888876
gcuucuuccagggagguga

SEQ ID NO: 2562985 - RNA, 19 nt, Artificial Sequence
  Description of Artificial Sequence: Synthetic oligonucleotide
  Antisense strand to SEQ ID NO: 2562984
ucaccucccuggaagaagc

SEQ ID NO: 2562986 - RNA, 19 nt, Artificial Sequence
  Description of Artificial Sequence: Synthetic oligonucleotide
  Sense strand starting at position 1387 of SEQ ID NO: 1888876
uggcacagaugguuucuaa

SEQ ID NO: 2562987 - RNA, 19 nt, Artificial Sequence
  Description of Artificial Sequence: Synthetic oligonucleotide
  Antisense strand to SEQ ID NO: 2562986
uuagaaaccaucugugcca

SEQ ID NO: 2562988 - RNA, 19 nt, Artificial Sequence
  Description of Artificial Sequence: Synthetic oligonucleotide
  Sense strand starting at position 1390 of SEQ ID NO: 1888876
cacagaugguuucuaagau

SEQ ID NO: 2562989 - RNA, 19 nt, Artificial Sequence
  Description of Artificial Sequence: Synthetic oligonucleotide
  Antisense strand to SEQ ID NO: 2562988
aucuuagaaaccaucugug

SEQ ID NO: 2562990 - RNA, 19 nt, Artificial Sequence
  Description of Artificial Sequence: Synthetic oligonucleotide
  Sense strand starting at position 1391 of SEQ ID NO: 1888876
acagaugguuucuaagauc

SEQ ID NO: 2562991 - RNA, 19 nt, Artificial Sequence
  Description of Artificial Sequence: Synthetic oligonucleotide
  Antisense strand to SEQ ID NO: 2562990
gaucuuagaaaccaucugu

SEQ ID NO: 2562992 - RNA, 19 nt, Artificial Sequence
  Description of Artificial Sequence: Synthetic oligonucleotide
  Sense strand starting at position 1394 of SEQ ID NO: 1888876
gaugguuucuaagaucccu

SEQ ID NO: 2562993 - RNA, 19 nt, Artificial Sequence
  Description of Artificial Sequence: Synthetic oligonucleotide
  Antisense strand to SEQ ID NO: 2562992
agggaucuuagaaaccauc

SEQ ID NO: 2562994 - RNA, 19 nt, Artificial Sequence
  Description of Artificial Sequence: Synthetic oligonucleotide
  Sense strand starting at position 1421 of SEQ ID NO: 1888876
uggaacuucuaagcgauua

SEQ ID NO: 2562995 - RNA, 19 nt, Artificial Sequence
  Description of Artificial Sequence: Synthetic oligonucleotide
  Antisense strand to SEQ ID NO: 2562994
uaaucgcuuagaaguucca

SEQ ID NO: 2562996 - RNA, 19 nt, Artificial Sequence
  Description of Artificial Sequence: Synthetic oligonucleotide
  Sense strand starting at position 1422 of SEQ ID NO: 1888876
ggaacuucuaagcgauuag

SEQ ID NO: 2562997 - RNA, 19 nt, Artificial Sequence
  Description of Artificial Sequence: Synthetic oligonucleotide
  Antisense strand to SEQ ID NO: 2562996
cuaaucgcuuagaaguucc

SEQ ID NO: 2562998 - RNA, 19 nt, Artificial Sequence
  Description of Artificial Sequence: Synthetic oligonucleotide
  Sense strand starting at position 1426 of SEQ ID NO: 1888876
cuucuaagcgauuagguca

SEQ ID NO: 2562999 - RNA, 19 nt, Artificial Sequence
  Description of Artificial Sequence: Synthetic oligonucleotide
  Antisense strand to SEQ ID NO: 2562998
ugaccuaaucgcuuagaag

SEQ ID NO: 2563000 - RNA, 19 nt, Artificial Sequence
  Description of Artificial Sequence: Synthetic oligonucleotide
  Sense strand starting at position 1431 of SEQ ID NO: 1888876
aagcgauuaggucaaaggu

SEQ ID NO: 2563001 - RNA, 19 nt, Artificial Sequence
  Description of Artificial Sequence: Synthetic oligonucleotide
  Antisense strand to SEQ ID NO: 2563000
accuuugaccuaaucgcuu

SEQ ID NO: 2563002 - RNA, 19 nt, Artificial Sequence
  Description of Artificial Sequence: Synthetic oligonucleotide
  Sense strand starting at position 1433 of SEQ ID NO: 1888876
gcgauuaggucaaagguga

SEQ ID NO: 2563003 - RNA, 19 nt, Artificial Sequence
  Description of Artificial Sequence: Synthetic oligonucleotide
  Antisense strand to SEQ ID NO: 2563002
ucaccuuugaccuaaucgc

SEQ ID NO: 2563004 - RNA, 19 nt, Artificial Sequence
  Description of Artificial Sequence: Synthetic oligonucleotide
  Sense strand starting at position 1791 of SEQ ID NO: 1888876
gcaagaucacaugguuagu

SEQ ID NO: 2563005 - RNA, 19 nt, Artificial Sequence
  Description of Artificial Sequence: Synthetic oligonucleotide
  Antisense strand to SEQ ID NO: 2563004
acuaaccaugugaucuugc

SEQ ID NO: 2563006 - RNA, 19 nt, Artificial Sequence
  Description of Artificial Sequence: Synthetic oligonucleotide
  Sense strand starting at position 1801 of SEQ ID NO: 1888876
augguuaguaagugggaga

SEQ ID NO: 2563007 - RNA, 19 nt, Artificial Sequence
  Description of Artificial Sequence: Synthetic oligonucleotide
  Antisense strand to SEQ ID NO: 2563006
ucucccacuuacuaaccau

SEQ ID NO: 2563008 - RNA, 19 nt, Artificial Sequence
  Description of Artificial Sequence: Synthetic oligonucleotide
  Sense strand starting at position 1818 of SEQ ID NO: 1888876
gagccaagguuugaacagu

SEQ ID NO: 2563009 - RNA, 19 nt, Artificial Sequence
  Description of Artificial Sequence: Synthetic oligonucleotide
  Antisense strand to SEQ ID NO: 2563008
acuguucaaaccuuggcuc

SEQ ID NO: 2563010 - RNA, 19 nt, Artificial Sequence
  Description of Artificial Sequence: Synthetic oligonucleotide
  Sense strand starting at position 1900 of SEQ ID NO: 1888876
cacccucuugagugcgaaa

SEQ ID NO: 2563011 - RNA, 19 nt, Artificial Sequence
  Description of Artificial Sequence: Synthetic oligonucleotide
  Antisense strand to SEQ ID NO: 2563010
uuucgcacucaagagggug

SEQ ID NO: 2563012 - RNA, 19 nt, Artificial Sequence
  Description of Artificial Sequence: Synthetic oligonucleotide
  Sense strand starting at position 1902 of SEQ ID NO: 1888876
cccucuugagugcgaaauu

SEQ ID NO: 2563013 - RNA, 19 nt, Artificial Sequence
  Description of Artificial Sequence: Synthetic oligonucleotide
  Antisense strand to SEQ ID NO: 2563012
aauuucgcacucaagaggg

SEQ ID NO: 2563014 - RNA, 19 nt, Artificial Sequence
  Description of Artificial Sequence: Synthetic oligonucleotide
  Sense strand starting at position 1903 of SEQ ID NO: 1888876
ccucuugagugcgaaauuu

SEQ ID NO: 2563015 - RNA, 19 nt, Artificial Sequence
  Description of Artificial Sequence: Synthetic oligonucleotide
  Antisense strand to SEQ ID NO: 2563014
aaauuucgcacucaagagg

SEQ ID NO: 2563016 - RNA, 19 nt, Artificial Sequence
  Description of Artificial Sequence: Synthetic oligonucleotide
  Sense strand starting at position 2050 of SEQ ID NO: 1888876
aguugacagucagugguaa

SEQ ID NO: 2563017 - RNA, 19 nt, Artificial Sequence
  Description of Artificial Sequence: Synthetic oligonucleotide
  Antisense strand to SEQ ID NO: 2563016
uuaccacugacugucaacu

SEQ ID NO: 2563018 - RNA, 19 nt, Artificial Sequence
  Description of Artificial Sequence: Synthetic oligonucleotide
  Sense strand starting at position 2051 of SEQ ID NO: 1888876
guugacagucagugguaau

SEQ ID NO: 2563019 - RNA, 19 nt, Artificial Sequence
  Description of Artificial Sequence: Synthetic oligonucleotide
  Antisense strand to SEQ ID NO: 2563018
auuaccacugacugucaac

SEQ ID NO: 2563020 - RNA, 19 nt, Artificial Sequence
  Description of Artificial Sequence: Synthetic oligonucleotide
  Sense strand starting at position 2052 of SEQ ID NO: 1888876
uugacagucagugguaauu

SEQ ID NO: 2563021 - RNA, 19 nt, Artificial Sequence
  Description of Artificial Sequence: Synthetic oligonucleotide
  Antisense strand to SEQ ID NO: 2563020
aauuaccacugacugucaa

SEQ ID NO: 2563022 - RNA, 19 nt, Artificial Sequence
  Description of Artificial Sequence: Synthetic oligonucleotide
  Sense strand starting at position 2054 of SEQ ID NO: 1888876
gacagucagugguaauuaa

SEQ ID NO: 2563023 - RNA, 19 nt, Artificial Sequence
  Description of Artificial Sequence: Synthetic oligonucleotide
  Antisense strand to SEQ ID NO: 2563022
uuaauuaccacugacuguc

SEQ ID NO: 2563024 - RNA, 19 nt, Artificial Sequence
  Description of Artificial Sequence: Synthetic oligonucleotide
  Sense strand starting at position 2058 of SEQ ID NO: 1888876
gucagugguaauuaaauug

SEQ ID NO: 2563025 - RNA, 19 nt, Artificial Sequence
  Description of Artificial Sequence: Synthetic oligonucleotide
  Antisense strand to SEQ ID NO: 2563024
caauuuaauuaccacugac

SEQ ID NO: 2563026 - RNA, 19 nt, Artificial Sequence
  Description of Artificial Sequence: Synthetic oligonucleotide
  Sense strand starting at position 2065 of SEQ ID NO: 1888876
guaauuaaauugucucucu

SEQ ID NO: 2563027 - RNA, 19 nt, Artificial Sequence
  Description of Artificial Sequence: Synthetic oligonucleotide
  Antisense strand to SEQ ID NO: 2563026
agagagacaauuuaauuac

SEQ ID NO: 2563028 - RNA, 19 nt, Artificial Sequence
  Description of Artificial Sequence: Synthetic oligonucleotide
  Sense strand starting at position 2083 of SEQ ID NO: 1888876
ugguucugugacugaagga

SEQ ID NO: 2563029 - RNA, 19 nt, Artificial Sequence
  Description of Artificial Sequence: Synthetic oligonucleotide
  Antisense strand to SEQ ID NO: 2563028
uccuucagucacagaacca

SEQ ID NO: 2563030 - RNA, 19 nt, Artificial Sequence
  Description of Artificial Sequence: Synthetic oligonucleotide
  Sense strand starting at position 2102 of SEQ ID NO: 1888876
gacagaaggcuuuauggug

SEQ ID NO: 2563031 - RNA, 19 nt, Artificial Sequence
  Description of Artificial Sequence: Synthetic oligonucleotide
  Antisense strand to SEQ ID NO: 2563030
caccauaaagccuucuguc

SEQ ID NO: 2563032 - RNA, 19 nt, Artificial Sequence
  Description of Artificial Sequence: Synthetic oligonucleotide
  Sense strand starting at position 2308 of SEQ ID NO: 1888876
aucuaauggucucuaguuc

SEQ ID NO: 2563033 - RNA, 19 nt, Artificial Sequence
  Description of Artificial Sequence: Synthetic oligonucleotide
  Antisense strand to SEQ ID NO: 2563032
gaacuagagaccauuagau

SEQ ID NO: 2563034 - RNA, 19 nt, Artificial Sequence
  Description of Artificial Sequence: Synthetic oligonucleotide
  Sense strand starting at position 2396 of SEQ ID NO: 1888876
ggcgcauucugaguuguaa

SEQ ID NO: 2563035 - RNA, 19 nt, Artificial Sequence
  Description of Artificial Sequence: Synthetic oligonucleotide
  Antisense strand to SEQ ID NO: 2563034
uuacaacucagaaugcgcc

SEQ ID NO: 2563036 - RNA, 19 nt, Artificial Sequence
  Description of Artificial Sequence: Synthetic oligonucleotide
  Sense strand starting at position 2397 of SEQ ID NO: 1888876
gcgcauucugaguuguaau

SEQ ID NO: 2563037 - RNA, 19 nt, Artificial Sequence
  Description of Artificial Sequence: Synthetic oligonucleotide
  Antisense strand to SEQ ID NO: 2563036
auuacaacucagaaugcgc

SEQ ID NO: 2563038 - RNA, 19 nt, Artificial Sequence
  Description of Artificial Sequence: Synthetic oligonucleotide
  Sense strand starting at position 2398 of SEQ ID NO: 1888876
cgcauucugaguuguaaug

SEQ ID NO: 2563039 - RNA, 19 nt, Artificial Sequence
  Description of Artificial Sequence: Synthetic oligonucleotide
  Antisense strand to SEQ ID NO: 2563038
cauuacaacucagaaugcg

SEQ ID NO: 2563040 - RNA, 19 nt, Artificial Sequence
  Description of Artificial Sequence: Synthetic oligonucleotide
  Sense strand starting at position 2400 of SEQ ID NO: 1888876
cauucugaguuguaaugac

SEQ ID NO: 2563041 - RNA, 19 nt, Artificial Sequence
  Description of Artificial Sequence: Synthetic oligonucleotide
  Antisense strand to SEQ ID NO: 2563040
gucauuacaacucagaaug

SEQ ID NO: 2563042 - RNA, 19 nt, Artificial Sequence
  Description of Artificial Sequence: Synthetic oligonucleotide
  Sense strand starting at position 2408 of SEQ ID NO: 1888876
guuguaaugacagagcuag

SEQ ID NO: 2563043 - RNA, 19 nt, Artificial Sequence
  Description of Artificial Sequence: Synthetic oligonucleotide
  Antisense strand to SEQ ID NO: 2563042
cuagcucugucauuacaac

SEQ ID NO: 2563044 - RNA, 19 nt, Artificial Sequence
  Description of Artificial Sequence: Synthetic oligonucleotide
  Sense strand starting at position 2427 of SEQ ID NO: 1888876
acaggucuugucuguagau

SEQ ID NO: 2563045 - RNA, 19 nt, Artificial Sequence
  Description of Artificial Sequence: Synthetic oligonucleotide
  Antisense strand to SEQ ID NO: 2563044
aucuacagacaagaccugu

SEQ ID NO: 2563046 - RNA, 19 nt, Artificial Sequence
  Description of Artificial Sequence: Synthetic oligonucleotide
  Sense strand starting at position 2513 of SEQ ID NO: 1888876
gaggauucuagaggcuuga

SEQ ID NO: 2563047 - RNA, 19 nt, Artificial Sequence
  Description of Artificial Sequence: Synthetic oligonucleotide
  Antisense strand to SEQ ID NO: 2563046
ucaagccucuagaauccuc

SEQ ID NO: 2563048 - RNA, 19 nt, Artificial Sequence
  Description of Artificial Sequence: Synthetic oligonucleotide
  Sense strand starting at position 2517 of SEQ ID NO: 1888876
auucuagaggcuugagaga

SEQ ID NO: 2563049 - RNA, 19 nt, Artificial Sequence
  Description of Artificial Sequence: Synthetic oligonucleotide
  Antisense strand to SEQ ID NO: 2563048
ucucucaagccucuagaau

SEQ ID NO: 2563050 - RNA, 19 nt, Artificial Sequence
  Description of Artificial Sequence: Synthetic oligonucleotide
  Sense strand starting at position 2547 of SEQ ID NO: 1888876
gcgguuucacucugauuug

SEQ ID NO: 2563051 - RNA, 19 nt, Artificial Sequence
  Description of Artificial Sequence: Synthetic oligonucleotide
  Antisense strand to SEQ ID NO: 2563050
caaaucagagugaaaccgc

SEQ ID NO: 2563052 - RNA, 19 nt, Artificial Sequence
  Description of Artificial Sequence: Synthetic oligonucleotide
  Sense strand starting at position 2559 of SEQ ID NO: 1888876
ugauuugcuucuccaguga

SEQ ID NO: 2563053 - RNA, 19 nt, Artificial Sequence
  Description of Artificial Sequence: Synthetic oligonucleotide
  Antisense strand to SEQ ID NO: 2563052
ucacuggagaagcaaauca

SEQ ID NO: 2563054 - RNA, 19 nt, Artificial Sequence
  Description of Artificial Sequence: Synthetic oligonucleotide
  Sense strand starting at position 2563 of SEQ ID NO: 1888876
uugcuucuccagugaagau

SEQ ID NO: 2563055 - RNA, 19 nt, Artificial Sequence
  Description of Artificial Sequence: Synthetic oligonucleotide
  Antisense strand to SEQ ID NO: 2563054
aucuucacuggagaagcaa

SEQ ID NO: 2563056 - RNA, 19 nt, Artificial Sequence
  Description of Artificial Sequence: Synthetic oligonucleotide
  Sense strand starting at position 169 of SEQ ID NO: 1888877
cuuccuaggugauuccaau

SEQ ID NO: 2563057 - RNA, 19 nt, Artificial Sequence
  Description of Artificial Sequence: Synthetic oligonucleotide
  Antisense strand to SEQ ID NO: 2563056
auuggaaucaccuaggaag

SEQ ID NO: 2563058 - RNA, 19 nt, Artificial Sequence
  Description of Artificial Sequence: Synthetic oligonucleotide
  Sense strand starting at position 634 of SEQ ID NO: 1888877
guuaaauuguaaucccuau

SEQ ID NO: 2563059 - RNA, 19 nt, Artificial Sequence
  Description of Artificial Sequence: Synthetic oligonucleotide
  Antisense strand to SEQ ID NO: 2563058
auagggauuacaauuuaac

SEQ ID NO: 2563060 - RNA, 19 nt, Artificial Sequence
  Description of Artificial Sequence: Synthetic oligonucleotide
  Sense strand starting at position 713 of SEQ ID NO: 1888877
acaauacuguuugugauag

SEQ ID NO: 2563061 - RNA, 19 nt, Artificial Sequence
  Description of Artificial Sequence: Synthetic oligonucleotide
  Antisense strand to SEQ ID NO: 2563060
cuaucacaaacaguauugu

SEQ ID NO: 2563062 - RNA, 19 nt, Artificial Sequence
  Description of Artificial Sequence: Synthetic oligonucleotide
  Sense strand starting at position 760 of SEQ ID NO: 1888877
uuuauaagaguuuggcaug

SEQ ID NO: 2563063 - RNA, 19 nt, Artificial Sequence
  Description of Artificial Sequence: Synthetic oligonucleotide
  Antisense strand to SEQ ID NO: 2563062
caugccaaacucuuauaaa

SEQ ID NO: 2563064 - RNA, 19 nt, Artificial Sequence
  Description of Artificial Sequence: Synthetic oligonucleotide
  Sense strand starting at position 1004 of SEQ ID NO: 1888877
gguaauaacucuuugaucu

SEQ ID NO: 2563065 - RNA, 19 nt, Artificial Sequence
  Description of Artificial Sequence: Synthetic oligonucleotide
  Antisense strand to SEQ ID NO: 2563064
agaucaaagaguuauuacc

SEQ ID NO: 2563066 - RNA, 19 nt, Artificial Sequence
  Description of Artificial Sequence: Synthetic oligonucleotide
  Sense strand starting at position 1059 of SEQ ID NO: 1888877
uuaagaaucuagguuucca

SEQ ID NO: 2563067 - RNA, 19 nt, Artificial Sequence
  Description of Artificial Sequence: Synthetic oligonucleotide
  Antisense strand to SEQ ID NO: 2563066
uggaaaccuagauucuuaa

SEQ ID NO: 2563068 - RNA, 19 nt, Artificial Sequence
  Description of Artificial Sequence: Synthetic oligonucleotide
  Sense strand starting at position 1063 of SEQ ID NO: 1888877
gaaucuagguuuccagaca

SEQ ID NO: 2563069 - RNA, 19 nt, Artificial Sequence
  Description of Artificial Sequence: Synthetic oligonucleotide
  Antisense strand to SEQ ID NO: 2563068
ugucuggaaaccuagauuc

SEQ ID NO: 2563070 - RNA, 19 nt, Artificial Sequence
  Description of Artificial Sequence: Synthetic oligonucleotide
  Sense strand starting at position 1138 of SEQ ID NO: 1888877
aggacuccaggcugucaaa

SEQ ID NO: 2563071 - RNA, 19 nt, Artificial Sequence
  Description of Artificial Sequence: Synthetic oligonucleotide
  Antisense strand to SEQ ID NO: 2563070
uuugacagccuggaguccu

SEQ ID NO: 2563072 - RNA, 19 nt, Artificial Sequence
  Description of Artificial Sequence: Synthetic oligonucleotide
  Sense strand starting at position 1326 of SEQ ID NO: 1888877
uuauguuaucuggauugca

SEQ ID NO: 2563073 - RNA, 19 nt, Artificial Sequence
  Description of Artificial Sequence: Synthetic oligonucleotide
  Antisense strand to SEQ ID NO: 2563072
ugcaauccagauaacauaa

SEQ ID NO: 2563074 - RNA, 19 nt, Artificial Sequence
  Description of Artificial Sequence: Synthetic oligonucleotide
  Sense strand starting at position 1530 of SEQ ID NO: 1888877
gugaaauccagcuagagca

SEQ ID NO: 2563075 - RNA, 19 nt, Artificial Sequence
  Description of Artificial Sequence: Synthetic oligonucleotide
  Antisense strand to SEQ ID NO: 2563074
ugcucuagcuggauuucac

SEQ ID NO: 2563076 - RNA, 19 nt, Artificial Sequence
  Description of Artificial Sequence: Synthetic oligonucleotide
  Sense strand starting at position 1543 of SEQ ID NO: 1888877
agagcaguagcauacaaau

SEQ ID NO: 2563077 - RNA, 19 nt, Artificial Sequence
  Description of Artificial Sequence: Synthetic oligonucleotide
  Antisense strand to SEQ ID NO: 2563076
auuuguaugcuacugcucu

SEQ ID NO: 2563078 - RNA, 19 nt, Artificial Sequence
  Description of Artificial Sequence: Synthetic oligonucleotide
  Sense strand starting at position 1779 of SEQ ID NO: 1888877
ucuuuagauguuuauagac

SEQ ID NO: 2563079 - RNA, 19 nt, Artificial Sequence
  Description of Artificial Sequence: Synthetic oligonucleotide
  Antisense strand to SEQ ID NO: 2563078
gucuauaaacaucuaaaga

SEQ ID NO: 2563080 - RNA, 19 nt, Artificial Sequence
  Description of Artificial Sequence: Synthetic oligonucleotide
  Sense strand starting at position 1840 of SEQ ID NO: 1888877
cuuacuugagugcauuaaa

SEQ ID NO: 2563081 - RNA, 19 nt, Artificial Sequence
  Description of Artificial Sequence: Synthetic oligonucleotide
  Antisense strand to SEQ ID NO: 2563080
uuuaaugcacucaaguaag

SEQ ID NO: 2563082 - RNA, 19 nt, Artificial Sequence
  Description of Artificial Sequence: Synthetic oligonucleotide
  Sense strand starting at position 1995 of SEQ ID NO: 1888877
agagaaggcuuauugauac

SEQ ID NO: 2563083 - RNA, 19 nt, Artificial Sequence
  Description of Artificial Sequence: Synthetic oligonucleotide
  Antisense strand to SEQ ID NO: 2563082
guaucaauaagccuucucu

SEQ ID NO: 2563084 - RNA, 19 nt, Artificial Sequence
  Description of Artificial Sequence: Synthetic oligonucleotide
  Sense strand starting at position 2006 of SEQ ID NO: 1888877
auugauacauuugaagaca

SEQ ID NO: 2563085 - RNA, 19 nt, Artificial Sequence
  Description of Artificial Sequence: Synthetic oligonucleotide
  Antisense strand to SEQ ID NO: 2563084
ugucuucaaauguaucaau

SEQ ID NO: 2563086 - RNA, 19 nt, Artificial Sequence
  Description of Artificial Sequence: Synthetic oligonucleotide
  Sense strand starting at position 2069 of SEQ ID NO: 1888877
cuugcuuaaaggugauaag

SEQ ID NO: 2563087 - RNA, 19 nt, Artificial Sequence
  Description of Artificial Sequence: Synthetic oligonucleotide
  Antisense strand to SEQ ID NO: 2563086
cuuaucaccuuuaagcaag

SEQ ID NO: 2563088 - RNA, 19 nt, Artificial Sequence
  Description of Artificial Sequence: Synthetic oligonucleotide
  Sense strand starting at position 2079 of SEQ ID NO: 1888877
ggugauaagagcugguuag

SEQ ID NO: 2563089 - RNA, 19 nt, Artificial Sequence
  Description of Artificial Sequence: Synthetic oligonucleotide
  Antisense strand to SEQ ID NO: 2563088
cuaaccagcucuuaucacc

SEQ ID NO: 2563090 - RNA, 19 nt, Artificial Sequence
  Description of Artificial Sequence: Synthetic oligonucleotide
  Sense strand starting at position 2083 of SEQ ID NO: 1888877
auaagagcugguuagcuuu

SEQ ID NO: 2563091 - RNA, 19 nt, Artificial Sequence
  Description of Artificial Sequence: Synthetic oligonucleotide
  Antisense strand to SEQ ID NO: 2563090
aaagcuaaccagcucuuau

SEQ ID NO: 2563092 - RNA, 19 nt, Artificial Sequence
  Description of Artificial Sequence: Synthetic oligonucleotide
  Sense strand starting at position 2413 of SEQ ID NO: 1888877
cuaccuaaagccugaugau

SEQ ID NO: 2563093 - RNA, 19 nt, Artificial Sequence
  Description of Artificial Sequence: Synthetic oligonucleotide
  Antisense strand to SEQ ID NO: 2563092
aucaucaggcuuuagguag

SEQ ID NO: 2563094 - RNA, 19 nt, Artificial Sequence
  Description of Artificial Sequence: Synthetic oligonucleotide
  Sense strand starting at position 2431 of SEQ ID NO: 1888877
ucugauguggaacaguuua

SEQ ID NO: 2563095 - RNA, 19 nt, Artificial Sequence
  Description of Artificial Sequence: Synthetic oligonucleotide
  Antisense strand to SEQ ID NO: 2563094
uaaacuguuccacaucaga

SEQ ID NO: 2563096 - RNA, 19 nt, Artificial Sequence
  Description of Artificial Sequence: Synthetic oligonucleotide
  Sense strand starting at position 2536 of SEQ ID NO: 1888877
gaggauugcugcuuuagag

SEQ ID NO: 2563097 - RNA, 19 nt, Artificial Sequence
  Description of Artificial Sequence: Synthetic oligonucleotide
  Antisense strand to SEQ ID NO: 2563096
cucuaaagcagcaauccuc

SEQ ID NO: 2563098 - RNA, 19 nt, Artificial Sequence
  Description of Artificial Sequence: Synthetic oligonucleotide
  Sense strand starting at position 2892 of SEQ ID NO: 1888877
uggaauuagggcuguacca

SEQ ID NO: 2563099 - RNA, 19 nt, Artificial Sequence
  Description of Artificial Sequence: Synthetic oligonucleotide
  Antisense strand to SEQ ID NO: 2563098
ugguacagcccuaauucca

SEQ ID NO: 2563100 - RNA, 19 nt, Artificial Sequence
  Description of Artificial Sequence: Synthetic oligonucleotide
  Sense strand starting at position 2945 of SEQ ID NO: 1888877
augaguguaccucaauauc

SEQ ID NO: 2563101 - RNA, 19 nt, Artificial Sequence
  Description of Artificial Sequence: Synthetic oligonucleotide
  Antisense strand to SEQ ID NO: 2563100
gauauugagguacacucau

SEQ ID NO: 2563102 - RNA, 19 nt, Artificial Sequence
  Description of Artificial Sequence: Synthetic oligonucleotide
  Sense strand starting at position 2948 of SEQ ID NO: 1888877
aguguaccucaauaucuua

SEQ ID NO: 2563103 - RNA, 19 nt, Artificial Sequence
  Description of Artificial Sequence: Synthetic oligonucleotide
  Antisense strand to SEQ ID NO: 2563102
uaagauauugagguacacu

SEQ ID NO: 2563104 - RNA, 19 nt, Artificial Sequence
  Description of Artificial Sequence: Synthetic oligonucleotide
  Sense strand starting at position 3079 of SEQ ID NO: 1888877
auaaucucguuucuugaaa

SEQ ID NO: 2563105 - RNA, 19 nt, Artificial Sequence
  Description of Artificial Sequence: Synthetic oligonucleotide
  Antisense strand to SEQ ID NO: 2563104
uuucaagaaacgagauuau

SEQ ID NO: 2563106 - RNA, 19 nt, Artificial Sequence
  Description of Artificial Sequence: Synthetic oligonucleotide
  Sense strand starting at position 3251 of SEQ ID NO: 1888877
aaaguaaagcaucgacaga

SEQ ID NO: 2563107 - RNA, 19 nt, Artificial Sequence
  Description of Artificial Sequence: Synthetic oligonucleotide
  Antisense strand to SEQ ID NO: 2563106
ucugucgaugcuuuacuuu

SEQ ID NO: 2563108 - RNA, 19 nt, Artificial Sequence
  Description of Artificial Sequence: Synthetic oligonucleotide
  Sense strand starting at position 3318 of SEQ ID NO: 1888877
uacugaguugguuaaggau

SEQ ID NO: 2563109 - RNA, 19 nt, Artificial Sequence
  Description of Artificial Sequence: Synthetic oligonucleotide
  Antisense strand to SEQ ID NO: 2563108
auccuuaaccaacucagua

SEQ ID NO: 2563110 - RNA, 19 nt, Artificial Sequence
  Description of Artificial Sequence: Synthetic oligonucleotide
  Sense strand starting at position 3423 of SEQ ID NO: 1888877
uaagaauaagugugauauc

SEQ ID NO: 2563111 - RNA, 19 nt, Artificial Sequence
  Description of Artificial Sequence: Synthetic oligonucleotide
  Antisense strand to SEQ ID NO: 2563110
gauaucacacuuauucuua

SEQ ID NO: 2563112 - RNA, 19 nt, Artificial Sequence
  Description of Artificial Sequence: Synthetic oligonucleotide
  Sense strand starting at position 3545 of SEQ ID NO: 1888877
uuuagugucugauuauaga

SEQ ID NO: 2563113 - RNA, 19 nt, Artificial Sequence
  Description of Artificial Sequence: Synthetic oligonucleotide
  Antisense strand to SEQ ID NO: 2563112
ucuauaaucagacacuaaa

SEQ ID NO: 2563114 - RNA, 19 nt, Artificial Sequence
  Description of Artificial Sequence: Synthetic oligonucleotide
  Sense strand starting at position 3589 of SEQ ID NO: 1888877
ucaagaaugaauuggguuu

SEQ ID NO: 2563115 - RNA, 19 nt, Artificial Sequence
  Description of Artificial Sequence: Synthetic oligonucleotide
  Antisense strand to SEQ ID NO: 2563114
aaacccaauucauucuuga

SEQ ID NO: 2563116 - RNA, 19 nt, Artificial Sequence
  Description of Artificial Sequence: Synthetic oligonucleotide
  Sense strand starting at position 3595 of SEQ ID NO: 1888877
augaauuggguuugcauua

SEQ ID NO: 2563117 - RNA, 19 nt, Artificial Sequence
  Description of Artificial Sequence: Synthetic oligonucleotide
  Antisense strand to SEQ ID NO: 2563116
uaaugcaaacccaauucau

SEQ ID NO: 2563118 - RNA, 19 nt, Artificial Sequence
  Description of Artificial Sequence: Synthetic oligonucleotide
  Sense strand starting at position 3600 of SEQ ID NO: 1888877
uuggguuugcauuagagau

SEQ ID NO: 2563119 - RNA, 19 nt, Artificial Sequence
  Description of Artificial Sequence: Synthetic oligonucleotide
  Antisense strand to SEQ ID NO: 2563118
aucucuaaugcaaacccaa

SEQ ID NO: 2563120 - RNA, 19 nt, Artificial Sequence
  Description of Artificial Sequence: Synthetic oligonucleotide
  Sense strand starting at position 3612 of SEQ ID NO: 1888877
uagagauaaucuccuugug

SEQ ID NO: 2563121 - RNA, 19 nt, Artificial Sequence
  Description of Artificial Sequence: Synthetic oligonucleotide
  Antisense strand to SEQ ID NO: 2563120
cacaaggagauuaucucua

SEQ ID NO: 2563122 - RNA, 19 nt, Artificial Sequence
  Description of Artificial Sequence: Synthetic oligonucleotide
  Sense strand starting at position 3630 of SEQ ID NO: 1888877
gcagaaguaggugagucaa

SEQ ID NO: 2563123 - RNA, 19 nt, Artificial Sequence
  Description of Artificial Sequence: Synthetic oligonucleotide
  Antisense strand to SEQ ID NO: 2563122
uugacucaccuacuucugc

SEQ ID NO: 2563124 - RNA, 19 nt, Artificial Sequence
  Description of Artificial Sequence: Synthetic oligonucleotide
  Sense strand starting at position 3632 of SEQ ID NO: 1888877
agaaguaggugagucaaga

SEQ ID NO: 2563125 - RNA, 19 nt, Artificial Sequence
  Description of Artificial Sequence: Synthetic oligonucleotide
  Antisense strand to SEQ ID NO: 2563124
ucuugacucaccuacuucu

SEQ ID NO: 2563126 - RNA, 19 nt, Artificial Sequence
  Description of Artificial Sequence: Synthetic oligonucleotide
  Sense strand starting at position 3759 of SEQ ID NO: 1888877
gagggaauuugagauccua

SEQ ID NO: 2563127 - RNA, 19 nt, Artificial Sequence
  Description of Artificial Sequence: Synthetic oligonucleotide
  Antisense strand to SEQ ID NO: 2563126
uaggaucucaaauucccuc

SEQ ID NO: 2563128 - RNA, 19 nt, Artificial Sequence
  Description of Artificial Sequence: Synthetic oligonucleotide
  Sense strand starting at position 3786 of SEQ ID NO: 1888877
auaaucugucagcaagauu

SEQ ID NO: 2563129 - RNA, 19 nt, Artificial Sequence
  Description of Artificial Sequence: Synthetic oligonucleotide
  Antisense strand to SEQ ID NO: 2563128
aaucuugcugacagauuau

SEQ ID NO: 2563130 - RNA, 19 nt, Artificial Sequence
  Description of Artificial Sequence: Synthetic oligonucleotide
  Sense strand starting at position 3789 of SEQ ID NO: 1888877
aucugucagcaagauuaaa

SEQ ID NO: 2563131 - RNA, 19 nt, Artificial Sequence
  Description of Artificial Sequence: Synthetic oligonucleotide
  Antisense strand to SEQ ID NO: 2563130
uuuaaucuugcugacagau

SEQ ID NO: 2563132 - RNA, 19 nt, Artificial Sequence
  Description of Artificial Sequence: Synthetic oligonucleotide
  Sense strand starting at position 3838 of SEQ ID NO: 1888877
ugagacauauaguugcaaa

SEQ ID NO: 2563133 - RNA, 19 nt, Artificial Sequence
  Description of Artificial Sequence: Synthetic oligonucleotide
  Antisense strand to SEQ ID NO: 2563132
uuugcaacuauaugucuca

SEQ ID NO: 2563134 - RNA, 19 nt, Artificial Sequence
  Description of Artificial Sequence: Synthetic oligonucleotide
  Sense strand starting at position 3909 of SEQ ID NO: 1888877
auagaauaguggcuuucca

SEQ ID NO: 2563135 - RNA, 19 nt, Artificial Sequence
  Description of Artificial Sequence: Synthetic oligonucleotide
  Antisense strand to SEQ ID NO: 2563134
uggaaagccacuauucuau

SEQ ID NO: 2563136 - RNA, 19 nt, Artificial Sequence
  Description of Artificial Sequence: Synthetic oligonucleotide
  Sense strand starting at position 208 of SEQ ID NO: 1888878
gaguaagugcuacauaagu

SEQ ID NO: 2563137 - RNA, 19 nt, Artificial Sequence
  Description of Artificial Sequence: Synthetic oligonucleotide
  Antisense strand to SEQ ID NO: 2563136
acuuauguagcacuuacuc

SEQ ID NO: 2563138 - RNA, 19 nt, Artificial Sequence
  Description of Artificial Sequence: Synthetic oligonucleotide
  Sense strand starting at position 233 of SEQ ID NO: 1888878
uguugucaucaucacuauu

SEQ ID NO: 2563139 - RNA, 19 nt, Artificial Sequence
  Description of Artificial Sequence: Synthetic oligonucleotide
  Antisense strand to SEQ ID NO: 2563138
aauagugaugaugacaaca

SEQ ID NO: 2563140 - RNA, 19 nt, Artificial Sequence
  Description of Artificial Sequence: Synthetic oligonucleotide
  Sense strand starting at position 479 of SEQ ID NO: 1888878
aucucaaagcaucagugau

SEQ ID NO: 2563141 - RNA, 19 nt, Artificial Sequence
  Description of Artificial Sequence: Synthetic oligonucleotide
  Antisense strand to SEQ ID NO: 2563140
aucacugaugcuuugagau

SEQ ID NO: 2563142 - RNA, 19 nt, Artificial Sequence
  Description of Artificial Sequence: Synthetic oligonucleotide
  Sense strand starting at position 481 of SEQ ID NO: 1888878
cucaaagcaucagugauaa

SEQ ID NO: 2563143 - RNA, 19 nt, Artificial Sequence
  Description of Artificial Sequence: Synthetic oligonucleotide
  Antisense strand to SEQ ID NO: 2563142
uuaucacugaugcuuugag

SEQ ID NO: 2563144 - RNA, 19 nt, Artificial Sequence
  Description of Artificial Sequence: Synthetic oligonucleotide
  Sense strand starting at position 941 of SEQ ID NO: 1888878
agagucucaucacugacau

SEQ ID NO: 2563145 - RNA, 19 nt, Artificial Sequence
  Description of Artificial Sequence: Synthetic oligonucleotide
  Antisense strand to SEQ ID NO: 2563144
augucagugaugagacucu

SEQ ID NO: 2563146 - RNA, 19 nt, Artificial Sequence
  Description of Artificial Sequence: Synthetic oligonucleotide
  Sense strand starting at position 1001 of SEQ ID NO: 1888878
cgacuucugguacaaaucu

SEQ ID NO: 2563147 - RNA, 19 nt, Artificial Sequence
  Description of Artificial Sequence: Synthetic oligonucleotide
  Antisense strand to SEQ ID NO: 2563146
agauuuguaccagaagucg

SEQ ID NO: 2563148 - RNA, 19 nt, Artificial Sequence
  Description of Artificial Sequence: Synthetic oligonucleotide
  Sense strand starting at position 1009 of SEQ ID NO: 1888878
gguacaaaucuuuguacca

SEQ ID NO: 2563149 - RNA, 19 nt, Artificial Sequence
  Description of Artificial Sequence: Synthetic oligonucleotide
  Antisense strand to SEQ ID NO: 2563148
ugguacaaagauuuguacc

SEQ ID NO: 2563150 - RNA, 19 nt, Artificial Sequence
  Description of Artificial Sequence: Synthetic oligonucleotide
  Sense strand starting at position 1274 of SEQ ID NO: 1888878
aguuuaucaguccauccua

SEQ ID NO: 2563151 - RNA, 19 nt, Artificial Sequence
  Description of Artificial Sequence: Synthetic oligonucleotide
  Antisense strand to SEQ ID NO: 2563150
uaggauggacugauaaacu

SEQ ID NO: 2563152 - RNA, 19 nt, Artificial Sequence
  Description of Artificial Sequence: Synthetic oligonucleotide
  Sense strand starting at position 1414 of SEQ ID NO: 1888878
aguuauuggcaccacauga

SEQ ID NO: 2563153 - RNA, 19 nt, Artificial Sequence
  Description of Artificial Sequence: Synthetic oligonucleotide
  Antisense strand to SEQ ID NO: 2563152
ucauguggugccaauaacu

SEQ ID NO: 2563154 - RNA, 19 nt, Artificial Sequence
  Description of Artificial Sequence: Synthetic oligonucleotide
  Sense strand starting at position 1444 of SEQ ID NO: 1888878
ggaguuccuggccaacuuu

SEQ ID NO: 2563155 - RNA, 19 nt, Artificial Sequence
  Description of Artificial Sequence: Synthetic oligonucleotide
  Antisense strand to SEQ ID NO: 2563154
aaaguuggccaggaacucc

SEQ ID NO: 2563156 - RNA, 19 nt, Artificial Sequence
  Description of Artificial Sequence: Synthetic oligonucleotide
  Sense strand starting at position 1676 of SEQ ID NO: 1888878
gcaguuuaagaacaguuua

SEQ ID NO: 2563157 - RNA, 19 nt, Artificial Sequence
  Description of Artificial Sequence: Synthetic oligonucleotide
  Antisense strand to SEQ ID NO: 2563156
uaaacuguucuuaaacugc

SEQ ID NO: 2563158 - RNA, 19 nt, Artificial Sequence
  Description of Artificial Sequence: Synthetic oligonucleotide
  Sense strand starting at position 1802 of SEQ ID NO: 1888878
cccguuuguaccuuuguca

SEQ ID NO: 2563159 - RNA, 19 nt, Artificial Sequence
  Description of Artificial Sequence: Synthetic oligonucleotide
  Antisense strand to SEQ ID NO: 2563158
ugacaaagguacaaacggg

SEQ ID NO: 2563160 - RNA, 19 nt, Artificial Sequence
  Description of Artificial Sequence: Synthetic oligonucleotide
  Sense strand starting at position 1894 of SEQ ID NO: 1888878
uauguagucccagagccua

SEQ ID NO: 2563161 - RNA, 19 nt, Artificial Sequence
  Description of Artificial Sequence: Synthetic oligonucleotide
  Antisense strand to SEQ ID NO: 2563160
uaggcucugggacuacaua

SEQ ID NO: 2563162 - RNA, 19 nt, Artificial Sequence
  Description of Artificial Sequence: Synthetic oligonucleotide
  Sense strand starting at position 1920 of SEQ ID NO: 1888878
gcuugauugauaggagguc

SEQ ID NO: 2563163 - RNA, 19 nt, Artificial Sequence
  Description of Artificial Sequence: Synthetic oligonucleotide
  Antisense strand to SEQ ID NO: 2563162
gaccuccuaucaaucaagc

SEQ ID NO: 2563164 - RNA, 19 nt, Artificial Sequence
  Description of Artificial Sequence: Synthetic oligonucleotide
  Sense strand starting at position 2160 of SEQ ID NO: 1888878
guugaaugauugcuugaua

SEQ ID NO: 2563165 - RNA, 19 nt, Artificial Sequence
  Description of Artificial Sequence: Synthetic oligonucleotide
  Antisense strand to SEQ ID NO: 2563164
uaucaagcaaucauucaac

SEQ ID NO: 2563166 - RNA, 19 nt, Artificial Sequence
  Description of Artificial Sequence: Synthetic oligonucleotide
  Sense strand starting at position 2161 of SEQ ID NO: 1888878
uugaaugauugcuugauag

SEQ ID NO: 2563167 - RNA, 19 nt, Artificial Sequence
  Description of Artificial Sequence: Synthetic oligonucleotide
  Antisense strand to SEQ ID NO: 2563166
cuaucaagcaaucauucaa

SEQ ID NO: 2563168 - RNA, 19 nt, Artificial Sequence
  Description of Artificial Sequence: Synthetic oligonucleotide
  Sense strand starting at position 2211 of SEQ ID NO: 1888878
agaguugcuguaggaaaug

SEQ ID NO: 2563169 - RNA, 19 nt, Artificial Sequence
  Description of Artificial Sequence: Synthetic oligonucleotide
  Antisense strand to SEQ ID NO: 2563168
cauuuccuacagcaacucu

SEQ ID NO: 2563170 - RNA, 19 nt, Artificial Sequence
  Description of Artificial Sequence: Synthetic oligonucleotide
  Sense strand starting at position 2247 of SEQ ID NO: 1888878
ucugaaaucugguuccuua

SEQ ID NO: 2563171 - RNA, 19 nt, Artificial Sequence
  Description of Artificial Sequence: Synthetic oligonucleotide
  Antisense strand to SEQ ID NO: 2563170
uaaggaaccagauuucaga

SEQ ID NO: 2563172 - RNA, 19 nt, Artificial Sequence
  Description of Artificial Sequence: Synthetic oligonucleotide
  Sense strand starting at position 2297 of SEQ ID NO: 1888878
cugagcaguucucuagaaa

SEQ ID NO: 2563173 - RNA, 19 nt, Artificial Sequence
  Description of Artificial Sequence: Synthetic oligonucleotide
  Antisense strand to SEQ ID NO: 2563172
uuucuagagaacugcucag

SEQ ID NO: 2563174 - RNA, 19 nt, Artificial Sequence
  Description of Artificial Sequence: Synthetic oligonucleotide
  Sense strand starting at position 2298 of SEQ ID NO: 1888878
ugagcaguucucuagaaau

SEQ ID NO: 2563175 - RNA, 19 nt, Artificial Sequence
  Description of Artificial Sequence: Synthetic oligonucleotide
  Antisense strand to SEQ ID NO: 2563174
auuucuagagaacugcuca

SEQ ID NO: 2563176 - RNA, 19 nt, Artificial Sequence
  Description of Artificial Sequence: Synthetic oligonucleotide
  Sense strand starting at position 2554 of SEQ ID NO: 1888878
cugcaagaauagucugaac

SEQ ID NO: 2563177 - RNA, 19 nt, Artificial Sequence
  Description of Artificial Sequence: Synthetic oligonucleotide
  Antisense strand to SEQ ID NO: 2563176
guucagacuauucuugcag

SEQ ID NO: 2563178 - RNA, 19 nt, Artificial Sequence
  Description of Artificial Sequence: Synthetic oligonucleotide
  Sense strand starting at position 2698 of SEQ ID NO: 1888878
uugugauuaaagugcagaa

SEQ ID NO: 2563179 - RNA, 19 nt, Artificial Sequence
  Description of Artificial Sequence: Synthetic oligonucleotide
  Antisense strand to SEQ ID NO: 2563178
uucugcacuuuaaucacaa

SEQ ID NO: 2563180 - RNA, 19 nt, Artificial Sequence
  Description of Artificial Sequence: Synthetic oligonucleotide
  Sense strand starting at position 2700 of SEQ ID NO: 1888878
gugauuaaagugcagaaua

SEQ ID NO: 2563181 - RNA, 19 nt, Artificial Sequence
  Description of Artificial Sequence: Synthetic oligonucleotide
  Antisense strand to SEQ ID NO: 2563180
uauucugcacuuuaaucac

SEQ ID NO: 2563182 - RNA, 19 nt, Artificial Sequence
  Description of Artificial Sequence: Synthetic oligonucleotide
  Sense strand starting at position 2724 of SEQ ID NO: 1888878
auguauuggagagguauua

SEQ ID NO: 2563183 - RNA, 19 nt, Artificial Sequence
  Description of Artificial Sequence: Synthetic oligonucleotide
  Antisense strand to SEQ ID NO: 2563182
uaauaccucuccaauacau

SEQ ID NO: 2563184 - RNA, 19 nt, Artificial Sequence
  Description of Artificial Sequence: Synthetic oligonucleotide
  Sense strand starting at position 2792 of SEQ ID NO: 1888878
guagguaacacauguauau

SEQ ID NO: 2563185 - RNA, 19 nt, Artificial Sequence
  Description of Artificial Sequence: Synthetic oligonucleotide
  Antisense strand to SEQ ID NO: 2563184
auauacauguguuaccuac

SEQ ID NO: 2563186 - RNA, 19 nt, Artificial Sequence
  Description of Artificial Sequence: Synthetic oligonucleotide
  Sense strand starting at position 2839 of SEQ ID NO: 1888878
aaguaaggguucuucccaa

SEQ ID NO: 2563187 - RNA, 19 nt, Artificial Sequence
  Description of Artificial Sequence: Synthetic oligonucleotide
  Antisense strand to SEQ ID NO: 2563186
uugggaagaacccuuacuu

SEQ ID NO: 2563188 - RNA, 19 nt, Artificial Sequence
  Description of Artificial Sequence: Synthetic oligonucleotide
  Sense strand starting at position 2879 of SEQ ID NO: 1888878
agaggcaaucacuguuaaa

SEQ ID NO: 2563189 - RNA, 19 nt, Artificial Sequence
  Description of Artificial Sequence: Synthetic oligonucleotide
  Antisense strand to SEQ ID NO: 2563188
uuuaacagugauugccucu

SEQ ID NO: 2563190 - RNA, 19 nt, Artificial Sequence
  Description of Artificial Sequence: Synthetic oligonucleotide
  Sense strand starting at position 2940 of SEQ ID NO: 1888878
acauauauggagugccuau

SEQ ID NO: 2563191 - RNA, 19 nt, Artificial Sequence
  Description of Artificial Sequence: Synthetic oligonucleotide
  Antisense strand to SEQ ID NO: 2563190
auaggcacuccauauaugu

SEQ ID NO: 2563192 - RNA, 19 nt, Artificial Sequence
  Description of Artificial Sequence: Synthetic oligonucleotide
  Sense strand starting at position 2951 of SEQ ID NO: 1888878
gugccuauacaauauggua

SEQ ID NO: 2563193 - RNA, 19 nt, Artificial Sequence
  Description of Artificial Sequence: Synthetic oligonucleotide
  Antisense strand to SEQ ID NO: 2563192
uaccauauuguauaggcac

SEQ ID NO: 2563194 - RNA, 19 nt, Artificial Sequence
  Description of Artificial Sequence: Synthetic oligonucleotide
  Sense strand starting at position 3126 of SEQ ID NO: 1888878
ugaacauuggcaggaaauc

SEQ ID NO: 2563195 - RNA, 19 nt, Artificial Sequence
  Description of Artificial Sequence: Synthetic oligonucleotide
  Antisense strand to SEQ ID NO: 2563194
gauuuccugccaauguuca

SEQ ID NO: 2563196 - RNA, 19 nt, Artificial Sequence
  Description of Artificial Sequence: Synthetic oligonucleotide
  Sense strand starting at position 3138 of SEQ ID NO: 1888878
ggaaaucuguuacuaacca

SEQ ID NO: 2563197 - RNA, 19 nt, Artificial Sequence
  Description of Artificial Sequence: Synthetic oligonucleotide
  Antisense strand to SEQ ID NO: 2563196
ugguuaguaacagauuucc

SEQ ID NO: 2563198 - RNA, 19 nt, Artificial Sequence
  Description of Artificial Sequence: Synthetic oligonucleotide
  Sense strand starting at position 3142 of SEQ ID NO: 1888878
aucuguuacuaaccagagu

SEQ ID NO: 2563199 - RNA, 19 nt, Artificial Sequence
  Description of Artificial Sequence: Synthetic oligonucleotide
  Antisense strand to SEQ ID NO: 2563198
acucugguuaguaacagau

SEQ ID NO: 2563200 - RNA, 19 nt, Artificial Sequence
  Description of Artificial Sequence: Synthetic oligonucleotide
  Sense strand starting at position 3145 of SEQ ID NO: 1888878
uguuacuaaccagaguuua

SEQ ID NO: 2563201 - RNA, 19 nt, Artificial Sequence
  Description of Artificial Sequence: Synthetic oligonucleotide
  Antisense strand to SEQ ID NO: 2563200
uaaacucugguuaguaaca

SEQ ID NO: 2563202 - RNA, 19 nt, Artificial Sequence
  Description of Artificial Sequence: Synthetic oligonucleotide
  Sense strand starting at position 3382 of SEQ ID NO: 1888878
auuaaauaagcaugguaac

SEQ ID NO: 2563203 - RNA, 19 nt, Artificial Sequence
  Description of Artificial Sequence: Synthetic oligonucleotide
  Antisense strand to SEQ ID NO: 2563202
guuaccaugcuuauuuaau

SEQ ID NO: 2563204 - RNA, 19 nt, Artificial Sequence
  Description of Artificial Sequence: Synthetic oligonucleotide
  Sense strand starting at position 3383 of SEQ ID NO: 1888878
uuaaauaagcaugguaaca

SEQ ID NO: 2563205 - RNA, 19 nt, Artificial Sequence
  Description of Artificial Sequence: Synthetic oligonucleotide
  Antisense strand to SEQ ID NO: 2563204
uguuaccaugcuuauuuaa

SEQ ID NO: 2563206 - RNA, 19 nt, Artificial Sequence
  Description of Artificial Sequence: Synthetic oligonucleotide
  Sense strand starting at position 3503 of SEQ ID NO: 1888878
uuacauacuugguuuauca

SEQ ID NO: 2563207 - RNA, 19 nt, Artificial Sequence
  Description of Artificial Sequence: Synthetic oligonucleotide
  Antisense strand to SEQ ID NO: 2563206
ugauaaaccaaguauguaa

SEQ ID NO: 2563208 - RNA, 19 nt, Artificial Sequence
  Description of Artificial Sequence: Synthetic oligonucleotide
  Sense strand starting at position 3700 of SEQ ID NO: 1888878
aggguaguaucauugacau

SEQ ID NO: 2563209 - RNA, 19 nt, Artificial Sequence
  Description of Artificial Sequence: Synthetic oligonucleotide
  Antisense strand to SEQ ID NO: 2563208
augucaaugauacuacccu

SEQ ID NO: 2563210 - RNA, 19 nt, Artificial Sequence
  Description of Artificial Sequence: Synthetic oligonucleotide
  Sense strand starting at position 3702 of SEQ ID NO: 1888878
gguaguaucauugacaugu

SEQ ID NO: 2563211 - RNA, 19 nt, Artificial Sequence
  Description of Artificial Sequence: Synthetic oligonucleotide
  Antisense strand to SEQ ID NO: 2563210
acaugucaaugauacuacc

SEQ ID NO: 2563212 - RNA, 19 nt, Artificial Sequence
  Description of Artificial Sequence: Synthetic oligonucleotide
  Sense strand starting at position 3813 of SEQ ID NO: 1888878
ugaagucuuccaggauucu

SEQ ID NO: 2563213 - RNA, 19 nt, Artificial Sequence
  Description of Artificial Sequence: Synthetic oligonucleotide
  Antisense strand to SEQ ID NO: 2563212
agaauccuggaagacuuca

SEQ ID NO: 2563214 - RNA, 19 nt, Artificial Sequence
  Description of Artificial Sequence: Synthetic oligonucleotide
  Sense strand starting at position 3823 of SEQ ID NO: 1888878
caggauucugcccauguua

SEQ ID NO: 2563215 - RNA, 19 nt, Artificial Sequence
  Description of Artificial Sequence: Synthetic oligonucleotide
  Antisense strand to SEQ ID NO: 2563214
uaacaugggcagaauccug

SEQ ID NO: 2563216 - RNA, 19 nt, Artificial Sequence
  Description of Artificial Sequence: Synthetic oligonucleotide
  Sense strand starting at position 169 of SEQ ID NO: 1888879
uguuuaucagaacaguuaa

SEQ ID NO: 2563217 - RNA, 19 nt, Artificial Sequence
  Description of Artificial Sequence: Synthetic oligonucleotide
  Antisense strand to SEQ ID NO: 2563216
uuaacuguucugauaaaca

SEQ ID NO: 2563218 - RNA, 19 nt, Artificial Sequence
  Description of Artificial Sequence: Synthetic oligonucleotide
  Sense strand starting at position 257 of SEQ ID NO: 1888879
auuauuccuccacacguau

SEQ ID NO: 2563219 - RNA, 19 nt, Artificial Sequence
  Description of Artificial Sequence: Synthetic oligonucleotide
  Antisense strand to SEQ ID NO: 2563218
auacguguggaggaauaau

SEQ ID NO: 2563220 - RNA, 19 nt, Artificial Sequence
  Description of Artificial Sequence: Synthetic oligonucleotide
  Sense strand starting at position 524 of SEQ ID NO: 1888879
agcauuucgaagugccauu

SEQ ID NO: 2563221 - RNA, 19 nt, Artificial Sequence
  Description of Artificial Sequence: Synthetic oligonucleotide
  Antisense strand to SEQ ID NO: 2563220
aauggcacuucgaaaugcu

SEQ ID NO: 2563222 - RNA, 19 nt, Artificial Sequence
  Description of Artificial Sequence: Synthetic oligonucleotide
  Sense strand starting at position 666 of SEQ ID NO: 1888879
agaguaaguuuccuuucca

SEQ ID NO: 2563223 - RNA, 19 nt, Artificial Sequence
  Description of Artificial Sequence: Synthetic oligonucleotide
  Antisense strand to SEQ ID NO: 2563222
uggaaaggaaacuuacucu

SEQ ID NO: 2563224 - RNA, 19 nt, Artificial Sequence
  Description of Artificial Sequence: Synthetic oligonucleotide
  Sense strand starting at position 667 of SEQ ID NO: 1888879
gaguaaguuuccuuuccag

SEQ ID NO: 2563225 - RNA, 19 nt, Artificial Sequence
  Description of Artificial Sequence: Synthetic oligonucleotide
  Antisense strand to SEQ ID NO: 2563224
cuggaaaggaaacuuacuc

SEQ ID NO: 2563226 - RNA, 19 nt, Artificial Sequence
  Description of Artificial Sequence: Synthetic oligonucleotide
  Sense strand starting at position 827 of SEQ ID NO: 1888879
gcauuaugucagucguuau

SEQ ID NO: 2563227 - RNA, 19 nt, Artificial Sequence
  Description of Artificial Sequence: Synthetic oligonucleotide
  Antisense strand to SEQ ID NO: 2563226
auaacgacugacauaaugc

SEQ ID NO: 2563228 - RNA, 19 nt, Artificial Sequence
  Description of Artificial Sequence: Synthetic oligonucleotide
  Sense strand starting at position 861 of SEQ ID NO: 1888879
agugucucacugcagagau

SEQ ID NO: 2563229 - RNA, 19 nt, Artificial Sequence
  Description of Artificial Sequence: Synthetic oligonucleotide
  Antisense strand to SEQ ID NO: 2563228
aucucugcagugagacacu

SEQ ID NO: 2563230 - RNA, 19 nt, Artificial Sequence
  Description of Artificial Sequence: Synthetic oligonucleotide
  Sense strand starting at position 890 of SEQ ID NO: 1888879
uuagaaaugcugcaaucua

SEQ ID NO: 2563231 - RNA, 19 nt, Artificial Sequence
  Description of Artificial Sequence: Synthetic oligonucleotide
  Antisense strand to SEQ ID NO: 2563230
uagauugcagcauuucuaa

SEQ ID NO: 2563232 - RNA, 19 nt, Artificial Sequence
  Description of Artificial Sequence: Synthetic oligonucleotide
  Sense strand starting at position 1061 of SEQ ID NO: 1888879
agucuugcacaugagagau

SEQ ID NO: 2563233 - RNA, 19 nt, Artificial Sequence
  Description of Artificial Sequence: Synthetic oligonucleotide
  Antisense strand to SEQ ID NO: 2563232
aucucucaugugcaagacu

SEQ ID NO: 2563234 - RNA, 19 nt, Artificial Sequence
  Description of Artificial Sequence: Synthetic oligonucleotide
  Sense strand starting at position 1078 of SEQ ID NO: 1888879
auuagauacuguucuaagc

SEQ ID NO: 2563235 - RNA, 19 nt, Artificial Sequence
  Description of Artificial Sequence: Synthetic oligonucleotide
  Antisense strand to SEQ ID NO: 2563234
gcuuagaacaguaucuaau

SEQ ID NO: 2563236 - RNA, 19 nt, Artificial Sequence
  Description of Artificial Sequence: Synthetic oligonucleotide
  Sense strand starting at position 1330 of SEQ ID NO: 1888879
uaacuuuggccugaaguga

SEQ ID NO: 2563237 - RNA, 19 nt, Artificial Sequence
  Description of Artificial Sequence: Synthetic oligonucleotide
  Antisense strand to SEQ ID NO: 2563236
ucacuucaggccaaaguua

SEQ ID NO: 2563238 - RNA, 19 nt, Artificial Sequence
  Description of Artificial Sequence: Synthetic oligonucleotide
  Sense strand starting at position 1712 of SEQ ID NO: 1888879
cuugaaucagcauagucuu

SEQ ID NO: 2563239 - RNA, 19 nt, Artificial Sequence
  Description of Artificial Sequence: Synthetic oligonucleotide
  Antisense strand to SEQ ID NO: 2563238
aagacuaugcugauucaag

SEQ ID NO: 2563240 - RNA, 19 nt, Artificial Sequence
  Description of Artificial Sequence: Synthetic oligonucleotide
  Sense strand starting at position 1769 of SEQ ID NO: 1888879
ucugcagaauugguuuaaa

SEQ ID NO: 2563241 - RNA, 19 nt, Artificial Sequence
  Description of Artificial Sequence: Synthetic oligonucleotide
  Antisense strand to SEQ ID NO: 2563240
uuuaaaccaauucugcaga

SEQ ID NO: 2563242 - RNA, 19 nt, Artificial Sequence
  Description of Artificial Sequence: Synthetic oligonucleotide
  Sense strand starting at position 1772 of SEQ ID NO: 1888879
gcagaauugguuuaaacug

SEQ ID NO: 2563243 - RNA, 19 nt, Artificial Sequence
  Description of Artificial Sequence: Synthetic oligonucleotide
  Antisense strand to SEQ ID NO: 2563242
caguuuaaaccaauucugc

SEQ ID NO: 2563244 - RNA, 19 nt, Artificial Sequence
  Description of Artificial Sequence: Synthetic oligonucleotide
  Sense strand starting at position 2063 of SEQ ID NO: 1888879
cuaauaguccgagagguag

SEQ ID NO: 2563245 - RNA, 19 nt, Artificial Sequence
  Description of Artificial Sequence: Synthetic oligonucleotide
  Antisense strand to SEQ ID NO: 2563244
cuaccucucggacuauuag

SEQ ID NO: 2563246 - RNA, 19 nt, Artificial Sequence
  Description of Artificial Sequence: Synthetic oligonucleotide
  Sense strand starting at position 2069 of SEQ ID NO: 1888879
guccgagagguaggaucaa

SEQ ID NO: 2563247 - RNA, 19 nt, Artificial Sequence
  Description of Artificial Sequence: Synthetic oligonucleotide
  Antisense strand to SEQ ID NO: 2563246
uugauccuaccucucggac

SEQ ID NO: 2563248 - RNA, 19 nt, Artificial Sequence
  Description of Artificial Sequence: Synthetic oligonucleotide
  Sense strand starting at position 2146 of SEQ ID NO: 1888879
aaaucacuggugugagaca

SEQ ID NO: 2563249 - RNA, 19 nt, Artificial Sequence
  Description of Artificial Sequence: Synthetic oligonucleotide
  Antisense strand to SEQ ID NO: 2563248
ugucucacaccagugauuu

SEQ ID NO: 2563250 - RNA, 19 nt, Artificial Sequence
  Description of Artificial Sequence: Synthetic oligonucleotide
  Sense strand starting at position 2234 of SEQ ID NO: 1888879
gaugcuugucgauaaggag

SEQ ID NO: 2563251 - RNA, 19 nt, Artificial Sequence
  Description of Artificial Sequence: Synthetic oligonucleotide
  Antisense strand to SEQ ID NO: 2563250
cuccuuaucgacaagcauc

SEQ ID NO: 2563252 - RNA, 19 nt, Artificial Sequence
  Description of Artificial Sequence: Synthetic oligonucleotide
  Sense strand starting at position 2312 of SEQ ID NO: 1888879
ucuaguaguguguaagaca

SEQ ID NO: 2563253 - RNA, 19 nt, Artificial Sequence
  Description of Artificial Sequence: Synthetic oligonucleotide
  Antisense strand to SEQ ID NO: 2563252
ugucuuacacacuacuaga

SEQ ID NO: 2563254 - RNA, 19 nt, Artificial Sequence
  Description of Artificial Sequence: Synthetic oligonucleotide
  Sense strand starting at position 2471 of SEQ ID NO: 1888879
agaauaugguguucuguaa

SEQ ID NO: 2563255 - RNA, 19 nt, Artificial Sequence
  Description of Artificial Sequence: Synthetic oligonucleotide
  Antisense strand to SEQ ID NO: 2563254
uuacagaacaccauauucu

SEQ ID NO: 2563256 - RNA, 19 nt, Artificial Sequence
  Description of Artificial Sequence: Synthetic oligonucleotide
  Sense strand starting at position 2475 of SEQ ID NO: 1888879
uaugguguucuguaagaca

SEQ ID NO: 2563257 - RNA, 19 nt, Artificial Sequence
  Description of Artificial Sequence: Synthetic oligonucleotide
  Antisense strand to SEQ ID NO: 2563256
ugucuuacagaacaccaua

SEQ ID NO: 2563258 - RNA, 19 nt, Artificial Sequence
  Description of Artificial Sequence: Synthetic oligonucleotide
  Sense strand starting at position 2829 of SEQ ID NO: 1888879
aaaguaauuggcgaaugau

SEQ ID NO: 2563259 - RNA, 19 nt, Artificial Sequence
  Description of Artificial Sequence: Synthetic oligonucleotide
  Antisense strand to SEQ ID NO: 2563258
aucauucgccaauuacuuu

SEQ ID NO: 2563260 - RNA, 19 nt, Artificial Sequence
  Description of Artificial Sequence: Synthetic oligonucleotide
  Sense strand starting at position 2841 of SEQ ID NO: 1888879
gaaugauggcuauguggaa

SEQ ID NO: 2563261 - RNA, 19 nt, Artificial Sequence
  Description of Artificial Sequence: Synthetic oligonucleotide
  Antisense strand to SEQ ID NO: 2563260
uuccacauagccaucauuc

SEQ ID NO: 2563262 - RNA, 19 nt, Artificial Sequence
  Description of Artificial Sequence: Synthetic oligonucleotide
  Sense strand starting at position 2879 of SEQ ID NO: 1888879
aguacaguccuauaaacuu

SEQ ID NO: 2563263 - RNA, 19 nt, Artificial Sequence
  Description of Artificial Sequence: Synthetic oligonucleotide
  Antisense strand to SEQ ID NO: 2563262
aaguuuauaggacuguacu

SEQ ID NO: 2563264 - RNA, 19 nt, Artificial Sequence
  Description of Artificial Sequence: Synthetic oligonucleotide
  Sense strand starting at position 2909 of SEQ ID NO: 1888879
agcccaguucuacauaaga

SEQ ID NO: 2563265 - RNA, 19 nt, Artificial Sequence
  Description of Artificial Sequence: Synthetic oligonucleotide
  Antisense strand to SEQ ID NO: 2563264
ucuuauguagaacugggcu

SEQ ID NO: 2563266 - RNA, 19 nt, Artificial Sequence
  Description of Artificial Sequence: Synthetic oligonucleotide
  Sense strand starting at position 2932 of SEQ ID NO: 1888879
ugaguccuccuaugacauc

SEQ ID NO: 2563267 - RNA, 19 nt, Artificial Sequence
  Description of Artificial Sequence: Synthetic oligonucleotide
  Antisense strand to SEQ ID NO: 2563266
gaugucauaggaggacuca

SEQ ID NO: 2563268 - RNA, 19 nt, Artificial Sequence
  Description of Artificial Sequence: Synthetic oligonucleotide
  Sense strand starting at position 2964 of SEQ ID NO: 1888879
gcuugaauacuuuacguga

SEQ ID NO: 2563269 - RNA, 19 nt, Artificial Sequence
  Description of Artificial Sequence: Synthetic oligonucleotide
  Antisense strand to SEQ ID NO: 2563268
ucacguaaaguauucaagc

SEQ ID NO: 2563270 - RNA, 19 nt, Artificial Sequence
  Description of Artificial Sequence: Synthetic oligonucleotide
  Sense strand starting at position 3103 of SEQ ID NO: 1888879
ucugaauccugucuucuag

SEQ ID NO: 2563271 - RNA, 19 nt, Artificial Sequence
  Description of Artificial Sequence: Synthetic oligonucleotide
  Antisense strand to SEQ ID NO: 2563270
cuagaagacaggauucaga

SEQ ID NO: 2563272 - RNA, 19 nt, Artificial Sequence
  Description of Artificial Sequence: Synthetic oligonucleotide
  Sense strand starting at position 3438 of SEQ ID NO: 1888879
cccuuuccagaguaaguuu

SEQ ID NO: 2563273 - RNA, 19 nt, Artificial Sequence
  Description of Artificial Sequence: Synthetic oligonucleotide
  Antisense strand to SEQ ID NO: 2563272
aaacuuacucuggaaaggg

SEQ ID NO: 2563274 - RNA, 19 nt, Artificial Sequence
  Description of Artificial Sequence: Synthetic oligonucleotide
  Sense strand starting at position 3446 of SEQ ID NO: 1888879
agaguaaguuugcugacca

SEQ ID NO: 2563275 - RNA, 19 nt, Artificial Sequence
  Description of Artificial Sequence: Synthetic oligonucleotide
  Antisense strand to SEQ ID NO: 2563274
uggucagcaaacuuacucu

SEQ ID NO: 2563276 - RNA, 19 nt, Artificial Sequence
  Description of Artificial Sequence: Synthetic oligonucleotide
  Sense strand starting at position 3450 of SEQ ID NO: 1888879
uaaguuugcugaccacaga

SEQ ID NO: 2563277 - RNA, 19 nt, Artificial Sequence
  Description of Artificial Sequence: Synthetic oligonucleotide
  Antisense strand to SEQ ID NO: 2563276
ucuguggucagcaaacuua

SEQ ID NO: 2563278 - RNA, 19 nt, Artificial Sequence
  Description of Artificial Sequence: Synthetic oligonucleotide
  Sense strand starting at position 3451 of SEQ ID NO: 1888879
aaguuugcugaccacagau

SEQ ID NO: 2563279 - RNA, 19 nt, Artificial Sequence
  Description of Artificial Sequence: Synthetic oligonucleotide
  Antisense strand to SEQ ID NO: 2563278
aucuguggucagcaaacuu

SEQ ID NO: 2563280 - RNA, 19 nt, Artificial Sequence
  Description of Artificial Sequence: Synthetic oligonucleotide
  Sense strand starting at position 3493 of SEQ ID NO: 1888879
ucaacaggacucugcuuaa

SEQ ID NO: 2563281 - RNA, 19 nt, Artificial Sequence
  Description of Artificial Sequence: Synthetic oligonucleotide
  Antisense strand to SEQ ID NO: 2563280
uuaagcagaguccuguuga

SEQ ID NO: 2563282 - RNA, 19 nt, Artificial Sequence
  Description of Artificial Sequence: Synthetic oligonucleotide
  Sense strand starting at position 3496 of SEQ ID NO: 1888879
acaggacucugcuuaagua

SEQ ID NO: 2563283 - RNA, 19 nt, Artificial Sequence
  Description of Artificial Sequence: Synthetic oligonucleotide
  Antisense strand to SEQ ID NO: 2563282
uacuuaagcagaguccugu

SEQ ID NO: 2563284 - RNA, 19 nt, Artificial Sequence
  Description of Artificial Sequence: Synthetic oligonucleotide
  Sense strand starting at position 3497 of SEQ ID NO: 1888879
caggacucugcuuaaguaa

SEQ ID NO: 2563285 - RNA, 19 nt, Artificial Sequence
  Description of Artificial Sequence: Synthetic oligonucleotide
  Antisense strand to SEQ ID NO: 2563284
uuacuuaagcagaguccug

SEQ ID NO: 2563286 - RNA, 19 nt, Artificial Sequence
  Description of Artificial Sequence: Synthetic oligonucleotide
  Sense strand starting at position 3646 of SEQ ID NO: 1888879
cauggucuccaagggauaa

SEQ ID NO: 2563287 - RNA, 19 nt, Artificial Sequence
  Description of Artificial Sequence: Synthetic oligonucleotide
  Antisense strand to SEQ ID NO: 2563286
uuaucccuuggagaccaug

SEQ ID NO: 2563288 - RNA, 19 nt, Artificial Sequence
  Description of Artificial Sequence: Synthetic oligonucleotide
  Sense strand starting at position 3743 of SEQ ID NO: 1888879
guuaaagaccuugagcaca

SEQ ID NO: 2563289 - RNA, 19 nt, Artificial Sequence
  Description of Artificial Sequence: Synthetic oligonucleotide
  Antisense strand to SEQ ID NO: 2563288
ugugcucaaggucuuuaac

SEQ ID NO: 2563290 - RNA, 19 nt, Artificial Sequence
  Description of Artificial Sequence: Synthetic oligonucleotide
  Sense strand starting at position 3828 of SEQ ID NO: 1888879
ggucgauugacaggguaaa

SEQ ID NO: 2563291 - RNA, 19 nt, Artificial Sequence
  Description of Artificial Sequence: Synthetic oligonucleotide
  Antisense strand to SEQ ID NO: 2563290
uuuacccugucaaucgacc

SEQ ID NO: 2563292 - RNA, 19 nt, Artificial Sequence
  Description of Artificial Sequence: Synthetic oligonucleotide
  Sense strand starting at position 3923 of SEQ ID NO: 1888879
guuugagaaguucagguca

SEQ ID NO: 2563293 - RNA, 19 nt, Artificial Sequence
  Description of Artificial Sequence: Synthetic oligonucleotide
  Antisense strand to SEQ ID NO: 2563292
ugaccugaacuucucaaac

SEQ ID NO: 2563294 - RNA, 19 nt, Artificial Sequence
  Description of Artificial Sequence: Synthetic oligonucleotide
  Sense strand starting at position 3936 of SEQ ID NO: 1888879
aggucauucuggucacuca

SEQ ID NO: 2563295 - RNA, 19 nt, Artificial Sequence
  Description of Artificial Sequence: Synthetic oligonucleotide
  Antisense strand to SEQ ID NO: 2563294
ugagugaccagaaugaccu

SEQ ID NO: 2563296 - RNA, 19 nt, Artificial Sequence
  Description of Artificial Sequence: Synthetic oligonucleotide
  Sense strand starting at position 57 of SEQ ID NO: 1888880
aaaggaugaucauagaaag

SEQ ID NO: 2563297 - RNA, 19 nt, Artificial Sequence
  Description of Artificial Sequence: Synthetic oligonucleotide
  Antisense strand to SEQ ID NO: 2563296
cuuucuaugaucauccuuu

SEQ ID NO: 2563298 - RNA, 19 nt, Artificial Sequence
  Description of Artificial Sequence: Synthetic oligonucleotide
  Sense strand starting at position 76 of SEQ ID NO: 1888880
auuucuuugaaguguuguu

SEQ ID NO: 2563299 - RNA, 19 nt, Artificial Sequence
  Description of Artificial Sequence: Synthetic oligonucleotide
  Antisense strand to SEQ ID NO: 2563298
aacaacacuucaaagaaau

SEQ ID NO: 2563300 - RNA, 19 nt, Artificial Sequence
  Description of Artificial Sequence: Synthetic oligonucleotide
  Sense strand starting at position 144 of SEQ ID NO: 1888880
cugauauguguuggaacaa

SEQ ID NO: 2563301 - RNA, 19 nt, Artificial Sequence
  Description of Artificial Sequence: Synthetic oligonucleotide
  Antisense strand to SEQ ID NO: 2563300
uuguuccaacacauaucag

SEQ ID NO: 2563302 - RNA, 19 nt, Artificial Sequence
  Description of Artificial Sequence: Synthetic oligonucleotide
  Sense strand starting at position 298 of SEQ ID NO: 1888880
agggcaacauccuugaaau

SEQ ID NO: 2563303 - RNA, 19 nt, Artificial Sequence
  Description of Artificial Sequence: Synthetic oligonucleotide
  Antisense strand to SEQ ID NO: 2563302
auuucaaggauguugcccu

SEQ ID NO: 2563304 - RNA, 19 nt, Artificial Sequence
  Description of Artificial Sequence: Synthetic oligonucleotide
  Sense strand starting at position 299 of SEQ ID NO: 1888880
gggcaacauccuugaaaug

SEQ ID NO: 2563305 - RNA, 19 nt, Artificial Sequence
  Description of Artificial Sequence: Synthetic oligonucleotide
  Antisense strand to SEQ ID NO: 2563304
cauuucaaggauguugccc

SEQ ID NO: 2563306 - RNA, 19 nt, Artificial Sequence
  Description of Artificial Sequence: Synthetic oligonucleotide
  Sense strand starting at position 331 of SEQ ID NO: 1888880
ugacaaagccaguaugcaa

SEQ ID NO: 2563307 - RNA, 19 nt, Artificial Sequence
  Description of Artificial Sequence: Synthetic oligonucleotide
  Antisense strand to SEQ ID NO: 2563306
uugcauacuggcuuuguca

SEQ ID NO: 2563308 - RNA, 19 nt, Artificial Sequence
  Description of Artificial Sequence: Synthetic oligonucleotide
  Sense strand starting at position 673 of SEQ ID NO: 1888880
agauuauaauaugcuggua

SEQ ID NO: 2563309 - RNA, 19 nt, Artificial Sequence
  Description of Artificial Sequence: Synthetic oligonucleotide
  Antisense strand to SEQ ID NO: 2563308
uaccagcauauuauaaucu

SEQ ID NO: 2563310 - RNA, 19 nt, Artificial Sequence
  Description of Artificial Sequence: Synthetic oligonucleotide
  Sense strand starting at position 717 of SEQ ID NO: 1888880
uuguaaggauagucuauga

SEQ ID NO: 2563311 - RNA, 19 nt, Artificial Sequence
  Description of Artificial Sequence: Synthetic oligonucleotide
  Antisense strand to SEQ ID NO: 2563310
ucauagacuauccuuacaa

SEQ ID NO: 2563312 - RNA, 19 nt, Artificial Sequence
  Description of Artificial Sequence: Synthetic oligonucleotide
  Sense strand starting at position 721 of SEQ ID NO: 1888880
aaggauagucuaugauguc

SEQ ID NO: 2563313 - RNA, 19 nt, Artificial Sequence
  Description of Artificial Sequence: Synthetic oligonucleotide
  Antisense strand to SEQ ID NO: 2563312
gacaucauagacuauccuu

SEQ ID NO: 2563314 - RNA, 19 nt, Artificial Sequence
  Description of Artificial Sequence: Synthetic oligonucleotide
  Sense strand starting at position 728 of SEQ ID NO: 1888880
gucuaugaugucuagugau

SEQ ID NO: 2563315 - RNA, 19 nt, Artificial Sequence
  Description of Artificial Sequence: Synthetic oligonucleotide
  Antisense strand to SEQ ID NO: 2563314
aucacuagacaucauagac

SEQ ID NO: 2563316 - RNA, 19 nt, Artificial Sequence
  Description of Artificial Sequence: Synthetic oligonucleotide
  Sense strand starting at position 1113 of SEQ ID NO: 1888880
uccuguaagcacugacaaa

SEQ ID NO: 2563317 - RNA, 19 nt, Artificial Sequence
  Description of Artificial Sequence: Synthetic oligonucleotide
  Antisense strand to SEQ ID NO: 2563316
uuugucagugcuuacagga

SEQ ID NO: 2563318 - RNA, 19 nt, Artificial Sequence
  Description of Artificial Sequence: Synthetic oligonucleotide
  Sense strand starting at position 1333 of SEQ ID NO: 1888880
aauauugagcuccagguaa

SEQ ID NO: 2563319 - RNA, 19 nt, Artificial Sequence
  Description of Artificial Sequence: Synthetic oligonucleotide
  Antisense strand to SEQ ID NO: 2563318
uuaccuggagcucaauauu

SEQ ID NO: 2563320 - RNA, 19 nt, Artificial Sequence
  Description of Artificial Sequence: Synthetic oligonucleotide
  Sense strand starting at position 1463 of SEQ ID NO: 1888880
agacgugugacugaacaag

SEQ ID NO: 2563321 - RNA, 19 nt, Artificial Sequence
  Description of Artificial Sequence: Synthetic oligonucleotide
  Antisense strand to SEQ ID NO: 2563320
cuuguucagucacacgucu

SEQ ID NO: 2563322 - RNA, 19 nt, Artificial Sequence
  Description of Artificial Sequence: Synthetic oligonucleotide
  Sense strand starting at position 1520 of SEQ ID NO: 1888880
agguguucucuugaaauuc

SEQ ID NO: 2563323 - RNA, 19 nt, Artificial Sequence
  Description of Artificial Sequence: Synthetic oligonucleotide
  Antisense strand to SEQ ID NO: 2563322
gaauuucaagagaacaccu

SEQ ID NO: 2563324 - RNA, 19 nt, Artificial Sequence
  Description of Artificial Sequence: Synthetic oligonucleotide
  Sense strand starting at position 1544 of SEQ ID NO: 1888880
augucaguauaaguuugaa

SEQ ID NO: 2563325 - RNA, 19 nt, Artificial Sequence
  Description of Artificial Sequence: Synthetic oligonucleotide
  Antisense strand to SEQ ID NO: 2563324
uucaaacuuauacugacau

SEQ ID NO: 2563326 - RNA, 19 nt, Artificial Sequence
  Description of Artificial Sequence: Synthetic oligonucleotide
  Sense strand starting at position 1848 of SEQ ID NO: 1888880
aggagaagauacuaauaca

SEQ ID NO: 2563327 - RNA, 19 nt, Artificial Sequence
  Description of Artificial Sequence: Synthetic oligonucleotide
  Antisense strand to SEQ ID NO: 2563326
uguauuaguaucuucuccu

SEQ ID NO: 2563328 - RNA, 19 nt, Artificial Sequence
  Description of Artificial Sequence: Synthetic oligonucleotide
  Sense strand starting at position 1888 of SEQ ID NO: 1888880
uucuaaagaaacggugauu

SEQ ID NO: 2563329 - RNA, 19 nt, Artificial Sequence
  Description of Artificial Sequence: Synthetic oligonucleotide
  Antisense strand to SEQ ID NO: 2563328
aaucaccguuucuuuagaa

SEQ ID NO: 2563330 - RNA, 19 nt, Artificial Sequence
  Description of Artificial Sequence: Synthetic oligonucleotide
  Sense strand starting at position 2107 of SEQ ID NO: 1888880
uuuguuucugcagaaauug

SEQ ID NO: 2563331 - RNA, 19 nt, Artificial Sequence
  Description of Artificial Sequence: Synthetic oligonucleotide
  Antisense strand to SEQ ID NO: 2563330
caauuucugcagaaacaaa

SEQ ID NO: 2563332 - RNA, 19 nt, Artificial Sequence
  Description of Artificial Sequence: Synthetic oligonucleotide
  Sense strand starting at position 2117 of SEQ ID NO: 1888880
cagaaauugaggugauggu

SEQ ID NO: 2563333 - RNA, 19 nt, Artificial Sequence
  Description of Artificial Sequence: Synthetic oligonucleotide
  Antisense strand to SEQ ID NO: 2563332
accaucaccucaauuucug

SEQ ID NO: 2563334 - RNA, 19 nt, Artificial Sequence
  Description of Artificial Sequence: Synthetic oligonucleotide
  Sense strand starting at position 2124 of SEQ ID NO: 1888880
ugaggugauggucacauau

SEQ ID NO: 2563335 - RNA, 19 nt, Artificial Sequence
  Description of Artificial Sequence: Synthetic oligonucleotide
  Antisense strand to SEQ ID NO: 2563334
auaugugaccaucaccuca

SEQ ID NO: 2563336 - RNA, 19 nt, Artificial Sequence
  Description of Artificial Sequence: Synthetic oligonucleotide
  Sense strand starting at position 2151 of SEQ ID NO: 1888880
cucagucugguagaugaua

SEQ ID NO: 2563337 - RNA, 19 nt, Artificial Sequence
  Description of Artificial Sequence: Synthetic oligonucleotide
  Antisense strand to SEQ ID NO: 2563336
uaucaucuaccagacugag

SEQ ID NO: 2563338 - RNA, 19 nt, Artificial Sequence
  Description of Artificial Sequence: Synthetic oligonucleotide
  Sense strand starting at position 2203 of SEQ ID NO: 1888880
guacuaagacucuaggcuu

SEQ ID NO: 2563339 - RNA, 19 nt, Artificial Sequence
  Description of Artificial Sequence: Synthetic oligonucleotide
  Antisense strand to SEQ ID NO: 2563338
aagccuagagucuuaguac

SEQ ID NO: 2563340 - RNA, 19 nt, Artificial Sequence
  Description of Artificial Sequence: Synthetic oligonucleotide
  Sense strand starting at position 2209 of SEQ ID NO: 1888880
agacucuaggcuuaagcaa

SEQ ID NO: 2563341 - RNA, 19 nt, Artificial Sequence
  Description of Artificial Sequence: Synthetic oligonucleotide
  Antisense strand to SEQ ID NO: 2563340
uugcuuaagccuagagucu

SEQ ID NO: 2563342 - RNA, 19 nt, Artificial Sequence
  Description of Artificial Sequence: Synthetic oligonucleotide
  Sense strand starting at position 2231 of SEQ ID NO: 1888880
ugcucaaaucaagacaugu

SEQ ID NO: 2563343 - RNA, 19 nt, Artificial Sequence
  Description of Artificial Sequence: Synthetic oligonucleotide
  Antisense strand to SEQ ID NO: 2563342
acaugucuugauuugagca

SEQ ID NO: 2563344 - RNA, 19 nt, Artificial Sequence
  Description of Artificial Sequence: Synthetic oligonucleotide
  Sense strand starting at position 2239 of SEQ ID NO: 1888880
ucaagacauguuuaagcaa

SEQ ID NO: 2563345 - RNA, 19 nt, Artificial Sequence
  Description of Artificial Sequence: Synthetic oligonucleotide
  Antisense strand to SEQ ID NO: 2563344
uugcuuaaacaugucuuga

SEQ ID NO: 2563346 - RNA, 19 nt, Artificial Sequence
  Description of Artificial Sequence: Synthetic oligonucleotide
  Sense strand starting at position 2248 of SEQ ID NO: 1888880
guuuaagcaagugauaaga

SEQ ID NO: 2563347 - RNA, 19 nt, Artificial Sequence
  Description of Artificial Sequence: Synthetic oligonucleotide
  Antisense strand to SEQ ID NO: 2563346
ucuuaucacuugcuuaaac

SEQ ID NO: 2563348 - RNA, 19 nt, Artificial Sequence
  Description of Artificial Sequence: Synthetic oligonucleotide
  Sense strand starting at position 2434 of SEQ ID NO: 1888880
ugcugccagagucaugaaa

SEQ ID NO: 2563349 - RNA, 19 nt, Artificial Sequence
  Description of Artificial Sequence: Synthetic oligonucleotide
  Antisense strand to SEQ ID NO: 2563348
uuucaugacucuggcagca

SEQ ID NO: 2563350 - RNA, 19 nt, Artificial Sequence
  Description of Artificial Sequence: Synthetic oligonucleotide
  Sense strand starting at position 2519 of SEQ ID NO: 1888880
cuugcugagccucauaaau

SEQ ID NO: 2563351 - RNA, 19 nt, Artificial Sequence
  Description of Artificial Sequence: Synthetic oligonucleotide
  Antisense strand to SEQ ID NO: 2563350
auuuaugaggcucagcaag

SEQ ID NO: 2563352 - RNA, 19 nt, Artificial Sequence
  Description of Artificial Sequence: Synthetic oligonucleotide
  Sense strand starting at position 2621 of SEQ ID NO: 1888880
acagaacauuucuagagcu

SEQ ID NO: 2563353 - RNA, 19 nt, Artificial Sequence
  Description of Artificial Sequence: Synthetic oligonucleotide
  Antisense strand to SEQ ID NO: 2563352
agcucuagaaauguucugu

SEQ ID NO: 2563354 - RNA, 19 nt, Artificial Sequence
  Description of Artificial Sequence: Synthetic oligonucleotide
  Sense strand starting at position 2688 of SEQ ID NO: 1888880
gauauaaguguguagauag

SEQ ID NO: 2563355 - RNA, 19 nt, Artificial Sequence
  Description of Artificial Sequence: Synthetic oligonucleotide
  Antisense strand to SEQ ID NO: 2563354
cuaucuacacacuuauauc

SEQ ID NO: 2563356 - RNA, 19 nt, Artificial Sequence
  Description of Artificial Sequence: Synthetic oligonucleotide
  Sense strand starting at position 3063 of SEQ ID NO: 1888880
acaccauuagcaggcaaau

SEQ ID NO: 2563357 - RNA, 19 nt, Artificial Sequence
  Description of Artificial Sequence: Synthetic oligonucleotide
  Antisense strand to SEQ ID NO: 2563356
auuugccugcuaauggugu

SEQ ID NO: 2563358 - RNA, 19 nt, Artificial Sequence
  Description of Artificial Sequence: Synthetic oligonucleotide
  Sense strand starting at position 3223 of SEQ ID NO: 1888880
agucaauguguauaaugua

SEQ ID NO: 2563359 - RNA, 19 nt, Artificial Sequence
  Description of Artificial Sequence: Synthetic oligonucleotide
  Antisense strand to SEQ ID NO: 2563358
uacauuauacacauugacu

SEQ ID NO: 2563360 - RNA, 19 nt, Artificial Sequence
  Description of Artificial Sequence: Synthetic oligonucleotide
  Sense strand starting at position 3259 of SEQ ID NO: 1888880
guguaaugauuaccacaaa

SEQ ID NO: 2563361 - RNA, 19 nt, Artificial Sequence
  Description of Artificial Sequence: Synthetic oligonucleotide
  Antisense strand to SEQ ID NO: 2563360
uuugugguaaucauuacac

SEQ ID NO: 2563362 - RNA, 19 nt, Artificial Sequence
  Description of Artificial Sequence: Synthetic oligonucleotide
  Sense strand starting at position 3410 of SEQ ID NO: 1888880
gcaaacugaguuuaucaug

SEQ ID NO: 2563363 - RNA, 19 nt, Artificial Sequence
  Description of Artificial Sequence: Synthetic oligonucleotide
  Antisense strand to SEQ ID NO: 2563362
caugauaaacucaguuugc

SEQ ID NO: 2563364 - RNA, 19 nt, Artificial Sequence
  Description of Artificial Sequence: Synthetic oligonucleotide
  Sense strand starting at position 3535 of SEQ ID NO: 1888880
uugauuccgcuuuauaaau

SEQ ID NO: 2563365 - RNA, 19 nt, Artificial Sequence
  Description of Artificial Sequence: Synthetic oligonucleotide
  Antisense strand to SEQ ID NO: 2563364
auuuauaaagcggaaucaa

SEQ ID NO: 2563366 - RNA, 19 nt, Artificial Sequence
  Description of Artificial Sequence: Synthetic oligonucleotide
  Sense strand starting at position 3619 of SEQ ID NO: 1888880
auaugauaaugaccugcua

SEQ ID NO: 2563367 - RNA, 19 nt, Artificial Sequence
  Description of Artificial Sequence: Synthetic oligonucleotide
  Antisense strand to SEQ ID NO: 2563366
uagcaggucauuaucauau

SEQ ID NO: 2563368 - RNA, 19 nt, Artificial Sequence
  Description of Artificial Sequence: Synthetic oligonucleotide
  Sense strand starting at position 3697 of SEQ ID NO: 1888880
acuguucuaagagguaaga

SEQ ID NO: 2563369 - RNA, 19 nt, Artificial Sequence
  Description of Artificial Sequence: Synthetic oligonucleotide
  Antisense strand to SEQ ID NO: 2563368
ucuuaccucuuagaacagu

SEQ ID NO: 2563370 - RNA, 19 nt, Artificial Sequence
  Description of Artificial Sequence: Synthetic oligonucleotide
  Sense strand starting at position 3797 of SEQ ID NO: 1888880
agcaaaguccagugauaaa

SEQ ID NO: 2563371 - RNA, 19 nt, Artificial Sequence
  Description of Artificial Sequence: Synthetic oligonucleotide
  Antisense strand to SEQ ID NO: 2563370
uuuaucacuggacuuugcu

SEQ ID NO: 2563372 - RNA, 19 nt, Artificial Sequence
  Description of Artificial Sequence: Synthetic oligonucleotide
  Sense strand starting at position 3879 of SEQ ID NO: 1888880
uggaguaucagggaaugcu

SEQ ID NO: 2563373 - RNA, 19 nt, Artificial Sequence
  Description of Artificial Sequence: Synthetic oligonucleotide
  Antisense strand to SEQ ID NO: 2563372
agcauucccugauacucca

SEQ ID NO: 2563374 - RNA, 19 nt, Artificial Sequence
  Description of Artificial Sequence: Synthetic oligonucleotide
  Sense strand starting at position 3889 of SEQ ID NO: 1888880
gggaaugcucuuuggagga

SEQ ID NO: 2563375 - RNA, 19 nt, Artificial Sequence
  Description of Artificial Sequence: Synthetic oligonucleotide
  Antisense strand to SEQ ID NO: 2563374
uccuccaaagagcauuccc

SEQ ID NO: 2563376 - RNA, 19 nt, Artificial Sequence
  Description of Artificial Sequence: Synthetic oligonucleotide
  Sense strand starting at position 79 of SEQ ID NO: 1888881
ccagauauggcucauucuc

SEQ ID NO: 2563377 - RNA, 19 nt, Artificial Sequence
  Description of Artificial Sequence: Synthetic oligonucleotide
  Antisense strand to SEQ ID NO: 2563376
gagaaugagccauaucugg

SEQ ID NO: 2563378 - RNA, 19 nt, Artificial Sequence
  Description of Artificial Sequence: Synthetic oligonucleotide
  Sense strand starting at position 135 of SEQ ID NO: 1888881
guagguagguacucaacaa

SEQ ID NO: 2563379 - RNA, 19 nt, Artificial Sequence
  Description of Artificial Sequence: Synthetic oligonucleotide
  Antisense strand to SEQ ID NO: 2563378
uuguugaguaccuaccuac

SEQ ID NO: 2563380 - RNA, 19 nt, Artificial Sequence
  Description of Artificial Sequence: Synthetic oligonucleotide
  Sense strand starting at position 303 of SEQ ID NO: 1888881
aggagauuccaguaccugu

SEQ ID NO: 2563381 - RNA, 19 nt, Artificial Sequence
  Description of Artificial Sequence: Synthetic oligonucleotide
  Antisense strand to SEQ ID NO: 2563380
acagguacuggaaucuccu

SEQ ID NO: 2563382 - RNA, 19 nt, Artificial Sequence
  Description of Artificial Sequence: Synthetic oligonucleotide
  Sense strand starting at position 397 of SEQ ID NO: 1888881
gagagaaguugcuucgaca

SEQ ID NO: 2563383 - RNA, 19 nt, Artificial Sequence
  Description of Artificial Sequence: Synthetic oligonucleotide
  Antisense strand to SEQ ID NO: 2563382
ugucgaagcaacuucucuc

SEQ ID NO: 2563384 - RNA, 19 nt, Artificial Sequence
  Description of Artificial Sequence: Synthetic oligonucleotide
  Sense strand starting at position 858 of SEQ ID NO: 1888881
cacacuuauggguggguua

SEQ ID NO: 2563385 - RNA, 19 nt, Artificial Sequence
  Description of Artificial Sequence: Synthetic oligonucleotide
  Antisense strand to SEQ ID NO: 2563384
uaacccacccauaagugug

SEQ ID NO: 2563386 - RNA, 19 nt, Artificial Sequence
  Description of Artificial Sequence: Synthetic oligonucleotide
  Sense strand starting at position 859 of SEQ ID NO: 1888881
acacuuauggguggguuaa

SEQ ID NO: 2563387 - RNA, 19 nt, Artificial Sequence
  Description of Artificial Sequence: Synthetic oligonucleotide
  Antisense strand to SEQ ID NO: 2563386
uuaacccacccauaagugu

SEQ ID NO: 2563388 - RNA, 19 nt, Artificial Sequence
  Description of Artificial Sequence: Synthetic oligonucleotide
  Sense strand starting at position 860 of SEQ ID NO: 1888881
cacuuauggguggguuaag

SEQ ID NO: 2563389 - RNA, 19 nt, Artificial Sequence
  Description of Artificial Sequence: Synthetic oligonucleotide
  Antisense strand to SEQ ID NO: 2563388
cuuaacccacccauaagug

SEQ ID NO: 2563390 - RNA, 19 nt, Artificial Sequence
  Description of Artificial Sequence: Synthetic oligonucleotide
  Sense strand starting at position 1014 of SEQ ID NO: 1888881
ucauuucucuguguccaau

SEQ ID NO: 2563391 - RNA, 19 nt, Artificial Sequence
  Description of Artificial Sequence: Synthetic oligonucleotide
  Antisense strand to SEQ ID NO: 2563390
auuggacacagagaaauga

SEQ ID NO: 2563392 - RNA, 19 nt, Artificial Sequence
  Description of Artificial Sequence: Synthetic oligonucleotide
  Sense strand starting at position 1350 of SEQ ID NO: 1888881
gaugccucuccucagggau

SEQ ID NO: 2563393 - RNA, 19 nt, Artificial Sequence
  Description of Artificial Sequence: Synthetic oligonucleotide
  Antisense strand to SEQ ID NO: 2563392
aucccugaggagaggcauc

SEQ ID NO: 2563394 - RNA, 19 nt, Artificial Sequence
  Description of Artificial Sequence: Synthetic oligonucleotide
  Sense strand starting at position 1356 of SEQ ID NO: 1888881
ucuccucagggauagcaua

SEQ ID NO: 2563395 - RNA, 19 nt, Artificial Sequence
  Description of Artificial Sequence: Synthetic oligonucleotide
  Antisense strand to SEQ ID NO: 2563394
uaugcuaucccugaggaga

SEQ ID NO: 2563396 - RNA, 19 nt, Artificial Sequence
  Description of Artificial Sequence: Synthetic oligonucleotide
  Sense strand starting at position 1363 of SEQ ID NO: 1888881
agggauagcauauguauuc

SEQ ID NO: 2563397 - RNA, 19 nt, Artificial Sequence
  Description of Artificial Sequence: Synthetic oligonucleotide
  Antisense strand to SEQ ID NO: 2563396
gaauacauaugcuaucccu

SEQ ID NO: 2563398 - RNA, 19 nt, Artificial Sequence
  Description of Artificial Sequence: Synthetic oligonucleotide
  Sense strand starting at position 1440 of SEQ ID NO: 1888881
gaaagauaugaguggcauc

SEQ ID NO: 2563399 - RNA, 19 nt, Artificial Sequence
  Description of Artificial Sequence: Synthetic oligonucleotide
  Antisense strand to SEQ ID NO: 2563398
gaugccacucauaucuuuc

SEQ ID NO: 2563400 - RNA, 19 nt, Artificial Sequence
  Description of Artificial Sequence: Synthetic oligonucleotide
  Sense strand starting at position 1484 of SEQ ID NO: 1888881
gcaggugcuggauguauuu

SEQ ID NO: 2563401 - RNA, 19 nt, Artificial Sequence
  Description of Artificial Sequence: Synthetic oligonucleotide
  Antisense strand to SEQ ID NO: 2563400
aaauacauccagcaccugc

SEQ ID NO: 2563402 - RNA, 19 nt, Artificial Sequence
  Description of Artificial Sequence: Synthetic oligonucleotide
  Sense strand starting at position 1696 of SEQ ID NO: 1888881
cauaguaagcugggaguaa

SEQ ID NO: 2563403 - RNA, 19 nt, Artificial Sequence
  Description of Artificial Sequence: Synthetic oligonucleotide
  Antisense strand to SEQ ID NO: 2563402
uuacucccagcuuacuaug

SEQ ID NO: 2563404 - RNA, 19 nt, Artificial Sequence
  Description of Artificial Sequence: Synthetic oligonucleotide
  Sense strand starting at position 1731 of SEQ ID NO: 1888881
cucaaagagguguaagcuu

SEQ ID NO: 2563405 - RNA, 19 nt, Artificial Sequence
  Description of Artificial Sequence: Synthetic oligonucleotide
  Antisense strand to SEQ ID NO: 2563404
aagcuuacaccucuuugag

SEQ ID NO: 2563406 - RNA, 19 nt, Artificial Sequence
  Description of Artificial Sequence: Synthetic oligonucleotide
  Sense strand starting at position 1817 of SEQ ID NO: 1888881
cuuauuuaccguuguaucu

SEQ ID NO: 2563407 - RNA, 19 nt, Artificial Sequence
  Description of Artificial Sequence: Synthetic oligonucleotide
  Antisense strand to SEQ ID NO: 2563406
agauacaacgguaaauaag

SEQ ID NO: 2563408 - RNA, 19 nt, Artificial Sequence
  Description of Artificial Sequence: Synthetic oligonucleotide
  Sense strand starting at position 2549 of SEQ ID NO: 1888881
ugugaauguucagugagag

SEQ ID NO: 2563409 - RNA, 19 nt, Artificial Sequence
  Description of Artificial Sequence: Synthetic oligonucleotide
  Antisense strand to SEQ ID NO: 2563408
cucucacugaacauucaca

SEQ ID NO: 2563410 - RNA, 19 nt, Artificial Sequence
  Description of Artificial Sequence: Synthetic oligonucleotide
  Sense strand starting at position 2550 of SEQ ID NO: 1888881
gugaauguucagugagagg

SEQ ID NO: 2563411 - RNA, 19 nt, Artificial Sequence
  Description of Artificial Sequence: Synthetic oligonucleotide
  Antisense strand to SEQ ID NO: 2563410
ccucucacugaacauucac

SEQ ID NO: 2563412 - RNA, 19 nt, Artificial Sequence
  Description of Artificial Sequence: Synthetic oligonucleotide
  Sense strand starting at position 2593 of SEQ ID NO: 1888881
cuuacuugucaugauauag

SEQ ID NO: 2563413 - RNA, 19 nt, Artificial Sequence
  Description of Artificial Sequence: Synthetic oligonucleotide
  Antisense strand to SEQ ID NO: 2563412
cuauaucaugacaaguaag

SEQ ID NO: 2563414 - RNA, 19 nt, Artificial Sequence
  Description of Artificial Sequence: Synthetic oligonucleotide
  Sense strand starting at position 2618 of SEQ ID NO: 1888881
agagaacaguucuugagcu

SEQ ID NO: 2563415 - RNA, 19 nt, Artificial Sequence
  Description of Artificial Sequence: Synthetic oligonucleotide
  Antisense strand to SEQ ID NO: 2563414
agcucaagaacuguucucu

SEQ ID NO: 2563416 - RNA, 19 nt, Artificial Sequence
  Description of Artificial Sequence: Synthetic oligonucleotide
  Sense strand starting at position 2620 of SEQ ID NO: 1888881
agaacaguucuugagcuuu

SEQ ID NO: 2563417 - RNA, 19 nt, Artificial Sequence
  Description of Artificial Sequence: Synthetic oligonucleotide
  Antisense strand to SEQ ID NO: 2563416
aaagcucaagaacuguucu

SEQ ID NO: 2563418 - RNA, 19 nt, Artificial Sequence
  Description of Artificial Sequence: Synthetic oligonucleotide
  Sense strand starting at position 2631 of SEQ ID NO: 1888881
ugagcuuugcauuaaagau

SEQ ID NO: 2563419 - RNA, 19 nt, Artificial Sequence
  Description of Artificial Sequence: Synthetic oligonucleotide
  Antisense strand to SEQ ID NO: 2563418
aucuuuaaugcaaagcuca

SEQ ID NO: 2563420 - RNA, 19 nt, Artificial Sequence
  Description of Artificial Sequence: Synthetic oligonucleotide
  Sense strand starting at position 2761 of SEQ ID NO: 1888881
ugaauauaacgccaaagcu

SEQ ID NO: 2563421 - RNA, 19 nt, Artificial Sequence
  Description of Artificial Sequence: Synthetic oligonucleotide
  Antisense strand to SEQ ID NO: 2563420
agcuuuggcguuauauuca

SEQ ID NO: 2563422 - RNA, 19 nt, Artificial Sequence
  Description of Artificial Sequence: Synthetic oligonucleotide
  Sense strand starting at position 2836 of SEQ ID NO: 1888881
acaguuguucucuaacaug

SEQ ID NO: 2563423 - RNA, 19 nt, Artificial Sequence
  Description of Artificial Sequence: Synthetic oligonucleotide
  Antisense strand to SEQ ID NO: 2563422
cauguuagagaacaacugu

SEQ ID NO: 2563424 - RNA, 19 nt, Artificial Sequence
  Description of Artificial Sequence: Synthetic oligonucleotide
  Sense strand starting at position 2854 of SEQ ID NO: 1888881
gcaccagaaucaucugaag

SEQ ID NO: 2563425 - RNA, 19 nt, Artificial Sequence
  Description of Artificial Sequence: Synthetic oligonucleotide
  Antisense strand to SEQ ID NO: 2563424
cuucagaugauucuggugc

SEQ ID NO: 2563426 - RNA, 19 nt, Artificial Sequence
  Description of Artificial Sequence: Synthetic oligonucleotide
  Sense strand starting at position 2865 of SEQ ID NO: 1888881
aucugaagaccuggguaau

SEQ ID NO: 2563427 - RNA, 19 nt, Artificial Sequence
  Description of Artificial Sequence: Synthetic oligonucleotide
  Antisense strand to SEQ ID NO: 2563426
auuacccaggucuucagau

SEQ ID NO: 2563428 - RNA, 19 nt, Artificial Sequence
  Description of Artificial Sequence: Synthetic oligonucleotide
  Sense strand starting at position 2866 of SEQ ID NO: 1888881
ucugaagaccuggguaaua

SEQ ID NO: 2563429 - RNA, 19 nt, Artificial Sequence
  Description of Artificial Sequence: Synthetic oligonucleotide
  Antisense strand to SEQ ID NO: 2563428
uauuacccaggucuucaga

SEQ ID NO: 2563430 - RNA, 19 nt, Artificial Sequence
  Description of Artificial Sequence: Synthetic oligonucleotide
  Sense strand starting at position 2877 of SEQ ID NO: 1888881
ggguaauauacagguuaca

SEQ ID NO: 2563431 - RNA, 19 nt, Artificial Sequence
  Description of Artificial Sequence: Synthetic oligonucleotide
  Antisense strand to SEQ ID NO: 2563430
uguaaccuguauauuaccc

SEQ ID NO: 2563432 - RNA, 19 nt, Artificial Sequence
  Description of Artificial Sequence: Synthetic oligonucleotide
  Sense strand starting at position 2992 of SEQ ID NO: 1888881
cugggagaaucacuaaugu

SEQ ID NO: 2563433 - RNA, 19 nt, Artificial Sequence
  Description of Artificial Sequence: Synthetic oligonucleotide
  Antisense strand to SEQ ID NO: 2563432
acauuagugauucucccag

SEQ ID NO: 2563434 - RNA, 19 nt, Artificial Sequence
  Description of Artificial Sequence: Synthetic oligonucleotide
  Sense strand starting at position 3280 of SEQ ID NO: 1888881
gugaaacuccugcaugcaa

SEQ ID NO: 2563435 - RNA, 19 nt, Artificial Sequence
  Description of Artificial Sequence: Synthetic oligonucleotide
  Antisense strand to SEQ ID NO: 2563434
uugcaugcaggaguuucac

SEQ ID NO: 2563436 - RNA, 19 nt, Artificial Sequence
  Description of Artificial Sequence: Synthetic oligonucleotide
  Sense strand starting at position 3311 of SEQ ID NO: 1888881
agagaagagguccgaguau

SEQ ID NO: 2563437 - RNA, 19 nt, Artificial Sequence
  Description of Artificial Sequence: Synthetic oligonucleotide
  Antisense strand to SEQ ID NO: 2563436
auacucggaccucuucucu

SEQ ID NO: 2563438 - RNA, 19 nt, Artificial Sequence
  Description of Artificial Sequence: Synthetic oligonucleotide
  Sense strand starting at position 3323 of SEQ ID NO: 1888881
cgaguaucugugaguguga

SEQ ID NO: 2563439 - RNA, 19 nt, Artificial Sequence
  Description of Artificial Sequence: Synthetic oligonucleotide
  Antisense strand to SEQ ID NO: 2563438
ucacacucacagauacucg

SEQ ID NO: 2563440 - RNA, 19 nt, Artificial Sequence
  Description of Artificial Sequence: Synthetic oligonucleotide
  Sense strand starting at position 3418 of SEQ ID NO: 1888881
ucccuaggucaacaaaguu

SEQ ID NO: 2563441 - RNA, 19 nt, Artificial Sequence
  Description of Artificial Sequence: Synthetic oligonucleotide
  Antisense strand to SEQ ID NO: 2563440
aacuuuguugaccuaggga

SEQ ID NO: 2563442 - RNA, 19 nt, Artificial Sequence
  Description of Artificial Sequence: Synthetic oligonucleotide
  Sense strand starting at position 3754 of SEQ ID NO: 1888881
auauacgaguauuugugua

SEQ ID NO: 2563443 - RNA, 19 nt, Artificial Sequence
  Description of Artificial Sequence: Synthetic oligonucleotide
  Antisense strand to SEQ ID NO: 2563442
uacacaaauacucguauau

SEQ ID NO: 2563444 - RNA, 19 nt, Artificial Sequence
  Description of Artificial Sequence: Synthetic oligonucleotide
  Sense strand starting at position 3756 of SEQ ID NO: 1888881
auacgaguauuuguguauc

SEQ ID NO: 2563445 - RNA, 19 nt, Artificial Sequence
  Description of Artificial Sequence: Synthetic oligonucleotide
  Antisense strand to SEQ ID NO: 2563444
gauacacaaauacucguau

SEQ ID NO: 2563446 - RNA, 19 nt, Artificial Sequence
  Description of Artificial Sequence: Synthetic oligonucleotide
  Sense strand starting at position 3758 of SEQ ID NO: 1888881
acgaguauuuguguaucug

SEQ ID NO: 2563447 - RNA, 19 nt, Artificial Sequence
  Description of Artificial Sequence: Synthetic oligonucleotide
  Antisense strand to SEQ ID NO: 2563446
cagauacacaaauacucgu

SEQ ID NO: 2563448 - RNA, 19 nt, Artificial Sequence
  Description of Artificial Sequence: Synthetic oligonucleotide
  Sense strand starting at position 3759 of SEQ ID NO: 1888881
cgaguauuuguguaucugu

SEQ ID NO: 2563449 - RNA, 19 nt, Artificial Sequence
  Description of Artificial Sequence: Synthetic oligonucleotide
  Antisense strand to SEQ ID NO: 2563448
acagauacacaaauacucg

SEQ ID NO: 2563450 - RNA, 19 nt, Artificial Sequence
  Description of Artificial Sequence: Synthetic oligonucleotide
  Sense strand starting at position 3787 of SEQ ID NO: 1888881
agagaacauuaacaaggaa

SEQ ID NO: 2563451 - RNA, 19 nt, Artificial Sequence
  Description of Artificial Sequence: Synthetic oligonucleotide
  Antisense strand to SEQ ID NO: 2563450
uuccuuguuaauguucucu

SEQ ID NO: 2563452 - RNA, 19 nt, Artificial Sequence
  Description of Artificial Sequence: Synthetic oligonucleotide
  Sense strand starting at position 3835 of SEQ ID NO: 1888881
gaagaaugccgagacagcu

SEQ ID NO: 2563453 - RNA, 19 nt, Artificial Sequence
  Description of Artificial Sequence: Synthetic oligonucleotide
  Antisense strand to SEQ ID NO: 2563452
agcugucucggcauucuuc

SEQ ID NO: 2563454 - RNA, 19 nt, Artificial Sequence
  Description of Artificial Sequence: Synthetic oligonucleotide
  Sense strand starting at position 3915 of SEQ ID NO: 1888881
uuaccugaucagugggacu

SEQ ID NO: 2563455 - RNA, 19 nt, Artificial Sequence
  Description of Artificial Sequence: Synthetic oligonucleotide
  Antisense strand to SEQ ID NO: 2563454
agucccacugaucagguaa

SEQ ID NO: 2563456 - RNA, 19 nt, Artificial Sequence
  Description of Artificial Sequence: Synthetic oligonucleotide
  Sense strand starting at position 30 of SEQ ID NO: 1888882
caacguagucagcacuaga

SEQ ID NO: 2563457 - RNA, 19 nt, Artificial Sequence
  Description of Artificial Sequence: Synthetic oligonucleotide
  Antisense strand to SEQ ID NO: 2563456
ucuagugcugacuacguug

SEQ ID NO: 2563458 - RNA, 19 nt, Artificial Sequence
  Description of Artificial Sequence: Synthetic oligonucleotide
  Sense strand starting at position 33 of SEQ ID NO: 1888882
cguagucagcacuagacaa

SEQ ID NO: 2563459 - RNA, 19 nt, Artificial Sequence
  Description of Artificial Sequence: Synthetic oligonucleotide
  Antisense strand to SEQ ID NO: 2563458
uugucuagugcugacuacg

SEQ ID NO: 2563460 - RNA, 19 nt, Artificial Sequence
  Description of Artificial Sequence: Synthetic oligonucleotide
  Sense strand starting at position 62 of SEQ ID NO: 1888882
accuguaguuauuuauguu

SEQ ID NO: 2563461 - RNA, 19 nt, Artificial Sequence
  Description of Artificial Sequence: Synthetic oligonucleotide
  Antisense strand to SEQ ID NO: 2563460
aacauaaauaacuacaggu

SEQ ID NO: 2563462 - RNA, 19 nt, Artificial Sequence
  Description of Artificial Sequence: Synthetic oligonucleotide
  Sense strand starting at position 131 of SEQ ID NO: 1888882
cuuaauacuggacgacaga

SEQ ID NO: 2563463 - RNA, 19 nt, Artificial Sequence
  Description of Artificial Sequence: Synthetic oligonucleotide
  Antisense strand to SEQ ID NO: 2563462
ucugucguccaguauuaag

SEQ ID NO: 2563464 - RNA, 19 nt, Artificial Sequence
  Description of Artificial Sequence: Synthetic oligonucleotide
  Sense strand starting at position 246 of SEQ ID NO: 1888882
cccacauauccuugaggua

SEQ ID NO: 2563465 - RNA, 19 nt, Artificial Sequence
  Description of Artificial Sequence: Synthetic oligonucleotide
  Antisense strand to SEQ ID NO: 2563464
uaccucaaggauauguggg

SEQ ID NO: 2563466 - RNA, 19 nt, Artificial Sequence
  Description of Artificial Sequence: Synthetic oligonucleotide
  Sense strand starting at position 259 of SEQ ID NO: 1888882
gagguagaccaauguuauc

SEQ ID NO: 2563467 - RNA, 19 nt, Artificial Sequence
  Description of Artificial Sequence: Synthetic oligonucleotide
  Antisense strand to SEQ ID NO: 2563466
gauaacauuggucuaccuc

SEQ ID NO: 2563468 - RNA, 19 nt, Artificial Sequence
  Description of Artificial Sequence: Synthetic oligonucleotide
  Sense strand starting at position 264 of SEQ ID NO: 1888882
agaccaauguuaucacugu

SEQ ID NO: 2563469 - RNA, 19 nt, Artificial Sequence
  Description of Artificial Sequence: Synthetic oligonucleotide
  Antisense strand to SEQ ID NO: 2563468
acagugauaacauuggucu

SEQ ID NO: 2563470 - RNA, 19 nt, Artificial Sequence
  Description of Artificial Sequence: Synthetic oligonucleotide
  Sense strand starting at position 312 of SEQ ID NO: 1888882
aggcaacuagcucaagauu

SEQ ID NO: 2563471 - RNA, 19 nt, Artificial Sequence
  Description of Artificial Sequence: Synthetic oligonucleotide
  Antisense strand to SEQ ID NO: 2563470
aaucuugagcuaguugccu

SEQ ID NO: 2563472 - RNA, 19 nt, Artificial Sequence
  Description of Artificial Sequence: Synthetic oligonucleotide
  Sense strand starting at position 547 of SEQ ID NO: 1888882
ugccaaauacaugauguua

SEQ ID NO: 2563473 - RNA, 19 nt, Artificial Sequence
  Description of Artificial Sequence: Synthetic oligonucleotide
  Antisense strand to SEQ ID NO: 2563472
uaacaucauguauuuggca

SEQ ID NO: 2563474 - RNA, 19 nt, Artificial Sequence
  Description of Artificial Sequence: Synthetic oligonucleotide
  Sense strand starting at position 975 of SEQ ID NO: 1888882
gguuguggugaaugagaga

SEQ ID NO: 2563475 - RNA, 19 nt, Artificial Sequence
  Description of Artificial Sequence: Synthetic oligonucleotide
  Antisense strand to SEQ ID NO: 2563474
ucucucauucaccacaacc

SEQ ID NO: 2563476 - RNA, 19 nt, Artificial Sequence
  Description of Artificial Sequence: Synthetic oligonucleotide
  Sense strand starting at position 984 of SEQ ID NO: 1888882
gaaugagagaucgggccau

SEQ ID NO: 2563477 - RNA, 19 nt, Artificial Sequence
  Description of Artificial Sequence: Synthetic oligonucleotide
  Antisense strand to SEQ ID NO: 2563476
auggcccgaucucucauuc

SEQ ID NO: 2563478 - RNA, 19 nt, Artificial Sequence
  Description of Artificial Sequence: Synthetic oligonucleotide
  Sense strand starting at position 988 of SEQ ID NO: 1888882
gagagaucgggccauugca

SEQ ID NO: 2563479 - RNA, 19 nt, Artificial Sequence
  Description of Artificial Sequence: Synthetic oligonucleotide
  Antisense strand to SEQ ID NO: 2563478
ugcaauggcccgaucucuc

SEQ ID NO: 2563480 - RNA, 19 nt, Artificial Sequence
  Description of Artificial Sequence: Synthetic oligonucleotide
  Sense strand starting at position 1119 of SEQ ID NO: 1888882
gcuggcugugucuuaguaa

SEQ ID NO: 2563481 - RNA, 19 nt, Artificial Sequence
  Description of Artificial Sequence: Synthetic oligonucleotide
  Antisense strand to SEQ ID NO: 2563480
uuacuaagacacagccagc

SEQ ID NO: 2563482 - RNA, 19 nt, Artificial Sequence
  Description of Artificial Sequence: Synthetic oligonucleotide
  Sense strand starting at position 1452 of SEQ ID NO: 1888882
gucccauugguuuacaacu

SEQ ID NO: 2563483 - RNA, 19 nt, Artificial Sequence
  Description of Artificial Sequence: Synthetic oligonucleotide
  Antisense strand to SEQ ID NO: 2563482
aguuguaaaccaaugggac

SEQ ID NO: 2563484 - RNA, 19 nt, Artificial Sequence
  Description of Artificial Sequence: Synthetic oligonucleotide
  Sense strand starting at position 1526 of SEQ ID NO: 1888882
auccaaauauugucagggu

SEQ ID NO: 2563485 - RNA, 19 nt, Artificial Sequence
  Description of Artificial Sequence: Synthetic oligonucleotide
  Antisense strand to SEQ ID NO: 2563484
acccugacaauauuuggau

SEQ ID NO: 2563486 - RNA, 19 nt, Artificial Sequence
  Description of Artificial Sequence: Synthetic oligonucleotide
  Sense strand starting at position 1530 of SEQ ID NO: 1888882
aaauauugucaggguaaua

SEQ ID NO: 2563487 - RNA, 19 nt, Artificial Sequence
  Description of Artificial Sequence: Synthetic oligonucleotide
  Antisense strand to SEQ ID NO: 2563486
uauuacccugacaauauuu

SEQ ID NO: 2563488 - RNA, 19 nt, Artificial Sequence
  Description of Artificial Sequence: Synthetic oligonucleotide
  Sense strand starting at position 1899 of SEQ ID NO: 1888882
caggaaugucgccaacaaa

SEQ ID NO: 2563489 - RNA, 19 nt, Artificial Sequence
  Description of Artificial Sequence: Synthetic oligonucleotide
  Antisense strand to SEQ ID NO: 2563488
uuuguuggcgacauuccug

SEQ ID NO: 2563490 - RNA, 19 nt, Artificial Sequence
  Description of Artificial Sequence: Synthetic oligonucleotide
  Sense strand starting at position 2100 of SEQ ID NO: 1888882
ggacaagugcaauacuuua

SEQ ID NO: 2563491 - RNA, 19 nt, Artificial Sequence
  Description of Artificial Sequence: Synthetic oligonucleotide
  Antisense strand to SEQ ID NO: 2563490
uaaaguauugcacuugucc

SEQ ID NO: 2563492 - RNA, 19 nt, Artificial Sequence
  Description of Artificial Sequence: Synthetic oligonucleotide
  Sense strand starting at position 2105 of SEQ ID NO: 1888882
agugcaauacuuuauauag

SEQ ID NO: 2563493 - RNA, 19 nt, Artificial Sequence
  Description of Artificial Sequence: Synthetic oligonucleotide
  Antisense strand to SEQ ID NO: 2563492
cuauauaaaguauugcacu

SEQ ID NO: 2563494 - RNA, 19 nt, Artificial Sequence
  Description of Artificial Sequence: Synthetic oligonucleotide
  Sense strand starting at position 2165 of SEQ ID NO: 1888882
gcaugagugcuggagauac

SEQ ID NO: 2563495 - RNA, 19 nt, Artificial Sequence
  Description of Artificial Sequence: Synthetic oligonucleotide
  Antisense strand to SEQ ID NO: 2563494
guaucuccagcacucaugc

SEQ ID NO: 2563496 - RNA, 19 nt, Artificial Sequence
  Description of Artificial Sequence: Synthetic oligonucleotide
  Sense strand starting at position 2175 of SEQ ID NO: 1888882
uggagauacgcaugaaggu

SEQ ID NO: 2563497 - RNA, 19 nt, Artificial Sequence
  Description of Artificial Sequence: Synthetic oligonucleotide
  Antisense strand to SEQ ID NO: 2563496
accuucaugcguaucucca

SEQ ID NO: 2563498 - RNA, 19 nt, Artificial Sequence
  Description of Artificial Sequence: Synthetic oligonucleotide
  Sense strand starting at position 2261 of SEQ ID NO: 1888882
auacauauauacgcugaaa

SEQ ID NO: 2563499 - RNA, 19 nt, Artificial Sequence
  Description of Artificial Sequence: Synthetic oligonucleotide
  Antisense strand to SEQ ID NO: 2563498
uuucagcguauauauguau

SEQ ID NO: 2563500 - RNA, 19 nt, Artificial Sequence
  Description of Artificial Sequence: Synthetic oligonucleotide
  Sense strand starting at position 2263 of SEQ ID NO: 1888882
acauauauacgcugaaaug

SEQ ID NO: 2563501 - RNA, 19 nt, Artificial Sequence
  Description of Artificial Sequence: Synthetic oligonucleotide
  Antisense strand to SEQ ID NO: 2563500
cauuucagcguauauaugu

SEQ ID NO: 2563502 - RNA, 19 nt, Artificial Sequence
  Description of Artificial Sequence: Synthetic oligonucleotide
  Sense strand starting at position 2344 of SEQ ID NO: 1888882
uuuguuauccaagaguacu

SEQ ID NO: 2563503 - RNA, 19 nt, Artificial Sequence
  Description of Artificial Sequence: Synthetic oligonucleotide
  Antisense strand to SEQ ID NO: 2563502
aguacucuuggauaacaaa

SEQ ID NO: 2563504 - RNA, 19 nt, Artificial Sequence
  Description of Artificial Sequence: Synthetic oligonucleotide
  Sense strand starting at position 2360 of SEQ ID NO: 1888882
acuggaagugcccauacua

SEQ ID NO: 2563505 - RNA, 19 nt, Artificial Sequence
  Description of Artificial Sequence: Synthetic oligonucleotide
  Antisense strand to SEQ ID NO: 2563504
uaguaugggcacuuccagu

SEQ ID NO: 2563506 - RNA, 19 nt, Artificial Sequence
  Description of Artificial Sequence: Synthetic oligonucleotide
  Sense strand starting at position 2727 of SEQ ID NO: 1888882
guagccauugacuaaauca

SEQ ID NO: 2563507 - RNA, 19 nt, Artificial Sequence
  Description of Artificial Sequence: Synthetic oligonucleotide
  Antisense strand to SEQ ID NO: 2563506
ugauuuagucaauggcuac

SEQ ID NO: 2563508 - RNA, 19 nt, Artificial Sequence
  Description of Artificial Sequence: Synthetic oligonucleotide
  Sense strand starting at position 2738 of SEQ ID NO: 1888882
cuaaaucaccaugguaaug

SEQ ID NO: 2563509 - RNA, 19 nt, Artificial Sequence
  Description of Artificial Sequence: Synthetic oligonucleotide
  Antisense strand to SEQ ID NO: 2563508
cauuaccauggugauuuag

SEQ ID NO: 2563510 - RNA, 19 nt, Artificial Sequence
  Description of Artificial Sequence: Synthetic oligonucleotide
  Sense strand starting at position 2756 of SEQ ID NO: 1888882
guaagaagugcuuacauug

SEQ ID NO: 2563511 - RNA, 19 nt, Artificial Sequence
  Description of Artificial Sequence: Synthetic oligonucleotide
  Antisense strand to SEQ ID NO: 2563510
caauguaagcacuucuuac

SEQ ID NO: 2563512 - RNA, 19 nt, Artificial Sequence
  Description of Artificial Sequence: Synthetic oligonucleotide
  Sense strand starting at position 2766 of SEQ ID NO: 1888882
cuuacauugcaguagaucu

SEQ ID NO: 2563513 - RNA, 19 nt, Artificial Sequence
  Description of Artificial Sequence: Synthetic oligonucleotide
  Antisense strand to SEQ ID NO: 2563512
agaucuacugcaauguaag

SEQ ID NO: 2563514 - RNA, 19 nt, Artificial Sequence
  Description of Artificial Sequence: Synthetic oligonucleotide
  Sense strand starting at position 2891 of SEQ ID NO: 1888882
gcagacucaccugguuaaa

SEQ ID NO: 2563515 - RNA, 19 nt, Artificial Sequence
  Description of Artificial Sequence: Synthetic oligonucleotide
  Antisense strand to SEQ ID NO: 2563514
uuuaaccaggugagucugc

SEQ ID NO: 2563516 - RNA, 19 nt, Artificial Sequence
  Description of Artificial Sequence: Synthetic oligonucleotide
  Sense strand starting at position 2989 of SEQ ID NO: 1888882
gcuuacagagucuaagcua

SEQ ID NO: 2563517 - RNA, 19 nt, Artificial Sequence
  Description of Artificial Sequence: Synthetic oligonucleotide
  Antisense strand to SEQ ID NO: 2563516
uagcuuagacucuguaagc

SEQ ID NO: 2563518 - RNA, 19 nt, Artificial Sequence
  Description of Artificial Sequence: Synthetic oligonucleotide
  Sense strand starting at position 3170 of SEQ ID NO: 1888882
caguaauuugcaggcacau

SEQ ID NO: 2563519 - RNA, 19 nt, Artificial Sequence
  Description of Artificial Sequence: Synthetic oligonucleotide
  Antisense strand to SEQ ID NO: 2563518
augugccugcaaauuacug

SEQ ID NO: 2563520 - RNA, 19 nt, Artificial Sequence
  Description of Artificial Sequence: Synthetic oligonucleotide
  Sense strand starting at position 3293 of SEQ ID NO: 1888882
acggaaagugacuguuaga

SEQ ID NO: 2563521 - RNA, 19 nt, Artificial Sequence
  Description of Artificial Sequence: Synthetic oligonucleotide
  Antisense strand to SEQ ID NO: 2563520
ucuaacagucacuuuccgu

SEQ ID NO: 2563522 - RNA, 19 nt, Artificial Sequence
  Description of Artificial Sequence: Synthetic oligonucleotide
  Sense strand starting at position 3413 of SEQ ID NO: 1888882
auggcugagagaugucaca

SEQ ID NO: 2563523 - RNA, 19 nt, Artificial Sequence
  Description of Artificial Sequence: Synthetic oligonucleotide
  Antisense strand to SEQ ID NO: 2563522
ugugacaucucucagccau

SEQ ID NO: 2563524 - RNA, 19 nt, Artificial Sequence
  Description of Artificial Sequence: Synthetic oligonucleotide
  Sense strand starting at position 3701 of SEQ ID NO: 1888882
ucuguaauacguuaaacga

SEQ ID NO: 2563525 - RNA, 19 nt, Artificial Sequence
  Description of Artificial Sequence: Synthetic oligonucleotide
  Antisense strand to SEQ ID NO: 2563524
ucguuuaacguauuacaga

SEQ ID NO: 2563526 - RNA, 19 nt, Artificial Sequence
  Description of Artificial Sequence: Synthetic oligonucleotide
  Sense strand starting at position 3709 of SEQ ID NO: 1888882
acguuaaacgagugaggga

SEQ ID NO: 2563527 - RNA, 19 nt, Artificial Sequence
  Description of Artificial Sequence: Synthetic oligonucleotide
  Antisense strand to SEQ ID NO: 2563526
ucccucacucguuuaacgu

SEQ ID NO: 2563528 - RNA, 19 nt, Artificial Sequence
  Description of Artificial Sequence: Synthetic oligonucleotide
  Sense strand starting at position 3738 of SEQ ID NO: 1888882
uugaacuuucgucacgaua

SEQ ID NO: 2563529 - RNA, 19 nt, Artificial Sequence
  Description of Artificial Sequence: Synthetic oligonucleotide
  Antisense strand to SEQ ID NO: 2563528
uaucgugacgaaaguucaa

SEQ ID NO: 2563530 - RNA, 19 nt, Artificial Sequence
  Description of Artificial Sequence: Synthetic oligonucleotide
  Sense strand starting at position 3767 of SEQ ID NO: 1888882
cuaaaugagucuuuagaag

SEQ ID NO: 2563531 - RNA, 19 nt, Artificial Sequence
  Description of Artificial Sequence: Synthetic oligonucleotide
  Antisense strand to SEQ ID NO: 2563530
cuucuaaagacucauuuag

SEQ ID NO: 2563532 - RNA, 19 nt, Artificial Sequence
  Description of Artificial Sequence: Synthetic oligonucleotide
  Sense strand starting at position 3892 of SEQ ID NO: 1888882
cccuuaaauuggguuucua

SEQ ID NO: 2563533 - RNA, 19 nt, Artificial Sequence
  Description of Artificial Sequence: Synthetic oligonucleotide
  Antisense strand to SEQ ID NO: 2563532
uagaaacccaauuuaaggg

SEQ ID NO: 2563534 - RNA, 19 nt, Artificial Sequence
  Description of Artificial Sequence: Synthetic oligonucleotide
  Sense strand starting at position 3905 of SEQ ID NO: 1888882
uuucuacaccugugaagau

SEQ ID NO: 2563535 - RNA, 19 nt, Artificial Sequence
  Description of Artificial Sequence: Synthetic oligonucleotide
  Antisense strand to SEQ ID NO: 2563534
aucuucacagguguagaaa

SEQ ID NO: 2563536 - RNA, 19 nt, Artificial Sequence
  Description of Artificial Sequence: Synthetic oligonucleotide
  Sense strand starting at position 647 of SEQ ID NO: 1888883
agcagaaauccuggagcua

SEQ ID NO: 2563537 - RNA, 19 nt, Artificial Sequence
  Description of Artificial Sequence: Synthetic oligonucleotide
  Antisense strand to SEQ ID NO: 2563536
uagcuccaggauuucugcu

SEQ ID NO: 2563538 - RNA, 19 nt, Artificial Sequence
  Description of Artificial Sequence: Synthetic oligonucleotide
  Sense strand starting at position 648 of SEQ ID NO: 1888883
gcagaaauccuggagcuaa

SEQ ID NO: 2563539 - RNA, 19 nt, Artificial Sequence
  Description of Artificial Sequence: Synthetic oligonucleotide
  Antisense strand to SEQ ID NO: 2563538
uuagcuccaggauuucugc

SEQ ID NO: 2563540 - RNA, 19 nt, Artificial Sequence
  Description of Artificial Sequence: Synthetic oligonucleotide
  Sense strand starting at position 704 of SEQ ID NO: 1888883
acagaugucuuccucagca

SEQ ID NO: 2563541 - RNA, 19 nt, Artificial Sequence
  Description of Artificial Sequence: Synthetic oligonucleotide
  Antisense strand to SEQ ID NO: 2563540
ugcugaggaagacaucugu

SEQ ID NO: 2563542 - RNA, 19 nt, Artificial Sequence
  Description of Artificial Sequence: Synthetic oligonucleotide
  Sense strand starting at position 706 of SEQ ID NO: 1888883
agaugucuuccucagcaga

SEQ ID NO: 2563543 - RNA, 19 nt, Artificial Sequence
  Description of Artificial Sequence: Synthetic oligonucleotide
  Antisense strand to SEQ ID NO: 2563542
ucugcugaggaagacaucu

SEQ ID NO: 2563544 - RNA, 19 nt, Artificial Sequence
  Description of Artificial Sequence: Synthetic oligonucleotide
  Sense strand starting at position 708 of SEQ ID NO: 1888883
augucuuccucagcagacu

SEQ ID NO: 2563545 - RNA, 19 nt, Artificial Sequence
  Description of Artificial Sequence: Synthetic oligonucleotide
  Antisense strand to SEQ ID NO: 2563544
agucugcugaggaagacau

SEQ ID NO: 2563546 - RNA, 19 nt, Artificial Sequence
  Description of Artificial Sequence: Synthetic oligonucleotide
  Sense strand starting at position 937 of SEQ ID NO: 1888883
auucucauaucugaaggaa

SEQ ID NO: 2563547 - RNA, 19 nt, Artificial Sequence
  Description of Artificial Sequence: Synthetic oligonucleotide
  Antisense strand to SEQ ID NO: 2563546
uuccuucagauaugagaau

SEQ ID NO: 2563548 - RNA, 19 nt, Artificial Sequence
  Description of Artificial Sequence: Synthetic oligonucleotide
  Sense strand starting at position 1087 of SEQ ID NO: 1888883
acaggcuugucacauacaa

SEQ ID NO: 2563549 - RNA, 19 nt, Artificial Sequence
  Description of Artificial Sequence: Synthetic oligonucleotide
  Antisense strand to SEQ ID NO: 2563548
uuguaugugacaagccugu

SEQ ID NO: 2563550 - RNA, 19 nt, Artificial Sequence
  Description of Artificial Sequence: Synthetic oligonucleotide
  Sense strand starting at position 1116 of SEQ ID NO: 1888883
acuggaguaucagaggauu

SEQ ID NO: 2563551 - RNA, 19 nt, Artificial Sequence
  Description of Artificial Sequence: Synthetic oligonucleotide
  Antisense strand to SEQ ID NO: 2563550
aauccucugauacuccagu

SEQ ID NO: 2563552 - RNA, 19 nt, Artificial Sequence
  Description of Artificial Sequence: Synthetic oligonucleotide
  Sense strand starting at position 1140 of SEQ ID NO: 1888883
gcagaaguccugcaggcua

SEQ ID NO: 2563553 - RNA, 19 nt, Artificial Sequence
  Description of Artificial Sequence: Synthetic oligonucleotide
  Antisense strand to SEQ ID NO: 2563552
uagccugcaggacuucugc

SEQ ID NO: 2563554 - RNA, 19 nt, Artificial Sequence
  Description of Artificial Sequence: Synthetic oligonucleotide
  Sense strand starting at position 1142 of SEQ ID NO: 1888883
agaaguccugcaggcuaaa

SEQ ID NO: 2563555 - RNA, 19 nt, Artificial Sequence
  Description of Artificial Sequence: Synthetic oligonucleotide
  Antisense strand to SEQ ID NO: 2563554
uuuagccugcaggacuucu

SEQ ID NO: 2563556 - RNA, 19 nt, Artificial Sequence
  Description of Artificial Sequence: Synthetic oligonucleotide
  Sense strand starting at position 1202 of SEQ ID NO: 1888883
gcuaaucaguaguucuuua

SEQ ID NO: 2563557 - RNA, 19 nt, Artificial Sequence
  Description of Artificial Sequence: Synthetic oligonucleotide
  Antisense strand to SEQ ID NO: 2563556
uaaagaacuacugauuagc

SEQ ID NO: 2563558 - RNA, 19 nt, Artificial Sequence
  Description of Artificial Sequence: Synthetic oligonucleotide
  Sense strand starting at position 1209 of SEQ ID NO: 1888883
aguaguucuuuaucuggca

SEQ ID NO: 2563559 - RNA, 19 nt, Artificial Sequence
  Description of Artificial Sequence: Synthetic oligonucleotide
  Antisense strand to SEQ ID NO: 2563558
ugccagauaaagaacuacu

SEQ ID NO: 2563560 - RNA, 19 nt, Artificial Sequence
  Description of Artificial Sequence: Synthetic oligonucleotide
  Sense strand starting at position 1680 of SEQ ID NO: 1888883
ccagccugacuccguuaaa

SEQ ID NO: 2563561 - RNA, 19 nt, Artificial Sequence
  Description of Artificial Sequence: Synthetic oligonucleotide
  Antisense strand to SEQ ID NO: 2563560
uuuaacggagucaggcugg

SEQ ID NO: 2563562 - RNA, 19 nt, Artificial Sequence
  Description of Artificial Sequence: Synthetic oligonucleotide
  Sense strand starting at position 1710 of SEQ ID NO: 1888883
aaacucuuacguuaugaug

SEQ ID NO: 2563563 - RNA, 19 nt, Artificial Sequence
  Description of Artificial Sequence: Synthetic oligonucleotide
  Antisense strand to SEQ ID NO: 2563562
caucauaacguaagaguuu

SEQ ID NO: 2563564 - RNA, 19 nt, Artificial Sequence
  Description of Artificial Sequence: Synthetic oligonucleotide
  Sense strand starting at position 1717 of SEQ ID NO: 1888883
uacguuaugaugugguaca

SEQ ID NO: 2563565 - RNA, 19 nt, Artificial Sequence
  Description of Artificial Sequence: Synthetic oligonucleotide
  Antisense strand to SEQ ID NO: 2563564
uguaccacaucauaacgua

SEQ ID NO: 2563566 - RNA, 19 nt, Artificial Sequence
  Description of Artificial Sequence: Synthetic oligonucleotide
  Sense strand starting at position 1864 of SEQ ID NO: 1888883
aaaguugaaguguaagguu

SEQ ID NO: 2563567 - RNA, 19 nt, Artificial Sequence
  Description of Artificial Sequence: Synthetic oligonucleotide
  Antisense strand to SEQ ID NO: 2563566
aaccuuacacuucaacuuu

SEQ ID NO: 2563568 - RNA, 19 nt, Artificial Sequence
  Description of Artificial Sequence: Synthetic oligonucleotide
  Sense strand starting at position 1899 of SEQ ID NO: 1888883
aguuaucagcuuuaauagu

SEQ ID NO: 2563569 - RNA, 19 nt, Artificial Sequence
  Description of Artificial Sequence: Synthetic oligonucleotide
  Antisense strand to SEQ ID NO: 2563568
acuauuaaagcugauaacu

SEQ ID NO: 2563570 - RNA, 19 nt, Artificial Sequence
  Description of Artificial Sequence: Synthetic oligonucleotide
  Sense strand starting at position 2346 of SEQ ID NO: 1888883
aagagagcuuaguuggcua

SEQ ID NO: 2563571 - RNA, 19 nt, Artificial Sequence
  Description of Artificial Sequence: Synthetic oligonucleotide
  Antisense strand to SEQ ID NO: 2563570
uagccaacuaagcucucuu

SEQ ID NO: 2563572 - RNA, 19 nt, Artificial Sequence
  Description of Artificial Sequence: Synthetic oligonucleotide
  Sense strand starting at position 2349 of SEQ ID NO: 1888883
agagcuuaguuggcuacau

SEQ ID NO: 2563573 - RNA, 19 nt, Artificial Sequence
  Description of Artificial Sequence: Synthetic oligonucleotide
  Antisense strand to SEQ ID NO: 2563572
auguagccaacuaagcucu

SEQ ID NO: 2563574 - RNA, 19 nt, Artificial Sequence
  Description of Artificial Sequence: Synthetic oligonucleotide
  Sense strand starting at position 2350 of SEQ ID NO: 1888883
gagcuuaguuggcuacauu

SEQ ID NO: 2563575 - RNA, 19 nt, Artificial Sequence
  Description of Artificial Sequence: Synthetic oligonucleotide
  Antisense strand to SEQ ID NO: 2563574
aauguagccaacuaagcuc

SEQ ID NO: 2563576 - RNA, 19 nt, Artificial Sequence
  Description of Artificial Sequence: Synthetic oligonucleotide
  Sense strand starting at position 2493 of SEQ ID NO: 1888883
cuauguaugcaauauugga

SEQ ID NO: 2563577 - RNA, 19 nt, Artificial Sequence
  Description of Artificial Sequence: Synthetic oligonucleotide
  Antisense strand to SEQ ID NO: 2563576
uccaauauugcauacauag

SEQ ID NO: 2563578 - RNA, 19 nt, Artificial Sequence
  Description of Artificial Sequence: Synthetic oligonucleotide
  Sense strand starting at position 2501 of SEQ ID NO: 1888883
gcaauauuggagcaccuaa

SEQ ID NO: 2563579 - RNA, 19 nt, Artificial Sequence
  Description of Artificial Sequence: Synthetic oligonucleotide
  Antisense strand to SEQ ID NO: 2563578
uuaggugcuccaauauugc

SEQ ID NO: 2563580 - RNA, 19 nt, Artificial Sequence
  Description of Artificial Sequence: Synthetic oligonucleotide
  Sense strand starting at position 2533 of SEQ ID NO: 1888883
gguauuuauuaacagaacu

SEQ ID NO: 2563581 - RNA, 19 nt, Artificial Sequence
  Description of Artificial Sequence: Synthetic oligonucleotide
  Antisense strand to SEQ ID NO: 2563580
aguucuguuaauaaauacc

SEQ ID NO: 2563582 - RNA, 19 nt, Artificial Sequence
  Description of Artificial Sequence: Synthetic oligonucleotide
  Sense strand starting at position 2766 of SEQ ID NO: 1888883
gagaauauguaaggccaaa

SEQ ID NO: 2563583 - RNA, 19 nt, Artificial Sequence
  Description of Artificial Sequence: Synthetic oligonucleotide
  Antisense strand to SEQ ID NO: 2563582
uuuggccuuacauauucuc

SEQ ID NO: 2563584 - RNA, 19 nt, Artificial Sequence
  Description of Artificial Sequence: Synthetic oligonucleotide
  Sense strand starting at position 2908 of SEQ ID NO: 1888883
auauauuugugagguacac

SEQ ID NO: 2563585 - RNA, 19 nt, Artificial Sequence
  Description of Artificial Sequence: Synthetic oligonucleotide
  Antisense strand to SEQ ID NO: 2563584
guguaccucacaaauauau

SEQ ID NO: 2563586 - RNA, 19 nt, Artificial Sequence
  Description of Artificial Sequence: Synthetic oligonucleotide
  Sense strand starting at position 2925 of SEQ ID NO: 1888883
acaagauguucugauauag

SEQ ID NO: 2563587 - RNA, 19 nt, Artificial Sequence
  Description of Artificial Sequence: Synthetic oligonucleotide
  Antisense strand to SEQ ID NO: 2563586
cuauaucagaacaucuugu

SEQ ID NO: 2563588 - RNA, 19 nt, Artificial Sequence
  Description of Artificial Sequence: Synthetic oligonucleotide
  Sense strand starting at position 2935 of SEQ ID NO: 1888883
cugauauaggcaugcaaug

SEQ ID NO: 2563589 - RNA, 19 nt, Artificial Sequence
  Description of Artificial Sequence: Synthetic oligonucleotide
  Antisense strand to SEQ ID NO: 2563588
cauugcaugccuauaucag

SEQ ID NO: 2563590 - RNA, 19 nt, Artificial Sequence
  Description of Artificial Sequence: Synthetic oligonucleotide
  Sense strand starting at position 2944 of SEQ ID NO: 1888883
gcaugcaaugcguaccaau

SEQ ID NO: 2563591 - RNA, 19 nt, Artificial Sequence
  Description of Artificial Sequence: Synthetic oligonucleotide
  Antisense strand to SEQ ID NO: 2563590
auugguacgcauugcaugc

SEQ ID NO: 2563592 - RNA, 19 nt, Artificial Sequence
  Description of Artificial Sequence: Synthetic oligonucleotide
  Sense strand starting at position 2958 of SEQ ID NO: 1888883
ccaaucacaucauggagaa

SEQ ID NO: 2563593 - RNA, 19 nt, Artificial Sequence
  Description of Artificial Sequence: Synthetic oligonucleotide
  Antisense strand to SEQ ID NO: 2563592
uucuccaugaugugauugg

SEQ ID NO: 2563594 - RNA, 19 nt, Artificial Sequence
  Description of Artificial Sequence: Synthetic oligonucleotide
  Sense strand starting at position 3085 of SEQ ID NO: 1888883
uguacugucaaauguagau

SEQ ID NO: 2563595 - RNA, 19 nt, Artificial Sequence
  Description of Artificial Sequence: Synthetic oligonucleotide
  Antisense strand to SEQ ID NO: 2563594
aucuacauuugacaguaca

SEQ ID NO: 2563596 - RNA, 19 nt, Artificial Sequence
  Description of Artificial Sequence: Synthetic oligonucleotide
  Sense strand starting at position 3089 of SEQ ID NO: 1888883
cugucaaauguagaucuua

SEQ ID NO: 2563597 - RNA, 19 nt, Artificial Sequence
  Description of Artificial Sequence: Synthetic oligonucleotide
  Antisense strand to SEQ ID NO: 2563596
uaagaucuacauuugacag

SEQ ID NO: 2563598 - RNA, 19 nt, Artificial Sequence
  Description of Artificial Sequence: Synthetic oligonucleotide
  Sense strand starting at position 3097 of SEQ ID NO: 1888883
uguagaucuuauguucuuu

SEQ ID NO: 2563599 - RNA, 19 nt, Artificial Sequence
  Description of Artificial Sequence: Synthetic oligonucleotide
  Antisense strand to SEQ ID NO: 2563598
aaagaacauaagaucuaca

SEQ ID NO: 2563600 - RNA, 19 nt, Artificial Sequence
  Description of Artificial Sequence: Synthetic oligonucleotide
  Sense strand starting at position 3102 of SEQ ID NO: 1888883
aucuuauguucuuucuaug

SEQ ID NO: 2563601 - RNA, 19 nt, Artificial Sequence
  Description of Artificial Sequence: Synthetic oligonucleotide
  Antisense strand to SEQ ID NO: 2563600
cauagaaagaacauaagau

SEQ ID NO: 2563602 - RNA, 19 nt, Artificial Sequence
  Description of Artificial Sequence: Synthetic oligonucleotide
  Sense strand starting at position 3454 of SEQ ID NO: 1888883
ggcuauugggaacaguguu

SEQ ID NO: 2563603 - RNA, 19 nt, Artificial Sequence
  Description of Artificial Sequence: Synthetic oligonucleotide
  Antisense strand to SEQ ID NO: 2563602
aacacuguucccaauagcc

SEQ ID NO: 2563604 - RNA, 19 nt, Artificial Sequence
  Description of Artificial Sequence: Synthetic oligonucleotide
  Sense strand starting at position 3682 of SEQ ID NO: 1888883
augauaucauaugggaguu

SEQ ID NO: 2563605 - RNA, 19 nt, Artificial Sequence
  Description of Artificial Sequence: Synthetic oligonucleotide
  Antisense strand to SEQ ID NO: 2563604
aacucccauaugauaucau

SEQ ID NO: 2563606 - RNA, 19 nt, Artificial Sequence
  Description of Artificial Sequence: Synthetic oligonucleotide
  Sense strand starting at position 3683 of SEQ ID NO: 1888883
ugauaucauaugggaguuu

SEQ ID NO: 2563607 - RNA, 19 nt, Artificial Sequence
  Description of Artificial Sequence: Synthetic oligonucleotide
  Antisense strand to SEQ ID NO: 2563606
aaacucccauaugauauca

SEQ ID NO: 2563608 - RNA, 19 nt, Artificial Sequence
  Description of Artificial Sequence: Synthetic oligonucleotide
  Sense strand starting at position 3744 of SEQ ID NO: 1888883
ucauaugccuguuugcauu

SEQ ID NO: 2563609 - RNA, 19 nt, Artificial Sequence
  Description of Artificial Sequence: Synthetic oligonucleotide
  Antisense strand to SEQ ID NO: 2563608
aaugcaaacaggcauauga

SEQ ID NO: 2563610 - RNA, 19 nt, Artificial Sequence
  Description of Artificial Sequence: Synthetic oligonucleotide
  Sense strand starting at position 3937 of SEQ ID NO: 1888883
guuguuuccuuagcuguga

SEQ ID NO: 2563611 - RNA, 19 nt, Artificial Sequence
  Description of Artificial Sequence: Synthetic oligonucleotide
  Antisense strand to SEQ ID NO: 2563610
ucacagcuaaggaaacaac

SEQ ID NO: 2563612 - RNA, 19 nt, Artificial Sequence
  Description of Artificial Sequence: Synthetic oligonucleotide
  Sense strand starting at position 3938 of SEQ ID NO: 1888883
uuguuuccuuagcugugaa

SEQ ID NO: 2563613 - RNA, 19 nt, Artificial Sequence
  Description of Artificial Sequence: Synthetic oligonucleotide
  Antisense strand to SEQ ID NO: 2563612
uucacagcuaaggaaacaa

SEQ ID NO: 2563614 - RNA, 19 nt, Artificial Sequence
  Description of Artificial Sequence: Synthetic oligonucleotide
  Sense strand starting at position 3941 of SEQ ID NO: 1888883
uuuccuuagcugugaagag

SEQ ID NO: 2563615 - RNA, 19 nt, Artificial Sequence
  Description of Artificial Sequence: Synthetic oligonucleotide
  Antisense strand to SEQ ID NO: 2563614
cucuucacagcuaaggaaa

SEQ ID NO: 2563616 - RNA, 19 nt, Artificial Sequence
  Description of Artificial Sequence: Synthetic oligonucleotide
  Sense strand starting at position 49 of SEQ ID NO: 1888885
gucuuuaagcaacacauga

SEQ ID NO: 2563617 - RNA, 19 nt, Artificial Sequence
  Description of Artificial Sequence: Synthetic oligonucleotide
  Antisense strand to SEQ ID NO: 2563616
ucauguguugcuuaaagac

SEQ ID NO: 2563618 - RNA, 19 nt, Artificial Sequence
  Description of Artificial Sequence: Synthetic oligonucleotide
  Sense strand starting at position 64 of SEQ ID NO: 1888885
augacuguauaguuaaaug

SEQ ID NO: 2563619 - RNA, 19 nt, Artificial Sequence
  Description of Artificial Sequence: Synthetic oligonucleotide
  Antisense strand to SEQ ID NO: 2563618
cauuuaacuauacagucau

SEQ ID NO: 2563620 - RNA, 19 nt, Artificial Sequence
  Description of Artificial Sequence: Synthetic oligonucleotide
  Sense strand starting at position 251 of SEQ ID NO: 1888885
ggaugauccuauccaacga

SEQ ID NO: 2563621 - RNA, 19 nt, Artificial Sequence
  Description of Artificial Sequence: Synthetic oligonucleotide
  Antisense strand to SEQ ID NO: 2563620
ucguuggauaggaucaucc

SEQ ID NO: 2563622 - RNA, 19 nt, Artificial Sequence
  Description of Artificial Sequence: Synthetic oligonucleotide
  Sense strand starting at position 255 of SEQ ID NO: 1888885
gauccuauccaacgagaug

SEQ ID NO: 2563623 - RNA, 19 nt, Artificial Sequence
  Description of Artificial Sequence: Synthetic oligonucleotide
  Antisense strand to SEQ ID NO: 2563622
caucucguuggauaggauc

SEQ ID NO: 2563624 - RNA, 19 nt, Artificial Sequence
  Description of Artificial Sequence: Synthetic oligonucleotide
  Sense strand starting at position 382 of SEQ ID NO: 1888885
gcagguuaccaagauagua

SEQ ID NO: 2563625 - RNA, 19 nt, Artificial Sequence
  Description of Artificial Sequence: Synthetic oligonucleotide
  Antisense strand to SEQ ID NO: 2563624
uacuaucuugguaaccugc

SEQ ID NO: 2563626 - RNA, 19 nt, Artificial Sequence
  Description of Artificial Sequence: Synthetic oligonucleotide
  Sense strand starting at position 455 of SEQ ID NO: 1888885
gcucacuaucuguauacau

SEQ ID NO: 2563627 - RNA, 19 nt, Artificial Sequence
  Description of Artificial Sequence: Synthetic oligonucleotide
  Antisense strand to SEQ ID NO: 2563626
auguauacagauagugagc

SEQ ID NO: 2563628 - RNA, 19 nt, Artificial Sequence
  Description of Artificial Sequence: Synthetic oligonucleotide
  Sense strand starting at position 604 of SEQ ID NO: 1888885
ugcaaagaacuguguagga

SEQ ID NO: 2563629 - RNA, 19 nt, Artificial Sequence
  Description of Artificial Sequence: Synthetic oligonucleotide
  Antisense strand to SEQ ID NO: 2563628
uccuacacaguucuuugca

SEQ ID NO: 2563630 - RNA, 19 nt, Artificial Sequence
  Description of Artificial Sequence: Synthetic oligonucleotide
  Sense strand starting at position 835 of SEQ ID NO: 1888885
ugucacaagcaaugacaaa

SEQ ID NO: 2563631 - RNA, 19 nt, Artificial Sequence
  Description of Artificial Sequence: Synthetic oligonucleotide
  Antisense strand to SEQ ID NO: 2563630
uuugucauugcuugugaca

SEQ ID NO: 2563632 - RNA, 19 nt, Artificial Sequence
  Description of Artificial Sequence: Synthetic oligonucleotide
  Sense strand starting at position 905 of SEQ ID NO: 1888885
accaucacugucgagugau

SEQ ID NO: 2563633 - RNA, 19 nt, Artificial Sequence
  Description of Artificial Sequence: Synthetic oligonucleotide
  Antisense strand to SEQ ID NO: 2563632
aucacucgacagugauggu

SEQ ID NO: 2563634 - RNA, 19 nt, Artificial Sequence
  Description of Artificial Sequence: Synthetic oligonucleotide
  Sense strand starting at position 1100 of SEQ ID NO: 1888885
uccaauauagaaugguauu

SEQ ID NO: 2563635 - RNA, 19 nt, Artificial Sequence
  Description of Artificial Sequence: Synthetic oligonucleotide
  Antisense strand to SEQ ID NO: 2563634
aauaccauucuauauugga

SEQ ID NO: 2563636 - RNA, 19 nt, Artificial Sequence
  Description of Artificial Sequence: Synthetic oligonucleotide
  Sense strand starting at position 1133 of SEQ ID NO: 1888885
gcccaugggcaauaaaguu

SEQ ID NO: 2563637 - RNA, 19 nt, Artificial Sequence
  Description of Artificial Sequence: Synthetic oligonucleotide
  Antisense strand to SEQ ID NO: 2563636
aacuuuauugcccaugggc

SEQ ID NO: 2563638 - RNA, 19 nt, Artificial Sequence
  Description of Artificial Sequence: Synthetic oligonucleotide
  Sense strand starting at position 1155 of SEQ ID NO: 1888885
ccacccuugguuuagaaua

SEQ ID NO: 2563639 - RNA, 19 nt, Artificial Sequence
  Description of Artificial Sequence: Synthetic oligonucleotide
  Antisense strand to SEQ ID NO: 2563638
uauucuaaaccaagggugg

SEQ ID NO: 2563640 - RNA, 19 nt, Artificial Sequence
  Description of Artificial Sequence: Synthetic oligonucleotide
  Sense strand starting at position 1445 of SEQ ID NO: 1888885
gugagaaccugucccuuaa

SEQ ID NO: 2563641 - RNA, 19 nt, Artificial Sequence
  Description of Artificial Sequence: Synthetic oligonucleotide
  Antisense strand to SEQ ID NO: 2563640
uuaagggacagguucucac

SEQ ID NO: 2563642 - RNA, 19 nt, Artificial Sequence
  Description of Artificial Sequence: Synthetic oligonucleotide
  Sense strand starting at position 1504 of SEQ ID NO: 1888885
agaauacuauuuggaugau

SEQ ID NO: 2563643 - RNA, 19 nt, Artificial Sequence
  Description of Artificial Sequence: Synthetic oligonucleotide
  Antisense strand to SEQ ID NO: 2563642
aucauccaaauaguauucu

SEQ ID NO: 2563644 - RNA, 19 nt, Artificial Sequence
  Description of Artificial Sequence: Synthetic oligonucleotide
  Sense strand starting at position 1773 of SEQ ID NO: 1888885
acaauaaauguuugcugau

SEQ ID NO: 2563645 - RNA, 19 nt, Artificial Sequence
  Description of Artificial Sequence: Synthetic oligonucleotide
  Antisense strand to SEQ ID NO: 2563644
aucagcaaacauuuauugu

SEQ ID NO: 2563646 - RNA, 19 nt, Artificial Sequence
  Description of Artificial Sequence: Synthetic oligonucleotide
  Sense strand starting at position 1774 of SEQ ID NO: 1888885
caauaaauguuugcugaug

SEQ ID NO: 2563647 - RNA, 19 nt, Artificial Sequence
  Description of Artificial Sequence: Synthetic oligonucleotide
  Antisense strand to SEQ ID NO: 2563646
caucagcaaacauuuauug

SEQ ID NO: 2563648 - RNA, 19 nt, Artificial Sequence
  Description of Artificial Sequence: Synthetic oligonucleotide
  Sense strand starting at position 1821 of SEQ ID NO: 1888885
uuuacugaggccuacuaau

SEQ ID NO: 2563649 - RNA, 19 nt, Artificial Sequence
  Description of Artificial Sequence: Synthetic oligonucleotide
  Antisense strand to SEQ ID NO: 2563648
auuaguaggccucaguaaa

SEQ ID NO: 2563650 - RNA, 19 nt, Artificial Sequence
  Description of Artificial Sequence: Synthetic oligonucleotide
  Sense strand starting at position 1953 of SEQ ID NO: 1888885
ugauaagugcuauaacacu

SEQ ID NO: 2563651 - RNA, 19 nt, Artificial Sequence
  Description of Artificial Sequence: Synthetic oligonucleotide
  Antisense strand to SEQ ID NO: 2563650
aguguuauagcacuuauca

SEQ ID NO: 2563652 - RNA, 19 nt, Artificial Sequence
  Description of Artificial Sequence: Synthetic oligonucleotide
  Sense strand starting at position 1983 of SEQ ID NO: 1888885
auuauaauggccgauguaa

SEQ ID NO: 2563653 - RNA, 19 nt, Artificial Sequence
  Description of Artificial Sequence: Synthetic oligonucleotide
  Antisense strand to SEQ ID NO: 2563652
uuacaucggccauuauaau

SEQ ID NO: 2563654 - RNA, 19 nt, Artificial Sequence
  Description of Artificial Sequence: Synthetic oligonucleotide
  Sense strand starting at position 2156 of SEQ ID NO: 1888885
uagacacuggcaugaugua

SEQ ID NO: 2563655 - RNA, 19 nt, Artificial Sequence
  Description of Artificial Sequence: Synthetic oligonucleotide
  Antisense strand to SEQ ID NO: 2563654
uacaucaugccagugucua

SEQ ID NO: 2563656 - RNA, 19 nt, Artificial Sequence
  Description of Artificial Sequence: Synthetic oligonucleotide
  Sense strand starting at position 2295 of SEQ ID NO: 1888885
acaugagccugguuuaaua

SEQ ID NO: 2563657 - RNA, 19 nt, Artificial Sequence
  Description of Artificial Sequence: Synthetic oligonucleotide
  Antisense strand to SEQ ID NO: 2563656
uauuaaaccaggcucaugu

SEQ ID NO: 2563658 - RNA, 19 nt, Artificial Sequence
  Description of Artificial Sequence: Synthetic oligonucleotide
  Sense strand starting at position 2306 of SEQ ID NO: 1888885
guuuaauaucuacagcuag

SEQ ID NO: 2563659 - RNA, 19 nt, Artificial Sequence
  Description of Artificial Sequence: Synthetic oligonucleotide
  Antisense strand to SEQ ID NO: 2563658
cuagcuguagauauuaaac

SEQ ID NO: 2563660 - RNA, 19 nt, Artificial Sequence
  Description of Artificial Sequence: Synthetic oligonucleotide
  Sense strand starting at position 2345 of SEQ ID NO: 1888885
gcuuacaacuaacuggauu

SEQ ID NO: 2563661 - RNA, 19 nt, Artificial Sequence
  Description of Artificial Sequence: Synthetic oligonucleotide
  Antisense strand to SEQ ID NO: 2563660
aauccaguuaguuguaagc

SEQ ID NO: 2563662 - RNA, 19 nt, Artificial Sequence
  Description of Artificial Sequence: Synthetic oligonucleotide
  Sense strand starting at position 2359 of SEQ ID NO: 1888885
ggauuaacccaguguaacc

SEQ ID NO: 2563663 - RNA, 19 nt, Artificial Sequence
  Description of Artificial Sequence: Synthetic oligonucleotide
  Antisense strand to SEQ ID NO: 2563662
gguuacacuggguuaaucc

SEQ ID NO: 2563664 - RNA, 19 nt, Artificial Sequence
  Description of Artificial Sequence: Synthetic oligonucleotide
  Sense strand starting at position 2369 of SEQ ID NO: 1888885
aguguaaccggauagcaaa

SEQ ID NO: 2563665 - RNA, 19 nt, Artificial Sequence
  Description of Artificial Sequence: Synthetic oligonucleotide
  Antisense strand to SEQ ID NO: 2563664
uuugcuauccgguuacacu

SEQ ID NO: 2563666 - RNA, 19 nt, Artificial Sequence
  Description of Artificial Sequence: Synthetic oligonucleotide
  Sense strand starting at position 2396 of SEQ ID NO: 1888885
aguaauagcucauuuggca

SEQ ID NO: 2563667 - RNA, 19 nt, Artificial Sequence
  Description of Artificial Sequence: Synthetic oligonucleotide
  Antisense strand to SEQ ID NO: 2563666
ugccaaaugagcuauuacu

SEQ ID NO: 2563668 - RNA, 19 nt, Artificial Sequence
  Description of Artificial Sequence: Synthetic oligonucleotide
  Sense strand starting at position 2598 of SEQ ID NO: 1888885
cuccaagaccuuugagaau

SEQ ID NO: 2563669 - RNA, 19 nt, Artificial Sequence
  Description of Artificial Sequence: Synthetic oligonucleotide
  Antisense strand to SEQ ID NO: 2563668
auucucaaaggucuuggag

SEQ ID NO: 2563670 - RNA, 19 nt, Artificial Sequence
  Description of Artificial Sequence: Synthetic oligonucleotide
  Sense strand starting at position 2691 of SEQ ID NO: 1888885
aaaucaugugagugauagu

SEQ ID NO: 2563671 - RNA, 19 nt, Artificial Sequence
  Description of Artificial Sequence: Synthetic oligonucleotide
  Antisense strand to SEQ ID NO: 2563670
acuaucacucacaugauuu

SEQ ID NO: 2563672 - RNA, 19 nt, Artificial Sequence
  Description of Artificial Sequence: Synthetic oligonucleotide
  Sense strand starting at position 2725 of SEQ ID NO: 1888885
gcaagauuauuacuguaau

SEQ ID NO: 2563673 - RNA, 19 nt, Artificial Sequence
  Description of Artificial Sequence: Synthetic oligonucleotide
  Antisense strand to SEQ ID NO: 2563672
auuacaguaauaaucuugc

SEQ ID NO: 2563674 - RNA, 19 nt, Artificial Sequence
  Description of Artificial Sequence: Synthetic oligonucleotide
  Sense strand starting at position 2862 of SEQ ID NO: 1888885
cugauaacaucagcaaguu

SEQ ID NO: 2563675 - RNA, 19 nt, Artificial Sequence
  Description of Artificial Sequence: Synthetic oligonucleotide
  Antisense strand to SEQ ID NO: 2563674
aacuugcugauguuaucag

SEQ ID NO: 2563676 - RNA, 19 nt, Artificial Sequence
  Description of Artificial Sequence: Synthetic oligonucleotide
  Sense strand starting at position 2878 of SEQ ID NO: 1888885
guuguugacaguuauacug

SEQ ID NO: 2563677 - RNA, 19 nt, Artificial Sequence
  Description of Artificial Sequence: Synthetic oligonucleotide
  Antisense strand to SEQ ID NO: 2563676
caguauaacugucaacaac

SEQ ID NO: 2563678 - RNA, 19 nt, Artificial Sequence
  Description of Artificial Sequence: Synthetic oligonucleotide
  Sense strand starting at position 2912 of SEQ ID NO: 1888885
gacccaaugucucuaugag

SEQ ID NO: 2563679 - RNA, 19 nt, Artificial Sequence
  Description of Artificial Sequence: Synthetic oligonucleotide
  Antisense strand to SEQ ID NO: 2563678
cucauagagacauuggguc

SEQ ID NO: 2563680 - RNA, 19 nt, Artificial Sequence
  Description of Artificial Sequence: Synthetic oligonucleotide
  Sense strand starting at position 3039 of SEQ ID NO: 1888885
caugcuagcguguuccuau

SEQ ID NO: 2563681 - RNA, 19 nt, Artificial Sequence
  Description of Artificial Sequence: Synthetic oligonucleotide
  Antisense strand to SEQ ID NO: 2563680
auaggaacacgcuagcaug

SEQ ID NO: 2563682 - RNA, 19 nt, Artificial Sequence
  Description of Artificial Sequence: Synthetic oligonucleotide
  Sense strand starting at position 3091 of SEQ ID NO: 1888885
uguauaaauguggacacuu

SEQ ID NO: 2563683 - RNA, 19 nt, Artificial Sequence
  Description of Artificial Sequence: Synthetic oligonucleotide
  Antisense strand to SEQ ID NO: 2563682
aaguguccacauuuauaca

SEQ ID NO: 2563684 - RNA, 19 nt, Artificial Sequence
  Description of Artificial Sequence: Synthetic oligonucleotide
  Sense strand starting at position 3214 of SEQ ID NO: 1888885
auuaguuucucauuaggga

SEQ ID NO: 2563685 - RNA, 19 nt, Artificial Sequence
  Description of Artificial Sequence: Synthetic oligonucleotide
  Antisense strand to SEQ ID NO: 2563684
ucccuaaugagaaacuaau

SEQ ID NO: 2563686 - RNA, 19 nt, Artificial Sequence
  Description of Artificial Sequence: Synthetic oligonucleotide
  Sense strand starting at position 3280 of SEQ ID NO: 1888885
acuguuguacaguacucaa

SEQ ID NO: 2563687 - RNA, 19 nt, Artificial Sequence
  Description of Artificial Sequence: Synthetic oligonucleotide
  Antisense strand to SEQ ID NO: 2563686
uugaguacuguacaacagu

SEQ ID NO: 2563688 - RNA, 19 nt, Artificial Sequence
  Description of Artificial Sequence: Synthetic oligonucleotide
  Sense strand starting at position 3444 of SEQ ID NO: 1888885
gggcaagaccuccacucua

SEQ ID NO: 2563689 - RNA, 19 nt, Artificial Sequence
  Description of Artificial Sequence: Synthetic oligonucleotide
  Antisense strand to SEQ ID NO: 2563688
uagaguggaggucuugccc

SEQ ID NO: 2563690 - RNA, 19 nt, Artificial Sequence
  Description of Artificial Sequence: Synthetic oligonucleotide
  Sense strand starting at position 3525 of SEQ ID NO: 1888885
ccagacauguauccacaca

SEQ ID NO: 2563691 - RNA, 19 nt, Artificial Sequence
  Description of Artificial Sequence: Synthetic oligonucleotide
  Antisense strand to SEQ ID NO: 2563690
uguguggauacaugucugg

SEQ ID NO: 2563692 - RNA, 19 nt, Artificial Sequence
  Description of Artificial Sequence: Synthetic oligonucleotide
  Sense strand starting at position 3602 of SEQ ID NO: 1888885
ggagcauaucugcaacaaa

SEQ ID NO: 2563693 - RNA, 19 nt, Artificial Sequence
  Description of Artificial Sequence: Synthetic oligonucleotide
  Antisense strand to SEQ ID NO: 2563692
uuuguugcagauaugcucc

SEQ ID NO: 2563694 - RNA, 19 nt, Artificial Sequence
  Description of Artificial Sequence: Synthetic oligonucleotide
  Sense strand starting at position 3746 of SEQ ID NO: 1888885
aaagauaucggccagguau

SEQ ID NO: 2563695 - RNA, 19 nt, Artificial Sequence
  Description of Artificial Sequence: Synthetic oligonucleotide
  Antisense strand to SEQ ID NO: 2563694
auaccuggccgauaucuuu

SEQ ID NO: 2563696 - RNA, 19 nt, Artificial Sequence
  Description of Artificial Sequence: Synthetic oligonucleotide
  Sense strand starting at position 650 of SEQ ID NO: 1888886
ccugaauauuccuuaggga

SEQ ID NO: 2563697 - RNA, 19 nt, Artificial Sequence
  Description of Artificial Sequence: Synthetic oligonucleotide
  Antisense strand to SEQ ID NO: 2563696
ucccuaaggaauauucagg

SEQ ID NO: 2563698 - RNA, 19 nt, Artificial Sequence
  Description of Artificial Sequence: Synthetic oligonucleotide
  Sense strand starting at position 819 of SEQ ID NO: 1888886
aucucugugcuccagcaaa

SEQ ID NO: 2563699 - RNA, 19 nt, Artificial Sequence
  Description of Artificial Sequence: Synthetic oligonucleotide
  Antisense strand to SEQ ID NO: 2563698
uuugcuggagcacagagau

SEQ ID NO: 2563700 - RNA, 19 nt, Artificial Sequence
  Description of Artificial Sequence: Synthetic oligonucleotide
  Sense strand starting at position 1536 of SEQ ID NO: 1888886
ugagauaagaccugguuuc

SEQ ID NO: 2563701 - RNA, 19 nt, Artificial Sequence
  Description of Artificial Sequence: Synthetic oligonucleotide
  Antisense strand to SEQ ID NO: 2563700
gaaaccaggucuuaucuca

SEQ ID NO: 2563702 - RNA, 19 nt, Artificial Sequence
  Description of Artificial Sequence: Synthetic oligonucleotide
  Sense strand starting at position 1578 of SEQ ID NO: 1888886
cagggcaggcauuaucaau

SEQ ID NO: 2563703 - RNA, 19 nt, Artificial Sequence
  Description of Artificial Sequence: Synthetic oligonucleotide
  Antisense strand to SEQ ID NO: 2563702
auugauaaugccugcccug

SEQ ID NO: 2563704 - RNA, 19 nt, Artificial Sequence
  Description of Artificial Sequence: Synthetic oligonucleotide
  Sense strand starting at position 1608 of SEQ ID NO: 1888886
gguacuugagaugaagugu

SEQ ID NO: 2563705 - RNA, 19 nt, Artificial Sequence
  Description of Artificial Sequence: Synthetic oligonucleotide
  Antisense strand to SEQ ID NO: 2563704
acacuucaucucaaguacc

SEQ ID NO: 2563706 - RNA, 19 nt, Artificial Sequence
  Description of Artificial Sequence: Synthetic oligonucleotide
  Sense strand starting at position 1619 of SEQ ID NO: 1888886
ugaaguguauuugcuauca

SEQ ID NO: 2563707 - RNA, 19 nt, Artificial Sequence
  Description of Artificial Sequence: Synthetic oligonucleotide
  Antisense strand to SEQ ID NO: 2563706
ugauagcaaauacacuuca

SEQ ID NO: 2563708 - RNA, 19 nt, Artificial Sequence
  Description of Artificial Sequence: Synthetic oligonucleotide
  Sense strand starting at position 1707 of SEQ ID NO: 1888886
ugaagagagcuuggacguu

SEQ ID NO: 2563709 - RNA, 19 nt, Artificial Sequence
  Description of Artificial Sequence: Synthetic oligonucleotide
  Antisense strand to SEQ ID NO: 2563708
aacguccaagcucucuuca

SEQ ID NO: 2563710 - RNA, 19 nt, Artificial Sequence
  Description of Artificial Sequence: Synthetic oligonucleotide
  Sense strand starting at position 1777 of SEQ ID NO: 1888886
cccaauuaaugucuguuga

SEQ ID NO: 2563711 - RNA, 19 nt, Artificial Sequence
  Description of Artificial Sequence: Synthetic oligonucleotide
  Antisense strand to SEQ ID NO: 2563710
ucaacagacauuaauuggg

SEQ ID NO: 2563712 - RNA, 19 nt, Artificial Sequence
  Description of Artificial Sequence: Synthetic oligonucleotide
  Sense strand starting at position 1778 of SEQ ID NO: 1888886
ccaauuaaugucuguugau

SEQ ID NO: 2563713 - RNA, 19 nt, Artificial Sequence
  Description of Artificial Sequence: Synthetic oligonucleotide
  Antisense strand to SEQ ID NO: 2563712
aucaacagacauuaauugg

SEQ ID NO: 2563714 - RNA, 19 nt, Artificial Sequence
  Description of Artificial Sequence: Synthetic oligonucleotide
  Sense strand starting at position 1846 of SEQ ID NO: 1888886
cggauuaggcacugugaau

SEQ ID NO: 2563715 - RNA, 19 nt, Artificial Sequence
  Description of Artificial Sequence: Synthetic oligonucleotide
  Antisense strand to SEQ ID NO: 2563714
auucacagugccuaauccg

SEQ ID NO: 2563716 - RNA, 19 nt, Artificial Sequence
  Description of Artificial Sequence: Synthetic oligonucleotide
  Sense strand starting at position 1884 of SEQ ID NO: 1888886
uguccuugcccuuaaggaa

SEQ ID NO: 2563717 - RNA, 19 nt, Artificial Sequence
  Description of Artificial Sequence: Synthetic oligonucleotide
  Antisense strand to SEQ ID NO: 2563716
uuccuuaagggcaaggaca

SEQ ID NO: 2563718 - RNA, 19 nt, Artificial Sequence
  Description of Artificial Sequence: Synthetic oligonucleotide
  Sense strand starting at position 1988 of SEQ ID NO: 1888886
uauccauccgaguaggauu

SEQ ID NO: 2563719 - RNA, 19 nt, Artificial Sequence
  Description of Artificial Sequence: Synthetic oligonucleotide
  Antisense strand to SEQ ID NO: 2563718
aauccuacucggauggaua

SEQ ID NO: 2563720 - RNA, 19 nt, Artificial Sequence
  Description of Artificial Sequence: Synthetic oligonucleotide
  Sense strand starting at position 2123 of SEQ ID NO: 1888886
guaauuaauguauagagug

SEQ ID NO: 2563721 - RNA, 19 nt, Artificial Sequence
  Description of Artificial Sequence: Synthetic oligonucleotide
  Antisense strand to SEQ ID NO: 2563720
cacucuauacauuaauuac

SEQ ID NO: 2563722 - RNA, 19 nt, Artificial Sequence
  Description of Artificial Sequence: Synthetic oligonucleotide
  Sense strand starting at position 2324 of SEQ ID NO: 1888886
gguguaauacaacaacuuu

SEQ ID NO: 2563723 - RNA, 19 nt, Artificial Sequence
  Description of Artificial Sequence: Synthetic oligonucleotide
  Antisense strand to SEQ ID NO: 2563722
aaaguuguuguauuacacc

SEQ ID NO: 2563724 - RNA, 19 nt, Artificial Sequence
  Description of Artificial Sequence: Synthetic oligonucleotide
  Sense strand starting at position 2375 of SEQ ID NO: 1888886
ggcaauagauuagucacua

SEQ ID NO: 2563725 - RNA, 19 nt, Artificial Sequence
  Description of Artificial Sequence: Synthetic oligonucleotide
  Antisense strand to SEQ ID NO: 2563724
uagugacuaaucuauugcc

SEQ ID NO: 2563726 - RNA, 19 nt, Artificial Sequence
  Description of Artificial Sequence: Synthetic oligonucleotide
  Sense strand starting at position 2376 of SEQ ID NO: 1888886
gcaauagauuagucacuag

SEQ ID NO: 2563727 - RNA, 19 nt, Artificial Sequence
  Description of Artificial Sequence: Synthetic oligonucleotide
  Antisense strand to SEQ ID NO: 2563726
cuagugacuaaucuauugc

SEQ ID NO: 2563728 - RNA, 19 nt, Artificial Sequence
  Description of Artificial Sequence: Synthetic oligonucleotide
  Sense strand starting at position 2379 of SEQ ID NO: 1888886
auagauuagucacuagauc

SEQ ID NO: 2563729 - RNA, 19 nt, Artificial Sequence
  Description of Artificial Sequence: Synthetic oligonucleotide
  Antisense strand to SEQ ID NO: 2563728
gaucuagugacuaaucuau

SEQ ID NO: 2563730 - RNA, 19 nt, Artificial Sequence
  Description of Artificial Sequence: Synthetic oligonucleotide
  Sense strand starting at position 2388 of SEQ ID NO: 1888886
ucacuagaucauggaguga

SEQ ID NO: 2563731 - RNA, 19 nt, Artificial Sequence
  Description of Artificial Sequence: Synthetic oligonucleotide
  Antisense strand to SEQ ID NO: 2563730
ucacuccaugaucuaguga

SEQ ID NO: 2563732 - RNA, 19 nt, Artificial Sequence
  Description of Artificial Sequence: Synthetic oligonucleotide
  Sense strand starting at position 2512 of SEQ ID NO: 1888886
acccuaacaucgucacuga

SEQ ID NO: 2563733 - RNA, 19 nt, Artificial Sequence
  Description of Artificial Sequence: Synthetic oligonucleotide
  Antisense strand to SEQ ID NO: 2563732
ucagugacgauguuagggu

SEQ ID NO: 2563734 - RNA, 19 nt, Artificial Sequence
  Description of Artificial Sequence: Synthetic oligonucleotide
  Sense strand starting at position 2513 of SEQ ID NO: 1888886
cccuaacaucgucacugau

SEQ ID NO: 2563735 - RNA, 19 nt, Artificial Sequence
  Description of Artificial Sequence: Synthetic oligonucleotide
  Antisense strand to SEQ ID NO: 2563734
aucagugacgauguuaggg

SEQ ID NO: 2563736 - RNA, 19 nt, Artificial Sequence
  Description of Artificial Sequence: Synthetic oligonucleotide
  Sense strand starting at position 2515 of SEQ ID NO: 1888886
cuaacaucgucacugauca

SEQ ID NO: 2563737 - RNA, 19 nt, Artificial Sequence
  Description of Artificial Sequence: Synthetic oligonucleotide
  Antisense strand to SEQ ID NO: 2563736
ugaucagugacgauguuag

SEQ ID NO: 2563738 - RNA, 19 nt, Artificial Sequence
  Description of Artificial Sequence: Synthetic oligonucleotide
  Sense strand starting at position 2578 of SEQ ID NO: 1888886
ugucauagucaacaccauu

SEQ ID NO: 2563739 - RNA, 19 nt, Artificial Sequence
  Description of Artificial Sequence: Synthetic oligonucleotide
  Antisense strand to SEQ ID NO: 2563738
aaugguguugacuaugaca

SEQ ID NO: 2563740 - RNA, 19 nt, Artificial Sequence
  Description of Artificial Sequence: Synthetic oligonucleotide
  Sense strand starting at position 3017 of SEQ ID NO: 1888886
cccgaagaacauugaguuu

SEQ ID NO: 2563741 - RNA, 19 nt, Artificial Sequence
  Description of Artificial Sequence: Synthetic oligonucleotide
  Antisense strand to SEQ ID NO: 2563740
aaacucaauguucuucggg

SEQ ID NO: 2563742 - RNA, 19 nt, Artificial Sequence
  Description of Artificial Sequence: Synthetic oligonucleotide
  Sense strand starting at position 3062 of SEQ ID NO: 1888886
auaaacacucgauauguuu

SEQ ID NO: 2563743 - RNA, 19 nt, Artificial Sequence
  Description of Artificial Sequence: Synthetic oligonucleotide
  Antisense strand to SEQ ID NO: 2563742
aaacauaucgaguguuuau

SEQ ID NO: 2563744 - RNA, 19 nt, Artificial Sequence
  Description of Artificial Sequence: Synthetic oligonucleotide
  Sense strand starting at position 3068 of SEQ ID NO: 1888886
acucgauauguuuagguuu

SEQ ID NO: 2563745 - RNA, 19 nt, Artificial Sequence
  Description of Artificial Sequence: Synthetic oligonucleotide
  Antisense strand to SEQ ID NO: 2563744
aaaccuaaacauaucgagu

SEQ ID NO: 2563746 - RNA, 19 nt, Artificial Sequence
  Description of Artificial Sequence: Synthetic oligonucleotide
  Sense strand starting at position 3193 of SEQ ID NO: 1888886
ucaauugagucuuugauau

SEQ ID NO: 2563747 - RNA, 19 nt, Artificial Sequence
  Description of Artificial Sequence: Synthetic oligonucleotide
  Antisense strand to SEQ ID NO: 2563746
auaucaaagacucaauuga

SEQ ID NO: 2563748 - RNA, 19 nt, Artificial Sequence
  Description of Artificial Sequence: Synthetic oligonucleotide
  Sense strand starting at position 3269 of SEQ ID NO: 1888886
gugggagauaugugacagu

SEQ ID NO: 2563749 - RNA, 19 nt, Artificial Sequence
  Description of Artificial Sequence: Synthetic oligonucleotide
  Antisense strand to SEQ ID NO: 2563748
acugucacauaucucccac

SEQ ID NO: 2563750 - RNA, 19 nt, Artificial Sequence
  Description of Artificial Sequence: Synthetic oligonucleotide
  Sense strand starting at position 3294 of SEQ ID NO: 1888886
aggccugcuacugaugaga

SEQ ID NO: 2563751 - RNA, 19 nt, Artificial Sequence
  Description of Artificial Sequence: Synthetic oligonucleotide
  Antisense strand to SEQ ID NO: 2563750
ucucaucaguagcaggccu

SEQ ID NO: 2563752 - RNA, 19 nt, Artificial Sequence
  Description of Artificial Sequence: Synthetic oligonucleotide
  Sense strand starting at position 3363 of SEQ ID NO: 1888886
cuaggugucucccugagaa

SEQ ID NO: 2563753 - RNA, 19 nt, Artificial Sequence
  Description of Artificial Sequence: Synthetic oligonucleotide
  Antisense strand to SEQ ID NO: 2563752
uucucagggagacaccuag

SEQ ID NO: 2563754 - RNA, 19 nt, Artificial Sequence
  Description of Artificial Sequence: Synthetic oligonucleotide
  Sense strand starting at position 3365 of SEQ ID NO: 1888886
aggugucucccugagaauc

SEQ ID NO: 2563755 - RNA, 19 nt, Artificial Sequence
  Description of Artificial Sequence: Synthetic oligonucleotide
  Antisense strand to SEQ ID NO: 2563754
gauucucagggagacaccu

SEQ ID NO: 2563756 - RNA, 19 nt, Artificial Sequence
  Description of Artificial Sequence: Synthetic oligonucleotide
  Sense strand starting at position 3421 of SEQ ID NO: 1888886
gcacaaucuguacagucaa

SEQ ID NO: 2563757 - RNA, 19 nt, Artificial Sequence
  Description of Artificial Sequence: Synthetic oligonucleotide
  Antisense strand to SEQ ID NO: 2563756
uugacuguacagauugugc

SEQ ID NO: 2563758 - RNA, 19 nt, Artificial Sequence
  Description of Artificial Sequence: Synthetic oligonucleotide
  Sense strand starting at position 3543 of SEQ ID NO: 1888886
guucuauuaugucuauaca

SEQ ID NO: 2563759 - RNA, 19 nt, Artificial Sequence
  Description of Artificial Sequence: Synthetic oligonucleotide
  Antisense strand to SEQ ID NO: 2563758
uguauagacauaauagaac

SEQ ID NO: 2563760 - RNA, 19 nt, Artificial Sequence
  Description of Artificial Sequence: Synthetic oligonucleotide
  Sense strand starting at position 3546 of SEQ ID NO: 1888886
cuauuaugucuauacaguc

SEQ ID NO: 2563761 - RNA, 19 nt, Artificial Sequence
  Description of Artificial Sequence: Synthetic oligonucleotide
  Antisense strand to SEQ ID NO: 2563760
gacuguauagacauaauag

SEQ ID NO: 2563762 - RNA, 19 nt, Artificial Sequence
  Description of Artificial Sequence: Synthetic oligonucleotide
  Sense strand starting at position 3563 of SEQ ID NO: 1888886
ucaugugcugccuaacaau

SEQ ID NO: 2563763 - RNA, 19 nt, Artificial Sequence
  Description of Artificial Sequence: Synthetic oligonucleotide
  Antisense strand to SEQ ID NO: 2563762
auuguuaggcagcacauga

SEQ ID NO: 2563764 - RNA, 19 nt, Artificial Sequence
  Description of Artificial Sequence: Synthetic oligonucleotide
  Sense strand starting at position 3606 of SEQ ID NO: 1888886
auaugacaguugucccaca

SEQ ID NO: 2563765 - RNA, 19 nt, Artificial Sequence
  Description of Artificial Sequence: Synthetic oligonucleotide
  Antisense strand to SEQ ID NO: 2563764
ugugggacaacugucauau

SEQ ID NO: 2563766 - RNA, 19 nt, Artificial Sequence
  Description of Artificial Sequence: Synthetic oligonucleotide
  Sense strand starting at position 3677 of SEQ ID NO: 1888886
auauauguuuagguacaca

SEQ ID NO: 2563767 - RNA, 19 nt, Artificial Sequence
  Description of Artificial Sequence: Synthetic oligonucleotide
  Antisense strand to SEQ ID NO: 2563766
uguguaccuaaacauauau

SEQ ID NO: 2563768 - RNA, 19 nt, Artificial Sequence
  Description of Artificial Sequence: Synthetic oligonucleotide
  Sense strand starting at position 3771 of SEQ ID NO: 1888886
uguaauaggcuauaccauu

SEQ ID NO: 2563769 - RNA, 19 nt, Artificial Sequence
  Description of Artificial Sequence: Synthetic oligonucleotide
  Antisense strand to SEQ ID NO: 2563768
aaugguauagccuauuaca

SEQ ID NO: 2563770 - RNA, 19 nt, Artificial Sequence
  Description of Artificial Sequence: Synthetic oligonucleotide
  Sense strand starting at position 3801 of SEQ ID NO: 1888886
guguuaauauacucuauga

SEQ ID NO: 2563771 - RNA, 19 nt, Artificial Sequence
  Description of Artificial Sequence: Synthetic oligonucleotide
  Antisense strand to SEQ ID NO: 2563770
ucauagaguauauuaacac

SEQ ID NO: 2563772 - RNA, 19 nt, Artificial Sequence
  Description of Artificial Sequence: Synthetic oligonucleotide
  Sense strand starting at position 3874 of SEQ ID NO: 1888886
cuaagcaaugcaugacuaa

SEQ ID NO: 2563773 - RNA, 19 nt, Artificial Sequence
  Description of Artificial Sequence: Synthetic oligonucleotide
  Antisense strand to SEQ ID NO: 2563772
uuagucaugcauugcuuag

SEQ ID NO: 2563774 - RNA, 19 nt, Artificial Sequence
  Description of Artificial Sequence: Synthetic oligonucleotide
  Sense strand starting at position 3877 of SEQ ID NO: 1888886
agcaaugcaugacuaaauu

SEQ ID NO: 2563775 - RNA, 19 nt, Artificial Sequence
  Description of Artificial Sequence: Synthetic oligonucleotide
  Antisense strand to SEQ ID NO: 2563774
aauuuagucaugcauugcu

SEQ ID NO: 2563776 - RNA, 19 nt, Artificial Sequence
  Description of Artificial Sequence: Synthetic oligonucleotide
  Sense strand starting at position 138 of SEQ ID NO: 1888887
cucuaaaugguauagccua

SEQ ID NO: 2563777 - RNA, 19 nt, Artificial Sequence
  Description of Artificial Sequence: Synthetic oligonucleotide
  Antisense strand to SEQ ID NO: 2563776
uaggcuauaccauuuagag

SEQ ID NO: 2563778 - RNA, 19 nt, Artificial Sequence
  Description of Artificial Sequence: Synthetic oligonucleotide
  Sense strand starting at position 447 of SEQ ID NO: 1888887
auauucuuuggaugaaugu

SEQ ID NO: 2563779 - RNA, 19 nt, Artificial Sequence
  Description of Artificial Sequence: Synthetic oligonucleotide
  Antisense strand to SEQ ID NO: 2563778
acauucauccaaagaauau

SEQ ID NO: 2563780 - RNA, 19 nt, Artificial Sequence
  Description of Artificial Sequence: Synthetic oligonucleotide
  Sense strand starting at position 448 of SEQ ID NO: 1888887
uauucuuuggaugaauguu

SEQ ID NO: 2563781 - RNA, 19 nt, Artificial Sequence
  Description of Artificial Sequence: Synthetic oligonucleotide
  Antisense strand to SEQ ID NO: 2563780
aacauucauccaaagaaua

SEQ ID NO: 2563782 - RNA, 19 nt, Artificial Sequence
  Description of Artificial Sequence: Synthetic oligonucleotide
  Sense strand starting at position 539 of SEQ ID NO: 1888887
augaaauguugauucucag

SEQ ID NO: 2563783 - RNA, 19 nt, Artificial Sequence
  Description of Artificial Sequence: Synthetic oligonucleotide
  Antisense strand to SEQ ID NO: 2563782
cugagaaucaacauuucau

SEQ ID NO: 2563784 - RNA, 19 nt, Artificial Sequence
  Description of Artificial Sequence: Synthetic oligonucleotide
  Sense strand starting at position 542 of SEQ ID NO: 1888887
aaauguugauucucaggga

SEQ ID NO: 2563785 - RNA, 19 nt, Artificial Sequence
  Description of Artificial Sequence: Synthetic oligonucleotide
  Antisense strand to SEQ ID NO: 2563784
ucccugagaaucaacauuu

SEQ ID NO: 2563786 - RNA, 19 nt, Artificial Sequence
  Description of Artificial Sequence: Synthetic oligonucleotide
  Sense strand starting at position 546 of SEQ ID NO: 1888887
guugauucucagggagaca

SEQ ID NO: 2563787 - RNA, 19 nt, Artificial Sequence
  Description of Artificial Sequence: Synthetic oligonucleotide
  Antisense strand to SEQ ID NO: 2563786
ugucucccugagaaucaac

SEQ ID NO: 2563788 - RNA, 19 nt, Artificial Sequence
  Description of Artificial Sequence: Synthetic oligonucleotide
  Sense strand starting at position 573 of SEQ ID NO: 1888887
ccugaauugcagcagacau

SEQ ID NO: 2563789 - RNA, 19 nt, Artificial Sequence
  Description of Artificial Sequence: Synthetic oligonucleotide
  Antisense strand to SEQ ID NO: 2563788
augucugcugcaauucagg

SEQ ID NO: 2563790 - RNA, 19 nt, Artificial Sequence
  Description of Artificial Sequence: Synthetic oligonucleotide
  Sense strand starting at position 807 of SEQ ID NO: 1888887
ugacuauaucugcaaguaa

SEQ ID NO: 2563791 - RNA, 19 nt, Artificial Sequence
  Description of Artificial Sequence: Synthetic oligonucleotide
  Antisense strand to SEQ ID NO: 2563790
uuacuugcagauauaguca

SEQ ID NO: 2563792 - RNA, 19 nt, Artificial Sequence
  Description of Artificial Sequence: Synthetic oligonucleotide
  Sense strand starting at position 879 of SEQ ID NO: 1888887
uuugcaaagguauauucua

SEQ ID NO: 2563793 - RNA, 19 nt, Artificial Sequence
  Description of Artificial Sequence: Synthetic oligonucleotide
  Antisense strand to SEQ ID NO: 2563792
uagaauauaccuuugcaaa

SEQ ID NO: 2563794 - RNA, 19 nt, Artificial Sequence
  Description of Artificial Sequence: Synthetic oligonucleotide
  Sense strand starting at position 928 of SEQ ID NO: 1888887
uaaggcucugaguauugau

SEQ ID NO: 2563795 - RNA, 19 nt, Artificial Sequence
  Description of Artificial Sequence: Synthetic oligonucleotide
  Antisense strand to SEQ ID NO: 2563794
aucaauacucagagccuua

SEQ ID NO: 2563796 - RNA, 19 nt, Artificial Sequence
  Description of Artificial Sequence: Synthetic oligonucleotide
  Sense strand starting at position 959 of SEQ ID NO: 1888887
gagaauggcuuucuaugac

SEQ ID NO: 2563797 - RNA, 19 nt, Artificial Sequence
  Description of Artificial Sequence: Synthetic oligonucleotide
  Antisense strand to SEQ ID NO: 2563796
gucauagaaagccauucuc

SEQ ID NO: 2563798 - RNA, 19 nt, Artificial Sequence
  Description of Artificial Sequence: Synthetic oligonucleotide
  Sense strand starting at position 966 of SEQ ID NO: 1888887
gcuuucuaugaccagaaug

SEQ ID NO: 2563799 - RNA, 19 nt, Artificial Sequence
  Description of Artificial Sequence: Synthetic oligonucleotide
  Antisense strand to SEQ ID NO: 2563798
cauucuggucauagaaagc

SEQ ID NO: 2563800 - RNA, 19 nt, Artificial Sequence
  Description of Artificial Sequence: Synthetic oligonucleotide
  Sense strand starting at position 974 of SEQ ID NO: 1888887
ugaccagaaugguuaguga

SEQ ID NO: 2563801 - RNA, 19 nt, Artificial Sequence
  Description of Artificial Sequence: Synthetic oligonucleotide
  Antisense strand to SEQ ID NO: 2563800
ucacuaaccauucugguca

SEQ ID NO: 2563802 - RNA, 19 nt, Artificial Sequence
  Description of Artificial Sequence: Synthetic oligonucleotide
  Sense strand starting at position 977 of SEQ ID NO: 1888887
ccagaaugguuagugauga

SEQ ID NO: 2563803 - RNA, 19 nt, Artificial Sequence
  Description of Artificial Sequence: Synthetic oligonucleotide
  Antisense strand to SEQ ID NO: 2563802
ucaucacuaaccauucugg

SEQ ID NO: 2563804 - RNA, 19 nt, Artificial Sequence
  Description of Artificial Sequence: Synthetic oligonucleotide
  Sense strand starting at position 1044 of SEQ ID NO: 1888887
gccaucaagaguugggaaa

SEQ ID NO: 2563805 - RNA, 19 nt, Artificial Sequence
  Description of Artificial Sequence: Synthetic oligonucleotide
  Antisense strand to SEQ ID NO: 2563804
uuucccaacucuugauggc

SEQ ID NO: 2563806 - RNA, 19 nt, Artificial Sequence
  Description of Artificial Sequence: Synthetic oligonucleotide
  Sense strand starting at position 1261 of SEQ ID NO: 1888887
gggacuaauuauguaaauu

SEQ ID NO: 2563807 - RNA, 19 nt, Artificial Sequence
  Description of Artificial Sequence: Synthetic oligonucleotide
  Antisense strand to SEQ ID NO: 2563806
aauuuacauaauuaguccc

SEQ ID NO: 2563808 - RNA, 19 nt, Artificial Sequence
  Description of Artificial Sequence: Synthetic oligonucleotide
  Sense strand starting at position 1282 of SEQ ID NO: 1888887
uuagaacaggccuggaaua

SEQ ID NO: 2563809 - RNA, 19 nt, Artificial Sequence
  Description of Artificial Sequence: Synthetic oligonucleotide
  Antisense strand to SEQ ID NO: 2563808
uauuccaggccuguucuaa

SEQ ID NO: 2563810 - RNA, 19 nt, Artificial Sequence
  Description of Artificial Sequence: Synthetic oligonucleotide
  Sense strand starting at position 1283 of SEQ ID NO: 1888887
uagaacaggccuggaauau

SEQ ID NO: 2563811 - RNA, 19 nt, Artificial Sequence
  Description of Artificial Sequence: Synthetic oligonucleotide
  Antisense strand to SEQ ID NO: 2563810
auauuccaggccuguucua

SEQ ID NO: 2563812 - RNA, 19 nt, Artificial Sequence
  Description of Artificial Sequence: Synthetic oligonucleotide
  Sense strand starting at position 1393 of SEQ ID NO: 1888887
uuugaaugaucagugacga

SEQ ID NO: 2563813 - RNA, 19 nt, Artificial Sequence
  Description of Artificial Sequence: Synthetic oligonucleotide
  Antisense strand to SEQ ID NO: 2563812
ucgucacugaucauucaaa

SEQ ID NO: 2563814 - RNA, 19 nt, Artificial Sequence
  Description of Artificial Sequence: Synthetic oligonucleotide
  Sense strand starting at position 1394 of SEQ ID NO: 1888887
uugaaugaucagugacgau

SEQ ID NO: 2563815 - RNA, 19 nt, Artificial Sequence
  Description of Artificial Sequence: Synthetic oligonucleotide
  Antisense strand to SEQ ID NO: 2563814
aucgucacugaucauucaa

SEQ ID NO: 2563816 - RNA, 19 nt, Artificial Sequence
  Description of Artificial Sequence: Synthetic oligonucleotide
  Sense strand starting at position 1398 of SEQ ID NO: 1888887
augaucagugacgauguua

SEQ ID NO: 2563817 - RNA, 19 nt, Artificial Sequence
  Description of Artificial Sequence: Synthetic oligonucleotide
  Antisense strand to SEQ ID NO: 2563816
uaacaucgucacugaucau

SEQ ID NO: 2563818 - RNA, 19 nt, Artificial Sequence
  Description of Artificial Sequence: Synthetic oligonucleotide
  Sense strand starting at position 1533 of SEQ ID NO: 1888887
augaucuagugacuaaucu

SEQ ID NO: 2563819 - RNA, 19 nt, Artificial Sequence
  Description of Artificial Sequence: Synthetic oligonucleotide
  Antisense strand to SEQ ID NO: 2563818
agauuagucacuagaucau

SEQ ID NO: 2563820 - RNA, 19 nt, Artificial Sequence
  Description of Artificial Sequence: Synthetic oligonucleotide
  Sense strand starting at position 1599 of SEQ ID NO: 1888887
guauuacaccugcauaaag

SEQ ID NO: 2563821 - RNA, 19 nt, Artificial Sequence
  Description of Artificial Sequence: Synthetic oligonucleotide
  Antisense strand to SEQ ID NO: 2563820
cuuuaugcagguguaauac

SEQ ID NO: 2563822 - RNA, 19 nt, Artificial Sequence
  Description of Artificial Sequence: Synthetic oligonucleotide
  Sense strand starting at position 1922 of SEQ ID NO: 1888887
aagaaauccuacucggaug

SEQ ID NO: 2563823 - RNA, 19 nt, Artificial Sequence
  Description of Artificial Sequence: Synthetic oligonucleotide
  Antisense strand to SEQ ID NO: 2563822
cauccgaguaggauuucuu

SEQ ID NO: 2563824 - RNA, 19 nt, Artificial Sequence
  Description of Artificial Sequence: Synthetic oligonucleotide
  Sense strand starting at position 1927 of SEQ ID NO: 1888887
auccuacucggauggauau

SEQ ID NO: 2563825 - RNA, 19 nt, Artificial Sequence
  Description of Artificial Sequence: Synthetic oligonucleotide
  Antisense strand to SEQ ID NO: 2563824
auauccauccgaguaggau

SEQ ID NO: 2563826 - RNA, 19 nt, Artificial Sequence
  Description of Artificial Sequence: Synthetic oligonucleotide
  Sense strand starting at position 1928 of SEQ ID NO: 1888887
uccuacucggauggauaua

SEQ ID NO: 2563827 - RNA, 19 nt, Artificial Sequence
  Description of Artificial Sequence: Synthetic oligonucleotide
  Antisense strand to SEQ ID NO: 2563826
uauauccauccgaguagga

SEQ ID NO: 2563828 - RNA, 19 nt, Artificial Sequence
  Description of Artificial Sequence: Synthetic oligonucleotide
  Sense strand starting at position 1999 of SEQ ID NO: 1888887
ugucuauggcucucgucua

SEQ ID NO: 2563829 - RNA, 19 nt, Artificial Sequence
  Description of Artificial Sequence: Synthetic oligonucleotide
  Antisense strand to SEQ ID NO: 2563828
uagacgagagccauagaca

SEQ ID NO: 2563830 - RNA, 19 nt, Artificial Sequence
  Description of Artificial Sequence: Synthetic oligonucleotide
  Sense strand starting at position 2043 of SEQ ID NO: 1888887
aggacagugccuuacucau

SEQ ID NO: 2563831 - RNA, 19 nt, Artificial Sequence
  Description of Artificial Sequence: Synthetic oligonucleotide
  Antisense strand to SEQ ID NO: 2563830
augaguaaggcacuguccu

SEQ ID NO: 2563832 - RNA, 19 nt, Artificial Sequence
  Description of Artificial Sequence: Synthetic oligonucleotide
  Sense strand starting at position 2075 of SEQ ID NO: 1888887
gugccuaauccggugcaca

SEQ ID NO: 2563833 - RNA, 19 nt, Artificial Sequence
  Description of Artificial Sequence: Synthetic oligonucleotide
  Antisense strand to SEQ ID NO: 2563832
ugugcaccggauuaggcac

SEQ ID NO: 2563834 - RNA, 19 nt, Artificial Sequence
  Description of Artificial Sequence: Synthetic oligonucleotide
  Sense strand starting at position 2657 of SEQ ID NO: 1888887
gcuccuguggcugauauuu

SEQ ID NO: 2563835 - RNA, 19 nt, Artificial Sequence
  Description of Artificial Sequence: Synthetic oligonucleotide
  Antisense strand to SEQ ID NO: 2563834
aaauaucagccacaggagc

SEQ ID NO: 2563836 - RNA, 19 nt, Artificial Sequence
  Description of Artificial Sequence: Synthetic oligonucleotide
  Sense strand starting at position 2880 of SEQ ID NO: 1888887
ugaaucauuuaacaugaga

SEQ ID NO: 2563837 - RNA, 19 nt, Artificial Sequence
  Description of Artificial Sequence: Synthetic oligonucleotide
  Antisense strand to SEQ ID NO: 2563836
ucucauguuaaaugauuca

SEQ ID NO: 2563838 - RNA, 19 nt, Artificial Sequence
  Description of Artificial Sequence: Synthetic oligonucleotide
  Sense strand starting at position 2947 of SEQ ID NO: 1888887
ggagucauuguagauguga

SEQ ID NO: 2563839 - RNA, 19 nt, Artificial Sequence
  Description of Artificial Sequence: Synthetic oligonucleotide
  Antisense strand to SEQ ID NO: 2563838
ucacaucuacaaugacucc

SEQ ID NO: 2563840 - RNA, 19 nt, Artificial Sequence
  Description of Artificial Sequence: Synthetic oligonucleotide
  Sense strand starting at position 3063 of SEQ ID NO: 1888887
gaggguuagccuuagguaa

SEQ ID NO: 2563841 - RNA, 19 nt, Artificial Sequence
  Description of Artificial Sequence: Synthetic oligonucleotide
  Antisense strand to SEQ ID NO: 2563840
uuaccuaaggcuaacccuc

SEQ ID NO: 2563842 - RNA, 19 nt, Artificial Sequence
  Description of Artificial Sequence: Synthetic oligonucleotide
  Sense strand starting at position 3314 of SEQ ID NO: 1888887
gagcuuaugguauaucaaa

SEQ ID NO: 2563843 - RNA, 19 nt, Artificial Sequence
  Description of Artificial Sequence: Synthetic oligonucleotide
  Antisense strand to SEQ ID NO: 2563842
uuugauauaccauaagcuc

SEQ ID NO: 2563844 - RNA, 19 nt, Artificial Sequence
  Description of Artificial Sequence: Synthetic oligonucleotide
  Sense strand starting at position 3344 of SEQ ID NO: 1888887
guuugaaacuggguuagaa

SEQ ID NO: 2563845 - RNA, 19 nt, Artificial Sequence
  Description of Artificial Sequence: Synthetic oligonucleotide
  Antisense strand to SEQ ID NO: 2563844
uucuaacccaguuucaaac

SEQ ID NO: 2563846 - RNA, 19 nt, Artificial Sequence
  Description of Artificial Sequence: Synthetic oligonucleotide
  Sense strand starting at position 3405 of SEQ ID NO: 1888887
aguauuugguugccuugau

SEQ ID NO: 2563847 - RNA, 19 nt, Artificial Sequence
  Description of Artificial Sequence: Synthetic oligonucleotide
  Antisense strand to SEQ ID NO: 2563846
aucaaggcaaccaaauacu

SEQ ID NO: 2563848 - RNA, 19 nt, Artificial Sequence
  Description of Artificial Sequence: Synthetic oligonucleotide
  Sense strand starting at position 3406 of SEQ ID NO: 1888887
guauuugguugccuugauu

SEQ ID NO: 2563849 - RNA, 19 nt, Artificial Sequence
  Description of Artificial Sequence: Synthetic oligonucleotide
  Antisense strand to SEQ ID NO: 2563848
aaucaaggcaaccaaauac

SEQ ID NO: 2563850 - RNA, 19 nt, Artificial Sequence
  Description of Artificial Sequence: Synthetic oligonucleotide
  Sense strand starting at position 3887 of SEQ ID NO: 1888887
agugauaggaccuguaauc

SEQ ID NO: 2563851 - RNA, 19 nt, Artificial Sequence
  Description of Artificial Sequence: Synthetic oligonucleotide
  Antisense strand to SEQ ID NO: 2563850
gauuacagguccuaucacu

SEQ ID NO: 2563852 - RNA, 19 nt, Artificial Sequence
  Description of Artificial Sequence: Synthetic oligonucleotide
  Sense strand starting at position 3943 of SEQ ID NO: 1888887
ugguuaagauaccugugaa

SEQ ID NO: 2563853 - RNA, 19 nt, Artificial Sequence
  Description of Artificial Sequence: Synthetic oligonucleotide
  Antisense strand to SEQ ID NO: 2563852
uucacagguaucuuaacca

SEQ ID NO: 2563854 - RNA, 19 nt, Artificial Sequence
  Description of Artificial Sequence: Synthetic oligonucleotide
  Sense strand starting at position 3944 of SEQ ID NO: 1888887
gguuaagauaccugugaag

SEQ ID NO: 2563855 - RNA, 19 nt, Artificial Sequence
  Description of Artificial Sequence: Synthetic oligonucleotide
  Antisense strand to SEQ ID NO: 2563854
cuucacagguaucuuaacc

SEQ ID NO: 2563856 - RNA, 19 nt, Artificial Sequence
  Description of Artificial Sequence: Synthetic oligonucleotide
  Sense strand starting at position 31 of SEQ ID NO: 1888888
guauuuggucaaugguucu

SEQ ID NO: 2563857 - RNA, 19 nt, Artificial Sequence
  Description of Artificial Sequence: Synthetic oligonucleotide
  Antisense strand to SEQ ID NO: 2563856
agaaccauugaccaaauac

SEQ ID NO: 2563858 - RNA, 19 nt, Artificial Sequence
  Description of Artificial Sequence: Synthetic oligonucleotide
  Sense strand starting at position 86 of SEQ ID NO: 1888888
acuugacacuuaguagaua

SEQ ID NO: 2563859 - RNA, 19 nt, Artificial Sequence
  Description of Artificial Sequence: Synthetic oligonucleotide
  Antisense strand to SEQ ID NO: 2563858
uaucuacuaagugucaagu

SEQ ID NO: 2563860 - RNA, 19 nt, Artificial Sequence
  Description of Artificial Sequence: Synthetic oligonucleotide
  Sense strand starting at position 274 of SEQ ID NO: 1888888
auggucaccauaggugaaa

SEQ ID NO: 2563861 - RNA, 19 nt, Artificial Sequence
  Description of Artificial Sequence: Synthetic oligonucleotide
  Antisense strand to SEQ ID NO: 2563860
uuucaccuauggugaccau

SEQ ID NO: 2563862 - RNA, 19 nt, Artificial Sequence
  Description of Artificial Sequence: Synthetic oligonucleotide
  Sense strand starting at position 807 of SEQ ID NO: 1888888
uugagucaucucuggauac

SEQ ID NO: 2563863 - RNA, 19 nt, Artificial Sequence
  Description of Artificial Sequence: Synthetic oligonucleotide
  Antisense strand to SEQ ID NO: 2563862
guauccagagaugacucaa

SEQ ID NO: 2563864 - RNA, 19 nt, Artificial Sequence
  Description of Artificial Sequence: Synthetic oligonucleotide
  Sense strand starting at position 811 of SEQ ID NO: 1888888
gucaucucuggauacagua

SEQ ID NO: 2563865 - RNA, 19 nt, Artificial Sequence
  Description of Artificial Sequence: Synthetic oligonucleotide
  Antisense strand to SEQ ID NO: 2563864
uacuguauccagagaugac

SEQ ID NO: 2563866 - RNA, 19 nt, Artificial Sequence
  Description of Artificial Sequence: Synthetic oligonucleotide
  Sense strand starting at position 891 of SEQ ID NO: 1888888
gucaaauauugcucaacag

SEQ ID NO: 2563867 - RNA, 19 nt, Artificial Sequence
  Description of Artificial Sequence: Synthetic oligonucleotide
  Antisense strand to SEQ ID NO: 2563866
cuguugagcaauauuugac

SEQ ID NO: 2563868 - RNA, 19 nt, Artificial Sequence
  Description of Artificial Sequence: Synthetic oligonucleotide
  Sense strand starting at position 954 of SEQ ID NO: 1888888
ugaugucaauuguuagaag

SEQ ID NO: 2563869 - RNA, 19 nt, Artificial Sequence
  Description of Artificial Sequence: Synthetic oligonucleotide
  Antisense strand to SEQ ID NO: 2563868
cuucuaacaauugacauca

SEQ ID NO: 2563870 - RNA, 19 nt, Artificial Sequence
  Description of Artificial Sequence: Synthetic oligonucleotide
  Sense strand starting at position 1129 of SEQ ID NO: 1888888
gauacuccagccugagaga

SEQ ID NO: 2563871 - RNA, 19 nt, Artificial Sequence
  Description of Artificial Sequence: Synthetic oligonucleotide
  Antisense strand to SEQ ID NO: 2563870
ucucucaggcuggaguauc

SEQ ID NO: 2563872 - RNA, 19 nt, Artificial Sequence
  Description of Artificial Sequence: Synthetic oligonucleotide
  Sense strand starting at position 1277 of SEQ ID NO: 1888888
gacauaaaccaauguguag

SEQ ID NO: 2563873 - RNA, 19 nt, Artificial Sequence
  Description of Artificial Sequence: Synthetic oligonucleotide
  Antisense strand to SEQ ID NO: 2563872
cuacacauugguuuauguc

SEQ ID NO: 2563874 - RNA, 19 nt, Artificial Sequence
  Description of Artificial Sequence: Synthetic oligonucleotide
  Sense strand starting at position 1519 of SEQ ID NO: 1888888
cauggagucgaguaaggua

SEQ ID NO: 2563875 - RNA, 19 nt, Artificial Sequence
  Description of Artificial Sequence: Synthetic oligonucleotide
  Antisense strand to SEQ ID NO: 2563874
uaccuuacucgacuccaug

SEQ ID NO: 2563876 - RNA, 19 nt, Artificial Sequence
  Description of Artificial Sequence: Synthetic oligonucleotide
  Sense strand starting at position 1891 of SEQ ID NO: 1888888
ggcaucuuguuauuugcau

SEQ ID NO: 2563877 - RNA, 19 nt, Artificial Sequence
  Description of Artificial Sequence: Synthetic oligonucleotide
  Antisense strand to SEQ ID NO: 2563876
augcaaauaacaagaugcc

SEQ ID NO: 2563878 - RNA, 19 nt, Artificial Sequence
  Description of Artificial Sequence: Synthetic oligonucleotide
  Sense strand starting at position 1892 of SEQ ID NO: 1888888
gcaucuuguuauuugcaua

SEQ ID NO: 2563879 - RNA, 19 nt, Artificial Sequence
  Description of Artificial Sequence: Synthetic oligonucleotide
  Antisense strand to SEQ ID NO: 2563878
uaugcaaauaacaagaugc

SEQ ID NO: 2563880 - RNA, 19 nt, Artificial Sequence
  Description of Artificial Sequence: Synthetic oligonucleotide
  Sense strand starting at position 1926 of SEQ ID NO: 1888888
augaacaauuucuaggaau

SEQ ID NO: 2563881 - RNA, 19 nt, Artificial Sequence
  Description of Artificial Sequence: Synthetic oligonucleotide
  Antisense strand to SEQ ID NO: 2563880
auuccuagaaauuguucau

SEQ ID NO: 2563882 - RNA, 19 nt, Artificial Sequence
  Description of Artificial Sequence: Synthetic oligonucleotide
  Sense strand starting at position 1957 of SEQ ID NO: 1888888
uuauacauauugucuagga

SEQ ID NO: 2563883 - RNA, 19 nt, Artificial Sequence
  Description of Artificial Sequence: Synthetic oligonucleotide
  Antisense strand to SEQ ID NO: 2563882
uccuagacaauauguauaa

SEQ ID NO: 2563884 - RNA, 19 nt, Artificial Sequence
  Description of Artificial Sequence: Synthetic oligonucleotide
  Sense strand starting at position 1961 of SEQ ID NO: 1888888
acauauugucuaggaauug

SEQ ID NO: 2563885 - RNA, 19 nt, Artificial Sequence
  Description of Artificial Sequence: Synthetic oligonucleotide
  Antisense strand to SEQ ID NO: 2563884
caauuccuagacaauaugu

SEQ ID NO: 2563886 - RNA, 19 nt, Artificial Sequence
  Description of Artificial Sequence: Synthetic oligonucleotide
  Sense strand starting at position 2124 of SEQ ID NO: 1888888
uguaauacagcauagguaa

SEQ ID NO: 2563887 - RNA, 19 nt, Artificial Sequence
  Description of Artificial Sequence: Synthetic oligonucleotide
  Antisense strand to SEQ ID NO: 2563886
uuaccuaugcuguauuaca

SEQ ID NO: 2563888 - RNA, 19 nt, Artificial Sequence
  Description of Artificial Sequence: Synthetic oligonucleotide
  Sense strand starting at position 2204 of SEQ ID NO: 1888888
gaaagaauguaagugcaaa

SEQ ID NO: 2563889 - RNA, 19 nt, Artificial Sequence
  Description of Artificial Sequence: Synthetic oligonucleotide
  Antisense strand to SEQ ID NO: 2563888
uuugcacuuacauucuuuc

SEQ ID NO: 2563890 - RNA, 19 nt, Artificial Sequence
  Description of Artificial Sequence: Synthetic oligonucleotide
  Sense strand starting at position 2341 of SEQ ID NO: 1888888
ccaacaugauggcuauauu

SEQ ID NO: 2563891 - RNA, 19 nt, Artificial Sequence
  Description of Artificial Sequence: Synthetic oligonucleotide
  Antisense strand to SEQ ID NO: 2563890
aauauagccaucauguugg

SEQ ID NO: 2563892 - RNA, 19 nt, Artificial Sequence
  Description of Artificial Sequence: Synthetic oligonucleotide
  Sense strand starting at position 2383 of SEQ ID NO: 1888888
uggcaaugagcccaagaua

SEQ ID NO: 2563893 - RNA, 19 nt, Artificial Sequence
  Description of Artificial Sequence: Synthetic oligonucleotide
  Antisense strand to SEQ ID NO: 2563892
uaucuugggcucauugcca

SEQ ID NO: 2563894 - RNA, 19 nt, Artificial Sequence
  Description of Artificial Sequence: Synthetic oligonucleotide
  Sense strand starting at position 2430 of SEQ ID NO: 1888888
gaugaugauggcuggugau

SEQ ID NO: 2563895 - RNA, 19 nt, Artificial Sequence
  Description of Artificial Sequence: Synthetic oligonucleotide
  Antisense strand to SEQ ID NO: 2563894
aucaccagccaucaucauc

SEQ ID NO: 2563896 - RNA, 19 nt, Artificial Sequence
  Description of Artificial Sequence: Synthetic oligonucleotide
  Sense strand starting at position 2453 of SEQ ID NO: 1888888
auagcauaucucuggauua

SEQ ID NO: 2563897 - RNA, 19 nt, Artificial Sequence
  Description of Artificial Sequence: Synthetic oligonucleotide
  Antisense strand to SEQ ID NO: 2563896
uaauccagagauaugcuau

SEQ ID NO: 2563898 - RNA, 19 nt, Artificial Sequence
  Description of Artificial Sequence: Synthetic oligonucleotide
  Sense strand starting at position 2474 of SEQ ID NO: 1888888
agcugauuagauuagcuua

SEQ ID NO: 2563899 - RNA, 19 nt, Artificial Sequence
  Description of Artificial Sequence: Synthetic oligonucleotide
  Antisense strand to SEQ ID NO: 2563898
uaagcuaaucuaaucagcu

SEQ ID NO: 2563900 - RNA, 19 nt, Artificial Sequence
  Description of Artificial Sequence: Synthetic oligonucleotide
  Sense strand starting at position 2555 of SEQ ID NO: 1888888
acagauuaagacugguuua

SEQ ID NO: 2563901 - RNA, 19 nt, Artificial Sequence
  Description of Artificial Sequence: Synthetic oligonucleotide
  Antisense strand to SEQ ID NO: 2563900
uaaaccagucuuaaucugu

SEQ ID NO: 2563902 - RNA, 19 nt, Artificial Sequence
  Description of Artificial Sequence: Synthetic oligonucleotide
  Sense strand starting at position 2766 of SEQ ID NO: 1888888
auugcaguccuggaaucuu

SEQ ID NO: 2563903 - RNA, 19 nt, Artificial Sequence
  Description of Artificial Sequence: Synthetic oligonucleotide
  Antisense strand to SEQ ID NO: 2563902
aagauuccaggacugcaau

SEQ ID NO: 2563904 - RNA, 19 nt, Artificial Sequence
  Description of Artificial Sequence: Synthetic oligonucleotide
  Sense strand starting at position 2774 of SEQ ID NO: 1888888
ccuggaaucuuucuccaug

SEQ ID NO: 2563905 - RNA, 19 nt, Artificial Sequence
  Description of Artificial Sequence: Synthetic oligonucleotide
  Antisense strand to SEQ ID NO: 2563904
cauggagaaagauuccagg

SEQ ID NO: 2563906 - RNA, 19 nt, Artificial Sequence
  Description of Artificial Sequence: Synthetic oligonucleotide
  Sense strand starting at position 3032 of SEQ ID NO: 1888888
guuugaagaaguuaaguca

SEQ ID NO: 2563907 - RNA, 19 nt, Artificial Sequence
  Description of Artificial Sequence: Synthetic oligonucleotide
  Antisense strand to SEQ ID NO: 2563906
ugacuuaacuucuucaaac

SEQ ID NO: 2563908 - RNA, 19 nt, Artificial Sequence
  Description of Artificial Sequence: Synthetic oligonucleotide
  Sense strand starting at position 3399 of SEQ ID NO: 1888888
uuucucaacugguuaaaug

SEQ ID NO: 2563909 - RNA, 19 nt, Artificial Sequence
  Description of Artificial Sequence: Synthetic oligonucleotide
  Antisense strand to SEQ ID NO: 2563908
cauuuaaccaguugagaaa

SEQ ID NO: 2563910 - RNA, 19 nt, Artificial Sequence
  Description of Artificial Sequence: Synthetic oligonucleotide
  Sense strand starting at position 3449 of SEQ ID NO: 1888888
uugaguuagguggaaguau

SEQ ID NO: 2563911 - RNA, 19 nt, Artificial Sequence
  Description of Artificial Sequence: Synthetic oligonucleotide
  Antisense strand to SEQ ID NO: 2563910
auacuuccaccuaacucaa

SEQ ID NO: 2563912 - RNA, 19 nt, Artificial Sequence
  Description of Artificial Sequence: Synthetic oligonucleotide
  Sense strand starting at position 3487 of SEQ ID NO: 1888888
gggcaagcccuccagagau

SEQ ID NO: 2563913 - RNA, 19 nt, Artificial Sequence
  Description of Artificial Sequence: Synthetic oligonucleotide
  Antisense strand to SEQ ID NO: 2563912
aucucuggagggcuugccc

SEQ ID NO: 2563914 - RNA, 19 nt, Artificial Sequence
  Description of Artificial Sequence: Synthetic oligonucleotide
  Sense strand starting at position 3541 of SEQ ID NO: 1888888
auggcagcccuagaaugau

SEQ ID NO: 2563915 - RNA, 19 nt, Artificial Sequence
  Description of Artificial Sequence: Synthetic oligonucleotide
  Antisense strand to SEQ ID NO: 2563914
aucauucuagggcugccau

SEQ ID NO: 2563916 - RNA, 19 nt, Artificial Sequence
  Description of Artificial Sequence: Synthetic oligonucleotide
  Sense strand starting at position 3571 of SEQ ID NO: 1888888
caguaauaggcugaguaau

SEQ ID NO: 2563917 - RNA, 19 nt, Artificial Sequence
  Description of Artificial Sequence: Synthetic oligonucleotide
  Antisense strand to SEQ ID NO: 2563916
auuacucagccuauuacug

SEQ ID NO: 2563918 - RNA, 19 nt, Artificial Sequence
  Description of Artificial Sequence: Synthetic oligonucleotide
  Sense strand starting at position 3634 of SEQ ID NO: 1888888
acauuuguguucuccuagu

SEQ ID NO: 2563919 - RNA, 19 nt, Artificial Sequence
  Description of Artificial Sequence: Synthetic oligonucleotide
  Antisense strand to SEQ ID NO: 2563918
acuaggagaacacaaaugu

SEQ ID NO: 2563920 - RNA, 19 nt, Artificial Sequence
  Description of Artificial Sequence: Synthetic oligonucleotide
  Sense strand starting at position 3663 of SEQ ID NO: 1888888
uucucucaucuuugggaca

SEQ ID NO: 2563921 - RNA, 19 nt, Artificial Sequence
  Description of Artificial Sequence: Synthetic oligonucleotide
  Antisense strand to SEQ ID NO: 2563920
ugucccaaagaugagagaa

SEQ ID NO: 2563922 - RNA, 19 nt, Artificial Sequence
  Description of Artificial Sequence: Synthetic oligonucleotide
  Sense strand starting at position 3688 of SEQ ID NO: 1888888
agaaaugcccaguggacuu

SEQ ID NO: 2563923 - RNA, 19 nt, Artificial Sequence
  Description of Artificial Sequence: Synthetic oligonucleotide
  Antisense strand to SEQ ID NO: 2563922
aaguccacugggcauuucu

SEQ ID NO: 2563924 - RNA, 19 nt, Artificial Sequence
  Description of Artificial Sequence: Synthetic oligonucleotide
  Sense strand starting at position 3735 of SEQ ID NO: 1888888
gggcucugaccuuaaacca

SEQ ID NO: 2563925 - RNA, 19 nt, Artificial Sequence
  Description of Artificial Sequence: Synthetic oligonucleotide
  Antisense strand to SEQ ID NO: 2563924
ugguuuaaggucagagccc

SEQ ID NO: 2563926 - RNA, 19 nt, Artificial Sequence
  Description of Artificial Sequence: Synthetic oligonucleotide
  Sense strand starting at position 3921 of SEQ ID NO: 1888888
uggaaauauucucugugga

SEQ ID NO: 2563927 - RNA, 19 nt, Artificial Sequence
  Description of Artificial Sequence: Synthetic oligonucleotide
  Antisense strand to SEQ ID NO: 2563926
uccacagagaauauuucca

SEQ ID NO: 2563928 - RNA, 19 nt, Artificial Sequence
  Description of Artificial Sequence: Synthetic oligonucleotide
  Sense strand starting at position 3922 of SEQ ID NO: 1888888
ggaaauauucucuguggau

SEQ ID NO: 2563929 - RNA, 19 nt, Artificial Sequence
  Description of Artificial Sequence: Synthetic oligonucleotide
  Antisense strand to SEQ ID NO: 2563928
auccacagagaauauuucc

SEQ ID NO: 2563930 - RNA, 19 nt, Artificial Sequence
  Description of Artificial Sequence: Synthetic oligonucleotide
  Sense strand starting at position 3923 of SEQ ID NO: 1888888
gaaauauucucuguggaua

SEQ ID NO: 2563931 - RNA, 19 nt, Artificial Sequence
  Description of Artificial Sequence: Synthetic oligonucleotide
  Antisense strand to SEQ ID NO: 2563930
uauccacagagaauauuuc

SEQ ID NO: 2563932 - RNA, 19 nt, Artificial Sequence
  Description of Artificial Sequence: Synthetic oligonucleotide
  Sense strand starting at position 3924 of SEQ ID NO: 1888888
aaauauucucuguggauag

SEQ ID NO: 2563933 - RNA, 19 nt, Artificial Sequence
  Description of Artificial Sequence: Synthetic oligonucleotide
  Antisense strand to SEQ ID NO: 2563932
cuauccacagagaauauuu

SEQ ID NO: 2563934 - RNA, 19 nt, Artificial Sequence
  Description of Artificial Sequence: Synthetic oligonucleotide
  Sense strand starting at position 3942 of SEQ ID NO: 1888888
gauugaaugucaccucuug

SEQ ID NO: 2563935 - RNA, 19 nt, Artificial Sequence
  Description of Artificial Sequence: Synthetic oligonucleotide
  Antisense strand to SEQ ID NO: 2563934
caagaggugacauucaauc

SEQ ID NO: 2563936 - RNA, 19 nt, Artificial Sequence
  Description of Artificial Sequence: Synthetic oligonucleotide
  Sense strand starting at position 105 of SEQ ID NO: 1888889
ccagguuuaguuuauuaca

SEQ ID NO: 2563937 - RNA, 19 nt, Artificial Sequence
  Description of Artificial Sequence: Synthetic oligonucleotide
  Antisense strand to SEQ ID NO: 2563936
uguaauaaacuaaaccugg

SEQ ID NO: 2563938 - RNA, 19 nt, Artificial Sequence
  Description of Artificial Sequence: Synthetic oligonucleotide
  Sense strand starting at position 336 of SEQ ID NO: 1888889
aguucuucccucugagacu

SEQ ID NO: 2563939 - RNA, 19 nt, Artificial Sequence
  Description of Artificial Sequence: Synthetic oligonucleotide
  Antisense strand to SEQ ID NO: 2563938
agucucagagggaagaacu

SEQ ID NO: 2563940 - RNA, 19 nt, Artificial Sequence
  Description of Artificial Sequence: Synthetic oligonucleotide
  Sense strand starting at position 384 of SEQ ID NO: 1888889
cccauuguacuagaguauu

SEQ ID NO: 2563941 - RNA, 19 nt, Artificial Sequence
  Description of Artificial Sequence: Synthetic oligonucleotide
  Antisense strand to SEQ ID NO: 2563940
aauacucuaguacaauggg

SEQ ID NO: 2563942 - RNA, 19 nt, Artificial Sequence
  Description of Artificial Sequence: Synthetic oligonucleotide
  Sense strand starting at position 546 of SEQ ID NO: 1888889
guagcaugguaccuggaua

SEQ ID NO: 2563943 - RNA, 19 nt, Artificial Sequence
  Description of Artificial Sequence: Synthetic oligonucleotide
  Antisense strand to SEQ ID NO: 2563942
uauccagguaccaugcuac

SEQ ID NO: 2563944 - RNA, 19 nt, Artificial Sequence
  Description of Artificial Sequence: Synthetic oligonucleotide
  Sense strand starting at position 665 of SEQ ID NO: 1888889
agaaauaaaucucagagaa

SEQ ID NO: 2563945 - RNA, 19 nt, Artificial Sequence
  Description of Artificial Sequence: Synthetic oligonucleotide
  Antisense strand to SEQ ID NO: 2563944
uucucugagauuuauuucu

SEQ ID NO: 2563946 - RNA, 19 nt, Artificial Sequence
  Description of Artificial Sequence: Synthetic oligonucleotide
  Sense strand starting at position 779 of SEQ ID NO: 1888889
aauguugauucuguacaag

SEQ ID NO: 2563947 - RNA, 19 nt, Artificial Sequence
  Description of Artificial Sequence: Synthetic oligonucleotide
  Antisense strand to SEQ ID NO: 2563946
cuuguacagaaucaacauu

SEQ ID NO: 2563948 - RNA, 19 nt, Artificial Sequence
  Description of Artificial Sequence: Synthetic oligonucleotide
  Sense strand starting at position 1039 of SEQ ID NO: 1888889
gagcgcuuacuuuagggaa

SEQ ID NO: 2563949 - RNA, 19 nt, Artificial Sequence
  Description of Artificial Sequence: Synthetic oligonucleotide
  Antisense strand to SEQ ID NO: 2563948
uucccuaaaguaagcgcuc

SEQ ID NO: 2563950 - RNA, 19 nt, Artificial Sequence
  Description of Artificial Sequence: Synthetic oligonucleotide
  Sense strand starting at position 1103 of SEQ ID NO: 1888889
uucuacaauccgggaauau

SEQ ID NO: 2563951 - RNA, 19 nt, Artificial Sequence
  Description of Artificial Sequence: Synthetic oligonucleotide
  Antisense strand to SEQ ID NO: 2563950
auauucccggauuguagaa

SEQ ID NO: 2563952 - RNA, 19 nt, Artificial Sequence
  Description of Artificial Sequence: Synthetic oligonucleotide
  Sense strand starting at position 1112 of SEQ ID NO: 1888889
ccgggaauaucuuucucaa

SEQ ID NO: 2563953 - RNA, 19 nt, Artificial Sequence
  Description of Artificial Sequence: Synthetic oligonucleotide
  Antisense strand to SEQ ID NO: 2563952
uugagaaagauauucccgg

SEQ ID NO: 2563954 - RNA, 19 nt, Artificial Sequence
  Description of Artificial Sequence: Synthetic oligonucleotide
  Sense strand starting at position 1366 of SEQ ID NO: 1888889
ggcaauagucuugauccau

SEQ ID NO: 2563955 - RNA, 19 nt, Artificial Sequence
  Description of Artificial Sequence: Synthetic oligonucleotide
  Antisense strand to SEQ ID NO: 2563954
auggaucaagacuauugcc

SEQ ID NO: 2563956 - RNA, 19 nt, Artificial Sequence
  Description of Artificial Sequence: Synthetic oligonucleotide
  Sense strand starting at position 1416 of SEQ ID NO: 1888889
ccuguuugucuggugcauu

SEQ ID NO: 2563957 - RNA, 19 nt, Artificial Sequence
  Description of Artificial Sequence: Synthetic oligonucleotide
  Antisense strand to SEQ ID NO: 2563956
aaugcaccagacaaacagg

SEQ ID NO: 2563958 - RNA, 19 nt, Artificial Sequence
  Description of Artificial Sequence: Synthetic oligonucleotide
  Sense strand starting at position 1776 of SEQ ID NO: 1888889
gucauaaugcuauaguaau

SEQ ID NO: 2563959 - RNA, 19 nt, Artificial Sequence
  Description of Artificial Sequence: Synthetic oligonucleotide
  Antisense strand to SEQ ID NO: 2563958
auuacuauagcauuaugac

SEQ ID NO: 2563960 - RNA, 19 nt, Artificial Sequence
  Description of Artificial Sequence: Synthetic oligonucleotide
  Sense strand starting at position 1804 of SEQ ID NO: 1888889
guggaauuagcaugaggac

SEQ ID NO: 2563961 - RNA, 19 nt, Artificial Sequence
  Description of Artificial Sequence: Synthetic oligonucleotide
  Antisense strand to SEQ ID NO: 2563960
guccucaugcuaauuccac

SEQ ID NO: 2563962 - RNA, 19 nt, Artificial Sequence
  Description of Artificial Sequence: Synthetic oligonucleotide
  Sense strand starting at position 2054 of SEQ ID NO: 1888889
ccuguaauaauagguggau

SEQ ID NO: 2563963 - RNA, 19 nt, Artificial Sequence
  Description of Artificial Sequence: Synthetic oligonucleotide
  Antisense strand to SEQ ID NO: 2563962
auccaccuauuauuacagg

SEQ ID NO: 2563964 - RNA, 19 nt, Artificial Sequence
  Description of Artificial Sequence: Synthetic oligonucleotide
  Sense strand starting at position 2055 of SEQ ID NO: 1888889
cuguaauaauagguggauu

SEQ ID NO: 2563965 - RNA, 19 nt, Artificial Sequence
  Description of Artificial Sequence: Synthetic oligonucleotide
  Antisense strand to SEQ ID NO: 2563964
aauccaccuauuauuacag

SEQ ID NO: 2563966 - RNA, 19 nt, Artificial Sequence
  Description of Artificial Sequence: Synthetic oligonucleotide
  Sense strand starting at position 2057 of SEQ ID NO: 1888889
guaauaauagguggauugu

SEQ ID NO: 2563967 - RNA, 19 nt, Artificial Sequence
  Description of Artificial Sequence: Synthetic oligonucleotide
  Antisense strand to SEQ ID NO: 2563966
acaauccaccuauuauuac

SEQ ID NO: 2563968 - RNA, 19 nt, Artificial Sequence
  Description of Artificial Sequence: Synthetic oligonucleotide
  Sense strand starting at position 2199 of SEQ ID NO: 1888889
ugaagugaacuauguuaaa

SEQ ID NO: 2563969 - RNA, 19 nt, Artificial Sequence
  Description of Artificial Sequence: Synthetic oligonucleotide
  Antisense strand to SEQ ID NO: 2563968
uuuaacauaguucacuuca

SEQ ID NO: 2563970 - RNA, 19 nt, Artificial Sequence
  Description of Artificial Sequence: Synthetic oligonucleotide
  Sense strand starting at position 2439 of SEQ ID NO: 1888889
cucacuggucaucaguaua

SEQ ID NO: 2563971 - RNA, 19 nt, Artificial Sequence
  Description of Artificial Sequence: Synthetic oligonucleotide
  Antisense strand to SEQ ID NO: 2563970
uauacugaugaccagugag

SEQ ID NO: 2563972 - RNA, 19 nt, Artificial Sequence
  Description of Artificial Sequence: Synthetic oligonucleotide
  Sense strand starting at position 2442 of SEQ ID NO: 1888889
acuggucaucaguauauac

SEQ ID NO: 2563973 - RNA, 19 nt, Artificial Sequence
  Description of Artificial Sequence: Synthetic oligonucleotide
  Antisense strand to SEQ ID NO: 2563972
guauauacugaugaccagu

SEQ ID NO: 2563974 - RNA, 19 nt, Artificial Sequence
  Description of Artificial Sequence: Synthetic oligonucleotide
  Sense strand starting at position 2444 of SEQ ID NO: 1888889
uggucaucaguauauacaa

SEQ ID NO: 2563975 - RNA, 19 nt, Artificial Sequence
  Description of Artificial Sequence: Synthetic oligonucleotide
  Antisense strand to SEQ ID NO: 2563974
uuguauauacugaugacca

SEQ ID NO: 2563976 - RNA, 19 nt, Artificial Sequence
  Description of Artificial Sequence: Synthetic oligonucleotide
  Sense strand starting at position 2563 of SEQ ID NO: 1888889
auuuacuacuggugagaau

SEQ ID NO: 2563977 - RNA, 19 nt, Artificial Sequence
  Description of Artificial Sequence: Synthetic oligonucleotide
  Antisense strand to SEQ ID NO: 2563976
auucucaccaguaguaaau

SEQ ID NO: 2563978 - RNA, 19 nt, Artificial Sequence
  Description of Artificial Sequence: Synthetic oligonucleotide
  Sense strand starting at position 2572 of SEQ ID NO: 1888889
uggugagaauaugaauuua

SEQ ID NO: 2563979 - RNA, 19 nt, Artificial Sequence
  Description of Artificial Sequence: Synthetic oligonucleotide
  Antisense strand to SEQ ID NO: 2563978
uaaauucauauucucacca

SEQ ID NO: 2563980 - RNA, 19 nt, Artificial Sequence
  Description of Artificial Sequence: Synthetic oligonucleotide
  Sense strand starting at position 2611 of SEQ ID NO: 1888889
uguuaauaucuugaaagcu

SEQ ID NO: 2563981 - RNA, 19 nt, Artificial Sequence
  Description of Artificial Sequence: Synthetic oligonucleotide
  Antisense strand to SEQ ID NO: 2563980
agcuuucaagauauuaaca

SEQ ID NO: 2563982 - RNA, 19 nt, Artificial Sequence
  Description of Artificial Sequence: Synthetic oligonucleotide
  Sense strand starting at position 2659 of SEQ ID NO: 1888889
ugcuauucuuagguaaaua

SEQ ID NO: 2563983 - RNA, 19 nt, Artificial Sequence
  Description of Artificial Sequence: Synthetic oligonucleotide
  Antisense strand to SEQ ID NO: 2563982
uauuuaccuaagaauagca

SEQ ID NO: 2563984 - RNA, 19 nt, Artificial Sequence
  Description of Artificial Sequence: Synthetic oligonucleotide
  Sense strand starting at position 2816 of SEQ ID NO: 1888889
aaguaauucuauccagcga

SEQ ID NO: 2563985 - RNA, 19 nt, Artificial Sequence
  Description of Artificial Sequence: Synthetic oligonucleotide
  Antisense strand to SEQ ID NO: 2563984
ucgcuggauagaauuacuu

SEQ ID NO: 2563986 - RNA, 19 nt, Artificial Sequence
  Description of Artificial Sequence: Synthetic oligonucleotide
  Sense strand starting at position 2971 of SEQ ID NO: 1888889
gcagcauuauaacucaaga

SEQ ID NO: 2563987 - RNA, 19 nt, Artificial Sequence
  Description of Artificial Sequence: Synthetic oligonucleotide
  Antisense strand to SEQ ID NO: 2563986
ucuugaguuauaaugcugc

SEQ ID NO: 2563988 - RNA, 19 nt, Artificial Sequence
  Description of Artificial Sequence: Synthetic oligonucleotide
  Sense strand starting at position 2987 of SEQ ID NO: 1888889
agauacauguuaccuuuga

SEQ ID NO: 2563989 - RNA, 19 nt, Artificial Sequence
  Description of Artificial Sequence: Synthetic oligonucleotide
  Antisense strand to SEQ ID NO: 2563988
ucaaagguaacauguaucu

SEQ ID NO: 2563990 - RNA, 19 nt, Artificial Sequence
  Description of Artificial Sequence: Synthetic oligonucleotide
  Sense strand starting at position 2991 of SEQ ID NO: 1888889
acauguuaccuuugaggag

SEQ ID NO: 2563991 - RNA, 19 nt, Artificial Sequence
  Description of Artificial Sequence: Synthetic oligonucleotide
  Antisense strand to SEQ ID NO: 2563990
cuccucaaagguaacaugu

SEQ ID NO: 2563992 - RNA, 19 nt, Artificial Sequence
  Description of Artificial Sequence: Synthetic oligonucleotide
  Sense strand starting at position 3027 of SEQ ID NO: 1888889
uaccauagggcuugaugga

SEQ ID NO: 2563993 - RNA, 19 nt, Artificial Sequence
  Description of Artificial Sequence: Synthetic oligonucleotide
  Antisense strand to SEQ ID NO: 2563992
uccaucaagcccuauggua

SEQ ID NO: 2563994 - RNA, 19 nt, Artificial Sequence
  Description of Artificial Sequence: Synthetic oligonucleotide
  Sense strand starting at position 3088 of SEQ ID NO: 1888889
ggaaucauaguauguuacu

SEQ ID NO: 2563995 - RNA, 19 nt, Artificial Sequence
  Description of Artificial Sequence: Synthetic oligonucleotide
  Antisense strand to SEQ ID NO: 2563994
aguaacauacuaugauucc

SEQ ID NO: 2563996 - RNA, 19 nt, Artificial Sequence
  Description of Artificial Sequence: Synthetic oligonucleotide
  Sense strand starting at position 3099 of SEQ ID NO: 1888889
auguuacuucuguaauaag

SEQ ID NO: 2563997 - RNA, 19 nt, Artificial Sequence
  Description of Artificial Sequence: Synthetic oligonucleotide
  Antisense strand to SEQ ID NO: 2563996
cuuauuacagaaguaacau

SEQ ID NO: 2563998 - RNA, 19 nt, Artificial Sequence
  Description of Artificial Sequence: Synthetic oligonucleotide
  Sense strand starting at position 3110 of SEQ ID NO: 1888889
guaauaagucuuuaagcua

SEQ ID NO: 2563999 - RNA, 19 nt, Artificial Sequence
  Description of Artificial Sequence: Synthetic oligonucleotide
  Antisense strand to SEQ ID NO: 2563998
uagcuuaaagacuuauuac

SEQ ID NO: 2564000 - RNA, 19 nt, Artificial Sequence
  Description of Artificial Sequence: Synthetic oligonucleotide
  Sense strand starting at position 3142 of SEQ ID NO: 1888889
uguccuuugcuugauacuu

SEQ ID NO: 2564001 - RNA, 19 nt, Artificial Sequence
  Description of Artificial Sequence: Synthetic oligonucleotide
  Antisense strand to SEQ ID NO: 2564000
aaguaucaagcaaaggaca

SEQ ID NO: 2564002 - RNA, 19 nt, Artificial Sequence
  Description of Artificial Sequence: Synthetic oligonucleotide
  Sense strand starting at position 3428 of SEQ ID NO: 1888889
cugggaagaguguguggau

SEQ ID NO: 2564003 - RNA, 19 nt, Artificial Sequence
  Description of Artificial Sequence: Synthetic oligonucleotide
  Antisense strand to SEQ ID NO: 2564002
auccacacacucuucccag

SEQ ID NO: 2564004 - RNA, 19 nt, Artificial Sequence
  Description of Artificial Sequence: Synthetic oligonucleotide
  Sense strand starting at position 3459 of SEQ ID NO: 1888889
gguuguuuaauggguacau

SEQ ID NO: 2564005 - RNA, 19 nt, Artificial Sequence
  Description of Artificial Sequence: Synthetic oligonucleotide
  Antisense strand to SEQ ID NO: 2564004
auguacccauuaaacaacc

SEQ ID NO: 2564006 - RNA, 19 nt, Artificial Sequence
  Description of Artificial Sequence: Synthetic oligonucleotide
  Sense strand starting at position 3471 of SEQ ID NO: 1888889
gguacauacgcuuagauag

SEQ ID NO: 2564007 - RNA, 19 nt, Artificial Sequence
  Description of Artificial Sequence: Synthetic oligonucleotide
  Antisense strand to SEQ ID NO: 2564006
cuaucuaagcguauguacc

SEQ ID NO: 2564008 - RNA, 19 nt, Artificial Sequence
  Description of Artificial Sequence: Synthetic oligonucleotide
  Sense strand starting at position 3562 of SEQ ID NO: 1888889
ucacauguacucuauaagu

SEQ ID NO: 2564009 - RNA, 19 nt, Artificial Sequence
  Description of Artificial Sequence: Synthetic oligonucleotide
  Antisense strand to SEQ ID NO: 2564008
acuuauagaguacauguga

SEQ ID NO: 2564010 - RNA, 19 nt, Artificial Sequence
  Description of Artificial Sequence: Synthetic oligonucleotide
  Sense strand starting at position 3567 of SEQ ID NO: 1888889
uguacucuauaaguaugua

SEQ ID NO: 2564011 - RNA, 19 nt, Artificial Sequence
  Description of Artificial Sequence: Synthetic oligonucleotide
  Antisense strand to SEQ ID NO: 2564010
uacauacuuauagaguaca

SEQ ID NO: 2564012 - RNA, 19 nt, Artificial Sequence
  Description of Artificial Sequence: Synthetic oligonucleotide
  Sense strand starting at position 3570 of SEQ ID NO: 1888889
acucuauaaguauguacaa

SEQ ID NO: 2564013 - RNA, 19 nt, Artificial Sequence
  Description of Artificial Sequence: Synthetic oligonucleotide
  Antisense strand to SEQ ID NO: 2564012
uuguacauacuuauagagu

SEQ ID NO: 2564014 - RNA, 19 nt, Artificial Sequence
  Description of Artificial Sequence: Synthetic oligonucleotide
  Sense strand starting at position 3571 of SEQ ID NO: 1888889
cucuauaaguauguacaaa

SEQ ID NO: 2564015 - RNA, 19 nt, Artificial Sequence
  Description of Artificial Sequence: Synthetic oligonucleotide
  Antisense strand to SEQ ID NO: 2564014
uuuguacauacuuauagag

SEQ ID NO: 2564016 - RNA, 19 nt, Artificial Sequence
  Description of Artificial Sequence: Synthetic oligonucleotide
  Sense strand starting at position 443 of SEQ ID NO: 1888890
aaggaacaugcauguauau

SEQ ID NO: 2564017 - RNA, 19 nt, Artificial Sequence
  Description of Artificial Sequence: Synthetic oligonucleotide
  Antisense strand to SEQ ID NO: 2564016
auauacaugcauguuccuu

SEQ ID NO: 2564018 - RNA, 19 nt, Artificial Sequence
  Description of Artificial Sequence: Synthetic oligonucleotide
  Sense strand starting at position 499 of SEQ ID NO: 1888890
aaauauagucacugagguu

SEQ ID NO: 2564019 - RNA, 19 nt, Artificial Sequence
  Description of Artificial Sequence: Synthetic oligonucleotide
  Antisense strand to SEQ ID NO: 2564018
aaccucagugacuauauuu

SEQ ID NO: 2564020 - RNA, 19 nt, Artificial Sequence
  Description of Artificial Sequence: Synthetic oligonucleotide
  Sense strand starting at position 534 of SEQ ID NO: 1888890
accuauauuccuggagcgu

SEQ ID NO: 2564021 - RNA, 19 nt, Artificial Sequence
  Description of Artificial Sequence: Synthetic oligonucleotide
  Antisense strand to SEQ ID NO: 2564020
acgcuccaggaauauaggu

SEQ ID NO: 2564022 - RNA, 19 nt, Artificial Sequence
  Description of Artificial Sequence: Synthetic oligonucleotide
  Sense strand starting at position 535 of SEQ ID NO: 1888890
ccuauauuccuggagcguu

SEQ ID NO: 2564023 - RNA, 19 nt, Artificial Sequence
  Description of Artificial Sequence: Synthetic oligonucleotide
  Antisense strand to SEQ ID NO: 2564022
aacgcuccaggaauauagg

SEQ ID NO: 2564024 - RNA, 19 nt, Artificial Sequence
  Description of Artificial Sequence: Synthetic oligonucleotide
  Sense strand starting at position 586 of SEQ ID NO: 1888890
agaaguuugagacaagugu

SEQ ID NO: 2564025 - RNA, 19 nt, Artificial Sequence
  Description of Artificial Sequence: Synthetic oligonucleotide
  Antisense strand to SEQ ID NO: 2564024
acacuugucucaaacuucu

SEQ ID NO: 2564026 - RNA, 19 nt, Artificial Sequence
  Description of Artificial Sequence: Synthetic oligonucleotide
  Sense strand starting at position 770 of SEQ ID NO: 1888890
augagaugugauugcacca

SEQ ID NO: 2564027 - RNA, 19 nt, Artificial Sequence
  Description of Artificial Sequence: Synthetic oligonucleotide
  Antisense strand to SEQ ID NO: 2564026
uggugcaaucacaucucau

SEQ ID NO: 2564028 - RNA, 19 nt, Artificial Sequence
  Description of Artificial Sequence: Synthetic oligonucleotide
  Sense strand starting at position 775 of SEQ ID NO: 1888890
augugauugcaccacuaca

SEQ ID NO: 2564029 - RNA, 19 nt, Artificial Sequence
  Description of Artificial Sequence: Synthetic oligonucleotide
  Antisense strand to SEQ ID NO: 2564028
uguaguggugcaaucacau

SEQ ID NO: 2564030 - RNA, 19 nt, Artificial Sequence
  Description of Artificial Sequence: Synthetic oligonucleotide
  Sense strand starting at position 1173 of SEQ ID NO: 1888890
ucagaauccucagcaggau

SEQ ID NO: 2564031 - RNA, 19 nt, Artificial Sequence
  Description of Artificial Sequence: Synthetic oligonucleotide
  Antisense strand to SEQ ID NO: 2564030
auccugcugaggauucuga

SEQ ID NO: 2564032 - RNA, 19 nt, Artificial Sequence
  Description of Artificial Sequence: Synthetic oligonucleotide
  Sense strand starting at position 1176 of SEQ ID NO: 1888890
gaauccucagcaggauaga

SEQ ID NO: 2564033 - RNA, 19 nt, Artificial Sequence
  Description of Artificial Sequence: Synthetic oligonucleotide
  Antisense strand to SEQ ID NO: 2564032
ucuauccugcugaggauuc

SEQ ID NO: 2564034 - RNA, 19 nt, Artificial Sequence
  Description of Artificial Sequence: Synthetic oligonucleotide
  Sense strand starting at position 1475 of SEQ ID NO: 1888890
guugcaguaagguauaauc

SEQ ID NO: 2564035 - RNA, 19 nt, Artificial Sequence
  Description of Artificial Sequence: Synthetic oligonucleotide
  Antisense strand to SEQ ID NO: 2564034
gauuauaccuuacugcaac

SEQ ID NO: 2564036 - RNA, 19 nt, Artificial Sequence
  Description of Artificial Sequence: Synthetic oligonucleotide
  Sense strand starting at position 1477 of SEQ ID NO: 1888890
ugcaguaagguauaaucuu

SEQ ID NO: 2564037 - RNA, 19 nt, Artificial Sequence
  Description of Artificial Sequence: Synthetic oligonucleotide
  Antisense strand to SEQ ID NO: 2564036
aagauuauaccuuacugca

SEQ ID NO: 2564038 - RNA, 19 nt, Artificial Sequence
  Description of Artificial Sequence: Synthetic oligonucleotide
  Sense strand starting at position 1633 of SEQ ID NO: 1888890
guagcaguguggguagaaa

SEQ ID NO: 2564039 - RNA, 19 nt, Artificial Sequence
  Description of Artificial Sequence: Synthetic oligonucleotide
  Antisense strand to SEQ ID NO: 2564038
uuucuacccacacugcuac

SEQ ID NO: 2564040 - RNA, 19 nt, Artificial Sequence
  Description of Artificial Sequence: Synthetic oligonucleotide
  Sense strand starting at position 1716 of SEQ ID NO: 1888890
aguuguuauguccauauaa

SEQ ID NO: 2564041 - RNA, 19 nt, Artificial Sequence
  Description of Artificial Sequence: Synthetic oligonucleotide
  Antisense strand to SEQ ID NO: 2564040
uuauauggacauaacaacu

SEQ ID NO: 2564042 - RNA, 19 nt, Artificial Sequence
  Description of Artificial Sequence: Synthetic oligonucleotide
  Sense strand starting at position 1848 of SEQ ID NO: 1888890
ucucucaugugguuacaau

SEQ ID NO: 2564043 - RNA, 19 nt, Artificial Sequence
  Description of Artificial Sequence: Synthetic oligonucleotide
  Antisense strand to SEQ ID NO: 2564042
auuguaaccacaugagaga

SEQ ID NO: 2564044 - RNA, 19 nt, Artificial Sequence
  Description of Artificial Sequence: Synthetic oligonucleotide
  Sense strand starting at position 1849 of SEQ ID NO: 1888890
cucucaugugguuacaauu

SEQ ID NO: 2564045 - RNA, 19 nt, Artificial Sequence
  Description of Artificial Sequence: Synthetic oligonucleotide
  Antisense strand to SEQ ID NO: 2564044
aauuguaaccacaugagag

SEQ ID NO: 2564046 - RNA, 19 nt, Artificial Sequence
  Description of Artificial Sequence: Synthetic oligonucleotide
  Sense strand starting at position 1862 of SEQ ID NO: 1888890
acaauuagacuguggcuga

SEQ ID NO: 2564047 - RNA, 19 nt, Artificial Sequence
  Description of Artificial Sequence: Synthetic oligonucleotide
  Antisense strand to SEQ ID NO: 2564046
ucagccacagucuaauugu

SEQ ID NO: 2564048 - RNA, 19 nt, Artificial Sequence
  Description of Artificial Sequence: Synthetic oligonucleotide
  Sense strand starting at position 2142 of SEQ ID NO: 1888890
guagaaguugugucgccuu

SEQ ID NO: 2564049 - RNA, 19 nt, Artificial Sequence
  Description of Artificial Sequence: Synthetic oligonucleotide
  Antisense strand to SEQ ID NO: 2564048
aaggcgacacaacuucuac

SEQ ID NO: 2564050 - RNA, 19 nt, Artificial Sequence
  Description of Artificial Sequence: Synthetic oligonucleotide
  Sense strand starting at position 2173 of SEQ ID NO: 1888890
cuuggaagucauugagugu

SEQ ID NO: 2564051 - RNA, 19 nt, Artificial Sequence
  Description of Artificial Sequence: Synthetic oligonucleotide
  Antisense strand to SEQ ID NO: 2564050
acacucaaugacuuccaag

SEQ ID NO: 2564052 - RNA, 19 nt, Artificial Sequence
  Description of Artificial Sequence: Synthetic oligonucleotide
  Sense strand starting at position 2177 of SEQ ID NO: 1888890
gaagucauugagugucacu

SEQ ID NO: 2564053 - RNA, 19 nt, Artificial Sequence
  Description of Artificial Sequence: Synthetic oligonucleotide
  Antisense strand to SEQ ID NO: 2564052
agugacacucaaugacuuc

SEQ ID NO: 2564054 - RNA, 19 nt, Artificial Sequence
  Description of Artificial Sequence: Synthetic oligonucleotide
  Sense strand starting at position 2222 of SEQ ID NO: 1888890
ucacaagucugcccagagu

SEQ ID NO: 2564055 - RNA, 19 nt, Artificial Sequence
  Description of Artificial Sequence: Synthetic oligonucleotide
  Antisense strand to SEQ ID NO: 2564054
acucugggcagacuuguga

SEQ ID NO: 2564056 - RNA, 19 nt, Artificial Sequence
  Description of Artificial Sequence: Synthetic oligonucleotide
  Sense strand starting at position 2225 of SEQ ID NO: 1888890
caagucugcccagaguuaa

SEQ ID NO: 2564057 - RNA, 19 nt, Artificial Sequence
  Description of Artificial Sequence: Synthetic oligonucleotide
  Antisense strand to SEQ ID NO: 2564056
uuaacucugggcagacuug

SEQ ID NO: 2564058 - RNA, 19 nt, Artificial Sequence
  Description of Artificial Sequence: Synthetic oligonucleotide
  Sense strand starting at position 2238 of SEQ ID NO: 1888890
aguuaaggcagaggauaua

SEQ ID NO: 2564059 - RNA, 19 nt, Artificial Sequence
  Description of Artificial Sequence: Synthetic oligonucleotide
  Antisense strand to SEQ ID NO: 2564058
uauauccucugccuuaacu

SEQ ID NO: 2564060 - RNA, 19 nt, Artificial Sequence
  Description of Artificial Sequence: Synthetic oligonucleotide
  Sense strand starting at position 2281 of SEQ ID NO: 1888890
ggaugggaggagugucaau

SEQ ID NO: 2564061 - RNA, 19 nt, Artificial Sequence
  Description of Artificial Sequence: Synthetic oligonucleotide
  Antisense strand to SEQ ID NO: 2564060
auugacacuccucccaucc

SEQ ID NO: 2564062 - RNA, 19 nt, Artificial Sequence
  Description of Artificial Sequence: Synthetic oligonucleotide
  Sense strand starting at position 2295 of SEQ ID NO: 1888890
ucaauaugccauuguagaa

SEQ ID NO: 2564063 - RNA, 19 nt, Artificial Sequence
  Description of Artificial Sequence: Synthetic oligonucleotide
  Antisense strand to SEQ ID NO: 2564062
uucuacaauggcauauuga

SEQ ID NO: 2564064 - RNA, 19 nt, Artificial Sequence
  Description of Artificial Sequence: Synthetic oligonucleotide
  Sense strand starting at position 2302 of SEQ ID NO: 1888890
gccauuguagaauacgauu

SEQ ID NO: 2564065 - RNA, 19 nt, Artificial Sequence
  Description of Artificial Sequence: Synthetic oligonucleotide
  Antisense strand to SEQ ID NO: 2564064
aaucguauucuacaauggc

SEQ ID NO: 2564066 - RNA, 19 nt, Artificial Sequence
  Description of Artificial Sequence: Synthetic oligonucleotide
  Sense strand starting at position 2308 of SEQ ID NO: 1888890
guagaauacgauuguggga

SEQ ID NO: 2564067 - RNA, 19 nt, Artificial Sequence
  Description of Artificial Sequence: Synthetic oligonucleotide
  Antisense strand to SEQ ID NO: 2564066
ucccacaaucguauucuac

SEQ ID NO: 2564068 - RNA, 19 nt, Artificial Sequence
  Description of Artificial Sequence: Synthetic oligonucleotide
  Sense strand starting at position 2348 of SEQ ID NO: 1888890
gggauauugcugggaccau

SEQ ID NO: 2564069 - RNA, 19 nt, Artificial Sequence
  Description of Artificial Sequence: Synthetic oligonucleotide
  Antisense strand to SEQ ID NO: 2564068
auggucccagcaauauccc

SEQ ID NO: 2564070 - RNA, 19 nt, Artificial Sequence
  Description of Artificial Sequence: Synthetic oligonucleotide
  Sense strand starting at position 2390 of SEQ ID NO: 1888890
aguauagguauugauaagu

SEQ ID NO: 2564071 - RNA, 19 nt, Artificial Sequence
  Description of Artificial Sequence: Synthetic oligonucleotide
  Antisense strand to SEQ ID NO: 2564070
acuuaucaauaccuauacu

SEQ ID NO: 2564072 - RNA, 19 nt, Artificial Sequence
  Description of Artificial Sequence: Synthetic oligonucleotide
  Sense strand starting at position 2395 of SEQ ID NO: 1888890
agguauugauaaguuuaac

SEQ ID NO: 2564073 - RNA, 19 nt, Artificial Sequence
  Description of Artificial Sequence: Synthetic oligonucleotide
  Antisense strand to SEQ ID NO: 2564072
guuaaacuuaucaauaccu

SEQ ID NO: 2564074 - RNA, 19 nt, Artificial Sequence
  Description of Artificial Sequence: Synthetic oligonucleotide
  Sense strand starting at position 2416 of SEQ ID NO: 1888890
auugauugacgguauaggu

SEQ ID NO: 2564075 - RNA, 19 nt, Artificial Sequence
  Description of Artificial Sequence: Synthetic oligonucleotide
  Antisense strand to SEQ ID NO: 2564074
accuauaccgucaaucaau

SEQ ID NO: 2564076 - RNA, 19 nt, Artificial Sequence
  Description of Artificial Sequence: Synthetic oligonucleotide
  Sense strand starting at position 2491 of SEQ ID NO: 1888890
ugauauugucaauagucug

SEQ ID NO: 2564077 - RNA, 19 nt, Artificial Sequence
  Description of Artificial Sequence: Synthetic oligonucleotide
  Antisense strand to SEQ ID NO: 2564076
cagacuauugacaauauca

SEQ ID NO: 2564078 - RNA, 19 nt, Artificial Sequence
  Description of Artificial Sequence: Synthetic oligonucleotide
  Sense strand starting at position 2574 of SEQ ID NO: 1888890
uccuaaugguaguuacaac

SEQ ID NO: 2564079 - RNA, 19 nt, Artificial Sequence
  Description of Artificial Sequence: Synthetic oligonucleotide
  Antisense strand to SEQ ID NO: 2564078
guuguaacuaccauuagga

SEQ ID NO: 2564080 - RNA, 19 nt, Artificial Sequence
  Description of Artificial Sequence: Synthetic oligonucleotide
  Sense strand starting at position 2850 of SEQ ID NO: 1888890
cuacauugucuauacugau

SEQ ID NO: 2564081 - RNA, 19 nt, Artificial Sequence
  Description of Artificial Sequence: Synthetic oligonucleotide
  Antisense strand to SEQ ID NO: 2564080
aucaguauagacaauguag

SEQ ID NO: 2564082 - RNA, 19 nt, Artificial Sequence
  Description of Artificial Sequence: Synthetic oligonucleotide
  Sense strand starting at position 2938 of SEQ ID NO: 1888890
ccaccauguccuugaucua

SEQ ID NO: 2564083 - RNA, 19 nt, Artificial Sequence
  Description of Artificial Sequence: Synthetic oligonucleotide
  Antisense strand to SEQ ID NO: 2564082
uagaucaaggacauggugg

SEQ ID NO: 2564084 - RNA, 19 nt, Artificial Sequence
  Description of Artificial Sequence: Synthetic oligonucleotide
  Sense strand starting at position 3183 of SEQ ID NO: 1888890
guagauauauuugagacag

SEQ ID NO: 2564085 - RNA, 19 nt, Artificial Sequence
  Description of Artificial Sequence: Synthetic oligonucleotide
  Antisense strand to SEQ ID NO: 2564084
cugucucaaauauaucuac

SEQ ID NO: 2564086 - RNA, 19 nt, Artificial Sequence
  Description of Artificial Sequence: Synthetic oligonucleotide
  Sense strand starting at position 3513 of SEQ ID NO: 1888890
uaggcauugcucuagguuu

SEQ ID NO: 2564087 - RNA, 19 nt, Artificial Sequence
  Description of Artificial Sequence: Synthetic oligonucleotide
  Antisense strand to SEQ ID NO: 2564086
aaaccuagagcaaugccua

SEQ ID NO: 2564088 - RNA, 19 nt, Artificial Sequence
  Description of Artificial Sequence: Synthetic oligonucleotide
  Sense strand starting at position 3515 of SEQ ID NO: 1888890
ggcauugcucuagguuuga

SEQ ID NO: 2564089 - RNA, 19 nt, Artificial Sequence
  Description of Artificial Sequence: Synthetic oligonucleotide
  Antisense strand to SEQ ID NO: 2564088
ucaaaccuagagcaaugcc

SEQ ID NO: 2564090 - RNA, 19 nt, Artificial Sequence
  Description of Artificial Sequence: Synthetic oligonucleotide
  Sense strand starting at position 3669 of SEQ ID NO: 1888890
aguguagguggagauguua

SEQ ID NO: 2564091 - RNA, 19 nt, Artificial Sequence
  Description of Artificial Sequence: Synthetic oligonucleotide
  Antisense strand to SEQ ID NO: 2564090
uaacaucuccaccuacacu

SEQ ID NO: 2564092 - RNA, 19 nt, Artificial Sequence
  Description of Artificial Sequence: Synthetic oligonucleotide
  Sense strand starting at position 3769 of SEQ ID NO: 1888890
uuaacuagcggauaugaau

SEQ ID NO: 2564093 - RNA, 19 nt, Artificial Sequence
  Description of Artificial Sequence: Synthetic oligonucleotide
  Antisense strand to SEQ ID NO: 2564092
auucauauccgcuaguuaa

SEQ ID NO: 2564094 - RNA, 19 nt, Artificial Sequence
  Description of Artificial Sequence: Synthetic oligonucleotide
  Sense strand starting at position 3783 of SEQ ID NO: 1888890
ugaauagaaucugacauuc

SEQ ID NO: 2564095 - RNA, 19 nt, Artificial Sequence
  Description of Artificial Sequence: Synthetic oligonucleotide
  Antisense strand to SEQ ID NO: 2564094
gaaugucagauucuauuca

SEQ ID NO: 2564096 - RNA, 19 nt, Artificial Sequence
  Description of Artificial Sequence: Synthetic oligonucleotide
  Sense strand starting at position 368 of SEQ ID NO: 1888891
ugagaaauauaugagauac

SEQ ID NO: 2564097 - RNA, 19 nt, Artificial Sequence
  Description of Artificial Sequence: Synthetic oligonucleotide
  Antisense strand to SEQ ID NO: 2564096
guaucucauauauuucuca

SEQ ID NO: 2564098 - RNA, 19 nt, Artificial Sequence
  Description of Artificial Sequence: Synthetic oligonucleotide
  Sense strand starting at position 392 of SEQ ID NO: 1888891
caugcaugugagcaacuaa

SEQ ID NO: 2564099 - RNA, 19 nt, Artificial Sequence
  Description of Artificial Sequence: Synthetic oligonucleotide
  Antisense strand to SEQ ID NO: 2564098
uuaguugcucacaugcaug

SEQ ID NO: 2564100 - RNA, 19 nt, Artificial Sequence
  Description of Artificial Sequence: Synthetic oligonucleotide
  Sense strand starting at position 461 of SEQ ID NO: 1888891
gacagacucuguguuguga

SEQ ID NO: 2564101 - RNA, 19 nt, Artificial Sequence
  Description of Artificial Sequence: Synthetic oligonucleotide
  Antisense strand to SEQ ID NO: 2564100
ucacaacacagagucuguc

SEQ ID NO: 2564102 - RNA, 19 nt, Artificial Sequence
  Description of Artificial Sequence: Synthetic oligonucleotide
  Sense strand starting at position 477 of SEQ ID NO: 1888891
ugaugaugucaaugaaauu

SEQ ID NO: 2564103 - RNA, 19 nt, Artificial Sequence
  Description of Artificial Sequence: Synthetic oligonucleotide
  Antisense strand to SEQ ID NO: 2564102
aauuucauugacaucauca

SEQ ID NO: 2564104 - RNA, 19 nt, Artificial Sequence
  Description of Artificial Sequence: Synthetic oligonucleotide
  Sense strand starting at position 499 of SEQ ID NO: 1888891
gguuuaaaguaguuccaau

SEQ ID NO: 2564105 - RNA, 19 nt, Artificial Sequence
  Description of Artificial Sequence: Synthetic oligonucleotide
  Antisense strand to SEQ ID NO: 2564104
auuggaacuacuuuaaacc

SEQ ID NO: 2564106 - RNA, 19 nt, Artificial Sequence
  Description of Artificial Sequence: Synthetic oligonucleotide
  Sense strand starting at position 585 of SEQ ID NO: 1888891
gguugagacuagcuaagaa

SEQ ID NO: 2564107 - RNA, 19 nt, Artificial Sequence
  Description of Artificial Sequence: Synthetic oligonucleotide
  Antisense strand to SEQ ID NO: 2564106
uucuuagcuagucucaacc

SEQ ID NO: 2564108 - RNA, 19 nt, Artificial Sequence
  Description of Artificial Sequence: Synthetic oligonucleotide
  Sense strand starting at position 657 of SEQ ID NO: 1888891
ccagcuguugcauauauaa

SEQ ID NO: 2564109 - RNA, 19 nt, Artificial Sequence
  Description of Artificial Sequence: Synthetic oligonucleotide
  Antisense strand to SEQ ID NO: 2564108
uuauauaugcaacagcugg

SEQ ID NO: 2564110 - RNA, 19 nt, Artificial Sequence
  Description of Artificial Sequence: Synthetic oligonucleotide
  Sense strand starting at position 665 of SEQ ID NO: 1888891
ugcauauauaaggguauga

SEQ ID NO: 2564111 - RNA, 19 nt, Artificial Sequence
  Description of Artificial Sequence: Synthetic oligonucleotide
  Antisense strand to SEQ ID NO: 2564110
ucauacccuuauauaugca

SEQ ID NO: 2564112 - RNA, 19 nt, Artificial Sequence
  Description of Artificial Sequence: Synthetic oligonucleotide
  Sense strand starting at position 805 of SEQ ID NO: 1888891
gaugaauggugcucaaaua

SEQ ID NO: 2564113 - RNA, 19 nt, Artificial Sequence
  Description of Artificial Sequence: Synthetic oligonucleotide
  Antisense strand to SEQ ID NO: 2564112
uauuugagcaccauucauc

SEQ ID NO: 2564114 - RNA, 19 nt, Artificial Sequence
  Description of Artificial Sequence: Synthetic oligonucleotide
  Sense strand starting at position 1361 of SEQ ID NO: 1888891
ccaccagugagaugugaga

SEQ ID NO: 2564115 - RNA, 19 nt, Artificial Sequence
  Description of Artificial Sequence: Synthetic oligonucleotide
  Antisense strand to SEQ ID NO: 2564114
ucucacaucucacuggugg

SEQ ID NO: 2564116 - RNA, 19 nt, Artificial Sequence
  Description of Artificial Sequence: Synthetic oligonucleotide
  Sense strand starting at position 1437 of SEQ ID NO: 1888891
uuauccuaucccugagguu

SEQ ID NO: 2564117 - RNA, 19 nt, Artificial Sequence
  Description of Artificial Sequence: Synthetic oligonucleotide
  Antisense strand to SEQ ID NO: 2564116
aaccucagggauaggauaa

SEQ ID NO: 2564118 - RNA, 19 nt, Artificial Sequence
  Description of Artificial Sequence: Synthetic oligonucleotide
  Sense strand starting at position 1522 of SEQ ID NO: 1888891
gguucccuaagaugaauga

SEQ ID NO: 2564119 - RNA, 19 nt, Artificial Sequence
  Description of Artificial Sequence: Synthetic oligonucleotide
  Antisense strand to SEQ ID NO: 2564118
ucauucaucuuagggaacc

SEQ ID NO: 2564120 - RNA, 19 nt, Artificial Sequence
  Description of Artificial Sequence: Synthetic oligonucleotide
  Sense strand starting at position 1568 of SEQ ID NO: 1888891
gcaggauaguaagugcaaa

SEQ ID NO: 2564121 - RNA, 19 nt, Artificial Sequence
  Description of Artificial Sequence: Synthetic oligonucleotide
  Antisense strand to SEQ ID NO: 2564120
uuugcacuuacuauccugc

SEQ ID NO: 2564122 - RNA, 19 nt, Artificial Sequence
  Description of Artificial Sequence: Synthetic oligonucleotide
  Sense strand starting at position 1634 of SEQ ID NO: 1888891
agaauucuguggcuuggau

SEQ ID NO: 2564123 - RNA, 19 nt, Artificial Sequence
  Description of Artificial Sequence: Synthetic oligonucleotide
  Antisense strand to SEQ ID NO: 2564122
auccaagccacagaauucu

SEQ ID NO: 2564124 - RNA, 19 nt, Artificial Sequence
  Description of Artificial Sequence: Synthetic oligonucleotide
  Sense strand starting at position 1869 of SEQ ID NO: 1888891
gcuggaauucuaggaguug

SEQ ID NO: 2564125 - RNA, 19 nt, Artificial Sequence
  Description of Artificial Sequence: Synthetic oligonucleotide
  Antisense strand to SEQ ID NO: 2564124
caacuccuagaauuccagc

SEQ ID NO: 2564126 - RNA, 19 nt, Artificial Sequence
  Description of Artificial Sequence: Synthetic oligonucleotide
  Sense strand starting at position 2090 of SEQ ID NO: 1888891
cagacauaacacuguggua

SEQ ID NO: 2564127 - RNA, 19 nt, Artificial Sequence
  Description of Artificial Sequence: Synthetic oligonucleotide
  Antisense strand to SEQ ID NO: 2564126
uaccacaguguuaugucug

SEQ ID NO: 2564128 - RNA, 19 nt, Artificial Sequence
  Description of Artificial Sequence: Synthetic oligonucleotide
  Sense strand starting at position 2092 of SEQ ID NO: 1888891
gacauaacacugugguacu

SEQ ID NO: 2564129 - RNA, 19 nt, Artificial Sequence
  Description of Artificial Sequence: Synthetic oligonucleotide
  Antisense strand to SEQ ID NO: 2564128
aguaccacaguguuauguc

SEQ ID NO: 2564130 - RNA, 19 nt, Artificial Sequence
  Description of Artificial Sequence: Synthetic oligonucleotide
  Sense strand starting at position 2149 of SEQ ID NO: 1888891
ggagaauccugucccuucu

SEQ ID NO: 2564131 - RNA, 19 nt, Artificial Sequence
  Description of Artificial Sequence: Synthetic oligonucleotide
  Antisense strand to SEQ ID NO: 2564130
agaagggacaggauucucc

SEQ ID NO: 2564132 - RNA, 19 nt, Artificial Sequence
  Description of Artificial Sequence: Synthetic oligonucleotide
  Sense strand starting at position 2346 of SEQ ID NO: 1888891
gcaagagagauagguauau

SEQ ID NO: 2564133 - RNA, 19 nt, Artificial Sequence
  Description of Artificial Sequence: Synthetic oligonucleotide
  Antisense strand to SEQ ID NO: 2564132
auauaccuaucucucuugc

SEQ ID NO: 2564134 - RNA, 19 nt, Artificial Sequence
  Description of Artificial Sequence: Synthetic oligonucleotide
  Sense strand starting at position 2361 of SEQ ID NO: 1888891
auaugaugcuagucaacaa

SEQ ID NO: 2564135 - RNA, 19 nt, Artificial Sequence
  Description of Artificial Sequence: Synthetic oligonucleotide
  Antisense strand to SEQ ID NO: 2564134
uuguugacuagcaucauau

SEQ ID NO: 2564136 - RNA, 19 nt, Artificial Sequence
  Description of Artificial Sequence: Synthetic oligonucleotide
  Sense strand starting at position 2413 of SEQ ID NO: 1888891
agagcucauccauguauac

SEQ ID NO: 2564137 - RNA, 19 nt, Artificial Sequence
  Description of Artificial Sequence: Synthetic oligonucleotide
  Antisense strand to SEQ ID NO: 2564136
guauacauggaugagcucu

SEQ ID NO: 2564138 - RNA, 19 nt, Artificial Sequence
  Description of Artificial Sequence: Synthetic oligonucleotide
  Sense strand starting at position 2516 of SEQ ID NO: 1888891
gcaacacaaggucaugauu

SEQ ID NO: 2564139 - RNA, 19 nt, Artificial Sequence
  Description of Artificial Sequence: Synthetic oligonucleotide
  Antisense strand to SEQ ID NO: 2564138
aaucaugaccuuguguugc

SEQ ID NO: 2564140 - RNA, 19 nt, Artificial Sequence
  Description of Artificial Sequence: Synthetic oligonucleotide
  Sense strand starting at position 2556 of SEQ ID NO: 1888891
agagaaacuuuggaucaaa

SEQ ID NO: 2564141 - RNA, 19 nt, Artificial Sequence
  Description of Artificial Sequence: Synthetic oligonucleotide
  Antisense strand to SEQ ID NO: 2564140
uuugauccaaaguuucucu

SEQ ID NO: 2564142 - RNA, 19 nt, Artificial Sequence
  Description of Artificial Sequence: Synthetic oligonucleotide
  Sense strand starting at position 2753 of SEQ ID NO: 1888891
aguaaaccugauuauguua

SEQ ID NO: 2564143 - RNA, 19 nt, Artificial Sequence
  Description of Artificial Sequence: Synthetic oligonucleotide
  Antisense strand to SEQ ID NO: 2564142
uaacauaaucagguuuacu

SEQ ID NO: 2564144 - RNA, 19 nt, Artificial Sequence
  Description of Artificial Sequence: Synthetic oligonucleotide
  Sense strand starting at position 2766 of SEQ ID NO: 1888891
auguuaugaucacuggcaa

SEQ ID NO: 2564145 - RNA, 19 nt, Artificial Sequence
  Description of Artificial Sequence: Synthetic oligonucleotide
  Antisense strand to SEQ ID NO: 2564144
uugccagugaucauaacau

SEQ ID NO: 2564146 - RNA, 19 nt, Artificial Sequence
  Description of Artificial Sequence: Synthetic oligonucleotide
  Sense strand starting at position 2767 of SEQ ID NO: 1888891
uguuaugaucacuggcaag

SEQ ID NO: 2564147 - RNA, 19 nt, Artificial Sequence
  Description of Artificial Sequence: Synthetic oligonucleotide
  Antisense strand to SEQ ID NO: 2564146
cuugccagugaucauaaca

SEQ ID NO: 2564148 - RNA, 19 nt, Artificial Sequence
  Description of Artificial Sequence: Synthetic oligonucleotide
  Sense strand starting at position 2806 of SEQ ID NO: 1888891
ugacucugccacgaaguaa

SEQ ID NO: 2564149 - RNA, 19 nt, Artificial Sequence
  Description of Artificial Sequence: Synthetic oligonucleotide
  Antisense strand to SEQ ID NO: 2564148
uuacuucguggcagaguca

SEQ ID NO: 2564150 - RNA, 19 nt, Artificial Sequence
  Description of Artificial Sequence: Synthetic oligonucleotide
  Sense strand starting at position 2818 of SEQ ID NO: 1888891
gaaguaaucuuagccaagu

SEQ ID NO: 2564151 - RNA, 19 nt, Artificial Sequence
  Description of Artificial Sequence: Synthetic oligonucleotide
  Antisense strand to SEQ ID NO: 2564150
acuuggcuaagauuacuuc

SEQ ID NO: 2564152 - RNA, 19 nt, Artificial Sequence
  Description of Artificial Sequence: Synthetic oligonucleotide
  Sense strand starting at position 2864 of SEQ ID NO: 1888891
cucuauuuauaguauggau

SEQ ID NO: 2564153 - RNA, 19 nt, Artificial Sequence
  Description of Artificial Sequence: Synthetic oligonucleotide
  Antisense strand to SEQ ID NO: 2564152
auccauacuauaaauagag

SEQ ID NO: 2564154 - RNA, 19 nt, Artificial Sequence
  Description of Artificial Sequence: Synthetic oligonucleotide
  Sense strand starting at position 3433 of SEQ ID NO: 1888891
ggaauuaugcuaggugauu

SEQ ID NO: 2564155 - RNA, 19 nt, Artificial Sequence
  Description of Artificial Sequence: Synthetic oligonucleotide
  Antisense strand to SEQ ID NO: 2564154
aaucaccuagcauaauucc

SEQ ID NO: 2564156 - RNA, 19 nt, Artificial Sequence
  Description of Artificial Sequence: Synthetic oligonucleotide
  Sense strand starting at position 3568 of SEQ ID NO: 1888891
ggguuuagauauguagaug

SEQ ID NO: 2564157 - RNA, 19 nt, Artificial Sequence
  Description of Artificial Sequence: Synthetic oligonucleotide
  Antisense strand to SEQ ID NO: 2564156
caucuacauaucuaaaccc

SEQ ID NO: 2564158 - RNA, 19 nt, Artificial Sequence
  Description of Artificial Sequence: Synthetic oligonucleotide
  Sense strand starting at position 3614 of SEQ ID NO: 1888891
aagagaucugcauggugac

SEQ ID NO: 2564159 - RNA, 19 nt, Artificial Sequence
  Description of Artificial Sequence: Synthetic oligonucleotide
  Antisense strand to SEQ ID NO: 2564158
gucaccaugcagaucucuu

SEQ ID NO: 2564160 - RNA, 19 nt, Artificial Sequence
  Description of Artificial Sequence: Synthetic oligonucleotide
  Sense strand starting at position 3615 of SEQ ID NO: 1888891
agagaucugcauggugaca

SEQ ID NO: 2564161 - RNA, 19 nt, Artificial Sequence
  Description of Artificial Sequence: Synthetic oligonucleotide
  Antisense strand to SEQ ID NO: 2564160
ugucaccaugcagaucucu

SEQ ID NO: 2564162 - RNA, 19 nt, Artificial Sequence
  Description of Artificial Sequence: Synthetic oligonucleotide
  Sense strand starting at position 3636 of SEQ ID NO: 1888891
acuguucugcuuuaucaga

SEQ ID NO: 2564163 - RNA, 19 nt, Artificial Sequence
  Description of Artificial Sequence: Synthetic oligonucleotide
  Antisense strand to SEQ ID NO: 2564162
ucugauaaagcagaacagu

SEQ ID NO: 2564164 - RNA, 19 nt, Artificial Sequence
  Description of Artificial Sequence: Synthetic oligonucleotide
  Sense strand starting at position 3646 of SEQ ID NO: 1888891
uuuaucagaccguaucaau

SEQ ID NO: 2564165 - RNA, 19 nt, Artificial Sequence
  Description of Artificial Sequence: Synthetic oligonucleotide
  Antisense strand to SEQ ID NO: 2564164
auugauacggucugauaaa

SEQ ID NO: 2564166 - RNA, 19 nt, Artificial Sequence
  Description of Artificial Sequence: Synthetic oligonucleotide
  Sense strand starting at position 3669 of SEQ ID NO: 1888891
auauccuggcagugauacu

SEQ ID NO: 2564167 - RNA, 19 nt, Artificial Sequence
  Description of Artificial Sequence: Synthetic oligonucleotide
  Antisense strand to SEQ ID NO: 2564166
aguaucacugccaggauau

SEQ ID NO: 2564168 - RNA, 19 nt, Artificial Sequence
  Description of Artificial Sequence: Synthetic oligonucleotide
  Sense strand starting at position 3704 of SEQ ID NO: 1888891
agagguuaccaguggagga

SEQ ID NO: 2564169 - RNA, 19 nt, Artificial Sequence
  Description of Artificial Sequence: Synthetic oligonucleotide
  Antisense strand to SEQ ID NO: 2564168
uccuccacugguaaccucu

SEQ ID NO: 2564170 - RNA, 19 nt, Artificial Sequence
  Description of Artificial Sequence: Synthetic oligonucleotide
  Sense strand starting at position 3705 of SEQ ID NO: 1888891
gagguuaccaguggaggaa

SEQ ID NO: 2564171 - RNA, 19 nt, Artificial Sequence
  Description of Artificial Sequence: Synthetic oligonucleotide
  Antisense strand to SEQ ID NO: 2564170
uuccuccacugguaaccuc

SEQ ID NO: 2564172 - RNA, 19 nt, Artificial Sequence
  Description of Artificial Sequence: Synthetic oligonucleotide
  Sense strand starting at position 3708 of SEQ ID NO: 1888891
guuaccaguggaggaaauu

SEQ ID NO: 2564173 - RNA, 19 nt, Artificial Sequence
  Description of Artificial Sequence: Synthetic oligonucleotide
  Antisense strand to SEQ ID NO: 2564172
aauuuccuccacugguaac

SEQ ID NO: 2564174 - RNA, 19 nt, Artificial Sequence
  Description of Artificial Sequence: Synthetic oligonucleotide
  Sense strand starting at position 3740 of SEQ ID NO: 1888891
augggauuucuuuguguuu

SEQ ID NO: 2564175 - RNA, 19 nt, Artificial Sequence
  Description of Artificial Sequence: Synthetic oligonucleotide
  Antisense strand to SEQ ID NO: 2564174
aaacacaaagaaaucccau

SEQ ID NO: 2564176 - RNA, 19 nt, Artificial Sequence
  Description of Artificial Sequence: Synthetic oligonucleotide
  Sense strand starting at position 4 of SEQ ID NO: 1888892
ccaagucauuccucacagu

SEQ ID NO: 2564177 - RNA, 19 nt, Artificial Sequence
  Description of Artificial Sequence: Synthetic oligonucleotide
  Antisense strand to SEQ ID NO: 2564176
acugugaggaaugacuugg

SEQ ID NO: 2564178 - RNA, 19 nt, Artificial Sequence
  Description of Artificial Sequence: Synthetic oligonucleotide
  Sense strand starting at position 73 of SEQ ID NO: 1888892
acuauaauccuggguuacu

SEQ ID NO: 2564179 - RNA, 19 nt, Artificial Sequence
  Description of Artificial Sequence: Synthetic oligonucleotide
  Antisense strand to SEQ ID NO: 2564178
aguaacccaggauuauagu

SEQ ID NO: 2564180 - RNA, 19 nt, Artificial Sequence
  Description of Artificial Sequence: Synthetic oligonucleotide
  Sense strand starting at position 74 of SEQ ID NO: 1888892
cuauaauccuggguuacua

SEQ ID NO: 2564181 - RNA, 19 nt, Artificial Sequence
  Description of Artificial Sequence: Synthetic oligonucleotide
  Antisense strand to SEQ ID NO: 2564180
uaguaacccaggauuauag

SEQ ID NO: 2564182 - RNA, 19 nt, Artificial Sequence
  Description of Artificial Sequence: Synthetic oligonucleotide
  Sense strand starting at position 102 of SEQ ID NO: 1888892
uguaaaugaucaucugaca

SEQ ID NO: 2564183 - RNA, 19 nt, Artificial Sequence
  Description of Artificial Sequence: Synthetic oligonucleotide
  Antisense strand to SEQ ID NO: 2564182
ugucagaugaucauuuaca

SEQ ID NO: 2564184 - RNA, 19 nt, Artificial Sequence
  Description of Artificial Sequence: Synthetic oligonucleotide
  Sense strand starting at position 807 of SEQ ID NO: 1888892
ccugaauauuccuuaggga

SEQ ID NO: 2564185 - RNA, 19 nt, Artificial Sequence
  Description of Artificial Sequence: Synthetic oligonucleotide
  Antisense strand to SEQ ID NO: 2564184
ucccuaaggaauauucagg

SEQ ID NO: 2564186 - RNA, 19 nt, Artificial Sequence
  Description of Artificial Sequence: Synthetic oligonucleotide
  Sense strand starting at position 1693 of SEQ ID NO: 1888892
ugagauaagaccugguuuc

SEQ ID NO: 2564187 - RNA, 19 nt, Artificial Sequence
  Description of Artificial Sequence: Synthetic oligonucleotide
  Antisense strand to SEQ ID NO: 2564186
gaaaccaggucuuaucuca

SEQ ID NO: 2564188 - RNA, 19 nt, Artificial Sequence
  Description of Artificial Sequence: Synthetic oligonucleotide
  Sense strand starting at position 1735 of SEQ ID NO: 1888892
cagggcaggcauuaucaau

SEQ ID NO: 2564189 - RNA, 19 nt, Artificial Sequence
  Description of Artificial Sequence: Synthetic oligonucleotide
  Antisense strand to SEQ ID NO: 2564188
auugauaaugccugcccug

SEQ ID NO: 2564190 - RNA, 19 nt, Artificial Sequence
  Description of Artificial Sequence: Synthetic oligonucleotide
  Sense strand starting at position 1765 of SEQ ID NO: 1888892
gguacuugagaugaagugu

SEQ ID NO: 2564191 - RNA, 19 nt, Artificial Sequence
  Description of Artificial Sequence: Synthetic oligonucleotide
  Antisense strand to SEQ ID NO: 2564190
acacuucaucucaaguacc

SEQ ID NO: 2564192 - RNA, 19 nt, Artificial Sequence
  Description of Artificial Sequence: Synthetic oligonucleotide
  Sense strand starting at position 1776 of SEQ ID NO: 1888892
ugaaguguauuugcuauca

SEQ ID NO: 2564193 - RNA, 19 nt, Artificial Sequence
  Description of Artificial Sequence: Synthetic oligonucleotide
  Antisense strand to SEQ ID NO: 2564192
ugauagcaaauacacuuca

SEQ ID NO: 2564194 - RNA, 19 nt, Artificial Sequence
  Description of Artificial Sequence: Synthetic oligonucleotide
  Sense strand starting at position 1864 of SEQ ID NO: 1888892
ugaagagagcuuggacguu

SEQ ID NO: 2564195 - RNA, 19 nt, Artificial Sequence
  Description of Artificial Sequence: Synthetic oligonucleotide
  Antisense strand to SEQ ID NO: 2564194
aacguccaagcucucuuca

SEQ ID NO: 2564196 - RNA, 19 nt, Artificial Sequence
  Description of Artificial Sequence: Synthetic oligonucleotide
  Sense strand starting at position 1934 of SEQ ID NO: 1888892
cccaauuaaugucuguuga

SEQ ID NO: 2564197 - RNA, 19 nt, Artificial Sequence
  Description of Artificial Sequence: Synthetic oligonucleotide
  Antisense strand to SEQ ID NO: 2564196
ucaacagacauuaauuggg

SEQ ID NO: 2564198 - RNA, 19 nt, Artificial Sequence
  Description of Artificial Sequence: Synthetic oligonucleotide
  Sense strand starting at position 1935 of SEQ ID NO: 1888892
ccaauuaaugucuguugau

SEQ ID NO: 2564199 - RNA, 19 nt, Artificial Sequence
  Description of Artificial Sequence: Synthetic oligonucleotide
  Antisense strand to SEQ ID NO: 2564198
aucaacagacauuaauugg

SEQ ID NO: 2564200 - RNA, 19 nt, Artificial Sequence
  Description of Artificial Sequence: Synthetic oligonucleotide
  Sense strand starting at position 2003 of SEQ ID NO: 1888892
cggauuaggcacugugaau

SEQ ID NO: 2564201 - RNA, 19 nt, Artificial Sequence
  Description of Artificial Sequence: Synthetic oligonucleotide
  Antisense strand to SEQ ID NO: 2564200
auucacagugccuaauccg

SEQ ID NO: 2564202 - RNA, 19 nt, Artificial Sequence
  Description of Artificial Sequence: Synthetic oligonucleotide
  Sense strand starting at position 2041 of SEQ ID NO: 1888892
uguccuugcccuuaaggaa

SEQ ID NO: 2564203 - RNA, 19 nt, Artificial Sequence
  Description of Artificial Sequence: Synthetic oligonucleotide
  Antisense strand to SEQ ID NO: 2564202
uuccuuaagggcaaggaca

SEQ ID NO: 2564204 - RNA, 19 nt, Artificial Sequence
  Description of Artificial Sequence: Synthetic oligonucleotide
  Sense strand starting at position 2145 of SEQ ID NO: 1888892
uauccauccgaguaggauu

SEQ ID NO: 2564205 - RNA, 19 nt, Artificial Sequence
  Description of Artificial Sequence: Synthetic oligonucleotide
  Antisense strand to SEQ ID NO: 2564204
aauccuacucggauggaua

SEQ ID NO: 2564206 - RNA, 19 nt, Artificial Sequence
  Description of Artificial Sequence: Synthetic oligonucleotide
  Sense strand starting at position 2280 of SEQ ID NO: 1888892
guaauuaauguauagagug

SEQ ID NO: 2564207 - RNA, 19 nt, Artificial Sequence
  Description of Artificial Sequence: Synthetic oligonucleotide
  Antisense strand to SEQ ID NO: 2564206
cacucuauacauuaauuac

SEQ ID NO: 2564208 - RNA, 19 nt, Artificial Sequence
  Description of Artificial Sequence: Synthetic oligonucleotide
  Sense strand starting at position 2481 of SEQ ID NO: 1888892
gguguaauacaacaacuuu

SEQ ID NO: 2564209 - RNA, 19 nt, Artificial Sequence
  Description of Artificial Sequence: Synthetic oligonucleotide
  Antisense strand to SEQ ID NO: 2564208
aaaguuguuguauuacacc

SEQ ID NO: 2564210 - RNA, 19 nt, Artificial Sequence
  Description of Artificial Sequence: Synthetic oligonucleotide
  Sense strand starting at position 2532 of SEQ ID NO: 1888892
ggcaauagauuagucacua

SEQ ID NO: 2564211 - RNA, 19 nt, Artificial Sequence
  Description of Artificial Sequence: Synthetic oligonucleotide
  Antisense strand to SEQ ID NO: 2564210
uagugacuaaucuauugcc

SEQ ID NO: 2564212 - RNA, 19 nt, Artificial Sequence
  Description of Artificial Sequence: Synthetic oligonucleotide
  Sense strand starting at position 2533 of SEQ ID NO: 1888892
gcaauagauuagucacuag

SEQ ID NO: 2564213 - RNA, 19 nt, Artificial Sequence
  Description of Artificial Sequence: Synthetic oligonucleotide
  Antisense strand to SEQ ID NO: 2564212
cuagugacuaaucuauugc

SEQ ID NO: 2564214 - RNA, 19 nt, Artificial Sequence
  Description of Artificial Sequence: Synthetic oligonucleotide
  Sense strand starting at position 2536 of SEQ ID NO: 1888892
auagauuagucacuagauc

SEQ ID NO: 2564215 - RNA, 19 nt, Artificial Sequence
  Description of Artificial Sequence: Synthetic oligonucleotide
  Antisense strand to SEQ ID NO: 2564214
gaucuagugacuaaucuau

SEQ ID NO: 2564216 - RNA, 19 nt, Artificial Sequence
  Description of Artificial Sequence: Synthetic oligonucleotide
  Sense strand starting at position 2545 of SEQ ID NO: 1888892
ucacuagaucauggaguga

SEQ ID NO: 2564217 - RNA, 19 nt, Artificial Sequence
  Description of Artificial Sequence: Synthetic oligonucleotide
  Antisense strand to SEQ ID NO: 2564216
ucacuccaugaucuaguga

SEQ ID NO: 2564218 - RNA, 19 nt, Artificial Sequence
  Description of Artificial Sequence: Synthetic oligonucleotide
  Sense strand starting at position 2669 of SEQ ID NO: 1888892
acccuaacaucgucacuga

SEQ ID NO: 2564219 - RNA, 19 nt, Artificial Sequence
  Description of Artificial Sequence: Synthetic oligonucleotide
  Antisense strand to SEQ ID NO: 2564218
ucagugacgauguuagggu

SEQ ID NO: 2564220 - RNA, 19 nt, Artificial Sequence
  Description of Artificial Sequence: Synthetic oligonucleotide
  Sense strand starting at position 2670 of SEQ ID NO: 1888892
cccuaacaucgucacugau

SEQ ID NO: 2564221 - RNA, 19 nt, Artificial Sequence
  Description of Artificial Sequence: Synthetic oligonucleotide
  Antisense strand to SEQ ID NO: 2564220
aucagugacgauguuaggg

SEQ ID NO: 2564222 - RNA, 19 nt, Artificial Sequence
  Description of Artificial Sequence: Synthetic oligonucleotide
  Sense strand starting at position 2672 of SEQ ID NO: 1888892
cuaacaucgucacugauca

SEQ ID NO: 2564223 - RNA, 19 nt, Artificial Sequence
  Description of Artificial Sequence: Synthetic oligonucleotide
  Antisense strand to SEQ ID NO: 2564222
ugaucagugacgauguuag

SEQ ID NO: 2564224 - RNA, 19 nt, Artificial Sequence
  Description of Artificial Sequence: Synthetic oligonucleotide
  Sense strand starting at position 2735 of SEQ ID NO: 1888892
ugucauagucaacaccauu

SEQ ID NO: 2564225 - RNA, 19 nt, Artificial Sequence
  Description of Artificial Sequence: Synthetic oligonucleotide
  Antisense strand to SEQ ID NO: 2564224
aaugguguugacuaugaca

SEQ ID NO: 2564226 - RNA, 19 nt, Artificial Sequence
  Description of Artificial Sequence: Synthetic oligonucleotide
  Sense strand starting at position 3174 of SEQ ID NO: 1888892
cccgaagaacauugaguuu

SEQ ID NO: 2564227 - RNA, 19 nt, Artificial Sequence
  Description of Artificial Sequence: Synthetic oligonucleotide
  Antisense strand to SEQ ID NO: 2564226
aaacucaauguucuucggg

SEQ ID NO: 2564228 - RNA, 19 nt, Artificial Sequence
  Description of Artificial Sequence: Synthetic oligonucleotide
  Sense strand starting at position 3219 of SEQ ID NO: 1888892
auaaacacucgauauguuu

SEQ ID NO: 2564229 - RNA, 19 nt, Artificial Sequence
  Description of Artificial Sequence: Synthetic oligonucleotide
  Antisense strand to SEQ ID NO: 2564228
aaacauaucgaguguuuau

SEQ ID NO: 2564230 - RNA, 19 nt, Artificial Sequence
  Description of Artificial Sequence: Synthetic oligonucleotide
  Sense strand starting at position 3225 of SEQ ID NO: 1888892
acucgauauguuuagguuu

SEQ ID NO: 2564231 - RNA, 19 nt, Artificial Sequence
  Description of Artificial Sequence: Synthetic oligonucleotide
  Antisense strand to SEQ ID NO: 2564230
aaaccuaaacauaucgagu

SEQ ID NO: 2564232 - RNA, 19 nt, Artificial Sequence
  Description of Artificial Sequence: Synthetic oligonucleotide
  Sense strand starting at position 3350 of SEQ ID NO: 1888892
ucaauugagucuuugauau

SEQ ID NO: 2564233 - RNA, 19 nt, Artificial Sequence
  Description of Artificial Sequence: Synthetic oligonucleotide
  Antisense strand to SEQ ID NO: 2564232
auaucaaagacucaauuga

SEQ ID NO: 2564234 - RNA, 19 nt, Artificial Sequence
  Description of Artificial Sequence: Synthetic oligonucleotide
  Sense strand starting at position 3426 of SEQ ID NO: 1888892
gugggagauaugugacagu

SEQ ID NO: 2564235 - RNA, 19 nt, Artificial Sequence
  Description of Artificial Sequence: Synthetic oligonucleotide
  Antisense strand to SEQ ID NO: 2564234
acugucacauaucucccac

SEQ ID NO: 2564236 - RNA, 19 nt, Artificial Sequence
  Description of Artificial Sequence: Synthetic oligonucleotide
  Sense strand starting at position 3451 of SEQ ID NO: 1888892
aggccugcuacugaugaga

SEQ ID NO: 2564237 - RNA, 19 nt, Artificial Sequence
  Description of Artificial Sequence: Synthetic oligonucleotide
  Antisense strand to SEQ ID NO: 2564236
ucucaucaguagcaggccu

SEQ ID NO: 2564238 - RNA, 19 nt, Artificial Sequence
  Description of Artificial Sequence: Synthetic oligonucleotide
  Sense strand starting at position 3520 of SEQ ID NO: 1888892
cuaggugucucccugagaa

SEQ ID NO: 2564239 - RNA, 19 nt, Artificial Sequence
  Description of Artificial Sequence: Synthetic oligonucleotide
  Antisense strand to SEQ ID NO: 2564238
uucucagggagacaccuag

SEQ ID NO: 2564240 - RNA, 19 nt, Artificial Sequence
  Description of Artificial Sequence: Synthetic oligonucleotide
  Sense strand starting at position 3522 of SEQ ID NO: 1888892
aggugucucccugagaauc

SEQ ID NO: 2564241 - RNA, 19 nt, Artificial Sequence
  Description of Artificial Sequence: Synthetic oligonucleotide
  Antisense strand to SEQ ID NO: 2564240
gauucucagggagacaccu

SEQ ID NO: 2564242 - RNA, 19 nt, Artificial Sequence
  Description of Artificial Sequence: Synthetic oligonucleotide
  Sense strand starting at position 3578 of SEQ ID NO: 1888892
gcacaaucuguacagucaa

SEQ ID NO: 2564243 - RNA, 19 nt, Artificial Sequence
  Description of Artificial Sequence: Synthetic oligonucleotide
  Antisense strand to SEQ ID NO: 2564242
uugacuguacagauugugc

SEQ ID NO: 2564244 - RNA, 19 nt, Artificial Sequence
  Description of Artificial Sequence: Synthetic oligonucleotide
  Sense strand starting at position 3700 of SEQ ID NO: 1888892
guucuauuaugucuauaca

SEQ ID NO: 2564245 - RNA, 19 nt, Artificial Sequence
  Description of Artificial Sequence: Synthetic oligonucleotide
  Antisense strand to SEQ ID NO: 2564244
uguauagacauaauagaac

SEQ ID NO: 2564246 - RNA, 19 nt, Artificial Sequence
  Description of Artificial Sequence: Synthetic oligonucleotide
  Sense strand starting at position 3703 of SEQ ID NO: 1888892
cuauuaugucuauacaguc

SEQ ID NO: 2564247 - RNA, 19 nt, Artificial Sequence
  Description of Artificial Sequence: Synthetic oligonucleotide
  Antisense strand to SEQ ID NO: 2564246
gacuguauagacauaauag

SEQ ID NO: 2564248 - RNA, 19 nt, Artificial Sequence
  Description of Artificial Sequence: Synthetic oligonucleotide
  Sense strand starting at position 3763 of SEQ ID NO: 1888892
auaugacaguugucccaca

SEQ ID NO: 2564249 - RNA, 19 nt, Artificial Sequence
  Description of Artificial Sequence: Synthetic oligonucleotide
  Antisense strand to SEQ ID NO: 2564248
ugugggacaacugucauau

SEQ ID NO: 2564250 - RNA, 19 nt, Artificial Sequence
  Description of Artificial Sequence: Synthetic oligonucleotide
  Sense strand starting at position 3834 of SEQ ID NO: 1888892
auauauguuuagguacaca

SEQ ID NO: 2564251 - RNA, 19 nt, Artificial Sequence
  Description of Artificial Sequence: Synthetic oligonucleotide
  Antisense strand to SEQ ID NO: 2564250
uguguaccuaaacauauau

SEQ ID NO: 2564252 - RNA, 19 nt, Artificial Sequence
  Description of Artificial Sequence: Synthetic oligonucleotide
  Sense strand starting at position 3928 of SEQ ID NO: 1888892
uguaauaggcuauaccauu

SEQ ID NO: 2564253 - RNA, 19 nt, Artificial Sequence
  Description of Artificial Sequence: Synthetic oligonucleotide
  Antisense strand to SEQ ID NO: 2564252
aaugguauagccuauuaca

SEQ ID NO: 2564254 - RNA, 19 nt, Artificial Sequence
  Description of Artificial Sequence: Synthetic oligonucleotide
  Sense strand starting at position 3958 of SEQ ID NO: 1888892
guguuaauauacucuauga

SEQ ID NO: 2564255 - RNA, 19 nt, Artificial Sequence
  Description of Artificial Sequence: Synthetic oligonucleotide
  Antisense strand to SEQ ID NO: 2564254
ucauagaguauauuaacac

SEQ ID NO: 2564256 - RNA, 19 nt, Artificial Sequence
  Description of Artificial Sequence: Synthetic oligonucleotide
  Sense strand starting at position 43 of SEQ ID NO: 1888893
cgggcuuggucuuucagga

SEQ ID NO: 2564257 - RNA, 19 nt, Artificial Sequence
  Description of Artificial Sequence: Synthetic oligonucleotide
  Antisense strand to SEQ ID NO: 2564256
uccugaaagaccaagcccg

SEQ ID NO: 2564258 - RNA, 19 nt, Artificial Sequence
  Description of Artificial Sequence: Synthetic oligonucleotide
  Sense strand starting at position 212 of SEQ ID NO: 1888893
ccguuugagccuggagauu

SEQ ID NO: 2564259 - RNA, 19 nt, Artificial Sequence
  Description of Artificial Sequence: Synthetic oligonucleotide
  Antisense strand to SEQ ID NO: 2564258
aaucuccaggcucaaacgg

SEQ ID NO: 2564260 - RNA, 19 nt, Artificial Sequence
  Description of Artificial Sequence: Synthetic oligonucleotide
  Sense strand starting at position 540 of SEQ ID NO: 1888893
agaggaguuugggugucuu

SEQ ID NO: 2564261 - RNA, 19 nt, Artificial Sequence
  Description of Artificial Sequence: Synthetic oligonucleotide
  Antisense strand to SEQ ID NO: 2564260
aagacacccaaacuccucu

SEQ ID NO: 2564262 - RNA, 19 nt, Artificial Sequence
  Description of Artificial Sequence: Synthetic oligonucleotide
  Sense strand starting at position 665 of SEQ ID NO: 1888893
ucaagagauuugcacagaa

SEQ ID NO: 2564263 - RNA, 19 nt, Artificial Sequence
  Description of Artificial Sequence: Synthetic oligonucleotide
  Antisense strand to SEQ ID NO: 2564262
uucugugcaaaucucuuga

SEQ ID NO: 2564264 - RNA, 19 nt, Artificial Sequence
  Description of Artificial Sequence: Synthetic oligonucleotide
  Sense strand starting at position 863 of SEQ ID NO: 1888893
uccugaaaucgacagcuca

SEQ ID NO: 2564265 - RNA, 19 nt, Artificial Sequence
  Description of Artificial Sequence: Synthetic oligonucleotide
  Antisense strand to SEQ ID NO: 2564264
ugagcugucgauuucagga

SEQ ID NO: 2564266 - RNA, 19 nt, Artificial Sequence
  Description of Artificial Sequence: Synthetic oligonucleotide
  Sense strand starting at position 925 of SEQ ID NO: 1888893
ccggguuggaauuguggua

SEQ ID NO: 2564267 - RNA, 19 nt, Artificial Sequence
  Description of Artificial Sequence: Synthetic oligonucleotide
  Antisense strand to SEQ ID NO: 2564266
uaccacaauuccaacccgg

SEQ ID NO: 2564268 - RNA, 19 nt, Artificial Sequence
  Description of Artificial Sequence: Synthetic oligonucleotide
  Sense strand starting at position 1398 of SEQ ID NO: 1888893
gugguauucugauugggaa

SEQ ID NO: 2564269 - RNA, 19 nt, Artificial Sequence
  Description of Artificial Sequence: Synthetic oligonucleotide
  Antisense strand to SEQ ID NO: 2564268
uucccaaucagaauaccac

SEQ ID NO: 2564270 - RNA, 19 nt, Artificial Sequence
  Description of Artificial Sequence: Synthetic oligonucleotide
  Sense strand starting at position 1399 of SEQ ID NO: 1888893
ugguauucugauugggaag

SEQ ID NO: 2564271 - RNA, 19 nt, Artificial Sequence
  Description of Artificial Sequence: Synthetic oligonucleotide
  Antisense strand to SEQ ID NO: 2564270
cuucccaaucagaauacca

SEQ ID NO: 2564272 - RNA, 19 nt, Artificial Sequence
  Description of Artificial Sequence: Synthetic oligonucleotide
  Sense strand starting at position 2028 of SEQ ID NO: 1888893
gguaccugcgggugaauaa

SEQ ID NO: 2564273 - RNA, 19 nt, Artificial Sequence
  Description of Artificial Sequence: Synthetic oligonucleotide
  Antisense strand to SEQ ID NO: 2564272
uuauucacccgcagguacc

SEQ ID NO: 2564274 - RNA, 19 nt, Artificial Sequence
  Description of Artificial Sequence: Synthetic oligonucleotide
  Sense strand starting at position 2029 of SEQ ID NO: 1888893
guaccugcgggugaauaaa

SEQ ID NO: 2564275 - RNA, 19 nt, Artificial Sequence
  Description of Artificial Sequence: Synthetic oligonucleotide
  Antisense strand to SEQ ID NO: 2564274
uuuauucacccgcagguac

SEQ ID NO: 2564276 - RNA, 19 nt, Artificial Sequence
  Description of Artificial Sequence: Synthetic oligonucleotide
  Sense strand starting at position 2183 of SEQ ID NO: 1888893
ccgaaaguguggcucucaa

SEQ ID NO: 2564277 - RNA, 19 nt, Artificial Sequence
  Description of Artificial Sequence: Synthetic oligonucleotide
  Antisense strand to SEQ ID NO: 2564276
uugagagccacacuuucgg

SEQ ID NO: 2564278 - RNA, 19 nt, Artificial Sequence
  Description of Artificial Sequence: Synthetic oligonucleotide
  Sense strand starting at position 2213 of SEQ ID NO: 1888893
gaggaugaaucuuggaaca

SEQ ID NO: 2564279 - RNA, 19 nt, Artificial Sequence
  Description of Artificial Sequence: Synthetic oligonucleotide
  Antisense strand to SEQ ID NO: 2564278
uguuccaagauucauccuc

SEQ ID NO: 2564280 - RNA, 19 nt, Artificial Sequence
  Description of Artificial Sequence: Synthetic oligonucleotide
  Sense strand starting at position 2215 of SEQ ID NO: 1888893
ggaugaaucuuggaacaac

SEQ ID NO: 2564281 - RNA, 19 nt, Artificial Sequence
  Description of Artificial Sequence: Synthetic oligonucleotide
  Antisense strand to SEQ ID NO: 2564280
guuguuccaagauucaucc

SEQ ID NO: 2564282 - RNA, 19 nt, Artificial Sequence
  Description of Artificial Sequence: Synthetic oligonucleotide
  Sense strand starting at position 2264 of SEQ ID NO: 1888893
uacgaauuaguguggaaga

SEQ ID NO: 2564283 - RNA, 19 nt, Artificial Sequence
  Description of Artificial Sequence: Synthetic oligonucleotide
  Antisense strand to SEQ ID NO: 2564282
ucuuccacacuaauucgua

SEQ ID NO: 2564284 - RNA, 19 nt, Artificial Sequence
  Description of Artificial Sequence: Synthetic oligonucleotide
  Sense strand starting at position 2314 of SEQ ID NO: 1888893
agguuaaguagaggcaauu

SEQ ID NO: 2564285 - RNA, 19 nt, Artificial Sequence
  Description of Artificial Sequence: Synthetic oligonucleotide
  Antisense strand to SEQ ID NO: 2564284
aauugccucuacuuaaccu

SEQ ID NO: 2564286 - RNA, 19 nt, Artificial Sequence
  Description of Artificial Sequence: Synthetic oligonucleotide
  Sense strand starting at position 2341 of SEQ ID NO: 1888893
ggaucauucuugccaguuu

SEQ ID NO: 2564287 - RNA, 19 nt, Artificial Sequence
  Description of Artificial Sequence: Synthetic oligonucleotide
  Antisense strand to SEQ ID NO: 2564286
aaacuggcaagaaugaucc

SEQ ID NO: 2564288 - RNA, 19 nt, Artificial Sequence
  Description of Artificial Sequence: Synthetic oligonucleotide
  Sense strand starting at position 2360 of SEQ ID NO: 1888893
caaagucuuggugaaacuu

SEQ ID NO: 2564289 - RNA, 19 nt, Artificial Sequence
  Description of Artificial Sequence: Synthetic oligonucleotide
  Antisense strand to SEQ ID NO: 2564288
aaguuucaccaagacuuug

SEQ ID NO: 2564290 - RNA, 19 nt, Artificial Sequence
  Description of Artificial Sequence: Synthetic oligonucleotide
  Sense strand starting at position 2369 of SEQ ID NO: 1888893
ggugaaacuucuuccugcu

SEQ ID NO: 2564291 - RNA, 19 nt, Artificial Sequence
  Description of Artificial Sequence: Synthetic oligonucleotide
  Antisense strand to SEQ ID NO: 2564290
agcaggaagaaguuucacc

SEQ ID NO: 2564292 - RNA, 19 nt, Artificial Sequence
  Description of Artificial Sequence: Synthetic oligonucleotide
  Sense strand starting at position 2517 of SEQ ID NO: 1888893
ugauucuuacacuaucguu

SEQ ID NO: 2564293 - RNA, 19 nt, Artificial Sequence
  Description of Artificial Sequence: Synthetic oligonucleotide
  Antisense strand to SEQ ID NO: 2564292
aacgauaguguaagaauca

SEQ ID NO: 2564294 - RNA, 19 nt, Artificial Sequence
  Description of Artificial Sequence: Synthetic oligonucleotide
  Sense strand starting at position 2523 of SEQ ID NO: 1888893
uuacacuaucguugcgaca

SEQ ID NO: 2564295 - RNA, 19 nt, Artificial Sequence
  Description of Artificial Sequence: Synthetic oligonucleotide
  Antisense strand to SEQ ID NO: 2564294
ugucgcaacgauaguguaa

SEQ ID NO: 2564296 - RNA, 19 nt, Artificial Sequence
  Description of Artificial Sequence: Synthetic oligonucleotide
  Sense strand starting at position 2530 of SEQ ID NO: 1888893
aucguugcgacauauacau

SEQ ID NO: 2564297 - RNA, 19 nt, Artificial Sequence
  Description of Artificial Sequence: Synthetic oligonucleotide
  Antisense strand to SEQ ID NO: 2564296
auguauaugucgcaacgau

SEQ ID NO: 2564298 - RNA, 19 nt, Artificial Sequence
  Description of Artificial Sequence: Synthetic oligonucleotide
  Sense strand starting at position 2560 of SEQ ID NO: 1888893
agcauuagauguccuaacu

SEQ ID NO: 2564299 - RNA, 19 nt, Artificial Sequence
  Description of Artificial Sequence: Synthetic oligonucleotide
  Antisense strand to SEQ ID NO: 2564298
aguuaggacaucuaaugcu

SEQ ID NO: 2564300 - RNA, 19 nt, Artificial Sequence
  Description of Artificial Sequence: Synthetic oligonucleotide
  Sense strand starting at position 2570 of SEQ ID NO: 1888893
guccuaacucacugcuagu

SEQ ID NO: 2564301 - RNA, 19 nt, Artificial Sequence
  Description of Artificial Sequence: Synthetic oligonucleotide
  Antisense strand to SEQ ID NO: 2564300
acuagcagugaguuaggac

SEQ ID NO: 2564302 - RNA, 19 nt, Artificial Sequence
  Description of Artificial Sequence: Synthetic oligonucleotide
  Sense strand starting at position 2644 of SEQ ID NO: 1888893
agagaacuuucuguagaug

SEQ ID NO: 2564303 - RNA, 19 nt, Artificial Sequence
  Description of Artificial Sequence: Synthetic oligonucleotide
  Antisense strand to SEQ ID NO: 2564302
caucuacagaaaguucucu

SEQ ID NO: 2564304 - RNA, 19 nt, Artificial Sequence
  Description of Artificial Sequence: Synthetic oligonucleotide
  Sense strand starting at position 2751 of SEQ ID NO: 1888893
guuuaaauacuugauguca

SEQ ID NO: 2564305 - RNA, 19 nt, Artificial Sequence
  Description of Artificial Sequence: Synthetic oligonucleotide
  Antisense strand to SEQ ID NO: 2564304
ugacaucaaguauuuaaac

SEQ ID NO: 2564306 - RNA, 19 nt, Artificial Sequence
  Description of Artificial Sequence: Synthetic oligonucleotide
  Sense strand starting at position 2832 of SEQ ID NO: 1888893
ugcgcauacuccuuaauga

SEQ ID NO: 2564307 - RNA, 19 nt, Artificial Sequence
  Description of Artificial Sequence: Synthetic oligonucleotide
  Antisense strand to SEQ ID NO: 2564306
ucauuaaggaguaugcgca

SEQ ID NO: 2564308 - RNA, 19 nt, Artificial Sequence
  Description of Artificial Sequence: Synthetic oligonucleotide
  Sense strand starting at position 2833 of SEQ ID NO: 1888893
gcgcauacuccuuaaugau

SEQ ID NO: 2564309 - RNA, 19 nt, Artificial Sequence
  Description of Artificial Sequence: Synthetic oligonucleotide
  Antisense strand to SEQ ID NO: 2564308
aucauuaaggaguaugcgc

SEQ ID NO: 2564310 - RNA, 19 nt, Artificial Sequence
  Description of Artificial Sequence: Synthetic oligonucleotide
  Sense strand starting at position 3077 of SEQ ID NO: 1888893
auuauccaacuguaaguau

SEQ ID NO: 2564311 - RNA, 19 nt, Artificial Sequence
  Description of Artificial Sequence: Synthetic oligonucleotide
  Antisense strand to SEQ ID NO: 2564310
auacuuacaguuggauaau

SEQ ID NO: 2564312 - RNA, 19 nt, Artificial Sequence
  Description of Artificial Sequence: Synthetic oligonucleotide
  Sense strand starting at position 3088 of SEQ ID NO: 1888893
guaaguaucuuguuacacu

SEQ ID NO: 2564313 - RNA, 19 nt, Artificial Sequence
  Description of Artificial Sequence: Synthetic oligonucleotide
  Antisense strand to SEQ ID NO: 2564312
aguguaacaagauacuuac

SEQ ID NO: 2564314 - RNA, 19 nt, Artificial Sequence
  Description of Artificial Sequence: Synthetic oligonucleotide
  Sense strand starting at position 3151 of SEQ ID NO: 1888893
guguccuauuuauuaguua

SEQ ID NO: 2564315 - RNA, 19 nt, Artificial Sequence
  Description of Artificial Sequence: Synthetic oligonucleotide
  Antisense strand to SEQ ID NO: 2564314
uaacuaauaaauaggacac

SEQ ID NO: 2564316 - RNA, 19 nt, Artificial Sequence
  Description of Artificial Sequence: Synthetic oligonucleotide
  Sense strand starting at position 3224 of SEQ ID NO: 1888893
cugagauccagugguaaca

SEQ ID NO: 2564317 - RNA, 19 nt, Artificial Sequence
  Description of Artificial Sequence: Synthetic oligonucleotide
  Antisense strand to SEQ ID NO: 2564316
uguuaccacuggaucucag

SEQ ID NO: 2564318 - RNA, 19 nt, Artificial Sequence
  Description of Artificial Sequence: Synthetic oligonucleotide
  Sense strand starting at position 3226 of SEQ ID NO: 1888893
gagauccagugguaacaaa

SEQ ID NO: 2564319 - RNA, 19 nt, Artificial Sequence
  Description of Artificial Sequence: Synthetic oligonucleotide
  Antisense strand to SEQ ID NO: 2564318
uuuguuaccacuggaucuc

SEQ ID NO: 2564320 - RNA, 19 nt, Artificial Sequence
  Description of Artificial Sequence: Synthetic oligonucleotide
  Sense strand starting at position 3297 of SEQ ID NO: 1888893
ccuaaauugcgacaaucaa

SEQ ID NO: 2564321 - RNA, 19 nt, Artificial Sequence
  Description of Artificial Sequence: Synthetic oligonucleotide
  Antisense strand to SEQ ID NO: 2564320
uugauugucgcaauuuagg

SEQ ID NO: 2564322 - RNA, 19 nt, Artificial Sequence
  Description of Artificial Sequence: Synthetic oligonucleotide
  Sense strand starting at position 3365 of SEQ ID NO: 1888893
uuacacugacuuugggauu

SEQ ID NO: 2564323 - RNA, 19 nt, Artificial Sequence
  Description of Artificial Sequence: Synthetic oligonucleotide
  Antisense strand to SEQ ID NO: 2564322
aaucccaaagucaguguaa

SEQ ID NO: 2564324 - RNA, 19 nt, Artificial Sequence
  Description of Artificial Sequence: Synthetic oligonucleotide
  Sense strand starting at position 3397 of SEQ ID NO: 1888893
gucguugacugcccuuaaa

SEQ ID NO: 2564325 - RNA, 19 nt, Artificial Sequence
  Description of Artificial Sequence: Synthetic oligonucleotide
  Antisense strand to SEQ ID NO: 2564324
uuuaagggcagucaacgac

SEQ ID NO: 2564326 - RNA, 19 nt, Artificial Sequence
  Description of Artificial Sequence: Synthetic oligonucleotide
  Sense strand starting at position 3546 of SEQ ID NO: 1888893
uuccuuaguugacuacuua

SEQ ID NO: 2564327 - RNA, 19 nt, Artificial Sequence
  Description of Artificial Sequence: Synthetic oligonucleotide
  Antisense strand to SEQ ID NO: 2564326
uaaguagucaacuaaggaa

SEQ ID NO: 2564328 - RNA, 19 nt, Artificial Sequence
  Description of Artificial Sequence: Synthetic oligonucleotide
  Sense strand starting at position 3550 of SEQ ID NO: 1888893
uuaguugacuacuuagaaa

SEQ ID NO: 2564329 - RNA, 19 nt, Artificial Sequence
  Description of Artificial Sequence: Synthetic oligonucleotide
  Antisense strand to SEQ ID NO: 2564328
uuucuaaguagucaacuaa

SEQ ID NO: 2564330 - RNA, 19 nt, Artificial Sequence
  Description of Artificial Sequence: Synthetic oligonucleotide
  Sense strand starting at position 3615 of SEQ ID NO: 1888893
cuuccagauugcucuugga

SEQ ID NO: 2564331 - RNA, 19 nt, Artificial Sequence
  Description of Artificial Sequence: Synthetic oligonucleotide
  Antisense strand to SEQ ID NO: 2564330
uccaagagcaaucuggaag

SEQ ID NO: 2564332 - RNA, 19 nt, Artificial Sequence
  Description of Artificial Sequence: Synthetic oligonucleotide
  Sense strand starting at position 3681 of SEQ ID NO: 1888893
gugauaguacaacgaguua

SEQ ID NO: 2564333 - RNA, 19 nt, Artificial Sequence
  Description of Artificial Sequence: Synthetic oligonucleotide
  Antisense strand to SEQ ID NO: 2564332
uaacucguuguacuaucac

SEQ ID NO: 2564334 - RNA, 19 nt, Artificial Sequence
  Description of Artificial Sequence: Synthetic oligonucleotide
  Sense strand starting at position 3878 of SEQ ID NO: 1888893
caauguguuuggcuaaaug

SEQ ID NO: 2564335 - RNA, 19 nt, Artificial Sequence
  Description of Artificial Sequence: Synthetic oligonucleotide
  Antisense strand to SEQ ID NO: 2564334
cauuuagccaaacacauug

SEQ ID NO: 2564336 - RNA, 19 nt, Artificial Sequence
  Description of Artificial Sequence: Synthetic oligonucleotide
  Sense strand starting at position 103 of SEQ ID NO: 1888894
gucacauauuauguagaug

SEQ ID NO: 2564337 - RNA, 19 nt, Artificial Sequence
  Description of Artificial Sequence: Synthetic oligonucleotide
  Antisense strand to SEQ ID NO: 2564336
caucuacauaauaugugac

SEQ ID NO: 2564338 - RNA, 19 nt, Artificial Sequence
  Description of Artificial Sequence: Synthetic oligonucleotide
  Sense strand starting at position 475 of SEQ ID NO: 1888894
aggcaagucccuugacaaa

SEQ ID NO: 2564339 - RNA, 19 nt, Artificial Sequence
  Description of Artificial Sequence: Synthetic oligonucleotide
  Antisense strand to SEQ ID NO: 2564338
uuugucaagggacuugccu

SEQ ID NO: 2564340 - RNA, 19 nt, Artificial Sequence
  Description of Artificial Sequence: Synthetic oligonucleotide
  Sense strand starting at position 791 of SEQ ID NO: 1888894
cauagugggcauugaauau

SEQ ID NO: 2564341 - RNA, 19 nt, Artificial Sequence
  Description of Artificial Sequence: Synthetic oligonucleotide
  Antisense strand to SEQ ID NO: 2564340
auauucaaugcccacuaug

SEQ ID NO: 2564342 - RNA, 19 nt, Artificial Sequence
  Description of Artificial Sequence: Synthetic oligonucleotide
  Sense strand starting at position 1219 of SEQ ID NO: 1888894
ggacguuuggguugaauca

SEQ ID NO: 2564343 - RNA, 19 nt, Artificial Sequence
  Description of Artificial Sequence: Synthetic oligonucleotide
  Antisense strand to SEQ ID NO: 2564342
ugauucaacccaaacgucc

SEQ ID NO: 2564344 - RNA, 19 nt, Artificial Sequence
  Description of Artificial Sequence: Synthetic oligonucleotide
  Sense strand starting at position 1220 of SEQ ID NO: 1888894
gacguuuggguugaaucaa

SEQ ID NO: 2564345 - RNA, 19 nt, Artificial Sequence
  Description of Artificial Sequence: Synthetic oligonucleotide
  Antisense strand to SEQ ID NO: 2564344
uugauucaacccaaacguc

SEQ ID NO: 2564346 - RNA, 19 nt, Artificial Sequence
  Description of Artificial Sequence: Synthetic oligonucleotide
  Sense strand starting at position 1234 of SEQ ID NO: 1888894
aucaauagacagugucaaa

SEQ ID NO: 2564347 - RNA, 19 nt, Artificial Sequence
  Description of Artificial Sequence: Synthetic oligonucleotide
  Antisense strand to SEQ ID NO: 2564346
uuugacacugucuauugau

SEQ ID NO: 2564348 - RNA, 19 nt, Artificial Sequence
  Description of Artificial Sequence: Synthetic oligonucleotide
  Sense strand starting at position 1330 of SEQ ID NO: 1888894
aaagauaaguuggaaagaa

SEQ ID NO: 2564349 - RNA, 19 nt, Artificial Sequence
  Description of Artificial Sequence: Synthetic oligonucleotide
  Antisense strand to SEQ ID NO: 2564348
uucuuuccaacuuaucuuu

SEQ ID NO: 2564350 - RNA, 19 nt, Artificial Sequence
  Description of Artificial Sequence: Synthetic oligonucleotide
  Sense strand starting at position 1359 of SEQ ID NO: 1888894
gugugguaaggguagagua

SEQ ID NO: 2564351 - RNA, 19 nt, Artificial Sequence
  Description of Artificial Sequence: Synthetic oligonucleotide
  Antisense strand to SEQ ID NO: 2564350
uacucuacccuuaccacac

SEQ ID NO: 2564352 - RNA, 19 nt, Artificial Sequence
  Description of Artificial Sequence: Synthetic oligonucleotide
  Sense strand starting at position 1395 of SEQ ID NO: 1888894
agcaguuuggaggaaguua

SEQ ID NO: 2564353 - RNA, 19 nt, Artificial Sequence
  Description of Artificial Sequence: Synthetic oligonucleotide
  Antisense strand to SEQ ID NO: 2564352
uaacuuccuccaaacugcu

SEQ ID NO: 2564354 - RNA, 19 nt, Artificial Sequence
  Description of Artificial Sequence: Synthetic oligonucleotide
  Sense strand starting at position 1421 of SEQ ID NO: 1888894
aaggaaugaugagagagua

SEQ ID NO: 2564355 - RNA, 19 nt, Artificial Sequence
  Description of Artificial Sequence: Synthetic oligonucleotide
  Antisense strand to SEQ ID NO: 2564354
uacucucucaucauuccuu

SEQ ID NO: 2564356 - RNA, 19 nt, Artificial Sequence
  Description of Artificial Sequence: Synthetic oligonucleotide
  Sense strand starting at position 1531 of SEQ ID NO: 1888894
guuacccauuuguuuguua

SEQ ID NO: 2564357 - RNA, 19 nt, Artificial Sequence
  Description of Artificial Sequence: Synthetic oligonucleotide
  Antisense strand to SEQ ID NO: 2564356
uaacaaacaaauggguaac

SEQ ID NO: 2564358 - RNA, 19 nt, Artificial Sequence
  Description of Artificial Sequence: Synthetic oligonucleotide
  Sense strand starting at position 1532 of SEQ ID NO: 1888894
uuacccauuuguuuguuau

SEQ ID NO: 2564359 - RNA, 19 nt, Artificial Sequence
  Description of Artificial Sequence: Synthetic oligonucleotide
  Antisense strand to SEQ ID NO: 2564358
auaacaaacaaauggguaa

SEQ ID NO: 2564360 - RNA, 19 nt, Artificial Sequence
  Description of Artificial Sequence: Synthetic oligonucleotide
  Sense strand starting at position 1675 of SEQ ID NO: 1888894
auagcagugccuuaaucua

SEQ ID NO: 2564361 - RNA, 19 nt, Artificial Sequence
  Description of Artificial Sequence: Synthetic oligonucleotide
  Antisense strand to SEQ ID NO: 2564360
uagauuaaggcacugcuau

SEQ ID NO: 2564362 - RNA, 19 nt, Artificial Sequence
  Description of Artificial Sequence: Synthetic oligonucleotide
  Sense strand starting at position 1711 of SEQ ID NO: 1888894
gguggaauuucagaaagua

SEQ ID NO: 2564363 - RNA, 19 nt, Artificial Sequence
  Description of Artificial Sequence: Synthetic oligonucleotide
  Antisense strand to SEQ ID NO: 2564362
uacuuucugaaauuccacc

SEQ ID NO: 2564364 - RNA, 19 nt, Artificial Sequence
  Description of Artificial Sequence: Synthetic oligonucleotide
  Sense strand starting at position 1850 of SEQ ID NO: 1888894
cugcauugacuugaaaugu

SEQ ID NO: 2564365 - RNA, 19 nt, Artificial Sequence
  Description of Artificial Sequence: Synthetic oligonucleotide
  Antisense strand to SEQ ID NO: 2564364
acauuucaagucaaugcag

SEQ ID NO: 2564366 - RNA, 19 nt, Artificial Sequence
  Description of Artificial Sequence: Synthetic oligonucleotide
  Sense strand starting at position 1858 of SEQ ID NO: 1888894
acuugaaauguguauguga

SEQ ID NO: 2564367 - RNA, 19 nt, Artificial Sequence
  Description of Artificial Sequence: Synthetic oligonucleotide
  Antisense strand to SEQ ID NO: 2564366
ucacauacacauuucaagu

SEQ ID NO: 2564368 - RNA, 19 nt, Artificial Sequence
  Description of Artificial Sequence: Synthetic oligonucleotide
  Sense strand starting at position 1866 of SEQ ID NO: 1888894
uguguaugugagggaugaa

SEQ ID NO: 2564369 - RNA, 19 nt, Artificial Sequence
  Description of Artificial Sequence: Synthetic oligonucleotide
  Antisense strand to SEQ ID NO: 2564368
uucaucccucacauacaca

SEQ ID NO: 2564370 - RNA, 19 nt, Artificial Sequence
  Description of Artificial Sequence: Synthetic oligonucleotide
  Sense strand starting at position 1867 of SEQ ID NO: 1888894
guguaugugagggaugaac

SEQ ID NO: 2564371 - RNA, 19 nt, Artificial Sequence
  Description of Artificial Sequence: Synthetic oligonucleotide
  Antisense strand to SEQ ID NO: 2564370
guucaucccucacauacac

SEQ ID NO: 2564372 - RNA, 19 nt, Artificial Sequence
  Description of Artificial Sequence: Synthetic oligonucleotide
  Sense strand starting at position 1938 of SEQ ID NO: 1888894
uaucucucggaacaguuaa

SEQ ID NO: 2564373 - RNA, 19 nt, Artificial Sequence
  Description of Artificial Sequence: Synthetic oligonucleotide
  Antisense strand to SEQ ID NO: 2564372
uuaacuguuccgagagaua

SEQ ID NO: 2564374 - RNA, 19 nt, Artificial Sequence
  Description of Artificial Sequence: Synthetic oligonucleotide
  Sense strand starting at position 2132 of SEQ ID NO: 1888894
auagacuuccaaugucaug

SEQ ID NO: 2564375 - RNA, 19 nt, Artificial Sequence
  Description of Artificial Sequence: Synthetic oligonucleotide
  Antisense strand to SEQ ID NO: 2564374
caugacauuggaagucuau

SEQ ID NO: 2564376 - RNA, 19 nt, Artificial Sequence
  Description of Artificial Sequence: Synthetic oligonucleotide
  Sense strand starting at position 2278 of SEQ ID NO: 1888894
uguugaucuuacccauaga

SEQ ID NO: 2564377 - RNA, 19 nt, Artificial Sequence
  Description of Artificial Sequence: Synthetic oligonucleotide
  Antisense strand to SEQ ID NO: 2564376
ucuauggguaagaucaaca

SEQ ID NO: 2564378 - RNA, 19 nt, Artificial Sequence
  Description of Artificial Sequence: Synthetic oligonucleotide
  Sense strand starting at position 2301 of SEQ ID NO: 1888894
agucaaugucugcauuaau

SEQ ID NO: 2564379 - RNA, 19 nt, Artificial Sequence
  Description of Artificial Sequence: Synthetic oligonucleotide
  Antisense strand to SEQ ID NO: 2564378
auuaaugcagacauugacu

SEQ ID NO: 2564380 - RNA, 19 nt, Artificial Sequence
  Description of Artificial Sequence: Synthetic oligonucleotide
  Sense strand starting at position 2678 of SEQ ID NO: 1888894
auaugucuuguauaccaua

SEQ ID NO: 2564381 - RNA, 19 nt, Artificial Sequence
  Description of Artificial Sequence: Synthetic oligonucleotide
  Antisense strand to SEQ ID NO: 2564380
uaugguauacaagacauau

SEQ ID NO: 2564382 - RNA, 19 nt, Artificial Sequence
  Description of Artificial Sequence: Synthetic oligonucleotide
  Sense strand starting at position 2862 of SEQ ID NO: 1888894
uggcuacugugauuugcuu

SEQ ID NO: 2564383 - RNA, 19 nt, Artificial Sequence
  Description of Artificial Sequence: Synthetic oligonucleotide
  Antisense strand to SEQ ID NO: 2564382
aagcaaaucacaguagcca

SEQ ID NO: 2564384 - RNA, 19 nt, Artificial Sequence
  Description of Artificial Sequence: Synthetic oligonucleotide
  Sense strand starting at position 2892 of SEQ ID NO: 1888894
agaucauaaucagugcaaa

SEQ ID NO: 2564385 - RNA, 19 nt, Artificial Sequence
  Description of Artificial Sequence: Synthetic oligonucleotide
  Antisense strand to SEQ ID NO: 2564384
uuugcacugauuaugaucu

SEQ ID NO: 2564386 - RNA, 19 nt, Artificial Sequence
  Description of Artificial Sequence: Synthetic oligonucleotide
  Sense strand starting at position 2983 of SEQ ID NO: 1888894
caaugaaaucugugugggu

SEQ ID NO: 2564387 - RNA, 19 nt, Artificial Sequence
  Description of Artificial Sequence: Synthetic oligonucleotide
  Antisense strand to SEQ ID NO: 2564386
acccacacagauuucauug

SEQ ID NO: 2564388 - RNA, 19 nt, Artificial Sequence
  Description of Artificial Sequence: Synthetic oligonucleotide
  Sense strand starting at position 2984 of SEQ ID NO: 1888894
aaugaaaucugugugggua

SEQ ID NO: 2564389 - RNA, 19 nt, Artificial Sequence
  Description of Artificial Sequence: Synthetic oligonucleotide
  Antisense strand to SEQ ID NO: 2564388
uacccacacagauuucauu

SEQ ID NO: 2564390 - RNA, 19 nt, Artificial Sequence
  Description of Artificial Sequence: Synthetic oligonucleotide
  Sense strand starting at position 2985 of SEQ ID NO: 1888894
augaaaucuguguggguau

SEQ ID NO: 2564391 - RNA, 19 nt, Artificial Sequence
  Description of Artificial Sequence: Synthetic oligonucleotide
  Antisense strand to SEQ ID NO: 2564390
auacccacacagauuucau

SEQ ID NO: 2564392 - RNA, 19 nt, Artificial Sequence
  Description of Artificial Sequence: Synthetic oligonucleotide
  Sense strand starting at position 2988 of SEQ ID NO: 1888894
aaaucuguguggguauaca

SEQ ID NO: 2564393 - RNA, 19 nt, Artificial Sequence
  Description of Artificial Sequence: Synthetic oligonucleotide
  Antisense strand to SEQ ID NO: 2564392
uguauacccacacagauuu

SEQ ID NO: 2564394 - RNA, 19 nt, Artificial Sequence
  Description of Artificial Sequence: Synthetic oligonucleotide
  Sense strand starting at position 3087 of SEQ ID NO: 1888894
aggagauaguuugugcaga

SEQ ID NO: 2564395 - RNA, 19 nt, Artificial Sequence
  Description of Artificial Sequence: Synthetic oligonucleotide
  Antisense strand to SEQ ID NO: 2564394
ucugcacaaacuaucuccu

SEQ ID NO: 2564396 - RNA, 19 nt, Artificial Sequence
  Description of Artificial Sequence: Synthetic oligonucleotide
  Sense strand starting at position 3092 of SEQ ID NO: 1888894
auaguuugugcagaguaug

SEQ ID NO: 2564397 - RNA, 19 nt, Artificial Sequence
  Description of Artificial Sequence: Synthetic oligonucleotide
  Antisense strand to SEQ ID NO: 2564396
cauacucugcacaaacuau

SEQ ID NO: 2564398 - RNA, 19 nt, Artificial Sequence
  Description of Artificial Sequence: Synthetic oligonucleotide
  Sense strand starting at position 3102 of SEQ ID NO: 1888894
cagaguauguauuugcuuu

SEQ ID NO: 2564399 - RNA, 19 nt, Artificial Sequence
  Description of Artificial Sequence: Synthetic oligonucleotide
  Antisense strand to SEQ ID NO: 2564398
aaagcaaauacauacucug

SEQ ID NO: 2564400 - RNA, 19 nt, Artificial Sequence
  Description of Artificial Sequence: Synthetic oligonucleotide
  Sense strand starting at position 3163 of SEQ ID NO: 1888894
ugaguaguggacuggauaa

SEQ ID NO: 2564401 - RNA, 19 nt, Artificial Sequence
  Description of Artificial Sequence: Synthetic oligonucleotide
  Antisense strand to SEQ ID NO: 2564400
uuauccaguccacuacuca

SEQ ID NO: 2564402 - RNA, 19 nt, Artificial Sequence
  Description of Artificial Sequence: Synthetic oligonucleotide
  Sense strand starting at position 3212 of SEQ ID NO: 1888894
guugcagucauagacaaag

SEQ ID NO: 2564403 - RNA, 19 nt, Artificial Sequence
  Description of Artificial Sequence: Synthetic oligonucleotide
  Antisense strand to SEQ ID NO: 2564402
cuuugucuaugacugcaac

SEQ ID NO: 2564404 - RNA, 19 nt, Artificial Sequence
  Description of Artificial Sequence: Synthetic oligonucleotide
  Sense strand starting at position 3290 of SEQ ID NO: 1888894
uagugacuucuauagggua

SEQ ID NO: 2564405 - RNA, 19 nt, Artificial Sequence
  Description of Artificial Sequence: Synthetic oligonucleotide
  Antisense strand to SEQ ID NO: 2564404
uacccuauagaagucacua

SEQ ID NO: 2564406 - RNA, 19 nt, Artificial Sequence
  Description of Artificial Sequence: Synthetic oligonucleotide
  Sense strand starting at position 3292 of SEQ ID NO: 1888894
gugacuucuauaggguaga

SEQ ID NO: 2564407 - RNA, 19 nt, Artificial Sequence
  Description of Artificial Sequence: Synthetic oligonucleotide
  Antisense strand to SEQ ID NO: 2564406
ucuacccuauagaagucac

SEQ ID NO: 2564408 - RNA, 19 nt, Artificial Sequence
  Description of Artificial Sequence: Synthetic oligonucleotide
  Sense strand starting at position 3305 of SEQ ID NO: 1888894
gguagagcacuccaaaugu

SEQ ID NO: 2564409 - RNA, 19 nt, Artificial Sequence
  Description of Artificial Sequence: Synthetic oligonucleotide
  Antisense strand to SEQ ID NO: 2564408
acauuuggagugcucuacc

SEQ ID NO: 2564410 - RNA, 19 nt, Artificial Sequence
  Description of Artificial Sequence: Synthetic oligonucleotide
  Sense strand starting at position 3349 of SEQ ID NO: 1888894
uuaaccaguuaaguagaau

SEQ ID NO: 2564411 - RNA, 19 nt, Artificial Sequence
  Description of Artificial Sequence: Synthetic oligonucleotide
  Antisense strand to SEQ ID NO: 2564410
auucuacuuaacugguuaa

SEQ ID NO: 2564412 - RNA, 19 nt, Artificial Sequence
  Description of Artificial Sequence: Synthetic oligonucleotide
  Sense strand starting at position 3552 of SEQ ID NO: 1888894
aguaaaugcucaccaauga

SEQ ID NO: 2564413 - RNA, 19 nt, Artificial Sequence
  Description of Artificial Sequence: Synthetic oligonucleotide
  Antisense strand to SEQ ID NO: 2564412
ucauuggugagcauuuacu

SEQ ID NO: 2564414 - RNA, 19 nt, Artificial Sequence
  Description of Artificial Sequence: Synthetic oligonucleotide
  Sense strand starting at position 3553 of SEQ ID NO: 1888894
guaaaugcucaccaaugau

SEQ ID NO: 2564415 - RNA, 19 nt, Artificial Sequence
  Description of Artificial Sequence: Synthetic oligonucleotide
  Antisense strand to SEQ ID NO: 2564414
aucauuggugagcauuuac

SEQ ID NO: 2564416 - RNA, 19 nt, Artificial Sequence
  Description of Artificial Sequence: Synthetic oligonucleotide
  Sense strand starting at position 44 of SEQ ID NO: 1888895
caucuugguggaugagaag

SEQ ID NO: 2564417 - RNA, 19 nt, Artificial Sequence
  Description of Artificial Sequence: Synthetic oligonucleotide
  Antisense strand to SEQ ID NO: 2564416
cuucucauccaccaagaug

SEQ ID NO: 2564418 - RNA, 19 nt, Artificial Sequence
  Description of Artificial Sequence: Synthetic oligonucleotide
  Sense strand starting at position 84 of SEQ ID NO: 1888895
ucuccuuuagaacgugaaa

SEQ ID NO: 2564419 - RNA, 19 nt, Artificial Sequence
  Description of Artificial Sequence: Synthetic oligonucleotide
  Antisense strand to SEQ ID NO: 2564418
uuucacguucuaaaggaga

SEQ ID NO: 2564420 - RNA, 19 nt, Artificial Sequence
  Description of Artificial Sequence: Synthetic oligonucleotide
  Sense strand starting at position 196 of SEQ ID NO: 1888895
agggaauaauuaccuguuu

SEQ ID NO: 2564421 - RNA, 19 nt, Artificial Sequence
  Description of Artificial Sequence: Synthetic oligonucleotide
  Antisense strand to SEQ ID NO: 2564420
aaacagguaauuauucccu

SEQ ID NO: 2564422 - RNA, 19 nt, Artificial Sequence
  Description of Artificial Sequence: Synthetic oligonucleotide
  Sense strand starting at position 219 of SEQ ID NO: 1888895
uggauugcaggucaaacuu

SEQ ID NO: 2564423 - RNA, 19 nt, Artificial Sequence
  Description of Artificial Sequence: Synthetic oligonucleotide
  Antisense strand to SEQ ID NO: 2564422
aaguuugaccugcaaucca

SEQ ID NO: 2564424 - RNA, 19 nt, Artificial Sequence
  Description of Artificial Sequence: Synthetic oligonucleotide
  Sense strand starting at position 227 of SEQ ID NO: 1888895
aggucaaacuugguauaga

SEQ ID NO: 2564425 - RNA, 19 nt, Artificial Sequence
  Description of Artificial Sequence: Synthetic oligonucleotide
  Antisense strand to SEQ ID NO: 2564424
ucuauaccaaguuugaccu

SEQ ID NO: 2564426 - RNA, 19 nt, Artificial Sequence
  Description of Artificial Sequence: Synthetic oligonucleotide
  Sense strand starting at position 854 of SEQ ID NO: 1888895
ggacauauucagcacggua

SEQ ID NO: 2564427 - RNA, 19 nt, Artificial Sequence
  Description of Artificial Sequence: Synthetic oligonucleotide
  Antisense strand to SEQ ID NO: 2564426
uaccgugcugaauaugucc

SEQ ID NO: 2564428 - RNA, 19 nt, Artificial Sequence
  Description of Artificial Sequence: Synthetic oligonucleotide
  Sense strand starting at position 1194 of SEQ ID NO: 1888895
auauuaagccuguaaguga

SEQ ID NO: 2564429 - RNA, 19 nt, Artificial Sequence
  Description of Artificial Sequence: Synthetic oligonucleotide
  Antisense strand to SEQ ID NO: 2564428
ucacuuacaggcuuaauau

SEQ ID NO: 2564430 - RNA, 19 nt, Artificial Sequence
  Description of Artificial Sequence: Synthetic oligonucleotide
  Sense strand starting at position 1256 of SEQ ID NO: 1888895
uccaccaaguugucagaau

SEQ ID NO: 2564431 - RNA, 19 nt, Artificial Sequence
  Description of Artificial Sequence: Synthetic oligonucleotide
  Antisense strand to SEQ ID NO: 2564430
auucugacaacuuggugga

SEQ ID NO: 2564432 - RNA, 19 nt, Artificial Sequence
  Description of Artificial Sequence: Synthetic oligonucleotide
  Sense strand starting at position 1308 of SEQ ID NO: 1888895
acacguuaccagggagcaa

SEQ ID NO: 2564433 - RNA, 19 nt, Artificial Sequence
  Description of Artificial Sequence: Synthetic oligonucleotide
  Antisense strand to SEQ ID NO: 2564432
uugcucccugguaacgugu

SEQ ID NO: 2564434 - RNA, 19 nt, Artificial Sequence
  Description of Artificial Sequence: Synthetic oligonucleotide
  Sense strand starting at position 1356 of SEQ ID NO: 1888895
acagauugagugugguaau

SEQ ID NO: 2564435 - RNA, 19 nt, Artificial Sequence
  Description of Artificial Sequence: Synthetic oligonucleotide
  Antisense strand to SEQ ID NO: 2564434
auuaccacacucaaucugu

SEQ ID NO: 2564436 - RNA, 19 nt, Artificial Sequence
  Description of Artificial Sequence: Synthetic oligonucleotide
  Sense strand starting at position 1390 of SEQ ID NO: 1888895
gguucucaccaugaccaua

SEQ ID NO: 2564437 - RNA, 19 nt, Artificial Sequence
  Description of Artificial Sequence: Synthetic oligonucleotide
  Antisense strand to SEQ ID NO: 2564436
uauggucauggugagaacc

SEQ ID NO: 2564438 - RNA, 19 nt, Artificial Sequence
  Description of Artificial Sequence: Synthetic oligonucleotide
  Sense strand starting at position 1756 of SEQ ID NO: 1888895
ccacaugggcuuuggagaa

SEQ ID NO: 2564439 - RNA, 19 nt, Artificial Sequence
  Description of Artificial Sequence: Synthetic oligonucleotide
  Antisense strand to SEQ ID NO: 2564438
uucuccaaagcccaugugg

SEQ ID NO: 2564440 - RNA, 19 nt, Artificial Sequence
  Description of Artificial Sequence: Synthetic oligonucleotide
  Sense strand starting at position 1829 of SEQ ID NO: 1888895
agaguuaucuuccuugaca

SEQ ID NO: 2564441 - RNA, 19 nt, Artificial Sequence
  Description of Artificial Sequence: Synthetic oligonucleotide
  Antisense strand to SEQ ID NO: 2564440
ugucaaggaagauaacucu

SEQ ID NO: 2564442 - RNA, 19 nt, Artificial Sequence
  Description of Artificial Sequence: Synthetic oligonucleotide
  Sense strand starting at position 1895 of SEQ ID NO: 1888895
gguauucucaccgggagac

SEQ ID NO: 2564443 - RNA, 19 nt, Artificial Sequence
  Description of Artificial Sequence: Synthetic oligonucleotide
  Antisense strand to SEQ ID NO: 2564442
gucucccggugagaauacc

SEQ ID NO: 2564444 - RNA, 19 nt, Artificial Sequence
  Description of Artificial Sequence: Synthetic oligonucleotide
  Sense strand starting at position 1897 of SEQ ID NO: 1888895
uauucucaccgggagacuu

SEQ ID NO: 2564445 - RNA, 19 nt, Artificial Sequence
  Description of Artificial Sequence: Synthetic oligonucleotide
  Antisense strand to SEQ ID NO: 2564444
aagucucccggugagaaua

SEQ ID NO: 2564446 - RNA, 19 nt, Artificial Sequence
  Description of Artificial Sequence: Synthetic oligonucleotide
  Sense strand starting at position 2055 of SEQ ID NO: 1888895
cuuugaacacgugacuaua

SEQ ID NO: 2564447 - RNA, 19 nt, Artificial Sequence
  Description of Artificial Sequence: Synthetic oligonucleotide
  Antisense strand to SEQ ID NO: 2564446
uauagucacguguucaaag

SEQ ID NO: 2564448 - RNA, 19 nt, Artificial Sequence
  Description of Artificial Sequence: Synthetic oligonucleotide
  Sense strand starting at position 2057 of SEQ ID NO: 1888895
uugaacacgugacuauaau

SEQ ID NO: 2564449 - RNA, 19 nt, Artificial Sequence
  Description of Artificial Sequence: Synthetic oligonucleotide
  Antisense strand to SEQ ID NO: 2564448
auuauagucacguguucaa

SEQ ID NO: 2564450 - RNA, 19 nt, Artificial Sequence
  Description of Artificial Sequence: Synthetic oligonucleotide
  Sense strand starting at position 2058 of SEQ ID NO: 1888895
ugaacacgugacuauaauc

SEQ ID NO: 2564451 - RNA, 19 nt, Artificial Sequence
  Description of Artificial Sequence: Synthetic oligonucleotide
  Antisense strand to SEQ ID NO: 2564450
gauuauagucacguguuca

SEQ ID NO: 2564452 - RNA, 19 nt, Artificial Sequence
  Description of Artificial Sequence: Synthetic oligonucleotide
  Sense strand starting at position 2182 of SEQ ID NO: 1888895
cugauccagcauuggaaau

SEQ ID NO: 2564453 - RNA, 19 nt, Artificial Sequence
  Description of Artificial Sequence: Synthetic oligonucleotide
  Antisense strand to SEQ ID NO: 2564452
auuuccaaugcuggaucag

SEQ ID NO: 2564454 - RNA, 19 nt, Artificial Sequence
  Description of Artificial Sequence: Synthetic oligonucleotide
  Sense strand starting at position 2276 of SEQ ID NO: 1888895
gaguacuuugaucauggca

SEQ ID NO: 2564455 - RNA, 19 nt, Artificial Sequence
  Description of Artificial Sequence: Synthetic oligonucleotide
  Antisense strand to SEQ ID NO: 2564454
ugccaugaucaaaguacuc

SEQ ID NO: 2564456 - RNA, 19 nt, Artificial Sequence
  Description of Artificial Sequence: Synthetic oligonucleotide
  Sense strand starting at position 2301 of SEQ ID NO: 1888895
ucaauaaucugggcaugga

SEQ ID NO: 2564457 - RNA, 19 nt, Artificial Sequence
  Description of Artificial Sequence: Synthetic oligonucleotide
  Antisense strand to SEQ ID NO: 2564456
uccaugcccagauuauuga

SEQ ID NO: 2564458 - RNA, 19 nt, Artificial Sequence
  Description of Artificial Sequence: Synthetic oligonucleotide
  Sense strand starting at position 2728 of SEQ ID NO: 1888895
uggagcucccauuaucuuu

SEQ ID NO: 2564459 - RNA, 19 nt, Artificial Sequence
  Description of Artificial Sequence: Synthetic oligonucleotide
  Antisense strand to SEQ ID NO: 2564458
aaagauaaugggagcucca

SEQ ID NO: 2564460 - RNA, 19 nt, Artificial Sequence
  Description of Artificial Sequence: Synthetic oligonucleotide
  Sense strand starting at position 2747 of SEQ ID NO: 1888895
ucgacuaaaggcugaucua

SEQ ID NO: 2564461 - RNA, 19 nt, Artificial Sequence
  Description of Artificial Sequence: Synthetic oligonucleotide
  Antisense strand to SEQ ID NO: 2564460
uagaucagccuuuagucga

SEQ ID NO: 2564462 - RNA, 19 nt, Artificial Sequence
  Description of Artificial Sequence: Synthetic oligonucleotide
  Sense strand starting at position 2750 of SEQ ID NO: 1888895
acuaaaggcugaucuaguu

SEQ ID NO: 2564463 - RNA, 19 nt, Artificial Sequence
  Description of Artificial Sequence: Synthetic oligonucleotide
  Antisense strand to SEQ ID NO: 2564462
aacuagaucagccuuuagu

SEQ ID NO: 2564464 - RNA, 19 nt, Artificial Sequence
  Description of Artificial Sequence: Synthetic oligonucleotide
  Sense strand starting at position 2949 of SEQ ID NO: 1888895
aggugcuguagugaagaau

SEQ ID NO: 2564465 - RNA, 19 nt, Artificial Sequence
  Description of Artificial Sequence: Synthetic oligonucleotide
  Antisense strand to SEQ ID NO: 2564464
auucuucacuacagcaccu

SEQ ID NO: 2564466 - RNA, 19 nt, Artificial Sequence
  Description of Artificial Sequence: Synthetic oligonucleotide
  Sense strand starting at position 2960 of SEQ ID NO: 1888895
ugaagaaucucagucaaug

SEQ ID NO: 2564467 - RNA, 19 nt, Artificial Sequence
  Description of Artificial Sequence: Synthetic oligonucleotide
  Antisense strand to SEQ ID NO: 2564466
cauugacugagauucuuca

SEQ ID NO: 2564468 - RNA, 19 nt, Artificial Sequence
  Description of Artificial Sequence: Synthetic oligonucleotide
  Sense strand starting at position 3004 of SEQ ID NO: 1888895
gagaucuaugaaugagcga

SEQ ID NO: 2564469 - RNA, 19 nt, Artificial Sequence
  Description of Artificial Sequence: Synthetic oligonucleotide
  Antisense strand to SEQ ID NO: 2564468
ucgcucauucauagaucuc

SEQ ID NO: 2564470 - RNA, 19 nt, Artificial Sequence
  Description of Artificial Sequence: Synthetic oligonucleotide
  Sense strand starting at position 3029 of SEQ ID NO: 1888895
gcagguaguaaguaaauga

SEQ ID NO: 2564471 - RNA, 19 nt, Artificial Sequence
  Description of Artificial Sequence: Synthetic oligonucleotide
  Antisense strand to SEQ ID NO: 2564470
ucauuuacuuacuaccugc

SEQ ID NO: 2564472 - RNA, 19 nt, Artificial Sequence
  Description of Artificial Sequence: Synthetic oligonucleotide
  Sense strand starting at position 3037 of SEQ ID NO: 1888895
uaaguaaaugaucaugugu

SEQ ID NO: 2564473 - RNA, 19 nt, Artificial Sequence
  Description of Artificial Sequence: Synthetic oligonucleotide
  Antisense strand to SEQ ID NO: 2564472
acacaugaucauuuacuua

SEQ ID NO: 2564474 - RNA, 19 nt, Artificial Sequence
  Description of Artificial Sequence: Synthetic oligonucleotide
  Sense strand starting at position 3113 of SEQ ID NO: 1888895
guuguugagacggacucua

SEQ ID NO: 2564475 - RNA, 19 nt, Artificial Sequence
  Description of Artificial Sequence: Synthetic oligonucleotide
  Antisense strand to SEQ ID NO: 2564474
uagaguccgucucaacaac

SEQ ID NO: 2564476 - RNA, 19 nt, Artificial Sequence
  Description of Artificial Sequence: Synthetic oligonucleotide
  Sense strand starting at position 3455 of SEQ ID NO: 1888895
ggugcagugcuagaaagaa

SEQ ID NO: 2564477 - RNA, 19 nt, Artificial Sequence
  Description of Artificial Sequence: Synthetic oligonucleotide
  Antisense strand to SEQ ID NO: 2564476
uucuuucuagcacugcacc

SEQ ID NO: 2564478 - RNA, 19 nt, Artificial Sequence
  Description of Artificial Sequence: Synthetic oligonucleotide
  Sense strand starting at position 3560 of SEQ ID NO: 1888895
ccuggaauuccauguuuag

SEQ ID NO: 2564479 - RNA, 19 nt, Artificial Sequence
  Description of Artificial Sequence: Synthetic oligonucleotide
  Antisense strand to SEQ ID NO: 2564478
cuaaacauggaauuccagg

SEQ ID NO: 2564480 - RNA, 19 nt, Artificial Sequence
  Description of Artificial Sequence: Synthetic oligonucleotide
  Sense strand starting at position 3566 of SEQ ID NO: 1888895
auuccauguuuaguggaga

SEQ ID NO: 2564481 - RNA, 19 nt, Artificial Sequence
  Description of Artificial Sequence: Synthetic oligonucleotide
  Antisense strand to SEQ ID NO: 2564480
ucuccacuaaacauggaau

SEQ ID NO: 2564482 - RNA, 19 nt, Artificial Sequence
  Description of Artificial Sequence: Synthetic oligonucleotide
  Sense strand starting at position 3569 of SEQ ID NO: 1888895
ccauguuuaguggagauua

SEQ ID NO: 2564483 - RNA, 19 nt, Artificial Sequence
  Description of Artificial Sequence: Synthetic oligonucleotide
  Antisense strand to SEQ ID NO: 2564482
uaaucuccacuaaacaugg

SEQ ID NO: 2564484 - RNA, 19 nt, Artificial Sequence
  Description of Artificial Sequence: Synthetic oligonucleotide
  Sense strand starting at position 3571 of SEQ ID NO: 1888895
auguuuaguggagauuauc

SEQ ID NO: 2564485 - RNA, 19 nt, Artificial Sequence
  Description of Artificial Sequence: Synthetic oligonucleotide
  Antisense strand to SEQ ID NO: 2564484
gauaaucuccacuaaacau

SEQ ID NO: 2564486 - RNA, 19 nt, Artificial Sequence
  Description of Artificial Sequence: Synthetic oligonucleotide
  Sense strand starting at position 3655 of SEQ ID NO: 1888895
gaggcugcaugaucagauu

SEQ ID NO: 2564487 - RNA, 19 nt, Artificial Sequence
  Description of Artificial Sequence: Synthetic oligonucleotide
  Antisense strand to SEQ ID NO: 2564486
aaucugaucaugcagccuc

SEQ ID NO: 2564488 - RNA, 19 nt, Artificial Sequence
  Description of Artificial Sequence: Synthetic oligonucleotide
  Sense strand starting at position 3675 of SEQ ID NO: 1888895
ccuagcugugaauaaagau

SEQ ID NO: 2564489 - RNA, 19 nt, Artificial Sequence
  Description of Artificial Sequence: Synthetic oligonucleotide
  Antisense strand to SEQ ID NO: 2564488
aucuuuauucacagcuagg

SEQ ID NO: 2564490 - RNA, 19 nt, Artificial Sequence
  Description of Artificial Sequence: Synthetic oligonucleotide
  Sense strand starting at position 3687 of SEQ ID NO: 1888895
uaaagauccuauguggucu

SEQ ID NO: 2564491 - RNA, 19 nt, Artificial Sequence
  Description of Artificial Sequence: Synthetic oligonucleotide
  Antisense strand to SEQ ID NO: 2564490
agaccacauaggaucuuua

SEQ ID NO: 2564492 - RNA, 19 nt, Artificial Sequence
  Description of Artificial Sequence: Synthetic oligonucleotide
  Sense strand starting at position 3695 of SEQ ID NO: 1888895
cuauguggucucuauauca

SEQ ID NO: 2564493 - RNA, 19 nt, Artificial Sequence
  Description of Artificial Sequence: Synthetic oligonucleotide
  Antisense strand to SEQ ID NO: 2564492
ugauauagagaccacauag

SEQ ID NO: 2564494 - RNA, 19 nt, Artificial Sequence
  Description of Artificial Sequence: Synthetic oligonucleotide
  Sense strand starting at position 3775 of SEQ ID NO: 1888895
cuuauuggccaucaagauu

SEQ ID NO: 2564495 - RNA, 19 nt, Artificial Sequence
  Description of Artificial Sequence: Synthetic oligonucleotide
  Antisense strand to SEQ ID NO: 2564494
aaucuugauggccaauaag

SEQ ID NO: 2564496 - RNA, 19 nt, Artificial Sequence
  Description of Artificial Sequence: Synthetic oligonucleotide
  Sense strand starting at position 23 of SEQ ID NO: 1888896
ggcuuauuugcaggccaca

SEQ ID NO: 2564497 - RNA, 19 nt, Artificial Sequence
  Description of Artificial Sequence: Synthetic oligonucleotide
  Antisense strand to SEQ ID NO: 2564496
uguggccugcaaauaagcc

SEQ ID NO: 2564498 - RNA, 19 nt, Artificial Sequence
  Description of Artificial Sequence: Synthetic oligonucleotide
  Sense strand starting at position 371 of SEQ ID NO: 1888896
cuuguucuaguguauaaga

SEQ ID NO: 2564499 - RNA, 19 nt, Artificial Sequence
  Description of Artificial Sequence: Synthetic oligonucleotide
  Antisense strand to SEQ ID NO: 2564498
ucuuauacacuagaacaag

SEQ ID NO: 2564500 - RNA, 19 nt, Artificial Sequence
  Description of Artificial Sequence: Synthetic oligonucleotide
  Sense strand starting at position 373 of SEQ ID NO: 1888896
uguucuaguguauaagauc

SEQ ID NO: 2564501 - RNA, 19 nt, Artificial Sequence
  Description of Artificial Sequence: Synthetic oligonucleotide
  Antisense strand to SEQ ID NO: 2564500
gaucuuauacacuagaaca

SEQ ID NO: 2564502 - RNA, 19 nt, Artificial Sequence
  Description of Artificial Sequence: Synthetic oligonucleotide
  Sense strand starting at position 393 of SEQ ID NO: 1888896
ugcuuugacccucagacua

SEQ ID NO: 2564503 - RNA, 19 nt, Artificial Sequence
  Description of Artificial Sequence: Synthetic oligonucleotide
  Antisense strand to SEQ ID NO: 2564502
uagucugagggucaaagca

SEQ ID NO: 2564504 - RNA, 19 nt, Artificial Sequence
  Description of Artificial Sequence: Synthetic oligonucleotide
  Sense strand starting at position 451 of SEQ ID NO: 1888896
agcccaaugccugauaaua

SEQ ID NO: 2564505 - RNA, 19 nt, Artificial Sequence
  Description of Artificial Sequence: Synthetic oligonucleotide
  Antisense strand to SEQ ID NO: 2564504
uauuaucaggcauugggcu

SEQ ID NO: 2564506 - RNA, 19 nt, Artificial Sequence
  Description of Artificial Sequence: Synthetic oligonucleotide
  Sense strand starting at position 555 of SEQ ID NO: 1888896
ugaguaggguugccuauuu

SEQ ID NO: 2564507 - RNA, 19 nt, Artificial Sequence
  Description of Artificial Sequence: Synthetic oligonucleotide
  Antisense strand to SEQ ID NO: 2564506
aaauaggcaacccuacuca

SEQ ID NO: 2564508 - RNA, 19 nt, Artificial Sequence
  Description of Artificial Sequence: Synthetic oligonucleotide
  Sense strand starting at position 609 of SEQ ID NO: 1888896
ccaaguacauucuuaguau

SEQ ID NO: 2564509 - RNA, 19 nt, Artificial Sequence
  Description of Artificial Sequence: Synthetic oligonucleotide
  Antisense strand to SEQ ID NO: 2564508
auacuaagaauguacuugg

SEQ ID NO: 2564510 - RNA, 19 nt, Artificial Sequence
  Description of Artificial Sequence: Synthetic oligonucleotide
  Sense strand starting at position 612 of SEQ ID NO: 1888896
aguacauucuuaguauaag

SEQ ID NO: 2564511 - RNA, 19 nt, Artificial Sequence
  Description of Artificial Sequence: Synthetic oligonucleotide
  Antisense strand to SEQ ID NO: 2564510
cuuauacuaagaauguacu

SEQ ID NO: 2564512 - RNA, 19 nt, Artificial Sequence
  Description of Artificial Sequence: Synthetic oligonucleotide
  Sense strand starting at position 641 of SEQ ID NO: 1888896
gcaauauucggacauacuu

SEQ ID NO: 2564513 - RNA, 19 nt, Artificial Sequence
  Description of Artificial Sequence: Synthetic oligonucleotide
  Antisense strand to SEQ ID NO: 2564512
aaguauguccgaauauugc

SEQ ID NO: 2564514 - RNA, 19 nt, Artificial Sequence
  Description of Artificial Sequence: Synthetic oligonucleotide
  Sense strand starting at position 670 of SEQ ID NO: 1888896
uuguccacuguuuaucaga

SEQ ID NO: 2564515 - RNA, 19 nt, Artificial Sequence
  Description of Artificial Sequence: Synthetic oligonucleotide
  Antisense strand to SEQ ID NO: 2564514
ucugauaaacaguggacaa

SEQ ID NO: 2564516 - RNA, 19 nt, Artificial Sequence
  Description of Artificial Sequence: Synthetic oligonucleotide
  Sense strand starting at position 672 of SEQ ID NO: 1888896
guccacuguuuaucagaaa

SEQ ID NO: 2564517 - RNA, 19 nt, Artificial Sequence
  Description of Artificial Sequence: Synthetic oligonucleotide
  Antisense strand to SEQ ID NO: 2564516
uuucugauaaacaguggac

SEQ ID NO: 2564518 - RNA, 19 nt, Artificial Sequence
  Description of Artificial Sequence: Synthetic oligonucleotide
  Sense strand starting at position 749 of SEQ ID NO: 1888896
uguagcugacccuaaauga

SEQ ID NO: 2564519 - RNA, 19 nt, Artificial Sequence
  Description of Artificial Sequence: Synthetic oligonucleotide
  Antisense strand to SEQ ID NO: 2564518
ucauuuagggucagcuaca

SEQ ID NO: 2564520 - RNA, 19 nt, Artificial Sequence
  Description of Artificial Sequence: Synthetic oligonucleotide
  Sense strand starting at position 921 of SEQ ID NO: 1888896
ggauacugauuugauauau

SEQ ID NO: 2564521 - RNA, 19 nt, Artificial Sequence
  Description of Artificial Sequence: Synthetic oligonucleotide
  Antisense strand to SEQ ID NO: 2564520
auauaucaaaucaguaucc

SEQ ID NO: 2564522 - RNA, 19 nt, Artificial Sequence
  Description of Artificial Sequence: Synthetic oligonucleotide
  Sense strand starting at position 1054 of SEQ ID NO: 1888896
guacguagcaguuugcaaa

SEQ ID NO: 2564523 - RNA, 19 nt, Artificial Sequence
  Description of Artificial Sequence: Synthetic oligonucleotide
  Antisense strand to SEQ ID NO: 2564522
uuugcaaacugcuacguac

SEQ ID NO: 2564524 - RNA, 19 nt, Artificial Sequence
  Description of Artificial Sequence: Synthetic oligonucleotide
  Sense strand starting at position 1161 of SEQ ID NO: 1888896
guagguauggugagucucu

SEQ ID NO: 2564525 - RNA, 19 nt, Artificial Sequence
  Description of Artificial Sequence: Synthetic oligonucleotide
  Antisense strand to SEQ ID NO: 2564524
agagacucaccauaccuac

SEQ ID NO: 2564526 - RNA, 19 nt, Artificial Sequence
  Description of Artificial Sequence: Synthetic oligonucleotide
  Sense strand starting at position 1278 of SEQ ID NO: 1888896
uucugagucugaccauuau

SEQ ID NO: 2564527 - RNA, 19 nt, Artificial Sequence
  Description of Artificial Sequence: Synthetic oligonucleotide
  Antisense strand to SEQ ID NO: 2564526
auaauggucagacucagaa

SEQ ID NO: 2564528 - RNA, 19 nt, Artificial Sequence
  Description of Artificial Sequence: Synthetic oligonucleotide
  Sense strand starting at position 1422 of SEQ ID NO: 1888896
gggacucccuuauuacauc

SEQ ID NO: 2564529 - RNA, 19 nt, Artificial Sequence
  Description of Artificial Sequence: Synthetic oligonucleotide
  Antisense strand to SEQ ID NO: 2564528
gauguaauaagggaguccc

SEQ ID NO: 2564530 - RNA, 19 nt, Artificial Sequence
  Description of Artificial Sequence: Synthetic oligonucleotide
  Sense strand starting at position 1483 of SEQ ID NO: 1888896
gggaauuguguguacagga

SEQ ID NO: 2564531 - RNA, 19 nt, Artificial Sequence
  Description of Artificial Sequence: Synthetic oligonucleotide
  Antisense strand to SEQ ID NO: 2564530
uccuguacacacaauuccc

SEQ ID NO: 2564532 - RNA, 19 nt, Artificial Sequence
  Description of Artificial Sequence: Synthetic oligonucleotide
  Sense strand starting at position 1514 of SEQ ID NO: 1888896
agcuaaguauuacuggaau

SEQ ID NO: 2564533 - RNA, 19 nt, Artificial Sequence
  Description of Artificial Sequence: Synthetic oligonucleotide
  Antisense strand to SEQ ID NO: 2564532
auuccaguaauacuuagcu

SEQ ID NO: 2564534 - RNA, 19 nt, Artificial Sequence
  Description of Artificial Sequence: Synthetic oligonucleotide
  Sense strand starting at position 1571 of SEQ ID NO: 1888896
gucugucuggaauauuaaa

SEQ ID NO: 2564535 - RNA, 19 nt, Artificial Sequence
  Description of Artificial Sequence: Synthetic oligonucleotide
  Antisense strand to SEQ ID NO: 2564534
uuuaauauuccagacagac

SEQ ID NO: 2564536 - RNA, 19 nt, Artificial Sequence
  Description of Artificial Sequence: Synthetic oligonucleotide
  Sense strand starting at position 1817 of SEQ ID NO: 1888896
uuguaauuccagugacaca

SEQ ID NO: 2564537 - RNA, 19 nt, Artificial Sequence
  Description of Artificial Sequence: Synthetic oligonucleotide
  Antisense strand to SEQ ID NO: 2564536
ugugucacuggaauuacaa

SEQ ID NO: 2564538 - RNA, 19 nt, Artificial Sequence
  Description of Artificial Sequence: Synthetic oligonucleotide
  Sense strand starting at position 2465 of SEQ ID NO: 1888896
accauaucacugugacaca

SEQ ID NO: 2564539 - RNA, 19 nt, Artificial Sequence
  Description of Artificial Sequence: Synthetic oligonucleotide
  Antisense strand to SEQ ID NO: 2564538
ugugucacagugauauggu

SEQ ID NO: 2564540 - RNA, 19 nt, Artificial Sequence
  Description of Artificial Sequence: Synthetic oligonucleotide
  Sense strand starting at position 2584 of SEQ ID NO: 1888896
caaguaguuugauuggaaa

SEQ ID NO: 2564541 - RNA, 19 nt, Artificial Sequence
  Description of Artificial Sequence: Synthetic oligonucleotide
  Antisense strand to SEQ ID NO: 2564540
uuuccaaucaaacuacuug

SEQ ID NO: 2564542 - RNA, 19 nt, Artificial Sequence
  Description of Artificial Sequence: Synthetic oligonucleotide
  Sense strand starting at position 2655 of SEQ ID NO: 1888896
auucuacugcauuggagaa

SEQ ID NO: 2564543 - RNA, 19 nt, Artificial Sequence
  Description of Artificial Sequence: Synthetic oligonucleotide
  Antisense strand to SEQ ID NO: 2564542
uucuccaaugcaguagaau

SEQ ID NO: 2564544 - RNA, 19 nt, Artificial Sequence
  Description of Artificial Sequence: Synthetic oligonucleotide
  Sense strand starting at position 2679 of SEQ ID NO: 1888896
gcuucuggaucuccagaga

SEQ ID NO: 2564545 - RNA, 19 nt, Artificial Sequence
  Description of Artificial Sequence: Synthetic oligonucleotide
  Antisense strand to SEQ ID NO: 2564544
ucucuggagauccagaagc

SEQ ID NO: 2564546 - RNA, 19 nt, Artificial Sequence
  Description of Artificial Sequence: Synthetic oligonucleotide
  Sense strand starting at position 3189 of SEQ ID NO: 1888896
ccaguaagaucauuggcau

SEQ ID NO: 2564547 - RNA, 19 nt, Artificial Sequence
  Description of Artificial Sequence: Synthetic oligonucleotide
  Antisense strand to SEQ ID NO: 2564546
augccaaugaucuuacugg

SEQ ID NO: 2564548 - RNA, 19 nt, Artificial Sequence
  Description of Artificial Sequence: Synthetic oligonucleotide
  Sense strand starting at position 3190 of SEQ ID NO: 1888896
caguaagaucauuggcauu

SEQ ID NO: 2564549 - RNA, 19 nt, Artificial Sequence
  Description of Artificial Sequence: Synthetic oligonucleotide
  Antisense strand to SEQ ID NO: 2564548
aaugccaaugaucuuacug

SEQ ID NO: 2564550 - RNA, 19 nt, Artificial Sequence
  Description of Artificial Sequence: Synthetic oligonucleotide
  Sense strand starting at position 3327 of SEQ ID NO: 1888896
gggcuuguggucagcauga

SEQ ID NO: 2564551 - RNA, 19 nt, Artificial Sequence
  Description of Artificial Sequence: Synthetic oligonucleotide
  Antisense strand to SEQ ID NO: 2564550
ucaugcugaccacaagccc

SEQ ID NO: 2564552 - RNA, 19 nt, Artificial Sequence
  Description of Artificial Sequence: Synthetic oligonucleotide
  Sense strand starting at position 3352 of SEQ ID NO: 1888896
gaugguuuacucugggaug

SEQ ID NO: 2564553 - RNA, 19 nt, Artificial Sequence
  Description of Artificial Sequence: Synthetic oligonucleotide
  Antisense strand to SEQ ID NO: 2564552
caucccagaguaaaccauc

SEQ ID NO: 2564554 - RNA, 19 nt, Artificial Sequence
  Description of Artificial Sequence: Synthetic oligonucleotide
  Sense strand starting at position 3357 of SEQ ID NO: 1888896
uuuacucugggauguaacu

SEQ ID NO: 2564555 - RNA, 19 nt, Artificial Sequence
  Description of Artificial Sequence: Synthetic oligonucleotide
  Antisense strand to SEQ ID NO: 2564554
aguuacaucccagaguaaa

SEQ ID NO: 2564556 - RNA, 19 nt, Artificial Sequence
  Description of Artificial Sequence: Synthetic oligonucleotide
  Sense strand starting at position 3520 of SEQ ID NO: 1888896
agugcugcugugccucaaa

SEQ ID NO: 2564557 - RNA, 19 nt, Artificial Sequence
  Description of Artificial Sequence: Synthetic oligonucleotide
  Antisense strand to SEQ ID NO: 2564556
uuugaggcacagcagcacu

SEQ ID NO: 2564558 - RNA, 19 nt, Artificial Sequence
  Description of Artificial Sequence: Synthetic oligonucleotide
  Sense strand starting at position 3672 of SEQ ID NO: 1888896
aggagucaguuggucaaau

SEQ ID NO: 2564559 - RNA, 19 nt, Artificial Sequence
  Description of Artificial Sequence: Synthetic oligonucleotide
  Antisense strand to SEQ ID NO: 2564558
auuugaccaacugacuccu

SEQ ID NO: 2564560 - RNA, 19 nt, Artificial Sequence
  Description of Artificial Sequence: Synthetic oligonucleotide
  Sense strand starting at position 3673 of SEQ ID NO: 1888896
ggagucaguuggucaaaua

SEQ ID NO: 2564561 - RNA, 19 nt, Artificial Sequence
  Description of Artificial Sequence: Synthetic oligonucleotide
  Antisense strand to SEQ ID NO: 2564560
uauuugaccaacugacucc

SEQ ID NO: 2564562 - RNA, 19 nt, Artificial Sequence
  Description of Artificial Sequence: Synthetic oligonucleotide
  Sense strand starting at position 3674 of SEQ ID NO: 1888896
gagucaguuggucaaauau

SEQ ID NO: 2564563 - RNA, 19 nt, Artificial Sequence
  Description of Artificial Sequence: Synthetic oligonucleotide
  Antisense strand to SEQ ID NO: 2564562
auauuugaccaacugacuc

SEQ ID NO: 2564564 - RNA, 19 nt, Artificial Sequence
  Description of Artificial Sequence: Synthetic oligonucleotide
  Sense strand starting at position 3682 of SEQ ID NO: 1888896
uggucaaauaucugggaau

SEQ ID NO: 2564565 - RNA, 19 nt, Artificial Sequence
  Description of Artificial Sequence: Synthetic oligonucleotide
  Antisense strand to SEQ ID NO: 2564564
auucccagauauuugacca

SEQ ID NO: 2564566 - RNA, 19 nt, Artificial Sequence
  Description of Artificial Sequence: Synthetic oligonucleotide
  Sense strand starting at position 3684 of SEQ ID NO: 1888896
gucaaauaucugggaauau

SEQ ID NO: 2564567 - RNA, 19 nt, Artificial Sequence
  Description of Artificial Sequence: Synthetic oligonucleotide
  Antisense strand to SEQ ID NO: 2564566
auauucccagauauuugac

SEQ ID NO: 2564568 - RNA, 19 nt, Artificial Sequence
  Description of Artificial Sequence: Synthetic oligonucleotide
  Sense strand starting at position 3887 of SEQ ID NO: 1888896
acauuaggucucuagucua

SEQ ID NO: 2564569 - RNA, 19 nt, Artificial Sequence
  Description of Artificial Sequence: Synthetic oligonucleotide
  Antisense strand to SEQ ID NO: 2564568
uagacuagagaccuaaugu

SEQ ID NO: 2564570 - RNA, 19 nt, Artificial Sequence
  Description of Artificial Sequence: Synthetic oligonucleotide
  Sense strand starting at position 3959 of SEQ ID NO: 1888896
auguauuugugucuucuua

SEQ ID NO: 2564571 - RNA, 19 nt, Artificial Sequence
  Description of Artificial Sequence: Synthetic oligonucleotide
  Antisense strand to SEQ ID NO: 2564570
uaagaagacacaaauacau

SEQ ID NO: 2564572 - RNA, 19 nt, Artificial Sequence
  Description of Artificial Sequence: Synthetic oligonucleotide
  Sense strand starting at position 3961 of SEQ ID NO: 1888896
guauuugugucuucuuaag

SEQ ID NO: 2564573 - RNA, 19 nt, Artificial Sequence
  Description of Artificial Sequence: Synthetic oligonucleotide
  Antisense strand to SEQ ID NO: 2564572
cuuaagaagacacaaauac

SEQ ID NO: 2564574 - RNA, 19 nt, Artificial Sequence
  Description of Artificial Sequence: Synthetic oligonucleotide
  Sense strand starting at position 3963 of SEQ ID NO: 1888896
auuugugucuucuuaagca

SEQ ID NO: 2564575 - RNA, 19 nt, Artificial Sequence
  Description of Artificial Sequence: Synthetic oligonucleotide
  Antisense strand to SEQ ID NO: 2564574
ugcuuaagaagacacaaau

SEQ ID NO: 2564576 - RNA, 19 nt, Artificial Sequence
  Description of Artificial Sequence: Synthetic oligonucleotide
  Sense strand starting at position 79 of SEQ ID NO: 1888897
uguugcaagcuugaaagau

SEQ ID NO: 2564577 - RNA, 19 nt, Artificial Sequence
  Description of Artificial Sequence: Synthetic oligonucleotide
  Antisense strand to SEQ ID NO: 2564576
aucuuucaagcuugcaaca

SEQ ID NO: 2564578 - RNA, 19 nt, Artificial Sequence
  Description of Artificial Sequence: Synthetic oligonucleotide
  Sense strand starting at position 121 of SEQ ID NO: 1888897
agacuuuguggugagcaaa

SEQ ID NO: 2564579 - RNA, 19 nt, Artificial Sequence
  Description of Artificial Sequence: Synthetic oligonucleotide
  Antisense strand to SEQ ID NO: 2564578
uuugcucaccacaaagucu

SEQ ID NO: 2564580 - RNA, 19 nt, Artificial Sequence
  Description of Artificial Sequence: Synthetic oligonucleotide
  Sense strand starting at position 124 of SEQ ID NO: 1888897
cuuuguggugagcaaauau

SEQ ID NO: 2564581 - RNA, 19 nt, Artificial Sequence
  Description of Artificial Sequence: Synthetic oligonucleotide
  Antisense strand to SEQ ID NO: 2564580
auauuugcucaccacaaag

SEQ ID NO: 2564582 - RNA, 19 nt, Artificial Sequence
  Description of Artificial Sequence: Synthetic oligonucleotide
  Sense strand starting at position 166 of SEQ ID NO: 1888897
gggaauugccuuugccaga

SEQ ID NO: 2564583 - RNA, 19 nt, Artificial Sequence
  Description of Artificial Sequence: Synthetic oligonucleotide
  Antisense strand to SEQ ID NO: 2564582
ucuggcaaaggcaauuccc

SEQ ID NO: 2564584 - RNA, 19 nt, Artificial Sequence
  Description of Artificial Sequence: Synthetic oligonucleotide
  Sense strand starting at position 487 of SEQ ID NO: 1888897
uggcuuauggcacauaaau

SEQ ID NO: 2564585 - RNA, 19 nt, Artificial Sequence
  Description of Artificial Sequence: Synthetic oligonucleotide
  Antisense strand to SEQ ID NO: 2564584
auuuaugugccauaagcca

SEQ ID NO: 2564586 - RNA, 19 nt, Artificial Sequence
  Description of Artificial Sequence: Synthetic oligonucleotide
  Sense strand starting at position 496 of SEQ ID NO: 1888897
gcacauaaaugucccgaau

SEQ ID NO: 2564587 - RNA, 19 nt, Artificial Sequence
  Description of Artificial Sequence: Synthetic oligonucleotide
  Antisense strand to SEQ ID NO: 2564586
auucgggacauuuaugugc

SEQ ID NO: 2564588 - RNA, 19 nt, Artificial Sequence
  Description of Artificial Sequence: Synthetic oligonucleotide
  Sense strand starting at position 499 of SEQ ID NO: 1888897
cauaaaugucccgaauugu

SEQ ID NO: 2564589 - RNA, 19 nt, Artificial Sequence
  Description of Artificial Sequence: Synthetic oligonucleotide
  Antisense strand to SEQ ID NO: 2564588
acaauucgggacauuuaug

SEQ ID NO: 2564590 - RNA, 19 nt, Artificial Sequence
  Description of Artificial Sequence: Synthetic oligonucleotide
  Sense strand starting at position 554 of SEQ ID NO: 1888897
agggcucuuacauauguga

SEQ ID NO: 2564591 - RNA, 19 nt, Artificial Sequence
  Description of Artificial Sequence: Synthetic oligonucleotide
  Antisense strand to SEQ ID NO: 2564590
ucacauauguaagagcccu

SEQ ID NO: 2564592 - RNA, 19 nt, Artificial Sequence
  Description of Artificial Sequence: Synthetic oligonucleotide
  Sense strand starting at position 557 of SEQ ID NO: 1888897
gcucuuacauaugugaaag

SEQ ID NO: 2564593 - RNA, 19 nt, Artificial Sequence
  Description of Artificial Sequence: Synthetic oligonucleotide
  Antisense strand to SEQ ID NO: 2564592
cuuucacauauguaagagc

SEQ ID NO: 2564594 - RNA, 19 nt, Artificial Sequence
  Description of Artificial Sequence: Synthetic oligonucleotide
  Sense strand starting at position 696 of SEQ ID NO: 1888897
ugagcauaucgaggcuaau

SEQ ID NO: 2564595 - RNA, 19 nt, Artificial Sequence
  Description of Artificial Sequence: Synthetic oligonucleotide
  Antisense strand to SEQ ID NO: 2564594
auuagccucgauaugcuca

SEQ ID NO: 2564596 - RNA, 19 nt, Artificial Sequence
  Description of Artificial Sequence: Synthetic oligonucleotide
  Sense strand starting at position 699 of SEQ ID NO: 1888897
gcauaucgaggcuaaugua

SEQ ID NO: 2564597 - RNA, 19 nt, Artificial Sequence
  Description of Artificial Sequence: Synthetic oligonucleotide
  Antisense strand to SEQ ID NO: 2564596
uacauuagccucgauaugc

SEQ ID NO: 2564598 - RNA, 19 nt, Artificial Sequence
  Description of Artificial Sequence: Synthetic oligonucleotide
  Sense strand starting at position 723 of SEQ ID NO: 1888897
guccauaagcuauagacgu

SEQ ID NO: 2564599 - RNA, 19 nt, Artificial Sequence
  Description of Artificial Sequence: Synthetic oligonucleotide
  Antisense strand to SEQ ID NO: 2564598
acgucuauagcuuauggac

SEQ ID NO: 2564600 - RNA, 19 nt, Artificial Sequence
  Description of Artificial Sequence: Synthetic oligonucleotide
  Sense strand starting at position 729 of SEQ ID NO: 1888897
aagcuauagacgugggauu

SEQ ID NO: 2564601 - RNA, 19 nt, Artificial Sequence
  Description of Artificial Sequence: Synthetic oligonucleotide
  Antisense strand to SEQ ID NO: 2564600
aaucccacgucuauagcuu

SEQ ID NO: 2564602 - RNA, 19 nt, Artificial Sequence
  Description of Artificial Sequence: Synthetic oligonucleotide
  Sense strand starting at position 746 of SEQ ID NO: 1888897
uuugaauccagguauacgu

SEQ ID NO: 2564603 - RNA, 19 nt, Artificial Sequence
  Description of Artificial Sequence: Synthetic oligonucleotide
  Antisense strand to SEQ ID NO: 2564602
acguauaccuggauucaaa

SEQ ID NO: 2564604 - RNA, 19 nt, Artificial Sequence
  Description of Artificial Sequence: Synthetic oligonucleotide
  Sense strand starting at position 810 of SEQ ID NO: 1888897
cugaaagaguguccauuga

SEQ ID NO: 2564605 - RNA, 19 nt, Artificial Sequence
  Description of Artificial Sequence: Synthetic oligonucleotide
  Antisense strand to SEQ ID NO: 2564604
ucaauggacacucuuucag

SEQ ID NO: 2564606 - RNA, 19 nt, Artificial Sequence
  Description of Artificial Sequence: Synthetic oligonucleotide
  Sense strand starting at position 814 of SEQ ID NO: 1888897
aagaguguccauugaaguc

SEQ ID NO: 2564607 - RNA, 19 nt, Artificial Sequence
  Description of Artificial Sequence: Synthetic oligonucleotide
  Antisense strand to SEQ ID NO: 2564606
gacuucaauggacacucuu

SEQ ID NO: 2564608 - RNA, 19 nt, Artificial Sequence
  Description of Artificial Sequence: Synthetic oligonucleotide
  Sense strand starting at position 836 of SEQ ID NO: 1888897
uuuguugaacuaugcuaga

SEQ ID NO: 2564609 - RNA, 19 nt, Artificial Sequence
  Description of Artificial Sequence: Synthetic oligonucleotide
  Antisense strand to SEQ ID NO: 2564608
ucuagcauaguucaacaaa

SEQ ID NO: 2564610 - RNA, 19 nt, Artificial Sequence
  Description of Artificial Sequence: Synthetic oligonucleotide
  Sense strand starting at position 852 of SEQ ID NO: 1888897
agaguugcuccagguaaag

SEQ ID NO: 2564611 - RNA, 19 nt, Artificial Sequence
  Description of Artificial Sequence: Synthetic oligonucleotide
  Antisense strand to SEQ ID NO: 2564610
cuuuaccuggagcaacucu

SEQ ID NO: 2564612 - RNA, 19 nt, Artificial Sequence
  Description of Artificial Sequence: Synthetic oligonucleotide
  Sense strand starting at position 854 of SEQ ID NO: 1888897
aguugcuccagguaaagaa

SEQ ID NO: 2564613 - RNA, 19 nt, Artificial Sequence
  Description of Artificial Sequence: Synthetic oligonucleotide
  Antisense strand to SEQ ID NO: 2564612
uucuuuaccuggagcaacu

SEQ ID NO: 2564614 - RNA, 19 nt, Artificial Sequence
  Description of Artificial Sequence: Synthetic oligonucleotide
  Sense strand starting at position 923 of SEQ ID NO: 1888897
guaugcugccaccauaaua

SEQ ID NO: 2564615 - RNA, 19 nt, Artificial Sequence
  Description of Artificial Sequence: Synthetic oligonucleotide
  Antisense strand to SEQ ID NO: 2564614
uauuaugguggcagcauac

SEQ ID NO: 2564616 - RNA, 19 nt, Artificial Sequence
  Description of Artificial Sequence: Synthetic oligonucleotide
  Sense strand starting at position 969 of SEQ ID NO: 1888897
guguuaguucauuagaagg

SEQ ID NO: 2564617 - RNA, 19 nt, Artificial Sequence
  Description of Artificial Sequence: Synthetic oligonucleotide
  Antisense strand to SEQ ID NO: 2564616
ccuucuaaugaacuaacac

SEQ ID NO: 2564618 - RNA, 19 nt, Artificial Sequence
  Description of Artificial Sequence: Synthetic oligonucleotide
  Sense strand starting at position 1060 of SEQ ID NO: 1888897
gguguuuaggagcaaugua

SEQ ID NO: 2564619 - RNA, 19 nt, Artificial Sequence
  Description of Artificial Sequence: Synthetic oligonucleotide
  Antisense strand to SEQ ID NO: 2564618
uacauugcuccuaaacacc

SEQ ID NO: 2564620 - RNA, 19 nt, Artificial Sequence
  Description of Artificial Sequence: Synthetic oligonucleotide
  Sense strand starting at position 1103 of SEQ ID NO: 1888897
gugggaucuuaagucauga

SEQ ID NO: 2564621 - RNA, 19 nt, Artificial Sequence
  Description of Artificial Sequence: Synthetic oligonucleotide
  Antisense strand to SEQ ID NO: 2564620
ucaugacuuaagaucccac

SEQ ID NO: 2564622 - RNA, 19 nt, Artificial Sequence
  Description of Artificial Sequence: Synthetic oligonucleotide
  Sense strand starting at position 1173 of SEQ ID NO: 1888897
aagaccaauguuggugaaa

SEQ ID NO: 2564623 - RNA, 19 nt, Artificial Sequence
  Description of Artificial Sequence: Synthetic oligonucleotide
  Antisense strand to SEQ ID NO: 2564622
uuucaccaacauuggucuu

SEQ ID NO: 2564624 - RNA, 19 nt, Artificial Sequence
  Description of Artificial Sequence: Synthetic oligonucleotide
  Sense strand starting at position 1174 of SEQ ID NO: 1888897
agaccaauguuggugaaag

SEQ ID NO: 2564625 - RNA, 19 nt, Artificial Sequence
  Description of Artificial Sequence: Synthetic oligonucleotide
  Antisense strand to SEQ ID NO: 2564624
cuuucaccaacauuggucu

SEQ ID NO: 2564626 - RNA, 19 nt, Artificial Sequence
  Description of Artificial Sequence: Synthetic oligonucleotide
  Sense strand starting at position 1182 of SEQ ID NO: 1888897
guuggugaaagcugaaaua

SEQ ID NO: 2564627 - RNA, 19 nt, Artificial Sequence
  Description of Artificial Sequence: Synthetic oligonucleotide
  Antisense strand to SEQ ID NO: 2564626
uauuucagcuuucaccaac

SEQ ID NO: 2564628 - RNA, 19 nt, Artificial Sequence
  Description of Artificial Sequence: Synthetic oligonucleotide
  Sense strand starting at position 1210 of SEQ ID NO: 1888897
uggaauuccucuccuaaag

SEQ ID NO: 2564629 - RNA, 19 nt, Artificial Sequence
  Description of Artificial Sequence: Synthetic oligonucleotide
  Antisense strand to SEQ ID NO: 2564628
cuuuaggagaggaauucca

SEQ ID NO: 2564630 - RNA, 19 nt, Artificial Sequence
  Description of Artificial Sequence: Synthetic oligonucleotide
  Sense strand starting at position 1385 of SEQ ID NO: 1888897
gggaaagccuuccuugaag

SEQ ID NO: 2564631 - RNA, 19 nt, Artificial Sequence
  Description of Artificial Sequence: Synthetic oligonucleotide
  Antisense strand to SEQ ID NO: 2564630
cuucaaggaaggcuuuccc

SEQ ID NO: 2564632 - RNA, 19 nt, Artificial Sequence
  Description of Artificial Sequence: Synthetic oligonucleotide
  Sense strand starting at position 1387 of SEQ ID NO: 1888897
gaaagccuuccuugaagag

SEQ ID NO: 2564633 - RNA, 19 nt, Artificial Sequence
  Description of Artificial Sequence: Synthetic oligonucleotide
  Antisense strand to SEQ ID NO: 2564632
cucuucaaggaaggcuuuc

SEQ ID NO: 2564634 - RNA, 19 nt, Artificial Sequence
  Description of Artificial Sequence: Synthetic oligonucleotide
  Sense strand starting at position 1402 of SEQ ID NO: 1888897
agaggugacuugagaugga

SEQ ID NO: 2564635 - RNA, 19 nt, Artificial Sequence
  Description of Artificial Sequence: Synthetic oligonucleotide
  Antisense strand to SEQ ID NO: 2564634
uccaucucaagucaccucu

SEQ ID NO: 2564636 - RNA, 19 nt, Artificial Sequence
  Description of Artificial Sequence: Synthetic oligonucleotide
  Sense strand starting at position 1405 of SEQ ID NO: 1888897
ggugacuugagauggauau

SEQ ID NO: 2564637 - RNA, 19 nt, Artificial Sequence
  Description of Artificial Sequence: Synthetic oligonucleotide
  Antisense strand to SEQ ID NO: 2564636
auauccaucucaagucacc

SEQ ID NO: 2564638 - RNA, 19 nt, Artificial Sequence
  Description of Artificial Sequence: Synthetic oligonucleotide
  Sense strand starting at position 1406 of SEQ ID NO: 1888897
gugacuugagauggauauu

SEQ ID NO: 2564639 - RNA, 19 nt, Artificial Sequence
  Description of Artificial Sequence: Synthetic oligonucleotide
  Antisense strand to SEQ ID NO: 2564638
aauauccaucucaagucac

SEQ ID NO: 2564640 - RNA, 19 nt, Artificial Sequence
  Description of Artificial Sequence: Synthetic oligonucleotide
  Sense strand starting at position 1447 of SEQ ID NO: 1888897
ggaaauaaaugggaaauca

SEQ ID NO: 2564641 - RNA, 19 nt, Artificial Sequence
  Description of Artificial Sequence: Synthetic oligonucleotide
  Antisense strand to SEQ ID NO: 2564640
ugauuucccauuuauuucc

SEQ ID NO: 2564642 - RNA, 19 nt, Artificial Sequence
  Description of Artificial Sequence: Synthetic oligonucleotide
  Sense strand starting at position 1473 of SEQ ID NO: 1888897
gggaaugguauaugugaag

SEQ ID NO: 2564643 - RNA, 19 nt, Artificial Sequence
  Description of Artificial Sequence: Synthetic oligonucleotide
  Antisense strand to SEQ ID NO: 2564642
cuucacauauaccauuccc

SEQ ID NO: 2564644 - RNA, 19 nt, Artificial Sequence
  Description of Artificial Sequence: Synthetic oligonucleotide
  Sense strand starting at position 1503 of SEQ ID NO: 1888897
uguguuugagauuaguuug

SEQ ID NO: 2564645 - RNA, 19 nt, Artificial Sequence
  Description of Artificial Sequence: Synthetic oligonucleotide
  Antisense strand to SEQ ID NO: 2564644
caaacuaaucucaaacaca

SEQ ID NO: 2564646 - RNA, 19 nt, Artificial Sequence
  Description of Artificial Sequence: Synthetic oligonucleotide
  Sense strand starting at position 1506 of SEQ ID NO: 1888897
guuugagauuaguuuggca

SEQ ID NO: 2564647 - RNA, 19 nt, Artificial Sequence
  Description of Artificial Sequence: Synthetic oligonucleotide
  Antisense strand to SEQ ID NO: 2564646
ugccaaacuaaucucaaac

SEQ ID NO: 2564648 - RNA, 19 nt, Artificial Sequence
  Description of Artificial Sequence: Synthetic oligonucleotide
  Sense strand starting at position 1508 of SEQ ID NO: 1888897
uugagauuaguuuggcaua

SEQ ID NO: 2564649 - RNA, 19 nt, Artificial Sequence
  Description of Artificial Sequence: Synthetic oligonucleotide
  Antisense strand to SEQ ID NO: 2564648
uaugccaaacuaaucucaa

SEQ ID NO: 2564650 - RNA, 19 nt, Artificial Sequence
  Description of Artificial Sequence: Synthetic oligonucleotide
  Sense strand starting at position 1510 of SEQ ID NO: 1888897
gagauuaguuuggcauauu

SEQ ID NO: 2564651 - RNA, 19 nt, Artificial Sequence
  Description of Artificial Sequence: Synthetic oligonucleotide
  Antisense strand to SEQ ID NO: 2564650
aauaugccaaacuaaucuc

SEQ ID NO: 2564652 - RNA, 19 nt, Artificial Sequence
  Description of Artificial Sequence: Synthetic oligonucleotide
  Sense strand starting at position 2617 of SEQ ID NO: 1888897
cccuuauuuccgugaccca

SEQ ID NO: 2564653 - RNA, 19 nt, Artificial Sequence
  Description of Artificial Sequence: Synthetic oligonucleotide
  Antisense strand to SEQ ID NO: 2564652
ugggucacggaaauaaggg

SEQ ID NO: 2564654 - RNA, 19 nt, Artificial Sequence
  Description of Artificial Sequence: Synthetic oligonucleotide
  Sense strand starting at position 3816 of SEQ ID NO: 1888897
uggaaauuggacuguucag

SEQ ID NO: 2564655 - RNA, 19 nt, Artificial Sequence
  Description of Artificial Sequence: Synthetic oligonucleotide
  Antisense strand to SEQ ID NO: 2564654
cugaacaguccaauuucca

SEQ ID NO: 2564656 - RNA, 19 nt, Artificial Sequence
  Description of Artificial Sequence: Synthetic oligonucleotide
  Sense strand starting at position 1460 of SEQ ID NO: 1888898
uccagaugucucugcccuu

SEQ ID NO: 2564657 - RNA, 19 nt, Artificial Sequence
  Description of Artificial Sequence: Synthetic oligonucleotide
  Antisense strand to SEQ ID NO: 2564656
aagggcagagacaucugga

SEQ ID NO: 2564658 - RNA, 19 nt, Artificial Sequence
  Description of Artificial Sequence: Synthetic oligonucleotide
  Sense strand starting at position 1461 of SEQ ID NO: 1888898
ccagaugucucugcccuua

SEQ ID NO: 2564659 - RNA, 19 nt, Artificial Sequence
  Description of Artificial Sequence: Synthetic oligonucleotide
  Antisense strand to SEQ ID NO: 2564658
uaagggcagagacaucugg

SEQ ID NO: 2564660 - RNA, 19 nt, Artificial Sequence
  Description of Artificial Sequence: Synthetic oligonucleotide
  Sense strand starting at position 1680 of SEQ ID NO: 1888898
gccgguccuugcuuuaagu

SEQ ID NO: 2564661 - RNA, 19 nt, Artificial Sequence
  Description of Artificial Sequence: Synthetic oligonucleotide
  Antisense strand to SEQ ID NO: 2564660
acuuaaagcaaggaccggc

SEQ ID NO: 2564662 - RNA, 19 nt, Artificial Sequence
  Description of Artificial Sequence: Synthetic oligonucleotide
  Sense strand starting at position 1682 of SEQ ID NO: 1888898
cgguccuugcuuuaaguga

SEQ ID NO: 2564663 - RNA, 19 nt, Artificial Sequence
  Description of Artificial Sequence: Synthetic oligonucleotide
  Antisense strand to SEQ ID NO: 2564662
ucacuuaaagcaaggaccg

SEQ ID NO: 2564664 - RNA, 19 nt, Artificial Sequence
  Description of Artificial Sequence: Synthetic oligonucleotide
  Sense strand starting at position 174 of SEQ ID NO: 1888899
guaguacucaaagggaauu

SEQ ID NO: 2564665 - RNA, 19 nt, Artificial Sequence
  Description of Artificial Sequence: Synthetic oligonucleotide
  Antisense strand to SEQ ID NO: 2564664
aauucccuuugaguacuac

SEQ ID NO: 2564666 - RNA, 19 nt, Artificial Sequence
  Description of Artificial Sequence: Synthetic oligonucleotide
  Sense strand starting at position 418 of SEQ ID NO: 1888899
cucucaacagaucgacuaa

SEQ ID NO: 2564667 - RNA, 19 nt, Artificial Sequence
  Description of Artificial Sequence: Synthetic oligonucleotide
  Antisense strand to SEQ ID NO: 2564666
uuagucgaucuguugagag

SEQ ID NO: 2564668 - RNA, 19 nt, Artificial Sequence
  Description of Artificial Sequence: Synthetic oligonucleotide
  Sense strand starting at position 485 of SEQ ID NO: 1888899
gugauaucucuauagacuc

SEQ ID NO: 2564669 - RNA, 19 nt, Artificial Sequence
  Description of Artificial Sequence: Synthetic oligonucleotide
  Antisense strand to SEQ ID NO: 2564668
gagucuauagagauaucac

SEQ ID NO: 2564670 - RNA, 19 nt, Artificial Sequence
  Description of Artificial Sequence: Synthetic oligonucleotide
  Sense strand starting at position 508 of SEQ ID NO: 1888899
gaaauuacauggguauuau

SEQ ID NO: 2564671 - RNA, 19 nt, Artificial Sequence
  Description of Artificial Sequence: Synthetic oligonucleotide
  Antisense strand to SEQ ID NO: 2564670
auaauacccauguaauuuc

SEQ ID NO: 2564672 - RNA, 19 nt, Artificial Sequence
  Description of Artificial Sequence: Synthetic oligonucleotide
  Sense strand starting at position 771 of SEQ ID NO: 1888899
cccagauucgaaugcauag

SEQ ID NO: 2564673 - RNA, 19 nt, Artificial Sequence
  Description of Artificial Sequence: Synthetic oligonucleotide
  Antisense strand to SEQ ID NO: 2564672
cuaugcauucgaaucuggg

SEQ ID NO: 2564674 - RNA, 19 nt, Artificial Sequence
  Description of Artificial Sequence: Synthetic oligonucleotide
  Sense strand starting at position 872 of SEQ ID NO: 1888899
gauagcaucccaggauaca

SEQ ID NO: 2564675 - RNA, 19 nt, Artificial Sequence
  Description of Artificial Sequence: Synthetic oligonucleotide
  Antisense strand to SEQ ID NO: 2564674
uguauccugggaugcuauc

SEQ ID NO: 2564676 - RNA, 19 nt, Artificial Sequence
  Description of Artificial Sequence: Synthetic oligonucleotide
  Sense strand starting at position 936 of SEQ ID NO: 1888899
ucuccuacagauuagucau

SEQ ID NO: 2564677 - RNA, 19 nt, Artificial Sequence
  Description of Artificial Sequence: Synthetic oligonucleotide
  Antisense strand to SEQ ID NO: 2564676
augacuaaucuguaggaga

SEQ ID NO: 2564678 - RNA, 19 nt, Artificial Sequence
  Description of Artificial Sequence: Synthetic oligonucleotide
  Sense strand starting at position 1175 of SEQ ID NO: 1888899
ggcccugcucucgauauuu

SEQ ID NO: 2564679 - RNA, 19 nt, Artificial Sequence
  Description of Artificial Sequence: Synthetic oligonucleotide
  Antisense strand to SEQ ID NO: 2564678
aaauaucgagagcagggcc

SEQ ID NO: 2564680 - RNA, 19 nt, Artificial Sequence
  Description of Artificial Sequence: Synthetic oligonucleotide
  Sense strand starting at position 1209 of SEQ ID NO: 1888899
uugacagaauucccuggau

SEQ ID NO: 2564681 - RNA, 19 nt, Artificial Sequence
  Description of Artificial Sequence: Synthetic oligonucleotide
  Antisense strand to SEQ ID NO: 2564680
auccagggaauucugucaa

SEQ ID NO: 2564682 - RNA, 19 nt, Artificial Sequence
  Description of Artificial Sequence: Synthetic oligonucleotide
  Sense strand starting at position 1263 of SEQ ID NO: 1888899
cugaaauauuuguagggac

SEQ ID NO: 2564683 - RNA, 19 nt, Artificial Sequence
  Description of Artificial Sequence: Synthetic oligonucleotide
  Antisense strand to SEQ ID NO: 2564682
gucccuacaaauauuucag

SEQ ID NO: 2564684 - RNA, 19 nt, Artificial Sequence
  Description of Artificial Sequence: Synthetic oligonucleotide
  Sense strand starting at position 1330 of SEQ ID NO: 1888899
ugauucuugccucaaagug

SEQ ID NO: 2564685 - RNA, 19 nt, Artificial Sequence
  Description of Artificial Sequence: Synthetic oligonucleotide
  Antisense strand to SEQ ID NO: 2564684
cacuuugaggcaagaauca

SEQ ID NO: 2564686 - RNA, 19 nt, Artificial Sequence
  Description of Artificial Sequence: Synthetic oligonucleotide
  Sense strand starting at position 1337 of SEQ ID NO: 1888899
ugccucaaaguguaauaga

SEQ ID NO: 2564687 - RNA, 19 nt, Artificial Sequence
  Description of Artificial Sequence: Synthetic oligonucleotide
  Antisense strand to SEQ ID NO: 2564686
ucuauuacacuuugaggca

SEQ ID NO: 2564688 - RNA, 19 nt, Artificial Sequence
  Description of Artificial Sequence: Synthetic oligonucleotide
  Sense strand starting at position 1380 of SEQ ID NO: 1888899
uuaguucuucucuggaaua

SEQ ID NO: 2564689 - RNA, 19 nt, Artificial Sequence
  Description of Artificial Sequence: Synthetic oligonucleotide
  Antisense strand to SEQ ID NO: 2564688
uauuccagagaagaacuaa

SEQ ID NO: 2564690 - RNA, 19 nt, Artificial Sequence
  Description of Artificial Sequence: Synthetic oligonucleotide
  Sense strand starting at position 1382 of SEQ ID NO: 1888899
aguucuucucuggaauacu

SEQ ID NO: 2564691 - RNA, 19 nt, Artificial Sequence
  Description of Artificial Sequence: Synthetic oligonucleotide
  Antisense strand to SEQ ID NO: 2564690
aguauuccagagaagaacu

SEQ ID NO: 2564692 - RNA, 19 nt, Artificial Sequence
  Description of Artificial Sequence: Synthetic oligonucleotide
  Sense strand starting at position 1415 of SEQ ID NO: 1888899
uucuucugacuuugagaca

SEQ ID NO: 2564693 - RNA, 19 nt, Artificial Sequence
  Description of Artificial Sequence: Synthetic oligonucleotide
  Antisense strand to SEQ ID NO: 2564692
ugucucaaagucagaagaa

SEQ ID NO: 2564694 - RNA, 19 nt, Artificial Sequence
  Description of Artificial Sequence: Synthetic oligonucleotide
  Sense strand starting at position 1534 of SEQ ID NO: 1888899
ucucucuaccucuagguau

SEQ ID NO: 2564695 - RNA, 19 nt, Artificial Sequence
  Description of Artificial Sequence: Synthetic oligonucleotide
  Antisense strand to SEQ ID NO: 2564694
auaccuagagguagagaga

SEQ ID NO: 2564696 - RNA, 19 nt, Artificial Sequence
  Description of Artificial Sequence: Synthetic oligonucleotide
  Sense strand starting at position 1627 of SEQ ID NO: 1888899
ggcacaauucuggaggcau

SEQ ID NO: 2564697 - RNA, 19 nt, Artificial Sequence
  Description of Artificial Sequence: Synthetic oligonucleotide
  Antisense strand to SEQ ID NO: 2564696
augccuccagaauugugcc

SEQ ID NO: 2564698 - RNA, 19 nt, Artificial Sequence
  Description of Artificial Sequence: Synthetic oligonucleotide
  Sense strand starting at position 1656 of SEQ ID NO: 1888899
gccaguguuguugcuaaua

SEQ ID NO: 2564699 - RNA, 19 nt, Artificial Sequence
  Description of Artificial Sequence: Synthetic oligonucleotide
  Antisense strand to SEQ ID NO: 2564698
uauuagcaacaacacuggc

SEQ ID NO: 2564700 - RNA, 19 nt, Artificial Sequence
  Description of Artificial Sequence: Synthetic oligonucleotide
  Sense strand starting at position 1675 of SEQ ID NO: 1888899
ugguuuaaugcagaucuac

SEQ ID NO: 2564701 - RNA, 19 nt, Artificial Sequence
  Description of Artificial Sequence: Synthetic oligonucleotide
  Antisense strand to SEQ ID NO: 2564700
guagaucugcauuaaacca

SEQ ID NO: 2564702 - RNA, 19 nt, Artificial Sequence
  Description of Artificial Sequence: Synthetic oligonucleotide
  Sense strand starting at position 1694 of SEQ ID NO: 1888899
uggcccugagcuuaaagau

SEQ ID NO: 2564703 - RNA, 19 nt, Artificial Sequence
  Description of Artificial Sequence: Synthetic oligonucleotide
  Antisense strand to SEQ ID NO: 2564702
aucuuuaagcucagggcca

SEQ ID NO: 2564704 - RNA, 19 nt, Artificial Sequence
  Description of Artificial Sequence: Synthetic oligonucleotide
  Sense strand starting at position 2049 of SEQ ID NO: 1888899
aaggcuugacauugauuga

SEQ ID NO: 2564705 - RNA, 19 nt, Artificial Sequence
  Description of Artificial Sequence: Synthetic oligonucleotide
  Antisense strand to SEQ ID NO: 2564704
ucaaucaaugucaagccuu

SEQ ID NO: 2564706 - RNA, 19 nt, Artificial Sequence
  Description of Artificial Sequence: Synthetic oligonucleotide
  Sense strand starting at position 2124 of SEQ ID NO: 1888899
ugaugaacugguugugauu

SEQ ID NO: 2564707 - RNA, 19 nt, Artificial Sequence
  Description of Artificial Sequence: Synthetic oligonucleotide
  Antisense strand to SEQ ID NO: 2564706
aaucacaaccaguucauca

SEQ ID NO: 2564708 - RNA, 19 nt, Artificial Sequence
  Description of Artificial Sequence: Synthetic oligonucleotide
  Sense strand starting at position 2130 of SEQ ID NO: 1888899
acugguugugauuacaagu

SEQ ID NO: 2564709 - RNA, 19 nt, Artificial Sequence
  Description of Artificial Sequence: Synthetic oligonucleotide
  Antisense strand to SEQ ID NO: 2564708
acuuguaaucacaaccagu

SEQ ID NO: 2564710 - RNA, 19 nt, Artificial Sequence
  Description of Artificial Sequence: Synthetic oligonucleotide
  Sense strand starting at position 2141 of SEQ ID NO: 1888899
uuacaaguagccuaaauga

SEQ ID NO: 2564711 - RNA, 19 nt, Artificial Sequence
  Description of Artificial Sequence: Synthetic oligonucleotide
  Antisense strand to SEQ ID NO: 2564710
ucauuuaggcuacuuguaa

SEQ ID NO: 2564712 - RNA, 19 nt, Artificial Sequence
  Description of Artificial Sequence: Synthetic oligonucleotide
  Sense strand starting at position 2385 of SEQ ID NO: 1888899
ggaauucuauggcuggaag

SEQ ID NO: 2564713 - RNA, 19 nt, Artificial Sequence
  Description of Artificial Sequence: Synthetic oligonucleotide
  Antisense strand to SEQ ID NO: 2564712
cuuccagccauagaauucc

SEQ ID NO: 2564714 - RNA, 19 nt, Artificial Sequence
  Description of Artificial Sequence: Synthetic oligonucleotide
  Sense strand starting at position 2386 of SEQ ID NO: 1888899
gaauucuauggcuggaaga

SEQ ID NO: 2564715 - RNA, 19 nt, Artificial Sequence
  Description of Artificial Sequence: Synthetic oligonucleotide
  Antisense strand to SEQ ID NO: 2564714
ucuuccagccauagaauuc

SEQ ID NO: 2564716 - RNA, 19 nt, Artificial Sequence
  Description of Artificial Sequence: Synthetic oligonucleotide
  Sense strand starting at position 2849 of SEQ ID NO: 1888899
uaccuaugagugcauggaa

SEQ ID NO: 2564717 - RNA, 19 nt, Artificial Sequence
  Description of Artificial Sequence: Synthetic oligonucleotide
  Antisense strand to SEQ ID NO: 2564716
uuccaugcacucauaggua

SEQ ID NO: 2564718 - RNA, 19 nt, Artificial Sequence
  Description of Artificial Sequence: Synthetic oligonucleotide
  Sense strand starting at position 2872 of SEQ ID NO: 1888899
cuuccauuucucuguugau

SEQ ID NO: 2564719 - RNA, 19 nt, Artificial Sequence
  Description of Artificial Sequence: Synthetic oligonucleotide
  Antisense strand to SEQ ID NO: 2564718
aucaacagagaaauggaag

SEQ ID NO: 2564720 - RNA, 19 nt, Artificial Sequence
  Description of Artificial Sequence: Synthetic oligonucleotide
  Sense strand starting at position 2953 of SEQ ID NO: 1888899
uggaucuugagugguggaa

SEQ ID NO: 2564721 - RNA, 19 nt, Artificial Sequence
  Description of Artificial Sequence: Synthetic oligonucleotide
  Antisense strand to SEQ ID NO: 2564720
uuccaccacucaagaucca

SEQ ID NO: 2564722 - RNA, 19 nt, Artificial Sequence
  Description of Artificial Sequence: Synthetic oligonucleotide
  Sense strand starting at position 2998 of SEQ ID NO: 1888899
ugaauucuugccuaagcaa

SEQ ID NO: 2564723 - RNA, 19 nt, Artificial Sequence
  Description of Artificial Sequence: Synthetic oligonucleotide
  Antisense strand to SEQ ID NO: 2564722
uugcuuaggcaagaauuca

SEQ ID NO: 2564724 - RNA, 19 nt, Artificial Sequence
  Description of Artificial Sequence: Synthetic oligonucleotide
  Sense strand starting at position 3005 of SEQ ID NO: 1888899
uugccuaagcaagaauaua

SEQ ID NO: 2564725 - RNA, 19 nt, Artificial Sequence
  Description of Artificial Sequence: Synthetic oligonucleotide
  Antisense strand to SEQ ID NO: 2564724
uauauucuugcuuaggcaa

SEQ ID NO: 2564726 - RNA, 19 nt, Artificial Sequence
  Description of Artificial Sequence: Synthetic oligonucleotide
  Sense strand starting at position 3118 of SEQ ID NO: 1888899
uggcuuuaacuuuaugacu

SEQ ID NO: 2564727 - RNA, 19 nt, Artificial Sequence
  Description of Artificial Sequence: Synthetic oligonucleotide
  Antisense strand to SEQ ID NO: 2564726
agucauaaaguuaaagcca

SEQ ID NO: 2564728 - RNA, 19 nt, Artificial Sequence
  Description of Artificial Sequence: Synthetic oligonucleotide
  Sense strand starting at position 3234 of SEQ ID NO: 1888899
ugacuaugucauuaaugua

SEQ ID NO: 2564729 - RNA, 19 nt, Artificial Sequence
  Description of Artificial Sequence: Synthetic oligonucleotide
  Antisense strand to SEQ ID NO: 2564728
uacauuaaugacauaguca

SEQ ID NO: 2564730 - RNA, 19 nt, Artificial Sequence
  Description of Artificial Sequence: Synthetic oligonucleotide
  Sense strand starting at position 3241 of SEQ ID NO: 1888899
gucauuaauguagagugau

SEQ ID NO: 2564731 - RNA, 19 nt, Artificial Sequence
  Description of Artificial Sequence: Synthetic oligonucleotide
  Antisense strand to SEQ ID NO: 2564730
aucacucuacauuaaugac

SEQ ID NO: 2564732 - RNA, 19 nt, Artificial Sequence
  Description of Artificial Sequence: Synthetic oligonucleotide
  Sense strand starting at position 3597 of SEQ ID NO: 1888899
uuguuuagucuugaugaca

SEQ ID NO: 2564733 - RNA, 19 nt, Artificial Sequence
  Description of Artificial Sequence: Synthetic oligonucleotide
  Antisense strand to SEQ ID NO: 2564732
ugucaucaagacuaaacaa

SEQ ID NO: 2564734 - RNA, 19 nt, Artificial Sequence
  Description of Artificial Sequence: Synthetic oligonucleotide
  Sense strand starting at position 3600 of SEQ ID NO: 1888899
uuuagucuugaugacacua

SEQ ID NO: 2564735 - RNA, 19 nt, Artificial Sequence
  Description of Artificial Sequence: Synthetic oligonucleotide
  Antisense strand to SEQ ID NO: 2564734
uagugucaucaagacuaaa

SEQ ID NO: 2564736 - RNA, 19 nt, Artificial Sequence
  Description of Artificial Sequence: Synthetic oligonucleotide
  Sense strand starting at position 3610 of SEQ ID NO: 1888899
augacacuagcaggauuaa

SEQ ID NO: 2564737 - RNA, 19 nt, Artificial Sequence
  Description of Artificial Sequence: Synthetic oligonucleotide
  Antisense strand to SEQ ID NO: 2564736
uuaauccugcuagugucau

SEQ ID NO: 2564738 - RNA, 19 nt, Artificial Sequence
  Description of Artificial Sequence: Synthetic oligonucleotide
  Sense strand starting at position 3890 of SEQ ID NO: 1888899
cgcugugacucacuaauuu

SEQ ID NO: 2564739 - RNA, 19 nt, Artificial Sequence
  Description of Artificial Sequence: Synthetic oligonucleotide
  Antisense strand to SEQ ID NO: 2564738
aaauuagugagucacagcg

SEQ ID NO: 2564740 - RNA, 19 nt, Artificial Sequence
  Description of Artificial Sequence: Synthetic oligonucleotide
  Sense strand starting at position 3911 of SEQ ID NO: 1888899
cauggaauuugaugggaua

SEQ ID NO: 2564741 - RNA, 19 nt, Artificial Sequence
  Description of Artificial Sequence: Synthetic oligonucleotide
  Antisense strand to SEQ ID NO: 2564740
uaucccaucaaauuccaug

SEQ ID NO: 2564742 - RNA, 19 nt, Artificial Sequence
  Description of Artificial Sequence: Synthetic oligonucleotide
  Sense strand starting at position 3914 of SEQ ID NO: 1888899
ggaauuugaugggauacau

SEQ ID NO: 2564743 - RNA, 19 nt, Artificial Sequence
  Description of Artificial Sequence: Synthetic oligonucleotide
  Antisense strand to SEQ ID NO: 2564742
auguaucccaucaaauucc

SEQ ID NO: 2564744 - RNA, 19 nt, Artificial Sequence
  Description of Artificial Sequence: Synthetic oligonucleotide
  Sense strand starting at position 244 of SEQ ID NO: 1888900
gagguaggcacccaguaaa

SEQ ID NO: 2564745 - RNA, 19 nt, Artificial Sequence
  Description of Artificial Sequence: Synthetic oligonucleotide
  Antisense strand to SEQ ID NO: 2564744
uuuacugggugccuaccuc

SEQ ID NO: 2564746 - RNA, 19 nt, Artificial Sequence
  Description of Artificial Sequence: Synthetic oligonucleotide
  Sense strand starting at position 258 of SEQ ID NO: 1888900
guaaauaugcucugauuga

SEQ ID NO: 2564747 - RNA, 19 nt, Artificial Sequence
  Description of Artificial Sequence: Synthetic oligonucleotide
  Antisense strand to SEQ ID NO: 2564746
ucaaucagagcauauuuac

SEQ ID NO: 2564748 - RNA, 19 nt, Artificial Sequence
  Description of Artificial Sequence: Synthetic oligonucleotide
  Sense strand starting at position 262 of SEQ ID NO: 1888900
auaugcucugauugacaga

SEQ ID NO: 2564749 - RNA, 19 nt, Artificial Sequence
  Description of Artificial Sequence: Synthetic oligonucleotide
  Antisense strand to SEQ ID NO: 2564748
ucugucaaucagagcauau

SEQ ID NO: 2564750 - RNA, 19 nt, Artificial Sequence
  Description of Artificial Sequence: Synthetic oligonucleotide
  Sense strand starting at position 298 of SEQ ID NO: 1888900
gcuuaugcuccuuaaagag

SEQ ID NO: 2564751 - RNA, 19 nt, Artificial Sequence
  Description of Artificial Sequence: Synthetic oligonucleotide
  Antisense strand to SEQ ID NO: 2564750
cucuuuaaggagcauaagc

SEQ ID NO: 2564752 - RNA, 19 nt, Artificial Sequence
  Description of Artificial Sequence: Synthetic oligonucleotide
  Sense strand starting at position 355 of SEQ ID NO: 1888900
augauuguauguucuuaag

SEQ ID NO: 2564753 - RNA, 19 nt, Artificial Sequence
  Description of Artificial Sequence: Synthetic oligonucleotide
  Antisense strand to SEQ ID NO: 2564752
cuuaagaacauacaaucau

SEQ ID NO: 2564754 - RNA, 19 nt, Artificial Sequence
  Description of Artificial Sequence: Synthetic oligonucleotide
  Sense strand starting at position 403 of SEQ ID NO: 1888900
gaggaauggucuccuguau

SEQ ID NO: 2564755 - RNA, 19 nt, Artificial Sequence
  Description of Artificial Sequence: Synthetic oligonucleotide
  Antisense strand to SEQ ID NO: 2564754
auacaggagaccauuccuc

SEQ ID NO: 2564756 - RNA, 19 nt, Artificial Sequence
  Description of Artificial Sequence: Synthetic oligonucleotide
  Sense strand starting at position 425 of SEQ ID NO: 1888900
uguaaauggauauguguau

SEQ ID NO: 2564757 - RNA, 19 nt, Artificial Sequence
  Description of Artificial Sequence: Synthetic oligonucleotide
  Antisense strand to SEQ ID NO: 2564756
auacacauauccauuuaca

SEQ ID NO: 2564758 - RNA, 19 nt, Artificial Sequence
  Description of Artificial Sequence: Synthetic oligonucleotide
  Sense strand starting at position 426 of SEQ ID NO: 1888900
guaaauggauauguguaua

SEQ ID NO: 2564759 - RNA, 19 nt, Artificial Sequence
  Description of Artificial Sequence: Synthetic oligonucleotide
  Antisense strand to SEQ ID NO: 2564758
uauacacauauccauuuac

SEQ ID NO: 2564760 - RNA, 19 nt, Artificial Sequence
  Description of Artificial Sequence: Synthetic oligonucleotide
  Sense strand starting at position 816 of SEQ ID NO: 1888900
gaaaguaaugucuagucau

SEQ ID NO: 2564761 - RNA, 19 nt, Artificial Sequence
  Description of Artificial Sequence: Synthetic oligonucleotide
  Antisense strand to SEQ ID NO: 2564760
augacuagacauuacuuuc

SEQ ID NO: 2564762 - RNA, 19 nt, Artificial Sequence
  Description of Artificial Sequence: Synthetic oligonucleotide
  Sense strand starting at position 819 of SEQ ID NO: 1888900
aguaaugucuagucauaug

SEQ ID NO: 2564763 - RNA, 19 nt, Artificial Sequence
  Description of Artificial Sequence: Synthetic oligonucleotide
  Antisense strand to SEQ ID NO: 2564762
cauaugacuagacauuacu

SEQ ID NO: 2564764 - RNA, 19 nt, Artificial Sequence
  Description of Artificial Sequence: Synthetic oligonucleotide
  Sense strand starting at position 830 of SEQ ID NO: 1888900
gucauauggacuugcuaga

SEQ ID NO: 2564765 - RNA, 19 nt, Artificial Sequence
  Description of Artificial Sequence: Synthetic oligonucleotide
  Antisense strand to SEQ ID NO: 2564764
ucuagcaaguccauaugac

SEQ ID NO: 2564766 - RNA, 19 nt, Artificial Sequence
  Description of Artificial Sequence: Synthetic oligonucleotide
  Sense strand starting at position 1034 of SEQ ID NO: 1888900
gaacaaggaucgccuaaau

SEQ ID NO: 2564767 - RNA, 19 nt, Artificial Sequence
  Description of Artificial Sequence: Synthetic oligonucleotide
  Antisense strand to SEQ ID NO: 2564766
auuuaggcgauccuuguuc

SEQ ID NO: 2564768 - RNA, 19 nt, Artificial Sequence
  Description of Artificial Sequence: Synthetic oligonucleotide
  Sense strand starting at position 1147 of SEQ ID NO: 1888900
gaaguuggcugaguggaaa

SEQ ID NO: 2564769 - RNA, 19 nt, Artificial Sequence
  Description of Artificial Sequence: Synthetic oligonucleotide
  Antisense strand to SEQ ID NO: 2564768
uuuccacucagccaacuuc

SEQ ID NO: 2564770 - RNA, 19 nt, Artificial Sequence
  Description of Artificial Sequence: Synthetic oligonucleotide
  Sense strand starting at position 1150 of SEQ ID NO: 1888900
guuggcugaguggaaauaa

SEQ ID NO: 2564771 - RNA, 19 nt, Artificial Sequence
  Description of Artificial Sequence: Synthetic oligonucleotide
  Antisense strand to SEQ ID NO: 2564770
uuauuuccacucagccaac

SEQ ID NO: 2564772 - RNA, 19 nt, Artificial Sequence
  Description of Artificial Sequence: Synthetic oligonucleotide
  Sense strand starting at position 1187 of SEQ ID NO: 1888900
cugacuugggcauaucuca

SEQ ID NO: 2564773 - RNA, 19 nt, Artificial Sequence
  Description of Artificial Sequence: Synthetic oligonucleotide
  Antisense strand to SEQ ID NO: 2564772
ugagauaugcccaagucag

SEQ ID NO: 2564774 - RNA, 19 nt, Artificial Sequence
  Description of Artificial Sequence: Synthetic oligonucleotide
  Sense strand starting at position 1311 of SEQ ID NO: 1888900
auguuacuuugauuagaca

SEQ ID NO: 2564775 - RNA, 19 nt, Artificial Sequence
  Description of Artificial Sequence: Synthetic oligonucleotide
  Antisense strand to SEQ ID NO: 2564774
ugucuaaucaaaguaacau

SEQ ID NO: 2564776 - RNA, 19 nt, Artificial Sequence
  Description of Artificial Sequence: Synthetic oligonucleotide
  Sense strand starting at position 1312 of SEQ ID NO: 1888900
uguuacuuugauuagacau

SEQ ID NO: 2564777 - RNA, 19 nt, Artificial Sequence
  Description of Artificial Sequence: Synthetic oligonucleotide
  Antisense strand to SEQ ID NO: 2564776
augucuaaucaaaguaaca

SEQ ID NO: 2564778 - RNA, 19 nt, Artificial Sequence
  Description of Artificial Sequence: Synthetic oligonucleotide
  Sense strand starting at position 1366 of SEQ ID NO: 1888900
cucugucgugguuauauuu

SEQ ID NO: 2564779 - RNA, 19 nt, Artificial Sequence
  Description of Artificial Sequence: Synthetic oligonucleotide
  Antisense strand to SEQ ID NO: 2564778
aaauauaaccacgacagag

SEQ ID NO: 2564780 - RNA, 19 nt, Artificial Sequence
  Description of Artificial Sequence: Synthetic oligonucleotide
  Sense strand starting at position 1403 of SEQ ID NO: 1888900
uuucuuugccaagagcaaa

SEQ ID NO: 2564781 - RNA, 19 nt, Artificial Sequence
  Description of Artificial Sequence: Synthetic oligonucleotide
  Antisense strand to SEQ ID NO: 2564780
uuugcucuuggcaaagaaa

SEQ ID NO: 2564782 - RNA, 19 nt, Artificial Sequence
  Description of Artificial Sequence: Synthetic oligonucleotide
  Sense strand starting at position 1458 of SEQ ID NO: 1888900
guacaaagguuucccagau

SEQ ID NO: 2564783 - RNA, 19 nt, Artificial Sequence
  Description of Artificial Sequence: Synthetic oligonucleotide
  Antisense strand to SEQ ID NO: 2564782
aucugggaaaccuuuguac

SEQ ID NO: 2564784 - RNA, 19 nt, Artificial Sequence
  Description of Artificial Sequence: Synthetic oligonucleotide
  Sense strand starting at position 1467 of SEQ ID NO: 1888900
uuucccagauauguuugaa

SEQ ID NO: 2564785 - RNA, 19 nt, Artificial Sequence
  Description of Artificial Sequence: Synthetic oligonucleotide
  Antisense strand to SEQ ID NO: 2564784
uucaaacauaucugggaaa

SEQ ID NO: 2564786 - RNA, 19 nt, Artificial Sequence
  Description of Artificial Sequence: Synthetic oligonucleotide
  Sense strand starting at position 1629 of SEQ ID NO: 1888900
augcaaauauuacuuggaa

SEQ ID NO: 2564787 - RNA, 19 nt, Artificial Sequence
  Description of Artificial Sequence: Synthetic oligonucleotide
  Antisense strand to SEQ ID NO: 2564786
uuccaaguaauauuugcau

SEQ ID NO: 2564788 - RNA, 19 nt, Artificial Sequence
  Description of Artificial Sequence: Synthetic oligonucleotide
  Sense strand starting at position 2015 of SEQ ID NO: 1888900
ugacacaagucagcgauaa

SEQ ID NO: 2564789 - RNA, 19 nt, Artificial Sequence
  Description of Artificial Sequence: Synthetic oligonucleotide
  Antisense strand to SEQ ID NO: 2564788
uuaucgcugacuuguguca

SEQ ID NO: 2564790 - RNA, 19 nt, Artificial Sequence
  Description of Artificial Sequence: Synthetic oligonucleotide
  Sense strand starting at position 2016 of SEQ ID NO: 1888900
gacacaagucagcgauaac

SEQ ID NO: 2564791 - RNA, 19 nt, Artificial Sequence
  Description of Artificial Sequence: Synthetic oligonucleotide
  Antisense strand to SEQ ID NO: 2564790
guuaucgcugacuuguguc

SEQ ID NO: 2564792 - RNA, 19 nt, Artificial Sequence
  Description of Artificial Sequence: Synthetic oligonucleotide
  Sense strand starting at position 2048 of SEQ ID NO: 1888900
uugguauacuuccugauag

SEQ ID NO: 2564793 - RNA, 19 nt, Artificial Sequence
  Description of Artificial Sequence: Synthetic oligonucleotide
  Antisense strand to SEQ ID NO: 2564792
cuaucaggaaguauaccaa

SEQ ID NO: 2564794 - RNA, 19 nt, Artificial Sequence
  Description of Artificial Sequence: Synthetic oligonucleotide
  Sense strand starting at position 2354 of SEQ ID NO: 1888900
gcacauucucaugacauga

SEQ ID NO: 2564795 - RNA, 19 nt, Artificial Sequence
  Description of Artificial Sequence: Synthetic oligonucleotide
  Antisense strand to SEQ ID NO: 2564794
ucaugucaugagaaugugc

SEQ ID NO: 2564796 - RNA, 19 nt, Artificial Sequence
  Description of Artificial Sequence: Synthetic oligonucleotide
  Sense strand starting at position 2477 of SEQ ID NO: 1888900
ggauguuccuaacuuccau

SEQ ID NO: 2564797 - RNA, 19 nt, Artificial Sequence
  Description of Artificial Sequence: Synthetic oligonucleotide
  Antisense strand to SEQ ID NO: 2564796
auggaaguuaggaacaucc

SEQ ID NO: 2564798 - RNA, 19 nt, Artificial Sequence
  Description of Artificial Sequence: Synthetic oligonucleotide
  Sense strand starting at position 2679 of SEQ ID NO: 1888900
agcauucuagcacaaguau

SEQ ID NO: 2564799 - RNA, 19 nt, Artificial Sequence
  Description of Artificial Sequence: Synthetic oligonucleotide
  Antisense strand to SEQ ID NO: 2564798
auacuugugcuagaaugcu

SEQ ID NO: 2564800 - RNA, 19 nt, Artificial Sequence
  Description of Artificial Sequence: Synthetic oligonucleotide
  Sense strand starting at position 2937 of SEQ ID NO: 1888900
aguuaucaaucugucacaa

SEQ ID NO: 2564801 - RNA, 19 nt, Artificial Sequence
  Description of Artificial Sequence: Synthetic oligonucleotide
  Antisense strand to SEQ ID NO: 2564800
uugugacagauugauaacu

SEQ ID NO: 2564802 - RNA, 19 nt, Artificial Sequence
  Description of Artificial Sequence: Synthetic oligonucleotide
  Sense strand starting at position 2963 of SEQ ID NO: 1888900
cugguaucucgugacauga

SEQ ID NO: 2564803 - RNA, 19 nt, Artificial Sequence
  Description of Artificial Sequence: Synthetic oligonucleotide
  Antisense strand to SEQ ID NO: 2564802
ucaugucacgagauaccag

SEQ ID NO: 2564804 - RNA, 19 nt, Artificial Sequence
  Description of Artificial Sequence: Synthetic oligonucleotide
  Sense strand starting at position 2997 of SEQ ID NO: 1888900
cugagaucugugcauccuu

SEQ ID NO: 2564805 - RNA, 19 nt, Artificial Sequence
  Description of Artificial Sequence: Synthetic oligonucleotide
  Antisense strand to SEQ ID NO: 2564804
aaggaugcacagaucucag

SEQ ID NO: 2564806 - RNA, 19 nt, Artificial Sequence
  Description of Artificial Sequence: Synthetic oligonucleotide
  Sense strand starting at position 3263 of SEQ ID NO: 1888900
aaucaugguguccauguga

SEQ ID NO: 2564807 - RNA, 19 nt, Artificial Sequence
  Description of Artificial Sequence: Synthetic oligonucleotide
  Antisense strand to SEQ ID NO: 2564806
ucacauggacaccaugauu

SEQ ID NO: 2564808 - RNA, 19 nt, Artificial Sequence
  Description of Artificial Sequence: Synthetic oligonucleotide
  Sense strand starting at position 3378 of SEQ ID NO: 1888900
uccauugagugagugacua

SEQ ID NO: 2564809 - RNA, 19 nt, Artificial Sequence
  Description of Artificial Sequence: Synthetic oligonucleotide
  Antisense strand to SEQ ID NO: 2564808
uagucacucacucaaugga

SEQ ID NO: 2564810 - RNA, 19 nt, Artificial Sequence
  Description of Artificial Sequence: Synthetic oligonucleotide
  Sense strand starting at position 3382 of SEQ ID NO: 1888900
uugagugagugacuagauu

SEQ ID NO: 2564811 - RNA, 19 nt, Artificial Sequence
  Description of Artificial Sequence: Synthetic oligonucleotide
  Antisense strand to SEQ ID NO: 2564810
aaucuagucacucacucaa

SEQ ID NO: 2564812 - RNA, 19 nt, Artificial Sequence
  Description of Artificial Sequence: Synthetic oligonucleotide
  Sense strand starting at position 3547 of SEQ ID NO: 1888900
gguaacuuauagucacuau

SEQ ID NO: 2564813 - RNA, 19 nt, Artificial Sequence
  Description of Artificial Sequence: Synthetic oligonucleotide
  Antisense strand to SEQ ID NO: 2564812
auagugacuauaaguuacc

SEQ ID NO: 2564814 - RNA, 19 nt, Artificial Sequence
  Description of Artificial Sequence: Synthetic oligonucleotide
  Sense strand starting at position 3598 of SEQ ID NO: 1888900
ccaggaaguguccaaugua

SEQ ID NO: 2564815 - RNA, 19 nt, Artificial Sequence
  Description of Artificial Sequence: Synthetic oligonucleotide
  Antisense strand to SEQ ID NO: 2564814
uacauuggacacuuccugg

SEQ ID NO: 2564816 - RNA, 19 nt, Artificial Sequence
  Description of Artificial Sequence: Synthetic oligonucleotide
  Sense strand starting at position 3601 of SEQ ID NO: 1888900
ggaaguguccaauguauag

SEQ ID NO: 2564817 - RNA, 19 nt, Artificial Sequence
  Description of Artificial Sequence: Synthetic oligonucleotide
  Antisense strand to SEQ ID NO: 2564816
cuauacauuggacacuucc

SEQ ID NO: 2564818 - RNA, 19 nt, Artificial Sequence
  Description of Artificial Sequence: Synthetic oligonucleotide
  Sense strand starting at position 3619 of SEQ ID NO: 1888900
ggccaaagcucaucauaag

SEQ ID NO: 2564819 - RNA, 19 nt, Artificial Sequence
  Description of Artificial Sequence: Synthetic oligonucleotide
  Antisense strand to SEQ ID NO: 2564818
cuuaugaugagcuuuggcc

SEQ ID NO: 2564820 - RNA, 19 nt, Artificial Sequence
  Description of Artificial Sequence: Synthetic oligonucleotide
  Sense strand starting at position 3620 of SEQ ID NO: 1888900
gccaaagcucaucauaaga

SEQ ID NO: 2564821 - RNA, 19 nt, Artificial Sequence
  Description of Artificial Sequence: Synthetic oligonucleotide
  Antisense strand to SEQ ID NO: 2564820
ucuuaugaugagcuuuggc

SEQ ID NO: 2564822 - RNA, 19 nt, Artificial Sequence
  Description of Artificial Sequence: Synthetic oligonucleotide
  Sense strand starting at position 3631 of SEQ ID NO: 1888900
ucauaagacuagccaguuu

SEQ ID NO: 2564823 - RNA, 19 nt, Artificial Sequence
  Description of Artificial Sequence: Synthetic oligonucleotide
  Antisense strand to SEQ ID NO: 2564822
aaacuggcuagucuuauga

SEQ ID NO: 2564824 - RNA, 19 nt, Artificial Sequence
  Description of Artificial Sequence: Synthetic oligonucleotide
  Sense strand starting at position 68 of SEQ ID NO: 1888901
gagguaggcacccaguaaa

SEQ ID NO: 2564825 - RNA, 19 nt, Artificial Sequence
  Description of Artificial Sequence: Synthetic oligonucleotide
  Antisense strand to SEQ ID NO: 2564824
uuuacugggugccuaccuc

SEQ ID NO: 2564826 - RNA, 19 nt, Artificial Sequence
  Description of Artificial Sequence: Synthetic oligonucleotide
  Sense strand starting at position 82 of SEQ ID NO: 1888901
guaaauaugcucugauuga

SEQ ID NO: 2564827 - RNA, 19 nt, Artificial Sequence
  Description of Artificial Sequence: Synthetic oligonucleotide
  Antisense strand to SEQ ID NO: 2564826
ucaaucagagcauauuuac

SEQ ID NO: 2564828 - RNA, 19 nt, Artificial Sequence
  Description of Artificial Sequence: Synthetic oligonucleotide
  Sense strand starting at position 86 of SEQ ID NO: 1888901
auaugcucugauugacaga

SEQ ID NO: 2564829 - RNA, 19 nt, Artificial Sequence
  Description of Artificial Sequence: Synthetic oligonucleotide
  Antisense strand to SEQ ID NO: 2564828
ucugucaaucagagcauau

SEQ ID NO: 2564830 - RNA, 19 nt, Artificial Sequence
  Description of Artificial Sequence: Synthetic oligonucleotide
  Sense strand starting at position 122 of SEQ ID NO: 1888901
gcuuaugcuccuuaaagag

SEQ ID NO: 2564831 - RNA, 19 nt, Artificial Sequence
  Description of Artificial Sequence: Synthetic oligonucleotide
  Antisense strand to SEQ ID NO: 2564830
cucuuuaaggagcauaagc

SEQ ID NO: 2564832 - RNA, 19 nt, Artificial Sequence
  Description of Artificial Sequence: Synthetic oligonucleotide
  Sense strand starting at position 179 of SEQ ID NO: 1888901
augauuguauguucuuaag

SEQ ID NO: 2564833 - RNA, 19 nt, Artificial Sequence
  Description of Artificial Sequence: Synthetic oligonucleotide
  Antisense strand to SEQ ID NO: 2564832
cuuaagaacauacaaucau

SEQ ID NO: 2564834 - RNA, 19 nt, Artificial Sequence
  Description of Artificial Sequence: Synthetic oligonucleotide
  Sense strand starting at position 227 of SEQ ID NO: 1888901
gaggaauggucuccuguau

SEQ ID NO: 2564835 - RNA, 19 nt, Artificial Sequence
  Description of Artificial Sequence: Synthetic oligonucleotide
  Antisense strand to SEQ ID NO: 2564834
auacaggagaccauuccuc

SEQ ID NO: 2564836 - RNA, 19 nt, Artificial Sequence
  Description of Artificial Sequence: Synthetic oligonucleotide
  Sense strand starting at position 249 of SEQ ID NO: 1888901
uguaaauggauauguguau

SEQ ID NO: 2564837 - RNA, 19 nt, Artificial Sequence
  Description of Artificial Sequence: Synthetic oligonucleotide
  Antisense strand to SEQ ID NO: 2564836
auacacauauccauuuaca

SEQ ID NO: 2564838 - RNA, 19 nt, Artificial Sequence
  Description of Artificial Sequence: Synthetic oligonucleotide
  Sense strand starting at position 250 of SEQ ID NO: 1888901
guaaauggauauguguaua

SEQ ID NO: 2564839 - RNA, 19 nt, Artificial Sequence
  Description of Artificial Sequence: Synthetic oligonucleotide
  Antisense strand to SEQ ID NO: 2564838
uauacacauauccauuuac

SEQ ID NO: 2564840 - RNA, 19 nt, Artificial Sequence
  Description of Artificial Sequence: Synthetic oligonucleotide
  Sense strand starting at position 640 of SEQ ID NO: 1888901
gaaaguaaugucuagucau

SEQ ID NO: 2564841 - RNA, 19 nt, Artificial Sequence
  Description of Artificial Sequence: Synthetic oligonucleotide
  Antisense strand to SEQ ID NO: 2564840
augacuagacauuacuuuc

SEQ ID NO: 2564842 - RNA, 19 nt, Artificial Sequence
  Description of Artificial Sequence: Synthetic oligonucleotide
  Sense strand starting at position 654 of SEQ ID NO: 1888901
gucauauggacuugcuaga

SEQ ID NO: 2564843 - RNA, 19 nt, Artificial Sequence
  Description of Artificial Sequence: Synthetic oligonucleotide
  Antisense strand to SEQ ID NO: 2564842
ucuagcaaguccauaugac

SEQ ID NO: 2564844 - RNA, 19 nt, Artificial Sequence
  Description of Artificial Sequence: Synthetic oligonucleotide
  Sense strand starting at position 858 of SEQ ID NO: 1888901
gaacaaggaucgccuaaau

SEQ ID NO: 2564845 - RNA, 19 nt, Artificial Sequence
  Description of Artificial Sequence: Synthetic oligonucleotide
  Antisense strand to SEQ ID NO: 2564844
auuuaggcgauccuuguuc

SEQ ID NO: 2564846 - RNA, 19 nt, Artificial Sequence
  Description of Artificial Sequence: Synthetic oligonucleotide
  Sense strand starting at position 971 of SEQ ID NO: 1888901
gaaguuggcugaguggaaa

SEQ ID NO: 2564847 - RNA, 19 nt, Artificial Sequence
  Description of Artificial Sequence: Synthetic oligonucleotide
  Antisense strand to SEQ ID NO: 2564846
uuuccacucagccaacuuc

SEQ ID NO: 2564848 - RNA, 19 nt, Artificial Sequence
  Description of Artificial Sequence: Synthetic oligonucleotide
  Sense strand starting at position 974 of SEQ ID NO: 1888901
guuggcugaguggaaauaa

SEQ ID NO: 2564849 - RNA, 19 nt, Artificial Sequence
  Description of Artificial Sequence: Synthetic oligonucleotide
  Antisense strand to SEQ ID NO: 2564848
uuauuuccacucagccaac

SEQ ID NO: 2564850 - RNA, 19 nt, Artificial Sequence
  Description of Artificial Sequence: Synthetic oligonucleotide
  Sense strand starting at position 1011 of SEQ ID NO: 1888901
cugacuugggcauaucuca

SEQ ID NO: 2564851 - RNA, 19 nt, Artificial Sequence
  Description of Artificial Sequence: Synthetic oligonucleotide
  Antisense strand to SEQ ID NO: 2564850
ugagauaugcccaagucag

SEQ ID NO: 2564852 - RNA, 19 nt, Artificial Sequence
  Description of Artificial Sequence: Synthetic oligonucleotide
  Sense strand starting at position 1135 of SEQ ID NO: 1888901
auguuacuuugauuagaca

SEQ ID NO: 2564853 - RNA, 19 nt, Artificial Sequence
  Description of Artificial Sequence: Synthetic oligonucleotide
  Antisense strand to SEQ ID NO: 2564852
ugucuaaucaaaguaacau

SEQ ID NO: 2564854 - RNA, 19 nt, Artificial Sequence
  Description of Artificial Sequence: Synthetic oligonucleotide
  Sense strand starting at position 1136 of SEQ ID NO: 1888901
uguuacuuugauuagacau

SEQ ID NO: 2564855 - RNA, 19 nt, Artificial Sequence
  Description of Artificial Sequence: Synthetic oligonucleotide
  Antisense strand to SEQ ID NO: 2564854
augucuaaucaaaguaaca

SEQ ID NO: 2564856 - RNA, 19 nt, Artificial Sequence
  Description of Artificial Sequence: Synthetic oligonucleotide
  Sense strand starting at position 1190 of SEQ ID NO: 1888901
cucugucgugguuauauuu

SEQ ID NO: 2564857 - RNA, 19 nt, Artificial Sequence
  Description of Artificial Sequence: Synthetic oligonucleotide
  Antisense strand to SEQ ID NO: 2564856
aaauauaaccacgacagag

SEQ ID NO: 2564858 - RNA, 19 nt, Artificial Sequence
  Description of Artificial Sequence: Synthetic oligonucleotide
  Sense strand starting at position 1227 of SEQ ID NO: 1888901
uuucuuugccaagagcaaa

SEQ ID NO: 2564859 - RNA, 19 nt, Artificial Sequence
  Description of Artificial Sequence: Synthetic oligonucleotide
  Antisense strand to SEQ ID NO: 2564858
uuugcucuuggcaaagaaa

SEQ ID NO: 2564860 - RNA, 19 nt, Artificial Sequence
  Description of Artificial Sequence: Synthetic oligonucleotide
  Sense strand starting at position 1282 of SEQ ID NO: 1888901
guacaaagguuucccagau

SEQ ID NO: 2564861 - RNA, 19 nt, Artificial Sequence
  Description of Artificial Sequence: Synthetic oligonucleotide
  Antisense strand to SEQ ID NO: 2564860
aucugggaaaccuuuguac

SEQ ID NO: 2564862 - RNA, 19 nt, Artificial Sequence
  Description of Artificial Sequence: Synthetic oligonucleotide
  Sense strand starting at position 1291 of SEQ ID NO: 1888901
uuucccagauauguuugaa

SEQ ID NO: 2564863 - RNA, 19 nt, Artificial Sequence
  Description of Artificial Sequence: Synthetic oligonucleotide
  Antisense strand to SEQ ID NO: 2564862
uucaaacauaucugggaaa

SEQ ID NO: 2564864 - RNA, 19 nt, Artificial Sequence
  Description of Artificial Sequence: Synthetic oligonucleotide
  Sense strand starting at position 1453 of SEQ ID NO: 1888901
augcaaauauuacuuggaa

SEQ ID NO: 2564865 - RNA, 19 nt, Artificial Sequence
  Description of Artificial Sequence: Synthetic oligonucleotide
  Antisense strand to SEQ ID NO: 2564864
uuccaaguaauauuugcau

SEQ ID NO: 2564866 - RNA, 19 nt, Artificial Sequence
  Description of Artificial Sequence: Synthetic oligonucleotide
  Sense strand starting at position 1839 of SEQ ID NO: 1888901
ugacacaagucagcgauaa

SEQ ID NO: 2564867 - RNA, 19 nt, Artificial Sequence
  Description of Artificial Sequence: Synthetic oligonucleotide
  Antisense strand to SEQ ID NO: 2564866
uuaucgcugacuuguguca

SEQ ID NO: 2564868 - RNA, 19 nt, Artificial Sequence
  Description of Artificial Sequence: Synthetic oligonucleotide
  Sense strand starting at position 1840 of SEQ ID NO: 1888901
gacacaagucagcgauaac

SEQ ID NO: 2564869 - RNA, 19 nt, Artificial Sequence
  Description of Artificial Sequence: Synthetic oligonucleotide
  Antisense strand to SEQ ID NO: 2564868
guuaucgcugacuuguguc

SEQ ID NO: 2564870 - RNA, 19 nt, Artificial Sequence
  Description of Artificial Sequence: Synthetic oligonucleotide
  Sense strand starting at position 1872 of SEQ ID NO: 1888901
uugguauacuuccugauag

SEQ ID NO: 2564871 - RNA, 19 nt, Artificial Sequence
  Description of Artificial Sequence: Synthetic oligonucleotide
  Antisense strand to SEQ ID NO: 2564870
cuaucaggaaguauaccaa

SEQ ID NO: 2564872 - RNA, 19 nt, Artificial Sequence
  Description of Artificial Sequence: Synthetic oligonucleotide
  Sense strand starting at position 2178 of SEQ ID NO: 1888901
gcacauucucaugacauga

SEQ ID NO: 2564873 - RNA, 19 nt, Artificial Sequence
  Description of Artificial Sequence: Synthetic oligonucleotide
  Antisense strand to SEQ ID NO: 2564872
ucaugucaugagaaugugc

SEQ ID NO: 2564874 - RNA, 19 nt, Artificial Sequence
  Description of Artificial Sequence: Synthetic oligonucleotide
  Sense strand starting at position 2301 of SEQ ID NO: 1888901
ggauguuccuaacuuccau

SEQ ID NO: 2564875 - RNA, 19 nt, Artificial Sequence
  Description of Artificial Sequence: Synthetic oligonucleotide
  Antisense strand to SEQ ID NO: 2564874
auggaaguuaggaacaucc

SEQ ID NO: 2564876 - RNA, 19 nt, Artificial Sequence
  Description of Artificial Sequence: Synthetic oligonucleotide
  Sense strand starting at position 2503 of SEQ ID NO: 1888901
agcauucuagcacaaguau

SEQ ID NO: 2564877 - RNA, 19 nt, Artificial Sequence
  Description of Artificial Sequence: Synthetic oligonucleotide
  Antisense strand to SEQ ID NO: 2564876
auacuugugcuagaaugcu

SEQ ID NO: 2564878 - RNA, 19 nt, Artificial Sequence
  Description of Artificial Sequence: Synthetic oligonucleotide
  Sense strand starting at position 2761 of SEQ ID NO: 1888901
aguuaucaaucugucacaa

SEQ ID NO: 2564879 - RNA, 19 nt, Artificial Sequence
  Description of Artificial Sequence: Synthetic oligonucleotide
  Antisense strand to SEQ ID NO: 2564878
uugugacagauugauaacu

SEQ ID NO: 2564880 - RNA, 19 nt, Artificial Sequence
  Description of Artificial Sequence: Synthetic oligonucleotide
  Sense strand starting at position 2787 of SEQ ID NO: 1888901
cugguaucucgugacauga

SEQ ID NO: 2564881 - RNA, 19 nt, Artificial Sequence
  Description of Artificial Sequence: Synthetic oligonucleotide
  Antisense strand to SEQ ID NO: 2564880
ucaugucacgagauaccag

SEQ ID NO: 2564882 - RNA, 19 nt, Artificial Sequence
  Description of Artificial Sequence: Synthetic oligonucleotide
  Sense strand starting at position 2821 of SEQ ID NO: 1888901
cugagaucugugcauccuu

SEQ ID NO: 2564883 - RNA, 19 nt, Artificial Sequence
  Description of Artificial Sequence: Synthetic oligonucleotide
  Antisense strand to SEQ ID NO: 2564882
aaggaugcacagaucucag

SEQ ID NO: 2564884 - RNA, 19 nt, Artificial Sequence
  Description of Artificial Sequence: Synthetic oligonucleotide
  Sense strand starting at position 3087 of SEQ ID NO: 1888901
aaucaugguguccauguga

SEQ ID NO: 2564885 - RNA, 19 nt, Artificial Sequence
  Description of Artificial Sequence: Synthetic oligonucleotide
  Antisense strand to SEQ ID NO: 2564884
ucacauggacaccaugauu

SEQ ID NO: 2564886 - RNA, 19 nt, Artificial Sequence
  Description of Artificial Sequence: Synthetic oligonucleotide
  Sense strand starting at position 3202 of SEQ ID NO: 1888901
uccauugagugagugacua

SEQ ID NO: 2564887 - RNA, 19 nt, Artificial Sequence
  Description of Artificial Sequence: Synthetic oligonucleotide
  Antisense strand to SEQ ID NO: 2564886
uagucacucacucaaugga

SEQ ID NO: 2564888 - RNA, 19 nt, Artificial Sequence
  Description of Artificial Sequence: Synthetic oligonucleotide
  Sense strand starting at position 3206 of SEQ ID NO: 1888901
uugagugagugacuagauu

SEQ ID NO: 2564889 - RNA, 19 nt, Artificial Sequence
  Description of Artificial Sequence: Synthetic oligonucleotide
  Antisense strand to SEQ ID NO: 2564888
aaucuagucacucacucaa

SEQ ID NO: 2564890 - RNA, 19 nt, Artificial Sequence
  Description of Artificial Sequence: Synthetic oligonucleotide
  Sense strand starting at position 3371 of SEQ ID NO: 1888901
gguaacuuauagucacuau

SEQ ID NO: 2564891 - RNA, 19 nt, Artificial Sequence
  Description of Artificial Sequence: Synthetic oligonucleotide
  Antisense strand to SEQ ID NO: 2564890
auagugacuauaaguuacc

SEQ ID NO: 2564892 - RNA, 19 nt, Artificial Sequence
  Description of Artificial Sequence: Synthetic oligonucleotide
  Sense strand starting at position 3422 of SEQ ID NO: 1888901
ccaggaaguguccaaugua

SEQ ID NO: 2564893 - RNA, 19 nt, Artificial Sequence
  Description of Artificial Sequence: Synthetic oligonucleotide
  Antisense strand to SEQ ID NO: 2564892
uacauuggacacuuccugg

SEQ ID NO: 2564894 - RNA, 19 nt, Artificial Sequence
  Description of Artificial Sequence: Synthetic oligonucleotide
  Sense strand starting at position 3425 of SEQ ID NO: 1888901
ggaaguguccaauguauag

SEQ ID NO: 2564895 - RNA, 19 nt, Artificial Sequence
  Description of Artificial Sequence: Synthetic oligonucleotide
  Antisense strand to SEQ ID NO: 2564894
cuauacauuggacacuucc

SEQ ID NO: 2564896 - RNA, 19 nt, Artificial Sequence
  Description of Artificial Sequence: Synthetic oligonucleotide
  Sense strand starting at position 3443 of SEQ ID NO: 1888901
ggccaaagcucaucauaag

SEQ ID NO: 2564897 - RNA, 19 nt, Artificial Sequence
  Description of Artificial Sequence: Synthetic oligonucleotide
  Antisense strand to SEQ ID NO: 2564896
cuuaugaugagcuuuggcc

SEQ ID NO: 2564898 - RNA, 19 nt, Artificial Sequence
  Description of Artificial Sequence: Synthetic oligonucleotide
  Sense strand starting at position 3444 of SEQ ID NO: 1888901
gccaaagcucaucauaaga

SEQ ID NO: 2564899 - RNA, 19 nt, Artificial Sequence
  Description of Artificial Sequence: Synthetic oligonucleotide
  Antisense strand to SEQ ID NO: 2564898
ucuuaugaugagcuuuggc

SEQ ID NO: 2564900 - RNA, 19 nt, Artificial Sequence
  Description of Artificial Sequence: Synthetic oligonucleotide
  Sense strand starting at position 3455 of SEQ ID NO: 1888901
ucauaagacuagccaguuu

SEQ ID NO: 2564901 - RNA, 19 nt, Artificial Sequence
  Description of Artificial Sequence: Synthetic oligonucleotide
  Antisense strand to SEQ ID NO: 2564900
aaacuggcuagucuuauga

SEQ ID NO: 2564902 - RNA, 19 nt, Artificial Sequence
  Description of Artificial Sequence: Synthetic oligonucleotide
  Sense strand starting at position 3821 of SEQ ID NO: 1888901
cuggucuuaggguaauagu

SEQ ID NO: 2564903 - RNA, 19 nt, Artificial Sequence
  Description of Artificial Sequence: Synthetic oligonucleotide
  Antisense strand to SEQ ID NO: 2564902
acuauuacccuaagaccag

SEQ ID NO: 2564904 - RNA, 19 nt, Artificial Sequence
  Description of Artificial Sequence: Synthetic oligonucleotide
  Sense strand starting at position 65 of SEQ ID NO: 1888902
augcucaauuuggaaugau

SEQ ID NO: 2564905 - RNA, 19 nt, Artificial Sequence
  Description of Artificial Sequence: Synthetic oligonucleotide
  Antisense strand to SEQ ID NO: 2564904
aucauuccaaauugagcau

SEQ ID NO: 2564906 - RNA, 19 nt, Artificial Sequence
  Description of Artificial Sequence: Synthetic oligonucleotide
  Sense strand starting at position 413 of SEQ ID NO: 1888902
gagguaggcacccaguaaa

SEQ ID NO: 2564907 - RNA, 19 nt, Artificial Sequence
  Description of Artificial Sequence: Synthetic oligonucleotide
  Antisense strand to SEQ ID NO: 2564906
uuuacugggugccuaccuc

SEQ ID NO: 2564908 - RNA, 19 nt, Artificial Sequence
  Description of Artificial Sequence: Synthetic oligonucleotide
  Sense strand starting at position 427 of SEQ ID NO: 1888902
guaaauaugcucugauuga

SEQ ID NO: 2564909 - RNA, 19 nt, Artificial Sequence
  Description of Artificial Sequence: Synthetic oligonucleotide
  Antisense strand to SEQ ID NO: 2564908
ucaaucagagcauauuuac

SEQ ID NO: 2564910 - RNA, 19 nt, Artificial Sequence
  Description of Artificial Sequence: Synthetic oligonucleotide
  Sense strand starting at position 431 of SEQ ID NO: 1888902
auaugcucugauugacaga

SEQ ID NO: 2564911 - RNA, 19 nt, Artificial Sequence
  Description of Artificial Sequence: Synthetic oligonucleotide
  Antisense strand to SEQ ID NO: 2564910
ucugucaaucagagcauau

SEQ ID NO: 2564912 - RNA, 19 nt, Artificial Sequence
  Description of Artificial Sequence: Synthetic oligonucleotide
  Sense strand starting at position 467 of SEQ ID NO: 1888902
gcuuaugcuccuuaaagag

SEQ ID NO: 2564913 - RNA, 19 nt, Artificial Sequence
  Description of Artificial Sequence: Synthetic oligonucleotide
  Antisense strand to SEQ ID NO: 2564912
cucuuuaaggagcauaagc

SEQ ID NO: 2564914 - RNA, 19 nt, Artificial Sequence
  Description of Artificial Sequence: Synthetic oligonucleotide
  Sense strand starting at position 524 of SEQ ID NO: 1888902
augauuguauguucuuaag

SEQ ID NO: 2564915 - RNA, 19 nt, Artificial Sequence
  Description of Artificial Sequence: Synthetic oligonucleotide
  Antisense strand to SEQ ID NO: 2564914
cuuaagaacauacaaucau

SEQ ID NO: 2564916 - RNA, 19 nt, Artificial Sequence
  Description of Artificial Sequence: Synthetic oligonucleotide
  Sense strand starting at position 572 of SEQ ID NO: 1888902
gaggaauggucuccuguau

SEQ ID NO: 2564917 - RNA, 19 nt, Artificial Sequence
  Description of Artificial Sequence: Synthetic oligonucleotide
  Antisense strand to SEQ ID NO: 2564916
auacaggagaccauuccuc

SEQ ID NO: 2564918 - RNA, 19 nt, Artificial Sequence
  Description of Artificial Sequence: Synthetic oligonucleotide
  Sense strand starting at position 594 of SEQ ID NO: 1888902
uguaaauggauauguguau

SEQ ID NO: 2564919 - RNA, 19 nt, Artificial Sequence
  Description of Artificial Sequence: Synthetic oligonucleotide
  Antisense strand to SEQ ID NO: 2564918
auacacauauccauuuaca

SEQ ID NO: 2564920 - RNA, 19 nt, Artificial Sequence
  Description of Artificial Sequence: Synthetic oligonucleotide
  Sense strand starting at position 595 of SEQ ID NO: 1888902
guaaauggauauguguaua

SEQ ID NO: 2564921 - RNA, 19 nt, Artificial Sequence
  Description of Artificial Sequence: Synthetic oligonucleotide
  Antisense strand to SEQ ID NO: 2564920
uauacacauauccauuuac

SEQ ID NO: 2564922 - RNA, 19 nt, Artificial Sequence
  Description of Artificial Sequence: Synthetic oligonucleotide
  Sense strand starting at position 985 of SEQ ID NO: 1888902
gaaaguaaugucuagucau

SEQ ID NO: 2564923 - RNA, 19 nt, Artificial Sequence
  Description of Artificial Sequence: Synthetic oligonucleotide
  Antisense strand to SEQ ID NO: 2564922
augacuagacauuacuuuc

SEQ ID NO: 2564924 - RNA, 19 nt, Artificial Sequence
  Description of Artificial Sequence: Synthetic oligonucleotide
  Sense strand starting at position 999 of SEQ ID NO: 1888902
gucauauggacuugcuaga

SEQ ID NO: 2564925 - RNA, 19 nt, Artificial Sequence
  Description of Artificial Sequence: Synthetic oligonucleotide
  Antisense strand to SEQ ID NO: 2564924
ucuagcaaguccauaugac

SEQ ID NO: 2564926 - RNA, 19 nt, Artificial Sequence
  Description of Artificial Sequence: Synthetic oligonucleotide
  Sense strand starting at position 1203 of SEQ ID NO: 1888902
gaacaaggaucgccuaaau

SEQ ID NO: 2564927 - RNA, 19 nt, Artificial Sequence
  Description of Artificial Sequence: Synthetic oligonucleotide
  Antisense strand to SEQ ID NO: 2564926
auuuaggcgauccuuguuc

SEQ ID NO: 2564928 - RNA, 19 nt, Artificial Sequence
  Description of Artificial Sequence: Synthetic oligonucleotide
  Sense strand starting at position 1316 of SEQ ID NO: 1888902
gaaguuggcugaguggaaa

SEQ ID NO: 2564929 - RNA, 19 nt, Artificial Sequence
  Description of Artificial Sequence: Synthetic oligonucleotide
  Antisense strand to SEQ ID NO: 2564928
uuuccacucagccaacuuc

SEQ ID NO: 2564930 - RNA, 19 nt, Artificial Sequence
  Description of Artificial Sequence: Synthetic oligonucleotide
  Sense strand starting at position 1319 of SEQ ID NO: 1888902
guuggcugaguggaaauaa

SEQ ID NO: 2564931 - RNA, 19 nt, Artificial Sequence
  Description of Artificial Sequence: Synthetic oligonucleotide
  Antisense strand to SEQ ID NO: 2564930
uuauuuccacucagccaac

SEQ ID NO: 2564932 - RNA, 19 nt, Artificial Sequence
  Description of Artificial Sequence: Synthetic oligonucleotide
  Sense strand starting at position 1356 of SEQ ID NO: 1888902
cugacuugggcauaucuca

SEQ ID NO: 2564933 - RNA, 19 nt, Artificial Sequence
  Description of Artificial Sequence: Synthetic oligonucleotide
  Antisense strand to SEQ ID NO: 2564932
ugagauaugcccaagucag

SEQ ID NO: 2564934 - RNA, 19 nt, Artificial Sequence
  Description of Artificial Sequence: Synthetic oligonucleotide
  Sense strand starting at position 1480 of SEQ ID NO: 1888902
auguuacuuugauuagaca

SEQ ID NO: 2564935 - RNA, 19 nt, Artificial Sequence
  Description of Artificial Sequence: Synthetic oligonucleotide
  Antisense strand to SEQ ID NO: 2564934
ugucuaaucaaaguaacau

SEQ ID NO: 2564936 - RNA, 19 nt, Artificial Sequence
  Description of Artificial Sequence: Synthetic oligonucleotide
  Sense strand starting at position 1481 of SEQ ID NO: 1888902
uguuacuuugauuagacau

SEQ ID NO: 2564937 - RNA, 19 nt, Artificial Sequence
  Description of Artificial Sequence: Synthetic oligonucleotide
  Antisense strand to SEQ ID NO: 2564936
augucuaaucaaaguaaca

SEQ ID NO: 2564938 - RNA, 19 nt, Artificial Sequence
  Description of Artificial Sequence: Synthetic oligonucleotide
  Sense strand starting at position 1535 of SEQ ID NO: 1888902
cucugucgugguuauauuu

SEQ ID NO: 2564939 - RNA, 19 nt, Artificial Sequence
  Description of Artificial Sequence: Synthetic oligonucleotide
  Antisense strand to SEQ ID NO: 2564938
aaauauaaccacgacagag

SEQ ID NO: 2564940 - RNA, 19 nt, Artificial Sequence
  Description of Artificial Sequence: Synthetic oligonucleotide
  Sense strand starting at position 1572 of SEQ ID NO: 1888902
uuucuuugccaagagcaaa

SEQ ID NO: 2564941 - RNA, 19 nt, Artificial Sequence
  Description of Artificial Sequence: Synthetic oligonucleotide
  Antisense strand to SEQ ID NO: 2564940
uuugcucuuggcaaagaaa

SEQ ID NO: 2564942 - RNA, 19 nt, Artificial Sequence
  Description of Artificial Sequence: Synthetic oligonucleotide
  Sense strand starting at position 1627 of SEQ ID NO: 1888902
guacaaagguuucccagau

SEQ ID NO: 2564943 - RNA, 19 nt, Artificial Sequence
  Description of Artificial Sequence: Synthetic oligonucleotide
  Antisense strand to SEQ ID NO: 2564942
aucugggaaaccuuuguac

SEQ ID NO: 2564944 - RNA, 19 nt, Artificial Sequence
  Description of Artificial Sequence: Synthetic oligonucleotide
  Sense strand starting at position 1636 of SEQ ID NO: 1888902
uuucccagauauguuugaa

SEQ ID NO: 2564945 - RNA, 19 nt, Artificial Sequence
  Description of Artificial Sequence: Synthetic oligonucleotide
  Antisense strand to SEQ ID NO: 2564944
uucaaacauaucugggaaa

SEQ ID NO: 2564946 - RNA, 19 nt, Artificial Sequence
  Description of Artificial Sequence: Synthetic oligonucleotide
  Sense strand starting at position 1798 of SEQ ID NO: 1888902
augcaaauauuacuuggaa

SEQ ID NO: 2564947 - RNA, 19 nt, Artificial Sequence
  Description of Artificial Sequence: Synthetic oligonucleotide
  Antisense strand to SEQ ID NO: 2564946
uuccaaguaauauuugcau

SEQ ID NO: 2564948 - RNA, 19 nt, Artificial Sequence
  Description of Artificial Sequence: Synthetic oligonucleotide
  Sense strand starting at position 2184 of SEQ ID NO: 1888902
ugacacaagucagcgauaa

SEQ ID NO: 2564949 - RNA, 19 nt, Artificial Sequence
  Description of Artificial Sequence: Synthetic oligonucleotide
  Antisense strand to SEQ ID NO: 2564948
uuaucgcugacuuguguca

SEQ ID NO: 2564950 - RNA, 19 nt, Artificial Sequence
  Description of Artificial Sequence: Synthetic oligonucleotide
  Sense strand starting at position 2185 of SEQ ID NO: 1888902
gacacaagucagcgauaac

SEQ ID NO: 2564951 - RNA, 19 nt, Artificial Sequence
  Description of Artificial Sequence: Synthetic oligonucleotide
  Antisense strand to SEQ ID NO: 2564950
guuaucgcugacuuguguc

SEQ ID NO: 2564952 - RNA, 19 nt, Artificial Sequence
  Description of Artificial Sequence: Synthetic oligonucleotide
  Sense strand starting at position 2217 of SEQ ID NO: 1888902
uugguauacuuccugauag

SEQ ID NO: 2564953 - RNA, 19 nt, Artificial Sequence
  Description of Artificial Sequence: Synthetic oligonucleotide
  Antisense strand to SEQ ID NO: 2564952
cuaucaggaaguauaccaa

SEQ ID NO: 2564954 - RNA, 19 nt, Artificial Sequence
  Description of Artificial Sequence: Synthetic oligonucleotide
  Sense strand starting at position 2523 of SEQ ID NO: 1888902
gcacauucucaugacauga

SEQ ID NO: 2564955 - RNA, 19 nt, Artificial Sequence
  Description of Artificial Sequence: Synthetic oligonucleotide
  Antisense strand to SEQ ID NO: 2564954
ucaugucaugagaaugugc

SEQ ID NO: 2564956 - RNA, 19 nt, Artificial Sequence
  Description of Artificial Sequence: Synthetic oligonucleotide
  Sense strand starting at position 2646 of SEQ ID NO: 1888902
ggauguuccuaacuuccau

SEQ ID NO: 2564957 - RNA, 19 nt, Artificial Sequence
  Description of Artificial Sequence: Synthetic oligonucleotide
  Antisense strand to SEQ ID NO: 2564956
auggaaguuaggaacaucc

SEQ ID NO: 2564958 - RNA, 19 nt, Artificial Sequence
  Description of Artificial Sequence: Synthetic oligonucleotide
  Sense strand starting at position 2848 of SEQ ID NO: 1888902
agcauucuagcacaaguau

SEQ ID NO: 2564959 - RNA, 19 nt, Artificial Sequence
  Description of Artificial Sequence: Synthetic oligonucleotide
  Antisense strand to SEQ ID NO: 2564958
auacuugugcuagaaugcu

SEQ ID NO: 2564960 - RNA, 19 nt, Artificial Sequence
  Description of Artificial Sequence: Synthetic oligonucleotide
  Sense strand starting at position 3106 of SEQ ID NO: 1888902
aguuaucaaucugucacaa

SEQ ID NO: 2564961 - RNA, 19 nt, Artificial Sequence
  Description of Artificial Sequence: Synthetic oligonucleotide
  Antisense strand to SEQ ID NO: 2564960
uugugacagauugauaacu

SEQ ID NO: 2564962 - RNA, 19 nt, Artificial Sequence
  Description of Artificial Sequence: Synthetic oligonucleotide
  Sense strand starting at position 3132 of SEQ ID NO: 1888902
cugguaucucgugacauga

SEQ ID NO: 2564963 - RNA, 19 nt, Artificial Sequence
  Description of Artificial Sequence: Synthetic oligonucleotide
  Antisense strand to SEQ ID NO: 2564962
ucaugucacgagauaccag

SEQ ID NO: 2564964 - RNA, 19 nt, Artificial Sequence
  Description of Artificial Sequence: Synthetic oligonucleotide
  Sense strand starting at position 3166 of SEQ ID NO: 1888902
cugagaucugugcauccuu

SEQ ID NO: 2564965 - RNA, 19 nt, Artificial Sequence
  Description of Artificial Sequence: Synthetic oligonucleotide
  Antisense strand to SEQ ID NO: 2564964
aaggaugcacagaucucag

SEQ ID NO: 2564966 - RNA, 19 nt, Artificial Sequence
  Description of Artificial Sequence: Synthetic oligonucleotide
  Sense strand starting at position 3432 of SEQ ID NO: 1888902
aaucaugguguccauguga

SEQ ID NO: 2564967 - RNA, 19 nt, Artificial Sequence
  Description of Artificial Sequence: Synthetic oligonucleotide
  Antisense strand to SEQ ID NO: 2564966
ucacauggacaccaugauu

SEQ ID NO: 2564968 - RNA, 19 nt, Artificial Sequence
  Description of Artificial Sequence: Synthetic oligonucleotide
  Sense strand starting at position 3547 of SEQ ID NO: 1888902
uccauugagugagugacua

SEQ ID NO: 2564969 - RNA, 19 nt, Artificial Sequence
  Description of Artificial Sequence: Synthetic oligonucleotide
  Antisense strand to SEQ ID NO: 2564968
uagucacucacucaaugga

SEQ ID NO: 2564970 - RNA, 19 nt, Artificial Sequence
  Description of Artificial Sequence: Synthetic oligonucleotide
  Sense strand starting at position 3551 of SEQ ID NO: 1888902
uugagugagugacuagauu

SEQ ID NO: 2564971 - RNA, 19 nt, Artificial Sequence
  Description of Artificial Sequence: Synthetic oligonucleotide
  Antisense strand to SEQ ID NO: 2564970
aaucuagucacucacucaa

SEQ ID NO: 2564972 - RNA, 19 nt, Artificial Sequence
  Description of Artificial Sequence: Synthetic oligonucleotide
  Sense strand starting at position 3716 of SEQ ID NO: 1888902
gguaacuuauagucacuau

SEQ ID NO: 2564973 - RNA, 19 nt, Artificial Sequence
  Description of Artificial Sequence: Synthetic oligonucleotide
  Antisense strand to SEQ ID NO: 2564972
auagugacuauaaguuacc

SEQ ID NO: 2564974 - RNA, 19 nt, Artificial Sequence
  Description of Artificial Sequence: Synthetic oligonucleotide
  Sense strand starting at position 3767 of SEQ ID NO: 1888902
ccaggaaguguccaaugua

SEQ ID NO: 2564975 - RNA, 19 nt, Artificial Sequence
  Description of Artificial Sequence: Synthetic oligonucleotide
  Antisense strand to SEQ ID NO: 2564974
uacauuggacacuuccugg

SEQ ID NO: 2564976 - RNA, 19 nt, Artificial Sequence
  Description of Artificial Sequence: Synthetic oligonucleotide
  Sense strand starting at position 3770 of SEQ ID NO: 1888902
ggaaguguccaauguauag

SEQ ID NO: 2564977 - RNA, 19 nt, Artificial Sequence
  Description of Artificial Sequence: Synthetic oligonucleotide
  Antisense strand to SEQ ID NO: 2564976
cuauacauuggacacuucc

SEQ ID NO: 2564978 - RNA, 19 nt, Artificial Sequence
  Description of Artificial Sequence: Synthetic oligonucleotide
  Sense strand starting at position 3788 of SEQ ID NO: 1888902
ggccaaagcucaucauaag

SEQ ID NO: 2564979 - RNA, 19 nt, Artificial Sequence
  Description of Artificial Sequence: Synthetic oligonucleotide
  Antisense strand to SEQ ID NO: 2564978
cuuaugaugagcuuuggcc

SEQ ID NO: 2564980 - RNA, 19 nt, Artificial Sequence
  Description of Artificial Sequence: Synthetic oligonucleotide
  Sense strand starting at position 3789 of SEQ ID NO: 1888902
gccaaagcucaucauaaga

SEQ ID NO: 2564981 - RNA, 19 nt, Artificial Sequence
  Description of Artificial Sequence: Synthetic oligonucleotide
  Antisense strand to SEQ ID NO: 2564980
ucuuaugaugagcuuuggc

SEQ ID NO: 2564982 - RNA, 19 nt, Artificial Sequence
  Description of Artificial Sequence: Synthetic oligonucleotide
  Sense strand starting at position 3800 of SEQ ID NO: 1888902
ucauaagacuagccaguuu

SEQ ID NO: 2564983 - RNA, 19 nt, Artificial Sequence
  Description of Artificial Sequence: Synthetic oligonucleotide
  Antisense strand to SEQ ID NO: 2564982
aaacuggcuagucuuauga

SEQ ID NO: 2564984 - RNA, 19 nt, Artificial Sequence
  Description of Artificial Sequence: Synthetic oligonucleotide
  Sense strand starting at position 230 of SEQ ID NO: 1888903
ggcuauguagacuacaaca

SEQ ID NO: 2564985 - RNA, 19 nt, Artificial Sequence
  Description of Artificial Sequence: Synthetic oligonucleotide
  Antisense strand to SEQ ID NO: 2564984
uguuguagucuacauagcc

SEQ ID NO: 2564986 - RNA, 19 nt, Artificial Sequence
  Description of Artificial Sequence: Synthetic oligonucleotide
  Sense strand starting at position 254 of SEQ ID NO: 1888903
ugauccaugccgggaauga

SEQ ID NO: 2564987 - RNA, 19 nt, Artificial Sequence
  Description of Artificial Sequence: Synthetic oligonucleotide
  Antisense strand to SEQ ID NO: 2564986
ucauucccggcauggauca

SEQ ID NO: 2564988 - RNA, 19 nt, Artificial Sequence
  Description of Artificial Sequence: Synthetic oligonucleotide
  Sense strand starting at position 255 of SEQ ID NO: 1888903
gauccaugccgggaaugau

SEQ ID NO: 2564989 - RNA, 19 nt, Artificial Sequence
  Description of Artificial Sequence: Synthetic oligonucleotide
  Antisense strand to SEQ ID NO: 2564988
aucauucccggcauggauc

SEQ ID NO: 2564990 - RNA, 19 nt, Artificial Sequence
  Description of Artificial Sequence: Synthetic oligonucleotide
  Sense strand starting at position 318 of SEQ ID NO: 1888903
uaauguaaccuggacaguu

SEQ ID NO: 2564991 - RNA, 19 nt, Artificial Sequence
  Description of Artificial Sequence: Synthetic oligonucleotide
  Antisense strand to SEQ ID NO: 2564990
aacuguccagguuacauua

SEQ ID NO: 2564992 - RNA, 19 nt, Artificial Sequence
  Description of Artificial Sequence: Synthetic oligonucleotide
  Sense strand starting at position 447 of SEQ ID NO: 1888903
cuuguaagacagugaauuc

SEQ ID NO: 2564993 - RNA, 19 nt, Artificial Sequence
  Description of Artificial Sequence: Synthetic oligonucleotide
  Antisense strand to SEQ ID NO: 2564992
gaauucacugucuuacaag

SEQ ID NO: 2564994 - RNA, 19 nt, Artificial Sequence
  Description of Artificial Sequence: Synthetic oligonucleotide
  Sense strand starting at position 454 of SEQ ID NO: 1888903
gacagugaauuccugacca

SEQ ID NO: 2564995 - RNA, 19 nt, Artificial Sequence
  Description of Artificial Sequence: Synthetic oligonucleotide
  Antisense strand to SEQ ID NO: 2564994
uggucaggaauucacuguc

SEQ ID NO: 2564996 - RNA, 19 nt, Artificial Sequence
  Description of Artificial Sequence: Synthetic oligonucleotide
  Sense strand starting at position 456 of SEQ ID NO: 1888903
cagugaauuccugaccagc

SEQ ID NO: 2564997 - RNA, 19 nt, Artificial Sequence
  Description of Artificial Sequence: Synthetic oligonucleotide
  Antisense strand to SEQ ID NO: 2564996
gcuggucaggaauucacug

SEQ ID NO: 2564998 - RNA, 19 nt, Artificial Sequence
  Description of Artificial Sequence: Synthetic oligonucleotide
  Sense strand starting at position 458 of SEQ ID NO: 1888903
gugaauuccugaccagcaa

SEQ ID NO: 2564999 - RNA, 19 nt, Artificial Sequence
  Description of Artificial Sequence: Synthetic oligonucleotide
  Antisense strand to SEQ ID NO: 2564998
uugcuggucaggaauucac

SEQ ID NO: 2565000 - RNA, 19 nt, Artificial Sequence
  Description of Artificial Sequence: Synthetic oligonucleotide
  Sense strand starting at position 459 of SEQ ID NO: 1888903
ugaauuccugaccagcaau

SEQ ID NO: 2565001 - RNA, 19 nt, Artificial Sequence
  Description of Artificial Sequence: Synthetic oligonucleotide
  Antisense strand to SEQ ID NO: 2565000
auugcuggucaggaauuca

SEQ ID NO: 2565002 - RNA, 19 nt, Artificial Sequence
  Description of Artificial Sequence: Synthetic oligonucleotide
  Sense strand starting at position 748 of SEQ ID NO: 1888903
ucaacuagucuccagcaga

SEQ ID NO: 2565003 - RNA, 19 nt, Artificial Sequence
  Description of Artificial Sequence: Synthetic oligonucleotide
  Antisense strand to SEQ ID NO: 2565002
ucugcuggagacuaguuga

SEQ ID NO: 2565004 - RNA, 19 nt, Artificial Sequence
  Description of Artificial Sequence: Synthetic oligonucleotide
  Sense strand starting at position 1148 of SEQ ID NO: 1888903
ccuaauacugugcaagcaa

SEQ ID NO: 2565005 - RNA, 19 nt, Artificial Sequence
  Description of Artificial Sequence: Synthetic oligonucleotide
  Antisense strand to SEQ ID NO: 2565004
uugcuugcacaguauuagg

SEQ ID NO: 2565006 - RNA, 19 nt, Artificial Sequence
  Description of Artificial Sequence: Synthetic oligonucleotide
  Sense strand starting at position 1347 of SEQ ID NO: 1888903
cccugaacuuggucaggau

SEQ ID NO: 2565007 - RNA, 19 nt, Artificial Sequence
  Description of Artificial Sequence: Synthetic oligonucleotide
  Antisense strand to SEQ ID NO: 2565006
auccugaccaaguucaggg

SEQ ID NO: 2565008 - RNA, 19 nt, Artificial Sequence
  Description of Artificial Sequence: Synthetic oligonucleotide
  Sense strand starting at position 1473 of SEQ ID NO: 1888903
ggagcugaaguguaagaua

SEQ ID NO: 2565009 - RNA, 19 nt, Artificial Sequence
  Description of Artificial Sequence: Synthetic oligonucleotide
  Antisense strand to SEQ ID NO: 2565008
uaucuuacacuucagcucc

SEQ ID NO: 2565010 - RNA, 19 nt, Artificial Sequence
  Description of Artificial Sequence: Synthetic oligonucleotide
  Sense strand starting at position 1484 of SEQ ID NO: 1888903
guaagauacccaggaccuu

SEQ ID NO: 2565011 - RNA, 19 nt, Artificial Sequence
  Description of Artificial Sequence: Synthetic oligonucleotide
  Antisense strand to SEQ ID NO: 2565010
aagguccuggguaucuuac

SEQ ID NO: 2565012 - RNA, 19 nt, Artificial Sequence
  Description of Artificial Sequence: Synthetic oligonucleotide
  Sense strand starting at position 1546 of SEQ ID NO: 1888903
cacuaugucuauguggaau

SEQ ID NO: 2565013 - RNA, 19 nt, Artificial Sequence
  Description of Artificial Sequence: Synthetic oligonucleotide
  Antisense strand to SEQ ID NO: 2565012
auuccacauagacauagug

SEQ ID NO: 2565014 - RNA, 19 nt, Artificial Sequence
  Description of Artificial Sequence: Synthetic oligonucleotide
  Sense strand starting at position 1568 of SEQ ID NO: 1888903
ccaugaagccuuugauaag

SEQ ID NO: 2565015 - RNA, 19 nt, Artificial Sequence
  Description of Artificial Sequence: Synthetic oligonucleotide
  Antisense strand to SEQ ID NO: 2565014
cuuaucaaaggcuucaugg

SEQ ID NO: 2565016 - RNA, 19 nt, Artificial Sequence
  Description of Artificial Sequence: Synthetic oligonucleotide
  Sense strand starting at position 1599 of SEQ ID NO: 1888903
ucagacuuguuccuuuaag

SEQ ID NO: 2565017 - RNA, 19 nt, Artificial Sequence
  Description of Artificial Sequence: Synthetic oligonucleotide
  Antisense strand to SEQ ID NO: 2565016
cuuaaaggaacaagucuga

SEQ ID NO: 2565018 - RNA, 19 nt, Artificial Sequence
  Description of Artificial Sequence: Synthetic oligonucleotide
  Sense strand starting at position 1639 of SEQ ID NO: 1888903
aguguagcugcuguaacuu

SEQ ID NO: 2565019 - RNA, 19 nt, Artificial Sequence
  Description of Artificial Sequence: Synthetic oligonucleotide
  Antisense strand to SEQ ID NO: 2565018
aaguuacagcagcuacacu

SEQ ID NO: 2565020 - RNA, 19 nt, Artificial Sequence
  Description of Artificial Sequence: Synthetic oligonucleotide
  Sense strand starting at position 1755 of SEQ ID NO: 1888903
ugguucuggguauggagaa

SEQ ID NO: 2565021 - RNA, 19 nt, Artificial Sequence
  Description of Artificial Sequence: Synthetic oligonucleotide
  Antisense strand to SEQ ID NO: 2565020
uucuccauacccagaacca

SEQ ID NO: 2565022 - RNA, 19 nt, Artificial Sequence
  Description of Artificial Sequence: Synthetic oligonucleotide
  Sense strand starting at position 1816 of SEQ ID NO: 1888903
aguuguaaccucgaaacug

SEQ ID NO: 2565023 - RNA, 19 nt, Artificial Sequence
  Description of Artificial Sequence: Synthetic oligonucleotide
  Antisense strand to SEQ ID NO: 2565022
caguuucgagguuacaacu

SEQ ID NO: 2565024 - RNA, 19 nt, Artificial Sequence
  Description of Artificial Sequence: Synthetic oligonucleotide
  Sense strand starting at position 1830 of SEQ ID NO: 1888903
aacugaagggucugcauga

SEQ ID NO: 2565025 - RNA, 19 nt, Artificial Sequence
  Description of Artificial Sequence: Synthetic oligonucleotide
  Antisense strand to SEQ ID NO: 2565024
ucaugcagacccuucaguu

SEQ ID NO: 2565026 - RNA, 19 nt, Artificial Sequence
  Description of Artificial Sequence: Synthetic oligonucleotide
  Sense strand starting at position 1831 of SEQ ID NO: 1888903
acugaagggucugcaugaa

SEQ ID NO: 2565027 - RNA, 19 nt, Artificial Sequence
  Description of Artificial Sequence: Synthetic oligonucleotide
  Antisense strand to SEQ ID NO: 2565026
uucaugcagacccuucagu

SEQ ID NO: 2565028 - RNA, 19 nt, Artificial Sequence
  Description of Artificial Sequence: Synthetic oligonucleotide
  Sense strand starting at position 1873 of SEQ ID NO: 1888903
gcagcagaacuuuaucuac

SEQ ID NO: 2565029 - RNA, 19 nt, Artificial Sequence
  Description of Artificial Sequence: Synthetic oligonucleotide
  Antisense strand to SEQ ID NO: 2565028
guagauaaaguucugcugc

SEQ ID NO: 2565030 - RNA, 19 nt, Artificial Sequence
  Description of Artificial Sequence: Synthetic oligonucleotide
  Sense strand starting at position 1926 of SEQ ID NO: 1888903
uacuucuuugcagaugaga

SEQ ID NO: 2565031 - RNA, 19 nt, Artificial Sequence
  Description of Artificial Sequence: Synthetic oligonucleotide
  Antisense strand to SEQ ID NO: 2565030
ucucaucugcaaagaagua

SEQ ID NO: 2565032 - RNA, 19 nt, Artificial Sequence
  Description of Artificial Sequence: Synthetic oligonucleotide
  Sense strand starting at position 2232 of SEQ ID NO: 1888903
acuuguagaucaucucauu

SEQ ID NO: 2565033 - RNA, 19 nt, Artificial Sequence
  Description of Artificial Sequence: Synthetic oligonucleotide
  Antisense strand to SEQ ID NO: 2565032
aaugagaugaucuacaagu

SEQ ID NO: 2565034 - RNA, 19 nt, Artificial Sequence
  Description of Artificial Sequence: Synthetic oligonucleotide
  Sense strand starting at position 2314 of SEQ ID NO: 1888903
ugaggucuccaauagcaug

SEQ ID NO: 2565035 - RNA, 19 nt, Artificial Sequence
  Description of Artificial Sequence: Synthetic oligonucleotide
  Antisense strand to SEQ ID NO: 2565034
caugcuauuggagaccuca

SEQ ID NO: 2565036 - RNA, 19 nt, Artificial Sequence
  Description of Artificial Sequence: Synthetic oligonucleotide
  Sense strand starting at position 2437 of SEQ ID NO: 1888903
cugagcauuccucaguauc

SEQ ID NO: 2565037 - RNA, 19 nt, Artificial Sequence
  Description of Artificial Sequence: Synthetic oligonucleotide
  Antisense strand to SEQ ID NO: 2565036
gauacugaggaaugcucag

SEQ ID NO: 2565038 - RNA, 19 nt, Artificial Sequence
  Description of Artificial Sequence: Synthetic oligonucleotide
  Sense strand starting at position 2692 of SEQ ID NO: 1888903
ucucaauaagaaugagguu

SEQ ID NO: 2565039 - RNA, 19 nt, Artificial Sequence
  Description of Artificial Sequence: Synthetic oligonucleotide
  Antisense strand to SEQ ID NO: 2565038
aaccucauucuuauugaga

SEQ ID NO: 2565040 - RNA, 19 nt, Artificial Sequence
  Description of Artificial Sequence: Synthetic oligonucleotide
  Sense strand starting at position 2725 of SEQ ID NO: 1888903
gcaguauagaaaggugaaa

SEQ ID NO: 2565041 - RNA, 19 nt, Artificial Sequence
  Description of Artificial Sequence: Synthetic oligonucleotide
  Antisense strand to SEQ ID NO: 2565040
uuucaccuuucuauacugc

SEQ ID NO: 2565042 - RNA, 19 nt, Artificial Sequence
  Description of Artificial Sequence: Synthetic oligonucleotide
  Sense strand starting at position 2736 of SEQ ID NO: 1888903
aggugaaacaccuggugua

SEQ ID NO: 2565043 - RNA, 19 nt, Artificial Sequence
  Description of Artificial Sequence: Synthetic oligonucleotide
  Antisense strand to SEQ ID NO: 2565042
uacaccagguguuucaccu

SEQ ID NO: 2565044 - RNA, 19 nt, Artificial Sequence
  Description of Artificial Sequence: Synthetic oligonucleotide
  Sense strand starting at position 2748 of SEQ ID NO: 1888903
ugguguauuguggaaagga

SEQ ID NO: 2565045 - RNA, 19 nt, Artificial Sequence
  Description of Artificial Sequence: Synthetic oligonucleotide
  Antisense strand to SEQ ID NO: 2565044
uccuuuccacaauacacca

SEQ ID NO: 2565046 - RNA, 19 nt, Artificial Sequence
  Description of Artificial Sequence: Synthetic oligonucleotide
  Sense strand starting at position 2866 of SEQ ID NO: 1888903
caaauugauccaugagagu

SEQ ID NO: 2565047 - RNA, 19 nt, Artificial Sequence
  Description of Artificial Sequence: Synthetic oligonucleotide
  Antisense strand to SEQ ID NO: 2565046
acucucauggaucaauuug

SEQ ID NO: 2565048 - RNA, 19 nt, Artificial Sequence
  Description of Artificial Sequence: Synthetic oligonucleotide
  Sense strand starting at position 2877 of SEQ ID NO: 1888903
augagaguuaacggcagau

SEQ ID NO: 2565049 - RNA, 19 nt, Artificial Sequence
  Description of Artificial Sequence: Synthetic oligonucleotide
  Antisense strand to SEQ ID NO: 2565048
aucugccguuaacucucau

SEQ ID NO: 2565050 - RNA, 19 nt, Artificial Sequence
  Description of Artificial Sequence: Synthetic oligonucleotide
  Sense strand starting at position 2879 of SEQ ID NO: 1888903
gagaguuaacggcagauuc

SEQ ID NO: 2565051 - RNA, 19 nt, Artificial Sequence
  Description of Artificial Sequence: Synthetic oligonucleotide
  Antisense strand to SEQ ID NO: 2565050
gaaucugccguuaacucuc

SEQ ID NO: 2565052 - RNA, 19 nt, Artificial Sequence
  Description of Artificial Sequence: Synthetic oligonucleotide
  Sense strand starting at position 2881 of SEQ ID NO: 1888903
gaguuaacggcagauucga

SEQ ID NO: 2565053 - RNA, 19 nt, Artificial Sequence
  Description of Artificial Sequence: Synthetic oligonucleotide
  Antisense strand to SEQ ID NO: 2565052
ucgaaucugccguuaacuc

SEQ ID NO: 2565054 - RNA, 19 nt, Artificial Sequence
  Description of Artificial Sequence: Synthetic oligonucleotide
  Sense strand starting at position 2961 of SEQ ID NO: 1888903
gacaacauguugucaagga

SEQ ID NO: 2565055 - RNA, 19 nt, Artificial Sequence
  Description of Artificial Sequence: Synthetic oligonucleotide
  Antisense strand to SEQ ID NO: 2565054
uccuugacaacauguuguc

SEQ ID NO: 2565056 - RNA, 19 nt, Artificial Sequence
  Description of Artificial Sequence: Synthetic oligonucleotide
  Sense strand starting at position 3006 of SEQ ID NO: 1888903
uaaauuaaugcagguggaa

SEQ ID NO: 2565057 - RNA, 19 nt, Artificial Sequence
  Description of Artificial Sequence: Synthetic oligonucleotide
  Antisense strand to SEQ ID NO: 2565056
uuccaccugcauuaauuua

SEQ ID NO: 2565058 - RNA, 19 nt, Artificial Sequence
  Description of Artificial Sequence: Synthetic oligonucleotide
  Sense strand starting at position 3090 of SEQ ID NO: 1888903
ggaugugcugauugauuag

SEQ ID NO: 2565059 - RNA, 19 nt, Artificial Sequence
  Description of Artificial Sequence: Synthetic oligonucleotide
  Antisense strand to SEQ ID NO: 2565058
cuaaucaaucagcacaucc

SEQ ID NO: 2565060 - RNA, 19 nt, Artificial Sequence
  Description of Artificial Sequence: Synthetic oligonucleotide
  Sense strand starting at position 3520 of SEQ ID NO: 1888903
gaaggagcccagcauguuu

SEQ ID NO: 2565061 - RNA, 19 nt, Artificial Sequence
  Description of Artificial Sequence: Synthetic oligonucleotide
  Antisense strand to SEQ ID NO: 2565060
aaacaugcugggcuccuuc

SEQ ID NO: 2565062 - RNA, 19 nt, Artificial Sequence
  Description of Artificial Sequence: Synthetic oligonucleotide
  Sense strand starting at position 3640 of SEQ ID NO: 1888903
caucaauggucauccugga

SEQ ID NO: 2565063 - RNA, 19 nt, Artificial Sequence
  Description of Artificial Sequence: Synthetic oligonucleotide
  Antisense strand to SEQ ID NO: 2565062
uccaggaugaccauugaug

SEQ ID NO: 2565064 - RNA, 19 nt, Artificial Sequence
  Description of Artificial Sequence: Synthetic oligonucleotide
  Sense strand starting at position 1397 of SEQ ID NO: 1888904
agggacuuccgcuagcaga

SEQ ID NO: 2565065 - RNA, 19 nt, Artificial Sequence
  Description of Artificial Sequence: Synthetic oligonucleotide
  Antisense strand to SEQ ID NO: 2565064
ucugcuagcggaagucccu

SEQ ID NO: 2565066 - RNA, 19 nt, Artificial Sequence
  Description of Artificial Sequence: Synthetic oligonucleotide
  Sense strand starting at position 1647 of SEQ ID NO: 1888904
gggaggguguauucuugga

SEQ ID NO: 2565067 - RNA, 19 nt, Artificial Sequence
  Description of Artificial Sequence: Synthetic oligonucleotide
  Antisense strand to SEQ ID NO: 2565066
uccaagaauacacccuccc

SEQ ID NO: 2565068 - RNA, 19 nt, Artificial Sequence
  Description of Artificial Sequence: Synthetic oligonucleotide
  Sense strand starting at position 1649 of SEQ ID NO: 1888904
gaggguguauucuuggaag

SEQ ID NO: 2565069 - RNA, 19 nt, Artificial Sequence
  Description of Artificial Sequence: Synthetic oligonucleotide
  Antisense strand to SEQ ID NO: 2565068
cuuccaagaauacacccuc

SEQ ID NO: 2565070 - RNA, 19 nt, Artificial Sequence
  Description of Artificial Sequence: Synthetic oligonucleotide
  Sense strand starting at position 1651 of SEQ ID NO: 1888904
ggguguauucuuggaagga

SEQ ID NO: 2565071 - RNA, 19 nt, Artificial Sequence
  Description of Artificial Sequence: Synthetic oligonucleotide
  Antisense strand to SEQ ID NO: 2565070
uccuuccaagaauacaccc

SEQ ID NO: 2565072 - RNA, 19 nt, Artificial Sequence
  Description of Artificial Sequence: Synthetic oligonucleotide
  Sense strand starting at position 1655 of SEQ ID NO: 1888904
guauucuuggaaggaguca

SEQ ID NO: 2565073 - RNA, 19 nt, Artificial Sequence
  Description of Artificial Sequence: Synthetic oligonucleotide
  Antisense strand to SEQ ID NO: 2565072
ugacuccuuccaagaauac

SEQ ID NO: 2565074 - RNA, 19 nt, Artificial Sequence
  Description of Artificial Sequence: Synthetic oligonucleotide
  Sense strand starting at position 1740 of SEQ ID NO: 1888904
gaaggcauuuguguguaua

SEQ ID NO: 2565075 - RNA, 19 nt, Artificial Sequence
  Description of Artificial Sequence: Synthetic oligonucleotide
  Antisense strand to SEQ ID NO: 2565074
uauacacacaaaugccuuc

SEQ ID NO: 2565076 - RNA, 19 nt, Artificial Sequence
  Description of Artificial Sequence: Synthetic oligonucleotide
  Sense strand starting at position 1741 of SEQ ID NO: 1888904
aaggcauuuguguguauac

SEQ ID NO: 2565077 - RNA, 19 nt, Artificial Sequence
  Description of Artificial Sequence: Synthetic oligonucleotide
  Antisense strand to SEQ ID NO: 2565076
guauacacacaaaugccuu

SEQ ID NO: 2565078 - RNA, 19 nt, Artificial Sequence
  Description of Artificial Sequence: Synthetic oligonucleotide
  Sense strand starting at position 1742 of SEQ ID NO: 1888904
aggcauuuguguguauacu

SEQ ID NO: 2565079 - RNA, 19 nt, Artificial Sequence
  Description of Artificial Sequence: Synthetic oligonucleotide
  Antisense strand to SEQ ID NO: 2565078
aguauacacacaaaugccu

SEQ ID NO: 2565080 - RNA, 19 nt, Artificial Sequence
  Description of Artificial Sequence: Synthetic oligonucleotide
  Sense strand starting at position 1743 of SEQ ID NO: 1888904
ggcauuuguguguauacua

SEQ ID NO: 2565081 - RNA, 19 nt, Artificial Sequence
  Description of Artificial Sequence: Synthetic oligonucleotide
  Antisense strand to SEQ ID NO: 2565080
uaguauacacacaaaugcc

SEQ ID NO: 2565082 - RNA, 19 nt, Artificial Sequence
  Description of Artificial Sequence: Synthetic oligonucleotide
  Sense strand starting at position 1776 of SEQ ID NO: 1888904
ccauguaggacccggauaa

SEQ ID NO: 2565083 - RNA, 19 nt, Artificial Sequence
  Description of Artificial Sequence: Synthetic oligonucleotide
  Antisense strand to SEQ ID NO: 2565082
uuauccggguccuacaugg

SEQ ID NO: 2565084 - RNA, 19 nt, Artificial Sequence
  Description of Artificial Sequence: Synthetic oligonucleotide
  Sense strand starting at position 1777 of SEQ ID NO: 1888904
cauguaggacccggauaau

SEQ ID NO: 2565085 - RNA, 19 nt, Artificial Sequence
  Description of Artificial Sequence: Synthetic oligonucleotide
  Antisense strand to SEQ ID NO: 2565084
auuauccggguccuacaug

SEQ ID NO: 2565086 - RNA, 19 nt, Artificial Sequence
  Description of Artificial Sequence: Synthetic oligonucleotide
  Sense strand starting at position 1805 of SEQ ID NO: 1888904
gcagaugugcuggaugaug

SEQ ID NO: 2565087 - RNA, 19 nt, Artificial Sequence
  Description of Artificial Sequence: Synthetic oligonucleotide
  Antisense strand to SEQ ID NO: 2565086
caucauccagcacaucugc

SEQ ID NO: 2565088 - RNA, 19 nt, Artificial Sequence
  Description of Artificial Sequence: Synthetic oligonucleotide
  Sense strand starting at position 1883 of SEQ ID NO: 1888904
gguagauauaugcacgaua

SEQ ID NO: 2565089 - RNA, 19 nt, Artificial Sequence
  Description of Artificial Sequence: Synthetic oligonucleotide
  Antisense strand to SEQ ID NO: 2565088
uaucgugcauauaucuacc

SEQ ID NO: 2565090 - RNA, 19 nt, Artificial Sequence
  Description of Artificial Sequence: Synthetic oligonucleotide
  Sense strand starting at position 1885 of SEQ ID NO: 1888904
uagauauaugcacgauaua

SEQ ID NO: 2565091 - RNA, 19 nt, Artificial Sequence
  Description of Artificial Sequence: Synthetic oligonucleotide
  Antisense strand to SEQ ID NO: 2565090
uauaucgugcauauaucua

SEQ ID NO: 2565092 - RNA, 19 nt, Artificial Sequence
  Description of Artificial Sequence: Synthetic oligonucleotide
  Sense strand starting at position 1886 of SEQ ID NO: 1888904
agauauaugcacgauauau

SEQ ID NO: 2565093 - RNA, 19 nt, Artificial Sequence
  Description of Artificial Sequence: Synthetic oligonucleotide
  Antisense strand to SEQ ID NO: 2565092
auauaucgugcauauaucu

SEQ ID NO: 2565094 - RNA, 19 nt, Artificial Sequence
  Description of Artificial Sequence: Synthetic oligonucleotide
  Sense strand starting at position 1939 of SEQ ID NO: 1888904
accuauaucgugcauauau

SEQ ID NO: 2565095 - RNA, 19 nt, Artificial Sequence
  Description of Artificial Sequence: Synthetic oligonucleotide
  Antisense strand to SEQ ID NO: 2565094
auauaugcacgauauaggu

SEQ ID NO: 2565096 - RNA, 19 nt, Artificial Sequence
  Description of Artificial Sequence: Synthetic oligonucleotide
  Sense strand starting at position 2131 of SEQ ID NO: 1888904
ggaacuaaaguaugccuua

SEQ ID NO: 2565097 - RNA, 19 nt, Artificial Sequence
  Description of Artificial Sequence: Synthetic oligonucleotide
  Antisense strand to SEQ ID NO: 2565096
uaaggcauacuuuaguucc

SEQ ID NO: 2565098 - RNA, 19 nt, Artificial Sequence
  Description of Artificial Sequence: Synthetic oligonucleotide
  Sense strand starting at position 2136 of SEQ ID NO: 1888904
uaaaguaugccuuaaggcu

SEQ ID NO: 2565099 - RNA, 19 nt, Artificial Sequence
  Description of Artificial Sequence: Synthetic oligonucleotide
  Antisense strand to SEQ ID NO: 2565098
agccuuaaggcauacuuua

SEQ ID NO: 2565100 - RNA, 19 nt, Artificial Sequence
  Description of Artificial Sequence: Synthetic oligonucleotide
  Sense strand starting at position 2187 of SEQ ID NO: 1888904
uuuaaaggugaccguugaa

SEQ ID NO: 2565101 - RNA, 19 nt, Artificial Sequence
  Description of Artificial Sequence: Synthetic oligonucleotide
  Antisense strand to SEQ ID NO: 2565100
uucaacggucaccuuuaaa

SEQ ID NO: 2565102 - RNA, 19 nt, Artificial Sequence
  Description of Artificial Sequence: Synthetic oligonucleotide
  Sense strand starting at position 2206 of SEQ ID NO: 1888904
gggcuuugcagacagaaug

SEQ ID NO: 2565103 - RNA, 19 nt, Artificial Sequence
  Description of Artificial Sequence: Synthetic oligonucleotide
  Antisense strand to SEQ ID NO: 2565102
cauucugucugcaaagccc

SEQ ID NO: 2565104 - RNA, 19 nt, Artificial Sequence
  Description of Artificial Sequence: Synthetic oligonucleotide
  Sense strand starting at position 2259 of SEQ ID NO: 1888904
ucagauuggcuccaagguu

SEQ ID NO: 2565105 - RNA, 19 nt, Artificial Sequence
  Description of Artificial Sequence: Synthetic oligonucleotide
  Antisense strand to SEQ ID NO: 2565104
aaccuuggagccaaucuga

SEQ ID NO: 2565106 - RNA, 19 nt, Artificial Sequence
  Description of Artificial Sequence: Synthetic oligonucleotide
  Sense strand starting at position 2432 of SEQ ID NO: 1888904
agaccuguuucucccugaa

SEQ ID NO: 2565107 - RNA, 19 nt, Artificial Sequence
  Description of Artificial Sequence: Synthetic oligonucleotide
  Antisense strand to SEQ ID NO: 2565106
uucagggagaaacaggucu

SEQ ID NO: 2565108 - RNA, 19 nt, Artificial Sequence
  Description of Artificial Sequence: Synthetic oligonucleotide
  Sense strand starting at position 2546 of SEQ ID NO: 1888904
aagguauuaguuuaagcaa

SEQ ID NO: 2565109 - RNA, 19 nt, Artificial Sequence
  Description of Artificial Sequence: Synthetic oligonucleotide
  Antisense strand to SEQ ID NO: 2565108
uugcuuaaacuaauaccuu

SEQ ID NO: 2565110 - RNA, 19 nt, Artificial Sequence
  Description of Artificial Sequence: Synthetic oligonucleotide
  Sense strand starting at position 2618 of SEQ ID NO: 1888904
cccucauaggguugugaga

SEQ ID NO: 2565111 - RNA, 19 nt, Artificial Sequence
  Description of Artificial Sequence: Synthetic oligonucleotide
  Antisense strand to SEQ ID NO: 2565110
ucucacaacccuaugaggg

SEQ ID NO: 2565112 - RNA, 19 nt, Artificial Sequence
  Description of Artificial Sequence: Synthetic oligonucleotide
  Sense strand starting at position 2774 of SEQ ID NO: 1888904
agguguucuuaacugaacu

SEQ ID NO: 2565113 - RNA, 19 nt, Artificial Sequence
  Description of Artificial Sequence: Synthetic oligonucleotide
  Antisense strand to SEQ ID NO: 2565112
aguucaguuaagaacaccu

SEQ ID NO: 2565114 - RNA, 19 nt, Artificial Sequence
  Description of Artificial Sequence: Synthetic oligonucleotide
  Sense strand starting at position 2818 of SEQ ID NO: 1888904
gccugucuugcugaaauuu

SEQ ID NO: 2565115 - RNA, 19 nt, Artificial Sequence
  Description of Artificial Sequence: Synthetic oligonucleotide
  Antisense strand to SEQ ID NO: 2565114
aaauuucagcaagacaggc

SEQ ID NO: 2565116 - RNA, 19 nt, Artificial Sequence
  Description of Artificial Sequence: Synthetic oligonucleotide
  Sense strand starting at position 2862 of SEQ ID NO: 1888904
ccuccuguuggguaaguua

SEQ ID NO: 2565117 - RNA, 19 nt, Artificial Sequence
  Description of Artificial Sequence: Synthetic oligonucleotide
  Antisense strand to SEQ ID NO: 2565116
uaacuuacccaacaggagg

SEQ ID NO: 2565118 - RNA, 19 nt, Artificial Sequence
  Description of Artificial Sequence: Synthetic oligonucleotide
  Sense strand starting at position 2869 of SEQ ID NO: 1888904
uuggguaaguuagcaauaa

SEQ ID NO: 2565119 - RNA, 19 nt, Artificial Sequence
  Description of Artificial Sequence: Synthetic oligonucleotide
  Antisense strand to SEQ ID NO: 2565118
uuauugcuaacuuacccaa

SEQ ID NO: 2565120 - RNA, 19 nt, Artificial Sequence
  Description of Artificial Sequence: Synthetic oligonucleotide
  Sense strand starting at position 2873 of SEQ ID NO: 1888904
guaaguuagcaauaaauca

SEQ ID NO: 2565121 - RNA, 19 nt, Artificial Sequence
  Description of Artificial Sequence: Synthetic oligonucleotide
  Antisense strand to SEQ ID NO: 2565120
ugauuuauugcuaacuuac

SEQ ID NO: 2565122 - RNA, 19 nt, Artificial Sequence
  Description of Artificial Sequence: Synthetic oligonucleotide
  Sense strand starting at position 2948 of SEQ ID NO: 1888904
cuccguuugggauaaccuu

SEQ ID NO: 2565123 - RNA, 19 nt, Artificial Sequence
  Description of Artificial Sequence: Synthetic oligonucleotide
  Antisense strand to SEQ ID NO: 2565122
aagguuaucccaaacggag

SEQ ID NO: 2565124 - RNA, 19 nt, Artificial Sequence
  Description of Artificial Sequence: Synthetic oligonucleotide
  Sense strand starting at position 3044 of SEQ ID NO: 1888904
caguuucugguccauugau

SEQ ID NO: 2565125 - RNA, 19 nt, Artificial Sequence
  Description of Artificial Sequence: Synthetic oligonucleotide
  Antisense strand to SEQ ID NO: 2565124
aucaauggaccagaaacug

SEQ ID NO: 2565126 - RNA, 19 nt, Artificial Sequence
  Description of Artificial Sequence: Synthetic oligonucleotide
  Sense strand starting at position 3057 of SEQ ID NO: 1888904
auugauaauugcucugaau

SEQ ID NO: 2565127 - RNA, 19 nt, Artificial Sequence
  Description of Artificial Sequence: Synthetic oligonucleotide
  Antisense strand to SEQ ID NO: 2565126
auucagagcaauuaucaau

SEQ ID NO: 2565128 - RNA, 19 nt, Artificial Sequence
  Description of Artificial Sequence: Synthetic oligonucleotide
  Sense strand starting at position 3059 of SEQ ID NO: 1888904
ugauaauugcucugaauug

SEQ ID NO: 2565129 - RNA, 19 nt, Artificial Sequence
  Description of Artificial Sequence: Synthetic oligonucleotide
  Antisense strand to SEQ ID NO: 2565128
caauucagagcaauuauca

SEQ ID NO: 2565130 - RNA, 19 nt, Artificial Sequence
  Description of Artificial Sequence: Synthetic oligonucleotide
  Sense strand starting at position 3409 of SEQ ID NO: 1888904
ugugcuccucuauaaugaa

SEQ ID NO: 2565131 - RNA, 19 nt, Artificial Sequence
  Description of Artificial Sequence: Synthetic oligonucleotide
  Antisense strand to SEQ ID NO: 2565130
uucauuauagaggagcaca

SEQ ID NO: 2565132 - RNA, 19 nt, Artificial Sequence
  Description of Artificial Sequence: Synthetic oligonucleotide
  Sense strand starting at position 3718 of SEQ ID NO: 1888904
uaauauuugugcgcauguu

SEQ ID NO: 2565133 - RNA, 19 nt, Artificial Sequence
  Description of Artificial Sequence: Synthetic oligonucleotide
  Antisense strand to SEQ ID NO: 2565132
aacaugcgcacaaauauua

SEQ ID NO: 2565134 - RNA, 19 nt, Artificial Sequence
  Description of Artificial Sequence: Synthetic oligonucleotide
  Sense strand starting at position 3730 of SEQ ID NO: 1888904
gcauguucccuaugaacau

SEQ ID NO: 2565135 - RNA, 19 nt, Artificial Sequence
  Description of Artificial Sequence: Synthetic oligonucleotide
  Antisense strand to SEQ ID NO: 2565134
auguucauagggaacaugc

SEQ ID NO: 2565136 - RNA, 19 nt, Artificial Sequence
  Description of Artificial Sequence: Synthetic oligonucleotide
  Sense strand starting at position 3751 of SEQ ID NO: 1888904
gcaugcauuucucuaggau

SEQ ID NO: 2565137 - RNA, 19 nt, Artificial Sequence
  Description of Artificial Sequence: Synthetic oligonucleotide
  Antisense strand to SEQ ID NO: 2565136
auccuagagaaaugcaugc

SEQ ID NO: 2565138 - RNA, 19 nt, Artificial Sequence
  Description of Artificial Sequence: Synthetic oligonucleotide
  Sense strand starting at position 3802 of SEQ ID NO: 1888904
gcauguauauguuuagaua

SEQ ID NO: 2565139 - RNA, 19 nt, Artificial Sequence
  Description of Artificial Sequence: Synthetic oligonucleotide
  Antisense strand to SEQ ID NO: 2565138
uaucuaaacauauacaugc

SEQ ID NO: 2565140 - RNA, 19 nt, Artificial Sequence
  Description of Artificial Sequence: Synthetic oligonucleotide
  Sense strand starting at position 3803 of SEQ ID NO: 1888904
cauguauauguuuagauag

SEQ ID NO: 2565141 - RNA, 19 nt, Artificial Sequence
  Description of Artificial Sequence: Synthetic oligonucleotide
  Antisense strand to SEQ ID NO: 2565140
cuaucuaaacauauacaug

SEQ ID NO: 2565142 - RNA, 19 nt, Artificial Sequence
  Description of Artificial Sequence: Synthetic oligonucleotide
  Sense strand starting at position 3943 of SEQ ID NO: 1888904
auucuaguggcugaauguu

SEQ ID NO: 2565143 - RNA, 19 nt, Artificial Sequence
  Description of Artificial Sequence: Synthetic oligonucleotide
  Antisense strand to SEQ ID NO: 2565142
aacauucagccacuagaau

SEQ ID NO: 2565144 - RNA, 19 nt, Artificial Sequence
  Description of Artificial Sequence: Synthetic oligonucleotide
  Sense strand starting at position 88 of SEQ ID NO: 1888905
uugguugagaccugagaau

SEQ ID NO: 2565145 - RNA, 19 nt, Artificial Sequence
  Description of Artificial Sequence: Synthetic oligonucleotide
  Antisense strand to SEQ ID NO: 2565144
auucucaggucucaaccaa

SEQ ID NO: 2565146 - RNA, 19 nt, Artificial Sequence
  Description of Artificial Sequence: Synthetic oligonucleotide
  Sense strand starting at position 101 of SEQ ID NO: 1888905
gagaaucuguaucccaagu

SEQ ID NO: 2565147 - RNA, 19 nt, Artificial Sequence
  Description of Artificial Sequence: Synthetic oligonucleotide
  Antisense strand to SEQ ID NO: 2565146
acuugggauacagauucuc

SEQ ID NO: 2565148 - RNA, 19 nt, Artificial Sequence
  Description of Artificial Sequence: Synthetic oligonucleotide
  Sense strand starting at position 117 of SEQ ID NO: 1888905
agugacucugcugaggauu

SEQ ID NO: 2565149 - RNA, 19 nt, Artificial Sequence
  Description of Artificial Sequence: Synthetic oligonucleotide
  Antisense strand to SEQ ID NO: 2565148
aauccucagcagagucacu

SEQ ID NO: 2565150 - RNA, 19 nt, Artificial Sequence
  Description of Artificial Sequence: Synthetic oligonucleotide
  Sense strand starting at position 125 of SEQ ID NO: 1888905
ugcugaggauuaucagaga

SEQ ID NO: 2565151 - RNA, 19 nt, Artificial Sequence
  Description of Artificial Sequence: Synthetic oligonucleotide
  Antisense strand to SEQ ID NO: 2565150
ucucugauaauccucagca

SEQ ID NO: 2565152 - RNA, 19 nt, Artificial Sequence
  Description of Artificial Sequence: Synthetic oligonucleotide
  Sense strand starting at position 316 of SEQ ID NO: 1888905
ugccaugagucuucucaga

SEQ ID NO: 2565153 - RNA, 19 nt, Artificial Sequence
  Description of Artificial Sequence: Synthetic oligonucleotide
  Antisense strand to SEQ ID NO: 2565152
ucugagaagacucauggca

SEQ ID NO: 2565154 - RNA, 19 nt, Artificial Sequence
  Description of Artificial Sequence: Synthetic oligonucleotide
  Sense strand starting at position 318 of SEQ ID NO: 1888905
ccaugagucuucucagaaa

SEQ ID NO: 2565155 - RNA, 19 nt, Artificial Sequence
  Description of Artificial Sequence: Synthetic oligonucleotide
  Antisense strand to SEQ ID NO: 2565154
uuucugagaagacucaugg

SEQ ID NO: 2565156 - RNA, 19 nt, Artificial Sequence
  Description of Artificial Sequence: Synthetic oligonucleotide
  Sense strand starting at position 335 of SEQ ID NO: 1888905
aacuacgucaggugauaga

SEQ ID NO: 2565157 - RNA, 19 nt, Artificial Sequence
  Description of Artificial Sequence: Synthetic oligonucleotide
  Antisense strand to SEQ ID NO: 2565156
ucuaucaccugacguaguu

SEQ ID NO: 2565158 - RNA, 19 nt, Artificial Sequence
  Description of Artificial Sequence: Synthetic oligonucleotide
  Sense strand starting at position 353 of SEQ ID NO: 1888905
agguccucuccauaagagu

SEQ ID NO: 2565159 - RNA, 19 nt, Artificial Sequence
  Description of Artificial Sequence: Synthetic oligonucleotide
  Antisense strand to SEQ ID NO: 2565158
acucuuauggagaggaccu

SEQ ID NO: 2565160 - RNA, 19 nt, Artificial Sequence
  Description of Artificial Sequence: Synthetic oligonucleotide
  Sense strand starting at position 476 of SEQ ID NO: 1888905
gggaaauuguucugauuua

SEQ ID NO: 2565161 - RNA, 19 nt, Artificial Sequence
  Description of Artificial Sequence: Synthetic oligonucleotide
  Antisense strand to SEQ ID NO: 2565160
uaaaucagaacaauuuccc

SEQ ID NO: 2565162 - RNA, 19 nt, Artificial Sequence
  Description of Artificial Sequence: Synthetic oligonucleotide
  Sense strand starting at position 477 of SEQ ID NO: 1888905
ggaaauuguucugauuuag

SEQ ID NO: 2565163 - RNA, 19 nt, Artificial Sequence
  Description of Artificial Sequence: Synthetic oligonucleotide
  Antisense strand to SEQ ID NO: 2565162
cuaaaucagaacaauuucc

SEQ ID NO: 2565164 - RNA, 19 nt, Artificial Sequence
  Description of Artificial Sequence: Synthetic oligonucleotide
  Sense strand starting at position 555 of SEQ ID NO: 1888905
uucuguagugguuaauauu

SEQ ID NO: 2565165 - RNA, 19 nt, Artificial Sequence
  Description of Artificial Sequence: Synthetic oligonucleotide
  Antisense strand to SEQ ID NO: 2565164
aauauuaaccacuacagaa

SEQ ID NO: 2565166 - RNA, 19 nt, Artificial Sequence
  Description of Artificial Sequence: Synthetic oligonucleotide
  Sense strand starting at position 564 of SEQ ID NO: 1888905
gguuaauauuagguggcaa

SEQ ID NO: 2565167 - RNA, 19 nt, Artificial Sequence
  Description of Artificial Sequence: Synthetic oligonucleotide
  Antisense strand to SEQ ID NO: 2565166
uugccaccuaauauuaacc

SEQ ID NO: 2565168 - RNA, 19 nt, Artificial Sequence
  Description of Artificial Sequence: Synthetic oligonucleotide
  Sense strand starting at position 565 of SEQ ID NO: 1888905
guuaauauuagguggcaac

SEQ ID NO: 2565169 - RNA, 19 nt, Artificial Sequence
  Description of Artificial Sequence: Synthetic oligonucleotide
  Antisense strand to SEQ ID NO: 2565168
guugccaccuaauauuaac

SEQ ID NO: 2565170 - RNA, 19 nt, Artificial Sequence
  Description of Artificial Sequence: Synthetic oligonucleotide
  Sense strand starting at position 566 of SEQ ID NO: 1888905
uuaauauuagguggcaacu

SEQ ID NO: 2565171 - RNA, 19 nt, Artificial Sequence
  Description of Artificial Sequence: Synthetic oligonucleotide
  Antisense strand to SEQ ID NO: 2565170
aguugccaccuaauauuaa

SEQ ID NO: 2565172 - RNA, 19 nt, Artificial Sequence
  Description of Artificial Sequence: Synthetic oligonucleotide
  Sense strand starting at position 582 of SEQ ID NO: 1888905
acuugauuggauugcagaa

SEQ ID NO: 2565173 - RNA, 19 nt, Artificial Sequence
  Description of Artificial Sequence: Synthetic oligonucleotide
  Antisense strand to SEQ ID NO: 2565172
uucugcaauccaaucaagu

SEQ ID NO: 2565174 - RNA, 19 nt, Artificial Sequence
  Description of Artificial Sequence: Synthetic oligonucleotide
  Sense strand starting at position 782 of SEQ ID NO: 1888905
ggagucuucugcccuugga

SEQ ID NO: 2565175 - RNA, 19 nt, Artificial Sequence
  Description of Artificial Sequence: Synthetic oligonucleotide
  Antisense strand to SEQ ID NO: 2565174
uccaagggcagaagacucc

SEQ ID NO: 2565176 - RNA, 19 nt, Artificial Sequence
  Description of Artificial Sequence: Synthetic oligonucleotide
  Sense strand starting at position 986 of SEQ ID NO: 1888905
uugacuuggguucauguga

SEQ ID NO: 2565177 - RNA, 19 nt, Artificial Sequence
  Description of Artificial Sequence: Synthetic oligonucleotide
  Antisense strand to SEQ ID NO: 2565176
ucacaugaacccaagucaa

SEQ ID NO: 2565178 - RNA, 19 nt, Artificial Sequence
  Description of Artificial Sequence: Synthetic oligonucleotide
  Sense strand starting at position 1143 of SEQ ID NO: 1888905
cagcuucgggacugguuaa

SEQ ID NO: 2565179 - RNA, 19 nt, Artificial Sequence
  Description of Artificial Sequence: Synthetic oligonucleotide
  Antisense strand to SEQ ID NO: 2565178
uuaaccagucccgaagcug

SEQ ID NO: 2565180 - RNA, 19 nt, Artificial Sequence
  Description of Artificial Sequence: Synthetic oligonucleotide
  Sense strand starting at position 1144 of SEQ ID NO: 1888905
agcuucgggacugguuaau

SEQ ID NO: 2565181 - RNA, 19 nt, Artificial Sequence
  Description of Artificial Sequence: Synthetic oligonucleotide
  Antisense strand to SEQ ID NO: 2565180
auuaaccagucccgaagcu

SEQ ID NO: 2565182 - RNA, 19 nt, Artificial Sequence
  Description of Artificial Sequence: Synthetic oligonucleotide
  Sense strand starting at position 1211 of SEQ ID NO: 1888905
agggaaagauuggaacuuu

SEQ ID NO: 2565183 - RNA, 19 nt, Artificial Sequence
  Description of Artificial Sequence: Synthetic oligonucleotide
  Antisense strand to SEQ ID NO: 2565182
aaaguuccaaucuuucccu

SEQ ID NO: 2565184 - RNA, 19 nt, Artificial Sequence
  Description of Artificial Sequence: Synthetic oligonucleotide
  Sense strand starting at position 1499 of SEQ ID NO: 1888905
acagcauaugcaugagcaa

SEQ ID NO: 2565185 - RNA, 19 nt, Artificial Sequence
  Description of Artificial Sequence: Synthetic oligonucleotide
  Antisense strand to SEQ ID NO: 2565184
uugcucaugcauaugcugu

SEQ ID NO: 2565186 - RNA, 19 nt, Artificial Sequence
  Description of Artificial Sequence: Synthetic oligonucleotide
  Sense strand starting at position 1517 of SEQ ID NO: 1888905
aagggaugaucugaaacug

SEQ ID NO: 2565187 - RNA, 19 nt, Artificial Sequence
  Description of Artificial Sequence: Synthetic oligonucleotide
  Antisense strand to SEQ ID NO: 2565186
caguuucagaucaucccuu

SEQ ID NO: 2565188 - RNA, 19 nt, Artificial Sequence
  Description of Artificial Sequence: Synthetic oligonucleotide
  Sense strand starting at position 1663 of SEQ ID NO: 1888905
agaggagccgaaugcuaau

SEQ ID NO: 2565189 - RNA, 19 nt, Artificial Sequence
  Description of Artificial Sequence: Synthetic oligonucleotide
  Antisense strand to SEQ ID NO: 2565188
auuagcauucggcuccucu

SEQ ID NO: 2565190 - RNA, 19 nt, Artificial Sequence
  Description of Artificial Sequence: Synthetic oligonucleotide
  Sense strand starting at position 1676 of SEQ ID NO: 1888905
gcuaauagccaagacauau

SEQ ID NO: 2565191 - RNA, 19 nt, Artificial Sequence
  Description of Artificial Sequence: Synthetic oligonucleotide
  Antisense strand to SEQ ID NO: 2565190
auaugucuuggcuauuagc

SEQ ID NO: 2565192 - RNA, 19 nt, Artificial Sequence
  Description of Artificial Sequence: Synthetic oligonucleotide
  Sense strand starting at position 1688 of SEQ ID NO: 1888905
gacauauuguaucuuggaa

SEQ ID NO: 2565193 - RNA, 19 nt, Artificial Sequence
  Description of Artificial Sequence: Synthetic oligonucleotide
  Antisense strand to SEQ ID NO: 2565192
uuccaagauacaauauguc

SEQ ID NO: 2565194 - RNA, 19 nt, Artificial Sequence
  Description of Artificial Sequence: Synthetic oligonucleotide
  Sense strand starting at position 1908 of SEQ ID NO: 1888905
ggauuugugucacugucua

SEQ ID NO: 2565195 - RNA, 19 nt, Artificial Sequence
  Description of Artificial Sequence: Synthetic oligonucleotide
  Antisense strand to SEQ ID NO: 2565194
uagacagugacacaaaucc

SEQ ID NO: 2565196 - RNA, 19 nt, Artificial Sequence
  Description of Artificial Sequence: Synthetic oligonucleotide
  Sense strand starting at position 1986 of SEQ ID NO: 1888905
acaugcaauuuagacauga

SEQ ID NO: 2565197 - RNA, 19 nt, Artificial Sequence
  Description of Artificial Sequence: Synthetic oligonucleotide
  Antisense strand to SEQ ID NO: 2565196
ucaugucuaaauugcaugu

SEQ ID NO: 2565198 - RNA, 19 nt, Artificial Sequence
  Description of Artificial Sequence: Synthetic oligonucleotide
  Sense strand starting at position 2057 of SEQ ID NO: 1888905
aggagaucugguuguguag

SEQ ID NO: 2565199 - RNA, 19 nt, Artificial Sequence
  Description of Artificial Sequence: Synthetic oligonucleotide
  Antisense strand to SEQ ID NO: 2565198
cuacacaaccagaucuccu

SEQ ID NO: 2565200 - RNA, 19 nt, Artificial Sequence
  Description of Artificial Sequence: Synthetic oligonucleotide
  Sense strand starting at position 2352 of SEQ ID NO: 1888905
agcugugacuucuucucaa

SEQ ID NO: 2565201 - RNA, 19 nt, Artificial Sequence
  Description of Artificial Sequence: Synthetic oligonucleotide
  Antisense strand to SEQ ID NO: 2565200
uugagaagaagucacagcu

SEQ ID NO: 2565202 - RNA, 19 nt, Artificial Sequence
  Description of Artificial Sequence: Synthetic oligonucleotide
  Sense strand starting at position 2355 of SEQ ID NO: 1888905
ugugacuucuucucaagua

SEQ ID NO: 2565203 - RNA, 19 nt, Artificial Sequence
  Description of Artificial Sequence: Synthetic oligonucleotide
  Antisense strand to SEQ ID NO: 2565202
uacuugagaagaagucaca

SEQ ID NO: 2565204 - RNA, 19 nt, Artificial Sequence
  Description of Artificial Sequence: Synthetic oligonucleotide
  Sense strand starting at position 2452 of SEQ ID NO: 1888905
uuuaacuaguuucuaggau

SEQ ID NO: 2565205 - RNA, 19 nt, Artificial Sequence
  Description of Artificial Sequence: Synthetic oligonucleotide
  Antisense strand to SEQ ID NO: 2565204
auccuagaaacuaguuaaa

SEQ ID NO: 2565206 - RNA, 19 nt, Artificial Sequence
  Description of Artificial Sequence: Synthetic oligonucleotide
  Sense strand starting at position 2930 of SEQ ID NO: 1888905
gggaaagucaauuguauuc

SEQ ID NO: 2565207 - RNA, 19 nt, Artificial Sequence
  Description of Artificial Sequence: Synthetic oligonucleotide
  Antisense strand to SEQ ID NO: 2565206
gaauacaauugacuuuccc

SEQ ID NO: 2565208 - RNA, 19 nt, Artificial Sequence
  Description of Artificial Sequence: Synthetic oligonucleotide
  Sense strand starting at position 2935 of SEQ ID NO: 1888905
agucaauuguauuccuacu

SEQ ID NO: 2565209 - RNA, 19 nt, Artificial Sequence
  Description of Artificial Sequence: Synthetic oligonucleotide
  Antisense strand to SEQ ID NO: 2565208
aguaggaauacaauugacu

SEQ ID NO: 2565210 - RNA, 19 nt, Artificial Sequence
  Description of Artificial Sequence: Synthetic oligonucleotide
  Sense strand starting at position 3005 of SEQ ID NO: 1888905
uguugugucccucaaugau

SEQ ID NO: 2565211 - RNA, 19 nt, Artificial Sequence
  Description of Artificial Sequence: Synthetic oligonucleotide
  Antisense strand to SEQ ID NO: 2565210
aucauugagggacacaaca

SEQ ID NO: 2565212 - RNA, 19 nt, Artificial Sequence
  Description of Artificial Sequence: Synthetic oligonucleotide
  Sense strand starting at position 3069 of SEQ ID NO: 1888905
uugugaagugacuauauca

SEQ ID NO: 2565213 - RNA, 19 nt, Artificial Sequence
  Description of Artificial Sequence: Synthetic oligonucleotide
  Antisense strand to SEQ ID NO: 2565212
ugauauagucacuucacaa

SEQ ID NO: 2565214 - RNA, 19 nt, Artificial Sequence
  Description of Artificial Sequence: Synthetic oligonucleotide
  Sense strand starting at position 3138 of SEQ ID NO: 1888905
gagagaguuuguuuguccu

SEQ ID NO: 2565215 - RNA, 19 nt, Artificial Sequence
  Description of Artificial Sequence: Synthetic oligonucleotide
  Antisense strand to SEQ ID NO: 2565214
aggacaaacaaacucucuc

SEQ ID NO: 2565216 - RNA, 19 nt, Artificial Sequence
  Description of Artificial Sequence: Synthetic oligonucleotide
  Sense strand starting at position 3150 of SEQ ID NO: 1888905
uuguccuuccaugauguga

SEQ ID NO: 2565217 - RNA, 19 nt, Artificial Sequence
  Description of Artificial Sequence: Synthetic oligonucleotide
  Antisense strand to SEQ ID NO: 2565216
ucacaucauggaaggacaa

SEQ ID NO: 2565218 - RNA, 19 nt, Artificial Sequence
  Description of Artificial Sequence: Synthetic oligonucleotide
  Sense strand starting at position 3596 of SEQ ID NO: 1888905
ggagaauaagcaggcauca

SEQ ID NO: 2565219 - RNA, 19 nt, Artificial Sequence
  Description of Artificial Sequence: Synthetic oligonucleotide
  Antisense strand to SEQ ID NO: 2565218
ugaugccugcuuauucucc

SEQ ID NO: 2565220 - RNA, 19 nt, Artificial Sequence
  Description of Artificial Sequence: Synthetic oligonucleotide
  Sense strand starting at position 3715 of SEQ ID NO: 1888905
aaugucaagugccuuugaa

SEQ ID NO: 2565221 - RNA, 19 nt, Artificial Sequence
  Description of Artificial Sequence: Synthetic oligonucleotide
  Antisense strand to SEQ ID NO: 2565220
uucaaaggcacuugacauu

SEQ ID NO: 2565222 - RNA, 19 nt, Artificial Sequence
  Description of Artificial Sequence: Synthetic oligonucleotide
  Sense strand starting at position 3890 of SEQ ID NO: 1888905
ggucuccauuaaucagaaa

SEQ ID NO: 2565223 - RNA, 19 nt, Artificial Sequence
  Description of Artificial Sequence: Synthetic oligonucleotide
  Antisense strand to SEQ ID NO: 2565222
uuucugauuaauggagacc

SEQ ID NO: 2565224 - RNA, 19 nt, Artificial Sequence
  Description of Artificial Sequence: Synthetic oligonucleotide
  Sense strand starting at position 170 of SEQ ID NO: 1888906
ccuccagaucugugacaca

SEQ ID NO: 2565225 - RNA, 19 nt, Artificial Sequence
  Description of Artificial Sequence: Synthetic oligonucleotide
  Antisense strand to SEQ ID NO: 2565224
ugugucacagaucuggagg

SEQ ID NO: 2565226 - RNA, 19 nt, Artificial Sequence
  Description of Artificial Sequence: Synthetic oligonucleotide
  Sense strand starting at position 214 of SEQ ID NO: 1888906
uagucugugguauauuacu

SEQ ID NO: 2565227 - RNA, 19 nt, Artificial Sequence
  Description of Artificial Sequence: Synthetic oligonucleotide
  Antisense strand to SEQ ID NO: 2565226
aguaauauaccacagacua

SEQ ID NO: 2565228 - RNA, 19 nt, Artificial Sequence
  Description of Artificial Sequence: Synthetic oligonucleotide
  Sense strand starting at position 272 of SEQ ID NO: 1888906
cuguauuugaggcgcaagu

SEQ ID NO: 2565229 - RNA, 19 nt, Artificial Sequence
  Description of Artificial Sequence: Synthetic oligonucleotide
  Antisense strand to SEQ ID NO: 2565228
acuugcgccucaaauacag

SEQ ID NO: 2565230 - RNA, 19 nt, Artificial Sequence
  Description of Artificial Sequence: Synthetic oligonucleotide
  Sense strand starting at position 331 of SEQ ID NO: 1888906
cguguccucaaagggaaau

SEQ ID NO: 2565231 - RNA, 19 nt, Artificial Sequence
  Description of Artificial Sequence: Synthetic oligonucleotide
  Antisense strand to SEQ ID NO: 2565230
auuucccuuugaggacacg

SEQ ID NO: 2565232 - RNA, 19 nt, Artificial Sequence
  Description of Artificial Sequence: Synthetic oligonucleotide
  Sense strand starting at position 344 of SEQ ID NO: 1888906
ggaaaucacgauugcauua

SEQ ID NO: 2565233 - RNA, 19 nt, Artificial Sequence
  Description of Artificial Sequence: Synthetic oligonucleotide
  Antisense strand to SEQ ID NO: 2565232
uaaugcaaucgugauuucc

SEQ ID NO: 2565234 - RNA, 19 nt, Artificial Sequence
  Description of Artificial Sequence: Synthetic oligonucleotide
  Sense strand starting at position 519 of SEQ ID NO: 1888906
agauaauaauucuugcuga

SEQ ID NO: 2565235 - RNA, 19 nt, Artificial Sequence
  Description of Artificial Sequence: Synthetic oligonucleotide
  Antisense strand to SEQ ID NO: 2565234
ucagcaagaauuauuaucu

SEQ ID NO: 2565236 - RNA, 19 nt, Artificial Sequence
  Description of Artificial Sequence: Synthetic oligonucleotide
  Sense strand starting at position 819 of SEQ ID NO: 1888906
uuccuuaaacgugaauaua

SEQ ID NO: 2565237 - RNA, 19 nt, Artificial Sequence
  Description of Artificial Sequence: Synthetic oligonucleotide
  Antisense strand to SEQ ID NO: 2565236
uauauucacguuuaaggaa

SEQ ID NO: 2565238 - RNA, 19 nt, Artificial Sequence
  Description of Artificial Sequence: Synthetic oligonucleotide
  Sense strand starting at position 1006 of SEQ ID NO: 1888906
gcaagacauguugacuguu

SEQ ID NO: 2565239 - RNA, 19 nt, Artificial Sequence
  Description of Artificial Sequence: Synthetic oligonucleotide
  Antisense strand to SEQ ID NO: 2565238
aacagucaacaugucuugc

SEQ ID NO: 2565240 - RNA, 19 nt, Artificial Sequence
  Description of Artificial Sequence: Synthetic oligonucleotide
  Sense strand starting at position 1268 of SEQ ID NO: 1888906
ggccauuugucugcaaccu

SEQ ID NO: 2565241 - RNA, 19 nt, Artificial Sequence
  Description of Artificial Sequence: Synthetic oligonucleotide
  Antisense strand to SEQ ID NO: 2565240
agguugcagacaaauggcc

SEQ ID NO: 2565242 - RNA, 19 nt, Artificial Sequence
  Description of Artificial Sequence: Synthetic oligonucleotide
  Sense strand starting at position 1281 of SEQ ID NO: 1888906
caaccugauggcuagaagu

SEQ ID NO: 2565243 - RNA, 19 nt, Artificial Sequence
  Description of Artificial Sequence: Synthetic oligonucleotide
  Antisense strand to SEQ ID NO: 2565242
acuucuagccaucagguug

SEQ ID NO: 2565244 - RNA, 19 nt, Artificial Sequence
  Description of Artificial Sequence: Synthetic oligonucleotide
  Sense strand starting at position 1298 of SEQ ID NO: 1888906
gugauaccacccugagcau

SEQ ID NO: 2565245 - RNA, 19 nt, Artificial Sequence
  Description of Artificial Sequence: Synthetic oligonucleotide
  Antisense strand to SEQ ID NO: 2565244
augcucagggugguaucac

SEQ ID NO: 2565246 - RNA, 19 nt, Artificial Sequence
  Description of Artificial Sequence: Synthetic oligonucleotide
  Sense strand starting at position 1479 of SEQ ID NO: 1888906
gaggaauugaugcggguaa

SEQ ID NO: 2565247 - RNA, 19 nt, Artificial Sequence
  Description of Artificial Sequence: Synthetic oligonucleotide
  Antisense strand to SEQ ID NO: 2565246
uuacccgcaucaauuccuc

SEQ ID NO: 2565248 - RNA, 19 nt, Artificial Sequence
  Description of Artificial Sequence: Synthetic oligonucleotide
  Sense strand starting at position 1481 of SEQ ID NO: 1888906
ggaauugaugcggguaaac

SEQ ID NO: 2565249 - RNA, 19 nt, Artificial Sequence
  Description of Artificial Sequence: Synthetic oligonucleotide
  Antisense strand to SEQ ID NO: 2565248
guuuacccgcaucaauucc

SEQ ID NO: 2565250 - RNA, 19 nt, Artificial Sequence
  Description of Artificial Sequence: Synthetic oligonucleotide
  Sense strand starting at position 1483 of SEQ ID NO: 1888906
aauugaugcggguaaacau

SEQ ID NO: 2565251 - RNA, 19 nt, Artificial Sequence
  Description of Artificial Sequence: Synthetic oligonucleotide
  Antisense strand to SEQ ID NO: 2565250
auguuuacccgcaucaauu

SEQ ID NO: 2565252 - RNA, 19 nt, Artificial Sequence
  Description of Artificial Sequence: Synthetic oligonucleotide
  Sense strand starting at position 1797 of SEQ ID NO: 1888906
gacuucuucugggugggua

SEQ ID NO: 2565253 - RNA, 19 nt, Artificial Sequence
  Description of Artificial Sequence: Synthetic oligonucleotide
  Antisense strand to SEQ ID NO: 2565252
uacccacccagaagaaguc

SEQ ID NO: 2565254 - RNA, 19 nt, Artificial Sequence
  Description of Artificial Sequence: Synthetic oligonucleotide
  Sense strand starting at position 2363 of SEQ ID NO: 1888906
uggcgaugucaggagacau

SEQ ID NO: 2565255 - RNA, 19 nt, Artificial Sequence
  Description of Artificial Sequence: Synthetic oligonucleotide
  Antisense strand to SEQ ID NO: 2565254
augucuccugacaucgcca

SEQ ID NO: 2565256 - RNA, 19 nt, Artificial Sequence
  Description of Artificial Sequence: Synthetic oligonucleotide
  Sense strand starting at position 2432 of SEQ ID NO: 1888906
aguccagaccagugauacu

SEQ ID NO: 2565257 - RNA, 19 nt, Artificial Sequence
  Description of Artificial Sequence: Synthetic oligonucleotide
  Antisense strand to SEQ ID NO: 2565256
aguaucacuggucuggacu

SEQ ID NO: 2565258 - RNA, 19 nt, Artificial Sequence
  Description of Artificial Sequence: Synthetic oligonucleotide
  Sense strand starting at position 2470 of SEQ ID NO: 1888906
acaggagugcccuaugcaa

SEQ ID NO: 2565259 - RNA, 19 nt, Artificial Sequence
  Description of Artificial Sequence: Synthetic oligonucleotide
  Antisense strand to SEQ ID NO: 2565258
uugcauagggcacuccugu

SEQ ID NO: 2565260 - RNA, 19 nt, Artificial Sequence
  Description of Artificial Sequence: Synthetic oligonucleotide
  Sense strand starting at position 2496 of SEQ ID NO: 1888906
gaauuaucccgcgccguca

SEQ ID NO: 2565261 - RNA, 19 nt, Artificial Sequence
  Description of Artificial Sequence: Synthetic oligonucleotide
  Antisense strand to SEQ ID NO: 2565260
ugacggcgcgggauaauuc

SEQ ID NO: 2565262 - RNA, 19 nt, Artificial Sequence
  Description of Artificial Sequence: Synthetic oligonucleotide
  Sense strand starting at position 2576 of SEQ ID NO: 1888906
ggacaucaccugugggcua

SEQ ID NO: 2565263 - RNA, 19 nt, Artificial Sequence
  Description of Artificial Sequence: Synthetic oligonucleotide
  Antisense strand to SEQ ID NO: 2565262
uagcccacaggugaugucc

SEQ ID NO: 2565264 - RNA, 19 nt, Artificial Sequence
  Description of Artificial Sequence: Synthetic oligonucleotide
  Sense strand starting at position 2656 of SEQ ID NO: 1888906
gcgcgugaacguuugagaa

SEQ ID NO: 2565265 - RNA, 19 nt, Artificial Sequence
  Description of Artificial Sequence: Synthetic oligonucleotide
  Antisense strand to SEQ ID NO: 2565264
uucucaaacguucacgcgc

SEQ ID NO: 2565266 - RNA, 19 nt, Artificial Sequence
  Description of Artificial Sequence: Synthetic oligonucleotide
  Sense strand starting at position 2683 of SEQ ID NO: 1888906
cuaucaauccgaggcauua

SEQ ID NO: 2565267 - RNA, 19 nt, Artificial Sequence
  Description of Artificial Sequence: Synthetic oligonucleotide
  Antisense strand to SEQ ID NO: 2565266
uaaugccucggauugauag

SEQ ID NO: 2565268 - RNA, 19 nt, Artificial Sequence
  Description of Artificial Sequence: Synthetic oligonucleotide
  Sense strand starting at position 2699 of SEQ ID NO: 1888906
uuaagaaacccuuggcagu

SEQ ID NO: 2565269 - RNA, 19 nt, Artificial Sequence
  Description of Artificial Sequence: Synthetic oligonucleotide
  Antisense strand to SEQ ID NO: 2565268
acugccaaggguuucuuaa

SEQ ID NO: 2565270 - RNA, 19 nt, Artificial Sequence
  Description of Artificial Sequence: Synthetic oligonucleotide
  Sense strand starting at position 2730 of SEQ ID NO: 1888906
ucagucuuagcacauguga

SEQ ID NO: 2565271 - RNA, 19 nt, Artificial Sequence
  Description of Artificial Sequence: Synthetic oligonucleotide
  Antisense strand to SEQ ID NO: 2565270
ucacaugugcuaagacuga

SEQ ID NO: 2565272 - RNA, 19 nt, Artificial Sequence
  Description of Artificial Sequence: Synthetic oligonucleotide
  Sense strand starting at position 2819 of SEQ ID NO: 1888906
uaugcugagcucuaccgaa

SEQ ID NO: 2565273 - RNA, 19 nt, Artificial Sequence
  Description of Artificial Sequence: Synthetic oligonucleotide
  Antisense strand to SEQ ID NO: 2565272
uucgguagagcucagcaua

SEQ ID NO: 2565274 - RNA, 19 nt, Artificial Sequence
  Description of Artificial Sequence: Synthetic oligonucleotide
  Sense strand starting at position 2969 of SEQ ID NO: 1888906
gcaaguuaggaggaaguau

SEQ ID NO: 2565275 - RNA, 19 nt, Artificial Sequence
  Description of Artificial Sequence: Synthetic oligonucleotide
  Antisense strand to SEQ ID NO: 2565274
auacuuccuccuaacuugc

SEQ ID NO: 2565276 - RNA, 19 nt, Artificial Sequence
  Description of Artificial Sequence: Synthetic oligonucleotide
  Sense strand starting at position 2981 of SEQ ID NO: 1888906
gaaguauuugcaugucacu

SEQ ID NO: 2565277 - RNA, 19 nt, Artificial Sequence
  Description of Artificial Sequence: Synthetic oligonucleotide
  Antisense strand to SEQ ID NO: 2565276
agugacaugcaaauacuuc

SEQ ID NO: 2565278 - RNA, 19 nt, Artificial Sequence
  Description of Artificial Sequence: Synthetic oligonucleotide
  Sense strand starting at position 3091 of SEQ ID NO: 1888906
acgauucuggauugaucca

SEQ ID NO: 2565279 - RNA, 19 nt, Artificial Sequence
  Description of Artificial Sequence: Synthetic oligonucleotide
  Antisense strand to SEQ ID NO: 2565278
uggaucaauccagaaucgu

SEQ ID NO: 2565280 - RNA, 19 nt, Artificial Sequence
  Description of Artificial Sequence: Synthetic oligonucleotide
  Sense strand starting at position 3121 of SEQ ID NO: 1888906
aaaugauguugagcucauc

SEQ ID NO: 2565281 - RNA, 19 nt, Artificial Sequence
  Description of Artificial Sequence: Synthetic oligonucleotide
  Antisense strand to SEQ ID NO: 2565280
gaugagcucaacaucauuu

SEQ ID NO: 2565282 - RNA, 19 nt, Artificial Sequence
  Description of Artificial Sequence: Synthetic oligonucleotide
  Sense strand starting at position 3124 of SEQ ID NO: 1888906
ugauguugagcucaucuua

SEQ ID NO: 2565283 - RNA, 19 nt, Artificial Sequence
  Description of Artificial Sequence: Synthetic oligonucleotide
  Antisense strand to SEQ ID NO: 2565282
uaagaugagcucaacauca

SEQ ID NO: 2565284 - RNA, 19 nt, Artificial Sequence
  Description of Artificial Sequence: Synthetic oligonucleotide
  Sense strand starting at position 3170 of SEQ ID NO: 1888906
caucauauugcuggguaau

SEQ ID NO: 2565285 - RNA, 19 nt, Artificial Sequence
  Description of Artificial Sequence: Synthetic oligonucleotide
  Antisense strand to SEQ ID NO: 2565284
auuacccagcaauaugaug

SEQ ID NO: 2565286 - RNA, 19 nt, Artificial Sequence
  Description of Artificial Sequence: Synthetic oligonucleotide
  Sense strand starting at position 3171 of SEQ ID NO: 1888906
aucauauugcuggguaauu

SEQ ID NO: 2565287 - RNA, 19 nt, Artificial Sequence
  Description of Artificial Sequence: Synthetic oligonucleotide
  Antisense strand to SEQ ID NO: 2565286
aauuacccagcaauaugau

SEQ ID NO: 2565288 - RNA, 19 nt, Artificial Sequence
  Description of Artificial Sequence: Synthetic oligonucleotide
  Sense strand starting at position 3181 of SEQ ID NO: 1888906
uggguaauucccuagcagu

SEQ ID NO: 2565289 - RNA, 19 nt, Artificial Sequence
  Description of Artificial Sequence: Synthetic oligonucleotide
  Antisense strand to SEQ ID NO: 2565288
acugcuagggaauuaccca

SEQ ID NO: 2565290 - RNA, 19 nt, Artificial Sequence
  Description of Artificial Sequence: Synthetic oligonucleotide
  Sense strand starting at position 3366 of SEQ ID NO: 1888906
gugggauacauagguauag

SEQ ID NO: 2565291 - RNA, 19 nt, Artificial Sequence
  Description of Artificial Sequence: Synthetic oligonucleotide
  Antisense strand to SEQ ID NO: 2565290
cuauaccuauguaucccac

SEQ ID NO: 2565292 - RNA, 19 nt, Artificial Sequence
  Description of Artificial Sequence: Synthetic oligonucleotide
  Sense strand starting at position 3367 of SEQ ID NO: 1888906
ugggauacauagguauagu

SEQ ID NO: 2565293 - RNA, 19 nt, Artificial Sequence
  Description of Artificial Sequence: Synthetic oligonucleotide
  Antisense strand to SEQ ID NO: 2565292
acuauaccuauguauccca

SEQ ID NO: 2565294 - RNA, 19 nt, Artificial Sequence
  Description of Artificial Sequence: Synthetic oligonucleotide
  Sense strand starting at position 3376 of SEQ ID NO: 1888906
uagguauaguuuguagaca

SEQ ID NO: 2565295 - RNA, 19 nt, Artificial Sequence
  Description of Artificial Sequence: Synthetic oligonucleotide
  Antisense strand to SEQ ID NO: 2565294
ugucuacaaacuauaccua

SEQ ID NO: 2565296 - RNA, 19 nt, Artificial Sequence
  Description of Artificial Sequence: Synthetic oligonucleotide
  Sense strand starting at position 3464 of SEQ ID NO: 1888906
cagagaaccuguucuggga

SEQ ID NO: 2565297 - RNA, 19 nt, Artificial Sequence
  Description of Artificial Sequence: Synthetic oligonucleotide
  Antisense strand to SEQ ID NO: 2565296
ucccagaacagguucucug

SEQ ID NO: 2565298 - RNA, 19 nt, Artificial Sequence
  Description of Artificial Sequence: Synthetic oligonucleotide
  Sense strand starting at position 3556 of SEQ ID NO: 1888906
gccuaauucugauucuaga

SEQ ID NO: 2565299 - RNA, 19 nt, Artificial Sequence
  Description of Artificial Sequence: Synthetic oligonucleotide
  Antisense strand to SEQ ID NO: 2565298
ucuagaaucagaauuaggc

SEQ ID NO: 2565300 - RNA, 19 nt, Artificial Sequence
  Description of Artificial Sequence: Synthetic oligonucleotide
  Sense strand starting at position 3765 of SEQ ID NO: 1888906
ucuucuuugaggugguaag

SEQ ID NO: 2565301 - RNA, 19 nt, Artificial Sequence
  Description of Artificial Sequence: Synthetic oligonucleotide
  Antisense strand to SEQ ID NO: 2565300
cuuaccaccucaaagaaga

SEQ ID NO: 2565302 - RNA, 19 nt, Artificial Sequence
  Description of Artificial Sequence: Synthetic oligonucleotide
  Sense strand starting at position 3800 of SEQ ID NO: 1888906
uuggaaauauaccuuuguu

SEQ ID NO: 2565303 - RNA, 19 nt, Artificial Sequence
  Description of Artificial Sequence: Synthetic oligonucleotide
  Antisense strand to SEQ ID NO: 2565302
aacaaagguauauuuccaa

SEQ ID NO: 2565304 - RNA, 19 nt, Artificial Sequence
  Description of Artificial Sequence: Synthetic oligonucleotide
  Sense strand starting at position 187 of SEQ ID NO: 1888907
cuauuaucugugcaagaca

SEQ ID NO: 2565305 - RNA, 19 nt, Artificial Sequence
  Description of Artificial Sequence: Synthetic oligonucleotide
  Antisense strand to SEQ ID NO: 2565304
ugucuugcacagauaauag

SEQ ID NO: 2565306 - RNA, 19 nt, Artificial Sequence
  Description of Artificial Sequence: Synthetic oligonucleotide
  Sense strand starting at position 190 of SEQ ID NO: 1888907
uuaucugugcaagacagaa

SEQ ID NO: 2565307 - RNA, 19 nt, Artificial Sequence
  Description of Artificial Sequence: Synthetic oligonucleotide
  Antisense strand to SEQ ID NO: 2565306
uucugucuugcacagauaa

SEQ ID NO: 2565308 - RNA, 19 nt, Artificial Sequence
  Description of Artificial Sequence: Synthetic oligonucleotide
  Sense strand starting at position 480 of SEQ ID NO: 1888907
guguacauuucgguagaga

SEQ ID NO: 2565309 - RNA, 19 nt, Artificial Sequence
  Description of Artificial Sequence: Synthetic oligonucleotide
  Antisense strand to SEQ ID NO: 2565308
ucucuaccgaaauguacac

SEQ ID NO: 2565310 - RNA, 19 nt, Artificial Sequence
  Description of Artificial Sequence: Synthetic oligonucleotide
  Sense strand starting at position 530 of SEQ ID NO: 1888907
aggucuuggcaagacugua

SEQ ID NO: 2565311 - RNA, 19 nt, Artificial Sequence
  Description of Artificial Sequence: Synthetic oligonucleotide
  Antisense strand to SEQ ID NO: 2565310
uacagucuugccaagaccu

SEQ ID NO: 2565312 - RNA, 19 nt, Artificial Sequence
  Description of Artificial Sequence: Synthetic oligonucleotide
  Sense strand starting at position 647 of SEQ ID NO: 1888907
uccacauuccauuaagugu

SEQ ID NO: 2565313 - RNA, 19 nt, Artificial Sequence
  Description of Artificial Sequence: Synthetic oligonucleotide
  Antisense strand to SEQ ID NO: 2565312
acacuuaauggaaugugga

SEQ ID NO: 2565314 - RNA, 19 nt, Artificial Sequence
  Description of Artificial Sequence: Synthetic oligonucleotide
  Sense strand starting at position 887 of SEQ ID NO: 1888907
gcuggaacuucuuuaagac

SEQ ID NO: 2565315 - RNA, 19 nt, Artificial Sequence
  Description of Artificial Sequence: Synthetic oligonucleotide
  Antisense strand to SEQ ID NO: 2565314
gucuuaaagaaguuccagc

SEQ ID NO: 2565316 - RNA, 19 nt, Artificial Sequence
  Description of Artificial Sequence: Synthetic oligonucleotide
  Sense strand starting at position 896 of SEQ ID NO: 1888907
ucuuuaagaccaggaagua

SEQ ID NO: 2565317 - RNA, 19 nt, Artificial Sequence
  Description of Artificial Sequence: Synthetic oligonucleotide
  Antisense strand to SEQ ID NO: 2565316
uacuuccuggucuuaaaga

SEQ ID NO: 2565318 - RNA, 19 nt, Artificial Sequence
  Description of Artificial Sequence: Synthetic oligonucleotide
  Sense strand starting at position 940 of SEQ ID NO: 1888907
ucaauaauucuggguccuu

SEQ ID NO: 2565319 - RNA, 19 nt, Artificial Sequence
  Description of Artificial Sequence: Synthetic oligonucleotide
  Antisense strand to SEQ ID NO: 2565318
aaggacccagaauuauuga

SEQ ID NO: 2565320 - RNA, 19 nt, Artificial Sequence
  Description of Artificial Sequence: Synthetic oligonucleotide
  Sense strand starting at position 959 of SEQ ID NO: 1888907
gguccaccacugugauaug

SEQ ID NO: 2565321 - RNA, 19 nt, Artificial Sequence
  Description of Artificial Sequence: Synthetic oligonucleotide
  Antisense strand to SEQ ID NO: 2565320
cauaucacagugguggacc

SEQ ID NO: 2565322 - RNA, 19 nt, Artificial Sequence
  Description of Artificial Sequence: Synthetic oligonucleotide
  Sense strand starting at position 1046 of SEQ ID NO: 1888907
acuugaaagugcuuugaca

SEQ ID NO: 2565323 - RNA, 19 nt, Artificial Sequence
  Description of Artificial Sequence: Synthetic oligonucleotide
  Antisense strand to SEQ ID NO: 2565322
ugucaaagcacuuucaagu

SEQ ID NO: 2565324 - RNA, 19 nt, Artificial Sequence
  Description of Artificial Sequence: Synthetic oligonucleotide
  Sense strand starting at position 1090 of SEQ ID NO: 1888907
uuaugcuucucacuuagag

SEQ ID NO: 2565325 - RNA, 19 nt, Artificial Sequence
  Description of Artificial Sequence: Synthetic oligonucleotide
  Antisense strand to SEQ ID NO: 2565324
cucuaagugagaagcauaa

SEQ ID NO: 2565326 - RNA, 19 nt, Artificial Sequence
  Description of Artificial Sequence: Synthetic oligonucleotide
  Sense strand starting at position 1150 of SEQ ID NO: 1888907
aguagaauuacugggaguc

SEQ ID NO: 2565327 - RNA, 19 nt, Artificial Sequence
  Description of Artificial Sequence: Synthetic oligonucleotide
  Antisense strand to SEQ ID NO: 2565326
gacucccaguaauucuacu

SEQ ID NO: 2565328 - RNA, 19 nt, Artificial Sequence
  Description of Artificial Sequence: Synthetic oligonucleotide
  Sense strand starting at position 1466 of SEQ ID NO: 1888907
ucaggucgaguuuaauaga

SEQ ID NO: 2565329 - RNA, 19 nt, Artificial Sequence
  Description of Artificial Sequence: Synthetic oligonucleotide
  Antisense strand to SEQ ID NO: 2565328
ucuauuaaacucgaccuga

SEQ ID NO: 2565330 - RNA, 19 nt, Artificial Sequence
  Description of Artificial Sequence: Synthetic oligonucleotide
  Sense strand starting at position 1611 of SEQ ID NO: 1888907
uggugugcuggaagauguu

SEQ ID NO: 2565331 - RNA, 19 nt, Artificial Sequence
  Description of Artificial Sequence: Synthetic oligonucleotide
  Antisense strand to SEQ ID NO: 2565330
aacaucuuccagcacacca

SEQ ID NO: 2565332 - RNA, 19 nt, Artificial Sequence
  Description of Artificial Sequence: Synthetic oligonucleotide
  Sense strand starting at position 1746 of SEQ ID NO: 1888907
gggagagauaugugcaauc

SEQ ID NO: 2565333 - RNA, 19 nt, Artificial Sequence
  Description of Artificial Sequence: Synthetic oligonucleotide
  Antisense strand to SEQ ID NO: 2565332
gauugcacauaucucuccc

SEQ ID NO: 2565334 - RNA, 19 nt, Artificial Sequence
  Description of Artificial Sequence: Synthetic oligonucleotide
  Sense strand starting at position 1803 of SEQ ID NO: 1888907
acuggaauuucugagaagu

SEQ ID NO: 2565335 - RNA, 19 nt, Artificial Sequence
  Description of Artificial Sequence: Synthetic oligonucleotide
  Antisense strand to SEQ ID NO: 2565334
acuucucagaaauuccagu

SEQ ID NO: 2565336 - RNA, 19 nt, Artificial Sequence
  Description of Artificial Sequence: Synthetic oligonucleotide
  Sense strand starting at position 1805 of SEQ ID NO: 1888907
uggaauuucugagaagucu

SEQ ID NO: 2565337 - RNA, 19 nt, Artificial Sequence
  Description of Artificial Sequence: Synthetic oligonucleotide
  Antisense strand to SEQ ID NO: 2565336
agacuucucagaaauucca

SEQ ID NO: 2565338 - RNA, 19 nt, Artificial Sequence
  Description of Artificial Sequence: Synthetic oligonucleotide
  Sense strand starting at position 1830 of SEQ ID NO: 1888907
cggguuuaggaaugaaaua

SEQ ID NO: 2565339 - RNA, 19 nt, Artificial Sequence
  Description of Artificial Sequence: Synthetic oligonucleotide
  Antisense strand to SEQ ID NO: 2565338
uauuucauuccuaaacccg

SEQ ID NO: 2565340 - RNA, 19 nt, Artificial Sequence
  Description of Artificial Sequence: Synthetic oligonucleotide
  Sense strand starting at position 1850 of SEQ ID NO: 1888907
cuuucuggcccacaagaau

SEQ ID NO: 2565341 - RNA, 19 nt, Artificial Sequence
  Description of Artificial Sequence: Synthetic oligonucleotide
  Antisense strand to SEQ ID NO: 2565340
auucuugugggccagaaag

SEQ ID NO: 2565342 - RNA, 19 nt, Artificial Sequence
  Description of Artificial Sequence: Synthetic oligonucleotide
  Sense strand starting at position 2002 of SEQ ID NO: 1888907
ggagaaguuacuuggucca

SEQ ID NO: 2565343 - RNA, 19 nt, Artificial Sequence
  Description of Artificial Sequence: Synthetic oligonucleotide
  Antisense strand to SEQ ID NO: 2565342
uggaccaaguaacuucucc

SEQ ID NO: 2565344 - RNA, 19 nt, Artificial Sequence
  Description of Artificial Sequence: Synthetic oligonucleotide
  Sense strand starting at position 2005 of SEQ ID NO: 1888907
gaaguuacuugguccauca

SEQ ID NO: 2565345 - RNA, 19 nt, Artificial Sequence
  Description of Artificial Sequence: Synthetic oligonucleotide
  Antisense strand to SEQ ID NO: 2565344
ugauggaccaaguaacuuc

SEQ ID NO: 2565346 - RNA, 19 nt, Artificial Sequence
  Description of Artificial Sequence: Synthetic oligonucleotide
  Sense strand starting at position 2148 of SEQ ID NO: 1888907
uccaguuuccaaggugaua

SEQ ID NO: 2565347 - RNA, 19 nt, Artificial Sequence
  Description of Artificial Sequence: Synthetic oligonucleotide
  Antisense strand to SEQ ID NO: 2565346
uaucaccuuggaaacugga

SEQ ID NO: 2565348 - RNA, 19 nt, Artificial Sequence
  Description of Artificial Sequence: Synthetic oligonucleotide
  Sense strand starting at position 2384 of SEQ ID NO: 1888907
ggcagcaacucaucaggaa

SEQ ID NO: 2565349 - RNA, 19 nt, Artificial Sequence
  Description of Artificial Sequence: Synthetic oligonucleotide
  Antisense strand to SEQ ID NO: 2565348
uuccugaugaguugcugcc

SEQ ID NO: 2565350 - RNA, 19 nt, Artificial Sequence
  Description of Artificial Sequence: Synthetic oligonucleotide
  Sense strand starting at position 2385 of SEQ ID NO: 1888907
gcagcaacucaucaggaaa

SEQ ID NO: 2565351 - RNA, 19 nt, Artificial Sequence
  Description of Artificial Sequence: Synthetic oligonucleotide
  Antisense strand to SEQ ID NO: 2565350
uuuccugaugaguugcugc

SEQ ID NO: 2565352 - RNA, 19 nt, Artificial Sequence
  Description of Artificial Sequence: Synthetic oligonucleotide
  Sense strand starting at position 2501 of SEQ ID NO: 1888907
uggagcaauuccuccacau

SEQ ID NO: 2565353 - RNA, 19 nt, Artificial Sequence
  Description of Artificial Sequence: Synthetic oligonucleotide
  Antisense strand to SEQ ID NO: 2565352
auguggaggaauugcucca

SEQ ID NO: 2565354 - RNA, 19 nt, Artificial Sequence
  Description of Artificial Sequence: Synthetic oligonucleotide
  Sense strand starting at position 2577 of SEQ ID NO: 1888907
ggaauauguaacggacauu

SEQ ID NO: 2565355 - RNA, 19 nt, Artificial Sequence
  Description of Artificial Sequence: Synthetic oligonucleotide
  Antisense strand to SEQ ID NO: 2565354
aauguccguuacauauucc

SEQ ID NO: 2565356 - RNA, 19 nt, Artificial Sequence
  Description of Artificial Sequence: Synthetic oligonucleotide
  Sense strand starting at position 2904 of SEQ ID NO: 1888907
cugccauaugucgccuauu

SEQ ID NO: 2565357 - RNA, 19 nt, Artificial Sequence
  Description of Artificial Sequence: Synthetic oligonucleotide
  Antisense strand to SEQ ID NO: 2565356
aauaggcgacauauggcag

SEQ ID NO: 2565358 - RNA, 19 nt, Artificial Sequence
  Description of Artificial Sequence: Synthetic oligonucleotide
  Sense strand starting at position 3090 of SEQ ID NO: 1888907
cugguuuauccuuagcaua

SEQ ID NO: 2565359 - RNA, 19 nt, Artificial Sequence
  Description of Artificial Sequence: Synthetic oligonucleotide
  Antisense strand to SEQ ID NO: 2565358
uaugcuaaggauaaaccag

SEQ ID NO: 2565360 - RNA, 19 nt, Artificial Sequence
  Description of Artificial Sequence: Synthetic oligonucleotide
  Sense strand starting at position 3125 of SEQ ID NO: 1888907
ucucuaaagcaaggagauu

SEQ ID NO: 2565361 - RNA, 19 nt, Artificial Sequence
  Description of Artificial Sequence: Synthetic oligonucleotide
  Antisense strand to SEQ ID NO: 2565360
aaucuccuugcuuuagaga

SEQ ID NO: 2565362 - RNA, 19 nt, Artificial Sequence
  Description of Artificial Sequence: Synthetic oligonucleotide
  Sense strand starting at position 3222 of SEQ ID NO: 1888907
uugaguaaaccugguacua

SEQ ID NO: 2565363 - RNA, 19 nt, Artificial Sequence
  Description of Artificial Sequence: Synthetic oligonucleotide
  Antisense strand to SEQ ID NO: 2565362
uaguaccagguuuacucaa

SEQ ID NO: 2565364 - RNA, 19 nt, Artificial Sequence
  Description of Artificial Sequence: Synthetic oligonucleotide
  Sense strand starting at position 3301 of SEQ ID NO: 1888907
accugugaagauugcaaga

SEQ ID NO: 2565365 - RNA, 19 nt, Artificial Sequence
  Description of Artificial Sequence: Synthetic oligonucleotide
  Antisense strand to SEQ ID NO: 2565364
ucuugcaaucuucacaggu

SEQ ID NO: 2565366 - RNA, 19 nt, Artificial Sequence
  Description of Artificial Sequence: Synthetic oligonucleotide
  Sense strand starting at position 3311 of SEQ ID NO: 1888907
auugcaagauuaucuaaag

SEQ ID NO: 2565367 - RNA, 19 nt, Artificial Sequence
  Description of Artificial Sequence: Synthetic oligonucleotide
  Antisense strand to SEQ ID NO: 2565366
cuuuagauaaucuugcaau

SEQ ID NO: 2565368 - RNA, 19 nt, Artificial Sequence
  Description of Artificial Sequence: Synthetic oligonucleotide
  Sense strand starting at position 3312 of SEQ ID NO: 1888907
uugcaagauuaucuaaaga

SEQ ID NO: 2565369 - RNA, 19 nt, Artificial Sequence
  Description of Artificial Sequence: Synthetic oligonucleotide
  Antisense strand to SEQ ID NO: 2565368
ucuuuagauaaucuugcaa

SEQ ID NO: 2565370 - RNA, 19 nt, Artificial Sequence
  Description of Artificial Sequence: Synthetic oligonucleotide
  Sense strand starting at position 3380 of SEQ ID NO: 1888907
ccagaccacucauugugaa

SEQ ID NO: 2565371 - RNA, 19 nt, Artificial Sequence
  Description of Artificial Sequence: Synthetic oligonucleotide
  Antisense strand to SEQ ID NO: 2565370
uucacaaugaguggucugg

SEQ ID NO: 2565372 - RNA, 19 nt, Artificial Sequence
  Description of Artificial Sequence: Synthetic oligonucleotide
  Sense strand starting at position 3410 of SEQ ID NO: 1888907
ugcauaaaccuuugggaag

SEQ ID NO: 2565373 - RNA, 19 nt, Artificial Sequence
  Description of Artificial Sequence: Synthetic oligonucleotide
  Antisense strand to SEQ ID NO: 2565372
cuucccaaagguuuaugca

SEQ ID NO: 2565374 - RNA, 19 nt, Artificial Sequence
  Description of Artificial Sequence: Synthetic oligonucleotide
  Sense strand starting at position 3435 of SEQ ID NO: 1888907
augaauugauuagcugcaa

SEQ ID NO: 2565375 - RNA, 19 nt, Artificial Sequence
  Description of Artificial Sequence: Synthetic oligonucleotide
  Antisense strand to SEQ ID NO: 2565374
uugcagcuaaucaauucau

SEQ ID NO: 2565376 - RNA, 19 nt, Artificial Sequence
  Description of Artificial Sequence: Synthetic oligonucleotide
  Sense strand starting at position 3436 of SEQ ID NO: 1888907
ugaauugauuagcugcaau

SEQ ID NO: 2565377 - RNA, 19 nt, Artificial Sequence
  Description of Artificial Sequence: Synthetic oligonucleotide
  Antisense strand to SEQ ID NO: 2565376
auugcagcuaaucaauuca

SEQ ID NO: 2565378 - RNA, 19 nt, Artificial Sequence
  Description of Artificial Sequence: Synthetic oligonucleotide
  Sense strand starting at position 3647 of SEQ ID NO: 1888907
gagcauuugucccucagcu

SEQ ID NO: 2565379 - RNA, 19 nt, Artificial Sequence
  Description of Artificial Sequence: Synthetic oligonucleotide
  Antisense strand to SEQ ID NO: 2565378
agcugagggacaaaugcuc

SEQ ID NO: 2565380 - RNA, 19 nt, Artificial Sequence
  Description of Artificial Sequence: Synthetic oligonucleotide
  Sense strand starting at position 3875 of SEQ ID NO: 1888907
ggucaugccaacugauaag

SEQ ID NO: 2565381 - RNA, 19 nt, Artificial Sequence
  Description of Artificial Sequence: Synthetic oligonucleotide
  Antisense strand to SEQ ID NO: 2565380
cuuaucaguuggcaugacc

SEQ ID NO: 2565382 - RNA, 19 nt, Artificial Sequence
  Description of Artificial Sequence: Synthetic oligonucleotide
  Sense strand starting at position 3977 of SEQ ID NO: 1888907
cacuuuggucugugaaaua

SEQ ID NO: 2565383 - RNA, 19 nt, Artificial Sequence
  Description of Artificial Sequence: Synthetic oligonucleotide
  Antisense strand to SEQ ID NO: 2565382
uauuucacagaccaaagug

SEQ ID NO: 2565384 - RNA, 19 nt, Artificial Sequence
  Description of Artificial Sequence: Synthetic oligonucleotide
  Sense strand starting at position 495 of SEQ ID NO: 1888908
gaaggauucugggccagga

SEQ ID NO: 2565385 - RNA, 19 nt, Artificial Sequence
  Description of Artificial Sequence: Synthetic oligonucleotide
  Antisense strand to SEQ ID NO: 2565384
uccuggcccagaauccuuc

SEQ ID NO: 2565386 - RNA, 19 nt, Artificial Sequence
  Description of Artificial Sequence: Synthetic oligonucleotide
  Sense strand starting at position 518 of SEQ ID NO: 1888908
gacguccauguuuaaacau

SEQ ID NO: 2565387 - RNA, 19 nt, Artificial Sequence
  Description of Artificial Sequence: Synthetic oligonucleotide
  Antisense strand to SEQ ID NO: 2565386
auguuuaaacauggacguc

SEQ ID NO: 2565388 - RNA, 19 nt, Artificial Sequence
  Description of Artificial Sequence: Synthetic oligonucleotide
  Sense strand starting at position 525 of SEQ ID NO: 1888908
auguuuaaacauggcgaga

SEQ ID NO: 2565389 - RNA, 19 nt, Artificial Sequence
  Description of Artificial Sequence: Synthetic oligonucleotide
  Antisense strand to SEQ ID NO: 2565388
ucucgccauguuuaaacau

SEQ ID NO: 2565390 - RNA, 19 nt, Artificial Sequence
  Description of Artificial Sequence: Synthetic oligonucleotide
  Sense strand starting at position 658 of SEQ ID NO: 1888908
gagucucucccagagauuc

SEQ ID NO: 2565391 - RNA, 19 nt, Artificial Sequence
  Description of Artificial Sequence: Synthetic oligonucleotide
  Antisense strand to SEQ ID NO: 2565390
gaaucucugggagagacuc

SEQ ID NO: 2565392 - RNA, 19 nt, Artificial Sequence
  Description of Artificial Sequence: Synthetic oligonucleotide
  Sense strand starting at position 708 of SEQ ID NO: 1888908
ggaugcucacuugaccuau

SEQ ID NO: 2565393 - RNA, 19 nt, Artificial Sequence
  Description of Artificial Sequence: Synthetic oligonucleotide
  Antisense strand to SEQ ID NO: 2565392
auaggucaagugagcaucc

SEQ ID NO: 2565394 - RNA, 19 nt, Artificial Sequence
  Description of Artificial Sequence: Synthetic oligonucleotide
  Sense strand starting at position 734 of SEQ ID NO: 1888908
gauguucuacaagagcaau

SEQ ID NO: 2565395 - RNA, 19 nt, Artificial Sequence
  Description of Artificial Sequence: Synthetic oligonucleotide
  Antisense strand to SEQ ID NO: 2565394
auugcucuuguagaacauc

SEQ ID NO: 2565396 - RNA, 19 nt, Artificial Sequence
  Description of Artificial Sequence: Synthetic oligonucleotide
  Sense strand starting at position 758 of SEQ ID NO: 1888908
auguaaugagcccaggguu

SEQ ID NO: 2565397 - RNA, 19 nt, Artificial Sequence
  Description of Artificial Sequence: Synthetic oligonucleotide
  Antisense strand to SEQ ID NO: 2565396
aacccugggcucauuacau

SEQ ID NO: 2565398 - RNA, 19 nt, Artificial Sequence
  Description of Artificial Sequence: Synthetic oligonucleotide
  Sense strand starting at position 761 of SEQ ID NO: 1888908
uaaugagcccaggguuaca

SEQ ID NO: 2565399 - RNA, 19 nt, Artificial Sequence
  Description of Artificial Sequence: Synthetic oligonucleotide
  Antisense strand to SEQ ID NO: 2565398
uguaacccugggcucauua

SEQ ID NO: 2565400 - RNA, 19 nt, Artificial Sequence
  Description of Artificial Sequence: Synthetic oligonucleotide
  Sense strand starting at position 1066 of SEQ ID NO: 1888908
gacacuaagguuuggcgaa

SEQ ID NO: 2565401 - RNA, 19 nt, Artificial Sequence
  Description of Artificial Sequence: Synthetic oligonucleotide
  Antisense strand to SEQ ID NO: 2565400
uucgccaaaccuuaguguc

SEQ ID NO: 2565402 - RNA, 19 nt, Artificial Sequence
  Description of Artificial Sequence: Synthetic oligonucleotide
  Sense strand starting at position 1283 of SEQ ID NO: 1888908
gcgcauucccugcuuaagu

SEQ ID NO: 2565403 - RNA, 19 nt, Artificial Sequence
  Description of Artificial Sequence: Synthetic oligonucleotide
  Antisense strand to SEQ ID NO: 2565402
acuuaagcagggaaugcgc

SEQ ID NO: 2565404 - RNA, 19 nt, Artificial Sequence
  Description of Artificial Sequence: Synthetic oligonucleotide
  Sense strand starting at position 1331 of SEQ ID NO: 1888908
cauucccauccgggacaua

SEQ ID NO: 2565405 - RNA, 19 nt, Artificial Sequence
  Description of Artificial Sequence: Synthetic oligonucleotide
  Antisense strand to SEQ ID NO: 2565404
uaugucccggaugggaaug

SEQ ID NO: 2565406 - RNA, 19 nt, Artificial Sequence
  Description of Artificial Sequence: Synthetic oligonucleotide
  Sense strand starting at position 1334 of SEQ ID NO: 1888908
ucccauccgggacauaauu

SEQ ID NO: 2565407 - RNA, 19 nt, Artificial Sequence
  Description of Artificial Sequence: Synthetic oligonucleotide
  Antisense strand to SEQ ID NO: 2565406
aauuaugucccggauggga

SEQ ID NO: 2565408 - RNA, 19 nt, Artificial Sequence
  Description of Artificial Sequence: Synthetic oligonucleotide
  Sense strand starting at position 1433 of SEQ ID NO: 1888908
ccuagaaugcccuggagga

SEQ ID NO: 2565409 - RNA, 19 nt, Artificial Sequence
  Description of Artificial Sequence: Synthetic oligonucleotide
  Antisense strand to SEQ ID NO: 2565408
uccuccagggcauucuagg

SEQ ID NO: 2565410 - RNA, 19 nt, Artificial Sequence
  Description of Artificial Sequence: Synthetic oligonucleotide
  Sense strand starting at position 1446 of SEQ ID NO: 1888908
ggaggagaccuggguucuu

SEQ ID NO: 2565411 - RNA, 19 nt, Artificial Sequence
  Description of Artificial Sequence: Synthetic oligonucleotide
  Antisense strand to SEQ ID NO: 2565410
aagaacccaggucuccucc

SEQ ID NO: 2565412 - RNA, 19 nt, Artificial Sequence
  Description of Artificial Sequence: Synthetic oligonucleotide
  Sense strand starting at position 1456 of SEQ ID NO: 1888908
uggguucuuacugguaaga

SEQ ID NO: 2565413 - RNA, 19 nt, Artificial Sequence
  Description of Artificial Sequence: Synthetic oligonucleotide
  Antisense strand to SEQ ID NO: 2565412
ucuuaccaguaagaaccca

SEQ ID NO: 2565414 - RNA, 19 nt, Artificial Sequence
  Description of Artificial Sequence: Synthetic oligonucleotide
  Sense strand starting at position 1574 of SEQ ID NO: 1888908
aggugcuccauugaauguu

SEQ ID NO: 2565415 - RNA, 19 nt, Artificial Sequence
  Description of Artificial Sequence: Synthetic oligonucleotide
  Antisense strand to SEQ ID NO: 2565414
aacauucaauggagcaccu

SEQ ID NO: 2565416 - RNA, 19 nt, Artificial Sequence
  Description of Artificial Sequence: Synthetic oligonucleotide
  Sense strand starting at position 1622 of SEQ ID NO: 1888908
ggccucacuugagucaaga

SEQ ID NO: 2565417 - RNA, 19 nt, Artificial Sequence
  Description of Artificial Sequence: Synthetic oligonucleotide
  Antisense strand to SEQ ID NO: 2565416
ucuugacucaagugaggcc

SEQ ID NO: 2565418 - RNA, 19 nt, Artificial Sequence
  Description of Artificial Sequence: Synthetic oligonucleotide
  Sense strand starting at position 1633 of SEQ ID NO: 1888908
agucaagaccuuuggagua

SEQ ID NO: 2565419 - RNA, 19 nt, Artificial Sequence
  Description of Artificial Sequence: Synthetic oligonucleotide
  Antisense strand to SEQ ID NO: 2565418
uacuccaaaggucuugacu

SEQ ID NO: 2565420 - RNA, 19 nt, Artificial Sequence
  Description of Artificial Sequence: Synthetic oligonucleotide
  Sense strand starting at position 1828 of SEQ ID NO: 1888908
gaggguaugggccagcaua

SEQ ID NO: 2565421 - RNA, 19 nt, Artificial Sequence
  Description of Artificial Sequence: Synthetic oligonucleotide
  Antisense strand to SEQ ID NO: 2565420
uaugcuggcccauacccuc

SEQ ID NO: 2565422 - RNA, 19 nt, Artificial Sequence
  Description of Artificial Sequence: Synthetic oligonucleotide
  Sense strand starting at position 2023 of SEQ ID NO: 1888908
aggaauguccugcagccau

SEQ ID NO: 2565423 - RNA, 19 nt, Artificial Sequence
  Description of Artificial Sequence: Synthetic oligonucleotide
  Antisense strand to SEQ ID NO: 2565422
auggcugcaggacauuccu

SEQ ID NO: 2565424 - RNA, 19 nt, Artificial Sequence
  Description of Artificial Sequence: Synthetic oligonucleotide
  Sense strand starting at position 2188 of SEQ ID NO: 1888908
gggcauccucacuggacaa

SEQ ID NO: 2565425 - RNA, 19 nt, Artificial Sequence
  Description of Artificial Sequence: Synthetic oligonucleotide
  Antisense strand to SEQ ID NO: 2565424
uuguccagugaggaugccc

SEQ ID NO: 2565426 - RNA, 19 nt, Artificial Sequence
  Description of Artificial Sequence: Synthetic oligonucleotide
  Sense strand starting at position 2215 of SEQ ID NO: 1888908
cugugcuugaggcaaugau

SEQ ID NO: 2565427 - RNA, 19 nt, Artificial Sequence
  Description of Artificial Sequence: Synthetic oligonucleotide
  Antisense strand to SEQ ID NO: 2565426
aucauugccucaagcacag

SEQ ID NO: 2565428 - RNA, 19 nt, Artificial Sequence
  Description of Artificial Sequence: Synthetic oligonucleotide
  Sense strand starting at position 2312 of SEQ ID NO: 1888908
ggcagugauuugucagcug

SEQ ID NO: 2565429 - RNA, 19 nt, Artificial Sequence
  Description of Artificial Sequence: Synthetic oligonucleotide
  Antisense strand to SEQ ID NO: 2565428
cagcugacaaaucacugcc

SEQ ID NO: 2565430 - RNA, 19 nt, Artificial Sequence
  Description of Artificial Sequence: Synthetic oligonucleotide
  Sense strand starting at position 2317 of SEQ ID NO: 1888908
ugauuugucagcuguggga

SEQ ID NO: 2565431 - RNA, 19 nt, Artificial Sequence
  Description of Artificial Sequence: Synthetic oligonucleotide
  Antisense strand to SEQ ID NO: 2565430
ucccacagcugacaaauca

SEQ ID NO: 2565432 - RNA, 19 nt, Artificial Sequence
  Description of Artificial Sequence: Synthetic oligonucleotide
  Sense strand starting at position 2319 of SEQ ID NO: 1888908
auuugucagcugugggaua

SEQ ID NO: 2565433 - RNA, 19 nt, Artificial Sequence
  Description of Artificial Sequence: Synthetic oligonucleotide
  Antisense strand to SEQ ID NO: 2565432
uaucccacagcugacaaau

SEQ ID NO: 2565434 - RNA, 19 nt, Artificial Sequence
  Description of Artificial Sequence: Synthetic oligonucleotide
  Sense strand starting at position 2331 of SEQ ID NO: 1888908
ugggauaauuuauaacuag

SEQ ID NO: 2565435 - RNA, 19 nt, Artificial Sequence
  Description of Artificial Sequence: Synthetic oligonucleotide
  Antisense strand to SEQ ID NO: 2565434
cuaguuauaaauuauccca

SEQ ID NO: 2565436 - RNA, 19 nt, Artificial Sequence
  Description of Artificial Sequence: Synthetic oligonucleotide
  Sense strand starting at position 2397 of SEQ ID NO: 1888908
uaaaguauuggcuggagaa

SEQ ID NO: 2565437 - RNA, 19 nt, Artificial Sequence
  Description of Artificial Sequence: Synthetic oligonucleotide
  Antisense strand to SEQ ID NO: 2565436
uucuccagccaauacuuua

SEQ ID NO: 2565438 - RNA, 19 nt, Artificial Sequence
  Description of Artificial Sequence: Synthetic oligonucleotide
  Sense strand starting at position 2398 of SEQ ID NO: 1888908
aaaguauuggcuggagaaa

SEQ ID NO: 2565439 - RNA, 19 nt, Artificial Sequence
  Description of Artificial Sequence: Synthetic oligonucleotide
  Antisense strand to SEQ ID NO: 2565438
uuucuccagccaauacuuu

SEQ ID NO: 2565440 - RNA, 19 nt, Artificial Sequence
  Description of Artificial Sequence: Synthetic oligonucleotide
  Sense strand starting at position 2423 of SEQ ID NO: 1888908
agagguuacgguugauaau

SEQ ID NO: 2565441 - RNA, 19 nt, Artificial Sequence
  Description of Artificial Sequence: Synthetic oligonucleotide
  Antisense strand to SEQ ID NO: 2565440
auuaucaaccguaaccucu

SEQ ID NO: 2565442 - RNA, 19 nt, Artificial Sequence
  Description of Artificial Sequence: Synthetic oligonucleotide
  Sense strand starting at position 2424 of SEQ ID NO: 1888908
gagguuacgguugauaaug

SEQ ID NO: 2565443 - RNA, 19 nt, Artificial Sequence
  Description of Artificial Sequence: Synthetic oligonucleotide
  Antisense strand to SEQ ID NO: 2565442
cauuaucaaccguaaccuc

SEQ ID NO: 2565444 - RNA, 19 nt, Artificial Sequence
  Description of Artificial Sequence: Synthetic oligonucleotide
  Sense strand starting at position 3062 of SEQ ID NO: 1888908
ggaaaugucacuggguccu

SEQ ID NO: 2565445 - RNA, 19 nt, Artificial Sequence
  Description of Artificial Sequence: Synthetic oligonucleotide
  Antisense strand to SEQ ID NO: 2565444
aggacccagugacauuucc

SEQ ID NO: 2565446 - RNA, 19 nt, Artificial Sequence
  Description of Artificial Sequence: Synthetic oligonucleotide
  Sense strand starting at position 3075 of SEQ ID NO: 1888908
gguccugaaagguaacagu

SEQ ID NO: 2565447 - RNA, 19 nt, Artificial Sequence
  Description of Artificial Sequence: Synthetic oligonucleotide
  Antisense strand to SEQ ID NO: 2565446
acuguuaccuuucaggacc

SEQ ID NO: 2565448 - RNA, 19 nt, Artificial Sequence
  Description of Artificial Sequence: Synthetic oligonucleotide
  Sense strand starting at position 3089 of SEQ ID NO: 1888908
acaguaagccaguaaauca

SEQ ID NO: 2565449 - RNA, 19 nt, Artificial Sequence
  Description of Artificial Sequence: Synthetic oligonucleotide
  Antisense strand to SEQ ID NO: 2565448
ugauuuacuggcuuacugu

SEQ ID NO: 2565450 - RNA, 19 nt, Artificial Sequence
  Description of Artificial Sequence: Synthetic oligonucleotide
  Sense strand starting at position 3100 of SEQ ID NO: 1888908
guaaaucaguguccuggaa

SEQ ID NO: 2565451 - RNA, 19 nt, Artificial Sequence
  Description of Artificial Sequence: Synthetic oligonucleotide
  Antisense strand to SEQ ID NO: 2565450
uuccaggacacugauuuac

SEQ ID NO: 2565452 - RNA, 19 nt, Artificial Sequence
  Description of Artificial Sequence: Synthetic oligonucleotide
  Sense strand starting at position 3104 of SEQ ID NO: 1888908
aucaguguccuggaauggu

SEQ ID NO: 2565453 - RNA, 19 nt, Artificial Sequence
  Description of Artificial Sequence: Synthetic oligonucleotide
  Antisense strand to SEQ ID NO: 2565452
accauuccaggacacugau

SEQ ID NO: 2565454 - RNA, 19 nt, Artificial Sequence
  Description of Artificial Sequence: Synthetic oligonucleotide
  Sense strand starting at position 3268 of SEQ ID NO: 1888908
gauagucacugggcucaga

SEQ ID NO: 2565455 - RNA, 19 nt, Artificial Sequence
  Description of Artificial Sequence: Synthetic oligonucleotide
  Antisense strand to SEQ ID NO: 2565454
ucugagcccagugacuauc

SEQ ID NO: 2565456 - RNA, 19 nt, Artificial Sequence
  Description of Artificial Sequence: Synthetic oligonucleotide
  Sense strand starting at position 3324 of SEQ ID NO: 1888908
ccaggaggucaguguaaca

SEQ ID NO: 2565457 - RNA, 19 nt, Artificial Sequence
  Description of Artificial Sequence: Synthetic oligonucleotide
  Antisense strand to SEQ ID NO: 2565456
uguuacacugaccuccugg

SEQ ID NO: 2565458 - RNA, 19 nt, Artificial Sequence
  Description of Artificial Sequence: Synthetic oligonucleotide
  Sense strand starting at position 3395 of SEQ ID NO: 1888908
aggaagggucagugggauu

SEQ ID NO: 2565459 - RNA, 19 nt, Artificial Sequence
  Description of Artificial Sequence: Synthetic oligonucleotide
  Antisense strand to SEQ ID NO: 2565458
aaucccacugacccuuccu

SEQ ID NO: 2565460 - RNA, 19 nt, Artificial Sequence
  Description of Artificial Sequence: Synthetic oligonucleotide
  Sense strand starting at position 3423 of SEQ ID NO: 1888908
cacuuuggguucuuggaga

SEQ ID NO: 2565461 - RNA, 19 nt, Artificial Sequence
  Description of Artificial Sequence: Synthetic oligonucleotide
  Antisense strand to SEQ ID NO: 2565460
ucuccaagaacccaaagug

SEQ ID NO: 2565462 - RNA, 19 nt, Artificial Sequence
  Description of Artificial Sequence: Synthetic oligonucleotide
  Sense strand starting at position 3542 of SEQ ID NO: 1888908
gugaucacacgguauugga

SEQ ID NO: 2565463 - RNA, 19 nt, Artificial Sequence
  Description of Artificial Sequence: Synthetic oligonucleotide
  Antisense strand to SEQ ID NO: 2565462
uccaauaccgugugaucac

SEQ ID NO: 2565464 - RNA, 19 nt, Artificial Sequence
  Description of Artificial Sequence: Synthetic oligonucleotide
  Sense strand starting at position 289 of SEQ ID NO: 1888909
acacaaacuugguuguaga

SEQ ID NO: 2565465 - RNA, 19 nt, Artificial Sequence
  Description of Artificial Sequence: Synthetic oligonucleotide
  Antisense strand to SEQ ID NO: 2565464
ucuacaaccaaguuugugu

SEQ ID NO: 2565466 - RNA, 19 nt, Artificial Sequence
  Description of Artificial Sequence: Synthetic oligonucleotide
  Sense strand starting at position 330 of SEQ ID NO: 1888909
augacuauguagucccaaa

SEQ ID NO: 2565467 - RNA, 19 nt, Artificial Sequence
  Description of Artificial Sequence: Synthetic oligonucleotide
  Antisense strand to SEQ ID NO: 2565466
uuugggacuacauagucau

SEQ ID NO: 2565468 - RNA, 19 nt, Artificial Sequence
  Description of Artificial Sequence: Synthetic oligonucleotide
  Sense strand starting at position 469 of SEQ ID NO: 1888909
gagugcgcaauguuuguua

SEQ ID NO: 2565469 - RNA, 19 nt, Artificial Sequence
  Description of Artificial Sequence: Synthetic oligonucleotide
  Antisense strand to SEQ ID NO: 2565468
uaacaaacauugcgcacuc

SEQ ID NO: 2565470 - RNA, 19 nt, Artificial Sequence
  Description of Artificial Sequence: Synthetic oligonucleotide
  Sense strand starting at position 593 of SEQ ID NO: 1888909
auggcuucucagcagaaca

SEQ ID NO: 2565471 - RNA, 19 nt, Artificial Sequence
  Description of Artificial Sequence: Synthetic oligonucleotide
  Antisense strand to SEQ ID NO: 2565470
uguucugcugagaagccau

SEQ ID NO: 2565472 - RNA, 19 nt, Artificial Sequence
  Description of Artificial Sequence: Synthetic oligonucleotide
  Sense strand starting at position 595 of SEQ ID NO: 1888909
ggcuucucagcagaacaua

SEQ ID NO: 2565473 - RNA, 19 nt, Artificial Sequence
  Description of Artificial Sequence: Synthetic oligonucleotide
  Antisense strand to SEQ ID NO: 2565472
uauguucugcugagaagcc

SEQ ID NO: 2565474 - RNA, 19 nt, Artificial Sequence
  Description of Artificial Sequence: Synthetic oligonucleotide
  Sense strand starting at position 821 of SEQ ID NO: 1888909
ggucuuguugagaggcagu

SEQ ID NO: 2565475 - RNA, 19 nt, Artificial Sequence
  Description of Artificial Sequence: Synthetic oligonucleotide
  Antisense strand to SEQ ID NO: 2565474
acugccucucaacaagacc

SEQ ID NO: 2565476 - RNA, 19 nt, Artificial Sequence
  Description of Artificial Sequence: Synthetic oligonucleotide
  Sense strand starting at position 828 of SEQ ID NO: 1888909
uugagaggcaguuacugau

SEQ ID NO: 2565477 - RNA, 19 nt, Artificial Sequence
  Description of Artificial Sequence: Synthetic oligonucleotide
  Antisense strand to SEQ ID NO: 2565476
aucaguaacugccucucaa

SEQ ID NO: 2565478 - RNA, 19 nt, Artificial Sequence
  Description of Artificial Sequence: Synthetic oligonucleotide
  Sense strand starting at position 847 of SEQ ID NO: 1888909
cuagcagguguuuauagau

SEQ ID NO: 2565479 - RNA, 19 nt, Artificial Sequence
  Description of Artificial Sequence: Synthetic oligonucleotide
  Antisense strand to SEQ ID NO: 2565478
aucuauaaacaccugcuag

SEQ ID NO: 2565480 - RNA, 19 nt, Artificial Sequence
  Description of Artificial Sequence: Synthetic oligonucleotide
  Sense strand starting at position 1105 of SEQ ID NO: 1888909
ucaggucuacuguaugaau

SEQ ID NO: 2565481 - RNA, 19 nt, Artificial Sequence
  Description of Artificial Sequence: Synthetic oligonucleotide
  Antisense strand to SEQ ID NO: 2565480
auucauacaguagaccuga

SEQ ID NO: 2565482 - RNA, 19 nt, Artificial Sequence
  Description of Artificial Sequence: Synthetic oligonucleotide
  Sense strand starting at position 1107 of SEQ ID NO: 1888909
aggucuacuguaugaauag

SEQ ID NO: 2565483 - RNA, 19 nt, Artificial Sequence
  Description of Artificial Sequence: Synthetic oligonucleotide
  Antisense strand to SEQ ID NO: 2565482
cuauucauacaguagaccu

SEQ ID NO: 2565484 - RNA, 19 nt, Artificial Sequence
  Description of Artificial Sequence: Synthetic oligonucleotide
  Sense strand starting at position 1231 of SEQ ID NO: 1888909
agggacuuuccacgcacaa

SEQ ID NO: 2565485 - RNA, 19 nt, Artificial Sequence
  Description of Artificial Sequence: Synthetic oligonucleotide
  Antisense strand to SEQ ID NO: 2565484
uugugcguggaaagucccu

SEQ ID NO: 2565486 - RNA, 19 nt, Artificial Sequence
  Description of Artificial Sequence: Synthetic oligonucleotide
  Sense strand starting at position 1268 of SEQ ID NO: 1888909
gaagaugcuuuccuggaga

SEQ ID NO: 2565487 - RNA, 19 nt, Artificial Sequence
  Description of Artificial Sequence: Synthetic oligonucleotide
  Antisense strand to SEQ ID NO: 2565486
ucuccaggaaagcaucuuc

SEQ ID NO: 2565488 - RNA, 19 nt, Artificial Sequence
  Description of Artificial Sequence: Synthetic oligonucleotide
  Sense strand starting at position 1270 of SEQ ID NO: 1888909
agaugcuuuccuggagaag

SEQ ID NO: 2565489 - RNA, 19 nt, Artificial Sequence
  Description of Artificial Sequence: Synthetic oligonucleotide
  Antisense strand to SEQ ID NO: 2565488
cuucuccaggaaagcaucu

SEQ ID NO: 2565490 - RNA, 19 nt, Artificial Sequence
  Description of Artificial Sequence: Synthetic oligonucleotide
  Sense strand starting at position 1518 of SEQ ID NO: 1888909
agaggaauugucugguaag

SEQ ID NO: 2565491 - RNA, 19 nt, Artificial Sequence
  Description of Artificial Sequence: Synthetic oligonucleotide
  Antisense strand to SEQ ID NO: 2565490
cuuaccagacaauuccucu

SEQ ID NO: 2565492 - RNA, 19 nt, Artificial Sequence
  Description of Artificial Sequence: Synthetic oligonucleotide
  Sense strand starting at position 1529 of SEQ ID NO: 1888909
cugguaagaacggaauguu

SEQ ID NO: 2565493 - RNA, 19 nt, Artificial Sequence
  Description of Artificial Sequence: Synthetic oligonucleotide
  Antisense strand to SEQ ID NO: 2565492
aacauuccguucuuaccag

SEQ ID NO: 2565494 - RNA, 19 nt, Artificial Sequence
  Description of Artificial Sequence: Synthetic oligonucleotide
  Sense strand starting at position 1578 of SEQ ID NO: 1888909
cugauugacaggugcaaac

SEQ ID NO: 2565495 - RNA, 19 nt, Artificial Sequence
  Description of Artificial Sequence: Synthetic oligonucleotide
  Antisense strand to SEQ ID NO: 2565494
guuugcaccugucaaucag

SEQ ID NO: 2565496 - RNA, 19 nt, Artificial Sequence
  Description of Artificial Sequence: Synthetic oligonucleotide
  Sense strand starting at position 1605 of SEQ ID NO: 1888909
ggucaucuaggcugaauua

SEQ ID NO: 2565497 - RNA, 19 nt, Artificial Sequence
  Description of Artificial Sequence: Synthetic oligonucleotide
  Antisense strand to SEQ ID NO: 2565496
uaauucagccuagaugacc

SEQ ID NO: 2565498 - RNA, 19 nt, Artificial Sequence
  Description of Artificial Sequence: Synthetic oligonucleotide
  Sense strand starting at position 1615 of SEQ ID NO: 1888909
gcugaauuacaagaugucu

SEQ ID NO: 2565499 - RNA, 19 nt, Artificial Sequence
  Description of Artificial Sequence: Synthetic oligonucleotide
  Antisense strand to SEQ ID NO: 2565498
agacaucuuguaauucagc

SEQ ID NO: 2565500 - RNA, 19 nt, Artificial Sequence
  Description of Artificial Sequence: Synthetic oligonucleotide
  Sense strand starting at position 1621 of SEQ ID NO: 1888909
uuacaagaugucuggugga

SEQ ID NO: 2565501 - RNA, 19 nt, Artificial Sequence
  Description of Artificial Sequence: Synthetic oligonucleotide
  Antisense strand to SEQ ID NO: 2565500
uccaccagacaucuuguaa

SEQ ID NO: 2565502 - RNA, 19 nt, Artificial Sequence
  Description of Artificial Sequence: Synthetic oligonucleotide
  Sense strand starting at position 1626 of SEQ ID NO: 1888909
agaugucugguggaaguua

SEQ ID NO: 2565503 - RNA, 19 nt, Artificial Sequence
  Description of Artificial Sequence: Synthetic oligonucleotide
  Antisense strand to SEQ ID NO: 2565502
uaacuuccaccagacaucu

SEQ ID NO: 2565504 - RNA, 19 nt, Artificial Sequence
  Description of Artificial Sequence: Synthetic oligonucleotide
  Sense strand starting at position 1718 of SEQ ID NO: 1888909
cagagaugugugcauacug

SEQ ID NO: 2565505 - RNA, 19 nt, Artificial Sequence
  Description of Artificial Sequence: Synthetic oligonucleotide
  Antisense strand to SEQ ID NO: 2565504
caguaugcacacaucucug

SEQ ID NO: 2565506 - RNA, 19 nt, Artificial Sequence
  Description of Artificial Sequence: Synthetic oligonucleotide
  Sense strand starting at position 1838 of SEQ ID NO: 1888909
ggugccagagauuaucacu

SEQ ID NO: 2565507 - RNA, 19 nt, Artificial Sequence
  Description of Artificial Sequence: Synthetic oligonucleotide
  Antisense strand to SEQ ID NO: 2565506
agugauaaucucuggcacc

SEQ ID NO: 2565508 - RNA, 19 nt, Artificial Sequence
  Description of Artificial Sequence: Synthetic oligonucleotide
  Sense strand starting at position 2169 of SEQ ID NO: 1888909
ugugcuuuacggagggcua

SEQ ID NO: 2565509 - RNA, 19 nt, Artificial Sequence
  Description of Artificial Sequence: Synthetic oligonucleotide
  Antisense strand to SEQ ID NO: 2565508
uagcccuccguaaagcaca

SEQ ID NO: 2565510 - RNA, 19 nt, Artificial Sequence
  Description of Artificial Sequence: Synthetic oligonucleotide
  Sense strand starting at position 2202 of SEQ ID NO: 1888909
auugcaaagcgucuugcau

SEQ ID NO: 2565511 - RNA, 19 nt, Artificial Sequence
  Description of Artificial Sequence: Synthetic oligonucleotide
  Antisense strand to SEQ ID NO: 2565510
augcaagacgcuuugcaau

SEQ ID NO: 2565512 - RNA, 19 nt, Artificial Sequence
  Description of Artificial Sequence: Synthetic oligonucleotide
  Sense strand starting at position 2239 of SEQ ID NO: 1888909
uggcauuugccggagcuga

SEQ ID NO: 2565513 - RNA, 19 nt, Artificial Sequence
  Description of Artificial Sequence: Synthetic oligonucleotide
  Antisense strand to SEQ ID NO: 2565512
ucagcuccggcaaaugcca

SEQ ID NO: 2565514 - RNA, 19 nt, Artificial Sequence
  Description of Artificial Sequence: Synthetic oligonucleotide
  Sense strand starting at position 2285 of SEQ ID NO: 1888909
ggcaaagugauuuguugca

SEQ ID NO: 2565515 - RNA, 19 nt, Artificial Sequence
  Description of Artificial Sequence: Synthetic oligonucleotide
  Antisense strand to SEQ ID NO: 2565514
ugcaacaaaucacuuugcc

SEQ ID NO: 2565516 - RNA, 19 nt, Artificial Sequence
  Description of Artificial Sequence: Synthetic oligonucleotide
  Sense strand starting at position 2287 of SEQ ID NO: 1888909
caaagugauuuguugcacu

SEQ ID NO: 2565517 - RNA, 19 nt, Artificial Sequence
  Description of Artificial Sequence: Synthetic oligonucleotide
  Antisense strand to SEQ ID NO: 2565516
agugcaacaaaucacuuug

SEQ ID NO: 2565518 - RNA, 19 nt, Artificial Sequence
  Description of Artificial Sequence: Synthetic oligonucleotide
  Sense strand starting at position 2813 of SEQ ID NO: 1888909
gaaauuaguagcgacuugu

SEQ ID NO: 2565519 - RNA, 19 nt, Artificial Sequence
  Description of Artificial Sequence: Synthetic oligonucleotide
  Antisense strand to SEQ ID NO: 2565518
acaagucgcuacuaauuuc

SEQ ID NO: 2565520 - RNA, 19 nt, Artificial Sequence
  Description of Artificial Sequence: Synthetic oligonucleotide
  Sense strand starting at position 2917 of SEQ ID NO: 1888909
caccuaguagaaggguuaa

SEQ ID NO: 2565521 - RNA, 19 nt, Artificial Sequence
  Description of Artificial Sequence: Synthetic oligonucleotide
  Antisense strand to SEQ ID NO: 2565520
uuaacccuucuacuaggug

SEQ ID NO: 2565522 - RNA, 19 nt, Artificial Sequence
  Description of Artificial Sequence: Synthetic oligonucleotide
  Sense strand starting at position 2929 of SEQ ID NO: 1888909
ggguuaagugcauagacuu

SEQ ID NO: 2565523 - RNA, 19 nt, Artificial Sequence
  Description of Artificial Sequence: Synthetic oligonucleotide
  Antisense strand to SEQ ID NO: 2565522
aagucuaugcacuuaaccc

SEQ ID NO: 2565524 - RNA, 19 nt, Artificial Sequence
  Description of Artificial Sequence: Synthetic oligonucleotide
  Sense strand starting at position 3011 of SEQ ID NO: 1888909
aaguaaccauuguuaggaa

SEQ ID NO: 2565525 - RNA, 19 nt, Artificial Sequence
  Description of Artificial Sequence: Synthetic oligonucleotide
  Antisense strand to SEQ ID NO: 2565524
uuccuaacaaugguuacuu

SEQ ID NO: 2565526 - RNA, 19 nt, Artificial Sequence
  Description of Artificial Sequence: Synthetic oligonucleotide
  Sense strand starting at position 3083 of SEQ ID NO: 1888909
uuagcuacucaagggaaau

SEQ ID NO: 2565527 - RNA, 19 nt, Artificial Sequence
  Description of Artificial Sequence: Synthetic oligonucleotide
  Antisense strand to SEQ ID NO: 2565526
auuucccuugaguagcuaa

SEQ ID NO: 2565528 - RNA, 19 nt, Artificial Sequence
  Description of Artificial Sequence: Synthetic oligonucleotide
  Sense strand starting at position 3113 of SEQ ID NO: 1888909
ggguccucuagggauguuu

SEQ ID NO: 2565529 - RNA, 19 nt, Artificial Sequence
  Description of Artificial Sequence: Synthetic oligonucleotide
  Antisense strand to SEQ ID NO: 2565528
aaacaucccuagaggaccc

SEQ ID NO: 2565530 - RNA, 19 nt, Artificial Sequence
  Description of Artificial Sequence: Synthetic oligonucleotide
  Sense strand starting at position 3121 of SEQ ID NO: 1888909
uagggauguuuagcaauau

SEQ ID NO: 2565531 - RNA, 19 nt, Artificial Sequence
  Description of Artificial Sequence: Synthetic oligonucleotide
  Antisense strand to SEQ ID NO: 2565530
auauugcuaaacaucccua

SEQ ID NO: 2565532 - RNA, 19 nt, Artificial Sequence
  Description of Artificial Sequence: Synthetic oligonucleotide
  Sense strand starting at position 3131 of SEQ ID NO: 1888909
uagcaauaucuggacacgu

SEQ ID NO: 2565533 - RNA, 19 nt, Artificial Sequence
  Description of Artificial Sequence: Synthetic oligonucleotide
  Antisense strand to SEQ ID NO: 2565532
acguguccagauauugcua

SEQ ID NO: 2565534 - RNA, 19 nt, Artificial Sequence
  Description of Artificial Sequence: Synthetic oligonucleotide
  Sense strand starting at position 3133 of SEQ ID NO: 1888909
gcaauaucuggacacguuu

SEQ ID NO: 2565535 - RNA, 19 nt, Artificial Sequence
  Description of Artificial Sequence: Synthetic oligonucleotide
  Antisense strand to SEQ ID NO: 2565534
aaacguguccagauauugc

SEQ ID NO: 2565536 - RNA, 19 nt, Artificial Sequence
  Description of Artificial Sequence: Synthetic oligonucleotide
  Sense strand starting at position 3254 of SEQ ID NO: 1888909
uccaaaugucaauaguggu

SEQ ID NO: 2565537 - RNA, 19 nt, Artificial Sequence
  Description of Artificial Sequence: Synthetic oligonucleotide
  Antisense strand to SEQ ID NO: 2565536
accacuauugacauuugga

SEQ ID NO: 2565538 - RNA, 19 nt, Artificial Sequence
  Description of Artificial Sequence: Synthetic oligonucleotide
  Sense strand starting at position 3430 of SEQ ID NO: 1888909
caccgaggauacuuauuau

SEQ ID NO: 2565539 - RNA, 19 nt, Artificial Sequence
  Description of Artificial Sequence: Synthetic oligonucleotide
  Antisense strand to SEQ ID NO: 2565538
auaauaaguauccucggug

SEQ ID NO: 2565540 - RNA, 19 nt, Artificial Sequence
  Description of Artificial Sequence: Synthetic oligonucleotide
  Sense strand starting at position 3433 of SEQ ID NO: 1888909
cgaggauacuuauuauuac

SEQ ID NO: 2565541 - RNA, 19 nt, Artificial Sequence
  Description of Artificial Sequence: Synthetic oligonucleotide
  Antisense strand to SEQ ID NO: 2565540
guaauaauaaguauccucg

SEQ ID NO: 2565542 - RNA, 19 nt, Artificial Sequence
  Description of Artificial Sequence: Synthetic oligonucleotide
  Sense strand starting at position 3556 of SEQ ID NO: 1888909
guguaacuucuggauguug

SEQ ID NO: 2565543 - RNA, 19 nt, Artificial Sequence
  Description of Artificial Sequence: Synthetic oligonucleotide
  Antisense strand to SEQ ID NO: 2565542
caacauccagaaguuacac

SEQ ID NO: 2565544 - RNA, 19 nt, Artificial Sequence
  Description of Artificial Sequence: Synthetic oligonucleotide
  Sense strand starting at position 325 of SEQ ID NO: 1888910
cacacuuauggguggguua

SEQ ID NO: 2565545 - RNA, 19 nt, Artificial Sequence
  Description of Artificial Sequence: Synthetic oligonucleotide
  Antisense strand to SEQ ID NO: 2565544
uaacccacccauaagugug

SEQ ID NO: 2565546 - RNA, 19 nt, Artificial Sequence
  Description of Artificial Sequence: Synthetic oligonucleotide
  Sense strand starting at position 326 of SEQ ID NO: 1888910
acacuuauggguggguuaa

SEQ ID NO: 2565547 - RNA, 19 nt, Artificial Sequence
  Description of Artificial Sequence: Synthetic oligonucleotide
  Antisense strand to SEQ ID NO: 2565546
uuaacccacccauaagugu

SEQ ID NO: 2565548 - RNA, 19 nt, Artificial Sequence
  Description of Artificial Sequence: Synthetic oligonucleotide
  Sense strand starting at position 327 of SEQ ID NO: 1888910
cacuuauggguggguuaag

SEQ ID NO: 2565549 - RNA, 19 nt, Artificial Sequence
  Description of Artificial Sequence: Synthetic oligonucleotide
  Antisense strand to SEQ ID NO: 2565548
cuuaacccacccauaagug

SEQ ID NO: 2565550 - RNA, 19 nt, Artificial Sequence
  Description of Artificial Sequence: Synthetic oligonucleotide
  Sense strand starting at position 481 of SEQ ID NO: 1888910
ucauuucucuguguccaau

SEQ ID NO: 2565551 - RNA, 19 nt, Artificial Sequence
  Description of Artificial Sequence: Synthetic oligonucleotide
  Antisense strand to SEQ ID NO: 2565550
auuggacacagagaaauga

SEQ ID NO: 2565552 - RNA, 19 nt, Artificial Sequence
  Description of Artificial Sequence: Synthetic oligonucleotide
  Sense strand starting at position 817 of SEQ ID NO: 1888910
gaugccucuccucagggau

SEQ ID NO: 2565553 - RNA, 19 nt, Artificial Sequence
  Description of Artificial Sequence: Synthetic oligonucleotide
  Antisense strand to SEQ ID NO: 2565552
aucccugaggagaggcauc

SEQ ID NO: 2565554 - RNA, 19 nt, Artificial Sequence
  Description of Artificial Sequence: Synthetic oligonucleotide
  Sense strand starting at position 823 of SEQ ID NO: 1888910
ucuccucagggauagcaua

SEQ ID NO: 2565555 - RNA, 19 nt, Artificial Sequence
  Description of Artificial Sequence: Synthetic oligonucleotide
  Antisense strand to SEQ ID NO: 2565554
uaugcuaucccugaggaga

SEQ ID NO: 2565556 - RNA, 19 nt, Artificial Sequence
  Description of Artificial Sequence: Synthetic oligonucleotide
  Sense strand starting at position 830 of SEQ ID NO: 1888910
agggauagcauauguauuc

SEQ ID NO: 2565557 - RNA, 19 nt, Artificial Sequence
  Description of Artificial Sequence: Synthetic oligonucleotide
  Antisense strand to SEQ ID NO: 2565556
gaauacauaugcuaucccu

SEQ ID NO: 2565558 - RNA, 19 nt, Artificial Sequence
  Description of Artificial Sequence: Synthetic oligonucleotide
  Sense strand starting at position 907 of SEQ ID NO: 1888910
gaaagauaugaguggcauc

SEQ ID NO: 2565559 - RNA, 19 nt, Artificial Sequence
  Description of Artificial Sequence: Synthetic oligonucleotide
  Antisense strand to SEQ ID NO: 2565558
gaugccacucauaucuuuc

SEQ ID NO: 2565560 - RNA, 19 nt, Artificial Sequence
  Description of Artificial Sequence: Synthetic oligonucleotide
  Sense strand starting at position 951 of SEQ ID NO: 1888910
gcaggugcuggauguauuu

SEQ ID NO: 2565561 - RNA, 19 nt, Artificial Sequence
  Description of Artificial Sequence: Synthetic oligonucleotide
  Antisense strand to SEQ ID NO: 2565560
aaauacauccagcaccugc

SEQ ID NO: 2565562 - RNA, 19 nt, Artificial Sequence
  Description of Artificial Sequence: Synthetic oligonucleotide
  Sense strand starting at position 1163 of SEQ ID NO: 1888910
cauaguaagcugggaguaa

SEQ ID NO: 2565563 - RNA, 19 nt, Artificial Sequence
  Description of Artificial Sequence: Synthetic oligonucleotide
  Antisense strand to SEQ ID NO: 2565562
uuacucccagcuuacuaug

SEQ ID NO: 2565564 - RNA, 19 nt, Artificial Sequence
  Description of Artificial Sequence: Synthetic oligonucleotide
  Sense strand starting at position 1198 of SEQ ID NO: 1888910
cucaaagagguguaagcuu

SEQ ID NO: 2565565 - RNA, 19 nt, Artificial Sequence
  Description of Artificial Sequence: Synthetic oligonucleotide
  Antisense strand to SEQ ID NO: 2565564
aagcuuacaccucuuugag

SEQ ID NO: 2565566 - RNA, 19 nt, Artificial Sequence
  Description of Artificial Sequence: Synthetic oligonucleotide
  Sense strand starting at position 1284 of SEQ ID NO: 1888910
cuuauuuaccguuguaucu

SEQ ID NO: 2565567 - RNA, 19 nt, Artificial Sequence
  Description of Artificial Sequence: Synthetic oligonucleotide
  Antisense strand to SEQ ID NO: 2565566
agauacaacgguaaauaag

SEQ ID NO: 2565568 - RNA, 19 nt, Artificial Sequence
  Description of Artificial Sequence: Synthetic oligonucleotide
  Sense strand starting at position 2016 of SEQ ID NO: 1888910
ugugaauguucagugagag

SEQ ID NO: 2565569 - RNA, 19 nt, Artificial Sequence
  Description of Artificial Sequence: Synthetic oligonucleotide
  Antisense strand to SEQ ID NO: 2565568
cucucacugaacauucaca

SEQ ID NO: 2565570 - RNA, 19 nt, Artificial Sequence
  Description of Artificial Sequence: Synthetic oligonucleotide
  Sense strand starting at position 2017 of SEQ ID NO: 1888910
gugaauguucagugagagg

SEQ ID NO: 2565571 - RNA, 19 nt, Artificial Sequence
  Description of Artificial Sequence: Synthetic oligonucleotide
  Antisense strand to SEQ ID NO: 2565570
ccucucacugaacauucac

SEQ ID NO: 2565572 - RNA, 19 nt, Artificial Sequence
  Description of Artificial Sequence: Synthetic oligonucleotide
  Sense strand starting at position 2060 of SEQ ID NO: 1888910
cuuacuugucaugauauag

SEQ ID NO: 2565573 - RNA, 19 nt, Artificial Sequence
  Description of Artificial Sequence: Synthetic oligonucleotide
  Antisense strand to SEQ ID NO: 2565572
cuauaucaugacaaguaag

SEQ ID NO: 2565574 - RNA, 19 nt, Artificial Sequence
  Description of Artificial Sequence: Synthetic oligonucleotide
  Sense strand starting at position 2085 of SEQ ID NO: 1888910
agagaacaguucuugagcu

SEQ ID NO: 2565575 - RNA, 19 nt, Artificial Sequence
  Description of Artificial Sequence: Synthetic oligonucleotide
  Antisense strand to SEQ ID NO: 2565574
agcucaagaacuguucucu

SEQ ID NO: 2565576 - RNA, 19 nt, Artificial Sequence
  Description of Artificial Sequence: Synthetic oligonucleotide
  Sense strand starting at position 2087 of SEQ ID NO: 1888910
agaacaguucuugagcuuu

SEQ ID NO: 2565577 - RNA, 19 nt, Artificial Sequence
  Description of Artificial Sequence: Synthetic oligonucleotide
  Antisense strand to SEQ ID NO: 2565576
aaagcucaagaacuguucu

SEQ ID NO: 2565578 - RNA, 19 nt, Artificial Sequence
  Description of Artificial Sequence: Synthetic oligonucleotide
  Sense strand starting at position 2098 of SEQ ID NO: 1888910
ugagcuuugcauuaaagau

SEQ ID NO: 2565579 - RNA, 19 nt, Artificial Sequence
  Description of Artificial Sequence: Synthetic oligonucleotide
  Antisense strand to SEQ ID NO: 2565578
aucuuuaaugcaaagcuca

SEQ ID NO: 2565580 - RNA, 19 nt, Artificial Sequence
  Description of Artificial Sequence: Synthetic oligonucleotide
  Sense strand starting at position 2228 of SEQ ID NO: 1888910
ugaauauaacgccaaagcu

SEQ ID NO: 2565581 - RNA, 19 nt, Artificial Sequence
  Description of Artificial Sequence: Synthetic oligonucleotide
  Antisense strand to SEQ ID NO: 2565580
agcuuuggcguuauauuca

SEQ ID NO: 2565582 - RNA, 19 nt, Artificial Sequence
  Description of Artificial Sequence: Synthetic oligonucleotide
  Sense strand starting at position 2303 of SEQ ID NO: 1888910
acaguuguucucuaacaug

SEQ ID NO: 2565583 - RNA, 19 nt, Artificial Sequence
  Description of Artificial Sequence: Synthetic oligonucleotide
  Antisense strand to SEQ ID NO: 2565582
cauguuagagaacaacugu

SEQ ID NO: 2565584 - RNA, 19 nt, Artificial Sequence
  Description of Artificial Sequence: Synthetic oligonucleotide
  Sense strand starting at position 2321 of SEQ ID NO: 1888910
gcaccagaaucaucugaag

SEQ ID NO: 2565585 - RNA, 19 nt, Artificial Sequence
  Description of Artificial Sequence: Synthetic oligonucleotide
  Antisense strand to SEQ ID NO: 2565584
cuucagaugauucuggugc

SEQ ID NO: 2565586 - RNA, 19 nt, Artificial Sequence
  Description of Artificial Sequence: Synthetic oligonucleotide
  Sense strand starting at position 2332 of SEQ ID NO: 1888910
aucugaagaccuggguaau

SEQ ID NO: 2565587 - RNA, 19 nt, Artificial Sequence
  Description of Artificial Sequence: Synthetic oligonucleotide
  Antisense strand to SEQ ID NO: 2565586
auuacccaggucuucagau

SEQ ID NO: 2565588 - RNA, 19 nt, Artificial Sequence
  Description of Artificial Sequence: Synthetic oligonucleotide
  Sense strand starting at position 2333 of SEQ ID NO: 1888910
ucugaagaccuggguaaua

SEQ ID NO: 2565589 - RNA, 19 nt, Artificial Sequence
  Description of Artificial Sequence: Synthetic oligonucleotide
  Antisense strand to SEQ ID NO: 2565588
uauuacccaggucuucaga

SEQ ID NO: 2565590 - RNA, 19 nt, Artificial Sequence
  Description of Artificial Sequence: Synthetic oligonucleotide
  Sense strand starting at position 2344 of SEQ ID NO: 1888910
ggguaauauacagguuaca

SEQ ID NO: 2565591 - RNA, 19 nt, Artificial Sequence
  Description of Artificial Sequence: Synthetic oligonucleotide
  Antisense strand to SEQ ID NO: 2565590
uguaaccuguauauuaccc

SEQ ID NO: 2565592 - RNA, 19 nt, Artificial Sequence
  Description of Artificial Sequence: Synthetic oligonucleotide
  Sense strand starting at position 2459 of SEQ ID NO: 1888910
cugggagaaucacuaaugu

SEQ ID NO: 2565593 - RNA, 19 nt, Artificial Sequence
  Description of Artificial Sequence: Synthetic oligonucleotide
  Antisense strand to SEQ ID NO: 2565592
acauuagugauucucccag

SEQ ID NO: 2565594 - RNA, 19 nt, Artificial Sequence
  Description of Artificial Sequence: Synthetic oligonucleotide
  Sense strand starting at position 2747 of SEQ ID NO: 1888910
gugaaacuccugcaugcaa

SEQ ID NO: 2565595 - RNA, 19 nt, Artificial Sequence
  Description of Artificial Sequence: Synthetic oligonucleotide
  Antisense strand to SEQ ID NO: 2565594
uugcaugcaggaguuucac

SEQ ID NO: 2565596 - RNA, 19 nt, Artificial Sequence
  Description of Artificial Sequence: Synthetic oligonucleotide
  Sense strand starting at position 2778 of SEQ ID NO: 1888910
agagaagagguccgaguau

SEQ ID NO: 2565597 - RNA, 19 nt, Artificial Sequence
  Description of Artificial Sequence: Synthetic oligonucleotide
  Antisense strand to SEQ ID NO: 2565596
auacucggaccucuucucu

SEQ ID NO: 2565598 - RNA, 19 nt, Artificial Sequence
  Description of Artificial Sequence: Synthetic oligonucleotide
  Sense strand starting at position 2790 of SEQ ID NO: 1888910
cgaguaucugugaguguga

SEQ ID NO: 2565599 - RNA, 19 nt, Artificial Sequence
  Description of Artificial Sequence: Synthetic oligonucleotide
  Antisense strand to SEQ ID NO: 2565598
ucacacucacagauacucg

SEQ ID NO: 2565600 - RNA, 19 nt, Artificial Sequence
  Description of Artificial Sequence: Synthetic oligonucleotide
  Sense strand starting at position 2885 of SEQ ID NO: 1888910
ucccuaggucaacaaaguu

SEQ ID NO: 2565601 - RNA, 19 nt, Artificial Sequence
  Description of Artificial Sequence: Synthetic oligonucleotide
  Antisense strand to SEQ ID NO: 2565600
aacuuuguugaccuaggga

SEQ ID NO: 2565602 - RNA, 19 nt, Artificial Sequence
  Description of Artificial Sequence: Synthetic oligonucleotide
  Sense strand starting at position 3221 of SEQ ID NO: 1888910
auauacgaguauuugugua

SEQ ID NO: 2565603 - RNA, 19 nt, Artificial Sequence
  Description of Artificial Sequence: Synthetic oligonucleotide
  Antisense strand to SEQ ID NO: 2565602
uacacaaauacucguauau

SEQ ID NO: 2565604 - RNA, 19 nt, Artificial Sequence
  Description of Artificial Sequence: Synthetic oligonucleotide
  Sense strand starting at position 3223 of SEQ ID NO: 1888910
auacgaguauuuguguauc

SEQ ID NO: 2565605 - RNA, 19 nt, Artificial Sequence
  Description of Artificial Sequence: Synthetic oligonucleotide
  Antisense strand to SEQ ID NO: 2565604
gauacacaaauacucguau

SEQ ID NO: 2565606 - RNA, 19 nt, Artificial Sequence
  Description of Artificial Sequence: Synthetic oligonucleotide
  Sense strand starting at position 3225 of SEQ ID NO: 1888910
acgaguauuuguguaucug

SEQ ID NO: 2565607 - RNA, 19 nt, Artificial Sequence
  Description of Artificial Sequence: Synthetic oligonucleotide
  Antisense strand to SEQ ID NO: 2565606
cagauacacaaauacucgu

SEQ ID NO: 2565608 - RNA, 19 nt, Artificial Sequence
  Description of Artificial Sequence: Synthetic oligonucleotide
  Sense strand starting at position 3226 of SEQ ID NO: 1888910
cgaguauuuguguaucugu

SEQ ID NO: 2565609 - RNA, 19 nt, Artificial Sequence
  Description of Artificial Sequence: Synthetic oligonucleotide
  Antisense strand to SEQ ID NO: 2565608
acagauacacaaauacucg

SEQ ID NO: 2565610 - RNA, 19 nt, Artificial Sequence
  Description of Artificial Sequence: Synthetic oligonucleotide
  Sense strand starting at position 3254 of SEQ ID NO: 1888910
agagaacauuaacaaggaa

SEQ ID NO: 2565611 - RNA, 19 nt, Artificial Sequence
  Description of Artificial Sequence: Synthetic oligonucleotide
  Antisense strand to SEQ ID NO: 2565610
uuccuuguuaauguucucu

SEQ ID NO: 2565612 - RNA, 19 nt, Artificial Sequence
  Description of Artificial Sequence: Synthetic oligonucleotide
  Sense strand starting at position 3302 of SEQ ID NO: 1888910
gaagaaugccgagacagcu

SEQ ID NO: 2565613 - RNA, 19 nt, Artificial Sequence
  Description of Artificial Sequence: Synthetic oligonucleotide
  Antisense strand to SEQ ID NO: 2565612
agcugucucggcauucuuc

SEQ ID NO: 2565614 - RNA, 19 nt, Artificial Sequence
  Description of Artificial Sequence: Synthetic oligonucleotide
  Sense strand starting at position 3382 of SEQ ID NO: 1888910
uuaccugaucagugggacu

SEQ ID NO: 2565615 - RNA, 19 nt, Artificial Sequence
  Description of Artificial Sequence: Synthetic oligonucleotide
  Antisense strand to SEQ ID NO: 2565614
agucccacugaucagguaa

SEQ ID NO: 2565616 - RNA, 19 nt, Artificial Sequence
  Description of Artificial Sequence: Synthetic oligonucleotide
  Sense strand starting at position 3519 of SEQ ID NO: 1888910
cugcacagugaguacaaau

SEQ ID NO: 2565617 - RNA, 19 nt, Artificial Sequence
  Description of Artificial Sequence: Synthetic oligonucleotide
  Antisense strand to SEQ ID NO: 2565616
auuuguacucacugugcag

SEQ ID NO: 2565618 - RNA, 19 nt, Artificial Sequence
  Description of Artificial Sequence: Synthetic oligonucleotide
  Sense strand starting at position 3528 of SEQ ID NO: 1888910
gaguacaaaugagcuuuau

SEQ ID NO: 2565619 - RNA, 19 nt, Artificial Sequence
  Description of Artificial Sequence: Synthetic oligonucleotide
  Antisense strand to SEQ ID NO: 2565618
auaaagcucauuuguacuc

SEQ ID NO: 2565620 - RNA, 19 nt, Artificial Sequence
  Description of Artificial Sequence: Synthetic oligonucleotide
  Sense strand starting at position 3804 of SEQ ID NO: 1888910
caaggauagcaugggaguu

SEQ ID NO: 2565621 - RNA, 19 nt, Artificial Sequence
  Description of Artificial Sequence: Synthetic oligonucleotide
  Antisense strand to SEQ ID NO: 2565620
aacucccaugcuauccuug

SEQ ID NO: 2565622 - RNA, 19 nt, Artificial Sequence
  Description of Artificial Sequence: Synthetic oligonucleotide
  Sense strand starting at position 3805 of SEQ ID NO: 1888910
aaggauagcaugggaguua

SEQ ID NO: 2565623 - RNA, 19 nt, Artificial Sequence
  Description of Artificial Sequence: Synthetic oligonucleotide
  Antisense strand to SEQ ID NO: 2565622
uaacucccaugcuauccuu

SEQ ID NO: 2565624 - RNA, 19 nt, Artificial Sequence
  Description of Artificial Sequence: Synthetic oligonucleotide
  Sense strand starting at position 60 of SEQ ID NO: 1888911
ggaugagauucccucucug

SEQ ID NO: 2565625 - RNA, 19 nt, Artificial Sequence
  Description of Artificial Sequence: Synthetic oligonucleotide
  Antisense strand to SEQ ID NO: 2565624
cagagagggaaucucaucc

SEQ ID NO: 2565626 - RNA, 19 nt, Artificial Sequence
  Description of Artificial Sequence: Synthetic oligonucleotide
  Sense strand starting at position 281 of SEQ ID NO: 1888911
gugugagaugacugacaag

SEQ ID NO: 2565627 - RNA, 19 nt, Artificial Sequence
  Description of Artificial Sequence: Synthetic oligonucleotide
  Antisense strand to SEQ ID NO: 2565626
cuugucagucaucucacac

SEQ ID NO: 2565628 - RNA, 19 nt, Artificial Sequence
  Description of Artificial Sequence: Synthetic oligonucleotide
  Sense strand starting at position 523 of SEQ ID NO: 1888911
auacguaugcaugaacaau

SEQ ID NO: 2565629 - RNA, 19 nt, Artificial Sequence
  Description of Artificial Sequence: Synthetic oligonucleotide
  Antisense strand to SEQ ID NO: 2565628
auuguucaugcauacguau

SEQ ID NO: 2565630 - RNA, 19 nt, Artificial Sequence
  Description of Artificial Sequence: Synthetic oligonucleotide
  Sense strand starting at position 551 of SEQ ID NO: 1888911
ggaaguuccuucucuuaaa

SEQ ID NO: 2565631 - RNA, 19 nt, Artificial Sequence
  Description of Artificial Sequence: Synthetic oligonucleotide
  Antisense strand to SEQ ID NO: 2565630
uuuaagagaaggaacuucc

SEQ ID NO: 2565632 - RNA, 19 nt, Artificial Sequence
  Description of Artificial Sequence: Synthetic oligonucleotide
  Sense strand starting at position 627 of SEQ ID NO: 1888911
ccaugucuggugcaugaca

SEQ ID NO: 2565633 - RNA, 19 nt, Artificial Sequence
  Description of Artificial Sequence: Synthetic oligonucleotide
  Antisense strand to SEQ ID NO: 2565632
ugucaugcaccagacaugg

SEQ ID NO: 2565634 - RNA, 19 nt, Artificial Sequence
  Description of Artificial Sequence: Synthetic oligonucleotide
  Sense strand starting at position 692 of SEQ ID NO: 1888911
ggauuauaaacagguguuc

SEQ ID NO: 2565635 - RNA, 19 nt, Artificial Sequence
  Description of Artificial Sequence: Synthetic oligonucleotide
  Antisense strand to SEQ ID NO: 2565634
gaacaccuguuuauaaucc

SEQ ID NO: 2565636 - RNA, 19 nt, Artificial Sequence
  Description of Artificial Sequence: Synthetic oligonucleotide
  Sense strand starting at position 705 of SEQ ID NO: 1888911
guguucuucgcucuaugca

SEQ ID NO: 2565637 - RNA, 19 nt, Artificial Sequence
  Description of Artificial Sequence: Synthetic oligonucleotide
  Antisense strand to SEQ ID NO: 2565636
ugcauagagcgaagaacac

SEQ ID NO: 2565638 - RNA, 19 nt, Artificial Sequence
  Description of Artificial Sequence: Synthetic oligonucleotide
  Sense strand starting at position 1146 of SEQ ID NO: 1888911
gugucugguguacaaggau

SEQ ID NO: 2565639 - RNA, 19 nt, Artificial Sequence
  Description of Artificial Sequence: Synthetic oligonucleotide
  Antisense strand to SEQ ID NO: 2565638
auccuuguacaccagacac

SEQ ID NO: 2565640 - RNA, 19 nt, Artificial Sequence
  Description of Artificial Sequence: Synthetic oligonucleotide
  Sense strand starting at position 1306 of SEQ ID NO: 1888911
gagucccuaccagaaugua

SEQ ID NO: 2565641 - RNA, 19 nt, Artificial Sequence
  Description of Artificial Sequence: Synthetic oligonucleotide
  Antisense strand to SEQ ID NO: 2565640
uacauucugguagggacuc

SEQ ID NO: 2565642 - RNA, 19 nt, Artificial Sequence
  Description of Artificial Sequence: Synthetic oligonucleotide
  Sense strand starting at position 1377 of SEQ ID NO: 1888911
auaccugcugucuaauaga

SEQ ID NO: 2565643 - RNA, 19 nt, Artificial Sequence
  Description of Artificial Sequence: Synthetic oligonucleotide
  Antisense strand to SEQ ID NO: 2565642
ucuauuagacagcagguau

SEQ ID NO: 2565644 - RNA, 19 nt, Artificial Sequence
  Description of Artificial Sequence: Synthetic oligonucleotide
  Sense strand starting at position 1397 of SEQ ID NO: 1888911
acuugaguaucuguggaag

SEQ ID NO: 2565645 - RNA, 19 nt, Artificial Sequence
  Description of Artificial Sequence: Synthetic oligonucleotide
  Antisense strand to SEQ ID NO: 2565644
cuuccacagauacucaagu

SEQ ID NO: 2565646 - RNA, 19 nt, Artificial Sequence
  Description of Artificial Sequence: Synthetic oligonucleotide
  Sense strand starting at position 1529 of SEQ ID NO: 1888911
gcugaaagaaugugaguga

SEQ ID NO: 2565647 - RNA, 19 nt, Artificial Sequence
  Description of Artificial Sequence: Synthetic oligonucleotide
  Antisense strand to SEQ ID NO: 2565646
ucacucacauucuuucagc

SEQ ID NO: 2565648 - RNA, 19 nt, Artificial Sequence
  Description of Artificial Sequence: Synthetic oligonucleotide
  Sense strand starting at position 1533 of SEQ ID NO: 1888911
aaagaaugugagugaugca

SEQ ID NO: 2565649 - RNA, 19 nt, Artificial Sequence
  Description of Artificial Sequence: Synthetic oligonucleotide
  Antisense strand to SEQ ID NO: 2565648
ugcaucacucacauucuuu

SEQ ID NO: 2565650 - RNA, 19 nt, Artificial Sequence
  Description of Artificial Sequence: Synthetic oligonucleotide
  Sense strand starting at position 1575 of SEQ ID NO: 1888911
gaggacaugucucugugga

SEQ ID NO: 2565651 - RNA, 19 nt, Artificial Sequence
  Description of Artificial Sequence: Synthetic oligonucleotide
  Antisense strand to SEQ ID NO: 2565650
uccacagagacauguccuc

SEQ ID NO: 2565652 - RNA, 19 nt, Artificial Sequence
  Description of Artificial Sequence: Synthetic oligonucleotide
  Sense strand starting at position 1576 of SEQ ID NO: 1888911
aggacaugucucuguggau

SEQ ID NO: 2565653 - RNA, 19 nt, Artificial Sequence
  Description of Artificial Sequence: Synthetic oligonucleotide
  Antisense strand to SEQ ID NO: 2565652
auccacagagacauguccu

SEQ ID NO: 2565654 - RNA, 19 nt, Artificial Sequence
  Description of Artificial Sequence: Synthetic oligonucleotide
  Sense strand starting at position 1577 of SEQ ID NO: 1888911
ggacaugucucuguggaug

SEQ ID NO: 2565655 - RNA, 19 nt, Artificial Sequence
  Description of Artificial Sequence: Synthetic oligonucleotide
  Antisense strand to SEQ ID NO: 2565654
cauccacagagacaugucc

SEQ ID NO: 2565656 - RNA, 19 nt, Artificial Sequence
  Description of Artificial Sequence: Synthetic oligonucleotide
  Sense strand starting at position 1580 of SEQ ID NO: 1888911
caugucucuguggauguaa

SEQ ID NO: 2565657 - RNA, 19 nt, Artificial Sequence
  Description of Artificial Sequence: Synthetic oligonucleotide
  Antisense strand to SEQ ID NO: 2565656
uuacauccacagagacaug

SEQ ID NO: 2565658 - RNA, 19 nt, Artificial Sequence
  Description of Artificial Sequence: Synthetic oligonucleotide
  Sense strand starting at position 1625 of SEQ ID NO: 1888911
cagcguauuuaugugugau

SEQ ID NO: 2565659 - RNA, 19 nt, Artificial Sequence
  Description of Artificial Sequence: Synthetic oligonucleotide
  Antisense strand to SEQ ID NO: 2565658
aucacacauaaauacgcug

SEQ ID NO: 2565660 - RNA, 19 nt, Artificial Sequence
  Description of Artificial Sequence: Synthetic oligonucleotide
  Sense strand starting at position 1631 of SEQ ID NO: 1888911
auuuaugugugauuguacu

SEQ ID NO: 2565661 - RNA, 19 nt, Artificial Sequence
  Description of Artificial Sequence: Synthetic oligonucleotide
  Antisense strand to SEQ ID NO: 2565660
aguacaaucacacauaaau

SEQ ID NO: 2565662 - RNA, 19 nt, Artificial Sequence
  Description of Artificial Sequence: Synthetic oligonucleotide
  Sense strand starting at position 1638 of SEQ ID NO: 1888911
ugugauuguacugagguuu

SEQ ID NO: 2565663 - RNA, 19 nt, Artificial Sequence
  Description of Artificial Sequence: Synthetic oligonucleotide
  Antisense strand to SEQ ID NO: 2565662
aaaccucaguacaaucaca

SEQ ID NO: 2565664 - RNA, 19 nt, Artificial Sequence
  Description of Artificial Sequence: Synthetic oligonucleotide
  Sense strand starting at position 1644 of SEQ ID NO: 1888911
uguacugagguuuaguaga

SEQ ID NO: 2565665 - RNA, 19 nt, Artificial Sequence
  Description of Artificial Sequence: Synthetic oligonucleotide
  Antisense strand to SEQ ID NO: 2565664
ucuacuaaaccucaguaca

SEQ ID NO: 2565666 - RNA, 19 nt, Artificial Sequence
  Description of Artificial Sequence: Synthetic oligonucleotide
  Sense strand starting at position 1787 of SEQ ID NO: 1888911
ccagauauggcucauucuc

SEQ ID NO: 2565667 - RNA, 19 nt, Artificial Sequence
  Description of Artificial Sequence: Synthetic oligonucleotide
  Antisense strand to SEQ ID NO: 2565666
gagaaugagccauaucugg

SEQ ID NO: 2565668 - RNA, 19 nt, Artificial Sequence
  Description of Artificial Sequence: Synthetic oligonucleotide
  Sense strand starting at position 1789 of SEQ ID NO: 1888911
agauauggcucauucucuu

SEQ ID NO: 2565669 - RNA, 19 nt, Artificial Sequence
  Description of Artificial Sequence: Synthetic oligonucleotide
  Antisense strand to SEQ ID NO: 2565668
aagagaaugagccauaucu

SEQ ID NO: 2565670 - RNA, 19 nt, Artificial Sequence
  Description of Artificial Sequence: Synthetic oligonucleotide
  Sense strand starting at position 1835 of SEQ ID NO: 1888911
gcaauagaguagguaggua

SEQ ID NO: 2565671 - RNA, 19 nt, Artificial Sequence
  Description of Artificial Sequence: Synthetic oligonucleotide
  Antisense strand to SEQ ID NO: 2565670
uaccuaccuacucuauugc

SEQ ID NO: 2565672 - RNA, 19 nt, Artificial Sequence
  Description of Artificial Sequence: Synthetic oligonucleotide
  Sense strand starting at position 1843 of SEQ ID NO: 1888911
guagguagguacucaacaa

SEQ ID NO: 2565673 - RNA, 19 nt, Artificial Sequence
  Description of Artificial Sequence: Synthetic oligonucleotide
  Antisense strand to SEQ ID NO: 2565672
uuguugaguaccuaccuac

SEQ ID NO: 2565674 - RNA, 19 nt, Artificial Sequence
  Description of Artificial Sequence: Synthetic oligonucleotide
  Sense strand starting at position 2011 of SEQ ID NO: 1888911
aggagauuccaguaccugu

SEQ ID NO: 2565675 - RNA, 19 nt, Artificial Sequence
  Description of Artificial Sequence: Synthetic oligonucleotide
  Antisense strand to SEQ ID NO: 2565674
acagguacuggaaucuccu

SEQ ID NO: 2565676 - RNA, 19 nt, Artificial Sequence
  Description of Artificial Sequence: Synthetic oligonucleotide
  Sense strand starting at position 2105 of SEQ ID NO: 1888911
gagagaaguugcuucgaca

SEQ ID NO: 2565677 - RNA, 19 nt, Artificial Sequence
  Description of Artificial Sequence: Synthetic oligonucleotide
  Antisense strand to SEQ ID NO: 2565676
ugucgaagcaacuucucuc

SEQ ID NO: 2565678 - RNA, 19 nt, Artificial Sequence
  Description of Artificial Sequence: Synthetic oligonucleotide
  Sense strand starting at position 2566 of SEQ ID NO: 1888911
cacacuuauggguggguua

SEQ ID NO: 2565679 - RNA, 19 nt, Artificial Sequence
  Description of Artificial Sequence: Synthetic oligonucleotide
  Antisense strand to SEQ ID NO: 2565678
uaacccacccauaagugug

SEQ ID NO: 2565680 - RNA, 19 nt, Artificial Sequence
  Description of Artificial Sequence: Synthetic oligonucleotide
  Sense strand starting at position 2567 of SEQ ID NO: 1888911
acacuuauggguggguuaa

SEQ ID NO: 2565681 - RNA, 19 nt, Artificial Sequence
  Description of Artificial Sequence: Synthetic oligonucleotide
  Antisense strand to SEQ ID NO: 2565680
uuaacccacccauaagugu

SEQ ID NO: 2565682 - RNA, 19 nt, Artificial Sequence
  Description of Artificial Sequence: Synthetic oligonucleotide
  Sense strand starting at position 2568 of SEQ ID NO: 1888911
cacuuauggguggguuaag

SEQ ID NO: 2565683 - RNA, 19 nt, Artificial Sequence
  Description of Artificial Sequence: Synthetic oligonucleotide
  Antisense strand to SEQ ID NO: 2565682
cuuaacccacccauaagug

SEQ ID NO: 2565684 - RNA, 19 nt, Artificial Sequence
  Description of Artificial Sequence: Synthetic oligonucleotide
  Sense strand starting at position 2722 of SEQ ID NO: 1888911
ucauuucucuguguccaau

SEQ ID NO: 2565685 - RNA, 19 nt, Artificial Sequence
  Description of Artificial Sequence: Synthetic oligonucleotide
  Antisense strand to SEQ ID NO: 2565684
auuggacacagagaaauga

SEQ ID NO: 2565686 - RNA, 19 nt, Artificial Sequence
  Description of Artificial Sequence: Synthetic oligonucleotide
  Sense strand starting at position 3030 of SEQ ID NO: 1888911
aguaucucugugugcauuu

SEQ ID NO: 2565687 - RNA, 19 nt, Artificial Sequence
  Description of Artificial Sequence: Synthetic oligonucleotide
  Antisense strand to SEQ ID NO: 2565686
aaaugcacacagagauacu

SEQ ID NO: 2565688 - RNA, 19 nt, Artificial Sequence
  Description of Artificial Sequence: Synthetic oligonucleotide
  Sense strand starting at position 3058 of SEQ ID NO: 1888911
gaugccucuccucagggau

SEQ ID NO: 2565689 - RNA, 19 nt, Artificial Sequence
  Description of Artificial Sequence: Synthetic oligonucleotide
  Antisense strand to SEQ ID NO: 2565688
aucccugaggagaggcauc

SEQ ID NO: 2565690 - RNA, 19 nt, Artificial Sequence
  Description of Artificial Sequence: Synthetic oligonucleotide
  Sense strand starting at position 3064 of SEQ ID NO: 1888911
ucuccucagggauagcaua

SEQ ID NO: 2565691 - RNA, 19 nt, Artificial Sequence
  Description of Artificial Sequence: Synthetic oligonucleotide
  Antisense strand to SEQ ID NO: 2565690
uaugcuaucccugaggaga

SEQ ID NO: 2565692 - RNA, 19 nt, Artificial Sequence
  Description of Artificial Sequence: Synthetic oligonucleotide
  Sense strand starting at position 3071 of SEQ ID NO: 1888911
agggauagcauauguauuc

SEQ ID NO: 2565693 - RNA, 19 nt, Artificial Sequence
  Description of Artificial Sequence: Synthetic oligonucleotide
  Antisense strand to SEQ ID NO: 2565692
gaauacauaugcuaucccu

SEQ ID NO: 2565694 - RNA, 19 nt, Artificial Sequence
  Description of Artificial Sequence: Synthetic oligonucleotide
  Sense strand starting at position 3148 of SEQ ID NO: 1888911
gaaagauaugaguggcauc

SEQ ID NO: 2565695 - RNA, 19 nt, Artificial Sequence
  Description of Artificial Sequence: Synthetic oligonucleotide
  Antisense strand to SEQ ID NO: 2565694
gaugccacucauaucuuuc

SEQ ID NO: 2565696 - RNA, 19 nt, Artificial Sequence
  Description of Artificial Sequence: Synthetic oligonucleotide
  Sense strand starting at position 3192 of SEQ ID NO: 1888911
gcaggugcuggauguauuu

SEQ ID NO: 2565697 - RNA, 19 nt, Artificial Sequence
  Description of Artificial Sequence: Synthetic oligonucleotide
  Antisense strand to SEQ ID NO: 2565696
aaauacauccagcaccugc

SEQ ID NO: 2565698 - RNA, 19 nt, Artificial Sequence
  Description of Artificial Sequence: Synthetic oligonucleotide
  Sense strand starting at position 3404 of SEQ ID NO: 1888911
cauaguaagcugggaguaa

SEQ ID NO: 2565699 - RNA, 19 nt, Artificial Sequence
  Description of Artificial Sequence: Synthetic oligonucleotide
  Antisense strand to SEQ ID NO: 2565698
uuacucccagcuuacuaug

SEQ ID NO: 2565700 - RNA, 19 nt, Artificial Sequence
  Description of Artificial Sequence: Synthetic oligonucleotide
  Sense strand starting at position 3439 of SEQ ID NO: 1888911
cucaaagagguguaagcuu

SEQ ID NO: 2565701 - RNA, 19 nt, Artificial Sequence
  Description of Artificial Sequence: Synthetic oligonucleotide
  Antisense strand to SEQ ID NO: 2565700
aagcuuacaccucuuugag

SEQ ID NO: 2565702 - RNA, 19 nt, Artificial Sequence
  Description of Artificial Sequence: Synthetic oligonucleotide
  Sense strand starting at position 3525 of SEQ ID NO: 1888911
cuuauuuaccguuguaucu

SEQ ID NO: 2565703 - RNA, 19 nt, Artificial Sequence
  Description of Artificial Sequence: Synthetic oligonucleotide
  Antisense strand to SEQ ID NO: 2565702
agauacaacgguaaauaag

SEQ ID NO: 2565704 - RNA, 19 nt, Artificial Sequence
  Description of Artificial Sequence: Synthetic oligonucleotide
  Sense strand starting at position 356 of SEQ ID NO: 1888912
gagucccuaccagaaugua

SEQ ID NO: 2565705 - RNA, 19 nt, Artificial Sequence
  Description of Artificial Sequence: Synthetic oligonucleotide
  Antisense strand to SEQ ID NO: 2565704
uacauucugguagggacuc

SEQ ID NO: 2565706 - RNA, 19 nt, Artificial Sequence
  Description of Artificial Sequence: Synthetic oligonucleotide
  Sense strand starting at position 427 of SEQ ID NO: 1888912
auaccugcugucuaauaga

SEQ ID NO: 2565707 - RNA, 19 nt, Artificial Sequence
  Description of Artificial Sequence: Synthetic oligonucleotide
  Antisense strand to SEQ ID NO: 2565706
ucuauuagacagcagguau

SEQ ID NO: 2565708 - RNA, 19 nt, Artificial Sequence
  Description of Artificial Sequence: Synthetic oligonucleotide
  Sense strand starting at position 447 of SEQ ID NO: 1888912
acuugaguaucuguggaag

SEQ ID NO: 2565709 - RNA, 19 nt, Artificial Sequence
  Description of Artificial Sequence: Synthetic oligonucleotide
  Antisense strand to SEQ ID NO: 2565708
cuuccacagauacucaagu

SEQ ID NO: 2565710 - RNA, 19 nt, Artificial Sequence
  Description of Artificial Sequence: Synthetic oligonucleotide
  Sense strand starting at position 579 of SEQ ID NO: 1888912
gcugaaagaaugugaguga

SEQ ID NO: 2565711 - RNA, 19 nt, Artificial Sequence
  Description of Artificial Sequence: Synthetic oligonucleotide
  Antisense strand to SEQ ID NO: 2565710
ucacucacauucuuucagc

SEQ ID NO: 2565712 - RNA, 19 nt, Artificial Sequence
  Description of Artificial Sequence: Synthetic oligonucleotide
  Sense strand starting at position 583 of SEQ ID NO: 1888912
aaagaaugugagugaugca

SEQ ID NO: 2565713 - RNA, 19 nt, Artificial Sequence
  Description of Artificial Sequence: Synthetic oligonucleotide
  Antisense strand to SEQ ID NO: 2565712
ugcaucacucacauucuuu

SEQ ID NO: 2565714 - RNA, 19 nt, Artificial Sequence
  Description of Artificial Sequence: Synthetic oligonucleotide
  Sense strand starting at position 625 of SEQ ID NO: 1888912
gaggacaugucucugugga

SEQ ID NO: 2565715 - RNA, 19 nt, Artificial Sequence
  Description of Artificial Sequence: Synthetic oligonucleotide
  Antisense strand to SEQ ID NO: 2565714
uccacagagacauguccuc

SEQ ID NO: 2565716 - RNA, 19 nt, Artificial Sequence
  Description of Artificial Sequence: Synthetic oligonucleotide
  Sense strand starting at position 626 of SEQ ID NO: 1888912
aggacaugucucuguggau

SEQ ID NO: 2565717 - RNA, 19 nt, Artificial Sequence
  Description of Artificial Sequence: Synthetic oligonucleotide
  Antisense strand to SEQ ID NO: 2565716
auccacagagacauguccu

SEQ ID NO: 2565718 - RNA, 19 nt, Artificial Sequence
  Description of Artificial Sequence: Synthetic oligonucleotide
  Sense strand starting at position 627 of SEQ ID NO: 1888912
ggacaugucucuguggaug

SEQ ID NO: 2565719 - RNA, 19 nt, Artificial Sequence
  Description of Artificial Sequence: Synthetic oligonucleotide
  Antisense strand to SEQ ID NO: 2565718
cauccacagagacaugucc

SEQ ID NO: 2565720 - RNA, 19 nt, Artificial Sequence
  Description of Artificial Sequence: Synthetic oligonucleotide
  Sense strand starting at position 630 of SEQ ID NO: 1888912
caugucucuguggauguaa

SEQ ID NO: 2565721 - RNA, 19 nt, Artificial Sequence
  Description of Artificial Sequence: Synthetic oligonucleotide
  Antisense strand to SEQ ID NO: 2565720
uuacauccacagagacaug

SEQ ID NO: 2565722 - RNA, 19 nt, Artificial Sequence
  Description of Artificial Sequence: Synthetic oligonucleotide
  Sense strand starting at position 681 of SEQ ID NO: 1888912
auuuaugugugauuguacu

SEQ ID NO: 2565723 - RNA, 19 nt, Artificial Sequence
  Description of Artificial Sequence: Synthetic oligonucleotide
  Antisense strand to SEQ ID NO: 2565722
aguacaaucacacauaaau

SEQ ID NO: 2565724 - RNA, 19 nt, Artificial Sequence
  Description of Artificial Sequence: Synthetic oligonucleotide
  Sense strand starting at position 688 of SEQ ID NO: 1888912
ugugauuguacugagguuu

SEQ ID NO: 2565725 - RNA, 19 nt, Artificial Sequence
  Description of Artificial Sequence: Synthetic oligonucleotide
  Antisense strand to SEQ ID NO: 2565724
aaaccucaguacaaucaca

SEQ ID NO: 2565726 - RNA, 19 nt, Artificial Sequence
  Description of Artificial Sequence: Synthetic oligonucleotide
  Sense strand starting at position 694 of SEQ ID NO: 1888912
uguacugagguuuaguaga

SEQ ID NO: 2565727 - RNA, 19 nt, Artificial Sequence
  Description of Artificial Sequence: Synthetic oligonucleotide
  Antisense strand to SEQ ID NO: 2565726
ucuacuaaaccucaguaca

SEQ ID NO: 2565728 - RNA, 19 nt, Artificial Sequence
  Description of Artificial Sequence: Synthetic oligonucleotide
  Sense strand starting at position 837 of SEQ ID NO: 1888912
ccagauauggcucauucuc

SEQ ID NO: 2565729 - RNA, 19 nt, Artificial Sequence
  Description of Artificial Sequence: Synthetic oligonucleotide
  Antisense strand to SEQ ID NO: 2565728
gagaaugagccauaucugg

SEQ ID NO: 2565730 - RNA, 19 nt, Artificial Sequence
  Description of Artificial Sequence: Synthetic oligonucleotide
  Sense strand starting at position 893 of SEQ ID NO: 1888912
guagguagguacucaacaa

SEQ ID NO: 2565731 - RNA, 19 nt, Artificial Sequence
  Description of Artificial Sequence: Synthetic oligonucleotide
  Antisense strand to SEQ ID NO: 2565730
uuguugaguaccuaccuac

SEQ ID NO: 2565732 - RNA, 19 nt, Artificial Sequence
  Description of Artificial Sequence: Synthetic oligonucleotide
  Sense strand starting at position 1061 of SEQ ID NO: 1888912
aggagauuccaguaccugu

SEQ ID NO: 2565733 - RNA, 19 nt, Artificial Sequence
  Description of Artificial Sequence: Synthetic oligonucleotide
  Antisense strand to SEQ ID NO: 2565732
acagguacuggaaucuccu

SEQ ID NO: 2565734 - RNA, 19 nt, Artificial Sequence
  Description of Artificial Sequence: Synthetic oligonucleotide
  Sense strand starting at position 1616 of SEQ ID NO: 1888912
cacacuuauggguggguua

SEQ ID NO: 2565735 - RNA, 19 nt, Artificial Sequence
  Description of Artificial Sequence: Synthetic oligonucleotide
  Antisense strand to SEQ ID NO: 2565734
uaacccacccauaagugug

SEQ ID NO: 2565736 - RNA, 19 nt, Artificial Sequence
  Description of Artificial Sequence: Synthetic oligonucleotide
  Sense strand starting at position 1617 of SEQ ID NO: 1888912
acacuuauggguggguuaa

SEQ ID NO: 2565737 - RNA, 19 nt, Artificial Sequence
  Description of Artificial Sequence: Synthetic oligonucleotide
  Antisense strand to SEQ ID NO: 2565736
uuaacccacccauaagugu

SEQ ID NO: 2565738 - RNA, 19 nt, Artificial Sequence
  Description of Artificial Sequence: Synthetic oligonucleotide
  Sense strand starting at position 1618 of SEQ ID NO: 1888912
cacuuauggguggguuaag

SEQ ID NO: 2565739 - RNA, 19 nt, Artificial Sequence
  Description of Artificial Sequence: Synthetic oligonucleotide
  Antisense strand to SEQ ID NO: 2565738
cuuaacccacccauaagug

SEQ ID NO: 2565740 - RNA, 19 nt, Artificial Sequence
  Description of Artificial Sequence: Synthetic oligonucleotide
  Sense strand starting at position 1772 of SEQ ID NO: 1888912
ucauuucucuguguccaau

SEQ ID NO: 2565741 - RNA, 19 nt, Artificial Sequence
  Description of Artificial Sequence: Synthetic oligonucleotide
  Antisense strand to SEQ ID NO: 2565740
auuggacacagagaaauga

SEQ ID NO: 2565742 - RNA, 19 nt, Artificial Sequence
  Description of Artificial Sequence: Synthetic oligonucleotide
  Sense strand starting at position 2108 of SEQ ID NO: 1888912
gaugccucuccucagggau

SEQ ID NO: 2565743 - RNA, 19 nt, Artificial Sequence
  Description of Artificial Sequence: Synthetic oligonucleotide
  Antisense strand to SEQ ID NO: 2565742
aucccugaggagaggcauc

SEQ ID NO: 2565744 - RNA, 19 nt, Artificial Sequence
  Description of Artificial Sequence: Synthetic oligonucleotide
  Sense strand starting at position 2114 of SEQ ID NO: 1888912
ucuccucagggauagcaua

SEQ ID NO: 2565745 - RNA, 19 nt, Artificial Sequence
  Description of Artificial Sequence: Synthetic oligonucleotide
  Antisense strand to SEQ ID NO: 2565744
uaugcuaucccugaggaga

SEQ ID NO: 2565746 - RNA, 19 nt, Artificial Sequence
  Description of Artificial Sequence: Synthetic oligonucleotide
  Sense strand starting at position 2121 of SEQ ID NO: 1888912
agggauagcauauguauuc

SEQ ID NO: 2565747 - RNA, 19 nt, Artificial Sequence
  Description of Artificial Sequence: Synthetic oligonucleotide
  Antisense strand to SEQ ID NO: 2565746
gaauacauaugcuaucccu

SEQ ID NO: 2565748 - RNA, 19 nt, Artificial Sequence
  Description of Artificial Sequence: Synthetic oligonucleotide
  Sense strand starting at position 2198 of SEQ ID NO: 1888912
gaaagauaugaguggcauc

SEQ ID NO: 2565749 - RNA, 19 nt, Artificial Sequence
  Description of Artificial Sequence: Synthetic oligonucleotide
  Antisense strand to SEQ ID NO: 2565748
gaugccacucauaucuuuc

SEQ ID NO: 2565750 - RNA, 19 nt, Artificial Sequence
  Description of Artificial Sequence: Synthetic oligonucleotide
  Sense strand starting at position 2242 of SEQ ID NO: 1888912
gcaggugcuggauguauuu

SEQ ID NO: 2565751 - RNA, 19 nt, Artificial Sequence
  Description of Artificial Sequence: Synthetic oligonucleotide
  Antisense strand to SEQ ID NO: 2565750
aaauacauccagcaccugc

SEQ ID NO: 2565752 - RNA, 19 nt, Artificial Sequence
  Description of Artificial Sequence: Synthetic oligonucleotide
  Sense strand starting at position 2454 of SEQ ID NO: 1888912
cauaguaagcugggaguaa

SEQ ID NO: 2565753 - RNA, 19 nt, Artificial Sequence
  Description of Artificial Sequence: Synthetic oligonucleotide
  Antisense strand to SEQ ID NO: 2565752
uuacucccagcuuacuaug

SEQ ID NO: 2565754 - RNA, 19 nt, Artificial Sequence
  Description of Artificial Sequence: Synthetic oligonucleotide
  Sense strand starting at position 2489 of SEQ ID NO: 1888912
cucaaagagguguaagcuu

SEQ ID NO: 2565755 - RNA, 19 nt, Artificial Sequence
  Description of Artificial Sequence: Synthetic oligonucleotide
  Antisense strand to SEQ ID NO: 2565754
aagcuuacaccucuuugag

SEQ ID NO: 2565756 - RNA, 19 nt, Artificial Sequence
  Description of Artificial Sequence: Synthetic oligonucleotide
  Sense strand starting at position 2575 of SEQ ID NO: 1888912
cuuauuuaccguuguaucu

SEQ ID NO: 2565757 - RNA, 19 nt, Artificial Sequence
  Description of Artificial Sequence: Synthetic oligonucleotide
  Antisense strand to SEQ ID NO: 2565756
agauacaacgguaaauaag

SEQ ID NO: 2565758 - RNA, 19 nt, Artificial Sequence
  Description of Artificial Sequence: Synthetic oligonucleotide
  Sense strand starting at position 3307 of SEQ ID NO: 1888912
ugugaauguucagugagag

SEQ ID NO: 2565759 - RNA, 19 nt, Artificial Sequence
  Description of Artificial Sequence: Synthetic oligonucleotide
  Antisense strand to SEQ ID NO: 2565758
cucucacugaacauucaca

SEQ ID NO: 2565760 - RNA, 19 nt, Artificial Sequence
  Description of Artificial Sequence: Synthetic oligonucleotide
  Sense strand starting at position 3308 of SEQ ID NO: 1888912
gugaauguucagugagagg

SEQ ID NO: 2565761 - RNA, 19 nt, Artificial Sequence
  Description of Artificial Sequence: Synthetic oligonucleotide
  Antisense strand to SEQ ID NO: 2565760
ccucucacugaacauucac

SEQ ID NO: 2565762 - RNA, 19 nt, Artificial Sequence
  Description of Artificial Sequence: Synthetic oligonucleotide
  Sense strand starting at position 3351 of SEQ ID NO: 1888912
cuuacuugucaugauauag

SEQ ID NO: 2565763 - RNA, 19 nt, Artificial Sequence
  Description of Artificial Sequence: Synthetic oligonucleotide
  Antisense strand to SEQ ID NO: 2565762
cuauaucaugacaaguaag

SEQ ID NO: 2565764 - RNA, 19 nt, Artificial Sequence
  Description of Artificial Sequence: Synthetic oligonucleotide
  Sense strand starting at position 3376 of SEQ ID NO: 1888912
agagaacaguucuugagcu

SEQ ID NO: 2565765 - RNA, 19 nt, Artificial Sequence
  Description of Artificial Sequence: Synthetic oligonucleotide
  Antisense strand to SEQ ID NO: 2565764
agcucaagaacuguucucu

SEQ ID NO: 2565766 - RNA, 19 nt, Artificial Sequence
  Description of Artificial Sequence: Synthetic oligonucleotide
  Sense strand starting at position 3378 of SEQ ID NO: 1888912
agaacaguucuugagcuuu

SEQ ID NO: 2565767 - RNA, 19 nt, Artificial Sequence
  Description of Artificial Sequence: Synthetic oligonucleotide
  Antisense strand to SEQ ID NO: 2565766
aaagcucaagaacuguucu

SEQ ID NO: 2565768 - RNA, 19 nt, Artificial Sequence
  Description of Artificial Sequence: Synthetic oligonucleotide
  Sense strand starting at position 3389 of SEQ ID NO: 1888912
ugagcuuugcauuaaagau

SEQ ID NO: 2565769 - RNA, 19 nt, Artificial Sequence
  Description of Artificial Sequence: Synthetic oligonucleotide
  Antisense strand to SEQ ID NO: 2565768
aucuuuaaugcaaagcuca

SEQ ID NO: 2565770 - RNA, 19 nt, Artificial Sequence
  Description of Artificial Sequence: Synthetic oligonucleotide
  Sense strand starting at position 3519 of SEQ ID NO: 1888912
ugaauauaacgccaaagcu

SEQ ID NO: 2565771 - RNA, 19 nt, Artificial Sequence
  Description of Artificial Sequence: Synthetic oligonucleotide
  Antisense strand to SEQ ID NO: 2565770
agcuuuggcguuauauuca

SEQ ID NO: 2565772 - RNA, 19 nt, Artificial Sequence
  Description of Artificial Sequence: Synthetic oligonucleotide
  Sense strand starting at position 3594 of SEQ ID NO: 1888912
acaguuguucucuaacaug

SEQ ID NO: 2565773 - RNA, 19 nt, Artificial Sequence
  Description of Artificial Sequence: Synthetic oligonucleotide
  Antisense strand to SEQ ID NO: 2565772
cauguuagagaacaacugu

SEQ ID NO: 2565774 - RNA, 19 nt, Artificial Sequence
  Description of Artificial Sequence: Synthetic oligonucleotide
  Sense strand starting at position 3612 of SEQ ID NO: 1888912
gcaccagaaucaucugaag

SEQ ID NO: 2565775 - RNA, 19 nt, Artificial Sequence
  Description of Artificial Sequence: Synthetic oligonucleotide
  Antisense strand to SEQ ID NO: 2565774
cuucagaugauucuggugc

SEQ ID NO: 2565776 - RNA, 19 nt, Artificial Sequence
  Description of Artificial Sequence: Synthetic oligonucleotide
  Sense strand starting at position 3623 of SEQ ID NO: 1888912
aucugaagaccuggguaau

SEQ ID NO: 2565777 - RNA, 19 nt, Artificial Sequence
  Description of Artificial Sequence: Synthetic oligonucleotide
  Antisense strand to SEQ ID NO: 2565776
auuacccaggucuucagau

SEQ ID NO: 2565778 - RNA, 19 nt, Artificial Sequence
  Description of Artificial Sequence: Synthetic oligonucleotide
  Sense strand starting at position 3624 of SEQ ID NO: 1888912
ucugaagaccuggguaaua

SEQ ID NO: 2565779 - RNA, 19 nt, Artificial Sequence
  Description of Artificial Sequence: Synthetic oligonucleotide
  Antisense strand to SEQ ID NO: 2565778
uauuacccaggucuucaga

SEQ ID NO: 2565780 - RNA, 19 nt, Artificial Sequence
  Description of Artificial Sequence: Synthetic oligonucleotide
  Sense strand starting at position 3635 of SEQ ID NO: 1888912
ggguaauauacagguuaca

SEQ ID NO: 2565781 - RNA, 19 nt, Artificial Sequence
  Description of Artificial Sequence: Synthetic oligonucleotide
  Antisense strand to SEQ ID NO: 2565780
uguaaccuguauauuaccc

SEQ ID NO: 2565782 - RNA, 19 nt, Artificial Sequence
  Description of Artificial Sequence: Synthetic oligonucleotide
  Sense strand starting at position 3750 of SEQ ID NO: 1888912
cugggagaaucacuaaugu

SEQ ID NO: 2565783 - RNA, 19 nt, Artificial Sequence
  Description of Artificial Sequence: Synthetic oligonucleotide
  Antisense strand to SEQ ID NO: 2565782
acauuagugauucucccag

SEQ ID NO: 2565784 - RNA, 19 nt, Artificial Sequence
  Description of Artificial Sequence: Synthetic oligonucleotide
  Sense strand starting at position 157 of SEQ ID NO: 1888913
gugucucgagaauauauaa

SEQ ID NO: 2565785 - RNA, 19 nt, Artificial Sequence
  Description of Artificial Sequence: Synthetic oligonucleotide
  Antisense strand to SEQ ID NO: 2565784
uuauauauucucgagacac

SEQ ID NO: 2565786 - RNA, 19 nt, Artificial Sequence
  Description of Artificial Sequence: Synthetic oligonucleotide
  Sense strand starting at position 448 of SEQ ID NO: 1888913
ucugauuaccuaggucuga

SEQ ID NO: 2565787 - RNA, 19 nt, Artificial Sequence
  Description of Artificial Sequence: Synthetic oligonucleotide
  Antisense strand to SEQ ID NO: 2565786
ucagaccuagguaaucaga

SEQ ID NO: 2565788 - RNA, 19 nt, Artificial Sequence
  Description of Artificial Sequence: Synthetic oligonucleotide
  Sense strand starting at position 478 of SEQ ID NO: 1888913
agaguuuauuucuaacaag

SEQ ID NO: 2565789 - RNA, 19 nt, Artificial Sequence
  Description of Artificial Sequence: Synthetic oligonucleotide
  Antisense strand to SEQ ID NO: 2565788
cuuguuagaaauaaacucu

SEQ ID NO: 2565790 - RNA, 19 nt, Artificial Sequence
  Description of Artificial Sequence: Synthetic oligonucleotide
  Sense strand starting at position 490 of SEQ ID NO: 1888913
uaacaaguuccuggaggau

SEQ ID NO: 2565791 - RNA, 19 nt, Artificial Sequence
  Description of Artificial Sequence: Synthetic oligonucleotide
  Antisense strand to SEQ ID NO: 2565790
auccuccaggaacuuguua

SEQ ID NO: 2565792 - RNA, 19 nt, Artificial Sequence
  Description of Artificial Sequence: Synthetic oligonucleotide
  Sense strand starting at position 528 of SEQ ID NO: 1888913
ggcaucaagagagguauaa

SEQ ID NO: 2565793 - RNA, 19 nt, Artificial Sequence
  Description of Artificial Sequence: Synthetic oligonucleotide
  Antisense strand to SEQ ID NO: 2565792
uuauaccucucuugaugcc

SEQ ID NO: 2565794 - RNA, 19 nt, Artificial Sequence
  Description of Artificial Sequence: Synthetic oligonucleotide
  Sense strand starting at position 539 of SEQ ID NO: 1888913
agguauaaagucugauaaa

SEQ ID NO: 2565795 - RNA, 19 nt, Artificial Sequence
  Description of Artificial Sequence: Synthetic oligonucleotide
  Antisense strand to SEQ ID NO: 2565794
uuuaucagacuuuauaccu

SEQ ID NO: 2565796 - RNA, 19 nt, Artificial Sequence
  Description of Artificial Sequence: Synthetic oligonucleotide
  Sense strand starting at position 635 of SEQ ID NO: 1888913
gaaucuuuacugcagguua

SEQ ID NO: 2565797 - RNA, 19 nt, Artificial Sequence
  Description of Artificial Sequence: Synthetic oligonucleotide
  Antisense strand to SEQ ID NO: 2565796
uaaccugcaguaaagauuc

SEQ ID NO: 2565798 - RNA, 19 nt, Artificial Sequence
  Description of Artificial Sequence: Synthetic oligonucleotide
  Sense strand starting at position 646 of SEQ ID NO: 1888913
gcagguuagauugggagaa

SEQ ID NO: 2565799 - RNA, 19 nt, Artificial Sequence
  Description of Artificial Sequence: Synthetic oligonucleotide
  Antisense strand to SEQ ID NO: 2565798
uucucccaaucuaaccugc

SEQ ID NO: 2565800 - RNA, 19 nt, Artificial Sequence
  Description of Artificial Sequence: Synthetic oligonucleotide
  Sense strand starting at position 658 of SEQ ID NO: 1888913
gggagaaucugggagagaa

SEQ ID NO: 2565801 - RNA, 19 nt, Artificial Sequence
  Description of Artificial Sequence: Synthetic oligonucleotide
  Antisense strand to SEQ ID NO: 2565800
uucucucccagauucuccc

SEQ ID NO: 2565802 - RNA, 19 nt, Artificial Sequence
  Description of Artificial Sequence: Synthetic oligonucleotide
  Sense strand starting at position 703 of SEQ ID NO: 1888913
gucccaaauguuuaagaac

SEQ ID NO: 2565803 - RNA, 19 nt, Artificial Sequence
  Description of Artificial Sequence: Synthetic oligonucleotide
  Antisense strand to SEQ ID NO: 2565802
guucuuaaacauuugggac

SEQ ID NO: 2565804 - RNA, 19 nt, Artificial Sequence
  Description of Artificial Sequence: Synthetic oligonucleotide
  Sense strand starting at position 711 of SEQ ID NO: 1888913
uguuuaagaacuugaggac

SEQ ID NO: 2565805 - RNA, 19 nt, Artificial Sequence
  Description of Artificial Sequence: Synthetic oligonucleotide
  Antisense strand to SEQ ID NO: 2565804
guccucaaguucuuaaaca

SEQ ID NO: 2565806 - RNA, 19 nt, Artificial Sequence
  Description of Artificial Sequence: Synthetic oligonucleotide
  Sense strand starting at position 859 of SEQ ID NO: 1888913
agaucagcuuagcuaagaa

SEQ ID NO: 2565807 - RNA, 19 nt, Artificial Sequence
  Description of Artificial Sequence: Synthetic oligonucleotide
  Antisense strand to SEQ ID NO: 2565806
uucuuagcuaagcugaucu

SEQ ID NO: 2565808 - RNA, 19 nt, Artificial Sequence
  Description of Artificial Sequence: Synthetic oligonucleotide
  Sense strand starting at position 975 of SEQ ID NO: 1888913
accuguacucccuagguga

SEQ ID NO: 2565809 - RNA, 19 nt, Artificial Sequence
  Description of Artificial Sequence: Synthetic oligonucleotide
  Antisense strand to SEQ ID NO: 2565808
ucaccuagggaguacaggu

SEQ ID NO: 2565810 - RNA, 19 nt, Artificial Sequence
  Description of Artificial Sequence: Synthetic oligonucleotide
  Sense strand starting at position 1179 of SEQ ID NO: 1888913
ucaagaagagucuguaaua

SEQ ID NO: 2565811 - RNA, 19 nt, Artificial Sequence
  Description of Artificial Sequence: Synthetic oligonucleotide
  Antisense strand to SEQ ID NO: 2565810
uauuacagacucuucuuga

SEQ ID NO: 2565812 - RNA, 19 nt, Artificial Sequence
  Description of Artificial Sequence: Synthetic oligonucleotide
  Sense strand starting at position 1180 of SEQ ID NO: 1888913
caagaagagucuguaauag

SEQ ID NO: 2565813 - RNA, 19 nt, Artificial Sequence
  Description of Artificial Sequence: Synthetic oligonucleotide
  Antisense strand to SEQ ID NO: 2565812
cuauuacagacucuucuug

SEQ ID NO: 2565814 - RNA, 19 nt, Artificial Sequence
  Description of Artificial Sequence: Synthetic oligonucleotide
  Sense strand starting at position 1371 of SEQ ID NO: 1888913
aucauuugugcccgucuga

SEQ ID NO: 2565815 - RNA, 19 nt, Artificial Sequence
  Description of Artificial Sequence: Synthetic oligonucleotide
  Antisense strand to SEQ ID NO: 2565814
ucagacgggcacaaaugau

SEQ ID NO: 2565816 - RNA, 19 nt, Artificial Sequence
  Description of Artificial Sequence: Synthetic oligonucleotide
  Sense strand starting at position 1529 of SEQ ID NO: 1888913
augcacucaguccauauau

SEQ ID NO: 2565817 - RNA, 19 nt, Artificial Sequence
  Description of Artificial Sequence: Synthetic oligonucleotide
  Antisense strand to SEQ ID NO: 2565816
auauauggacugagugcau

SEQ ID NO: 2565818 - RNA, 19 nt, Artificial Sequence
  Description of Artificial Sequence: Synthetic oligonucleotide
  Sense strand starting at position 1566 of SEQ ID NO: 1888913
ggcuccaucucauugaauc

SEQ ID NO: 2565819 - RNA, 19 nt, Artificial Sequence
  Description of Artificial Sequence: Synthetic oligonucleotide
  Antisense strand to SEQ ID NO: 2565818
gauucaaugagauggagcc

SEQ ID NO: 2565820 - RNA, 19 nt, Artificial Sequence
  Description of Artificial Sequence: Synthetic oligonucleotide
  Sense strand starting at position 1577 of SEQ ID NO: 1888913
auugaauccuuggcuuaau

SEQ ID NO: 2565821 - RNA, 19 nt, Artificial Sequence
  Description of Artificial Sequence: Synthetic oligonucleotide
  Antisense strand to SEQ ID NO: 2565820
auuaagccaaggauucaau

SEQ ID NO: 2565822 - RNA, 19 nt, Artificial Sequence
  Description of Artificial Sequence: Synthetic oligonucleotide
  Sense strand starting at position 1578 of SEQ ID NO: 1888913
uugaauccuuggcuuaaua

SEQ ID NO: 2565823 - RNA, 19 nt, Artificial Sequence
  Description of Artificial Sequence: Synthetic oligonucleotide
  Antisense strand to SEQ ID NO: 2565822
uauuaagccaaggauucaa

SEQ ID NO: 2565824 - RNA, 19 nt, Artificial Sequence
  Description of Artificial Sequence: Synthetic oligonucleotide
  Sense strand starting at position 1722 of SEQ ID NO: 1888913
ucuggauaccugcauacau

SEQ ID NO: 2565825 - RNA, 19 nt, Artificial Sequence
  Description of Artificial Sequence: Synthetic oligonucleotide
  Antisense strand to SEQ ID NO: 2565824
auguaugcagguauccaga

SEQ ID NO: 2565826 - RNA, 19 nt, Artificial Sequence
  Description of Artificial Sequence: Synthetic oligonucleotide
  Sense strand starting at position 1732 of SEQ ID NO: 1888913
ugcauacauggacauuauu

SEQ ID NO: 2565827 - RNA, 19 nt, Artificial Sequence
  Description of Artificial Sequence: Synthetic oligonucleotide
  Antisense strand to SEQ ID NO: 2565826
aauaauguccauguaugca

SEQ ID NO: 2565828 - RNA, 19 nt, Artificial Sequence
  Description of Artificial Sequence: Synthetic oligonucleotide
  Sense strand starting at position 2036 of SEQ ID NO: 1888913
cagagaagguucucuguua

SEQ ID NO: 2565829 - RNA, 19 nt, Artificial Sequence
  Description of Artificial Sequence: Synthetic oligonucleotide
  Antisense strand to SEQ ID NO: 2565828
uaacagagaaccuucucug

SEQ ID NO: 2565830 - RNA, 19 nt, Artificial Sequence
  Description of Artificial Sequence: Synthetic oligonucleotide
  Sense strand starting at position 2102 of SEQ ID NO: 1888913
guugggagagggugucaau

SEQ ID NO: 2565831 - RNA, 19 nt, Artificial Sequence
  Description of Artificial Sequence: Synthetic oligonucleotide
  Antisense strand to SEQ ID NO: 2565830
auugacacccucucccaac

SEQ ID NO: 2565832 - RNA, 19 nt, Artificial Sequence
  Description of Artificial Sequence: Synthetic oligonucleotide
  Sense strand starting at position 2195 of SEQ ID NO: 1888913
acacauauucuuugaggca

SEQ ID NO: 2565833 - RNA, 19 nt, Artificial Sequence
  Description of Artificial Sequence: Synthetic oligonucleotide
  Antisense strand to SEQ ID NO: 2565832
ugccucaaagaauaugugu

SEQ ID NO: 2565834 - RNA, 19 nt, Artificial Sequence
  Description of Artificial Sequence: Synthetic oligonucleotide
  Sense strand starting at position 2276 of SEQ ID NO: 1888913
guacuaagugcucaauacu

SEQ ID NO: 2565835 - RNA, 19 nt, Artificial Sequence
  Description of Artificial Sequence: Synthetic oligonucleotide
  Antisense strand to SEQ ID NO: 2565834
aguauugagcacuuaguac

SEQ ID NO: 2565836 - RNA, 19 nt, Artificial Sequence
  Description of Artificial Sequence: Synthetic oligonucleotide
  Sense strand starting at position 2503 of SEQ ID NO: 1888913
augucugugggagggaaua

SEQ ID NO: 2565837 - RNA, 19 nt, Artificial Sequence
  Description of Artificial Sequence: Synthetic oligonucleotide
  Antisense strand to SEQ ID NO: 2565836
uauucccucccacagacau

SEQ ID NO: 2565838 - RNA, 19 nt, Artificial Sequence
  Description of Artificial Sequence: Synthetic oligonucleotide
  Sense strand starting at position 2574 of SEQ ID NO: 1888913
augacaugaggaugcuuau

SEQ ID NO: 2565839 - RNA, 19 nt, Artificial Sequence
  Description of Artificial Sequence: Synthetic oligonucleotide
  Antisense strand to SEQ ID NO: 2565838
auaagcauccucaugucau

SEQ ID NO: 2565840 - RNA, 19 nt, Artificial Sequence
  Description of Artificial Sequence: Synthetic oligonucleotide
  Sense strand starting at position 2580 of SEQ ID NO: 1888913
ugaggaugcuuauucucca

SEQ ID NO: 2565841 - RNA, 19 nt, Artificial Sequence
  Description of Artificial Sequence: Synthetic oligonucleotide
  Antisense strand to SEQ ID NO: 2565840
uggagaauaagcauccuca

SEQ ID NO: 2565842 - RNA, 19 nt, Artificial Sequence
  Description of Artificial Sequence: Synthetic oligonucleotide
  Sense strand starting at position 2581 of SEQ ID NO: 1888913
gaggaugcuuauucuccau

SEQ ID NO: 2565843 - RNA, 19 nt, Artificial Sequence
  Description of Artificial Sequence: Synthetic oligonucleotide
  Antisense strand to SEQ ID NO: 2565842
auggagaauaagcauccuc

SEQ ID NO: 2565844 - RNA, 19 nt, Artificial Sequence
  Description of Artificial Sequence: Synthetic oligonucleotide
  Sense strand starting at position 2583 of SEQ ID NO: 1888913
ggaugcuuauucuccauga

SEQ ID NO: 2565845 - RNA, 19 nt, Artificial Sequence
  Description of Artificial Sequence: Synthetic oligonucleotide
  Antisense strand to SEQ ID NO: 2565844
ucauggagaauaagcaucc

SEQ ID NO: 2565846 - RNA, 19 nt, Artificial Sequence
  Description of Artificial Sequence: Synthetic oligonucleotide
  Sense strand starting at position 2928 of SEQ ID NO: 1888913
guguguggcaaggaaacuu

SEQ ID NO: 2565847 - RNA, 19 nt, Artificial Sequence
  Description of Artificial Sequence: Synthetic oligonucleotide
  Antisense strand to SEQ ID NO: 2565846
aaguuuccuugccacacac

SEQ ID NO: 2565848 - RNA, 19 nt, Artificial Sequence
  Description of Artificial Sequence: Synthetic oligonucleotide
  Sense strand starting at position 3072 of SEQ ID NO: 1888913
ggcucaauuccugacacac

SEQ ID NO: 2565849 - RNA, 19 nt, Artificial Sequence
  Description of Artificial Sequence: Synthetic oligonucleotide
  Antisense strand to SEQ ID NO: 2565848
gugugucaggaauugagcc

SEQ ID NO: 2565850 - RNA, 19 nt, Artificial Sequence
  Description of Artificial Sequence: Synthetic oligonucleotide
  Sense strand starting at position 3144 of SEQ ID NO: 1888913
auaggaagucccggagaga

SEQ ID NO: 2565851 - RNA, 19 nt, Artificial Sequence
  Description of Artificial Sequence: Synthetic oligonucleotide
  Antisense strand to SEQ ID NO: 2565850
ucucuccgggacuuccuau

SEQ ID NO: 2565852 - RNA, 19 nt, Artificial Sequence
  Description of Artificial Sequence: Synthetic oligonucleotide
  Sense strand starting at position 3159 of SEQ ID NO: 1888913
gagagacacuguccauuau

SEQ ID NO: 2565853 - RNA, 19 nt, Artificial Sequence
  Description of Artificial Sequence: Synthetic oligonucleotide
  Antisense strand to SEQ ID NO: 2565852
auaauggacagugucucuc

SEQ ID NO: 2565854 - RNA, 19 nt, Artificial Sequence
  Description of Artificial Sequence: Synthetic oligonucleotide
  Sense strand starting at position 3240 of SEQ ID NO: 1888913
uuggauuguucagcagaag

SEQ ID NO: 2565855 - RNA, 19 nt, Artificial Sequence
  Description of Artificial Sequence: Synthetic oligonucleotide
  Antisense strand to SEQ ID NO: 2565854
cuucugcugaacaauccaa

SEQ ID NO: 2565856 - RNA, 19 nt, Artificial Sequence
  Description of Artificial Sequence: Synthetic oligonucleotide
  Sense strand starting at position 3463 of SEQ ID NO: 1888913
gagacagauugagauuaaa

SEQ ID NO: 2565857 - RNA, 19 nt, Artificial Sequence
  Description of Artificial Sequence: Synthetic oligonucleotide
  Antisense strand to SEQ ID NO: 2565856
uuuaaucucaaucugucuc

SEQ ID NO: 2565858 - RNA, 19 nt, Artificial Sequence
  Description of Artificial Sequence: Synthetic oligonucleotide
  Sense strand starting at position 3754 of SEQ ID NO: 1888913
uuaagugagcaucagaauc

SEQ ID NO: 2565859 - RNA, 19 nt, Artificial Sequence
  Description of Artificial Sequence: Synthetic oligonucleotide
  Antisense strand to SEQ ID NO: 2565858
gauucugaugcucacuuaa

SEQ ID NO: 2565860 - RNA, 19 nt, Artificial Sequence
  Description of Artificial Sequence: Synthetic oligonucleotide
  Sense strand starting at position 3762 of SEQ ID NO: 1888913
gcaucagaaucaguugaga

SEQ ID NO: 2565861 - RNA, 19 nt, Artificial Sequence
  Description of Artificial Sequence: Synthetic oligonucleotide
  Antisense strand to SEQ ID NO: 2565860
ucucaacugauucugaugc

SEQ ID NO: 2565862 - RNA, 19 nt, Artificial Sequence
  Description of Artificial Sequence: Synthetic oligonucleotide
  Sense strand starting at position 3813 of SEQ ID NO: 1888913
gguguaguaggucagggau

SEQ ID NO: 2565863 - RNA, 19 nt, Artificial Sequence
  Description of Artificial Sequence: Synthetic oligonucleotide
  Antisense strand to SEQ ID NO: 2565862
aucccugaccuacuacacc

SEQ ID NO: 2565864 - RNA, 19 nt, Artificial Sequence
  Description of Artificial Sequence: Synthetic oligonucleotide
  Sense strand starting at position 18 of SEQ ID NO: 1888914
cacagaaauguuuggcuaa

SEQ ID NO: 2565865 - RNA, 19 nt, Artificial Sequence
  Description of Artificial Sequence: Synthetic oligonucleotide
  Antisense strand to SEQ ID NO: 2565864
uuagccaaacauuucugug

SEQ ID NO: 2565866 - RNA, 19 nt, Artificial Sequence
  Description of Artificial Sequence: Synthetic oligonucleotide
  Sense strand starting at position 86 of SEQ ID NO: 1888914
ugcaacuuggaucguguaa

SEQ ID NO: 2565867 - RNA, 19 nt, Artificial Sequence
  Description of Artificial Sequence: Synthetic oligonucleotide
  Antisense strand to SEQ ID NO: 2565866
uuacacgauccaaguugca

SEQ ID NO: 2565868 - RNA, 19 nt, Artificial Sequence
  Description of Artificial Sequence: Synthetic oligonucleotide
  Sense strand starting at position 98 of SEQ ID NO: 1888914
cguguaaauaaagguacaa

SEQ ID NO: 2565869 - RNA, 19 nt, Artificial Sequence
  Description of Artificial Sequence: Synthetic oligonucleotide
  Antisense strand to SEQ ID NO: 2565868
uuguaccuuuauuuacacg

SEQ ID NO: 2565870 - RNA, 19 nt, Artificial Sequence
  Description of Artificial Sequence: Synthetic oligonucleotide
  Sense strand starting at position 171 of SEQ ID NO: 1888914
gcucaauuucgaugcaucu

SEQ ID NO: 2565871 - RNA, 19 nt, Artificial Sequence
  Description of Artificial Sequence: Synthetic oligonucleotide
  Antisense strand to SEQ ID NO: 2565870
agaugcaucgaaauugagc

SEQ ID NO: 2565872 - RNA, 19 nt, Artificial Sequence
  Description of Artificial Sequence: Synthetic oligonucleotide
  Sense strand starting at position 213 of SEQ ID NO: 1888914
cuuggauuccgggaggcaa

SEQ ID NO: 2565873 - RNA, 19 nt, Artificial Sequence
  Description of Artificial Sequence: Synthetic oligonucleotide
  Antisense strand to SEQ ID NO: 2565872
uugccucccggaauccaag

SEQ ID NO: 2565874 - RNA, 19 nt, Artificial Sequence
  Description of Artificial Sequence: Synthetic oligonucleotide
  Sense strand starting at position 356 of SEQ ID NO: 1888914
cgggcuuggucuuucagga

SEQ ID NO: 2565875 - RNA, 19 nt, Artificial Sequence
  Description of Artificial Sequence: Synthetic oligonucleotide
  Antisense strand to SEQ ID NO: 2565874
uccugaaagaccaagcccg

SEQ ID NO: 2565876 - RNA, 19 nt, Artificial Sequence
  Description of Artificial Sequence: Synthetic oligonucleotide
  Sense strand starting at position 525 of SEQ ID NO: 1888914
ccguuugagccuggagauu

SEQ ID NO: 2565877 - RNA, 19 nt, Artificial Sequence
  Description of Artificial Sequence: Synthetic oligonucleotide
  Antisense strand to SEQ ID NO: 2565876
aaucuccaggcucaaacgg

SEQ ID NO: 2565878 - RNA, 19 nt, Artificial Sequence
  Description of Artificial Sequence: Synthetic oligonucleotide
  Sense strand starting at position 853 of SEQ ID NO: 1888914
agaggaguuugggugucuu

SEQ ID NO: 2565879 - RNA, 19 nt, Artificial Sequence
  Description of Artificial Sequence: Synthetic oligonucleotide
  Antisense strand to SEQ ID NO: 2565878
aagacacccaaacuccucu

SEQ ID NO: 2565880 - RNA, 19 nt, Artificial Sequence
  Description of Artificial Sequence: Synthetic oligonucleotide
  Sense strand starting at position 978 of SEQ ID NO: 1888914
ucaagagauuugcacagaa

SEQ ID NO: 2565881 - RNA, 19 nt, Artificial Sequence
  Description of Artificial Sequence: Synthetic oligonucleotide
  Antisense strand to SEQ ID NO: 2565880
uucugugcaaaucucuuga

SEQ ID NO: 2565882 - RNA, 19 nt, Artificial Sequence
  Description of Artificial Sequence: Synthetic oligonucleotide
  Sense strand starting at position 1176 of SEQ ID NO: 1888914
uccugaaaucgacagcuca

SEQ ID NO: 2565883 - RNA, 19 nt, Artificial Sequence
  Description of Artificial Sequence: Synthetic oligonucleotide
  Antisense strand to SEQ ID NO: 2565882
ugagcugucgauuucagga

SEQ ID NO: 2565884 - RNA, 19 nt, Artificial Sequence
  Description of Artificial Sequence: Synthetic oligonucleotide
  Sense strand starting at position 1238 of SEQ ID NO: 1888914
ccggguuggaauuguggua

SEQ ID NO: 2565885 - RNA, 19 nt, Artificial Sequence
  Description of Artificial Sequence: Synthetic oligonucleotide
  Antisense strand to SEQ ID NO: 2565884
uaccacaauuccaacccgg

SEQ ID NO: 2565886 - RNA, 19 nt, Artificial Sequence
  Description of Artificial Sequence: Synthetic oligonucleotide
  Sense strand starting at position 1711 of SEQ ID NO: 1888914
gugguauucugauugggaa

SEQ ID NO: 2565887 - RNA, 19 nt, Artificial Sequence
  Description of Artificial Sequence: Synthetic oligonucleotide
  Antisense strand to SEQ ID NO: 2565886
uucccaaucagaauaccac

SEQ ID NO: 2565888 - RNA, 19 nt, Artificial Sequence
  Description of Artificial Sequence: Synthetic oligonucleotide
  Sense strand starting at position 1712 of SEQ ID NO: 1888914
ugguauucugauugggaag

SEQ ID NO: 2565889 - RNA, 19 nt, Artificial Sequence
  Description of Artificial Sequence: Synthetic oligonucleotide
  Antisense strand to SEQ ID NO: 2565888
cuucccaaucagaauacca

SEQ ID NO: 2565890 - RNA, 19 nt, Artificial Sequence
  Description of Artificial Sequence: Synthetic oligonucleotide
  Sense strand starting at position 2341 of SEQ ID NO: 1888914
gguaccugcgggugaauaa

SEQ ID NO: 2565891 - RNA, 19 nt, Artificial Sequence
  Description of Artificial Sequence: Synthetic oligonucleotide
  Antisense strand to SEQ ID NO: 2565890
uuauucacccgcagguacc

SEQ ID NO: 2565892 - RNA, 19 nt, Artificial Sequence
  Description of Artificial Sequence: Synthetic oligonucleotide
  Sense strand starting at position 2342 of SEQ ID NO: 1888914
guaccugcgggugaauaaa

SEQ ID NO: 2565893 - RNA, 19 nt, Artificial Sequence
  Description of Artificial Sequence: Synthetic oligonucleotide
  Antisense strand to SEQ ID NO: 2565892
uuuauucacccgcagguac

SEQ ID NO: 2565894 - RNA, 19 nt, Artificial Sequence
  Description of Artificial Sequence: Synthetic oligonucleotide
  Sense strand starting at position 2496 of SEQ ID NO: 1888914
ccgaaaguguggcucucaa

SEQ ID NO: 2565895 - RNA, 19 nt, Artificial Sequence
  Description of Artificial Sequence: Synthetic oligonucleotide
  Antisense strand to SEQ ID NO: 2565894
uugagagccacacuuucgg

SEQ ID NO: 2565896 - RNA, 19 nt, Artificial Sequence
  Description of Artificial Sequence: Synthetic oligonucleotide
  Sense strand starting at position 2526 of SEQ ID NO: 1888914
gaggaugaaucuuggaaca

SEQ ID NO: 2565897 - RNA, 19 nt, Artificial Sequence
  Description of Artificial Sequence: Synthetic oligonucleotide
  Antisense strand to SEQ ID NO: 2565896
uguuccaagauucauccuc

SEQ ID NO: 2565898 - RNA, 19 nt, Artificial Sequence
  Description of Artificial Sequence: Synthetic oligonucleotide
  Sense strand starting at position 2528 of SEQ ID NO: 1888914
ggaugaaucuuggaacaac

SEQ ID NO: 2565899 - RNA, 19 nt, Artificial Sequence
  Description of Artificial Sequence: Synthetic oligonucleotide
  Antisense strand to SEQ ID NO: 2565898
guuguuccaagauucaucc

SEQ ID NO: 2565900 - RNA, 19 nt, Artificial Sequence
  Description of Artificial Sequence: Synthetic oligonucleotide
  Sense strand starting at position 2577 of SEQ ID NO: 1888914
uacgaauuaguguggaaga

SEQ ID NO: 2565901 - RNA, 19 nt, Artificial Sequence
  Description of Artificial Sequence: Synthetic oligonucleotide
  Antisense strand to SEQ ID NO: 2565900
ucuuccacacuaauucgua

SEQ ID NO: 2565902 - RNA, 19 nt, Artificial Sequence
  Description of Artificial Sequence: Synthetic oligonucleotide
  Sense strand starting at position 2627 of SEQ ID NO: 1888914
agguuaaguagaggcaauu

SEQ ID NO: 2565903 - RNA, 19 nt, Artificial Sequence
  Description of Artificial Sequence: Synthetic oligonucleotide
  Antisense strand to SEQ ID NO: 2565902
aauugccucuacuuaaccu

SEQ ID NO: 2565904 - RNA, 19 nt, Artificial Sequence
  Description of Artificial Sequence: Synthetic oligonucleotide
  Sense strand starting at position 2654 of SEQ ID NO: 1888914
ggaucauucuugccaguuu

SEQ ID NO: 2565905 - RNA, 19 nt, Artificial Sequence
  Description of Artificial Sequence: Synthetic oligonucleotide
  Antisense strand to SEQ ID NO: 2565904
aaacuggcaagaaugaucc

SEQ ID NO: 2565906 - RNA, 19 nt, Artificial Sequence
  Description of Artificial Sequence: Synthetic oligonucleotide
  Sense strand starting at position 2673 of SEQ ID NO: 1888914
caaagucuuggugaaacuu

SEQ ID NO: 2565907 - RNA, 19 nt, Artificial Sequence
  Description of Artificial Sequence: Synthetic oligonucleotide
  Antisense strand to SEQ ID NO: 2565906
aaguuucaccaagacuuug

SEQ ID NO: 2565908 - RNA, 19 nt, Artificial Sequence
  Description of Artificial Sequence: Synthetic oligonucleotide
  Sense strand starting at position 2682 of SEQ ID NO: 1888914
ggugaaacuucuuccugcu

SEQ ID NO: 2565909 - RNA, 19 nt, Artificial Sequence
  Description of Artificial Sequence: Synthetic oligonucleotide
  Antisense strand to SEQ ID NO: 2565908
agcaggaagaaguuucacc

SEQ ID NO: 2565910 - RNA, 19 nt, Artificial Sequence
  Description of Artificial Sequence: Synthetic oligonucleotide
  Sense strand starting at position 2830 of SEQ ID NO: 1888914
ugauucuuacacuaucguu

SEQ ID NO: 2565911 - RNA, 19 nt, Artificial Sequence
  Description of Artificial Sequence: Synthetic oligonucleotide
  Antisense strand to SEQ ID NO: 2565910
aacgauaguguaagaauca

SEQ ID NO: 2565912 - RNA, 19 nt, Artificial Sequence
  Description of Artificial Sequence: Synthetic oligonucleotide
  Sense strand starting at position 2843 of SEQ ID NO: 1888914
aucguugcgacauauacau

SEQ ID NO: 2565913 - RNA, 19 nt, Artificial Sequence
  Description of Artificial Sequence: Synthetic oligonucleotide
  Antisense strand to SEQ ID NO: 2565912
auguauaugucgcaacgau

SEQ ID NO: 2565914 - RNA, 19 nt, Artificial Sequence
  Description of Artificial Sequence: Synthetic oligonucleotide
  Sense strand starting at position 2873 of SEQ ID NO: 1888914
agcauuagauguccuaacu

SEQ ID NO: 2565915 - RNA, 19 nt, Artificial Sequence
  Description of Artificial Sequence: Synthetic oligonucleotide
  Antisense strand to SEQ ID NO: 2565914
aguuaggacaucuaaugcu

SEQ ID NO: 2565916 - RNA, 19 nt, Artificial Sequence
  Description of Artificial Sequence: Synthetic oligonucleotide
  Sense strand starting at position 2883 of SEQ ID NO: 1888914
guccuaacucacugcuagu

SEQ ID NO: 2565917 - RNA, 19 nt, Artificial Sequence
  Description of Artificial Sequence: Synthetic oligonucleotide
  Antisense strand to SEQ ID NO: 2565916
acuagcagugaguuaggac

SEQ ID NO: 2565918 - RNA, 19 nt, Artificial Sequence
  Description of Artificial Sequence: Synthetic oligonucleotide
  Sense strand starting at position 2957 of SEQ ID NO: 1888914
agagaacuuucuguagaug

SEQ ID NO: 2565919 - RNA, 19 nt, Artificial Sequence
  Description of Artificial Sequence: Synthetic oligonucleotide
  Antisense strand to SEQ ID NO: 2565918
caucuacagaaaguucucu

SEQ ID NO: 2565920 - RNA, 19 nt, Artificial Sequence
  Description of Artificial Sequence: Synthetic oligonucleotide
  Sense strand starting at position 3064 of SEQ ID NO: 1888914
guuuaaauacuugauguca

SEQ ID NO: 2565921 - RNA, 19 nt, Artificial Sequence
  Description of Artificial Sequence: Synthetic oligonucleotide
  Antisense strand to SEQ ID NO: 2565920
ugacaucaaguauuuaaac

SEQ ID NO: 2565922 - RNA, 19 nt, Artificial Sequence
  Description of Artificial Sequence: Synthetic oligonucleotide
  Sense strand starting at position 3145 of SEQ ID NO: 1888914
ugcgcauacuccuuaauga

SEQ ID NO: 2565923 - RNA, 19 nt, Artificial Sequence
  Description of Artificial Sequence: Synthetic oligonucleotide
  Antisense strand to SEQ ID NO: 2565922
ucauuaaggaguaugcgca

SEQ ID NO: 2565924 - RNA, 19 nt, Artificial Sequence
  Description of Artificial Sequence: Synthetic oligonucleotide
  Sense strand starting at position 3146 of SEQ ID NO: 1888914
gcgcauacuccuuaaugau

SEQ ID NO: 2565925 - RNA, 19 nt, Artificial Sequence
  Description of Artificial Sequence: Synthetic oligonucleotide
  Antisense strand to SEQ ID NO: 2565924
aucauuaaggaguaugcgc

SEQ ID NO: 2565926 - RNA, 19 nt, Artificial Sequence
  Description of Artificial Sequence: Synthetic oligonucleotide
  Sense strand starting at position 3390 of SEQ ID NO: 1888914
auuauccaacuguaaguau

SEQ ID NO: 2565927 - RNA, 19 nt, Artificial Sequence
  Description of Artificial Sequence: Synthetic oligonucleotide
  Antisense strand to SEQ ID NO: 2565926
auacuuacaguuggauaau

SEQ ID NO: 2565928 - RNA, 19 nt, Artificial Sequence
  Description of Artificial Sequence: Synthetic oligonucleotide
  Sense strand starting at position 3401 of SEQ ID NO: 1888914
guaaguaucuuguuacacu

SEQ ID NO: 2565929 - RNA, 19 nt, Artificial Sequence
  Description of Artificial Sequence: Synthetic oligonucleotide
  Antisense strand to SEQ ID NO: 2565928
aguguaacaagauacuuac

SEQ ID NO: 2565930 - RNA, 19 nt, Artificial Sequence
  Description of Artificial Sequence: Synthetic oligonucleotide
  Sense strand starting at position 3464 of SEQ ID NO: 1888914
guguccuauuuauuaguua

SEQ ID NO: 2565931 - RNA, 19 nt, Artificial Sequence
  Description of Artificial Sequence: Synthetic oligonucleotide
  Antisense strand to SEQ ID NO: 2565930
uaacuaauaaauaggacac

SEQ ID NO: 2565932 - RNA, 19 nt, Artificial Sequence
  Description of Artificial Sequence: Synthetic oligonucleotide
  Sense strand starting at position 3537 of SEQ ID NO: 1888914
cugagauccagugguaaca

SEQ ID NO: 2565933 - RNA, 19 nt, Artificial Sequence
  Description of Artificial Sequence: Synthetic oligonucleotide
  Antisense strand to SEQ ID NO: 2565932
uguuaccacuggaucucag

SEQ ID NO: 2565934 - RNA, 19 nt, Artificial Sequence
  Description of Artificial Sequence: Synthetic oligonucleotide
  Sense strand starting at position 3610 of SEQ ID NO: 1888914
ccuaaauugcgacaaucaa

SEQ ID NO: 2565935 - RNA, 19 nt, Artificial Sequence
  Description of Artificial Sequence: Synthetic oligonucleotide
  Antisense strand to SEQ ID NO: 2565934
uugauugucgcaauuuagg

SEQ ID NO: 2565936 - RNA, 19 nt, Artificial Sequence
  Description of Artificial Sequence: Synthetic oligonucleotide
  Sense strand starting at position 3678 of SEQ ID NO: 1888914
uuacacugacuuugggauu

SEQ ID NO: 2565937 - RNA, 19 nt, Artificial Sequence
  Description of Artificial Sequence: Synthetic oligonucleotide
  Antisense strand to SEQ ID NO: 2565936
aaucccaaagucaguguaa

SEQ ID NO: 2565938 - RNA, 19 nt, Artificial Sequence
  Description of Artificial Sequence: Synthetic oligonucleotide
  Sense strand starting at position 3859 of SEQ ID NO: 1888914
uuccuuaguugacuacuua

SEQ ID NO: 2565939 - RNA, 19 nt, Artificial Sequence
  Description of Artificial Sequence: Synthetic oligonucleotide
  Antisense strand to SEQ ID NO: 2565938
uaaguagucaacuaaggaa

SEQ ID NO: 2565940 - RNA, 19 nt, Artificial Sequence
  Description of Artificial Sequence: Synthetic oligonucleotide
  Sense strand starting at position 3863 of SEQ ID NO: 1888914
uuaguugacuacuuagaaa

SEQ ID NO: 2565941 - RNA, 19 nt, Artificial Sequence
  Description of Artificial Sequence: Synthetic oligonucleotide
  Antisense strand to SEQ ID NO: 2565940
uuucuaaguagucaacuaa

SEQ ID NO: 2565942 - RNA, 19 nt, Artificial Sequence
  Description of Artificial Sequence: Synthetic oligonucleotide
  Sense strand starting at position 3928 of SEQ ID NO: 1888914
cuuccagauugcucuugga

SEQ ID NO: 2565943 - RNA, 19 nt, Artificial Sequence
  Description of Artificial Sequence: Synthetic oligonucleotide
  Antisense strand to SEQ ID NO: 2565942
uccaagagcaaucuggaag

SEQ ID NO: 2565944 - RNA, 19 nt, Artificial Sequence
  Description of Artificial Sequence: Synthetic oligonucleotide
  Sense strand starting at position 124 of SEQ ID NO: 1888915
cgggcuuggucuuucagga

SEQ ID NO: 2565945 - RNA, 19 nt, Artificial Sequence
  Description of Artificial Sequence: Synthetic oligonucleotide
  Antisense strand to SEQ ID NO: 2565944
uccugaaagaccaagcccg

SEQ ID NO: 2565946 - RNA, 19 nt, Artificial Sequence
  Description of Artificial Sequence: Synthetic oligonucleotide
  Sense strand starting at position 293 of SEQ ID NO: 1888915
ccguuugagccuggagauu

SEQ ID NO: 2565947 - RNA, 19 nt, Artificial Sequence
  Description of Artificial Sequence: Synthetic oligonucleotide
  Antisense strand to SEQ ID NO: 2565946
aaucuccaggcucaaacgg

SEQ ID NO: 2565948 - RNA, 19 nt, Artificial Sequence
  Description of Artificial Sequence: Synthetic oligonucleotide
  Sense strand starting at position 621 of SEQ ID NO: 1888915
agaggaguuugggugucuu

SEQ ID NO: 2565949 - RNA, 19 nt, Artificial Sequence
  Description of Artificial Sequence: Synthetic oligonucleotide
  Antisense strand to SEQ ID NO: 2565948
aagacacccaaacuccucu

SEQ ID NO: 2565950 - RNA, 19 nt, Artificial Sequence
  Description of Artificial Sequence: Synthetic oligonucleotide
  Sense strand starting at position 746 of SEQ ID NO: 1888915
ucaagagauuugcacagaa

SEQ ID NO: 2565951 - RNA, 19 nt, Artificial Sequence
  Description of Artificial Sequence: Synthetic oligonucleotide
  Antisense strand to SEQ ID NO: 2565950
uucugugcaaaucucuuga

SEQ ID NO: 2565952 - RNA, 19 nt, Artificial Sequence
  Description of Artificial Sequence: Synthetic oligonucleotide
  Sense strand starting at position 944 of SEQ ID NO: 1888915
uccugaaaucgacagcuca

SEQ ID NO: 2565953 - RNA, 19 nt, Artificial Sequence
  Description of Artificial Sequence: Synthetic oligonucleotide
  Antisense strand to SEQ ID NO: 2565952
ugagcugucgauuucagga

SEQ ID NO: 2565954 - RNA, 19 nt, Artificial Sequence
  Description of Artificial Sequence: Synthetic oligonucleotide
  Sense strand starting at position 1006 of SEQ ID NO: 1888915
ccggguuggaauuguggua

SEQ ID NO: 2565955 - RNA, 19 nt, Artificial Sequence
  Description of Artificial Sequence: Synthetic oligonucleotide
  Antisense strand to SEQ ID NO: 2565954
uaccacaauuccaacccgg

SEQ ID NO: 2565956 - RNA, 19 nt, Artificial Sequence
  Description of Artificial Sequence: Synthetic oligonucleotide
  Sense strand starting at position 1479 of SEQ ID NO: 1888915
gugguauucugauugggaa

SEQ ID NO: 2565957 - RNA, 19 nt, Artificial Sequence
  Description of Artificial Sequence: Synthetic oligonucleotide
  Antisense strand to SEQ ID NO: 2565956
uucccaaucagaauaccac

SEQ ID NO: 2565958 - RNA, 19 nt, Artificial Sequence
  Description of Artificial Sequence: Synthetic oligonucleotide
  Sense strand starting at position 1480 of SEQ ID NO: 1888915
ugguauucugauugggaag

SEQ ID NO: 2565959 - RNA, 19 nt, Artificial Sequence
  Description of Artificial Sequence: Synthetic oligonucleotide
  Antisense strand to SEQ ID NO: 2565958
cuucccaaucagaauacca

SEQ ID NO: 2565960 - RNA, 19 nt, Artificial Sequence
  Description of Artificial Sequence: Synthetic oligonucleotide
  Sense strand starting at position 2109 of SEQ ID NO: 1888915
gguaccugcgggugaauaa

SEQ ID NO: 2565961 - RNA, 19 nt, Artificial Sequence
  Description of Artificial Sequence: Synthetic oligonucleotide
  Antisense strand to SEQ ID NO: 2565960
uuauucacccgcagguacc

SEQ ID NO: 2565962 - RNA, 19 nt, Artificial Sequence
  Description of Artificial Sequence: Synthetic oligonucleotide
  Sense strand starting at position 2110 of SEQ ID NO: 1888915
guaccugcgggugaauaaa

SEQ ID NO: 2565963 - RNA, 19 nt, Artificial Sequence
  Description of Artificial Sequence: Synthetic oligonucleotide
  Antisense strand to SEQ ID NO: 2565962
uuuauucacccgcagguac

SEQ ID NO: 2565964 - RNA, 19 nt, Artificial Sequence
  Description of Artificial Sequence: Synthetic oligonucleotide
  Sense strand starting at position 2264 of SEQ ID NO: 1888915
ccgaaaguguggcucucaa

SEQ ID NO: 2565965 - RNA, 19 nt, Artificial Sequence
  Description of Artificial Sequence: Synthetic oligonucleotide
  Antisense strand to SEQ ID NO: 2565964
uugagagccacacuuucgg

SEQ ID NO: 2565966 - RNA, 19 nt, Artificial Sequence
  Description of Artificial Sequence: Synthetic oligonucleotide
  Sense strand starting at position 2294 of SEQ ID NO: 1888915
gaggaugaaucuuggaaca

SEQ ID NO: 2565967 - RNA, 19 nt, Artificial Sequence
  Description of Artificial Sequence: Synthetic oligonucleotide
  Antisense strand to SEQ ID NO: 2565966
uguuccaagauucauccuc

SEQ ID NO: 2565968 - RNA, 19 nt, Artificial Sequence
  Description of Artificial Sequence: Synthetic oligonucleotide
  Sense strand starting at position 2296 of SEQ ID NO: 1888915
ggaugaaucuuggaacaac

SEQ ID NO: 2565969 - RNA, 19 nt, Artificial Sequence
  Description of Artificial Sequence: Synthetic oligonucleotide
  Antisense strand to SEQ ID NO: 2565968
guuguuccaagauucaucc

SEQ ID NO: 2565970 - RNA, 19 nt, Artificial Sequence
  Description of Artificial Sequence: Synthetic oligonucleotide
  Sense strand starting at position 2345 of SEQ ID NO: 1888915
uacgaauuaguguggaaga

SEQ ID NO: 2565971 - RNA, 19 nt, Artificial Sequence
  Description of Artificial Sequence: Synthetic oligonucleotide
  Antisense strand to SEQ ID NO: 2565970
ucuuccacacuaauucgua

SEQ ID NO: 2565972 - RNA, 19 nt, Artificial Sequence
  Description of Artificial Sequence: Synthetic oligonucleotide
  Sense strand starting at position 2395 of SEQ ID NO: 1888915
agguuaaguagaggcaauu

SEQ ID NO: 2565973 - RNA, 19 nt, Artificial Sequence
  Description of Artificial Sequence: Synthetic oligonucleotide
  Antisense strand to SEQ ID NO: 2565972
aauugccucuacuuaaccu

SEQ ID NO: 2565974 - RNA, 19 nt, Artificial Sequence
  Description of Artificial Sequence: Synthetic oligonucleotide
  Sense strand starting at position 2422 of SEQ ID NO: 1888915
ggaucauucuugccaguuu

SEQ ID NO: 2565975 - RNA, 19 nt, Artificial Sequence
  Description of Artificial Sequence: Synthetic oligonucleotide
  Antisense strand to SEQ ID NO: 2565974
aaacuggcaagaaugaucc

SEQ ID NO: 2565976 - RNA, 19 nt, Artificial Sequence
  Description of Artificial Sequence: Synthetic oligonucleotide
  Sense strand starting at position 2441 of SEQ ID NO: 1888915
caaagucuuggugaaacuu

SEQ ID NO: 2565977 - RNA, 19 nt, Artificial Sequence
  Description of Artificial Sequence: Synthetic oligonucleotide
  Antisense strand to SEQ ID NO: 2565976
aaguuucaccaagacuuug

SEQ ID NO: 2565978 - RNA, 19 nt, Artificial Sequence
  Description of Artificial Sequence: Synthetic oligonucleotide
  Sense strand starting at position 2450 of SEQ ID NO: 1888915
ggugaaacuucuuccugcu

SEQ ID NO: 2565979 - RNA, 19 nt, Artificial Sequence
  Description of Artificial Sequence: Synthetic oligonucleotide
  Antisense strand to SEQ ID NO: 2565978
agcaggaagaaguuucacc

SEQ ID NO: 2565980 - RNA, 19 nt, Artificial Sequence
  Description of Artificial Sequence: Synthetic oligonucleotide
  Sense strand starting at position 2598 of SEQ ID NO: 1888915
ugauucuuacacuaucguu

SEQ ID NO: 2565981 - RNA, 19 nt, Artificial Sequence
  Description of Artificial Sequence: Synthetic oligonucleotide
  Antisense strand to SEQ ID NO: 2565980
aacgauaguguaagaauca

SEQ ID NO: 2565982 - RNA, 19 nt, Artificial Sequence
  Description of Artificial Sequence: Synthetic oligonucleotide
  Sense strand starting at position 2604 of SEQ ID NO: 1888915
uuacacuaucguugcgaca

SEQ ID NO: 2565983 - RNA, 19 nt, Artificial Sequence
  Description of Artificial Sequence: Synthetic oligonucleotide
  Antisense strand to SEQ ID NO: 2565982
ugucgcaacgauaguguaa

SEQ ID NO: 2565984 - RNA, 19 nt, Artificial Sequence
  Description of Artificial Sequence: Synthetic oligonucleotide
  Sense strand starting at position 2611 of SEQ ID NO: 1888915
aucguugcgacauauacau

SEQ ID NO: 2565985 - RNA, 19 nt, Artificial Sequence
  Description of Artificial Sequence: Synthetic oligonucleotide
  Antisense strand to SEQ ID NO: 2565984
auguauaugucgcaacgau

SEQ ID NO: 2565986 - RNA, 19 nt, Artificial Sequence
  Description of Artificial Sequence: Synthetic oligonucleotide
  Sense strand starting at position 2641 of SEQ ID NO: 1888915
agcauuagauguccuaacu

SEQ ID NO: 2565987 - RNA, 19 nt, Artificial Sequence
  Description of Artificial Sequence: Synthetic oligonucleotide
  Antisense strand to SEQ ID NO: 2565986
aguuaggacaucuaaugcu

SEQ ID NO: 2565988 - RNA, 19 nt, Artificial Sequence
  Description of Artificial Sequence: Synthetic oligonucleotide
  Sense strand starting at position 2651 of SEQ ID NO: 1888915
guccuaacucacugcuagu

SEQ ID NO: 2565989 - RNA, 19 nt, Artificial Sequence
  Description of Artificial Sequence: Synthetic oligonucleotide
  Antisense strand to SEQ ID NO: 2565988
acuagcagugaguuaggac

SEQ ID NO: 2565990 - RNA, 19 nt, Artificial Sequence
  Description of Artificial Sequence: Synthetic oligonucleotide
  Sense strand starting at position 2725 of SEQ ID NO: 1888915
agagaacuuucuguagaug

SEQ ID NO: 2565991 - RNA, 19 nt, Artificial Sequence
  Description of Artificial Sequence: Synthetic oligonucleotide
  Antisense strand to SEQ ID NO: 2565990
caucuacagaaaguucucu

SEQ ID NO: 2565992 - RNA, 19 nt, Artificial Sequence
  Description of Artificial Sequence: Synthetic oligonucleotide
  Sense strand starting at position 2832 of SEQ ID NO: 1888915
guuuaaauacuugauguca

SEQ ID NO: 2565993 - RNA, 19 nt, Artificial Sequence
  Description of Artificial Sequence: Synthetic oligonucleotide
  Antisense strand to SEQ ID NO: 2565992
ugacaucaaguauuuaaac

SEQ ID NO: 2565994 - RNA, 19 nt, Artificial Sequence
  Description of Artificial Sequence: Synthetic oligonucleotide
  Sense strand starting at position 2913 of SEQ ID NO: 1888915
ugcgcauacuccuuaauga

SEQ ID NO: 2565995 - RNA, 19 nt, Artificial Sequence
  Description of Artificial Sequence: Synthetic oligonucleotide
  Antisense strand to SEQ ID NO: 2565994
ucauuaaggaguaugcgca

SEQ ID NO: 2565996 - RNA, 19 nt, Artificial Sequence
  Description of Artificial Sequence: Synthetic oligonucleotide
  Sense strand starting at position 2914 of SEQ ID NO: 1888915
gcgcauacuccuuaaugau

SEQ ID NO: 2565997 - RNA, 19 nt, Artificial Sequence
  Description of Artificial Sequence: Synthetic oligonucleotide
  Antisense strand to SEQ ID NO: 2565996
aucauuaaggaguaugcgc

SEQ ID NO: 2565998 - RNA, 19 nt, Artificial Sequence
  Description of Artificial Sequence: Synthetic oligonucleotide
  Sense strand starting at position 3158 of SEQ ID NO: 1888915
auuauccaacuguaaguau

SEQ ID NO: 2565999 - RNA, 19 nt, Artificial Sequence
  Description of Artificial Sequence: Synthetic oligonucleotide
  Antisense strand to SEQ ID NO: 2565998
auacuuacaguuggauaau

SEQ ID NO: 2566000 - RNA, 19 nt, Artificial Sequence
  Description of Artificial Sequence: Synthetic oligonucleotide
  Sense strand starting at position 3169 of SEQ ID NO: 1888915
guaaguaucuuguuacacu

SEQ ID NO: 2566001 - RNA, 19 nt, Artificial Sequence
  Description of Artificial Sequence: Synthetic oligonucleotide
  Antisense strand to SEQ ID NO: 2566000
aguguaacaagauacuuac

SEQ ID NO: 2566002 - RNA, 19 nt, Artificial Sequence
  Description of Artificial Sequence: Synthetic oligonucleotide
  Sense strand starting at position 3232 of SEQ ID NO: 1888915
guguccuauuuauuaguua

SEQ ID NO: 2566003 - RNA, 19 nt, Artificial Sequence
  Description of Artificial Sequence: Synthetic oligonucleotide
  Antisense strand to SEQ ID NO: 2566002
uaacuaauaaauaggacac

SEQ ID NO: 2566004 - RNA, 19 nt, Artificial Sequence
  Description of Artificial Sequence: Synthetic oligonucleotide
  Sense strand starting at position 3305 of SEQ ID NO: 1888915
cugagauccagugguaaca

SEQ ID NO: 2566005 - RNA, 19 nt, Artificial Sequence
  Description of Artificial Sequence: Synthetic oligonucleotide
  Antisense strand to SEQ ID NO: 2566004
uguuaccacuggaucucag

SEQ ID NO: 2566006 - RNA, 19 nt, Artificial Sequence
  Description of Artificial Sequence: Synthetic oligonucleotide
  Sense strand starting at position 3307 of SEQ ID NO: 1888915
gagauccagugguaacaaa

SEQ ID NO: 2566007 - RNA, 19 nt, Artificial Sequence
  Description of Artificial Sequence: Synthetic oligonucleotide
  Antisense strand to SEQ ID NO: 2566006
uuuguuaccacuggaucuc

SEQ ID NO: 2566008 - RNA, 19 nt, Artificial Sequence
  Description of Artificial Sequence: Synthetic oligonucleotide
  Sense strand starting at position 3378 of SEQ ID NO: 1888915
ccuaaauugcgacaaucaa

SEQ ID NO: 2566009 - RNA, 19 nt, Artificial Sequence
  Description of Artificial Sequence: Synthetic oligonucleotide
  Antisense strand to SEQ ID NO: 2566008
uugauugucgcaauuuagg

SEQ ID NO: 2566010 - RNA, 19 nt, Artificial Sequence
  Description of Artificial Sequence: Synthetic oligonucleotide
  Sense strand starting at position 3446 of SEQ ID NO: 1888915
uuacacugacuuugggauu

SEQ ID NO: 2566011 - RNA, 19 nt, Artificial Sequence
  Description of Artificial Sequence: Synthetic oligonucleotide
  Antisense strand to SEQ ID NO: 2566010
aaucccaaagucaguguaa

SEQ ID NO: 2566012 - RNA, 19 nt, Artificial Sequence
  Description of Artificial Sequence: Synthetic oligonucleotide
  Sense strand starting at position 3478 of SEQ ID NO: 1888915
gucguugacugcccuuaaa

SEQ ID NO: 2566013 - RNA, 19 nt, Artificial Sequence
  Description of Artificial Sequence: Synthetic oligonucleotide
  Antisense strand to SEQ ID NO: 2566012
uuuaagggcagucaacgac

SEQ ID NO: 2566014 - RNA, 19 nt, Artificial Sequence
  Description of Artificial Sequence: Synthetic oligonucleotide
  Sense strand starting at position 3627 of SEQ ID NO: 1888915
uuccuuaguugacuacuua

SEQ ID NO: 2566015 - RNA, 19 nt, Artificial Sequence
  Description of Artificial Sequence: Synthetic oligonucleotide
  Antisense strand to SEQ ID NO: 2566014
uaaguagucaacuaaggaa

SEQ ID NO: 2566016 - RNA, 19 nt, Artificial Sequence
  Description of Artificial Sequence: Synthetic oligonucleotide
  Sense strand starting at position 3631 of SEQ ID NO: 1888915
uuaguugacuacuuagaaa

SEQ ID NO: 2566017 - RNA, 19 nt, Artificial Sequence
  Description of Artificial Sequence: Synthetic oligonucleotide
  Antisense strand to SEQ ID NO: 2566016
uuucuaaguagucaacuaa

SEQ ID NO: 2566018 - RNA, 19 nt, Artificial Sequence
  Description of Artificial Sequence: Synthetic oligonucleotide
  Sense strand starting at position 3696 of SEQ ID NO: 1888915
cuuccagauugcucuugga

SEQ ID NO: 2566019 - RNA, 19 nt, Artificial Sequence
  Description of Artificial Sequence: Synthetic oligonucleotide
  Antisense strand to SEQ ID NO: 2566018
uccaagagcaaucuggaag

SEQ ID NO: 2566020 - RNA, 19 nt, Artificial Sequence
  Description of Artificial Sequence: Synthetic oligonucleotide
  Sense strand starting at position 3762 of SEQ ID NO: 1888915
gugauaguacaacgaguua

SEQ ID NO: 2566021 - RNA, 19 nt, Artificial Sequence
  Description of Artificial Sequence: Synthetic oligonucleotide
  Antisense strand to SEQ ID NO: 2566020
uaacucguuguacuaucac

SEQ ID NO: 2566022 - RNA, 19 nt, Artificial Sequence
  Description of Artificial Sequence: Synthetic oligonucleotide
  Sense strand starting at position 3959 of SEQ ID NO: 1888915
caauguguuuggcuaaaug

SEQ ID NO: 2566023 - RNA, 19 nt, Artificial Sequence
  Description of Artificial Sequence: Synthetic oligonucleotide
  Antisense strand to SEQ ID NO: 2566022
cauuuagccaaacacauug

SEQ ID NO: 2566024 - RNA, 19 nt, Artificial Sequence
  Description of Artificial Sequence: Synthetic oligonucleotide
  Sense strand starting at position 70 of SEQ ID NO: 1888916
agcaaucugcuauaaagag

SEQ ID NO: 2566025 - RNA, 19 nt, Artificial Sequence
  Description of Artificial Sequence: Synthetic oligonucleotide
  Antisense strand to SEQ ID NO: 2566024
cucuuuauagcagauugcu

SEQ ID NO: 2566026 - RNA, 19 nt, Artificial Sequence
  Description of Artificial Sequence: Synthetic oligonucleotide
  Sense strand starting at position 124 of SEQ ID NO: 1888916
cuaaauuagggcugacaca

SEQ ID NO: 2566027 - RNA, 19 nt, Artificial Sequence
  Description of Artificial Sequence: Synthetic oligonucleotide
  Antisense strand to SEQ ID NO: 2566026
ugugucagcccuaauuuag

SEQ ID NO: 2566028 - RNA, 19 nt, Artificial Sequence
  Description of Artificial Sequence: Synthetic oligonucleotide
  Sense strand starting at position 152 of SEQ ID NO: 1888916
gguacauaaucaucuguuu

SEQ ID NO: 2566029 - RNA, 19 nt, Artificial Sequence
  Description of Artificial Sequence: Synthetic oligonucleotide
  Antisense strand to SEQ ID NO: 2566028
aaacagaugauuauguacc

SEQ ID NO: 2566030 - RNA, 19 nt, Artificial Sequence
  Description of Artificial Sequence: Synthetic oligonucleotide
  Sense strand starting at position 160 of SEQ ID NO: 1888916
aucaucuguuucucagaua

SEQ ID NO: 2566031 - RNA, 19 nt, Artificial Sequence
  Description of Artificial Sequence: Synthetic oligonucleotide
  Antisense strand to SEQ ID NO: 2566030
uaucugagaaacagaugau

SEQ ID NO: 2566032 - RNA, 19 nt, Artificial Sequence
  Description of Artificial Sequence: Synthetic oligonucleotide
  Sense strand starting at position 228 of SEQ ID NO: 1888916
guaugcuaucacuaagaug

SEQ ID NO: 2566033 - RNA, 19 nt, Artificial Sequence
  Description of Artificial Sequence: Synthetic oligonucleotide
  Antisense strand to SEQ ID NO: 2566032
caucuuagugauagcauac

SEQ ID NO: 2566034 - RNA, 19 nt, Artificial Sequence
  Description of Artificial Sequence: Synthetic oligonucleotide
  Sense strand starting at position 286 of SEQ ID NO: 1888916
gcauuuacauuguauuucu

SEQ ID NO: 2566035 - RNA, 19 nt, Artificial Sequence
  Description of Artificial Sequence: Synthetic oligonucleotide
  Antisense strand to SEQ ID NO: 2566034
agaaauacaauguaaaugc

SEQ ID NO: 2566036 - RNA, 19 nt, Artificial Sequence
  Description of Artificial Sequence: Synthetic oligonucleotide
  Sense strand starting at position 344 of SEQ ID NO: 1888916
gaaugaugguagucuagac

SEQ ID NO: 2566037 - RNA, 19 nt, Artificial Sequence
  Description of Artificial Sequence: Synthetic oligonucleotide
  Antisense strand to SEQ ID NO: 2566036
gucuagacuaccaucauuc

SEQ ID NO: 2566038 - RNA, 19 nt, Artificial Sequence
  Description of Artificial Sequence: Synthetic oligonucleotide
  Sense strand starting at position 451 of SEQ ID NO: 1888916
ggauccaauaucugagagu

SEQ ID NO: 2566039 - RNA, 19 nt, Artificial Sequence
  Description of Artificial Sequence: Synthetic oligonucleotide
  Antisense strand to SEQ ID NO: 2566038
acucucagauauuggaucc

SEQ ID NO: 2566040 - RNA, 19 nt, Artificial Sequence
  Description of Artificial Sequence: Synthetic oligonucleotide
  Sense strand starting at position 550 of SEQ ID NO: 1888916
ucaguugucagcuaaugag

SEQ ID NO: 2566041 - RNA, 19 nt, Artificial Sequence
  Description of Artificial Sequence: Synthetic oligonucleotide
  Antisense strand to SEQ ID NO: 2566040
cucauuagcugacaacuga

SEQ ID NO: 2566042 - RNA, 19 nt, Artificial Sequence
  Description of Artificial Sequence: Synthetic oligonucleotide
  Sense strand starting at position 630 of SEQ ID NO: 1888916
uugaauaagaggugcuaga

SEQ ID NO: 2566043 - RNA, 19 nt, Artificial Sequence
  Description of Artificial Sequence: Synthetic oligonucleotide
  Antisense strand to SEQ ID NO: 2566042
ucuagcaccucuuauucaa

SEQ ID NO: 2566044 - RNA, 19 nt, Artificial Sequence
  Description of Artificial Sequence: Synthetic oligonucleotide
  Sense strand starting at position 669 of SEQ ID NO: 1888916
gaaguugggacauggcaaa

SEQ ID NO: 2566045 - RNA, 19 nt, Artificial Sequence
  Description of Artificial Sequence: Synthetic oligonucleotide
  Antisense strand to SEQ ID NO: 2566044
uuugccaugucccaacuuc

SEQ ID NO: 2566046 - RNA, 19 nt, Artificial Sequence
  Description of Artificial Sequence: Synthetic oligonucleotide
  Sense strand starting at position 688 of SEQ ID NO: 1888916
guguacuggaaagaguauu

SEQ ID NO: 2566047 - RNA, 19 nt, Artificial Sequence
  Description of Artificial Sequence: Synthetic oligonucleotide
  Antisense strand to SEQ ID NO: 2566046
aauacucuuuccaguacac

SEQ ID NO: 2566048 - RNA, 19 nt, Artificial Sequence
  Description of Artificial Sequence: Synthetic oligonucleotide
  Sense strand starting at position 698 of SEQ ID NO: 1888916
aagaguauugguuaggagu

SEQ ID NO: 2566049 - RNA, 19 nt, Artificial Sequence
  Description of Artificial Sequence: Synthetic oligonucleotide
  Antisense strand to SEQ ID NO: 2566048
acuccuaaccaauacucuu

SEQ ID NO: 2566050 - RNA, 19 nt, Artificial Sequence
  Description of Artificial Sequence: Synthetic oligonucleotide
  Sense strand starting at position 742 of SEQ ID NO: 1888916
auuccaauguugucaauua

SEQ ID NO: 2566051 - RNA, 19 nt, Artificial Sequence
  Description of Artificial Sequence: Synthetic oligonucleotide
  Antisense strand to SEQ ID NO: 2566050
uaauugacaacauuggaau

SEQ ID NO: 2566052 - RNA, 19 nt, Artificial Sequence
  Description of Artificial Sequence: Synthetic oligonucleotide
  Sense strand starting at position 803 of SEQ ID NO: 1888916
ggacauaaguuuccuuauc

SEQ ID NO: 2566053 - RNA, 19 nt, Artificial Sequence
  Description of Artificial Sequence: Synthetic oligonucleotide
  Antisense strand to SEQ ID NO: 2566052
gauaaggaaacuuaugucc

SEQ ID NO: 2566054 - RNA, 19 nt, Artificial Sequence
  Description of Artificial Sequence: Synthetic oligonucleotide
  Sense strand starting at position 859 of SEQ ID NO: 1888916
agguguagcagggaucaaa

SEQ ID NO: 2566055 - RNA, 19 nt, Artificial Sequence
  Description of Artificial Sequence: Synthetic oligonucleotide
  Antisense strand to SEQ ID NO: 2566054
uuugaucccugcuacaccu

SEQ ID NO: 2566056 - RNA, 19 nt, Artificial Sequence
  Description of Artificial Sequence: Synthetic oligonucleotide
  Sense strand starting at position 1027 of SEQ ID NO: 1888916
gugccugaucuagacauaa

SEQ ID NO: 2566057 - RNA, 19 nt, Artificial Sequence
  Description of Artificial Sequence: Synthetic oligonucleotide
  Antisense strand to SEQ ID NO: 2566056
uuaugucuagaucaggcac

SEQ ID NO: 2566058 - RNA, 19 nt, Artificial Sequence
  Description of Artificial Sequence: Synthetic oligonucleotide
  Sense strand starting at position 1205 of SEQ ID NO: 1888916
gcagguuugaaacauggua

SEQ ID NO: 2566059 - RNA, 19 nt, Artificial Sequence
  Description of Artificial Sequence: Synthetic oligonucleotide
  Antisense strand to SEQ ID NO: 2566058
uaccauguuucaaaccugc

SEQ ID NO: 2566060 - RNA, 19 nt, Artificial Sequence
  Description of Artificial Sequence: Synthetic oligonucleotide
  Sense strand starting at position 1207 of SEQ ID NO: 1888916
agguuugaaacaugguaug

SEQ ID NO: 2566061 - RNA, 19 nt, Artificial Sequence
  Description of Artificial Sequence: Synthetic oligonucleotide
  Antisense strand to SEQ ID NO: 2566060
cauaccauguuucaaaccu

SEQ ID NO: 2566062 - RNA, 19 nt, Artificial Sequence
  Description of Artificial Sequence: Synthetic oligonucleotide
  Sense strand starting at position 1213 of SEQ ID NO: 1888916
gaaacaugguaugcauagu

SEQ ID NO: 2566063 - RNA, 19 nt, Artificial Sequence
  Description of Artificial Sequence: Synthetic oligonucleotide
  Antisense strand to SEQ ID NO: 2566062
acuaugcauaccauguuuc

SEQ ID NO: 2566064 - RNA, 19 nt, Artificial Sequence
  Description of Artificial Sequence: Synthetic oligonucleotide
  Sense strand starting at position 1780 of SEQ ID NO: 1888916
acuuaucaggauugaguuu

SEQ ID NO: 2566065 - RNA, 19 nt, Artificial Sequence
  Description of Artificial Sequence: Synthetic oligonucleotide
  Antisense strand to SEQ ID NO: 2566064
aaacucaauccugauaagu

SEQ ID NO: 2566066 - RNA, 19 nt, Artificial Sequence
  Description of Artificial Sequence: Synthetic oligonucleotide
  Sense strand starting at position 2037 of SEQ ID NO: 1888916
uugugauucuaugugggaa

SEQ ID NO: 2566067 - RNA, 19 nt, Artificial Sequence
  Description of Artificial Sequence: Synthetic oligonucleotide
  Antisense strand to SEQ ID NO: 2566066
uucccacauagaaucacaa

SEQ ID NO: 2566068 - RNA, 19 nt, Artificial Sequence
  Description of Artificial Sequence: Synthetic oligonucleotide
  Sense strand starting at position 2038 of SEQ ID NO: 1888916
ugugauucuaugugggaaa

SEQ ID NO: 2566069 - RNA, 19 nt, Artificial Sequence
  Description of Artificial Sequence: Synthetic oligonucleotide
  Antisense strand to SEQ ID NO: 2566068
uuucccacauagaaucaca

SEQ ID NO: 2566070 - RNA, 19 nt, Artificial Sequence
  Description of Artificial Sequence: Synthetic oligonucleotide
  Sense strand starting at position 2040 of SEQ ID NO: 1888916
ugauucuaugugggaaaug

SEQ ID NO: 2566071 - RNA, 19 nt, Artificial Sequence
  Description of Artificial Sequence: Synthetic oligonucleotide
  Antisense strand to SEQ ID NO: 2566070
cauuucccacauagaauca

SEQ ID NO: 2566072 - RNA, 19 nt, Artificial Sequence
  Description of Artificial Sequence: Synthetic oligonucleotide
  Sense strand starting at position 2270 of SEQ ID NO: 1888916
auauauuggccugaaggca

SEQ ID NO: 2566073 - RNA, 19 nt, Artificial Sequence
  Description of Artificial Sequence: Synthetic oligonucleotide
  Antisense strand to SEQ ID NO: 2566072
ugccuucaggccaauauau

SEQ ID NO: 2566074 - RNA, 19 nt, Artificial Sequence
  Description of Artificial Sequence: Synthetic oligonucleotide
  Sense strand starting at position 2404 of SEQ ID NO: 1888916
cccuaugaggucuauacua

SEQ ID NO: 2566075 - RNA, 19 nt, Artificial Sequence
  Description of Artificial Sequence: Synthetic oligonucleotide
  Antisense strand to SEQ ID NO: 2566074
uaguauagaccucauaggg

SEQ ID NO: 2566076 - RNA, 19 nt, Artificial Sequence
  Description of Artificial Sequence: Synthetic oligonucleotide
  Sense strand starting at position 2406 of SEQ ID NO: 1888916
cuaugaggucuauacuacu

SEQ ID NO: 2566077 - RNA, 19 nt, Artificial Sequence
  Description of Artificial Sequence: Synthetic oligonucleotide
  Antisense strand to SEQ ID NO: 2566076
aguaguauagaccucauag

SEQ ID NO: 2566078 - RNA, 19 nt, Artificial Sequence
  Description of Artificial Sequence: Synthetic oligonucleotide
  Sense strand starting at position 2575 of SEQ ID NO: 1888916
ggcagauauuauguaucau

SEQ ID NO: 2566079 - RNA, 19 nt, Artificial Sequence
  Description of Artificial Sequence: Synthetic oligonucleotide
  Antisense strand to SEQ ID NO: 2566078
augauacauaauaucugcc

SEQ ID NO: 2566080 - RNA, 19 nt, Artificial Sequence
  Description of Artificial Sequence: Synthetic oligonucleotide
  Sense strand starting at position 2674 of SEQ ID NO: 1888916
aggguaguguguucuauuu

SEQ ID NO: 2566081 - RNA, 19 nt, Artificial Sequence
  Description of Artificial Sequence: Synthetic oligonucleotide
  Antisense strand to SEQ ID NO: 2566080
aaauagaacacacuacccu

SEQ ID NO: 2566082 - RNA, 19 nt, Artificial Sequence
  Description of Artificial Sequence: Synthetic oligonucleotide
  Sense strand starting at position 2710 of SEQ ID NO: 1888916
acuccauuguugguuauuu

SEQ ID NO: 2566083 - RNA, 19 nt, Artificial Sequence
  Description of Artificial Sequence: Synthetic oligonucleotide
  Antisense strand to SEQ ID NO: 2566082
aaauaaccaacaauggagu

SEQ ID NO: 2566084 - RNA, 19 nt, Artificial Sequence
  Description of Artificial Sequence: Synthetic oligonucleotide
  Sense strand starting at position 2799 of SEQ ID NO: 1888916
gaugaaaggugucugcaua

SEQ ID NO: 2566085 - RNA, 19 nt, Artificial Sequence
  Description of Artificial Sequence: Synthetic oligonucleotide
  Antisense strand to SEQ ID NO: 2566084
uaugcagacaccuuucauc

SEQ ID NO: 2566086 - RNA, 19 nt, Artificial Sequence
  Description of Artificial Sequence: Synthetic oligonucleotide
  Sense strand starting at position 3049 of SEQ ID NO: 1888916
ggucaagugcuguagaaag

SEQ ID NO: 2566087 - RNA, 19 nt, Artificial Sequence
  Description of Artificial Sequence: Synthetic oligonucleotide
  Antisense strand to SEQ ID NO: 2566086
cuuucuacagcacuugacc

SEQ ID NO: 2566088 - RNA, 19 nt, Artificial Sequence
  Description of Artificial Sequence: Synthetic oligonucleotide
  Sense strand starting at position 3051 of SEQ ID NO: 1888916
ucaagugcuguagaaagga

SEQ ID NO: 2566089 - RNA, 19 nt, Artificial Sequence
  Description of Artificial Sequence: Synthetic oligonucleotide
  Antisense strand to SEQ ID NO: 2566088
uccuuucuacagcacuuga

SEQ ID NO: 2566090 - RNA, 19 nt, Artificial Sequence
  Description of Artificial Sequence: Synthetic oligonucleotide
  Sense strand starting at position 3122 of SEQ ID NO: 1888916
cgacauuagcaggaggagu

SEQ ID NO: 2566091 - RNA, 19 nt, Artificial Sequence
  Description of Artificial Sequence: Synthetic oligonucleotide
  Antisense strand to SEQ ID NO: 2566090
acuccuccugcuaaugucg

SEQ ID NO: 2566092 - RNA, 19 nt, Artificial Sequence
  Description of Artificial Sequence: Synthetic oligonucleotide
  Sense strand starting at position 3334 of SEQ ID NO: 1888916
ugaaaugaucuguaugcca

SEQ ID NO: 2566093 - RNA, 19 nt, Artificial Sequence
  Description of Artificial Sequence: Synthetic oligonucleotide
  Antisense strand to SEQ ID NO: 2566092
uggcauacagaucauuuca

SEQ ID NO: 2566094 - RNA, 19 nt, Artificial Sequence
  Description of Artificial Sequence: Synthetic oligonucleotide
  Sense strand starting at position 3364 of SEQ ID NO: 1888916
guaguaguccaggagguag

SEQ ID NO: 2566095 - RNA, 19 nt, Artificial Sequence
  Description of Artificial Sequence: Synthetic oligonucleotide
  Antisense strand to SEQ ID NO: 2566094
cuaccuccuggacuacuac

SEQ ID NO: 2566096 - RNA, 19 nt, Artificial Sequence
  Description of Artificial Sequence: Synthetic oligonucleotide
  Sense strand starting at position 3476 of SEQ ID NO: 1888916
uugggagaugguuguugaa

SEQ ID NO: 2566097 - RNA, 19 nt, Artificial Sequence
  Description of Artificial Sequence: Synthetic oligonucleotide
  Antisense strand to SEQ ID NO: 2566096
uucaacaaccaucucccaa

SEQ ID NO: 2566098 - RNA, 19 nt, Artificial Sequence
  Description of Artificial Sequence: Synthetic oligonucleotide
  Sense strand starting at position 3478 of SEQ ID NO: 1888916
gggagaugguuguugaacu

SEQ ID NO: 2566099 - RNA, 19 nt, Artificial Sequence
  Description of Artificial Sequence: Synthetic oligonucleotide
  Antisense strand to SEQ ID NO: 2566098
aguucaacaaccaucuccc

SEQ ID NO: 2566100 - RNA, 19 nt, Artificial Sequence
  Description of Artificial Sequence: Synthetic oligonucleotide
  Sense strand starting at position 3773 of SEQ ID NO: 1888916
ugugauaccuuugcaugaa

SEQ ID NO: 2566101 - RNA, 19 nt, Artificial Sequence
  Description of Artificial Sequence: Synthetic oligonucleotide
  Antisense strand to SEQ ID NO: 2566100
uucaugcaaagguaucaca

SEQ ID NO: 2566102 - RNA, 19 nt, Artificial Sequence
  Description of Artificial Sequence: Synthetic oligonucleotide
  Sense strand starting at position 3949 of SEQ ID NO: 1888916
ggauuucuccuaugugcau

SEQ ID NO: 2566103 - RNA, 19 nt, Artificial Sequence
  Description of Artificial Sequence: Synthetic oligonucleotide
  Antisense strand to SEQ ID NO: 2566102
augcacauaggagaaaucc

SEQ ID NO: 2566104 - RNA, 19 nt, Artificial Sequence
  Description of Artificial Sequence: Synthetic oligonucleotide
  Sense strand starting at position 120 of SEQ ID NO: 1888917
uauuguuguggagaccuaa

SEQ ID NO: 2566105 - RNA, 19 nt, Artificial Sequence
  Description of Artificial Sequence: Synthetic oligonucleotide
  Antisense strand to SEQ ID NO: 2566104
uuaggucuccacaacaaua

SEQ ID NO: 2566106 - RNA, 19 nt, Artificial Sequence
  Description of Artificial Sequence: Synthetic oligonucleotide
  Sense strand starting at position 189 of SEQ ID NO: 1888917
aacguaaggcauugaagau

SEQ ID NO: 2566107 - RNA, 19 nt, Artificial Sequence
  Description of Artificial Sequence: Synthetic oligonucleotide
  Antisense strand to SEQ ID NO: 2566106
aucuucaaugccuuacguu

SEQ ID NO: 2566108 - RNA, 19 nt, Artificial Sequence
  Description of Artificial Sequence: Synthetic oligonucleotide
  Sense strand starting at position 190 of SEQ ID NO: 1888917
acguaaggcauugaagauc

SEQ ID NO: 2566109 - RNA, 19 nt, Artificial Sequence
  Description of Artificial Sequence: Synthetic oligonucleotide
  Antisense strand to SEQ ID NO: 2566108
gaucuucaaugccuuacgu

SEQ ID NO: 2566110 - RNA, 19 nt, Artificial Sequence
  Description of Artificial Sequence: Synthetic oligonucleotide
  Sense strand starting at position 217 of SEQ ID NO: 1888917
gguguuucugcugugucau

SEQ ID NO: 2566111 - RNA, 19 nt, Artificial Sequence
  Description of Artificial Sequence: Synthetic oligonucleotide
  Antisense strand to SEQ ID NO: 2566110
augacacagcagaaacacc

SEQ ID NO: 2566112 - RNA, 19 nt, Artificial Sequence
  Description of Artificial Sequence: Synthetic oligonucleotide
  Sense strand starting at position 225 of SEQ ID NO: 1888917
ugcugugucauggacagga

SEQ ID NO: 2566113 - RNA, 19 nt, Artificial Sequence
  Description of Artificial Sequence: Synthetic oligonucleotide
  Antisense strand to SEQ ID NO: 2566112
uccuguccaugacacagca

SEQ ID NO: 2566114 - RNA, 19 nt, Artificial Sequence
  Description of Artificial Sequence: Synthetic oligonucleotide
  Sense strand starting at position 358 of SEQ ID NO: 1888917
ggauuagugcccuagggag

SEQ ID NO: 2566115 - RNA, 19 nt, Artificial Sequence
  Description of Artificial Sequence: Synthetic oligonucleotide
  Antisense strand to SEQ ID NO: 2566114
cucccuagggcacuaaucc

SEQ ID NO: 2566116 - RNA, 19 nt, Artificial Sequence
  Description of Artificial Sequence: Synthetic oligonucleotide
  Sense strand starting at position 486 of SEQ ID NO: 1888917
aaguuccaggauugugaga

SEQ ID NO: 2566117 - RNA, 19 nt, Artificial Sequence
  Description of Artificial Sequence: Synthetic oligonucleotide
  Antisense strand to SEQ ID NO: 2566116
ucucacaauccuggaacuu

SEQ ID NO: 2566118 - RNA, 19 nt, Artificial Sequence
  Description of Artificial Sequence: Synthetic oligonucleotide
  Sense strand starting at position 900 of SEQ ID NO: 1888917
auguauguucucuaaauug

SEQ ID NO: 2566119 - RNA, 19 nt, Artificial Sequence
  Description of Artificial Sequence: Synthetic oligonucleotide
  Antisense strand to SEQ ID NO: 2566118
caauuuagagaacauacau

SEQ ID NO: 2566120 - RNA, 19 nt, Artificial Sequence
  Description of Artificial Sequence: Synthetic oligonucleotide
  Sense strand starting at position 1054 of SEQ ID NO: 1888917
ggcuacuuccuccauaaag

SEQ ID NO: 2566121 - RNA, 19 nt, Artificial Sequence
  Description of Artificial Sequence: Synthetic oligonucleotide
  Antisense strand to SEQ ID NO: 2566120
cuuuauggaggaaguagcc

SEQ ID NO: 2566122 - RNA, 19 nt, Artificial Sequence
  Description of Artificial Sequence: Synthetic oligonucleotide
  Sense strand starting at position 1434 of SEQ ID NO: 1888917
acagguguagcuuacauaa

SEQ ID NO: 2566123 - RNA, 19 nt, Artificial Sequence
  Description of Artificial Sequence: Synthetic oligonucleotide
  Antisense strand to SEQ ID NO: 2566122
uuauguaagcuacaccugu

SEQ ID NO: 2566124 - RNA, 19 nt, Artificial Sequence
  Description of Artificial Sequence: Synthetic oligonucleotide
  Sense strand starting at position 1518 of SEQ ID NO: 1888917
gugggauuacugcaccauc

SEQ ID NO: 2566125 - RNA, 19 nt, Artificial Sequence
  Description of Artificial Sequence: Synthetic oligonucleotide
  Antisense strand to SEQ ID NO: 2566124
gauggugcaguaaucccac

SEQ ID NO: 2566126 - RNA, 19 nt, Artificial Sequence
  Description of Artificial Sequence: Synthetic oligonucleotide
  Sense strand starting at position 1528 of SEQ ID NO: 1888917
ugcaccauccaguaugauu

SEQ ID NO: 2566127 - RNA, 19 nt, Artificial Sequence
  Description of Artificial Sequence: Synthetic oligonucleotide
  Antisense strand to SEQ ID NO: 2566126
aaucauacuggauggugca

SEQ ID NO: 2566128 - RNA, 19 nt, Artificial Sequence
  Description of Artificial Sequence: Synthetic oligonucleotide
  Sense strand starting at position 1822 of SEQ ID NO: 1888917
ugaugaugcaaaugaguau

SEQ ID NO: 2566129 - RNA, 19 nt, Artificial Sequence
  Description of Artificial Sequence: Synthetic oligonucleotide
  Antisense strand to SEQ ID NO: 2566128
auacucauuugcaucauca

SEQ ID NO: 2566130 - RNA, 19 nt, Artificial Sequence
  Description of Artificial Sequence: Synthetic oligonucleotide
  Sense strand starting at position 1837 of SEQ ID NO: 1888917
guauuaggacuaugagcaa

SEQ ID NO: 2566131 - RNA, 19 nt, Artificial Sequence
  Description of Artificial Sequence: Synthetic oligonucleotide
  Antisense strand to SEQ ID NO: 2566130
uugcucauaguccuaauac

SEQ ID NO: 2566132 - RNA, 19 nt, Artificial Sequence
  Description of Artificial Sequence: Synthetic oligonucleotide
  Sense strand starting at position 1914 of SEQ ID NO: 1888917
ggcgaugcuccagagagga

SEQ ID NO: 2566133 - RNA, 19 nt, Artificial Sequence
  Description of Artificial Sequence: Synthetic oligonucleotide
  Antisense strand to SEQ ID NO: 2566132
uccucucuggagcaucgcc

SEQ ID NO: 2566134 - RNA, 19 nt, Artificial Sequence
  Description of Artificial Sequence: Synthetic oligonucleotide
  Sense strand starting at position 1950 of SEQ ID NO: 1888917
gcuaaacuggcagaaacau

SEQ ID NO: 2566135 - RNA, 19 nt, Artificial Sequence
  Description of Artificial Sequence: Synthetic oligonucleotide
  Antisense strand to SEQ ID NO: 2566134
auguuucugccaguuuagc

SEQ ID NO: 2566136 - RNA, 19 nt, Artificial Sequence
  Description of Artificial Sequence: Synthetic oligonucleotide
  Sense strand starting at position 2122 of SEQ ID NO: 1888917
gugauugcugggagucugu

SEQ ID NO: 2566137 - RNA, 19 nt, Artificial Sequence
  Description of Artificial Sequence: Synthetic oligonucleotide
  Antisense strand to SEQ ID NO: 2566136
acagacucccagcaaucac

SEQ ID NO: 2566138 - RNA, 19 nt, Artificial Sequence
  Description of Artificial Sequence: Synthetic oligonucleotide
  Sense strand starting at position 2152 of SEQ ID NO: 1888917
ugcugauuagcuuaaugau

SEQ ID NO: 2566139 - RNA, 19 nt, Artificial Sequence
  Description of Artificial Sequence: Synthetic oligonucleotide
  Antisense strand to SEQ ID NO: 2566138
aucauuaagcuaaucagca

SEQ ID NO: 2566140 - RNA, 19 nt, Artificial Sequence
  Description of Artificial Sequence: Synthetic oligonucleotide
  Sense strand starting at position 2158 of SEQ ID NO: 1888917
uuagcuuaaugaucuugga

SEQ ID NO: 2566141 - RNA, 19 nt, Artificial Sequence
  Description of Artificial Sequence: Synthetic oligonucleotide
  Antisense strand to SEQ ID NO: 2566140
uccaagaucauuaagcuaa

SEQ ID NO: 2566142 - RNA, 19 nt, Artificial Sequence
  Description of Artificial Sequence: Synthetic oligonucleotide
  Sense strand starting at position 2224 of SEQ ID NO: 1888917
gcgugauggaaagaguuaa

SEQ ID NO: 2566143 - RNA, 19 nt, Artificial Sequence
  Description of Artificial Sequence: Synthetic oligonucleotide
  Antisense strand to SEQ ID NO: 2566142
uuaacucuuuccaucacgc

SEQ ID NO: 2566144 - RNA, 19 nt, Artificial Sequence
  Description of Artificial Sequence: Synthetic oligonucleotide
  Sense strand starting at position 2371 of SEQ ID NO: 1888917
cuguguaaacaauaggguu

SEQ ID NO: 2566145 - RNA, 19 nt, Artificial Sequence
  Description of Artificial Sequence: Synthetic oligonucleotide
  Antisense strand to SEQ ID NO: 2566144
aacccuauuguuuacacag

SEQ ID NO: 2566146 - RNA, 19 nt, Artificial Sequence
  Description of Artificial Sequence: Synthetic oligonucleotide
  Sense strand starting at position 2383 of SEQ ID NO: 1888917
uaggguuuacacugaauac

SEQ ID NO: 2566147 - RNA, 19 nt, Artificial Sequence
  Description of Artificial Sequence: Synthetic oligonucleotide
  Antisense strand to SEQ ID NO: 2566146
guauucaguguaaacccua

SEQ ID NO: 2566148 - RNA, 19 nt, Artificial Sequence
  Description of Artificial Sequence: Synthetic oligonucleotide
  Sense strand starting at position 2484 of SEQ ID NO: 1888917
gguacugaaucucuaauaa

SEQ ID NO: 2566149 - RNA, 19 nt, Artificial Sequence
  Description of Artificial Sequence: Synthetic oligonucleotide
  Antisense strand to SEQ ID NO: 2566148
uuauuagagauucaguacc

SEQ ID NO: 2566150 - RNA, 19 nt, Artificial Sequence
  Description of Artificial Sequence: Synthetic oligonucleotide
  Sense strand starting at position 2560 of SEQ ID NO: 1888917
gcaugaccugugugauuuc

SEQ ID NO: 2566151 - RNA, 19 nt, Artificial Sequence
  Description of Artificial Sequence: Synthetic oligonucleotide
  Antisense strand to SEQ ID NO: 2566150
gaaaucacacaggucaugc

SEQ ID NO: 2566152 - RNA, 19 nt, Artificial Sequence
  Description of Artificial Sequence: Synthetic oligonucleotide
  Sense strand starting at position 2768 of SEQ ID NO: 1888917
uauaguguugaauagucua

SEQ ID NO: 2566153 - RNA, 19 nt, Artificial Sequence
  Description of Artificial Sequence: Synthetic oligonucleotide
  Antisense strand to SEQ ID NO: 2566152
uagacuauucaacacuaua

SEQ ID NO: 2566154 - RNA, 19 nt, Artificial Sequence
  Description of Artificial Sequence: Synthetic oligonucleotide
  Sense strand starting at position 2773 of SEQ ID NO: 1888917
uguugaauagucuaccaaa

SEQ ID NO: 2566155 - RNA, 19 nt, Artificial Sequence
  Description of Artificial Sequence: Synthetic oligonucleotide
  Antisense strand to SEQ ID NO: 2566154
uuugguagacuauucaaca

SEQ ID NO: 2566156 - RNA, 19 nt, Artificial Sequence
  Description of Artificial Sequence: Synthetic oligonucleotide
  Sense strand starting at position 2805 of SEQ ID NO: 1888917
agucuugugaaauagguau

SEQ ID NO: 2566157 - RNA, 19 nt, Artificial Sequence
  Description of Artificial Sequence: Synthetic oligonucleotide
  Antisense strand to SEQ ID NO: 2566156
auaccuauuucacaagacu

SEQ ID NO: 2566158 - RNA, 19 nt, Artificial Sequence
  Description of Artificial Sequence: Synthetic oligonucleotide
  Sense strand starting at position 2832 of SEQ ID NO: 1888917
ccauucuaucgaugaagaa

SEQ ID NO: 2566159 - RNA, 19 nt, Artificial Sequence
  Description of Artificial Sequence: Synthetic oligonucleotide
  Antisense strand to SEQ ID NO: 2566158
uucuucaucgauagaaugg

SEQ ID NO: 2566160 - RNA, 19 nt, Artificial Sequence
  Description of Artificial Sequence: Synthetic oligonucleotide
  Sense strand starting at position 2872 of SEQ ID NO: 1888917
cagagagugugcccagaaa

SEQ ID NO: 2566161 - RNA, 19 nt, Artificial Sequence
  Description of Artificial Sequence: Synthetic oligonucleotide
  Antisense strand to SEQ ID NO: 2566160
uuucugggcacacucucug

SEQ ID NO: 2566162 - RNA, 19 nt, Artificial Sequence
  Description of Artificial Sequence: Synthetic oligonucleotide
  Sense strand starting at position 2895 of SEQ ID NO: 1888917
auauuuccguguuuacuau

SEQ ID NO: 2566163 - RNA, 19 nt, Artificial Sequence
  Description of Artificial Sequence: Synthetic oligonucleotide
  Antisense strand to SEQ ID NO: 2566162
auaguaaacacggaaauau

SEQ ID NO: 2566164 - RNA, 19 nt, Artificial Sequence
  Description of Artificial Sequence: Synthetic oligonucleotide
  Sense strand starting at position 2985 of SEQ ID NO: 1888917
uggagucugucacccaaga

SEQ ID NO: 2566165 - RNA, 19 nt, Artificial Sequence
  Description of Artificial Sequence: Synthetic oligonucleotide
  Antisense strand to SEQ ID NO: 2566164
ucuugggugacagacucca

SEQ ID NO: 2566166 - RNA, 19 nt, Artificial Sequence
  Description of Artificial Sequence: Synthetic oligonucleotide
  Sense strand starting at position 3046 of SEQ ID NO: 1888917
guaagcauacaggauuauu

SEQ ID NO: 2566167 - RNA, 19 nt, Artificial Sequence
  Description of Artificial Sequence: Synthetic oligonucleotide
  Antisense strand to SEQ ID NO: 2566166
aauaauccuguaugcuuac

SEQ ID NO: 2566168 - RNA, 19 nt, Artificial Sequence
  Description of Artificial Sequence: Synthetic oligonucleotide
  Sense strand starting at position 3289 of SEQ ID NO: 1888917
uguuauuacugacucagac

SEQ ID NO: 2566169 - RNA, 19 nt, Artificial Sequence
  Description of Artificial Sequence: Synthetic oligonucleotide
  Antisense strand to SEQ ID NO: 2566168
gucugagucaguaauaaca

SEQ ID NO: 2566170 - RNA, 19 nt, Artificial Sequence
  Description of Artificial Sequence: Synthetic oligonucleotide
  Sense strand starting at position 3377 of SEQ ID NO: 1888917
ugcuaacugcaagaucauu

SEQ ID NO: 2566171 - RNA, 19 nt, Artificial Sequence
  Description of Artificial Sequence: Synthetic oligonucleotide
  Antisense strand to SEQ ID NO: 2566170
aaugaucuugcaguuagca

SEQ ID NO: 2566172 - RNA, 19 nt, Artificial Sequence
  Description of Artificial Sequence: Synthetic oligonucleotide
  Sense strand starting at position 3416 of SEQ ID NO: 1888917
uuccaagaauaccuuggua

SEQ ID NO: 2566173 - RNA, 19 nt, Artificial Sequence
  Description of Artificial Sequence: Synthetic oligonucleotide
  Antisense strand to SEQ ID NO: 2566172
uaccaagguauucuuggaa

SEQ ID NO: 2566174 - RNA, 19 nt, Artificial Sequence
  Description of Artificial Sequence: Synthetic oligonucleotide
  Sense strand starting at position 3513 of SEQ ID NO: 1888917
augauaucugcuugaacag

SEQ ID NO: 2566175 - RNA, 19 nt, Artificial Sequence
  Description of Artificial Sequence: Synthetic oligonucleotide
  Antisense strand to SEQ ID NO: 2566174
cuguucaagcagauaucau

SEQ ID NO: 2566176 - RNA, 19 nt, Artificial Sequence
  Description of Artificial Sequence: Synthetic oligonucleotide
  Sense strand starting at position 3805 of SEQ ID NO: 1888917
gcugcagcaguguuaacau

SEQ ID NO: 2566177 - RNA, 19 nt, Artificial Sequence
  Description of Artificial Sequence: Synthetic oligonucleotide
  Antisense strand to SEQ ID NO: 2566176
auguuaacacugcugcagc

SEQ ID NO: 2566178 - RNA, 19 nt, Artificial Sequence
  Description of Artificial Sequence: Synthetic oligonucleotide
  Sense strand starting at position 3826 of SEQ ID NO: 1888917
gcugcaguugugccaguau

SEQ ID NO: 2566179 - RNA, 19 nt, Artificial Sequence
  Description of Artificial Sequence: Synthetic oligonucleotide
  Antisense strand to SEQ ID NO: 2566178
auacuggcacaacugcagc

SEQ ID NO: 2566180 - RNA, 19 nt, Artificial Sequence
  Description of Artificial Sequence: Synthetic oligonucleotide
  Sense strand starting at position 3829 of SEQ ID NO: 1888917
gcaguugugccaguauguu

SEQ ID NO: 2566181 - RNA, 19 nt, Artificial Sequence
  Description of Artificial Sequence: Synthetic oligonucleotide
  Antisense strand to SEQ ID NO: 2566180
aacauacuggcacaacugc

SEQ ID NO: 2566182 - RNA, 19 nt, Artificial Sequence
  Description of Artificial Sequence: Synthetic oligonucleotide
  Sense strand starting at position 3893 of SEQ ID NO: 1888917
gguaaauguuaagugaaag

SEQ ID NO: 2566183 - RNA, 19 nt, Artificial Sequence
  Description of Artificial Sequence: Synthetic oligonucleotide
  Antisense strand to SEQ ID NO: 2566182
cuuucacuuaacauuuacc

SEQ ID NO: 2566184 - RNA, 19 nt, Artificial Sequence
  Description of Artificial Sequence: Synthetic oligonucleotide
  Sense strand starting at position 65 of SEQ ID NO: 1888918
uaacguaagguguacugau

SEQ ID NO: 2566185 - RNA, 19 nt, Artificial Sequence
  Description of Artificial Sequence: Synthetic oligonucleotide
  Antisense strand to SEQ ID NO: 2566184
aucaguacaccuuacguua

SEQ ID NO: 2566186 - RNA, 19 nt, Artificial Sequence
  Description of Artificial Sequence: Synthetic oligonucleotide
  Sense strand starting at position 197 of SEQ ID NO: 1888918
ggugaagugguucaugaau

SEQ ID NO: 2566187 - RNA, 19 nt, Artificial Sequence
  Description of Artificial Sequence: Synthetic oligonucleotide
  Antisense strand to SEQ ID NO: 2566186
auucaugaaccacuucacc

SEQ ID NO: 2566188 - RNA, 19 nt, Artificial Sequence
  Description of Artificial Sequence: Synthetic oligonucleotide
  Sense strand starting at position 211 of SEQ ID NO: 1888918
ugaauucuggguuguauaa

SEQ ID NO: 2566189 - RNA, 19 nt, Artificial Sequence
  Description of Artificial Sequence: Synthetic oligonucleotide
  Antisense strand to SEQ ID NO: 2566188
uuauacaacccagaauuca

SEQ ID NO: 2566190 - RNA, 19 nt, Artificial Sequence
  Description of Artificial Sequence: Synthetic oligonucleotide
  Sense strand starting at position 300 of SEQ ID NO: 1888918
uaaggagaugcguauaagu

SEQ ID NO: 2566191 - RNA, 19 nt, Artificial Sequence
  Description of Artificial Sequence: Synthetic oligonucleotide
  Antisense strand to SEQ ID NO: 2566190
acuuauacgcaucuccuua

SEQ ID NO: 2566192 - RNA, 19 nt, Artificial Sequence
  Description of Artificial Sequence: Synthetic oligonucleotide
  Sense strand starting at position 302 of SEQ ID NO: 1888918
aggagaugcguauaaguga

SEQ ID NO: 2566193 - RNA, 19 nt, Artificial Sequence
  Description of Artificial Sequence: Synthetic oligonucleotide
  Antisense strand to SEQ ID NO: 2566192
ucacuuauacgcaucuccu

SEQ ID NO: 2566194 - RNA, 19 nt, Artificial Sequence
  Description of Artificial Sequence: Synthetic oligonucleotide
  Sense strand starting at position 307 of SEQ ID NO: 1888918
augcguauaagugacaaca

SEQ ID NO: 2566195 - RNA, 19 nt, Artificial Sequence
  Description of Artificial Sequence: Synthetic oligonucleotide
  Antisense strand to SEQ ID NO: 2566194
uguugucacuuauacgcau

SEQ ID NO: 2566196 - RNA, 19 nt, Artificial Sequence
  Description of Artificial Sequence: Synthetic oligonucleotide
  Sense strand starting at position 438 of SEQ ID NO: 1888918
ggaugacauuagcauuuaa

SEQ ID NO: 2566197 - RNA, 19 nt, Artificial Sequence
  Description of Artificial Sequence: Synthetic oligonucleotide
  Antisense strand to SEQ ID NO: 2566196
uuaaaugcuaaugucaucc

SEQ ID NO: 2566198 - RNA, 19 nt, Artificial Sequence
  Description of Artificial Sequence: Synthetic oligonucleotide
  Sense strand starting at position 510 of SEQ ID NO: 1888918
gcaccaaucagaugaaggu

SEQ ID NO: 2566199 - RNA, 19 nt, Artificial Sequence
  Description of Artificial Sequence: Synthetic oligonucleotide
  Antisense strand to SEQ ID NO: 2566198
accuucaucugauuggugc

SEQ ID NO: 2566200 - RNA, 19 nt, Artificial Sequence
  Description of Artificial Sequence: Synthetic oligonucleotide
  Sense strand starting at position 1222 of SEQ ID NO: 1888918
uauguaaaguuuccagaag

SEQ ID NO: 2566201 - RNA, 19 nt, Artificial Sequence
  Description of Artificial Sequence: Synthetic oligonucleotide
  Antisense strand to SEQ ID NO: 2566200
cuucuggaaacuuuacaua

SEQ ID NO: 2566202 - RNA, 19 nt, Artificial Sequence
  Description of Artificial Sequence: Synthetic oligonucleotide
  Sense strand starting at position 1374 of SEQ ID NO: 1888918
augagauuaucaucacgga

SEQ ID NO: 2566203 - RNA, 19 nt, Artificial Sequence
  Description of Artificial Sequence: Synthetic oligonucleotide
  Antisense strand to SEQ ID NO: 2566202
uccgugaugauaaucucau

SEQ ID NO: 2566204 - RNA, 19 nt, Artificial Sequence
  Description of Artificial Sequence: Synthetic oligonucleotide
  Sense strand starting at position 1378 of SEQ ID NO: 1888918
gauuaucaucacggauaca

SEQ ID NO: 2566205 - RNA, 19 nt, Artificial Sequence
  Description of Artificial Sequence: Synthetic oligonucleotide
  Antisense strand to SEQ ID NO: 2566204
uguauccgugaugauaauc

SEQ ID NO: 2566206 - RNA, 19 nt, Artificial Sequence
  Description of Artificial Sequence: Synthetic oligonucleotide
  Sense strand starting at position 1422 of SEQ ID NO: 1888918
guaucuaagccuugaggag

SEQ ID NO: 2566207 - RNA, 19 nt, Artificial Sequence
  Description of Artificial Sequence: Synthetic oligonucleotide
  Antisense strand to SEQ ID NO: 2566206
cuccucaaggcuuagauac

SEQ ID NO: 2566208 - RNA, 19 nt, Artificial Sequence
  Description of Artificial Sequence: Synthetic oligonucleotide
  Sense strand starting at position 1570 of SEQ ID NO: 1888918
uuuauaaggcaagaagugu

SEQ ID NO: 2566209 - RNA, 19 nt, Artificial Sequence
  Description of Artificial Sequence: Synthetic oligonucleotide
  Antisense strand to SEQ ID NO: 2566208
acacuucuugccuuauaaa

SEQ ID NO: 2566210 - RNA, 19 nt, Artificial Sequence
  Description of Artificial Sequence: Synthetic oligonucleotide
  Sense strand starting at position 1583 of SEQ ID NO: 1888918
aaguguauuuggguuguua

SEQ ID NO: 2566211 - RNA, 19 nt, Artificial Sequence
  Description of Artificial Sequence: Synthetic oligonucleotide
  Antisense strand to SEQ ID NO: 2566210
uaacaacccaaauacacuu

SEQ ID NO: 2566212 - RNA, 19 nt, Artificial Sequence
  Description of Artificial Sequence: Synthetic oligonucleotide
  Sense strand starting at position 1585 of SEQ ID NO: 1888918
guguauuuggguuguuaua

SEQ ID NO: 2566213 - RNA, 19 nt, Artificial Sequence
  Description of Artificial Sequence: Synthetic oligonucleotide
  Antisense strand to SEQ ID NO: 2566212
uauaacaacccaaauacac

SEQ ID NO: 2566214 - RNA, 19 nt, Artificial Sequence
  Description of Artificial Sequence: Synthetic oligonucleotide
  Sense strand starting at position 1755 of SEQ ID NO: 1888918
uggagcagaucucucaaga

SEQ ID NO: 2566215 - RNA, 19 nt, Artificial Sequence
  Description of Artificial Sequence: Synthetic oligonucleotide
  Antisense strand to SEQ ID NO: 2566214
ucuugagagaucugcucca

SEQ ID NO: 2566216 - RNA, 19 nt, Artificial Sequence
  Description of Artificial Sequence: Synthetic oligonucleotide
  Sense strand starting at position 1791 of SEQ ID NO: 1888918
cuggaaauggcucaucacu

SEQ ID NO: 2566217 - RNA, 19 nt, Artificial Sequence
  Description of Artificial Sequence: Synthetic oligonucleotide
  Antisense strand to SEQ ID NO: 2566216
agugaugagccauuuccag

SEQ ID NO: 2566218 - RNA, 19 nt, Artificial Sequence
  Description of Artificial Sequence: Synthetic oligonucleotide
  Sense strand starting at position 1793 of SEQ ID NO: 1888918
ggaaauggcucaucacuaa

SEQ ID NO: 2566219 - RNA, 19 nt, Artificial Sequence
  Description of Artificial Sequence: Synthetic oligonucleotide
  Antisense strand to SEQ ID NO: 2566218
uuagugaugagccauuucc

SEQ ID NO: 2566220 - RNA, 19 nt, Artificial Sequence
  Description of Artificial Sequence: Synthetic oligonucleotide
  Sense strand starting at position 1915 of SEQ ID NO: 1888918
ucagaagggugccuuacaa

SEQ ID NO: 2566221 - RNA, 19 nt, Artificial Sequence
  Description of Artificial Sequence: Synthetic oligonucleotide
  Antisense strand to SEQ ID NO: 2566220
uuguaaggcacccuucuga

SEQ ID NO: 2566222 - RNA, 19 nt, Artificial Sequence
  Description of Artificial Sequence: Synthetic oligonucleotide
  Sense strand starting at position 2035 of SEQ ID NO: 1888918
agaugaggcuauucccaga

SEQ ID NO: 2566223 - RNA, 19 nt, Artificial Sequence
  Description of Artificial Sequence: Synthetic oligonucleotide
  Antisense strand to SEQ ID NO: 2566222
ucugggaauagccucaucu

SEQ ID NO: 2566224 - RNA, 19 nt, Artificial Sequence
  Description of Artificial Sequence: Synthetic oligonucleotide
  Sense strand starting at position 2089 of SEQ ID NO: 1888918
ucuuuaaaggguuguauga

SEQ ID NO: 2566225 - RNA, 19 nt, Artificial Sequence
  Description of Artificial Sequence: Synthetic oligonucleotide
  Antisense strand to SEQ ID NO: 2566224
ucauacaacccuuuaaaga

SEQ ID NO: 2566226 - RNA, 19 nt, Artificial Sequence
  Description of Artificial Sequence: Synthetic oligonucleotide
  Sense strand starting at position 2138 of SEQ ID NO: 1888918
cuuguaucuguugugcauu

SEQ ID NO: 2566227 - RNA, 19 nt, Artificial Sequence
  Description of Artificial Sequence: Synthetic oligonucleotide
  Antisense strand to SEQ ID NO: 2566226
aaugcacaacagauacaag

SEQ ID NO: 2566228 - RNA, 19 nt, Artificial Sequence
  Description of Artificial Sequence: Synthetic oligonucleotide
  Sense strand starting at position 2199 of SEQ ID NO: 1888918
auggcacuucuugaaguga

SEQ ID NO: 2566229 - RNA, 19 nt, Artificial Sequence
  Description of Artificial Sequence: Synthetic oligonucleotide
  Antisense strand to SEQ ID NO: 2566228
ucacuucaagaagugccau

SEQ ID NO: 2566230 - RNA, 19 nt, Artificial Sequence
  Description of Artificial Sequence: Synthetic oligonucleotide
  Sense strand starting at position 2281 of SEQ ID NO: 1888918
cucucaguccacuaggaau

SEQ ID NO: 2566231 - RNA, 19 nt, Artificial Sequence
  Description of Artificial Sequence: Synthetic oligonucleotide
  Antisense strand to SEQ ID NO: 2566230
auuccuaguggacugagag

SEQ ID NO: 2566232 - RNA, 19 nt, Artificial Sequence
  Description of Artificial Sequence: Synthetic oligonucleotide
  Sense strand starting at position 2283 of SEQ ID NO: 1888918
cucaguccacuaggaauaa

SEQ ID NO: 2566233 - RNA, 19 nt, Artificial Sequence
  Description of Artificial Sequence: Synthetic oligonucleotide
  Antisense strand to SEQ ID NO: 2566232
uuauuccuaguggacugag

SEQ ID NO: 2566234 - RNA, 19 nt, Artificial Sequence
  Description of Artificial Sequence: Synthetic oligonucleotide
  Sense strand starting at position 2301 of SEQ ID NO: 1888918
agcagaauauagucaauag

SEQ ID NO: 2566235 - RNA, 19 nt, Artificial Sequence
  Description of Artificial Sequence: Synthetic oligonucleotide
  Antisense strand to SEQ ID NO: 2566234
cuauugacuauauucugcu

SEQ ID NO: 2566236 - RNA, 19 nt, Artificial Sequence
  Description of Artificial Sequence: Synthetic oligonucleotide
  Sense strand starting at position 2600 of SEQ ID NO: 1888918
ccagauagagcucaguuga

SEQ ID NO: 2566237 - RNA, 19 nt, Artificial Sequence
  Description of Artificial Sequence: Synthetic oligonucleotide
  Antisense strand to SEQ ID NO: 2566236
ucaacugagcucuaucugg

SEQ ID NO: 2566238 - RNA, 19 nt, Artificial Sequence
  Description of Artificial Sequence: Synthetic oligonucleotide
  Sense strand starting at position 2906 of SEQ ID NO: 1888918
gacucauacgcagagucua

SEQ ID NO: 2566239 - RNA, 19 nt, Artificial Sequence
  Description of Artificial Sequence: Synthetic oligonucleotide
  Antisense strand to SEQ ID NO: 2566238
uagacucugcguaugaguc

SEQ ID NO: 2566240 - RNA, 19 nt, Artificial Sequence
  Description of Artificial Sequence: Synthetic oligonucleotide
  Sense strand starting at position 2911 of SEQ ID NO: 1888918
auacgcagagucuaagaaa

SEQ ID NO: 2566241 - RNA, 19 nt, Artificial Sequence
  Description of Artificial Sequence: Synthetic oligonucleotide
  Antisense strand to SEQ ID NO: 2566240
uuucuuagacucugcguau

SEQ ID NO: 2566242 - RNA, 19 nt, Artificial Sequence
  Description of Artificial Sequence: Synthetic oligonucleotide
  Sense strand starting at position 3009 of SEQ ID NO: 1888918
auugguuuauggguacaga

SEQ ID NO: 2566243 - RNA, 19 nt, Artificial Sequence
  Description of Artificial Sequence: Synthetic oligonucleotide
  Antisense strand to SEQ ID NO: 2566242
ucuguacccauaaaccaau

SEQ ID NO: 2566244 - RNA, 19 nt, Artificial Sequence
  Description of Artificial Sequence: Synthetic oligonucleotide
  Sense strand starting at position 3030 of SEQ ID NO: 1888918
cacaguuaggagggcuaaa

SEQ ID NO: 2566245 - RNA, 19 nt, Artificial Sequence
  Description of Artificial Sequence: Synthetic oligonucleotide
  Antisense strand to SEQ ID NO: 2566244
uuuagcccuccuaacugug

SEQ ID NO: 2566246 - RNA, 19 nt, Artificial Sequence
  Description of Artificial Sequence: Synthetic oligonucleotide
  Sense strand starting at position 3068 of SEQ ID NO: 1888918
gcagaagagugauugauua

SEQ ID NO: 2566247 - RNA, 19 nt, Artificial Sequence
  Description of Artificial Sequence: Synthetic oligonucleotide
  Antisense strand to SEQ ID NO: 2566246
uaaucaaucacucuucugc

SEQ ID NO: 2566248 - RNA, 19 nt, Artificial Sequence
  Description of Artificial Sequence: Synthetic oligonucleotide
  Sense strand starting at position 3072 of SEQ ID NO: 1888918
aagagugauugauuauagu

SEQ ID NO: 2566249 - RNA, 19 nt, Artificial Sequence
  Description of Artificial Sequence: Synthetic oligonucleotide
  Antisense strand to SEQ ID NO: 2566248
acuauaaucaaucacucuu

SEQ ID NO: 2566250 - RNA, 19 nt, Artificial Sequence
  Description of Artificial Sequence: Synthetic oligonucleotide
  Sense strand starting at position 3157 of SEQ ID NO: 1888918
caaagaagugauggacguu

SEQ ID NO: 2566251 - RNA, 19 nt, Artificial Sequence
  Description of Artificial Sequence: Synthetic oligonucleotide
  Antisense strand to SEQ ID NO: 2566250
aacguccaucacuucuuug

SEQ ID NO: 2566252 - RNA, 19 nt, Artificial Sequence
  Description of Artificial Sequence: Synthetic oligonucleotide
  Sense strand starting at position 3158 of SEQ ID NO: 1888918
aaagaagugauggacguuu

SEQ ID NO: 2566253 - RNA, 19 nt, Artificial Sequence
  Description of Artificial Sequence: Synthetic oligonucleotide
  Antisense strand to SEQ ID NO: 2566252
aaacguccaucacuucuuu

SEQ ID NO: 2566254 - RNA, 19 nt, Artificial Sequence
  Description of Artificial Sequence: Synthetic oligonucleotide
  Sense strand starting at position 3160 of SEQ ID NO: 1888918
agaagugauggacguuuga

SEQ ID NO: 2566255 - RNA, 19 nt, Artificial Sequence
  Description of Artificial Sequence: Synthetic oligonucleotide
  Antisense strand to SEQ ID NO: 2566254
ucaaacguccaucacuucu

SEQ ID NO: 2566256 - RNA, 19 nt, Artificial Sequence
  Description of Artificial Sequence: Synthetic oligonucleotide
  Sense strand starting at position 3169 of SEQ ID NO: 1888918
ggacguuugagguaaugaa

SEQ ID NO: 2566257 - RNA, 19 nt, Artificial Sequence
  Description of Artificial Sequence: Synthetic oligonucleotide
  Antisense strand to SEQ ID NO: 2566256
uucauuaccucaaacgucc

SEQ ID NO: 2566258 - RNA, 19 nt, Artificial Sequence
  Description of Artificial Sequence: Synthetic oligonucleotide
  Sense strand starting at position 3905 of SEQ ID NO: 1888918
gcacguaucagggauagac

SEQ ID NO: 2566259 - RNA, 19 nt, Artificial Sequence
  Description of Artificial Sequence: Synthetic oligonucleotide
  Antisense strand to SEQ ID NO: 2566258
gucuaucccugauacgugc

SEQ ID NO: 2566260 - RNA, 19 nt, Artificial Sequence
  Description of Artificial Sequence: Synthetic oligonucleotide
  Sense strand starting at position 3922 of SEQ ID NO: 1888918
acgacacugcacugagaaa

SEQ ID NO: 2566261 - RNA, 19 nt, Artificial Sequence
  Description of Artificial Sequence: Synthetic oligonucleotide
  Antisense strand to SEQ ID NO: 2566260
uuucucagugcagugucgu

SEQ ID NO: 2566262 - RNA, 19 nt, Artificial Sequence
  Description of Artificial Sequence: Synthetic oligonucleotide
  Sense strand starting at position 3923 of SEQ ID NO: 1888918
cgacacugcacugagaaau

SEQ ID NO: 2566263 - RNA, 19 nt, Artificial Sequence
  Description of Artificial Sequence: Synthetic oligonucleotide
  Antisense strand to SEQ ID NO: 2566262
auuucucagugcagugucg

SEQ ID NO: 2566264 - RNA, 19 nt, Artificial Sequence
  Description of Artificial Sequence: Synthetic oligonucleotide
  Sense strand starting at position 66 of SEQ ID NO: 1888919
uaaggagaugcguauaagu

SEQ ID NO: 2566265 - RNA, 19 nt, Artificial Sequence
  Description of Artificial Sequence: Synthetic oligonucleotide
  Antisense strand to SEQ ID NO: 2566264
acuuauacgcaucuccuua

SEQ ID NO: 2566266 - RNA, 19 nt, Artificial Sequence
  Description of Artificial Sequence: Synthetic oligonucleotide
  Sense strand starting at position 68 of SEQ ID NO: 1888919
aggagaugcguauaaguga

SEQ ID NO: 2566267 - RNA, 19 nt, Artificial Sequence
  Description of Artificial Sequence: Synthetic oligonucleotide
  Antisense strand to SEQ ID NO: 2566266
ucacuuauacgcaucuccu

SEQ ID NO: 2566268 - RNA, 19 nt, Artificial Sequence
  Description of Artificial Sequence: Synthetic oligonucleotide
  Sense strand starting at position 73 of SEQ ID NO: 1888919
augcguauaagugacaaca

SEQ ID NO: 2566269 - RNA, 19 nt, Artificial Sequence
  Description of Artificial Sequence: Synthetic oligonucleotide
  Antisense strand to SEQ ID NO: 2566268
uguugucacuuauacgcau

SEQ ID NO: 2566270 - RNA, 19 nt, Artificial Sequence
  Description of Artificial Sequence: Synthetic oligonucleotide
  Sense strand starting at position 204 of SEQ ID NO: 1888919
ggaugacauuagcauuuaa

SEQ ID NO: 2566271 - RNA, 19 nt, Artificial Sequence
  Description of Artificial Sequence: Synthetic oligonucleotide
  Antisense strand to SEQ ID NO: 2566270
uuaaaugcuaaugucaucc

SEQ ID NO: 2566272 - RNA, 19 nt, Artificial Sequence
  Description of Artificial Sequence: Synthetic oligonucleotide
  Sense strand starting at position 276 of SEQ ID NO: 1888919
gcaccaaucagaugaaggu

SEQ ID NO: 2566273 - RNA, 19 nt, Artificial Sequence
  Description of Artificial Sequence: Synthetic oligonucleotide
  Antisense strand to SEQ ID NO: 2566272
accuucaucugauuggugc

SEQ ID NO: 2566274 - RNA, 19 nt, Artificial Sequence
  Description of Artificial Sequence: Synthetic oligonucleotide
  Sense strand starting at position 988 of SEQ ID NO: 1888919
uauguaaaguuuccagaag

SEQ ID NO: 2566275 - RNA, 19 nt, Artificial Sequence
  Description of Artificial Sequence: Synthetic oligonucleotide
  Antisense strand to SEQ ID NO: 2566274
cuucuggaaacuuuacaua

SEQ ID NO: 2566276 - RNA, 19 nt, Artificial Sequence
  Description of Artificial Sequence: Synthetic oligonucleotide
  Sense strand starting at position 1140 of SEQ ID NO: 1888919
augagauuaucaucacgga

SEQ ID NO: 2566277 - RNA, 19 nt, Artificial Sequence
  Description of Artificial Sequence: Synthetic oligonucleotide
  Antisense strand to SEQ ID NO: 2566276
uccgugaugauaaucucau

SEQ ID NO: 2566278 - RNA, 19 nt, Artificial Sequence
  Description of Artificial Sequence: Synthetic oligonucleotide
  Sense strand starting at position 1144 of SEQ ID NO: 1888919
gauuaucaucacggauaca

SEQ ID NO: 2566279 - RNA, 19 nt, Artificial Sequence
  Description of Artificial Sequence: Synthetic oligonucleotide
  Antisense strand to SEQ ID NO: 2566278
uguauccgugaugauaauc

SEQ ID NO: 2566280 - RNA, 19 nt, Artificial Sequence
  Description of Artificial Sequence: Synthetic oligonucleotide
  Sense strand starting at position 1336 of SEQ ID NO: 1888919
uuuauaaggcaagaagugu

SEQ ID NO: 2566281 - RNA, 19 nt, Artificial Sequence
  Description of Artificial Sequence: Synthetic oligonucleotide
  Antisense strand to SEQ ID NO: 2566280
acacuucuugccuuauaaa

SEQ ID NO: 2566282 - RNA, 19 nt, Artificial Sequence
  Description of Artificial Sequence: Synthetic oligonucleotide
  Sense strand starting at position 1349 of SEQ ID NO: 1888919
aaguguauuuggguuguua

SEQ ID NO: 2566283 - RNA, 19 nt, Artificial Sequence
  Description of Artificial Sequence: Synthetic oligonucleotide
  Antisense strand to SEQ ID NO: 2566282
uaacaacccaaauacacuu

SEQ ID NO: 2566284 - RNA, 19 nt, Artificial Sequence
  Description of Artificial Sequence: Synthetic oligonucleotide
  Sense strand starting at position 1351 of SEQ ID NO: 1888919
guguauuuggguuguuaua

SEQ ID NO: 2566285 - RNA, 19 nt, Artificial Sequence
  Description of Artificial Sequence: Synthetic oligonucleotide
  Antisense strand to SEQ ID NO: 2566284
uauaacaacccaaauacac

SEQ ID NO: 2566286 - RNA, 19 nt, Artificial Sequence
  Description of Artificial Sequence: Synthetic oligonucleotide
  Sense strand starting at position 1521 of SEQ ID NO: 1888919
uggagcagaucucucaaga

SEQ ID NO: 2566287 - RNA, 19 nt, Artificial Sequence
  Description of Artificial Sequence: Synthetic oligonucleotide
  Antisense strand to SEQ ID NO: 2566286
ucuugagagaucugcucca

SEQ ID NO: 2566288 - RNA, 19 nt, Artificial Sequence
  Description of Artificial Sequence: Synthetic oligonucleotide
  Sense strand starting at position 1557 of SEQ ID NO: 1888919
cuggaaauggcucaucacu

SEQ ID NO: 2566289 - RNA, 19 nt, Artificial Sequence
  Description of Artificial Sequence: Synthetic oligonucleotide
  Antisense strand to SEQ ID NO: 2566288
agugaugagccauuuccag

SEQ ID NO: 2566290 - RNA, 19 nt, Artificial Sequence
  Description of Artificial Sequence: Synthetic oligonucleotide
  Sense strand starting at position 1559 of SEQ ID NO: 1888919
ggaaauggcucaucacuaa

SEQ ID NO: 2566291 - RNA, 19 nt, Artificial Sequence
  Description of Artificial Sequence: Synthetic oligonucleotide
  Antisense strand to SEQ ID NO: 2566290
uuagugaugagccauuucc

SEQ ID NO: 2566292 - RNA, 19 nt, Artificial Sequence
  Description of Artificial Sequence: Synthetic oligonucleotide
  Sense strand starting at position 1681 of SEQ ID NO: 1888919
ucagaagggugccuuacaa

SEQ ID NO: 2566293 - RNA, 19 nt, Artificial Sequence
  Description of Artificial Sequence: Synthetic oligonucleotide
  Antisense strand to SEQ ID NO: 2566292
uuguaaggcacccuucuga

SEQ ID NO: 2566294 - RNA, 19 nt, Artificial Sequence
  Description of Artificial Sequence: Synthetic oligonucleotide
  Sense strand starting at position 1801 of SEQ ID NO: 1888919
agaugaggcuauucccaga

SEQ ID NO: 2566295 - RNA, 19 nt, Artificial Sequence
  Description of Artificial Sequence: Synthetic oligonucleotide
  Antisense strand to SEQ ID NO: 2566294
ucugggaauagccucaucu

SEQ ID NO: 2566296 - RNA, 19 nt, Artificial Sequence
  Description of Artificial Sequence: Synthetic oligonucleotide
  Sense strand starting at position 1904 of SEQ ID NO: 1888919
cuuguaucuguugugcauu

SEQ ID NO: 2566297 - RNA, 19 nt, Artificial Sequence
  Description of Artificial Sequence: Synthetic oligonucleotide
  Antisense strand to SEQ ID NO: 2566296
aaugcacaacagauacaag

SEQ ID NO: 2566298 - RNA, 19 nt, Artificial Sequence
  Description of Artificial Sequence: Synthetic oligonucleotide
  Sense strand starting at position 1965 of SEQ ID NO: 1888919
auggcacuucuugaaguga

SEQ ID NO: 2566299 - RNA, 19 nt, Artificial Sequence
  Description of Artificial Sequence: Synthetic oligonucleotide
  Antisense strand to SEQ ID NO: 2566298
ucacuucaagaagugccau

SEQ ID NO: 2566300 - RNA, 19 nt, Artificial Sequence
  Description of Artificial Sequence: Synthetic oligonucleotide
  Sense strand starting at position 2047 of SEQ ID NO: 1888919
cucucaguccacuaggaau

SEQ ID NO: 2566301 - RNA, 19 nt, Artificial Sequence
  Description of Artificial Sequence: Synthetic oligonucleotide
  Antisense strand to SEQ ID NO: 2566300
auuccuaguggacugagag

SEQ ID NO: 2566302 - RNA, 19 nt, Artificial Sequence
  Description of Artificial Sequence: Synthetic oligonucleotide
  Sense strand starting at position 2049 of SEQ ID NO: 1888919
cucaguccacuaggaauaa

SEQ ID NO: 2566303 - RNA, 19 nt, Artificial Sequence
  Description of Artificial Sequence: Synthetic oligonucleotide
  Antisense strand to SEQ ID NO: 2566302
uuauuccuaguggacugag

SEQ ID NO: 2566304 - RNA, 19 nt, Artificial Sequence
  Description of Artificial Sequence: Synthetic oligonucleotide
  Sense strand starting at position 2067 of SEQ ID NO: 1888919
agcagaauauagucaauag

SEQ ID NO: 2566305 - RNA, 19 nt, Artificial Sequence
  Description of Artificial Sequence: Synthetic oligonucleotide
  Antisense strand to SEQ ID NO: 2566304
cuauugacuauauucugcu

SEQ ID NO: 2566306 - RNA, 19 nt, Artificial Sequence
  Description of Artificial Sequence: Synthetic oligonucleotide
  Sense strand starting at position 2366 of SEQ ID NO: 1888919
ccagauagagcucaguuga

SEQ ID NO: 2566307 - RNA, 19 nt, Artificial Sequence
  Description of Artificial Sequence: Synthetic oligonucleotide
  Antisense strand to SEQ ID NO: 2566306
ucaacugagcucuaucugg

SEQ ID NO: 2566308 - RNA, 19 nt, Artificial Sequence
  Description of Artificial Sequence: Synthetic oligonucleotide
  Sense strand starting at position 2672 of SEQ ID NO: 1888919
gacucauacgcagagucua

SEQ ID NO: 2566309 - RNA, 19 nt, Artificial Sequence
  Description of Artificial Sequence: Synthetic oligonucleotide
  Antisense strand to SEQ ID NO: 2566308
uagacucugcguaugaguc

SEQ ID NO: 2566310 - RNA, 19 nt, Artificial Sequence
  Description of Artificial Sequence: Synthetic oligonucleotide
  Sense strand starting at position 2677 of SEQ ID NO: 1888919
auacgcagagucuaagaaa

SEQ ID NO: 2566311 - RNA, 19 nt, Artificial Sequence
  Description of Artificial Sequence: Synthetic oligonucleotide
  Antisense strand to SEQ ID NO: 2566310
uuucuuagacucugcguau

SEQ ID NO: 2566312 - RNA, 19 nt, Artificial Sequence
  Description of Artificial Sequence: Synthetic oligonucleotide
  Sense strand starting at position 2775 of SEQ ID NO: 1888919
auugguuuauggguacaga

SEQ ID NO: 2566313 - RNA, 19 nt, Artificial Sequence
  Description of Artificial Sequence: Synthetic oligonucleotide
  Antisense strand to SEQ ID NO: 2566312
ucuguacccauaaaccaau

SEQ ID NO: 2566314 - RNA, 19 nt, Artificial Sequence
  Description of Artificial Sequence: Synthetic oligonucleotide
  Sense strand starting at position 2796 of SEQ ID NO: 1888919
cacaguuaggagggcuaaa

SEQ ID NO: 2566315 - RNA, 19 nt, Artificial Sequence
  Description of Artificial Sequence: Synthetic oligonucleotide
  Antisense strand to SEQ ID NO: 2566314
uuuagcccuccuaacugug

SEQ ID NO: 2566316 - RNA, 19 nt, Artificial Sequence
  Description of Artificial Sequence: Synthetic oligonucleotide
  Sense strand starting at position 2834 of SEQ ID NO: 1888919
gcagaagagugauugauua

SEQ ID NO: 2566317 - RNA, 19 nt, Artificial Sequence
  Description of Artificial Sequence: Synthetic oligonucleotide
  Antisense strand to SEQ ID NO: 2566316
uaaucaaucacucuucugc

SEQ ID NO: 2566318 - RNA, 19 nt, Artificial Sequence
  Description of Artificial Sequence: Synthetic oligonucleotide
  Sense strand starting at position 2838 of SEQ ID NO: 1888919
aagagugauugauuauagu

SEQ ID NO: 2566319 - RNA, 19 nt, Artificial Sequence
  Description of Artificial Sequence: Synthetic oligonucleotide
  Antisense strand to SEQ ID NO: 2566318
acuauaaucaaucacucuu

SEQ ID NO: 2566320 - RNA, 19 nt, Artificial Sequence
  Description of Artificial Sequence: Synthetic oligonucleotide
  Sense strand starting at position 2923 of SEQ ID NO: 1888919
caaagaagugauggacguu

SEQ ID NO: 2566321 - RNA, 19 nt, Artificial Sequence
  Description of Artificial Sequence: Synthetic oligonucleotide
  Antisense strand to SEQ ID NO: 2566320
aacguccaucacuucuuug

SEQ ID NO: 2566322 - RNA, 19 nt, Artificial Sequence
  Description of Artificial Sequence: Synthetic oligonucleotide
  Sense strand starting at position 2924 of SEQ ID NO: 1888919
aaagaagugauggacguuu

SEQ ID NO: 2566323 - RNA, 19 nt, Artificial Sequence
  Description of Artificial Sequence: Synthetic oligonucleotide
  Antisense strand to SEQ ID NO: 2566322
aaacguccaucacuucuuu

SEQ ID NO: 2566324 - RNA, 19 nt, Artificial Sequence
  Description of Artificial Sequence: Synthetic oligonucleotide
  Sense strand starting at position 2926 of SEQ ID NO: 1888919
agaagugauggacguuuga

SEQ ID NO: 2566325 - RNA, 19 nt, Artificial Sequence
  Description of Artificial Sequence: Synthetic oligonucleotide
  Antisense strand to SEQ ID NO: 2566324
ucaaacguccaucacuucu

SEQ ID NO: 2566326 - RNA, 19 nt, Artificial Sequence
  Description of Artificial Sequence: Synthetic oligonucleotide
  Sense strand starting at position 2935 of SEQ ID NO: 1888919
ggacguuugagguaaugaa

SEQ ID NO: 2566327 - RNA, 19 nt, Artificial Sequence
  Description of Artificial Sequence: Synthetic oligonucleotide
  Antisense strand to SEQ ID NO: 2566326
uucauuaccucaaacgucc

SEQ ID NO: 2566328 - RNA, 19 nt, Artificial Sequence
  Description of Artificial Sequence: Synthetic oligonucleotide
  Sense strand starting at position 3671 of SEQ ID NO: 1888919
gcacguaucagggauagac

SEQ ID NO: 2566329 - RNA, 19 nt, Artificial Sequence
  Description of Artificial Sequence: Synthetic oligonucleotide
  Antisense strand to SEQ ID NO: 2566328
gucuaucccugauacgugc

SEQ ID NO: 2566330 - RNA, 19 nt, Artificial Sequence
  Description of Artificial Sequence: Synthetic oligonucleotide
  Sense strand starting at position 3688 of SEQ ID NO: 1888919
acgacacugcacugagaaa

SEQ ID NO: 2566331 - RNA, 19 nt, Artificial Sequence
  Description of Artificial Sequence: Synthetic oligonucleotide
  Antisense strand to SEQ ID NO: 2566330
uuucucagugcagugucgu

SEQ ID NO: 2566332 - RNA, 19 nt, Artificial Sequence
  Description of Artificial Sequence: Synthetic oligonucleotide
  Sense strand starting at position 3689 of SEQ ID NO: 1888919
cgacacugcacugagaaau

SEQ ID NO: 2566333 - RNA, 19 nt, Artificial Sequence
  Description of Artificial Sequence: Synthetic oligonucleotide
  Antisense strand to SEQ ID NO: 2566332
auuucucagugcagugucg

SEQ ID NO: 2566334 - RNA, 19 nt, Artificial Sequence
  Description of Artificial Sequence: Synthetic oligonucleotide
  Sense strand starting at position 3818 of SEQ ID NO: 1888919
gccuguauuuccucaugac

SEQ ID NO: 2566335 - RNA, 19 nt, Artificial Sequence
  Description of Artificial Sequence: Synthetic oligonucleotide
  Antisense strand to SEQ ID NO: 2566334
gucaugaggaaauacaggc

SEQ ID NO: 2566336 - RNA, 19 nt, Artificial Sequence
  Description of Artificial Sequence: Synthetic oligonucleotide
  Sense strand starting at position 3928 of SEQ ID NO: 1888919
aagagcuuuccugggagau

SEQ ID NO: 2566337 - RNA, 19 nt, Artificial Sequence
  Description of Artificial Sequence: Synthetic oligonucleotide
  Antisense strand to SEQ ID NO: 2566336
aucucccaggaaagcucuu

SEQ ID NO: 2566338 - RNA, 19 nt, Artificial Sequence
  Description of Artificial Sequence: Synthetic oligonucleotide
  Sense strand starting at position 3929 of SEQ ID NO: 1888919
agagcuuuccugggagaua

SEQ ID NO: 2566339 - RNA, 19 nt, Artificial Sequence
  Description of Artificial Sequence: Synthetic oligonucleotide
  Antisense strand to SEQ ID NO: 2566338
uaucucccaggaaagcucu

SEQ ID NO: 2566340 - RNA, 19 nt, Artificial Sequence
  Description of Artificial Sequence: Synthetic oligonucleotide
  Sense strand starting at position 3932 of SEQ ID NO: 1888919
gcuuuccugggagauaaug

SEQ ID NO: 2566341 - RNA, 19 nt, Artificial Sequence
  Description of Artificial Sequence: Synthetic oligonucleotide
  Antisense strand to SEQ ID NO: 2566340
cauuaucucccaggaaagc

SEQ ID NO: 2566342 - RNA, 19 nt, Artificial Sequence
  Description of Artificial Sequence: Synthetic oligonucleotide
  Sense strand starting at position 3950 of SEQ ID NO: 1888919
guagcagcagacuaucaaa

SEQ ID NO: 2566343 - RNA, 19 nt, Artificial Sequence
  Description of Artificial Sequence: Synthetic oligonucleotide
  Antisense strand to SEQ ID NO: 2566342
uuugauagucugcugcuac

SEQ ID NO: 2566344 - RNA, 19 nt, Artificial Sequence
  Description of Artificial Sequence: Synthetic oligonucleotide
  Sense strand starting at position 133 of SEQ ID NO: 1888920
ucaaguaugcaacgaaaca

SEQ ID NO: 2566345 - RNA, 19 nt, Artificial Sequence
  Description of Artificial Sequence: Synthetic oligonucleotide
  Antisense strand to SEQ ID NO: 2566344
uguuucguugcauacuuga

SEQ ID NO: 2566346 - RNA, 19 nt, Artificial Sequence
  Description of Artificial Sequence: Synthetic oligonucleotide
  Sense strand starting at position 389 of SEQ ID NO: 1888920
aguuaccaaugucuggaua

SEQ ID NO: 2566347 - RNA, 19 nt, Artificial Sequence
  Description of Artificial Sequence: Synthetic oligonucleotide
  Antisense strand to SEQ ID NO: 2566346
uauccagacauugguaacu

SEQ ID NO: 2566348 - RNA, 19 nt, Artificial Sequence
  Description of Artificial Sequence: Synthetic oligonucleotide
  Sense strand starting at position 390 of SEQ ID NO: 1888920
guuaccaaugucuggauaa

SEQ ID NO: 2566349 - RNA, 19 nt, Artificial Sequence
  Description of Artificial Sequence: Synthetic oligonucleotide
  Antisense strand to SEQ ID NO: 2566348
uuauccagacauugguaac

SEQ ID NO: 2566350 - RNA, 19 nt, Artificial Sequence
  Description of Artificial Sequence: Synthetic oligonucleotide
  Sense strand starting at position 556 of SEQ ID NO: 1888920
gcacaaauuugagaacaau

SEQ ID NO: 2566351 - RNA, 19 nt, Artificial Sequence
  Description of Artificial Sequence: Synthetic oligonucleotide
  Antisense strand to SEQ ID NO: 2566350
auuguucucaaauuugugc

SEQ ID NO: 2566352 - RNA, 19 nt, Artificial Sequence
  Description of Artificial Sequence: Synthetic oligonucleotide
  Sense strand starting at position 622 of SEQ ID NO: 1888920
gagacuuucugcccaggaa

SEQ ID NO: 2566353 - RNA, 19 nt, Artificial Sequence
  Description of Artificial Sequence: Synthetic oligonucleotide
  Antisense strand to SEQ ID NO: 2566352
uuccugggcagaaagucuc

SEQ ID NO: 2566354 - RNA, 19 nt, Artificial Sequence
  Description of Artificial Sequence: Synthetic oligonucleotide
  Sense strand starting at position 697 of SEQ ID NO: 1888920
guacacaggcgauaaugua

SEQ ID NO: 2566355 - RNA, 19 nt, Artificial Sequence
  Description of Artificial Sequence: Synthetic oligonucleotide
  Antisense strand to SEQ ID NO: 2566354
uacauuaucgccuguguac

SEQ ID NO: 2566356 - RNA, 19 nt, Artificial Sequence
  Description of Artificial Sequence: Synthetic oligonucleotide
  Sense strand starting at position 788 of SEQ ID NO: 1888920
cggagugagacaugucacu

SEQ ID NO: 2566357 - RNA, 19 nt, Artificial Sequence
  Description of Artificial Sequence: Synthetic oligonucleotide
  Antisense strand to SEQ ID NO: 2566356
agugacaugucucacuccg

SEQ ID NO: 2566358 - RNA, 19 nt, Artificial Sequence
  Description of Artificial Sequence: Synthetic oligonucleotide
  Sense strand starting at position 795 of SEQ ID NO: 1888920
agacaugucacugacucga

SEQ ID NO: 2566359 - RNA, 19 nt, Artificial Sequence
  Description of Artificial Sequence: Synthetic oligonucleotide
  Antisense strand to SEQ ID NO: 2566358
ucgagucagugacaugucu

SEQ ID NO: 2566360 - RNA, 19 nt, Artificial Sequence
  Description of Artificial Sequence: Synthetic oligonucleotide
  Sense strand starting at position 797 of SEQ ID NO: 1888920
acaugucacugacucgaga

SEQ ID NO: 2566361 - RNA, 19 nt, Artificial Sequence
  Description of Artificial Sequence: Synthetic oligonucleotide
  Antisense strand to SEQ ID NO: 2566360
ucucgagucagugacaugu

SEQ ID NO: 2566362 - RNA, 19 nt, Artificial Sequence
  Description of Artificial Sequence: Synthetic oligonucleotide
  Sense strand starting at position 799 of SEQ ID NO: 1888920
augucacugacucgagaug

SEQ ID NO: 2566363 - RNA, 19 nt, Artificial Sequence
  Description of Artificial Sequence: Synthetic oligonucleotide
  Antisense strand to SEQ ID NO: 2566362
caucucgagucagugacau

SEQ ID NO: 2566364 - RNA, 19 nt, Artificial Sequence
  Description of Artificial Sequence: Synthetic oligonucleotide
  Sense strand starting at position 848 of SEQ ID NO: 1888920
cacuuaaggugcuuuauga

SEQ ID NO: 2566365 - RNA, 19 nt, Artificial Sequence
  Description of Artificial Sequence: Synthetic oligonucleotide
  Antisense strand to SEQ ID NO: 2566364
ucauaaagcaccuuaagug

SEQ ID NO: 2566366 - RNA, 19 nt, Artificial Sequence
  Description of Artificial Sequence: Synthetic oligonucleotide
  Sense strand starting at position 976 of SEQ ID NO: 1888920
ugaagauguucuccaggga

SEQ ID NO: 2566367 - RNA, 19 nt, Artificial Sequence
  Description of Artificial Sequence: Synthetic oligonucleotide
  Antisense strand to SEQ ID NO: 2566366
ucccuggagaacaucuuca

SEQ ID NO: 2566368 - RNA, 19 nt, Artificial Sequence
  Description of Artificial Sequence: Synthetic oligonucleotide
  Sense strand starting at position 1750 of SEQ ID NO: 1888920
gcccucagucccuaggauu

SEQ ID NO: 2566369 - RNA, 19 nt, Artificial Sequence
  Description of Artificial Sequence: Synthetic oligonucleotide
  Antisense strand to SEQ ID NO: 2566368
aauccuagggacugagggc

SEQ ID NO: 2566370 - RNA, 19 nt, Artificial Sequence
  Description of Artificial Sequence: Synthetic oligonucleotide
  Sense strand starting at position 1788 of SEQ ID NO: 1888920
augggaguccauugaguua

SEQ ID NO: 2566371 - RNA, 19 nt, Artificial Sequence
  Description of Artificial Sequence: Synthetic oligonucleotide
  Antisense strand to SEQ ID NO: 2566370
uaacucaauggacucccau

SEQ ID NO: 2566372 - RNA, 19 nt, Artificial Sequence
  Description of Artificial Sequence: Synthetic oligonucleotide
  Sense strand starting at position 1897 of SEQ ID NO: 1888920
gcguuacgugauguguauu

SEQ ID NO: 2566373 - RNA, 19 nt, Artificial Sequence
  Description of Artificial Sequence: Synthetic oligonucleotide
  Antisense strand to SEQ ID NO: 2566372
aauacacaucacguaacgc

SEQ ID NO: 2566374 - RNA, 19 nt, Artificial Sequence
  Description of Artificial Sequence: Synthetic oligonucleotide
  Sense strand starting at position 1908 of SEQ ID NO: 1888920
uguguauuacucuacucca

SEQ ID NO: 2566375 - RNA, 19 nt, Artificial Sequence
  Description of Artificial Sequence: Synthetic oligonucleotide
  Antisense strand to SEQ ID NO: 2566374
uggaguagaguaauacaca

SEQ ID NO: 2566376 - RNA, 19 nt, Artificial Sequence
  Description of Artificial Sequence: Synthetic oligonucleotide
  Sense strand starting at position 2010 of SEQ ID NO: 1888920
ccaaauauauacgugaagu

SEQ ID NO: 2566377 - RNA, 19 nt, Artificial Sequence
  Description of Artificial Sequence: Synthetic oligonucleotide
  Antisense strand to SEQ ID NO: 2566376
acuucacguauauauuugg

SEQ ID NO: 2566378 - RNA, 19 nt, Artificial Sequence
  Description of Artificial Sequence: Synthetic oligonucleotide
  Sense strand starting at position 2091 of SEQ ID NO: 1888920
uagugaggauacucuuacu

SEQ ID NO: 2566379 - RNA, 19 nt, Artificial Sequence
  Description of Artificial Sequence: Synthetic oligonucleotide
  Antisense strand to SEQ ID NO: 2566378
aguaagaguauccucacua

SEQ ID NO: 2566380 - RNA, 19 nt, Artificial Sequence
  Description of Artificial Sequence: Synthetic oligonucleotide
  Sense strand starting at position 2198 of SEQ ID NO: 1888920
agucauuaggaauggcaua

SEQ ID NO: 2566381 - RNA, 19 nt, Artificial Sequence
  Description of Artificial Sequence: Synthetic oligonucleotide
  Antisense strand to SEQ ID NO: 2566380
uaugccauuccuaaugacu

SEQ ID NO: 2566382 - RNA, 19 nt, Artificial Sequence
  Description of Artificial Sequence: Synthetic oligonucleotide
  Sense strand starting at position 2199 of SEQ ID NO: 1888920
gucauuaggaauggcauau

SEQ ID NO: 2566383 - RNA, 19 nt, Artificial Sequence
  Description of Artificial Sequence: Synthetic oligonucleotide
  Antisense strand to SEQ ID NO: 2566382
auaugccauuccuaaugac

SEQ ID NO: 2566384 - RNA, 19 nt, Artificial Sequence
  Description of Artificial Sequence: Synthetic oligonucleotide
  Sense strand starting at position 2447 of SEQ ID NO: 1888920
uuaccuugccuggaaucau

SEQ ID NO: 2566385 - RNA, 19 nt, Artificial Sequence
  Description of Artificial Sequence: Synthetic oligonucleotide
  Antisense strand to SEQ ID NO: 2566384
augauuccaggcaagguaa

SEQ ID NO: 2566386 - RNA, 19 nt, Artificial Sequence
  Description of Artificial Sequence: Synthetic oligonucleotide
  Sense strand starting at position 2457 of SEQ ID NO: 1888920
uggaaucauuuccaagaga

SEQ ID NO: 2566387 - RNA, 19 nt, Artificial Sequence
  Description of Artificial Sequence: Synthetic oligonucleotide
  Antisense strand to SEQ ID NO: 2566386
ucucuuggaaaugauucca

SEQ ID NO: 2566388 - RNA, 19 nt, Artificial Sequence
  Description of Artificial Sequence: Synthetic oligonucleotide
  Sense strand starting at position 2472 of SEQ ID NO: 1888920
gagagcaauuggcuuagaa

SEQ ID NO: 2566389 - RNA, 19 nt, Artificial Sequence
  Description of Artificial Sequence: Synthetic oligonucleotide
  Antisense strand to SEQ ID NO: 2566388
uucuaagccaauugcucuc

SEQ ID NO: 2566390 - RNA, 19 nt, Artificial Sequence
  Description of Artificial Sequence: Synthetic oligonucleotide
  Sense strand starting at position 2474 of SEQ ID NO: 1888920
gagcaauuggcuuagaacc

SEQ ID NO: 2566391 - RNA, 19 nt, Artificial Sequence
  Description of Artificial Sequence: Synthetic oligonucleotide
  Antisense strand to SEQ ID NO: 2566390
gguucuaagccaauugcuc

SEQ ID NO: 2566392 - RNA, 19 nt, Artificial Sequence
  Description of Artificial Sequence: Synthetic oligonucleotide
  Sense strand starting at position 2768 of SEQ ID NO: 1888920
cuaaauuacuugccaugga

SEQ ID NO: 2566393 - RNA, 19 nt, Artificial Sequence
  Description of Artificial Sequence: Synthetic oligonucleotide
  Antisense strand to SEQ ID NO: 2566392
uccauggcaaguaauuuag

SEQ ID NO: 2566394 - RNA, 19 nt, Artificial Sequence
  Description of Artificial Sequence: Synthetic oligonucleotide
  Sense strand starting at position 2772 of SEQ ID NO: 1888920
auuacuugccauggagcaa

SEQ ID NO: 2566395 - RNA, 19 nt, Artificial Sequence
  Description of Artificial Sequence: Synthetic oligonucleotide
  Antisense strand to SEQ ID NO: 2566394
uugcuccauggcaaguaau

SEQ ID NO: 2566396 - RNA, 19 nt, Artificial Sequence
  Description of Artificial Sequence: Synthetic oligonucleotide
  Sense strand starting at position 2799 of SEQ ID NO: 1888920
gagauuauggugugggaca

SEQ ID NO: 2566397 - RNA, 19 nt, Artificial Sequence
  Description of Artificial Sequence: Synthetic oligonucleotide
  Antisense strand to SEQ ID NO: 2566396
ugucccacaccauaaucuc

SEQ ID NO: 2566398 - RNA, 19 nt, Artificial Sequence
  Description of Artificial Sequence: Synthetic oligonucleotide
  Sense strand starting at position 2801 of SEQ ID NO: 1888920
gauuauggugugggacauu

SEQ ID NO: 2566399 - RNA, 19 nt, Artificial Sequence
  Description of Artificial Sequence: Synthetic oligonucleotide
  Antisense strand to SEQ ID NO: 2566398
aaugucccacaccauaauc

SEQ ID NO: 2566400 - RNA, 19 nt, Artificial Sequence
  Description of Artificial Sequence: Synthetic oligonucleotide
  Sense strand starting at position 3079 of SEQ ID NO: 1888920
aguguugacaagugaagaa

SEQ ID NO: 2566401 - RNA, 19 nt, Artificial Sequence
  Description of Artificial Sequence: Synthetic oligonucleotide
  Antisense strand to SEQ ID NO: 2566400
uucuucacuugucaacacu

SEQ ID NO: 2566402 - RNA, 19 nt, Artificial Sequence
  Description of Artificial Sequence: Synthetic oligonucleotide
  Sense strand starting at position 3208 of SEQ ID NO: 1888920
ugcaguauuggguauauac

SEQ ID NO: 2566403 - RNA, 19 nt, Artificial Sequence
  Description of Artificial Sequence: Synthetic oligonucleotide
  Antisense strand to SEQ ID NO: 2566402
guauauacccaauacugca

SEQ ID NO: 2566404 - RNA, 19 nt, Artificial Sequence
  Description of Artificial Sequence: Synthetic oligonucleotide
  Sense strand starting at position 3343 of SEQ ID NO: 1888920
auaugcaaacugugguaua

SEQ ID NO: 2566405 - RNA, 19 nt, Artificial Sequence
  Description of Artificial Sequence: Synthetic oligonucleotide
  Antisense strand to SEQ ID NO: 2566404
uauaccacaguuugcauau

SEQ ID NO: 2566406 - RNA, 19 nt, Artificial Sequence
  Description of Artificial Sequence: Synthetic oligonucleotide
  Sense strand starting at position 3516 of SEQ ID NO: 1888920
acauguccagcuuagaaau

SEQ ID NO: 2566407 - RNA, 19 nt, Artificial Sequence
  Description of Artificial Sequence: Synthetic oligonucleotide
  Antisense strand to SEQ ID NO: 2566406
auuucuaagcuggacaugu

SEQ ID NO: 2566408 - RNA, 19 nt, Artificial Sequence
  Description of Artificial Sequence: Synthetic oligonucleotide
  Sense strand starting at position 3573 of SEQ ID NO: 1888920
agacaauaugcuggguaaa

SEQ ID NO: 2566409 - RNA, 19 nt, Artificial Sequence
  Description of Artificial Sequence: Synthetic oligonucleotide
  Antisense strand to SEQ ID NO: 2566408
uuuacccagcauauugucu

SEQ ID NO: 2566410 - RNA, 19 nt, Artificial Sequence
  Description of Artificial Sequence: Synthetic oligonucleotide
  Sense strand starting at position 3705 of SEQ ID NO: 1888920
ggagucaguguuuaauggu

SEQ ID NO: 2566411 - RNA, 19 nt, Artificial Sequence
  Description of Artificial Sequence: Synthetic oligonucleotide
  Antisense strand to SEQ ID NO: 2566410
accauuaaacacugacucc

SEQ ID NO: 2566412 - RNA, 19 nt, Artificial Sequence
  Description of Artificial Sequence: Synthetic oligonucleotide
  Sense strand starting at position 3711 of SEQ ID NO: 1888920
aguguuuaaugguuacaga

SEQ ID NO: 2566413 - RNA, 19 nt, Artificial Sequence
  Description of Artificial Sequence: Synthetic oligonucleotide
  Antisense strand to SEQ ID NO: 2566412
ucuguaaccauuaaacacu

SEQ ID NO: 2566414 - RNA, 19 nt, Artificial Sequence
  Description of Artificial Sequence: Synthetic oligonucleotide
  Sense strand starting at position 3712 of SEQ ID NO: 1888920
guguuuaaugguuacagag

SEQ ID NO: 2566415 - RNA, 19 nt, Artificial Sequence
  Description of Artificial Sequence: Synthetic oligonucleotide
  Antisense strand to SEQ ID NO: 2566414
cucuguaaccauuaaacac

SEQ ID NO: 2566416 - RNA, 19 nt, Artificial Sequence
  Description of Artificial Sequence: Synthetic oligonucleotide
  Sense strand starting at position 3727 of SEQ ID NO: 1888920
agagguuuaguuugggaua

SEQ ID NO: 2566417 - RNA, 19 nt, Artificial Sequence
  Description of Artificial Sequence: Synthetic oligonucleotide
  Antisense strand to SEQ ID NO: 2566416
uaucccaaacuaaaccucu

SEQ ID NO: 2566418 - RNA, 19 nt, Artificial Sequence
  Description of Artificial Sequence: Synthetic oligonucleotide
  Sense strand starting at position 3746 of SEQ ID NO: 1888920
augaaucauuucuggagau

SEQ ID NO: 2566419 - RNA, 19 nt, Artificial Sequence
  Description of Artificial Sequence: Synthetic oligonucleotide
  Antisense strand to SEQ ID NO: 2566418
aucuccagaaaugauucau

SEQ ID NO: 2566420 - RNA, 19 nt, Artificial Sequence
  Description of Artificial Sequence: Synthetic oligonucleotide
  Sense strand starting at position 3747 of SEQ ID NO: 1888920
ugaaucauuucuggagaug

SEQ ID NO: 2566421 - RNA, 19 nt, Artificial Sequence
  Description of Artificial Sequence: Synthetic oligonucleotide
  Antisense strand to SEQ ID NO: 2566420
caucuccagaaaugauuca

SEQ ID NO: 2566422 - RNA, 19 nt, Artificial Sequence
  Description of Artificial Sequence: Synthetic oligonucleotide
  Sense strand starting at position 3763 of SEQ ID NO: 1888920
auggauuguggugaucauu

SEQ ID NO: 2566423 - RNA, 19 nt, Artificial Sequence
  Description of Artificial Sequence: Synthetic oligonucleotide
  Antisense strand to SEQ ID NO: 2566422
aaugaucaccacaauccau

SEQ ID NO: 2566424 - RNA, 19 nt, Artificial Sequence
  Description of Artificial Sequence: Synthetic oligonucleotide
  Sense strand starting at position 34 of SEQ ID NO: 1888921
uggccucagaaaggugaaa

SEQ ID NO: 2566425 - RNA, 19 nt, Artificial Sequence
  Description of Artificial Sequence: Synthetic oligonucleotide
  Antisense strand to SEQ ID NO: 2566424
uuucaccuuucugaggcca

SEQ ID NO: 2566426 - RNA, 19 nt, Artificial Sequence
  Description of Artificial Sequence: Synthetic oligonucleotide
  Sense strand starting at position 36 of SEQ ID NO: 1888921
gccucagaaaggugaaaca

SEQ ID NO: 2566427 - RNA, 19 nt, Artificial Sequence
  Description of Artificial Sequence: Synthetic oligonucleotide
  Antisense strand to SEQ ID NO: 2566426
uguuucaccuuucugaggc

SEQ ID NO: 2566428 - RNA, 19 nt, Artificial Sequence
  Description of Artificial Sequence: Synthetic oligonucleotide
  Sense strand starting at position 191 of SEQ ID NO: 1888921
gugagauaagcaugaagau

SEQ ID NO: 2566429 - RNA, 19 nt, Artificial Sequence
  Description of Artificial Sequence: Synthetic oligonucleotide
  Antisense strand to SEQ ID NO: 2566428
aucuucaugcuuaucucac

SEQ ID NO: 2566430 - RNA, 19 nt, Artificial Sequence
  Description of Artificial Sequence: Synthetic oligonucleotide
  Sense strand starting at position 200 of SEQ ID NO: 1888921
gcaugaagauauccagacu

SEQ ID NO: 2566431 - RNA, 19 nt, Artificial Sequence
  Description of Artificial Sequence: Synthetic oligonucleotide
  Antisense strand to SEQ ID NO: 2566430
agucuggauaucuucaugc

SEQ ID NO: 2566432 - RNA, 19 nt, Artificial Sequence
  Description of Artificial Sequence: Synthetic oligonucleotide
  Sense strand starting at position 288 of SEQ ID NO: 1888921
ccuuuauagcugcaagaga

SEQ ID NO: 2566433 - RNA, 19 nt, Artificial Sequence
  Description of Artificial Sequence: Synthetic oligonucleotide
  Antisense strand to SEQ ID NO: 2566432
ucucuugcagcuauaaagg

SEQ ID NO: 2566434 - RNA, 19 nt, Artificial Sequence
  Description of Artificial Sequence: Synthetic oligonucleotide
  Sense strand starting at position 600 of SEQ ID NO: 1888921
ucauaauucuggccaagaa

SEQ ID NO: 2566435 - RNA, 19 nt, Artificial Sequence
  Description of Artificial Sequence: Synthetic oligonucleotide
  Antisense strand to SEQ ID NO: 2566434
uucuuggccagaauuauga

SEQ ID NO: 2566436 - RNA, 19 nt, Artificial Sequence
  Description of Artificial Sequence: Synthetic oligonucleotide
  Sense strand starting at position 626 of SEQ ID NO: 1888921
gcaguauaccuauauaucu

SEQ ID NO: 2566437 - RNA, 19 nt, Artificial Sequence
  Description of Artificial Sequence: Synthetic oligonucleotide
  Antisense strand to SEQ ID NO: 2566436
agauauauagguauacugc

SEQ ID NO: 2566438 - RNA, 19 nt, Artificial Sequence
  Description of Artificial Sequence: Synthetic oligonucleotide
  Sense strand starting at position 680 of SEQ ID NO: 1888921
ugaacaacucgguaaaggu

SEQ ID NO: 2566439 - RNA, 19 nt, Artificial Sequence
  Description of Artificial Sequence: Synthetic oligonucleotide
  Antisense strand to SEQ ID NO: 2566438
accuuuaccgaguuguuca

SEQ ID NO: 2566440 - RNA, 19 nt, Artificial Sequence
  Description of Artificial Sequence: Synthetic oligonucleotide
  Sense strand starting at position 735 of SEQ ID NO: 1888921
caugaaugguaaguaagua

SEQ ID NO: 2566441 - RNA, 19 nt, Artificial Sequence
  Description of Artificial Sequence: Synthetic oligonucleotide
  Antisense strand to SEQ ID NO: 2566440
uacuuacuuaccauucaug

SEQ ID NO: 2566442 - RNA, 19 nt, Artificial Sequence
  Description of Artificial Sequence: Synthetic oligonucleotide
  Sense strand starting at position 880 of SEQ ID NO: 1888921
cugauaagaaguuggguaa

SEQ ID NO: 2566443 - RNA, 19 nt, Artificial Sequence
  Description of Artificial Sequence: Synthetic oligonucleotide
  Antisense strand to SEQ ID NO: 2566442
uuacccaacuucuuaucag

SEQ ID NO: 2566444 - RNA, 19 nt, Artificial Sequence
  Description of Artificial Sequence: Synthetic oligonucleotide
  Sense strand starting at position 881 of SEQ ID NO: 1888921
ugauaagaaguuggguaau

SEQ ID NO: 2566445 - RNA, 19 nt, Artificial Sequence
  Description of Artificial Sequence: Synthetic oligonucleotide
  Antisense strand to SEQ ID NO: 2566444
auuacccaacuucuuauca

SEQ ID NO: 2566446 - RNA, 19 nt, Artificial Sequence
  Description of Artificial Sequence: Synthetic oligonucleotide
  Sense strand starting at position 895 of SEQ ID NO: 1888921
guaauuggaucacuaauac

SEQ ID NO: 2566447 - RNA, 19 nt, Artificial Sequence
  Description of Artificial Sequence: Synthetic oligonucleotide
  Antisense strand to SEQ ID NO: 2566446
guauuagugauccaauuac

SEQ ID NO: 2566448 - RNA, 19 nt, Artificial Sequence
  Description of Artificial Sequence: Synthetic oligonucleotide
  Sense strand starting at position 1489 of SEQ ID NO: 1888921
aagguuaaguguuuaagaa

SEQ ID NO: 2566449 - RNA, 19 nt, Artificial Sequence
  Description of Artificial Sequence: Synthetic oligonucleotide
  Antisense strand to SEQ ID NO: 2566448
uucuuaaacacuuaaccuu

SEQ ID NO: 2566450 - RNA, 19 nt, Artificial Sequence
  Description of Artificial Sequence: Synthetic oligonucleotide
  Sense strand starting at position 1490 of SEQ ID NO: 1888921
agguuaaguguuuaagaag

SEQ ID NO: 2566451 - RNA, 19 nt, Artificial Sequence
  Description of Artificial Sequence: Synthetic oligonucleotide
  Antisense strand to SEQ ID NO: 2566450
cuucuuaaacacuuaaccu

SEQ ID NO: 2566452 - RNA, 19 nt, Artificial Sequence
  Description of Artificial Sequence: Synthetic oligonucleotide
  Sense strand starting at position 1786 of SEQ ID NO: 1888921
gagguaguccagcauggaa

SEQ ID NO: 2566453 - RNA, 19 nt, Artificial Sequence
  Description of Artificial Sequence: Synthetic oligonucleotide
  Antisense strand to SEQ ID NO: 2566452
uuccaugcuggacuaccuc

SEQ ID NO: 2566454 - RNA, 19 nt, Artificial Sequence
  Description of Artificial Sequence: Synthetic oligonucleotide
  Sense strand starting at position 2338 of SEQ ID NO: 1888921
gacuuuguauaucugagau

SEQ ID NO: 2566455 - RNA, 19 nt, Artificial Sequence
  Description of Artificial Sequence: Synthetic oligonucleotide
  Antisense strand to SEQ ID NO: 2566454
aucucagauauacaaaguc

SEQ ID NO: 2566456 - RNA, 19 nt, Artificial Sequence
  Description of Artificial Sequence: Synthetic oligonucleotide
  Sense strand starting at position 2387 of SEQ ID NO: 1888921
guguuuaagaagcaggaga

SEQ ID NO: 2566457 - RNA, 19 nt, Artificial Sequence
  Description of Artificial Sequence: Synthetic oligonucleotide
  Antisense strand to SEQ ID NO: 2566456
ucuccugcuucuuaaacac

SEQ ID NO: 2566458 - RNA, 19 nt, Artificial Sequence
  Description of Artificial Sequence: Synthetic oligonucleotide
  Sense strand starting at position 2479 of SEQ ID NO: 1888921
aggaaacaguuucugcaaa

SEQ ID NO: 2566459 - RNA, 19 nt, Artificial Sequence
  Description of Artificial Sequence: Synthetic oligonucleotide
  Antisense strand to SEQ ID NO: 2566458
uuugcagaaacuguuuccu

SEQ ID NO: 2566460 - RNA, 19 nt, Artificial Sequence
  Description of Artificial Sequence: Synthetic oligonucleotide
  Sense strand starting at position 2507 of SEQ ID NO: 1888921
acucuuaaggcguaaagaa

SEQ ID NO: 2566461 - RNA, 19 nt, Artificial Sequence
  Description of Artificial Sequence: Synthetic oligonucleotide
  Antisense strand to SEQ ID NO: 2566460
uucuuuacgccuuaagagu

SEQ ID NO: 2566462 - RNA, 19 nt, Artificial Sequence
  Description of Artificial Sequence: Synthetic oligonucleotide
  Sense strand starting at position 2958 of SEQ ID NO: 1888921
gugagugaccauuggaauu

SEQ ID NO: 2566463 - RNA, 19 nt, Artificial Sequence
  Description of Artificial Sequence: Synthetic oligonucleotide
  Antisense strand to SEQ ID NO: 2566462
aauuccaauggucacucac

SEQ ID NO: 2566464 - RNA, 19 nt, Artificial Sequence
  Description of Artificial Sequence: Synthetic oligonucleotide
  Sense strand starting at position 3224 of SEQ ID NO: 1888921
gacuuuguauaucugagac

SEQ ID NO: 2566465 - RNA, 19 nt, Artificial Sequence
  Description of Artificial Sequence: Synthetic oligonucleotide
  Antisense strand to SEQ ID NO: 2566464
gucucagauauacaaaguc

SEQ ID NO: 2566466 - RNA, 19 nt, Artificial Sequence
  Description of Artificial Sequence: Synthetic oligonucleotide
  Sense strand starting at position 3330 of SEQ ID NO: 1888921
gaagcuaaccguuaauaga

SEQ ID NO: 2566467 - RNA, 19 nt, Artificial Sequence
  Description of Artificial Sequence: Synthetic oligonucleotide
  Antisense strand to SEQ ID NO: 2566466
ucuauuaacgguuagcuuc

SEQ ID NO: 2566468 - RNA, 19 nt, Artificial Sequence
  Description of Artificial Sequence: Synthetic oligonucleotide
  Sense strand starting at position 3349 of SEQ ID NO: 1888921
uuuggauguuggagaagga

SEQ ID NO: 2566469 - RNA, 19 nt, Artificial Sequence
  Description of Artificial Sequence: Synthetic oligonucleotide
  Antisense strand to SEQ ID NO: 2566468
uccuucuccaacauccaaa

SEQ ID NO: 2566470 - RNA, 19 nt, Artificial Sequence
  Description of Artificial Sequence: Synthetic oligonucleotide
  Sense strand starting at position 3364 of SEQ ID NO: 1888921
aggaaauaguuucugcaaa

SEQ ID NO: 2566471 - RNA, 19 nt, Artificial Sequence
  Description of Artificial Sequence: Synthetic oligonucleotide
  Antisense strand to SEQ ID NO: 2566470
uuugcagaaacuauuuccu

SEQ ID NO: 2566472 - RNA, 19 nt, Artificial Sequence
  Description of Artificial Sequence: Synthetic oligonucleotide
  Sense strand starting at position 563 of SEQ ID NO: 1888922
gacuuuguauaucugagau

SEQ ID NO: 2566473 - RNA, 19 nt, Artificial Sequence
  Description of Artificial Sequence: Synthetic oligonucleotide
  Antisense strand to SEQ ID NO: 2566472
aucucagauauacaaaguc

SEQ ID NO: 2566474 - RNA, 19 nt, Artificial Sequence
  Description of Artificial Sequence: Synthetic oligonucleotide
  Sense strand starting at position 612 of SEQ ID NO: 1888922
guguuuaagaagcaggaga

SEQ ID NO: 2566475 - RNA, 19 nt, Artificial Sequence
  Description of Artificial Sequence: Synthetic oligonucleotide
  Antisense strand to SEQ ID NO: 2566474
ucuccugcuucuuaaacac

SEQ ID NO: 2566476 - RNA, 19 nt, Artificial Sequence
  Description of Artificial Sequence: Synthetic oligonucleotide
  Sense strand starting at position 704 of SEQ ID NO: 1888922
aggaaacaguuucugcaaa

SEQ ID NO: 2566477 - RNA, 19 nt, Artificial Sequence
  Description of Artificial Sequence: Synthetic oligonucleotide
  Antisense strand to SEQ ID NO: 2566476
uuugcagaaacuguuuccu

SEQ ID NO: 2566478 - RNA, 19 nt, Artificial Sequence
  Description of Artificial Sequence: Synthetic oligonucleotide
  Sense strand starting at position 732 of SEQ ID NO: 1888922
acucuuaaggcguaaagaa

SEQ ID NO: 2566479 - RNA, 19 nt, Artificial Sequence
  Description of Artificial Sequence: Synthetic oligonucleotide
  Antisense strand to SEQ ID NO: 2566478
uucuuuacgccuuaagagu

SEQ ID NO: 2566480 - RNA, 19 nt, Artificial Sequence
  Description of Artificial Sequence: Synthetic oligonucleotide
  Sense strand starting at position 1183 of SEQ ID NO: 1888922
gugagugaccauuggaauu

SEQ ID NO: 2566481 - RNA, 19 nt, Artificial Sequence
  Description of Artificial Sequence: Synthetic oligonucleotide
  Antisense strand to SEQ ID NO: 2566480
aauuccaauggucacucac

SEQ ID NO: 2566482 - RNA, 19 nt, Artificial Sequence
  Description of Artificial Sequence: Synthetic oligonucleotide
  Sense strand starting at position 1449 of SEQ ID NO: 1888922
gacuuuguauaucugagac

SEQ ID NO: 2566483 - RNA, 19 nt, Artificial Sequence
  Description of Artificial Sequence: Synthetic oligonucleotide
  Antisense strand to SEQ ID NO: 2566482
gucucagauauacaaaguc

SEQ ID NO: 2566484 - RNA, 19 nt, Artificial Sequence
  Description of Artificial Sequence: Synthetic oligonucleotide
  Sense strand starting at position 1555 of SEQ ID NO: 1888922
gaagcuaaccguuaauaga

SEQ ID NO: 2566485 - RNA, 19 nt, Artificial Sequence
  Description of Artificial Sequence: Synthetic oligonucleotide
  Antisense strand to SEQ ID NO: 2566484
ucuauuaacgguuagcuuc

SEQ ID NO: 2566486 - RNA, 19 nt, Artificial Sequence
  Description of Artificial Sequence: Synthetic oligonucleotide
  Sense strand starting at position 1574 of SEQ ID NO: 1888922
uuuggauguuggagaagga

SEQ ID NO: 2566487 - RNA, 19 nt, Artificial Sequence
  Description of Artificial Sequence: Synthetic oligonucleotide
  Antisense strand to SEQ ID NO: 2566486
uccuucuccaacauccaaa

SEQ ID NO: 2566488 - RNA, 19 nt, Artificial Sequence
  Description of Artificial Sequence: Synthetic oligonucleotide
  Sense strand starting at position 1589 of SEQ ID NO: 1888922
aggaaauaguuucugcaaa

SEQ ID NO: 2566489 - RNA, 19 nt, Artificial Sequence
  Description of Artificial Sequence: Synthetic oligonucleotide
  Antisense strand to SEQ ID NO: 2566488
uuugcagaaacuauuuccu

SEQ ID NO: 2566490 - RNA, 19 nt, Artificial Sequence
  Description of Artificial Sequence: Synthetic oligonucleotide
  Sense strand starting at position 1786 of SEQ ID NO: 1888922
gagguaguccagcauggaa

SEQ ID NO: 2566491 - RNA, 19 nt, Artificial Sequence
  Description of Artificial Sequence: Synthetic oligonucleotide
  Antisense strand to SEQ ID NO: 2566490
uuccaugcuggacuaccuc

SEQ ID NO: 2566492 - RNA, 19 nt, Artificial Sequence
  Description of Artificial Sequence: Synthetic oligonucleotide
  Sense strand starting at position 2417 of SEQ ID NO: 1888922
ccaugauucccauaugcug

SEQ ID NO: 2566493 - RNA, 19 nt, Artificial Sequence
  Description of Artificial Sequence: Synthetic oligonucleotide
  Antisense strand to SEQ ID NO: 2566492
cagcauaugggaaucaugg

SEQ ID NO: 2566494 - RNA, 19 nt, Artificial Sequence
  Description of Artificial Sequence: Synthetic oligonucleotide
  Sense strand starting at position 2887 of SEQ ID NO: 1888922
agagacuugacuuguugaa

SEQ ID NO: 2566495 - RNA, 19 nt, Artificial Sequence
  Description of Artificial Sequence: Synthetic oligonucleotide
  Antisense strand to SEQ ID NO: 2566494
uucaacaagucaagucucu

SEQ ID NO: 2566496 - RNA, 19 nt, Artificial Sequence
  Description of Artificial Sequence: Synthetic oligonucleotide
  Sense strand starting at position 2889 of SEQ ID NO: 1888922
agacuugacuuguugaaug

SEQ ID NO: 2566497 - RNA, 19 nt, Artificial Sequence
  Description of Artificial Sequence: Synthetic oligonucleotide
  Antisense strand to SEQ ID NO: 2566496
cauucaacaagucaagucu

SEQ ID NO: 2566498 - RNA, 19 nt, Artificial Sequence
  Description of Artificial Sequence: Synthetic oligonucleotide
  Sense strand starting at position 2950 of SEQ ID NO: 1888922
agguuaagguagucucaga

SEQ ID NO: 2566499 - RNA, 19 nt, Artificial Sequence
  Description of Artificial Sequence: Synthetic oligonucleotide
  Antisense strand to SEQ ID NO: 2566498
ucugagacuaccuuaaccu

SEQ ID NO: 2566500 - RNA, 19 nt, Artificial Sequence
  Description of Artificial Sequence: Synthetic oligonucleotide
  Sense strand starting at position 3256 of SEQ ID NO: 1888922
ccaagccagcuguagaaau

SEQ ID NO: 2566501 - RNA, 19 nt, Artificial Sequence
  Description of Artificial Sequence: Synthetic oligonucleotide
  Antisense strand to SEQ ID NO: 2566500
auuucuacagcuggcuugg

SEQ ID NO: 2566502 - RNA, 19 nt, Artificial Sequence
  Description of Artificial Sequence: Synthetic oligonucleotide
  Sense strand starting at position 3684 of SEQ ID NO: 1888922
cggagaaccucugcuagga

SEQ ID NO: 2566503 - RNA, 19 nt, Artificial Sequence
  Description of Artificial Sequence: Synthetic oligonucleotide
  Antisense strand to SEQ ID NO: 2566502
uccuagcagagguucuccg

SEQ ID NO: 2566504 - RNA, 19 nt, Artificial Sequence
  Description of Artificial Sequence: Synthetic oligonucleotide
  Sense strand starting at position 34 of SEQ ID NO: 1888923
uggccucagaaaggugaaa

SEQ ID NO: 2566505 - RNA, 19 nt, Artificial Sequence
  Description of Artificial Sequence: Synthetic oligonucleotide
  Antisense strand to SEQ ID NO: 2566504
uuucaccuuucugaggcca

SEQ ID NO: 2566506 - RNA, 19 nt, Artificial Sequence
  Description of Artificial Sequence: Synthetic oligonucleotide
  Sense strand starting at position 36 of SEQ ID NO: 1888923
gccucagaaaggugaaaca

SEQ ID NO: 2566507 - RNA, 19 nt, Artificial Sequence
  Description of Artificial Sequence: Synthetic oligonucleotide
  Antisense strand to SEQ ID NO: 2566506
uguuucaccuuucugaggc

SEQ ID NO: 2566508 - RNA, 19 nt, Artificial Sequence
  Description of Artificial Sequence: Synthetic oligonucleotide
  Sense strand starting at position 191 of SEQ ID NO: 1888923
gugagauaagcaugaagau

SEQ ID NO: 2566509 - RNA, 19 nt, Artificial Sequence
  Description of Artificial Sequence: Synthetic oligonucleotide
  Antisense strand to SEQ ID NO: 2566508
aucuucaugcuuaucucac

SEQ ID NO: 2566510 - RNA, 19 nt, Artificial Sequence
  Description of Artificial Sequence: Synthetic oligonucleotide
  Sense strand starting at position 200 of SEQ ID NO: 1888923
gcaugaagauauccagacu

SEQ ID NO: 2566511 - RNA, 19 nt, Artificial Sequence
  Description of Artificial Sequence: Synthetic oligonucleotide
  Antisense strand to SEQ ID NO: 2566510
agucuggauaucuucaugc

SEQ ID NO: 2566512 - RNA, 19 nt, Artificial Sequence
  Description of Artificial Sequence: Synthetic oligonucleotide
  Sense strand starting at position 288 of SEQ ID NO: 1888923
ccuuuauagcugcaagaga

SEQ ID NO: 2566513 - RNA, 19 nt, Artificial Sequence
  Description of Artificial Sequence: Synthetic oligonucleotide
  Antisense strand to SEQ ID NO: 2566512
ucucuugcagcuauaaagg

SEQ ID NO: 2566514 - RNA, 19 nt, Artificial Sequence
  Description of Artificial Sequence: Synthetic oligonucleotide
  Sense strand starting at position 600 of SEQ ID NO: 1888923
ucauaauucuggccaagaa

SEQ ID NO: 2566515 - RNA, 19 nt, Artificial Sequence
  Description of Artificial Sequence: Synthetic oligonucleotide
  Antisense strand to SEQ ID NO: 2566514
uucuuggccagaauuauga

SEQ ID NO: 2566516 - RNA, 19 nt, Artificial Sequence
  Description of Artificial Sequence: Synthetic oligonucleotide
  Sense strand starting at position 626 of SEQ ID NO: 1888923
gcaguauaccuauauaucu

SEQ ID NO: 2566517 - RNA, 19 nt, Artificial Sequence
  Description of Artificial Sequence: Synthetic oligonucleotide
  Antisense strand to SEQ ID NO: 2566516
agauauauagguauacugc

SEQ ID NO: 2566518 - RNA, 19 nt, Artificial Sequence
  Description of Artificial Sequence: Synthetic oligonucleotide
  Sense strand starting at position 680 of SEQ ID NO: 1888923
ugaacaacucgguaaaggu

SEQ ID NO: 2566519 - RNA, 19 nt, Artificial Sequence
  Description of Artificial Sequence: Synthetic oligonucleotide
  Antisense strand to SEQ ID NO: 2566518
accuuuaccgaguuguuca

SEQ ID NO: 2566520 - RNA, 19 nt, Artificial Sequence
  Description of Artificial Sequence: Synthetic oligonucleotide
  Sense strand starting at position 735 of SEQ ID NO: 1888923
caugaaugguaaguaagua

SEQ ID NO: 2566521 - RNA, 19 nt, Artificial Sequence
  Description of Artificial Sequence: Synthetic oligonucleotide
  Antisense strand to SEQ ID NO: 2566520
uacuuacuuaccauucaug

SEQ ID NO: 2566522 - RNA, 19 nt, Artificial Sequence
  Description of Artificial Sequence: Synthetic oligonucleotide
  Sense strand starting at position 880 of SEQ ID NO: 1888923
cugauaagaaguuggguaa

SEQ ID NO: 2566523 - RNA, 19 nt, Artificial Sequence
  Description of Artificial Sequence: Synthetic oligonucleotide
  Antisense strand to SEQ ID NO: 2566522
uuacccaacuucuuaucag

SEQ ID NO: 2566524 - RNA, 19 nt, Artificial Sequence
  Description of Artificial Sequence: Synthetic oligonucleotide
  Sense strand starting at position 881 of SEQ ID NO: 1888923
ugauaagaaguuggguaau

SEQ ID NO: 2566525 - RNA, 19 nt, Artificial Sequence
  Description of Artificial Sequence: Synthetic oligonucleotide
  Antisense strand to SEQ ID NO: 2566524
auuacccaacuucuuauca

SEQ ID NO: 2566526 - RNA, 19 nt, Artificial Sequence
  Description of Artificial Sequence: Synthetic oligonucleotide
  Sense strand starting at position 895 of SEQ ID NO: 1888923
guaauuggaucacuaauac

SEQ ID NO: 2566527 - RNA, 19 nt, Artificial Sequence
  Description of Artificial Sequence: Synthetic oligonucleotide
  Antisense strand to SEQ ID NO: 2566526
guauuagugauccaauuac

SEQ ID NO: 2566528 - RNA, 19 nt, Artificial Sequence
  Description of Artificial Sequence: Synthetic oligonucleotide
  Sense strand starting at position 1489 of SEQ ID NO: 1888923
aagguuaaguguuuaagaa

SEQ ID NO: 2566529 - RNA, 19 nt, Artificial Sequence
  Description of Artificial Sequence: Synthetic oligonucleotide
  Antisense strand to SEQ ID NO: 2566528
uucuuaaacacuuaaccuu

SEQ ID NO: 2566530 - RNA, 19 nt, Artificial Sequence
  Description of Artificial Sequence: Synthetic oligonucleotide
  Sense strand starting at position 1490 of SEQ ID NO: 1888923
agguuaaguguuuaagaag

SEQ ID NO: 2566531 - RNA, 19 nt, Artificial Sequence
  Description of Artificial Sequence: Synthetic oligonucleotide
  Antisense strand to SEQ ID NO: 2566530
cuucuuaaacacuuaaccu

SEQ ID NO: 2566532 - RNA, 19 nt, Artificial Sequence
  Description of Artificial Sequence: Synthetic oligonucleotide
  Sense strand starting at position 1786 of SEQ ID NO: 1888923
gagguaguccagcauggaa

SEQ ID NO: 2566533 - RNA, 19 nt, Artificial Sequence
  Description of Artificial Sequence: Synthetic oligonucleotide
  Antisense strand to SEQ ID NO: 2566532
uuccaugcuggacuaccuc

SEQ ID NO: 2566534 - RNA, 19 nt, Artificial Sequence
  Description of Artificial Sequence: Synthetic oligonucleotide
  Sense strand starting at position 2338 of SEQ ID NO: 1888923
gacuuuguauaucugagau

SEQ ID NO: 2566535 - RNA, 19 nt, Artificial Sequence
  Description of Artificial Sequence: Synthetic oligonucleotide
  Antisense strand to SEQ ID NO: 2566534
aucucagauauacaaaguc

SEQ ID NO: 2566536 - RNA, 19 nt, Artificial Sequence
  Description of Artificial Sequence: Synthetic oligonucleotide
  Sense strand starting at position 2387 of SEQ ID NO: 1888923
guguuuaagaagcaggaga

SEQ ID NO: 2566537 - RNA, 19 nt, Artificial Sequence
  Description of Artificial Sequence: Synthetic oligonucleotide
  Antisense strand to SEQ ID NO: 2566536
ucuccugcuucuuaaacac

SEQ ID NO: 2566538 - RNA, 19 nt, Artificial Sequence
  Description of Artificial Sequence: Synthetic oligonucleotide
  Sense strand starting at position 2479 of SEQ ID NO: 1888923
aggaaacaguuucugcaaa

SEQ ID NO: 2566539 - RNA, 19 nt, Artificial Sequence
  Description of Artificial Sequence: Synthetic oligonucleotide
  Antisense strand to SEQ ID NO: 2566538
uuugcagaaacuguuuccu

SEQ ID NO: 2566540 - RNA, 19 nt, Artificial Sequence
  Description of Artificial Sequence: Synthetic oligonucleotide
  Sense strand starting at position 2507 of SEQ ID NO: 1888923
acucuuaaggcguaaagaa

SEQ ID NO: 2566541 - RNA, 19 nt, Artificial Sequence
  Description of Artificial Sequence: Synthetic oligonucleotide
  Antisense strand to SEQ ID NO: 2566540
uucuuuacgccuuaagagu

SEQ ID NO: 2566542 - RNA, 19 nt, Artificial Sequence
  Description of Artificial Sequence: Synthetic oligonucleotide
  Sense strand starting at position 2958 of SEQ ID NO: 1888923
gugagugaccauuggaauu

SEQ ID NO: 2566543 - RNA, 19 nt, Artificial Sequence
  Description of Artificial Sequence: Synthetic oligonucleotide
  Antisense strand to SEQ ID NO: 2566542
aauuccaauggucacucac

SEQ ID NO: 2566544 - RNA, 19 nt, Artificial Sequence
  Description of Artificial Sequence: Synthetic oligonucleotide
  Sense strand starting at position 3224 of SEQ ID NO: 1888923
gacuuuguauaucugagac

SEQ ID NO: 2566545 - RNA, 19 nt, Artificial Sequence
  Description of Artificial Sequence: Synthetic oligonucleotide
  Antisense strand to SEQ ID NO: 2566544
gucucagauauacaaaguc

SEQ ID NO: 2566546 - RNA, 19 nt, Artificial Sequence
  Description of Artificial Sequence: Synthetic oligonucleotide
  Sense strand starting at position 3330 of SEQ ID NO: 1888923
gaagcuaaccguuaauaga

SEQ ID NO: 2566547 - RNA, 19 nt, Artificial Sequence
  Description of Artificial Sequence: Synthetic oligonucleotide
  Antisense strand to SEQ ID NO: 2566546
ucuauuaacgguuagcuuc

SEQ ID NO: 2566548 - RNA, 19 nt, Artificial Sequence
  Description of Artificial Sequence: Synthetic oligonucleotide
  Sense strand starting at position 3349 of SEQ ID NO: 1888923
uuuggauguuggagaagga

SEQ ID NO: 2566549 - RNA, 19 nt, Artificial Sequence
  Description of Artificial Sequence: Synthetic oligonucleotide
  Antisense strand to SEQ ID NO: 2566548
uccuucuccaacauccaaa

SEQ ID NO: 2566550 - RNA, 19 nt, Artificial Sequence
  Description of Artificial Sequence: Synthetic oligonucleotide
  Sense strand starting at position 3364 of SEQ ID NO: 1888923
aggaaauaguuucugcaaa

SEQ ID NO: 2566551 - RNA, 19 nt, Artificial Sequence
  Description of Artificial Sequence: Synthetic oligonucleotide
  Antisense strand to SEQ ID NO: 2566550
uuugcagaaacuauuuccu

SEQ ID NO: 2566552 - RNA, 19 nt, Artificial Sequence
  Description of Artificial Sequence: Synthetic oligonucleotide
  Sense strand starting at position 563 of SEQ ID NO: 1888924
gacuuuguauaucugagau

SEQ ID NO: 2566553 - RNA, 19 nt, Artificial Sequence
  Description of Artificial Sequence: Synthetic oligonucleotide
  Antisense strand to SEQ ID NO: 2566552
aucucagauauacaaaguc

SEQ ID NO: 2566554 - RNA, 19 nt, Artificial Sequence
  Description of Artificial Sequence: Synthetic oligonucleotide
  Sense strand starting at position 612 of SEQ ID NO: 1888924
guguuuaagaagcaggaga

SEQ ID NO: 2566555 - RNA, 19 nt, Artificial Sequence
  Description of Artificial Sequence: Synthetic oligonucleotide
  Antisense strand to SEQ ID NO: 2566554
ucuccugcuucuuaaacac

SEQ ID NO: 2566556 - RNA, 19 nt, Artificial Sequence
  Description of Artificial Sequence: Synthetic oligonucleotide
  Sense strand starting at position 704 of SEQ ID NO: 1888924
aggaaacaguuucugcaaa

SEQ ID NO: 2566557 - RNA, 19 nt, Artificial Sequence
  Description of Artificial Sequence: Synthetic oligonucleotide
  Antisense strand to SEQ ID NO: 2566556
uuugcagaaacuguuuccu

SEQ ID NO: 2566558 - RNA, 19 nt, Artificial Sequence
  Description of Artificial Sequence: Synthetic oligonucleotide
  Sense strand starting at position 732 of SEQ ID NO: 1888924
acucuuaaggcguaaagaa

SEQ ID NO: 2566559 - RNA, 19 nt, Artificial Sequence
  Description of Artificial Sequence: Synthetic oligonucleotide
  Antisense strand to SEQ ID NO: 2566558
uucuuuacgccuuaagagu

SEQ ID NO: 2566560 - RNA, 19 nt, Artificial Sequence
  Description of Artificial Sequence: Synthetic oligonucleotide
  Sense strand starting at position 1183 of SEQ ID NO: 1888924
gugagugaccauuggaauu

SEQ ID NO: 2566561 - RNA, 19 nt, Artificial Sequence
  Description of Artificial Sequence: Synthetic oligonucleotide
  Antisense strand to SEQ ID NO: 2566560
aauuccaauggucacucac

SEQ ID NO: 2566562 - RNA, 19 nt, Artificial Sequence
  Description of Artificial Sequence: Synthetic oligonucleotide
  Sense strand starting at position 1449 of SEQ ID NO: 1888924
gacuuuguauaucugagac

SEQ ID NO: 2566563 - RNA, 19 nt, Artificial Sequence
  Description of Artificial Sequence: Synthetic oligonucleotide
  Antisense strand to SEQ ID NO: 2566562
gucucagauauacaaaguc

SEQ ID NO: 2566564 - RNA, 19 nt, Artificial Sequence
  Description of Artificial Sequence: Synthetic oligonucleotide
  Sense strand starting at position 1555 of SEQ ID NO: 1888924
gaagcuaaccguuaauaga

SEQ ID NO: 2566565 - RNA, 19 nt, Artificial Sequence
  Description of Artificial Sequence: Synthetic oligonucleotide
  Antisense strand to SEQ ID NO: 2566564
ucuauuaacgguuagcuuc

SEQ ID NO: 2566566 - RNA, 19 nt, Artificial Sequence
  Description of Artificial Sequence: Synthetic oligonucleotide
  Sense strand starting at position 1574 of SEQ ID NO: 1888924
uuuggauguuggagaagga

SEQ ID NO: 2566567 - RNA, 19 nt, Artificial Sequence
  Description of Artificial Sequence: Synthetic oligonucleotide
  Antisense strand to SEQ ID NO: 2566566
uccuucuccaacauccaaa

SEQ ID NO: 2566568 - RNA, 19 nt, Artificial Sequence
  Description of Artificial Sequence: Synthetic oligonucleotide
  Sense strand starting at position 1589 of SEQ ID NO: 1888924
aggaaauaguuucugcaaa

SEQ ID NO: 2566569 - RNA, 19 nt, Artificial Sequence
  Description of Artificial Sequence: Synthetic oligonucleotide
  Antisense strand to SEQ ID NO: 2566568
uuugcagaaacuauuuccu

SEQ ID NO: 2566570 - RNA, 19 nt, Artificial Sequence
  Description of Artificial Sequence: Synthetic oligonucleotide
  Sense strand starting at position 1786 of SEQ ID NO: 1888924
gagguaguccagcauggaa

SEQ ID NO: 2566571 - RNA, 19 nt, Artificial Sequence
  Description of Artificial Sequence: Synthetic oligonucleotide
  Antisense strand to SEQ ID NO: 2566570
uuccaugcuggacuaccuc

SEQ ID NO: 2566572 - RNA, 19 nt, Artificial Sequence
  Description of Artificial Sequence: Synthetic oligonucleotide
  Sense strand starting at position 2417 of SEQ ID NO: 1888924
ccaugauucccauaugcug

SEQ ID NO: 2566573 - RNA, 19 nt, Artificial Sequence
  Description of Artificial Sequence: Synthetic oligonucleotide
  Antisense strand to SEQ ID NO: 2566572
cagcauaugggaaucaugg

SEQ ID NO: 2566574 - RNA, 19 nt, Artificial Sequence
  Description of Artificial Sequence: Synthetic oligonucleotide
  Sense strand starting at position 2887 of SEQ ID NO: 1888924
agagacuugacuuguugaa

SEQ ID NO: 2566575 - RNA, 19 nt, Artificial Sequence
  Description of Artificial Sequence: Synthetic oligonucleotide
  Antisense strand to SEQ ID NO: 2566574
uucaacaagucaagucucu

SEQ ID NO: 2566576 - RNA, 19 nt, Artificial Sequence
  Description of Artificial Sequence: Synthetic oligonucleotide
  Sense strand starting at position 2889 of SEQ ID NO: 1888924
agacuugacuuguugaaug

SEQ ID NO: 2566577 - RNA, 19 nt, Artificial Sequence
  Description of Artificial Sequence: Synthetic oligonucleotide
  Antisense strand to SEQ ID NO: 2566576
cauucaacaagucaagucu

SEQ ID NO: 2566578 - RNA, 19 nt, Artificial Sequence
  Description of Artificial Sequence: Synthetic oligonucleotide
  Sense strand starting at position 2950 of SEQ ID NO: 1888924
agguuaagguagucucaga

SEQ ID NO: 2566579 - RNA, 19 nt, Artificial Sequence
  Description of Artificial Sequence: Synthetic oligonucleotide
  Antisense strand to SEQ ID NO: 2566578
ucugagacuaccuuaaccu

SEQ ID NO: 2566580 - RNA, 19 nt, Artificial Sequence
  Description of Artificial Sequence: Synthetic oligonucleotide
  Sense strand starting at position 3256 of SEQ ID NO: 1888924
ccaagccagcuguagaaau

SEQ ID NO: 2566581 - RNA, 19 nt, Artificial Sequence
  Description of Artificial Sequence: Synthetic oligonucleotide
  Antisense strand to SEQ ID NO: 2566580
auuucuacagcuggcuugg

SEQ ID NO: 2566582 - RNA, 19 nt, Artificial Sequence
  Description of Artificial Sequence: Synthetic oligonucleotide
  Sense strand starting at position 3684 of SEQ ID NO: 1888924
cggagaaccucugcuagga

SEQ ID NO: 2566583 - RNA, 19 nt, Artificial Sequence
  Description of Artificial Sequence: Synthetic oligonucleotide
  Antisense strand to SEQ ID NO: 2566582
uccuagcagagguucuccg

SEQ ID NO: 2566584 - RNA, 19 nt, Artificial Sequence
  Description of Artificial Sequence: Synthetic oligonucleotide
  Sense strand starting at position 44 of SEQ ID NO: 1888925
uggccucagaaaggugaaa

SEQ ID NO: 2566585 - RNA, 19 nt, Artificial Sequence
  Description of Artificial Sequence: Synthetic oligonucleotide
  Antisense strand to SEQ ID NO: 2566584
uuucaccuuucugaggcca

SEQ ID NO: 2566586 - RNA, 19 nt, Artificial Sequence
  Description of Artificial Sequence: Synthetic oligonucleotide
  Sense strand starting at position 46 of SEQ ID NO: 1888925
gccucagaaaggugaaaca

SEQ ID NO: 2566587 - RNA, 19 nt, Artificial Sequence
  Description of Artificial Sequence: Synthetic oligonucleotide
  Antisense strand to SEQ ID NO: 2566586
uguuucaccuuucugaggc

SEQ ID NO: 2566588 - RNA, 19 nt, Artificial Sequence
  Description of Artificial Sequence: Synthetic oligonucleotide
  Sense strand starting at position 201 of SEQ ID NO: 1888925
gugagauaagcaugaagau

SEQ ID NO: 2566589 - RNA, 19 nt, Artificial Sequence
  Description of Artificial Sequence: Synthetic oligonucleotide
  Antisense strand to SEQ ID NO: 2566588
aucuucaugcuuaucucac

SEQ ID NO: 2566590 - RNA, 19 nt, Artificial Sequence
  Description of Artificial Sequence: Synthetic oligonucleotide
  Sense strand starting at position 210 of SEQ ID NO: 1888925
gcaugaagauauccagacu

SEQ ID NO: 2566591 - RNA, 19 nt, Artificial Sequence
  Description of Artificial Sequence: Synthetic oligonucleotide
  Antisense strand to SEQ ID NO: 2566590
agucuggauaucuucaugc

SEQ ID NO: 2566592 - RNA, 19 nt, Artificial Sequence
  Description of Artificial Sequence: Synthetic oligonucleotide
  Sense strand starting at position 298 of SEQ ID NO: 1888925
ccuuuauagcugcaagaga

SEQ ID NO: 2566593 - RNA, 19 nt, Artificial Sequence
  Description of Artificial Sequence: Synthetic oligonucleotide
  Antisense strand to SEQ ID NO: 2566592
ucucuugcagcuauaaagg

SEQ ID NO: 2566594 - RNA, 19 nt, Artificial Sequence
  Description of Artificial Sequence: Synthetic oligonucleotide
  Sense strand starting at position 610 of SEQ ID NO: 1888925
ucauaauucuggccaagaa

SEQ ID NO: 2566595 - RNA, 19 nt, Artificial Sequence
  Description of Artificial Sequence: Synthetic oligonucleotide
  Antisense strand to SEQ ID NO: 2566594
uucuuggccagaauuauga

SEQ ID NO: 2566596 - RNA, 19 nt, Artificial Sequence
  Description of Artificial Sequence: Synthetic oligonucleotide
  Sense strand starting at position 636 of SEQ ID NO: 1888925
gcaguauaccuauauaucu

SEQ ID NO: 2566597 - RNA, 19 nt, Artificial Sequence
  Description of Artificial Sequence: Synthetic oligonucleotide
  Antisense strand to SEQ ID NO: 2566596
agauauauagguauacugc

SEQ ID NO: 2566598 - RNA, 19 nt, Artificial Sequence
  Description of Artificial Sequence: Synthetic oligonucleotide
  Sense strand starting at position 690 of SEQ ID NO: 1888925
ugaacaacucgguaaaggu

SEQ ID NO: 2566599 - RNA, 19 nt, Artificial Sequence
  Description of Artificial Sequence: Synthetic oligonucleotide
  Antisense strand to SEQ ID NO: 2566598
accuuuaccgaguuguuca

SEQ ID NO: 2566600 - RNA, 19 nt, Artificial Sequence
  Description of Artificial Sequence: Synthetic oligonucleotide
  Sense strand starting at position 745 of SEQ ID NO: 1888925
caugaaugguaaguaagua

SEQ ID NO: 2566601 - RNA, 19 nt, Artificial Sequence
  Description of Artificial Sequence: Synthetic oligonucleotide
  Antisense strand to SEQ ID NO: 2566600
uacuuacuuaccauucaug

SEQ ID NO: 2566602 - RNA, 19 nt, Artificial Sequence
  Description of Artificial Sequence: Synthetic oligonucleotide
  Sense strand starting at position 890 of SEQ ID NO: 1888925
cugauaagaaguuggguaa

SEQ ID NO: 2566603 - RNA, 19 nt, Artificial Sequence
  Description of Artificial Sequence: Synthetic oligonucleotide
  Antisense strand to SEQ ID NO: 2566602
uuacccaacuucuuaucag

SEQ ID NO: 2566604 - RNA, 19 nt, Artificial Sequence
  Description of Artificial Sequence: Synthetic oligonucleotide
  Sense strand starting at position 891 of SEQ ID NO: 1888925
ugauaagaaguuggguaau

SEQ ID NO: 2566605 - RNA, 19 nt, Artificial Sequence
  Description of Artificial Sequence: Synthetic oligonucleotide
  Antisense strand to SEQ ID NO: 2566604
auuacccaacuucuuauca

SEQ ID NO: 2566606 - RNA, 19 nt, Artificial Sequence
  Description of Artificial Sequence: Synthetic oligonucleotide
  Sense strand starting at position 905 of SEQ ID NO: 1888925
guaauuggaucacuaauac

SEQ ID NO: 2566607 - RNA, 19 nt, Artificial Sequence
  Description of Artificial Sequence: Synthetic oligonucleotide
  Antisense strand to SEQ ID NO: 2566606
guauuagugauccaauuac

SEQ ID NO: 2566608 - RNA, 19 nt, Artificial Sequence
  Description of Artificial Sequence: Synthetic oligonucleotide
  Sense strand starting at position 1499 of SEQ ID NO: 1888925
aagguuaaguguuuaagaa

SEQ ID NO: 2566609 - RNA, 19 nt, Artificial Sequence
  Description of Artificial Sequence: Synthetic oligonucleotide
  Antisense strand to SEQ ID NO: 2566608
uucuuaaacacuuaaccuu

SEQ ID NO: 2566610 - RNA, 19 nt, Artificial Sequence
  Description of Artificial Sequence: Synthetic oligonucleotide
  Sense strand starting at position 1500 of SEQ ID NO: 1888925
agguuaaguguuuaagaag

SEQ ID NO: 2566611 - RNA, 19 nt, Artificial Sequence
  Description of Artificial Sequence: Synthetic oligonucleotide
  Antisense strand to SEQ ID NO: 2566610
cuucuuaaacacuuaaccu

SEQ ID NO: 2566612 - RNA, 19 nt, Artificial Sequence
  Description of Artificial Sequence: Synthetic oligonucleotide
  Sense strand starting at position 1796 of SEQ ID NO: 1888925
gagguaguccagcauggaa

SEQ ID NO: 2566613 - RNA, 19 nt, Artificial Sequence
  Description of Artificial Sequence: Synthetic oligonucleotide
  Antisense strand to SEQ ID NO: 2566612
uuccaugcuggacuaccuc

SEQ ID NO: 2566614 - RNA, 19 nt, Artificial Sequence
  Description of Artificial Sequence: Synthetic oligonucleotide
  Sense strand starting at position 2348 of SEQ ID NO: 1888925
gacuuuguauaucugagau

SEQ ID NO: 2566615 - RNA, 19 nt, Artificial Sequence
  Description of Artificial Sequence: Synthetic oligonucleotide
  Antisense strand to SEQ ID NO: 2566614
aucucagauauacaaaguc

SEQ ID NO: 2566616 - RNA, 19 nt, Artificial Sequence
  Description of Artificial Sequence: Synthetic oligonucleotide
  Sense strand starting at position 2397 of SEQ ID NO: 1888925
guguuuaagaagcaggaga

SEQ ID NO: 2566617 - RNA, 19 nt, Artificial Sequence
  Description of Artificial Sequence: Synthetic oligonucleotide
  Antisense strand to SEQ ID NO: 2566616
ucuccugcuucuuaaacac

SEQ ID NO: 2566618 - RNA, 19 nt, Artificial Sequence
  Description of Artificial Sequence: Synthetic oligonucleotide
  Sense strand starting at position 2489 of SEQ ID NO: 1888925
aggaaacaguuucugcaaa

SEQ ID NO: 2566619 - RNA, 19 nt, Artificial Sequence
  Description of Artificial Sequence: Synthetic oligonucleotide
  Antisense strand to SEQ ID NO: 2566618
uuugcagaaacuguuuccu

SEQ ID NO: 2566620 - RNA, 19 nt, Artificial Sequence
  Description of Artificial Sequence: Synthetic oligonucleotide
  Sense strand starting at position 2517 of SEQ ID NO: 1888925
acucuuaaggcguaaagaa

SEQ ID NO: 2566621 - RNA, 19 nt, Artificial Sequence
  Description of Artificial Sequence: Synthetic oligonucleotide
  Antisense strand to SEQ ID NO: 2566620
uucuuuacgccuuaagagu

SEQ ID NO: 2566622 - RNA, 19 nt, Artificial Sequence
  Description of Artificial Sequence: Synthetic oligonucleotide
  Sense strand starting at position 2968 of SEQ ID NO: 1888925
gugagugaccauuggaauu

SEQ ID NO: 2566623 - RNA, 19 nt, Artificial Sequence
  Description of Artificial Sequence: Synthetic oligonucleotide
  Antisense strand to SEQ ID NO: 2566622
aauuccaauggucacucac

SEQ ID NO: 2566624 - RNA, 19 nt, Artificial Sequence
  Description of Artificial Sequence: Synthetic oligonucleotide
  Sense strand starting at position 3234 of SEQ ID NO: 1888925
gacuuuguauaucugagac

SEQ ID NO: 2566625 - RNA, 19 nt, Artificial Sequence
  Description of Artificial Sequence: Synthetic oligonucleotide
  Antisense strand to SEQ ID NO: 2566624
gucucagauauacaaaguc

SEQ ID NO: 2566626 - RNA, 19 nt, Artificial Sequence
  Description of Artificial Sequence: Synthetic oligonucleotide
  Sense strand starting at position 3340 of SEQ ID NO: 1888925
gaagcuaaccguuaauaga

SEQ ID NO: 2566627 - RNA, 19 nt, Artificial Sequence
  Description of Artificial Sequence: Synthetic oligonucleotide
  Antisense strand to SEQ ID NO: 2566626
ucuauuaacgguuagcuuc

SEQ ID NO: 2566628 - RNA, 19 nt, Artificial Sequence
  Description of Artificial Sequence: Synthetic oligonucleotide
  Sense strand starting at position 3359 of SEQ ID NO: 1888925
uuuggauguuggagaagga

SEQ ID NO: 2566629 - RNA, 19 nt, Artificial Sequence
  Description of Artificial Sequence: Synthetic oligonucleotide
  Antisense strand to SEQ ID NO: 2566628
uccuucuccaacauccaaa

SEQ ID NO: 2566630 - RNA, 19 nt, Artificial Sequence
  Description of Artificial Sequence: Synthetic oligonucleotide
  Sense strand starting at position 3374 of SEQ ID NO: 1888925
aggaaauaguuucugcaaa

SEQ ID NO: 2566631 - RNA, 19 nt, Artificial Sequence
  Description of Artificial Sequence: Synthetic oligonucleotide
  Antisense strand to SEQ ID NO: 2566630
uuugcagaaacuauuuccu

SEQ ID NO: 2566632 - RNA, 19 nt, Artificial Sequence
  Description of Artificial Sequence: Synthetic oligonucleotide
  Sense strand starting at position 4 of SEQ ID NO: 1888926
cugauaagaaguuggguaa

SEQ ID NO: 2566633 - RNA, 19 nt, Artificial Sequence
  Description of Artificial Sequence: Synthetic oligonucleotide
  Antisense strand to SEQ ID NO: 2566632
uuacccaacuucuuaucag

SEQ ID NO: 2566634 - RNA, 19 nt, Artificial Sequence
  Description of Artificial Sequence: Synthetic oligonucleotide
  Sense strand starting at position 5 of SEQ ID NO: 1888926
ugauaagaaguuggguaau

SEQ ID NO: 2566635 - RNA, 19 nt, Artificial Sequence
  Description of Artificial Sequence: Synthetic oligonucleotide
  Antisense strand to SEQ ID NO: 2566634
auuacccaacuucuuauca

SEQ ID NO: 2566636 - RNA, 19 nt, Artificial Sequence
  Description of Artificial Sequence: Synthetic oligonucleotide
  Sense strand starting at position 19 of SEQ ID NO: 1888926
guaauuggaucacuaauac

SEQ ID NO: 2566637 - RNA, 19 nt, Artificial Sequence
  Description of Artificial Sequence: Synthetic oligonucleotide
  Antisense strand to SEQ ID NO: 2566636
guauuagugauccaauuac

SEQ ID NO: 2566638 - RNA, 19 nt, Artificial Sequence
  Description of Artificial Sequence: Synthetic oligonucleotide
  Sense strand starting at position 257 of SEQ ID NO: 1888926
ugugacuucuacccuacuu

SEQ ID NO: 2566639 - RNA, 19 nt, Artificial Sequence
  Description of Artificial Sequence: Synthetic oligonucleotide
  Antisense strand to SEQ ID NO: 2566638
aaguaggguagaagucaca

SEQ ID NO: 2566640 - RNA, 19 nt, Artificial Sequence
  Description of Artificial Sequence: Synthetic oligonucleotide
  Sense strand starting at position 371 of SEQ ID NO: 1888926
aucacugaaugagaaagaa

SEQ ID NO: 2566641 - RNA, 19 nt, Artificial Sequence
  Description of Artificial Sequence: Synthetic oligonucleotide
  Antisense strand to SEQ ID NO: 2566640
uucuuucucauucagugau

SEQ ID NO: 2566642 - RNA, 19 nt, Artificial Sequence
  Description of Artificial Sequence: Synthetic oligonucleotide
  Sense strand starting at position 609 of SEQ ID NO: 1888926
ucagaagguuaaguguuua

SEQ ID NO: 2566643 - RNA, 19 nt, Artificial Sequence
  Description of Artificial Sequence: Synthetic oligonucleotide
  Antisense strand to SEQ ID NO: 2566642
uaaacacuuaaccuucuga

SEQ ID NO: 2566644 - RNA, 19 nt, Artificial Sequence
  Description of Artificial Sequence: Synthetic oligonucleotide
  Sense strand starting at position 613 of SEQ ID NO: 1888926
aagguuaaguguuuaagaa

SEQ ID NO: 2566645 - RNA, 19 nt, Artificial Sequence
  Description of Artificial Sequence: Synthetic oligonucleotide
  Antisense strand to SEQ ID NO: 2566644
uucuuaaacacuuaaccuu

SEQ ID NO: 2566646 - RNA, 19 nt, Artificial Sequence
  Description of Artificial Sequence: Synthetic oligonucleotide
  Sense strand starting at position 614 of SEQ ID NO: 1888926
agguuaaguguuuaagaag

SEQ ID NO: 2566647 - RNA, 19 nt, Artificial Sequence
  Description of Artificial Sequence: Synthetic oligonucleotide
  Antisense strand to SEQ ID NO: 2566646
cuucuuaaacacuuaaccu

SEQ ID NO: 2566648 - RNA, 19 nt, Artificial Sequence
  Description of Artificial Sequence: Synthetic oligonucleotide
  Sense strand starting at position 682 of SEQ ID NO: 1888926
gcuaacaguuaacagauuu

SEQ ID NO: 2566649 - RNA, 19 nt, Artificial Sequence
  Description of Artificial Sequence: Synthetic oligonucleotide
  Antisense strand to SEQ ID NO: 2566648
aaaucuguuaacuguuagc

SEQ ID NO: 2566650 - RNA, 19 nt, Artificial Sequence
  Description of Artificial Sequence: Synthetic oligonucleotide
  Sense strand starting at position 695 of SEQ ID NO: 1888926
agauuuggauguuggagua

SEQ ID NO: 2566651 - RNA, 19 nt, Artificial Sequence
  Description of Artificial Sequence: Synthetic oligonucleotide
  Antisense strand to SEQ ID NO: 2566650
uacuccaacauccaaaucu

SEQ ID NO: 2566652 - RNA, 19 nt, Artificial Sequence
  Description of Artificial Sequence: Synthetic oligonucleotide
  Sense strand starting at position 713 of SEQ ID NO: 1888926
aggcaauaguuucugcaaa

SEQ ID NO: 2566653 - RNA, 19 nt, Artificial Sequence
  Description of Artificial Sequence: Synthetic oligonucleotide
  Antisense strand to SEQ ID NO: 2566652
uuugcagaaacuauugccu

SEQ ID NO: 2566654 - RNA, 19 nt, Artificial Sequence
  Description of Artificial Sequence: Synthetic oligonucleotide
  Sense strand starting at position 812 of SEQ ID NO: 1888926
ggaaaucaaucucagaaga

SEQ ID NO: 2566655 - RNA, 19 nt, Artificial Sequence
  Description of Artificial Sequence: Synthetic oligonucleotide
  Antisense strand to SEQ ID NO: 2566654
ucuucugagauugauuucc

SEQ ID NO: 2566656 - RNA, 19 nt, Artificial Sequence
  Description of Artificial Sequence: Synthetic oligonucleotide
  Sense strand starting at position 1462 of SEQ ID NO: 1888926
gacuuuguauaucugagau

SEQ ID NO: 2566657 - RNA, 19 nt, Artificial Sequence
  Description of Artificial Sequence: Synthetic oligonucleotide
  Antisense strand to SEQ ID NO: 2566656
aucucagauauacaaaguc

SEQ ID NO: 2566658 - RNA, 19 nt, Artificial Sequence
  Description of Artificial Sequence: Synthetic oligonucleotide
  Sense strand starting at position 1511 of SEQ ID NO: 1888926
guguuuaagaagcaggaga

SEQ ID NO: 2566659 - RNA, 19 nt, Artificial Sequence
  Description of Artificial Sequence: Synthetic oligonucleotide
  Antisense strand to SEQ ID NO: 2566658
ucuccugcuucuuaaacac

SEQ ID NO: 2566660 - RNA, 19 nt, Artificial Sequence
  Description of Artificial Sequence: Synthetic oligonucleotide
  Sense strand starting at position 1603 of SEQ ID NO: 1888926
aggaaacaguuucugcaaa

SEQ ID NO: 2566661 - RNA, 19 nt, Artificial Sequence
  Description of Artificial Sequence: Synthetic oligonucleotide
  Antisense strand to SEQ ID NO: 2566660
uuugcagaaacuguuuccu

SEQ ID NO: 2566662 - RNA, 19 nt, Artificial Sequence
  Description of Artificial Sequence: Synthetic oligonucleotide
  Sense strand starting at position 1631 of SEQ ID NO: 1888926
acucuuaaggcguaaagaa

SEQ ID NO: 2566663 - RNA, 19 nt, Artificial Sequence
  Description of Artificial Sequence: Synthetic oligonucleotide
  Antisense strand to SEQ ID NO: 2566662
uucuuuacgccuuaagagu

SEQ ID NO: 2566664 - RNA, 19 nt, Artificial Sequence
  Description of Artificial Sequence: Synthetic oligonucleotide
  Sense strand starting at position 1640 of SEQ ID NO: 1888926
gcguaaagaaacuguauaa

SEQ ID NO: 2566665 - RNA, 19 nt, Artificial Sequence
  Description of Artificial Sequence: Synthetic oligonucleotide
  Antisense strand to SEQ ID NO: 2566664
uuauacaguuucuuuacgc

SEQ ID NO: 2566666 - RNA, 19 nt, Artificial Sequence
  Description of Artificial Sequence: Synthetic oligonucleotide
  Sense strand starting at position 1758 of SEQ ID NO: 1888926
uagaccaugugucugauua

SEQ ID NO: 2566667 - RNA, 19 nt, Artificial Sequence
  Description of Artificial Sequence: Synthetic oligonucleotide
  Antisense strand to SEQ ID NO: 2566666
uaaucagacacauggucua

SEQ ID NO: 2566668 - RNA, 19 nt, Artificial Sequence
  Description of Artificial Sequence: Synthetic oligonucleotide
  Sense strand starting at position 1759 of SEQ ID NO: 1888926
agaccaugugucugauuag

SEQ ID NO: 2566669 - RNA, 19 nt, Artificial Sequence
  Description of Artificial Sequence: Synthetic oligonucleotide
  Antisense strand to SEQ ID NO: 2566668
cuaaucagacacauggucu

SEQ ID NO: 2566670 - RNA, 19 nt, Artificial Sequence
  Description of Artificial Sequence: Synthetic oligonucleotide
  Sense strand starting at position 1762 of SEQ ID NO: 1888926
ccaugugucugauuaggca

SEQ ID NO: 2566671 - RNA, 19 nt, Artificial Sequence
  Description of Artificial Sequence: Synthetic oligonucleotide
  Antisense strand to SEQ ID NO: 2566670
ugccuaaucagacacaugg

SEQ ID NO: 2566672 - RNA, 19 nt, Artificial Sequence
  Description of Artificial Sequence: Synthetic oligonucleotide
  Sense strand starting at position 1766 of SEQ ID NO: 1888926
gugucugauuaggcaccua

SEQ ID NO: 2566673 - RNA, 19 nt, Artificial Sequence
  Description of Artificial Sequence: Synthetic oligonucleotide
  Antisense strand to SEQ ID NO: 2566672
uaggugccuaaucagacac

SEQ ID NO: 2566674 - RNA, 19 nt, Artificial Sequence
  Description of Artificial Sequence: Synthetic oligonucleotide
  Sense strand starting at position 1797 of SEQ ID NO: 1888926
gagguaguccagcauggaa

SEQ ID NO: 2566675 - RNA, 19 nt, Artificial Sequence
  Description of Artificial Sequence: Synthetic oligonucleotide
  Antisense strand to SEQ ID NO: 2566674
uuccaugcuggacuaccuc

SEQ ID NO: 2566676 - RNA, 19 nt, Artificial Sequence
  Description of Artificial Sequence: Synthetic oligonucleotide
  Sense strand starting at position 1894 of SEQ ID NO: 1888926
cacacagugucaucaugua

SEQ ID NO: 2566677 - RNA, 19 nt, Artificial Sequence
  Description of Artificial Sequence: Synthetic oligonucleotide
  Antisense strand to SEQ ID NO: 2566676
uacaugaugacacugugug

SEQ ID NO: 2566678 - RNA, 19 nt, Artificial Sequence
  Description of Artificial Sequence: Synthetic oligonucleotide
  Sense strand starting at position 1928 of SEQ ID NO: 1888926
gcaguacucuacccacaga

SEQ ID NO: 2566679 - RNA, 19 nt, Artificial Sequence
  Description of Artificial Sequence: Synthetic oligonucleotide
  Antisense strand to SEQ ID NO: 2566678
ucuguggguagaguacugc

SEQ ID NO: 2566680 - RNA, 19 nt, Artificial Sequence
  Description of Artificial Sequence: Synthetic oligonucleotide
  Sense strand starting at position 2082 of SEQ ID NO: 1888926
gugagugaccauuggaauu

SEQ ID NO: 2566681 - RNA, 19 nt, Artificial Sequence
  Description of Artificial Sequence: Synthetic oligonucleotide
  Antisense strand to SEQ ID NO: 2566680
aauuccaauggucacucac

SEQ ID NO: 2566682 - RNA, 19 nt, Artificial Sequence
  Description of Artificial Sequence: Synthetic oligonucleotide
  Sense strand starting at position 2348 of SEQ ID NO: 1888926
gacuuuguauaucugagac

SEQ ID NO: 2566683 - RNA, 19 nt, Artificial Sequence
  Description of Artificial Sequence: Synthetic oligonucleotide
  Antisense strand to SEQ ID NO: 2566682
gucucagauauacaaaguc

SEQ ID NO: 2566684 - RNA, 19 nt, Artificial Sequence
  Description of Artificial Sequence: Synthetic oligonucleotide
  Sense strand starting at position 2384 of SEQ ID NO: 1888926
ucagaaaguuaaguguuua

SEQ ID NO: 2566685 - RNA, 19 nt, Artificial Sequence
  Description of Artificial Sequence: Synthetic oligonucleotide
  Antisense strand to SEQ ID NO: 2566684
uaaacacuuaacuuucuga

SEQ ID NO: 2566686 - RNA, 19 nt, Artificial Sequence
  Description of Artificial Sequence: Synthetic oligonucleotide
  Sense strand starting at position 2454 of SEQ ID NO: 1888926
gaagcuaaccguuaauaga

SEQ ID NO: 2566687 - RNA, 19 nt, Artificial Sequence
  Description of Artificial Sequence: Synthetic oligonucleotide
  Antisense strand to SEQ ID NO: 2566686
ucuauuaacgguuagcuuc

SEQ ID NO: 2566688 - RNA, 19 nt, Artificial Sequence
  Description of Artificial Sequence: Synthetic oligonucleotide
  Sense strand starting at position 2470 of SEQ ID NO: 1888926
agauuuggauguuggagaa

SEQ ID NO: 2566689 - RNA, 19 nt, Artificial Sequence
  Description of Artificial Sequence: Synthetic oligonucleotide
  Antisense strand to SEQ ID NO: 2566688
uucuccaacauccaaaucu

SEQ ID NO: 2566690 - RNA, 19 nt, Artificial Sequence
  Description of Artificial Sequence: Synthetic oligonucleotide
  Sense strand starting at position 2473 of SEQ ID NO: 1888926
uuuggauguuggagaagga

SEQ ID NO: 2566691 - RNA, 19 nt, Artificial Sequence
  Description of Artificial Sequence: Synthetic oligonucleotide
  Antisense strand to SEQ ID NO: 2566690
uccuucuccaacauccaaa

SEQ ID NO: 2566692 - RNA, 19 nt, Artificial Sequence
  Description of Artificial Sequence: Synthetic oligonucleotide
  Sense strand starting at position 2488 of SEQ ID NO: 1888926
aggaaauaguuucugcaaa

SEQ ID NO: 2566693 - RNA, 19 nt, Artificial Sequence
  Description of Artificial Sequence: Synthetic oligonucleotide
  Antisense strand to SEQ ID NO: 2566692
uuugcagaaacuauuuccu

SEQ ID NO: 2566694 - RNA, 19 nt, Artificial Sequence
  Description of Artificial Sequence: Synthetic oligonucleotide
  Sense strand starting at position 2587 of SEQ ID NO: 1888926
ggaagucaaucucagaaga

SEQ ID NO: 2566695 - RNA, 19 nt, Artificial Sequence
  Description of Artificial Sequence: Synthetic oligonucleotide
  Antisense strand to SEQ ID NO: 2566694
ucuucugagauugacuucc

SEQ ID NO: 2566696 - RNA, 19 nt, Artificial Sequence
  Description of Artificial Sequence: Synthetic oligonucleotide
  Sense strand starting at position 2808 of SEQ ID NO: 1888926
ugugucaugcaguacucua

SEQ ID NO: 2566697 - RNA, 19 nt, Artificial Sequence
  Description of Artificial Sequence: Synthetic oligonucleotide
  Antisense strand to SEQ ID NO: 2566696
uagaguacugcaugacaca

SEQ ID NO: 2566698 - RNA, 19 nt, Artificial Sequence
  Description of Artificial Sequence: Synthetic oligonucleotide
  Sense strand starting at position 2971 of SEQ ID NO: 1888926
guggguggccauuggaauu

SEQ ID NO: 2566699 - RNA, 19 nt, Artificial Sequence
  Description of Artificial Sequence: Synthetic oligonucleotide
  Antisense strand to SEQ ID NO: 2566698
aauuccaauggccacccac

SEQ ID NO: 2566700 - RNA, 19 nt, Artificial Sequence
  Description of Artificial Sequence: Synthetic oligonucleotide
  Sense strand starting at position 3316 of SEQ ID NO: 1888926
ccaugauucccauaugcug

SEQ ID NO: 2566701 - RNA, 19 nt, Artificial Sequence
  Description of Artificial Sequence: Synthetic oligonucleotide
  Antisense strand to SEQ ID NO: 2566700
cagcauaugggaaucaugg

SEQ ID NO: 2566702 - RNA, 19 nt, Artificial Sequence
  Description of Artificial Sequence: Synthetic oligonucleotide
  Sense strand starting at position 3786 of SEQ ID NO: 1888926
agagacuugacuuguugaa

SEQ ID NO: 2566703 - RNA, 19 nt, Artificial Sequence
  Description of Artificial Sequence: Synthetic oligonucleotide
  Antisense strand to SEQ ID NO: 2566702
uucaacaagucaagucucu

SEQ ID NO: 2566704 - RNA, 19 nt, Artificial Sequence
  Description of Artificial Sequence: Synthetic oligonucleotide
  Sense strand starting at position 3788 of SEQ ID NO: 1888926
agacuugacuuguugaaug

SEQ ID NO: 2566705 - RNA, 19 nt, Artificial Sequence
  Description of Artificial Sequence: Synthetic oligonucleotide
  Antisense strand to SEQ ID NO: 2566704
cauucaacaagucaagucu

SEQ ID NO: 2566706 - RNA, 19 nt, Artificial Sequence
  Description of Artificial Sequence: Synthetic oligonucleotide
  Sense strand starting at position 3849 of SEQ ID NO: 1888926
agguuaagguagucucaga

SEQ ID NO: 2566707 - RNA, 19 nt, Artificial Sequence
  Description of Artificial Sequence: Synthetic oligonucleotide
  Antisense strand to SEQ ID NO: 2566706
ucugagacuaccuuaaccu

SEQ ID NO: 2566708 - RNA, 19 nt, Artificial Sequence
  Description of Artificial Sequence: Synthetic oligonucleotide
  Sense strand starting at position 3895 of SEQ ID NO: 1888926
cagcaaaggugacucuuua

SEQ ID NO: 2566709 - RNA, 19 nt, Artificial Sequence
  Description of Artificial Sequence: Synthetic oligonucleotide
  Antisense strand to SEQ ID NO: 2566708
uaaagagucaccuuugcug

SEQ ID NO: 2566710 - RNA, 19 nt, Artificial Sequence
  Description of Artificial Sequence: Synthetic oligonucleotide
  Sense strand starting at position 3899 of SEQ ID NO: 1888926
aaaggugacucuuuauguu

SEQ ID NO: 2566711 - RNA, 19 nt, Artificial Sequence
  Description of Artificial Sequence: Synthetic oligonucleotide
  Antisense strand to SEQ ID NO: 2566710
aacauaaagagucaccuuu

SEQ ID NO: 2566712 - RNA, 19 nt, Artificial Sequence
  Description of Artificial Sequence: Synthetic oligonucleotide
  Sense strand starting at position 573 of SEQ ID NO: 1888927
gacuuuguauaucugagau

SEQ ID NO: 2566713 - RNA, 19 nt, Artificial Sequence
  Description of Artificial Sequence: Synthetic oligonucleotide
  Antisense strand to SEQ ID NO: 2566712
aucucagauauacaaaguc

SEQ ID NO: 2566714 - RNA, 19 nt, Artificial Sequence
  Description of Artificial Sequence: Synthetic oligonucleotide
  Sense strand starting at position 622 of SEQ ID NO: 1888927
guguuuaagaagcaggaga

SEQ ID NO: 2566715 - RNA, 19 nt, Artificial Sequence
  Description of Artificial Sequence: Synthetic oligonucleotide
  Antisense strand to SEQ ID NO: 2566714
ucuccugcuucuuaaacac

SEQ ID NO: 2566716 - RNA, 19 nt, Artificial Sequence
  Description of Artificial Sequence: Synthetic oligonucleotide
  Sense strand starting at position 714 of SEQ ID NO: 1888927
aggaaacaguuucugcaaa

SEQ ID NO: 2566717 - RNA, 19 nt, Artificial Sequence
  Description of Artificial Sequence: Synthetic oligonucleotide
  Antisense strand to SEQ ID NO: 2566716
uuugcagaaacuguuuccu

SEQ ID NO: 2566718 - RNA, 19 nt, Artificial Sequence
  Description of Artificial Sequence: Synthetic oligonucleotide
  Sense strand starting at position 742 of SEQ ID NO: 1888927
acucuuaaggcguaaagaa

SEQ ID NO: 2566719 - RNA, 19 nt, Artificial Sequence
  Description of Artificial Sequence: Synthetic oligonucleotide
  Antisense strand to SEQ ID NO: 2566718
uucuuuacgccuuaagagu

SEQ ID NO: 2566720 - RNA, 19 nt, Artificial Sequence
  Description of Artificial Sequence: Synthetic oligonucleotide
  Sense strand starting at position 1193 of SEQ ID NO: 1888927
gugagugaccauuggaauu

SEQ ID NO: 2566721 - RNA, 19 nt, Artificial Sequence
  Description of Artificial Sequence: Synthetic oligonucleotide
  Antisense strand to SEQ ID NO: 2566720
aauuccaauggucacucac

SEQ ID NO: 2566722 - RNA, 19 nt, Artificial Sequence
  Description of Artificial Sequence: Synthetic oligonucleotide
  Sense strand starting at position 1459 of SEQ ID NO: 1888927
gacuuuguauaucugagac

SEQ ID NO: 2566723 - RNA, 19 nt, Artificial Sequence
  Description of Artificial Sequence: Synthetic oligonucleotide
  Antisense strand to SEQ ID NO: 2566722
gucucagauauacaaaguc

SEQ ID NO: 2566724 - RNA, 19 nt, Artificial Sequence
  Description of Artificial Sequence: Synthetic oligonucleotide
  Sense strand starting at position 1565 of SEQ ID NO: 1888927
gaagcuaaccguuaauaga

SEQ ID NO: 2566725 - RNA, 19 nt, Artificial Sequence
  Description of Artificial Sequence: Synthetic oligonucleotide
  Antisense strand to SEQ ID NO: 2566724
ucuauuaacgguuagcuuc

SEQ ID NO: 2566726 - RNA, 19 nt, Artificial Sequence
  Description of Artificial Sequence: Synthetic oligonucleotide
  Sense strand starting at position 1584 of SEQ ID NO: 1888927
uuuggauguuggagaagga

SEQ ID NO: 2566727 - RNA, 19 nt, Artificial Sequence
  Description of Artificial Sequence: Synthetic oligonucleotide
  Antisense strand to SEQ ID NO: 2566726
uccuucuccaacauccaaa

SEQ ID NO: 2566728 - RNA, 19 nt, Artificial Sequence
  Description of Artificial Sequence: Synthetic oligonucleotide
  Sense strand starting at position 1599 of SEQ ID NO: 1888927
aggaaauaguuucugcaaa

SEQ ID NO: 2566729 - RNA, 19 nt, Artificial Sequence
  Description of Artificial Sequence: Synthetic oligonucleotide
  Antisense strand to SEQ ID NO: 2566728
uuugcagaaacuauuuccu

SEQ ID NO: 2566730 - RNA, 19 nt, Artificial Sequence
  Description of Artificial Sequence: Synthetic oligonucleotide
  Sense strand starting at position 1796 of SEQ ID NO: 1888927
gagguaguccagcauggaa

SEQ ID NO: 2566731 - RNA, 19 nt, Artificial Sequence
  Description of Artificial Sequence: Synthetic oligonucleotide
  Antisense strand to SEQ ID NO: 2566730
uuccaugcuggacuaccuc

SEQ ID NO: 2566732 - RNA, 19 nt, Artificial Sequence
  Description of Artificial Sequence: Synthetic oligonucleotide
  Sense strand starting at position 2427 of SEQ ID NO: 1888927
ccaugauucccauaugcug

SEQ ID NO: 2566733 - RNA, 19 nt, Artificial Sequence
  Description of Artificial Sequence: Synthetic oligonucleotide
  Antisense strand to SEQ ID NO: 2566732
cagcauaugggaaucaugg

SEQ ID NO: 2566734 - RNA, 19 nt, Artificial Sequence
  Description of Artificial Sequence: Synthetic oligonucleotide
  Sense strand starting at position 2897 of SEQ ID NO: 1888927
agagacuugacuuguugaa

SEQ ID NO: 2566735 - RNA, 19 nt, Artificial Sequence
  Description of Artificial Sequence: Synthetic oligonucleotide
  Antisense strand to SEQ ID NO: 2566734
uucaacaagucaagucucu

SEQ ID NO: 2566736 - RNA, 19 nt, Artificial Sequence
  Description of Artificial Sequence: Synthetic oligonucleotide
  Sense strand starting at position 2899 of SEQ ID NO: 1888927
agacuugacuuguugaaug

SEQ ID NO: 2566737 - RNA, 19 nt, Artificial Sequence
  Description of Artificial Sequence: Synthetic oligonucleotide
  Antisense strand to SEQ ID NO: 2566736
cauucaacaagucaagucu

SEQ ID NO: 2566738 - RNA, 19 nt, Artificial Sequence
  Description of Artificial Sequence: Synthetic oligonucleotide
  Sense strand starting at position 2960 of SEQ ID NO: 1888927
agguuaagguagucucaga

SEQ ID NO: 2566739 - RNA, 19 nt, Artificial Sequence
  Description of Artificial Sequence: Synthetic oligonucleotide
  Antisense strand to SEQ ID NO: 2566738
ucugagacuaccuuaaccu

SEQ ID NO: 2566740 - RNA, 19 nt, Artificial Sequence
  Description of Artificial Sequence: Synthetic oligonucleotide
  Sense strand starting at position 3266 of SEQ ID NO: 1888927
ccaagccagcuguagaaau

SEQ ID NO: 2566741 - RNA, 19 nt, Artificial Sequence
  Description of Artificial Sequence: Synthetic oligonucleotide
  Antisense strand to SEQ ID NO: 2566740
auuucuacagcuggcuugg

SEQ ID NO: 2566742 - RNA, 19 nt, Artificial Sequence
  Description of Artificial Sequence: Synthetic oligonucleotide
  Sense strand starting at position 3694 of SEQ ID NO: 1888927
cggagaaccucugcuagga

SEQ ID NO: 2566743 - RNA, 19 nt, Artificial Sequence
  Description of Artificial Sequence: Synthetic oligonucleotide
  Antisense strand to SEQ ID NO: 2566742
uccuagcagagguucuccg

SEQ ID NO: 2566744 - RNA, 19 nt, Artificial Sequence
  Description of Artificial Sequence: Synthetic oligonucleotide
  Sense strand starting at position 24 of SEQ ID NO: 1888928
cccaguaugucauuaaaca

SEQ ID NO: 2566745 - RNA, 19 nt, Artificial Sequence
  Description of Artificial Sequence: Synthetic oligonucleotide
  Antisense strand to SEQ ID NO: 2566744
uguuuaaugacauacuggg

SEQ ID NO: 2566746 - RNA, 19 nt, Artificial Sequence
  Description of Artificial Sequence: Synthetic oligonucleotide
  Sense strand starting at position 90 of SEQ ID NO: 1888928
cuacuaaugguccagcuua

SEQ ID NO: 2566747 - RNA, 19 nt, Artificial Sequence
  Description of Artificial Sequence: Synthetic oligonucleotide
  Antisense strand to SEQ ID NO: 2566746
uaagcuggaccauuaguag

SEQ ID NO: 2566748 - RNA, 19 nt, Artificial Sequence
  Description of Artificial Sequence: Synthetic oligonucleotide
  Sense strand starting at position 138 of SEQ ID NO: 1888928
acacauggauguccaauau

SEQ ID NO: 2566749 - RNA, 19 nt, Artificial Sequence
  Description of Artificial Sequence: Synthetic oligonucleotide
  Antisense strand to SEQ ID NO: 2566748
auauuggacauccaugugu

SEQ ID NO: 2566750 - RNA, 19 nt, Artificial Sequence
  Description of Artificial Sequence: Synthetic oligonucleotide
  Sense strand starting at position 144 of SEQ ID NO: 1888928
ggauguccaauaugugaca

SEQ ID NO: 2566751 - RNA, 19 nt, Artificial Sequence
  Description of Artificial Sequence: Synthetic oligonucleotide
  Antisense strand to SEQ ID NO: 2566750
ugucacauauuggacaucc

SEQ ID NO: 2566752 - RNA, 19 nt, Artificial Sequence
  Description of Artificial Sequence: Synthetic oligonucleotide
  Sense strand starting at position 166 of SEQ ID NO: 1888928
acaggcaucccguacaaau

SEQ ID NO: 2566753 - RNA, 19 nt, Artificial Sequence
  Description of Artificial Sequence: Synthetic oligonucleotide
  Antisense strand to SEQ ID NO: 2566752
auuuguacgggaugccugu

SEQ ID NO: 2566754 - RNA, 19 nt, Artificial Sequence
  Description of Artificial Sequence: Synthetic oligonucleotide
  Sense strand starting at position 663 of SEQ ID NO: 1888928
agugaauccuucucuggac

SEQ ID NO: 2566755 - RNA, 19 nt, Artificial Sequence
  Description of Artificial Sequence: Synthetic oligonucleotide
  Antisense strand to SEQ ID NO: 2566754
guccagagaaggauucacu

SEQ ID NO: 2566756 - RNA, 19 nt, Artificial Sequence
  Description of Artificial Sequence: Synthetic oligonucleotide
  Sense strand starting at position 664 of SEQ ID NO: 1888928
gugaauccuucucuggaca

SEQ ID NO: 2566757 - RNA, 19 nt, Artificial Sequence
  Description of Artificial Sequence: Synthetic oligonucleotide
  Antisense strand to SEQ ID NO: 2566756
uguccagagaaggauucac

SEQ ID NO: 2566758 - RNA, 19 nt, Artificial Sequence
  Description of Artificial Sequence: Synthetic oligonucleotide
  Sense strand starting at position 975 of SEQ ID NO: 1888928
aucucuccuugauuggaaa

SEQ ID NO: 2566759 - RNA, 19 nt, Artificial Sequence
  Description of Artificial Sequence: Synthetic oligonucleotide
  Antisense strand to SEQ ID NO: 2566758
uuuccaaucaaggagagau

SEQ ID NO: 2566760 - RNA, 19 nt, Artificial Sequence
  Description of Artificial Sequence: Synthetic oligonucleotide
  Sense strand starting at position 1011 of SEQ ID NO: 1888928
acuaauguuugacuuaugu

SEQ ID NO: 2566761 - RNA, 19 nt, Artificial Sequence
  Description of Artificial Sequence: Synthetic oligonucleotide
  Antisense strand to SEQ ID NO: 2566760
acauaagucaaacauuagu

SEQ ID NO: 2566762 - RNA, 19 nt, Artificial Sequence
  Description of Artificial Sequence: Synthetic oligonucleotide
  Sense strand starting at position 1072 of SEQ ID NO: 1888928
accgcugcgccugucaaau

SEQ ID NO: 2566763 - RNA, 19 nt, Artificial Sequence
  Description of Artificial Sequence: Synthetic oligonucleotide
  Antisense strand to SEQ ID NO: 2566762
auuugacaggcgcagcggu

SEQ ID NO: 2566764 - RNA, 19 nt, Artificial Sequence
  Description of Artificial Sequence: Synthetic oligonucleotide
  Sense strand starting at position 1078 of SEQ ID NO: 1888928
gcgccugucaaaucuguca

SEQ ID NO: 2566765 - RNA, 19 nt, Artificial Sequence
  Description of Artificial Sequence: Synthetic oligonucleotide
  Antisense strand to SEQ ID NO: 2566764
ugacagauuugacaggcgc

SEQ ID NO: 2566766 - RNA, 19 nt, Artificial Sequence
  Description of Artificial Sequence: Synthetic oligonucleotide
  Sense strand starting at position 1098 of SEQ ID NO: 1888928
ugcacacaucuguacuauu

SEQ ID NO: 2566767 - RNA, 19 nt, Artificial Sequence
  Description of Artificial Sequence: Synthetic oligonucleotide
  Antisense strand to SEQ ID NO: 2566766
aauaguacagaugugugca

SEQ ID NO: 2566768 - RNA, 19 nt, Artificial Sequence
  Description of Artificial Sequence: Synthetic oligonucleotide
  Sense strand starting at position 1340 of SEQ ID NO: 1888928
uuacuuacauuguccggaa

SEQ ID NO: 2566769 - RNA, 19 nt, Artificial Sequence
  Description of Artificial Sequence: Synthetic oligonucleotide
  Antisense strand to SEQ ID NO: 2566768
uuccggacaauguaaguaa

SEQ ID NO: 2566770 - RNA, 19 nt, Artificial Sequence
  Description of Artificial Sequence: Synthetic oligonucleotide
  Sense strand starting at position 1341 of SEQ ID NO: 1888928
uacuuacauuguccggaaa

SEQ ID NO: 2566771 - RNA, 19 nt, Artificial Sequence
  Description of Artificial Sequence: Synthetic oligonucleotide
  Antisense strand to SEQ ID NO: 2566770
uuuccggacaauguaagua

SEQ ID NO: 2566772 - RNA, 19 nt, Artificial Sequence
  Description of Artificial Sequence: Synthetic oligonucleotide
  Sense strand starting at position 1355 of SEQ ID NO: 1888928
ggaaaccgacuuugaucau

SEQ ID NO: 2566773 - RNA, 19 nt, Artificial Sequence
  Description of Artificial Sequence: Synthetic oligonucleotide
  Antisense strand to SEQ ID NO: 2566772
augaucaaagucgguuucc

SEQ ID NO: 2566774 - RNA, 19 nt, Artificial Sequence
  Description of Artificial Sequence: Synthetic oligonucleotide
  Sense strand starting at position 1382 of SEQ ID NO: 1888928
gagacugcucccugaaagg

SEQ ID NO: 2566775 - RNA, 19 nt, Artificial Sequence
  Description of Artificial Sequence: Synthetic oligonucleotide
  Antisense strand to SEQ ID NO: 2566774
ccuuucagggagcagucuc

SEQ ID NO: 2566776 - RNA, 19 nt, Artificial Sequence
  Description of Artificial Sequence: Synthetic oligonucleotide
  Sense strand starting at position 1615 of SEQ ID NO: 1888928
gcagguaaggguuaucaaa

SEQ ID NO: 2566777 - RNA, 19 nt, Artificial Sequence
  Description of Artificial Sequence: Synthetic oligonucleotide
  Antisense strand to SEQ ID NO: 2566776
uuugauaacccuuaccugc

SEQ ID NO: 2566778 - RNA, 19 nt, Artificial Sequence
  Description of Artificial Sequence: Synthetic oligonucleotide
  Sense strand starting at position 1845 of SEQ ID NO: 1888928
ggacuaucuaugugcuaag

SEQ ID NO: 2566779 - RNA, 19 nt, Artificial Sequence
  Description of Artificial Sequence: Synthetic oligonucleotide
  Antisense strand to SEQ ID NO: 2566778
cuuagcacauagauagucc

SEQ ID NO: 2566780 - RNA, 19 nt, Artificial Sequence
  Description of Artificial Sequence: Synthetic oligonucleotide
  Sense strand starting at position 1846 of SEQ ID NO: 1888928
gacuaucuaugugcuaaga

SEQ ID NO: 2566781 - RNA, 19 nt, Artificial Sequence
  Description of Artificial Sequence: Synthetic oligonucleotide
  Antisense strand to SEQ ID NO: 2566780
ucuuagcacauagauaguc

SEQ ID NO: 2566782 - RNA, 19 nt, Artificial Sequence
  Description of Artificial Sequence: Synthetic oligonucleotide
  Sense strand starting at position 2096 of SEQ ID NO: 1888928
gccguuggcauuuauguaa

SEQ ID NO: 2566783 - RNA, 19 nt, Artificial Sequence
  Description of Artificial Sequence: Synthetic oligonucleotide
  Antisense strand to SEQ ID NO: 2566782
uuacauaaaugccaacggc

SEQ ID NO: 2566784 - RNA, 19 nt, Artificial Sequence
  Description of Artificial Sequence: Synthetic oligonucleotide
  Sense strand starting at position 2107 of SEQ ID NO: 1888928
uuauguaaaugauuccuga

SEQ ID NO: 2566785 - RNA, 19 nt, Artificial Sequence
  Description of Artificial Sequence: Synthetic oligonucleotide
  Antisense strand to SEQ ID NO: 2566784
ucaggaaucauuuacauaa

SEQ ID NO: 2566786 - RNA, 19 nt, Artificial Sequence
  Description of Artificial Sequence: Synthetic oligonucleotide
  Sense strand starting at position 2110 of SEQ ID NO: 1888928
uguaaaugauuccugaaga

SEQ ID NO: 2566787 - RNA, 19 nt, Artificial Sequence
  Description of Artificial Sequence: Synthetic oligonucleotide
  Antisense strand to SEQ ID NO: 2566786
ucuucaggaaucauuuaca

SEQ ID NO: 2566788 - RNA, 19 nt, Artificial Sequence
  Description of Artificial Sequence: Synthetic oligonucleotide
  Sense strand starting at position 2400 of SEQ ID NO: 1888928
cuaccugaguuccuuacua

SEQ ID NO: 2566789 - RNA, 19 nt, Artificial Sequence
  Description of Artificial Sequence: Synthetic oligonucleotide
  Antisense strand to SEQ ID NO: 2566788
uaguaaggaacucagguag

SEQ ID NO: 2566790 - RNA, 19 nt, Artificial Sequence
  Description of Artificial Sequence: Synthetic oligonucleotide
  Sense strand starting at position 2402 of SEQ ID NO: 1888928
accugaguuccuuacuaca

SEQ ID NO: 2566791 - RNA, 19 nt, Artificial Sequence
  Description of Artificial Sequence: Synthetic oligonucleotide
  Antisense strand to SEQ ID NO: 2566790
uguaguaaggaacucaggu

SEQ ID NO: 2566792 - RNA, 19 nt, Artificial Sequence
  Description of Artificial Sequence: Synthetic oligonucleotide
  Sense strand starting at position 2477 of SEQ ID NO: 1888928
gagaauaaucagugagugg

SEQ ID NO: 2566793 - RNA, 19 nt, Artificial Sequence
  Description of Artificial Sequence: Synthetic oligonucleotide
  Antisense strand to SEQ ID NO: 2566792
ccacucacugauuauucuc

SEQ ID NO: 2566794 - RNA, 19 nt, Artificial Sequence
  Description of Artificial Sequence: Synthetic oligonucleotide
  Sense strand starting at position 2478 of SEQ ID NO: 1888928
agaauaaucagugaguggu

SEQ ID NO: 2566795 - RNA, 19 nt, Artificial Sequence
  Description of Artificial Sequence: Synthetic oligonucleotide
  Antisense strand to SEQ ID NO: 2566794
accacucacugauuauucu

SEQ ID NO: 2566796 - RNA, 19 nt, Artificial Sequence
  Description of Artificial Sequence: Synthetic oligonucleotide
  Sense strand starting at position 2480 of SEQ ID NO: 1888928
aauaaucagugagugguaa

SEQ ID NO: 2566797 - RNA, 19 nt, Artificial Sequence
  Description of Artificial Sequence: Synthetic oligonucleotide
  Antisense strand to SEQ ID NO: 2566796
uuaccacucacugauuauu

SEQ ID NO: 2566798 - RNA, 19 nt, Artificial Sequence
  Description of Artificial Sequence: Synthetic oligonucleotide
  Sense strand starting at position 2482 of SEQ ID NO: 1888928
uaaucagugagugguaaga

SEQ ID NO: 2566799 - RNA, 19 nt, Artificial Sequence
  Description of Artificial Sequence: Synthetic oligonucleotide
  Antisense strand to SEQ ID NO: 2566798
ucuuaccacucacugauua

SEQ ID NO: 2566800 - RNA, 19 nt, Artificial Sequence
  Description of Artificial Sequence: Synthetic oligonucleotide
  Sense strand starting at position 2869 of SEQ ID NO: 1888928
aauauacuuguggguuuaa

SEQ ID NO: 2566801 - RNA, 19 nt, Artificial Sequence
  Description of Artificial Sequence: Synthetic oligonucleotide
  Antisense strand to SEQ ID NO: 2566800
uuaaacccacaaguauauu

SEQ ID NO: 2566802 - RNA, 19 nt, Artificial Sequence
  Description of Artificial Sequence: Synthetic oligonucleotide
  Sense strand starting at position 3005 of SEQ ID NO: 1888928
ggguuuaggcucuauacca

SEQ ID NO: 2566803 - RNA, 19 nt, Artificial Sequence
  Description of Artificial Sequence: Synthetic oligonucleotide
  Antisense strand to SEQ ID NO: 2566802
ugguauagagccuaaaccc

SEQ ID NO: 2566804 - RNA, 19 nt, Artificial Sequence
  Description of Artificial Sequence: Synthetic oligonucleotide
  Sense strand starting at position 3036 of SEQ ID NO: 1888928
ggagauaauugaguacgua

SEQ ID NO: 2566805 - RNA, 19 nt, Artificial Sequence
  Description of Artificial Sequence: Synthetic oligonucleotide
  Antisense strand to SEQ ID NO: 2566804
uacguacucaauuaucucc

SEQ ID NO: 2566806 - RNA, 19 nt, Artificial Sequence
  Description of Artificial Sequence: Synthetic oligonucleotide
  Sense strand starting at position 3039 of SEQ ID NO: 1888928
gauaauugaguacguaaua

SEQ ID NO: 2566807 - RNA, 19 nt, Artificial Sequence
  Description of Artificial Sequence: Synthetic oligonucleotide
  Antisense strand to SEQ ID NO: 2566806
uauuacguacucaauuauc

SEQ ID NO: 2566808 - RNA, 19 nt, Artificial Sequence
  Description of Artificial Sequence: Synthetic oligonucleotide
  Sense strand starting at position 3139 of SEQ ID NO: 1888928
ucaucacccugguuguaaa

SEQ ID NO: 2566809 - RNA, 19 nt, Artificial Sequence
  Description of Artificial Sequence: Synthetic oligonucleotide
  Antisense strand to SEQ ID NO: 2566808
uuuacaaccagggugauga

SEQ ID NO: 2566810 - RNA, 19 nt, Artificial Sequence
  Description of Artificial Sequence: Synthetic oligonucleotide
  Sense strand starting at position 3343 of SEQ ID NO: 1888928
ggugccaaguaauuaggau

SEQ ID NO: 2566811 - RNA, 19 nt, Artificial Sequence
  Description of Artificial Sequence: Synthetic oligonucleotide
  Antisense strand to SEQ ID NO: 2566810
auccuaauuacuuggcacc

SEQ ID NO: 2566812 - RNA, 19 nt, Artificial Sequence
  Description of Artificial Sequence: Synthetic oligonucleotide
  Sense strand starting at position 3451 of SEQ ID NO: 1888928
guauuuggauaagacucua

SEQ ID NO: 2566813 - RNA, 19 nt, Artificial Sequence
  Description of Artificial Sequence: Synthetic oligonucleotide
  Antisense strand to SEQ ID NO: 2566812
uagagucuuauccaaauac

SEQ ID NO: 2566814 - RNA, 19 nt, Artificial Sequence
  Description of Artificial Sequence: Synthetic oligonucleotide
  Sense strand starting at position 3544 of SEQ ID NO: 1888928
gugugauaccgcagaggca

SEQ ID NO: 2566815 - RNA, 19 nt, Artificial Sequence
  Description of Artificial Sequence: Synthetic oligonucleotide
  Antisense strand to SEQ ID NO: 2566814
ugccucugcgguaucacac

SEQ ID NO: 2566816 - RNA, 19 nt, Artificial Sequence
  Description of Artificial Sequence: Synthetic oligonucleotide
  Sense strand starting at position 3622 of SEQ ID NO: 1888928
uagagugacuguguacaua

SEQ ID NO: 2566817 - RNA, 19 nt, Artificial Sequence
  Description of Artificial Sequence: Synthetic oligonucleotide
  Antisense strand to SEQ ID NO: 2566816
uauguacacagucacucua

SEQ ID NO: 2566818 - RNA, 19 nt, Artificial Sequence
  Description of Artificial Sequence: Synthetic oligonucleotide
  Sense strand starting at position 3893 of SEQ ID NO: 1888928
ggcaacagagccuaauguu

SEQ ID NO: 2566819 - RNA, 19 nt, Artificial Sequence
  Description of Artificial Sequence: Synthetic oligonucleotide
  Antisense strand to SEQ ID NO: 2566818
aacauuaggcucuguugcc

SEQ ID NO: 2566820 - RNA, 19 nt, Artificial Sequence
  Description of Artificial Sequence: Synthetic oligonucleotide
  Sense strand starting at position 3964 of SEQ ID NO: 1888928
acaaauggugcuuggaaga

SEQ ID NO: 2566821 - RNA, 19 nt, Artificial Sequence
  Description of Artificial Sequence: Synthetic oligonucleotide
  Antisense strand to SEQ ID NO: 2566820
ucuuccaagcaccauuugu

SEQ ID NO: 2566822 - RNA, 19 nt, Artificial Sequence
  Description of Artificial Sequence: Synthetic oligonucleotide
  Sense strand starting at position 3969 of SEQ ID NO: 1888928
uggugcuuggaagaguaaa

SEQ ID NO: 2566823 - RNA, 19 nt, Artificial Sequence
  Description of Artificial Sequence: Synthetic oligonucleotide
  Antisense strand to SEQ ID NO: 2566822
uuuacucuuccaagcacca

SEQ ID NO: 2566824 - RNA, 19 nt, Artificial Sequence
  Description of Artificial Sequence: Synthetic oligonucleotide
  Sense strand starting at position 17 of SEQ ID NO: 1888929
acuguuauucugcauacca

SEQ ID NO: 2566825 - RNA, 19 nt, Artificial Sequence
  Description of Artificial Sequence: Synthetic oligonucleotide
  Antisense strand to SEQ ID NO: 2566824
ugguaugcagaauaacagu

SEQ ID NO: 2566826 - RNA, 19 nt, Artificial Sequence
  Description of Artificial Sequence: Synthetic oligonucleotide
  Sense strand starting at position 267 of SEQ ID NO: 1888929
cagugaauagaguacucuu

SEQ ID NO: 2566827 - RNA, 19 nt, Artificial Sequence
  Description of Artificial Sequence: Synthetic oligonucleotide
  Antisense strand to SEQ ID NO: 2566826
aagaguacucuauucacug

SEQ ID NO: 2566828 - RNA, 19 nt, Artificial Sequence
  Description of Artificial Sequence: Synthetic oligonucleotide
  Sense strand starting at position 412 of SEQ ID NO: 1888929
guguuaucacuuuggaaau

SEQ ID NO: 2566829 - RNA, 19 nt, Artificial Sequence
  Description of Artificial Sequence: Synthetic oligonucleotide
  Antisense strand to SEQ ID NO: 2566828
auuuccaaagugauaacac

SEQ ID NO: 2566830 - RNA, 19 nt, Artificial Sequence
  Description of Artificial Sequence: Synthetic oligonucleotide
  Sense strand starting at position 422 of SEQ ID NO: 1888929
uuuggaaauuucuauguac

SEQ ID NO: 2566831 - RNA, 19 nt, Artificial Sequence
  Description of Artificial Sequence: Synthetic oligonucleotide
  Antisense strand to SEQ ID NO: 2566830
guacauagaaauuuccaaa

SEQ ID NO: 2566832 - RNA, 19 nt, Artificial Sequence
  Description of Artificial Sequence: Synthetic oligonucleotide
  Sense strand starting at position 607 of SEQ ID NO: 1888929
auccauucugaacguaaca

SEQ ID NO: 2566833 - RNA, 19 nt, Artificial Sequence
  Description of Artificial Sequence: Synthetic oligonucleotide
  Antisense strand to SEQ ID NO: 2566832
uguuacguucagaauggau

SEQ ID NO: 2566834 - RNA, 19 nt, Artificial Sequence
  Description of Artificial Sequence: Synthetic oligonucleotide
  Sense strand starting at position 903 of SEQ ID NO: 1888929
guguguauuucccucuauc

SEQ ID NO: 2566835 - RNA, 19 nt, Artificial Sequence
  Description of Artificial Sequence: Synthetic oligonucleotide
  Antisense strand to SEQ ID NO: 2566834
gauagagggaaauacacac

SEQ ID NO: 2566836 - RNA, 19 nt, Artificial Sequence
  Description of Artificial Sequence: Synthetic oligonucleotide
  Sense strand starting at position 938 of SEQ ID NO: 1888929
agaguuaagaagugucaac

SEQ ID NO: 2566837 - RNA, 19 nt, Artificial Sequence
  Description of Artificial Sequence: Synthetic oligonucleotide
  Antisense strand to SEQ ID NO: 2566836
guugacacuucuuaacucu

SEQ ID NO: 2566838 - RNA, 19 nt, Artificial Sequence
  Description of Artificial Sequence: Synthetic oligonucleotide
  Sense strand starting at position 1379 of SEQ ID NO: 1888929
agugaaauauucuugggug

SEQ ID NO: 2566839 - RNA, 19 nt, Artificial Sequence
  Description of Artificial Sequence: Synthetic oligonucleotide
  Antisense strand to SEQ ID NO: 2566838
cacccaagaauauuucacu

SEQ ID NO: 2566840 - RNA, 19 nt, Artificial Sequence
  Description of Artificial Sequence: Synthetic oligonucleotide
  Sense strand starting at position 1426 of SEQ ID NO: 1888929
gacuuaaggcuuugaaagg

SEQ ID NO: 2566841 - RNA, 19 nt, Artificial Sequence
  Description of Artificial Sequence: Synthetic oligonucleotide
  Antisense strand to SEQ ID NO: 2566840
ccuuucaaagccuuaaguc

SEQ ID NO: 2566842 - RNA, 19 nt, Artificial Sequence
  Description of Artificial Sequence: Synthetic oligonucleotide
  Sense strand starting at position 1571 of SEQ ID NO: 1888929
augacuaguugauaaguga

SEQ ID NO: 2566843 - RNA, 19 nt, Artificial Sequence
  Description of Artificial Sequence: Synthetic oligonucleotide
  Antisense strand to SEQ ID NO: 2566842
ucacuuaucaacuagucau

SEQ ID NO: 2566844 - RNA, 19 nt, Artificial Sequence
  Description of Artificial Sequence: Synthetic oligonucleotide
  Sense strand starting at position 1626 of SEQ ID NO: 1888929
auuccagcugacgaagaau

SEQ ID NO: 2566845 - RNA, 19 nt, Artificial Sequence
  Description of Artificial Sequence: Synthetic oligonucleotide
  Antisense strand to SEQ ID NO: 2566844
auucuucgucagcuggaau

SEQ ID NO: 2566846 - RNA, 19 nt, Artificial Sequence
  Description of Artificial Sequence: Synthetic oligonucleotide
  Sense strand starting at position 1733 of SEQ ID NO: 1888929
uucucaggaguccacaauu

SEQ ID NO: 2566847 - RNA, 19 nt, Artificial Sequence
  Description of Artificial Sequence: Synthetic oligonucleotide
  Antisense strand to SEQ ID NO: 2566846
aauuguggacuccugagaa

SEQ ID NO: 2566848 - RNA, 19 nt, Artificial Sequence
  Description of Artificial Sequence: Synthetic oligonucleotide
  Sense strand starting at position 1741 of SEQ ID NO: 1888929
aguccacaauuccuaugua

SEQ ID NO: 2566849 - RNA, 19 nt, Artificial Sequence
  Description of Artificial Sequence: Synthetic oligonucleotide
  Antisense strand to SEQ ID NO: 2566848
uacauaggaauuguggacu

SEQ ID NO: 2566850 - RNA, 19 nt, Artificial Sequence
  Description of Artificial Sequence: Synthetic oligonucleotide
  Sense strand starting at position 1754 of SEQ ID NO: 1888929
uauguacagucgucuagaa

SEQ ID NO: 2566851 - RNA, 19 nt, Artificial Sequence
  Description of Artificial Sequence: Synthetic oligonucleotide
  Antisense strand to SEQ ID NO: 2566850
uucuagacgacuguacaua

SEQ ID NO: 2566852 - RNA, 19 nt, Artificial Sequence
  Description of Artificial Sequence: Synthetic oligonucleotide
  Sense strand starting at position 2283 of SEQ ID NO: 1888929
cgaguagcuuagguuaaag

SEQ ID NO: 2566853 - RNA, 19 nt, Artificial Sequence
  Description of Artificial Sequence: Synthetic oligonucleotide
  Antisense strand to SEQ ID NO: 2566852
cuuuaaccuaagcuacucg

SEQ ID NO: 2566854 - RNA, 19 nt, Artificial Sequence
  Description of Artificial Sequence: Synthetic oligonucleotide
  Sense strand starting at position 2388 of SEQ ID NO: 1888929
gcgaguaauccuugucuga

SEQ ID NO: 2566855 - RNA, 19 nt, Artificial Sequence
  Description of Artificial Sequence: Synthetic oligonucleotide
  Antisense strand to SEQ ID NO: 2566854
ucagacaaggauuacucgc

SEQ ID NO: 2566856 - RNA, 19 nt, Artificial Sequence
  Description of Artificial Sequence: Synthetic oligonucleotide
  Sense strand starting at position 2390 of SEQ ID NO: 1888929
gaguaauccuugucugaau

SEQ ID NO: 2566857 - RNA, 19 nt, Artificial Sequence
  Description of Artificial Sequence: Synthetic oligonucleotide
  Antisense strand to SEQ ID NO: 2566856
auucagacaaggauuacuc

SEQ ID NO: 2566858 - RNA, 19 nt, Artificial Sequence
  Description of Artificial Sequence: Synthetic oligonucleotide
  Sense strand starting at position 2391 of SEQ ID NO: 1888929
aguaauccuugucugaauu

SEQ ID NO: 2566859 - RNA, 19 nt, Artificial Sequence
  Description of Artificial Sequence: Synthetic oligonucleotide
  Antisense strand to SEQ ID NO: 2566858
aauucagacaaggauuacu

SEQ ID NO: 2566860 - RNA, 19 nt, Artificial Sequence
  Description of Artificial Sequence: Synthetic oligonucleotide
  Sense strand starting at position 2392 of SEQ ID NO: 1888929
guaauccuugucugaauua

SEQ ID NO: 2566861 - RNA, 19 nt, Artificial Sequence
  Description of Artificial Sequence: Synthetic oligonucleotide
  Antisense strand to SEQ ID NO: 2566860
uaauucagacaaggauuac

SEQ ID NO: 2566862 - RNA, 19 nt, Artificial Sequence
  Description of Artificial Sequence: Synthetic oligonucleotide
  Sense strand starting at position 3126 of SEQ ID NO: 1888929
agcucucuaugguccuaaa

SEQ ID NO: 2566863 - RNA, 19 nt, Artificial Sequence
  Description of Artificial Sequence: Synthetic oligonucleotide
  Antisense strand to SEQ ID NO: 2566862
uuuaggaccauagagagcu

SEQ ID NO: 2566864 - RNA, 19 nt, Artificial Sequence
  Description of Artificial Sequence: Synthetic oligonucleotide
  Sense strand starting at position 3219 of SEQ ID NO: 1888929
agagaagagucagacagua

SEQ ID NO: 2566865 - RNA, 19 nt, Artificial Sequence
  Description of Artificial Sequence: Synthetic oligonucleotide
  Antisense strand to SEQ ID NO: 2566864
uacugucugacucuucucu

SEQ ID NO: 2566866 - RNA, 19 nt, Artificial Sequence
  Description of Artificial Sequence: Synthetic oligonucleotide
  Sense strand starting at position 3371 of SEQ ID NO: 1888929
guuccaugguucuuuauag

SEQ ID NO: 2566867 - RNA, 19 nt, Artificial Sequence
  Description of Artificial Sequence: Synthetic oligonucleotide
  Antisense strand to SEQ ID NO: 2566866
cuauaaagaaccauggaac

SEQ ID NO: 2566868 - RNA, 19 nt, Artificial Sequence
  Description of Artificial Sequence: Synthetic oligonucleotide
  Sense strand starting at position 3372 of SEQ ID NO: 1888929
uuccaugguucuuuauagu

SEQ ID NO: 2566869 - RNA, 19 nt, Artificial Sequence
  Description of Artificial Sequence: Synthetic oligonucleotide
  Antisense strand to SEQ ID NO: 2566868
acuauaaagaaccauggaa

SEQ ID NO: 2566870 - RNA, 19 nt, Artificial Sequence
  Description of Artificial Sequence: Synthetic oligonucleotide
  Sense strand starting at position 3378 of SEQ ID NO: 1888929
gguucuuuauaguacauuu

SEQ ID NO: 2566871 - RNA, 19 nt, Artificial Sequence
  Description of Artificial Sequence: Synthetic oligonucleotide
  Antisense strand to SEQ ID NO: 2566870
aaauguacuauaaagaacc

SEQ ID NO: 2566872 - RNA, 19 nt, Artificial Sequence
  Description of Artificial Sequence: Synthetic oligonucleotide
  Sense strand starting at position 3415 of SEQ ID NO: 1888929
ucucucgcugugugauuaa

SEQ ID NO: 2566873 - RNA, 19 nt, Artificial Sequence
  Description of Artificial Sequence: Synthetic oligonucleotide
  Antisense strand to SEQ ID NO: 2566872
uuaaucacacagcgagaga

SEQ ID NO: 2566874 - RNA, 19 nt, Artificial Sequence
  Description of Artificial Sequence: Synthetic oligonucleotide
  Sense strand starting at position 3418 of SEQ ID NO: 1888929
cucgcugugugauuaacaa

SEQ ID NO: 2566875 - RNA, 19 nt, Artificial Sequence
  Description of Artificial Sequence: Synthetic oligonucleotide
  Antisense strand to SEQ ID NO: 2566874
uuguuaaucacacagcgag

SEQ ID NO: 2566876 - RNA, 19 nt, Artificial Sequence
  Description of Artificial Sequence: Synthetic oligonucleotide
  Sense strand starting at position 3422 of SEQ ID NO: 1888929
cugugugauuaacaauuaa

SEQ ID NO: 2566877 - RNA, 19 nt, Artificial Sequence
  Description of Artificial Sequence: Synthetic oligonucleotide
  Antisense strand to SEQ ID NO: 2566876
uuaauuguuaaucacacag

SEQ ID NO: 2566878 - RNA, 19 nt, Artificial Sequence
  Description of Artificial Sequence: Synthetic oligonucleotide
  Sense strand starting at position 3553 of SEQ ID NO: 1888929
guguacagcuguuucuuau

SEQ ID NO: 2566879 - RNA, 19 nt, Artificial Sequence
  Description of Artificial Sequence: Synthetic oligonucleotide
  Antisense strand to SEQ ID NO: 2566878
auaagaaacagcuguacac

SEQ ID NO: 2566880 - RNA, 19 nt, Artificial Sequence
  Description of Artificial Sequence: Synthetic oligonucleotide
  Sense strand starting at position 3583 of SEQ ID NO: 1888929
uugacagugucucucuuaa

SEQ ID NO: 2566881 - RNA, 19 nt, Artificial Sequence
  Description of Artificial Sequence: Synthetic oligonucleotide
  Antisense strand to SEQ ID NO: 2566880
uuaagagagacacugucaa

SEQ ID NO: 2566882 - RNA, 19 nt, Artificial Sequence
  Description of Artificial Sequence: Synthetic oligonucleotide
  Sense strand starting at position 3633 of SEQ ID NO: 1888929
uuauguacaugcguuuaaa

SEQ ID NO: 2566883 - RNA, 19 nt, Artificial Sequence
  Description of Artificial Sequence: Synthetic oligonucleotide
  Antisense strand to SEQ ID NO: 2566882
uuuaaacgcauguacauaa

SEQ ID NO: 2566884 - RNA, 19 nt, Artificial Sequence
  Description of Artificial Sequence: Synthetic oligonucleotide
  Sense strand starting at position 3636 of SEQ ID NO: 1888929
uguacaugcguuuaaaucu

SEQ ID NO: 2566885 - RNA, 19 nt, Artificial Sequence
  Description of Artificial Sequence: Synthetic oligonucleotide
  Antisense strand to SEQ ID NO: 2566884
agauuuaaacgcauguaca

SEQ ID NO: 2566886 - RNA, 19 nt, Artificial Sequence
  Description of Artificial Sequence: Synthetic oligonucleotide
  Sense strand starting at position 3760 of SEQ ID NO: 1888929
ucugcacucuuggcuuauu

SEQ ID NO: 2566887 - RNA, 19 nt, Artificial Sequence
  Description of Artificial Sequence: Synthetic oligonucleotide
  Antisense strand to SEQ ID NO: 2566886
aauaagccaagagugcaga

SEQ ID NO: 2566888 - RNA, 19 nt, Artificial Sequence
  Description of Artificial Sequence: Synthetic oligonucleotide
  Sense strand starting at position 3761 of SEQ ID NO: 1888929
cugcacucuuggcuuauua

SEQ ID NO: 2566889 - RNA, 19 nt, Artificial Sequence
  Description of Artificial Sequence: Synthetic oligonucleotide
  Antisense strand to SEQ ID NO: 2566888
uaauaagccaagagugcag

SEQ ID NO: 2566890 - RNA, 19 nt, Artificial Sequence
  Description of Artificial Sequence: Synthetic oligonucleotide
  Sense strand starting at position 3763 of SEQ ID NO: 1888929
gcacucuuggcuuauuagu

SEQ ID NO: 2566891 - RNA, 19 nt, Artificial Sequence
  Description of Artificial Sequence: Synthetic oligonucleotide
  Antisense strand to SEQ ID NO: 2566890
acuaauaagccaagagugc

SEQ ID NO: 2566892 - RNA, 19 nt, Artificial Sequence
  Description of Artificial Sequence: Synthetic oligonucleotide
  Sense strand starting at position 3771 of SEQ ID NO: 1888929
ggcuuauuaguuggucacu

SEQ ID NO: 2566893 - RNA, 19 nt, Artificial Sequence
  Description of Artificial Sequence: Synthetic oligonucleotide
  Antisense strand to SEQ ID NO: 2566892
agugaccaacuaauaagcc

SEQ ID NO: 2566894 - RNA, 19 nt, Artificial Sequence
  Description of Artificial Sequence: Synthetic oligonucleotide
  Sense strand starting at position 3772 of SEQ ID NO: 1888929
gcuuauuaguuggucacuu

SEQ ID NO: 2566895 - RNA, 19 nt, Artificial Sequence
  Description of Artificial Sequence: Synthetic oligonucleotide
  Antisense strand to SEQ ID NO: 2566894
aagugaccaacuaauaagc

SEQ ID NO: 2566896 - RNA, 19 nt, Artificial Sequence
  Description of Artificial Sequence: Synthetic oligonucleotide
  Sense strand starting at position 3773 of SEQ ID NO: 1888929
cuuauuaguuggucacuuu

SEQ ID NO: 2566897 - RNA, 19 nt, Artificial Sequence
  Description of Artificial Sequence: Synthetic oligonucleotide
  Antisense strand to SEQ ID NO: 2566896
aaagugaccaacuaauaag

SEQ ID NO: 2566898 - RNA, 19 nt, Artificial Sequence
  Description of Artificial Sequence: Synthetic oligonucleotide
  Sense strand starting at position 3774 of SEQ ID NO: 1888929
uuauuaguuggucacuuua

SEQ ID NO: 2566899 - RNA, 19 nt, Artificial Sequence
  Description of Artificial Sequence: Synthetic oligonucleotide
  Antisense strand to SEQ ID NO: 2566898
uaaagugaccaacuaauaa

SEQ ID NO: 2566900 - RNA, 19 nt, Artificial Sequence
  Description of Artificial Sequence: Synthetic oligonucleotide
  Sense strand starting at position 3776 of SEQ ID NO: 1888929
auuaguuggucacuuuaaa

SEQ ID NO: 2566901 - RNA, 19 nt, Artificial Sequence
  Description of Artificial Sequence: Synthetic oligonucleotide
  Antisense strand to SEQ ID NO: 2566900
uuuaaagugaccaacuaau

SEQ ID NO: 2566902 - RNA, 19 nt, Artificial Sequence
  Description of Artificial Sequence: Synthetic oligonucleotide
  Sense strand starting at position 3875 of SEQ ID NO: 1888929
guuuaugaacccugaacau

SEQ ID NO: 2566903 - RNA, 19 nt, Artificial Sequence
  Description of Artificial Sequence: Synthetic oligonucleotide
  Antisense strand to SEQ ID NO: 2566902
auguucaggguucauaaac

SEQ ID NO: 2566904 - RNA, 19 nt, Artificial Sequence
  Description of Artificial Sequence: Synthetic oligonucleotide
  Sense strand starting at position 442 of SEQ ID NO: 1888930
gaguuaucacuuuggaaau

SEQ ID NO: 2566905 - RNA, 19 nt, Artificial Sequence
  Description of Artificial Sequence: Synthetic oligonucleotide
  Antisense strand to SEQ ID NO: 2566904
auuuccaaagugauaacuc

SEQ ID NO: 2566906 - RNA, 19 nt, Artificial Sequence
  Description of Artificial Sequence: Synthetic oligonucleotide
  Sense strand starting at position 443 of SEQ ID NO: 1888930
aguuaucacuuuggaaauu

SEQ ID NO: 2566907 - RNA, 19 nt, Artificial Sequence
  Description of Artificial Sequence: Synthetic oligonucleotide
  Antisense strand to SEQ ID NO: 2566906
aauuuccaaagugauaacu

SEQ ID NO: 2566908 - RNA, 19 nt, Artificial Sequence
  Description of Artificial Sequence: Synthetic oligonucleotide
  Sense strand starting at position 713 of SEQ ID NO: 1888930
uucucucuuucgguguaua

SEQ ID NO: 2566909 - RNA, 19 nt, Artificial Sequence
  Description of Artificial Sequence: Synthetic oligonucleotide
  Antisense strand to SEQ ID NO: 2566908
uauacaccgaaagagagaa

SEQ ID NO: 2566910 - RNA, 19 nt, Artificial Sequence
  Description of Artificial Sequence: Synthetic oligonucleotide
  Sense strand starting at position 714 of SEQ ID NO: 1888930
ucucucuuucgguguauau

SEQ ID NO: 2566911 - RNA, 19 nt, Artificial Sequence
  Description of Artificial Sequence: Synthetic oligonucleotide
  Antisense strand to SEQ ID NO: 2566910
auauacaccgaaagagaga

SEQ ID NO: 2566912 - RNA, 19 nt, Artificial Sequence
  Description of Artificial Sequence: Synthetic oligonucleotide
  Sense strand starting at position 741 of SEQ ID NO: 1888930
cucuauuuccguuggaauc

SEQ ID NO: 2566913 - RNA, 19 nt, Artificial Sequence
  Description of Artificial Sequence: Synthetic oligonucleotide
  Antisense strand to SEQ ID NO: 2566912
gauuccaacggaaauagag

SEQ ID NO: 2566914 - RNA, 19 nt, Artificial Sequence
  Description of Artificial Sequence: Synthetic oligonucleotide
  Sense strand starting at position 743 of SEQ ID NO: 1888930
cuauuuccguuggaaucaa

SEQ ID NO: 2566915 - RNA, 19 nt, Artificial Sequence
  Description of Artificial Sequence: Synthetic oligonucleotide
  Antisense strand to SEQ ID NO: 2566914
uugauuccaacggaaauag

SEQ ID NO: 2566916 - RNA, 19 nt, Artificial Sequence
  Description of Artificial Sequence: Synthetic oligonucleotide
  Sense strand starting at position 941 of SEQ ID NO: 1888930
ucuccauuagguugaguua

SEQ ID NO: 2566917 - RNA, 19 nt, Artificial Sequence
  Description of Artificial Sequence: Synthetic oligonucleotide
  Antisense strand to SEQ ID NO: 2566916
uaacucaaccuaauggaga

SEQ ID NO: 2566918 - RNA, 19 nt, Artificial Sequence
  Description of Artificial Sequence: Synthetic oligonucleotide
  Sense strand starting at position 942 of SEQ ID NO: 1888930
cuccauuagguugaguuaa

SEQ ID NO: 2566919 - RNA, 19 nt, Artificial Sequence
  Description of Artificial Sequence: Synthetic oligonucleotide
  Antisense strand to SEQ ID NO: 2566918
uuaacucaaccuaauggag

SEQ ID NO: 2566920 - RNA, 19 nt, Artificial Sequence
  Description of Artificial Sequence: Synthetic oligonucleotide
  Sense strand starting at position 944 of SEQ ID NO: 1888930
ccauuagguugaguuaaga

SEQ ID NO: 2566921 - RNA, 19 nt, Artificial Sequence
  Description of Artificial Sequence: Synthetic oligonucleotide
  Antisense strand to SEQ ID NO: 2566920
ucuuaacucaaccuaaugg

SEQ ID NO: 2566922 - RNA, 19 nt, Artificial Sequence
  Description of Artificial Sequence: Synthetic oligonucleotide
  Sense strand starting at position 953 of SEQ ID NO: 1888930
ugaguuaagaagugucaac

SEQ ID NO: 2566923 - RNA, 19 nt, Artificial Sequence
  Description of Artificial Sequence: Synthetic oligonucleotide
  Antisense strand to SEQ ID NO: 2566922
guugacacuucuuaacuca

SEQ ID NO: 2566924 - RNA, 19 nt, Artificial Sequence
  Description of Artificial Sequence: Synthetic oligonucleotide
  Sense strand starting at position 1305 of SEQ ID NO: 1888930
ggagauaucucuugaguaa

SEQ ID NO: 2566925 - RNA, 19 nt, Artificial Sequence
  Description of Artificial Sequence: Synthetic oligonucleotide
  Antisense strand to SEQ ID NO: 2566924
uuacucaagagauaucucc

SEQ ID NO: 2566926 - RNA, 19 nt, Artificial Sequence
  Description of Artificial Sequence: Synthetic oligonucleotide
  Sense strand starting at position 1421 of SEQ ID NO: 1888930
uccauaaauuggugacuga

SEQ ID NO: 2566927 - RNA, 19 nt, Artificial Sequence
  Description of Artificial Sequence: Synthetic oligonucleotide
  Antisense strand to SEQ ID NO: 2566926
ucagucaccaauuuaugga

SEQ ID NO: 2566928 - RNA, 19 nt, Artificial Sequence
  Description of Artificial Sequence: Synthetic oligonucleotide
  Sense strand starting at position 1579 of SEQ ID NO: 1888930
augacuucuugauaaguga

SEQ ID NO: 2566929 - RNA, 19 nt, Artificial Sequence
  Description of Artificial Sequence: Synthetic oligonucleotide
  Antisense strand to SEQ ID NO: 2566928
ucacuuaucaagaagucau

SEQ ID NO: 2566930 - RNA, 19 nt, Artificial Sequence
  Description of Artificial Sequence: Synthetic oligonucleotide
  Sense strand starting at position 1582 of SEQ ID NO: 1888930
acuucuugauaagugagaa

SEQ ID NO: 2566931 - RNA, 19 nt, Artificial Sequence
  Description of Artificial Sequence: Synthetic oligonucleotide
  Antisense strand to SEQ ID NO: 2566930
uucucacuuaucaagaagu

SEQ ID NO: 2566932 - RNA, 19 nt, Artificial Sequence
  Description of Artificial Sequence: Synthetic oligonucleotide
  Sense strand starting at position 1748 of SEQ ID NO: 1888930
cacaguuccuauguauagu

SEQ ID NO: 2566933 - RNA, 19 nt, Artificial Sequence
  Description of Artificial Sequence: Synthetic oligonucleotide
  Antisense strand to SEQ ID NO: 2566932
acuauacauaggaacugug

SEQ ID NO: 2566934 - RNA, 19 nt, Artificial Sequence
  Description of Artificial Sequence: Synthetic oligonucleotide
  Sense strand starting at position 1761 of SEQ ID NO: 1888930
uauagucauuuagaaggca

SEQ ID NO: 2566935 - RNA, 19 nt, Artificial Sequence
  Description of Artificial Sequence: Synthetic oligonucleotide
  Antisense strand to SEQ ID NO: 2566934
ugccuucuaaaugacuaua

SEQ ID NO: 2566936 - RNA, 19 nt, Artificial Sequence
  Description of Artificial Sequence: Synthetic oligonucleotide
  Sense strand starting at position 2059 of SEQ ID NO: 1888930
uggcauggccaccaagauu

SEQ ID NO: 2566937 - RNA, 19 nt, Artificial Sequence
  Description of Artificial Sequence: Synthetic oligonucleotide
  Antisense strand to SEQ ID NO: 2566936
aaucuugguggccaugcca

SEQ ID NO: 2566938 - RNA, 19 nt, Artificial Sequence
  Description of Artificial Sequence: Synthetic oligonucleotide
  Sense strand starting at position 2216 of SEQ ID NO: 1888930
caugcauuggugugaucuc

SEQ ID NO: 2566939 - RNA, 19 nt, Artificial Sequence
  Description of Artificial Sequence: Synthetic oligonucleotide
  Antisense strand to SEQ ID NO: 2566938
gagaucacaccaaugcaug

SEQ ID NO: 2566940 - RNA, 19 nt, Artificial Sequence
  Description of Artificial Sequence: Synthetic oligonucleotide
  Sense strand starting at position 2387 of SEQ ID NO: 1888930
cccagagauguguaauccu

SEQ ID NO: 2566941 - RNA, 19 nt, Artificial Sequence
  Description of Artificial Sequence: Synthetic oligonucleotide
  Antisense strand to SEQ ID NO: 2566940
aggauuacacaucucuggg

SEQ ID NO: 2566942 - RNA, 19 nt, Artificial Sequence
  Description of Artificial Sequence: Synthetic oligonucleotide
  Sense strand starting at position 2390 of SEQ ID NO: 1888930
agagauguguaauccuugu

SEQ ID NO: 2566943 - RNA, 19 nt, Artificial Sequence
  Description of Artificial Sequence: Synthetic oligonucleotide
  Antisense strand to SEQ ID NO: 2566942
acaaggauuacacaucucu

SEQ ID NO: 2566944 - RNA, 19 nt, Artificial Sequence
  Description of Artificial Sequence: Synthetic oligonucleotide
  Sense strand starting at position 2396 of SEQ ID NO: 1888930
guguaauccuugucuggau

SEQ ID NO: 2566945 - RNA, 19 nt, Artificial Sequence
  Description of Artificial Sequence: Synthetic oligonucleotide
  Antisense strand to SEQ ID NO: 2566944
auccagacaaggauuacac

SEQ ID NO: 2566946 - RNA, 19 nt, Artificial Sequence
  Description of Artificial Sequence: Synthetic oligonucleotide
  Sense strand starting at position 2397 of SEQ ID NO: 1888930
uguaauccuugucuggauu

SEQ ID NO: 2566947 - RNA, 19 nt, Artificial Sequence
  Description of Artificial Sequence: Synthetic oligonucleotide
  Antisense strand to SEQ ID NO: 2566946
aauccagacaaggauuaca

SEQ ID NO: 2566948 - RNA, 19 nt, Artificial Sequence
  Description of Artificial Sequence: Synthetic oligonucleotide
  Sense strand starting at position 2398 of SEQ ID NO: 1888930
guaauccuugucuggauua

SEQ ID NO: 2566949 - RNA, 19 nt, Artificial Sequence
  Description of Artificial Sequence: Synthetic oligonucleotide
  Antisense strand to SEQ ID NO: 2566948
uaauccagacaaggauuac

SEQ ID NO: 2566950 - RNA, 19 nt, Artificial Sequence
  Description of Artificial Sequence: Synthetic oligonucleotide
  Sense strand starting at position 2408 of SEQ ID NO: 1888930
ucuggauuaucccauuagu

SEQ ID NO: 2566951 - RNA, 19 nt, Artificial Sequence
  Description of Artificial Sequence: Synthetic oligonucleotide
  Antisense strand to SEQ ID NO: 2566950
acuaaugggauaauccaga

SEQ ID NO: 2566952 - RNA, 19 nt, Artificial Sequence
  Description of Artificial Sequence: Synthetic oligonucleotide
  Sense strand starting at position 2477 of SEQ ID NO: 1888930
ugcagugggucacacauau

SEQ ID NO: 2566953 - RNA, 19 nt, Artificial Sequence
  Description of Artificial Sequence: Synthetic oligonucleotide
  Antisense strand to SEQ ID NO: 2566952
auaugugugacccacugca

SEQ ID NO: 2566954 - RNA, 19 nt, Artificial Sequence
  Description of Artificial Sequence: Synthetic oligonucleotide
  Sense strand starting at position 2694 of SEQ ID NO: 1888930
agaucaugccacugaauca

SEQ ID NO: 2566955 - RNA, 19 nt, Artificial Sequence
  Description of Artificial Sequence: Synthetic oligonucleotide
  Antisense strand to SEQ ID NO: 2566954
ugauucaguggcaugaucu

SEQ ID NO: 2566956 - RNA, 19 nt, Artificial Sequence
  Description of Artificial Sequence: Synthetic oligonucleotide
  Sense strand starting at position 2778 of SEQ ID NO: 1888930
cagaguuaguuagacucuu

SEQ ID NO: 2566957 - RNA, 19 nt, Artificial Sequence
  Description of Artificial Sequence: Synthetic oligonucleotide
  Antisense strand to SEQ ID NO: 2566956
aagagucuaacuaacucug

SEQ ID NO: 2566958 - RNA, 19 nt, Artificial Sequence
  Description of Artificial Sequence: Synthetic oligonucleotide
  Sense strand starting at position 2946 of SEQ ID NO: 1888930
cuugauagcauguagaagu

SEQ ID NO: 2566959 - RNA, 19 nt, Artificial Sequence
  Description of Artificial Sequence: Synthetic oligonucleotide
  Antisense strand to SEQ ID NO: 2566958
acuucuacaugcuaucaag

SEQ ID NO: 2566960 - RNA, 19 nt, Artificial Sequence
  Description of Artificial Sequence: Synthetic oligonucleotide
  Sense strand starting at position 2984 of SEQ ID NO: 1888930
gaccgaguguuucuaugua

SEQ ID NO: 2566961 - RNA, 19 nt, Artificial Sequence
  Description of Artificial Sequence: Synthetic oligonucleotide
  Antisense strand to SEQ ID NO: 2566960
uacauagaaacacucgguc

SEQ ID NO: 2566962 - RNA, 19 nt, Artificial Sequence
  Description of Artificial Sequence: Synthetic oligonucleotide
  Sense strand starting at position 3052 of SEQ ID NO: 1888930
gcacauagcucaguguuag

SEQ ID NO: 2566963 - RNA, 19 nt, Artificial Sequence
  Description of Artificial Sequence: Synthetic oligonucleotide
  Antisense strand to SEQ ID NO: 2566962
cuaacacugagcuaugugc

SEQ ID NO: 2566964 - RNA, 19 nt, Artificial Sequence
  Description of Artificial Sequence: Synthetic oligonucleotide
  Sense strand starting at position 3053 of SEQ ID NO: 1888930
cacauagcucaguguuagu

SEQ ID NO: 2566965 - RNA, 19 nt, Artificial Sequence
  Description of Artificial Sequence: Synthetic oligonucleotide
  Antisense strand to SEQ ID NO: 2566964
acuaacacugagcuaugug

SEQ ID NO: 2566966 - RNA, 19 nt, Artificial Sequence
  Description of Artificial Sequence: Synthetic oligonucleotide
  Sense strand starting at position 3081 of SEQ ID NO: 1888930
cggucaaggagccauaguu

SEQ ID NO: 2566967 - RNA, 19 nt, Artificial Sequence
  Description of Artificial Sequence: Synthetic oligonucleotide
  Antisense strand to SEQ ID NO: 2566966
aacuauggcuccuugaccg

SEQ ID NO: 2566968 - RNA, 19 nt, Artificial Sequence
  Description of Artificial Sequence: Synthetic oligonucleotide
  Sense strand starting at position 3373 of SEQ ID NO: 1888930
aaaggagucuuuccagcaa

SEQ ID NO: 2566969 - RNA, 19 nt, Artificial Sequence
  Description of Artificial Sequence: Synthetic oligonucleotide
  Antisense strand to SEQ ID NO: 2566968
uugcuggaaagacuccuuu

SEQ ID NO: 2566970 - RNA, 19 nt, Artificial Sequence
  Description of Artificial Sequence: Synthetic oligonucleotide
  Sense strand starting at position 3377 of SEQ ID NO: 1888930
gagucuuuccagcaaccug

SEQ ID NO: 2566971 - RNA, 19 nt, Artificial Sequence
  Description of Artificial Sequence: Synthetic oligonucleotide
  Antisense strand to SEQ ID NO: 2566970
cagguugcuggaaagacuc

SEQ ID NO: 2566972 - RNA, 19 nt, Artificial Sequence
  Description of Artificial Sequence: Synthetic oligonucleotide
  Sense strand starting at position 3397 of SEQ ID NO: 1888930
cacaucauagcaggagauu

SEQ ID NO: 2566973 - RNA, 19 nt, Artificial Sequence
  Description of Artificial Sequence: Synthetic oligonucleotide
  Antisense strand to SEQ ID NO: 2566972
aaucuccugcuaugaugug

SEQ ID NO: 2566974 - RNA, 19 nt, Artificial Sequence
  Description of Artificial Sequence: Synthetic oligonucleotide
  Sense strand starting at position 3535 of SEQ ID NO: 1888930
uugauaagccaucgaaaga

SEQ ID NO: 2566975 - RNA, 19 nt, Artificial Sequence
  Description of Artificial Sequence: Synthetic oligonucleotide
  Antisense strand to SEQ ID NO: 2566974
ucuuucgauggcuuaucaa

SEQ ID NO: 2566976 - RNA, 19 nt, Artificial Sequence
  Description of Artificial Sequence: Synthetic oligonucleotide
  Sense strand starting at position 3546 of SEQ ID NO: 1888930
ucgaaagaacccuagcaau

SEQ ID NO: 2566977 - RNA, 19 nt, Artificial Sequence
  Description of Artificial Sequence: Synthetic oligonucleotide
  Antisense strand to SEQ ID NO: 2566976
auugcuaggguucuuucga

SEQ ID NO: 2566978 - RNA, 19 nt, Artificial Sequence
  Description of Artificial Sequence: Synthetic oligonucleotide
  Sense strand starting at position 3591 of SEQ ID NO: 1888930
ugugcaaauuaauaugcaa

SEQ ID NO: 2566979 - RNA, 19 nt, Artificial Sequence
  Description of Artificial Sequence: Synthetic oligonucleotide
  Antisense strand to SEQ ID NO: 2566978
uugcauauuaauuugcaca

SEQ ID NO: 2566980 - RNA, 19 nt, Artificial Sequence
  Description of Artificial Sequence: Synthetic oligonucleotide
  Sense strand starting at position 3674 of SEQ ID NO: 1888930
caagcaauguacguaaaga

SEQ ID NO: 2566981 - RNA, 19 nt, Artificial Sequence
  Description of Artificial Sequence: Synthetic oligonucleotide
  Antisense strand to SEQ ID NO: 2566980
ucuuuacguacauugcuug

SEQ ID NO: 2566982 - RNA, 19 nt, Artificial Sequence
  Description of Artificial Sequence: Synthetic oligonucleotide
  Sense strand starting at position 3916 of SEQ ID NO: 1888930
acaaauguaugggcacaua

SEQ ID NO: 2566983 - RNA, 19 nt, Artificial Sequence
  Description of Artificial Sequence: Synthetic oligonucleotide
  Antisense strand to SEQ ID NO: 2566982
uaugugcccauacauuugu

SEQ ID NO: 2566984 - RNA, 19 nt, Artificial Sequence
  Description of Artificial Sequence: Synthetic oligonucleotide
  Sense strand starting at position 45 of SEQ ID NO: 1888931
agaagaugcuacuugcuuu

SEQ ID NO: 2566985 - RNA, 19 nt, Artificial Sequence
  Description of Artificial Sequence: Synthetic oligonucleotide
  Antisense strand to SEQ ID NO: 2566984
aaagcaaguagcaucuucu

SEQ ID NO: 2566986 - RNA, 19 nt, Artificial Sequence
  Description of Artificial Sequence: Synthetic oligonucleotide
  Sense strand starting at position 262 of SEQ ID NO: 1888931
aaauguguuguuuacaagu

SEQ ID NO: 2566987 - RNA, 19 nt, Artificial Sequence
  Description of Artificial Sequence: Synthetic oligonucleotide
  Antisense strand to SEQ ID NO: 2566986
acuuguaaacaacacauuu

SEQ ID NO: 2566988 - RNA, 19 nt, Artificial Sequence
  Description of Artificial Sequence: Synthetic oligonucleotide
  Sense strand starting at position 696 of SEQ ID NO: 1888931
acuauauacuaagaggagu

SEQ ID NO: 2566989 - RNA, 19 nt, Artificial Sequence
  Description of Artificial Sequence: Synthetic oligonucleotide
  Antisense strand to SEQ ID NO: 2566988
acuccucuuaguauauagu

SEQ ID NO: 2566990 - RNA, 19 nt, Artificial Sequence
  Description of Artificial Sequence: Synthetic oligonucleotide
  Sense strand starting at position 819 of SEQ ID NO: 1888931
uguauucuauuagugcaau

SEQ ID NO: 2566991 - RNA, 19 nt, Artificial Sequence
  Description of Artificial Sequence: Synthetic oligonucleotide
  Antisense strand to SEQ ID NO: 2566990
auugcacuaauagaauaca

SEQ ID NO: 2566992 - RNA, 19 nt, Artificial Sequence
  Description of Artificial Sequence: Synthetic oligonucleotide
  Sense strand starting at position 822 of SEQ ID NO: 1888931
auucuauuagugcaauugu

SEQ ID NO: 2566993 - RNA, 19 nt, Artificial Sequence
  Description of Artificial Sequence: Synthetic oligonucleotide
  Antisense strand to SEQ ID NO: 2566992
acaauugcacuaauagaau

SEQ ID NO: 2566994 - RNA, 19 nt, Artificial Sequence
  Description of Artificial Sequence: Synthetic oligonucleotide
  Sense strand starting at position 886 of SEQ ID NO: 1888931
aguuacuaauggucuuaca

SEQ ID NO: 2566995 - RNA, 19 nt, Artificial Sequence
  Description of Artificial Sequence: Synthetic oligonucleotide
  Antisense strand to SEQ ID NO: 2566994
uguaagaccauuaguaacu

SEQ ID NO: 2566996 - RNA, 19 nt, Artificial Sequence
  Description of Artificial Sequence: Synthetic oligonucleotide
  Sense strand starting at position 1274 of SEQ ID NO: 1888931
uaagaagugucaccagaag

SEQ ID NO: 2566997 - RNA, 19 nt, Artificial Sequence
  Description of Artificial Sequence: Synthetic oligonucleotide
  Antisense strand to SEQ ID NO: 2566996
cuucuggugacacuucuua

SEQ ID NO: 2566998 - RNA, 19 nt, Artificial Sequence
  Description of Artificial Sequence: Synthetic oligonucleotide
  Sense strand starting at position 1317 of SEQ ID NO: 1888931
acaucuccugaguaucagu

SEQ ID NO: 2566999 - RNA, 19 nt, Artificial Sequence
  Description of Artificial Sequence: Synthetic oligonucleotide
  Antisense strand to SEQ ID NO: 2566998
acugauacucaggagaugu

SEQ ID NO: 2567000 - RNA, 19 nt, Artificial Sequence
  Description of Artificial Sequence: Synthetic oligonucleotide
  Sense strand starting at position 1401 of SEQ ID NO: 1888931
augaaauauucuuggaugg

SEQ ID NO: 2567001 - RNA, 19 nt, Artificial Sequence
  Description of Artificial Sequence: Synthetic oligonucleotide
  Antisense strand to SEQ ID NO: 2567000
ccauccaagaauauuucau

SEQ ID NO: 2567002 - RNA, 19 nt, Artificial Sequence
  Description of Artificial Sequence: Synthetic oligonucleotide
  Sense strand starting at position 1403 of SEQ ID NO: 1888931
gaaauauucuuggauggac

SEQ ID NO: 2567003 - RNA, 19 nt, Artificial Sequence
  Description of Artificial Sequence: Synthetic oligonucleotide
  Antisense strand to SEQ ID NO: 2567002
guccauccaagaauauuuc

SEQ ID NO: 2567004 - RNA, 19 nt, Artificial Sequence
  Description of Artificial Sequence: Synthetic oligonucleotide
  Sense strand starting at position 1406 of SEQ ID NO: 1888931
auauucuuggauggacuau

SEQ ID NO: 2567005 - RNA, 19 nt, Artificial Sequence
  Description of Artificial Sequence: Synthetic oligonucleotide
  Antisense strand to SEQ ID NO: 2567004
auaguccauccaagaauau

SEQ ID NO: 2567006 - RNA, 19 nt, Artificial Sequence
  Description of Artificial Sequence: Synthetic oligonucleotide
  Sense strand starting at position 1412 of SEQ ID NO: 1888931
uuggauggacuaugcuuaa

SEQ ID NO: 2567007 - RNA, 19 nt, Artificial Sequence
  Description of Artificial Sequence: Synthetic oligonucleotide
  Antisense strand to SEQ ID NO: 2567006
uuaagcauaguccauccaa

SEQ ID NO: 2567008 - RNA, 19 nt, Artificial Sequence
  Description of Artificial Sequence: Synthetic oligonucleotide
  Sense strand starting at position 1435 of SEQ ID NO: 1888931
uuguaaacuggugacauau

SEQ ID NO: 2567009 - RNA, 19 nt, Artificial Sequence
  Description of Artificial Sequence: Synthetic oligonucleotide
  Antisense strand to SEQ ID NO: 2567008
auaugucaccaguuuacaa

SEQ ID NO: 2567010 - RNA, 19 nt, Artificial Sequence
  Description of Artificial Sequence: Synthetic oligonucleotide
  Sense strand starting at position 1444 of SEQ ID NO: 1888931
ggugacauauagcuuugaa

SEQ ID NO: 2567011 - RNA, 19 nt, Artificial Sequence
  Description of Artificial Sequence: Synthetic oligonucleotide
  Antisense strand to SEQ ID NO: 2567010
uucaaagcuauaugucacc

SEQ ID NO: 2567012 - RNA, 19 nt, Artificial Sequence
  Description of Artificial Sequence: Synthetic oligonucleotide
  Sense strand starting at position 1447 of SEQ ID NO: 1888931
gacauauagcuuugaaagg

SEQ ID NO: 2567013 - RNA, 19 nt, Artificial Sequence
  Description of Artificial Sequence: Synthetic oligonucleotide
  Antisense strand to SEQ ID NO: 2567012
ccuuucaaagcuauauguc

SEQ ID NO: 2567014 - RNA, 19 nt, Artificial Sequence
  Description of Artificial Sequence: Synthetic oligonucleotide
  Sense strand starting at position 1491 of SEQ ID NO: 1888931
uuuagucuuugagagacaa

SEQ ID NO: 2567015 - RNA, 19 nt, Artificial Sequence
  Description of Artificial Sequence: Synthetic oligonucleotide
  Antisense strand to SEQ ID NO: 2567014
uugucucucaaagacuaaa

SEQ ID NO: 2567016 - RNA, 19 nt, Artificial Sequence
  Description of Artificial Sequence: Synthetic oligonucleotide
  Sense strand starting at position 1592 of SEQ ID NO: 1888931
augacuaguugacaagaga

SEQ ID NO: 2567017 - RNA, 19 nt, Artificial Sequence
  Description of Artificial Sequence: Synthetic oligonucleotide
  Antisense strand to SEQ ID NO: 2567016
ucucuugucaacuagucau

SEQ ID NO: 2567018 - RNA, 19 nt, Artificial Sequence
  Description of Artificial Sequence: Synthetic oligonucleotide
  Sense strand starting at position 1779 of SEQ ID NO: 1888931
uaugucuagucgucuagaa

SEQ ID NO: 2567019 - RNA, 19 nt, Artificial Sequence
  Description of Artificial Sequence: Synthetic oligonucleotide
  Antisense strand to SEQ ID NO: 2567018
uucuagacgacuagacaua

SEQ ID NO: 2567020 - RNA, 19 nt, Artificial Sequence
  Description of Artificial Sequence: Synthetic oligonucleotide
  Sense strand starting at position 1781 of SEQ ID NO: 1888931
ugucuagucgucuagaagg

SEQ ID NO: 2567021 - RNA, 19 nt, Artificial Sequence
  Description of Artificial Sequence: Synthetic oligonucleotide
  Antisense strand to SEQ ID NO: 2567020
ccuucuagacgacuagaca

SEQ ID NO: 2567022 - RNA, 19 nt, Artificial Sequence
  Description of Artificial Sequence: Synthetic oligonucleotide
  Sense strand starting at position 1970 of SEQ ID NO: 1888931
augacaccuccuugugaaa

SEQ ID NO: 2567023 - RNA, 19 nt, Artificial Sequence
  Description of Artificial Sequence: Synthetic oligonucleotide
  Antisense strand to SEQ ID NO: 2567022
uuucacaaggaggugucau

SEQ ID NO: 2567024 - RNA, 19 nt, Artificial Sequence
  Description of Artificial Sequence: Synthetic oligonucleotide
  Sense strand starting at position 2061 of SEQ ID NO: 1888931
gucccuauauagguguaua

SEQ ID NO: 2567025 - RNA, 19 nt, Artificial Sequence
  Description of Artificial Sequence: Synthetic oligonucleotide
  Antisense strand to SEQ ID NO: 2567024
uauacaccuauauagggac

SEQ ID NO: 2567026 - RNA, 19 nt, Artificial Sequence
  Description of Artificial Sequence: Synthetic oligonucleotide
  Sense strand starting at position 2064 of SEQ ID NO: 1888931
ccuauauagguguauacau

SEQ ID NO: 2567027 - RNA, 19 nt, Artificial Sequence
  Description of Artificial Sequence: Synthetic oligonucleotide
  Antisense strand to SEQ ID NO: 2567026
auguauacaccuauauagg

SEQ ID NO: 2567028 - RNA, 19 nt, Artificial Sequence
  Description of Artificial Sequence: Synthetic oligonucleotide
  Sense strand starting at position 2149 of SEQ ID NO: 1888931
uccugcccugagugagauu

SEQ ID NO: 2567029 - RNA, 19 nt, Artificial Sequence
  Description of Artificial Sequence: Synthetic oligonucleotide
  Antisense strand to SEQ ID NO: 2567028
aaucucacucagggcagga

SEQ ID NO: 2567030 - RNA, 19 nt, Artificial Sequence
  Description of Artificial Sequence: Synthetic oligonucleotide
  Sense strand starting at position 2280 of SEQ ID NO: 1888931
uauacucaagccuggguua

SEQ ID NO: 2567031 - RNA, 19 nt, Artificial Sequence
  Description of Artificial Sequence: Synthetic oligonucleotide
  Antisense strand to SEQ ID NO: 2567030
uaacccaggcuugaguaua

SEQ ID NO: 2567032 - RNA, 19 nt, Artificial Sequence
  Description of Artificial Sequence: Synthetic oligonucleotide
  Sense strand starting at position 2282 of SEQ ID NO: 1888931
uacucaagccuggguuaca

SEQ ID NO: 2567033 - RNA, 19 nt, Artificial Sequence
  Description of Artificial Sequence: Synthetic oligonucleotide
  Antisense strand to SEQ ID NO: 2567032
uguaacccaggcuugagua

SEQ ID NO: 2567034 - RNA, 19 nt, Artificial Sequence
  Description of Artificial Sequence: Synthetic oligonucleotide
  Sense strand starting at position 2368 of SEQ ID NO: 1888931
auuacugguuaaguagaaa

SEQ ID NO: 2567035 - RNA, 19 nt, Artificial Sequence
  Description of Artificial Sequence: Synthetic oligonucleotide
  Antisense strand to SEQ ID NO: 2567034
uuucuacuuaaccaguaau

SEQ ID NO: 2567036 - RNA, 19 nt, Artificial Sequence
  Description of Artificial Sequence: Synthetic oligonucleotide
  Sense strand starting at position 2406 of SEQ ID NO: 1888931
gcuuucuguuguccuaaac

SEQ ID NO: 2567037 - RNA, 19 nt, Artificial Sequence
  Description of Artificial Sequence: Synthetic oligonucleotide
  Antisense strand to SEQ ID NO: 2567036
guuuaggacaacagaaagc

SEQ ID NO: 2567038 - RNA, 19 nt, Artificial Sequence
  Description of Artificial Sequence: Synthetic oligonucleotide
  Sense strand starting at position 2497 of SEQ ID NO: 1888931
ggagaagagucagagggua

SEQ ID NO: 2567039 - RNA, 19 nt, Artificial Sequence
  Description of Artificial Sequence: Synthetic oligonucleotide
  Antisense strand to SEQ ID NO: 2567038
uacccucugacucuucucc

SEQ ID NO: 2567040 - RNA, 19 nt, Artificial Sequence
  Description of Artificial Sequence: Synthetic oligonucleotide
  Sense strand starting at position 2649 of SEQ ID NO: 1888931
gcuccaugguucuuuauag

SEQ ID NO: 2567041 - RNA, 19 nt, Artificial Sequence
  Description of Artificial Sequence: Synthetic oligonucleotide
  Antisense strand to SEQ ID NO: 2567040
cuauaaagaaccauggagc

SEQ ID NO: 2567042 - RNA, 19 nt, Artificial Sequence
  Description of Artificial Sequence: Synthetic oligonucleotide
  Sense strand starting at position 2650 of SEQ ID NO: 1888931
cuccaugguucuuuauagu

SEQ ID NO: 2567043 - RNA, 19 nt, Artificial Sequence
  Description of Artificial Sequence: Synthetic oligonucleotide
  Antisense strand to SEQ ID NO: 2567042
acuauaaagaaccauggag

SEQ ID NO: 2567044 - RNA, 19 nt, Artificial Sequence
  Description of Artificial Sequence: Synthetic oligonucleotide
  Sense strand starting at position 2735 of SEQ ID NO: 1888931
uaguaauagcuguaagauu

SEQ ID NO: 2567045 - RNA, 19 nt, Artificial Sequence
  Description of Artificial Sequence: Synthetic oligonucleotide
  Antisense strand to SEQ ID NO: 2567044
aaucuuacagcuauuacua

SEQ ID NO: 2567046 - RNA, 19 nt, Artificial Sequence
  Description of Artificial Sequence: Synthetic oligonucleotide
  Sense strand starting at position 2758 of SEQ ID NO: 1888931
guucuaagauucuuugcau

SEQ ID NO: 2567047 - RNA, 19 nt, Artificial Sequence
  Description of Artificial Sequence: Synthetic oligonucleotide
  Antisense strand to SEQ ID NO: 2567046
augcaaagaaucuuagaac

SEQ ID NO: 2567048 - RNA, 19 nt, Artificial Sequence
  Description of Artificial Sequence: Synthetic oligonucleotide
  Sense strand starting at position 3068 of SEQ ID NO: 1888931
cuacucuuggcguauuagu

SEQ ID NO: 2567049 - RNA, 19 nt, Artificial Sequence
  Description of Artificial Sequence: Synthetic oligonucleotide
  Antisense strand to SEQ ID NO: 2567048
acuaauacgccaagaguag

SEQ ID NO: 2567050 - RNA, 19 nt, Artificial Sequence
  Description of Artificial Sequence: Synthetic oligonucleotide
  Sense strand starting at position 3075 of SEQ ID NO: 1888931
uggcguauuaguuagguca

SEQ ID NO: 2567051 - RNA, 19 nt, Artificial Sequence
  Description of Artificial Sequence: Synthetic oligonucleotide
  Antisense strand to SEQ ID NO: 2567050
ugaccuaacuaauacgcca

SEQ ID NO: 2567052 - RNA, 19 nt, Artificial Sequence
  Description of Artificial Sequence: Synthetic oligonucleotide
  Sense strand starting at position 3078 of SEQ ID NO: 1888931
cguauuaguuaggucacuu

SEQ ID NO: 2567053 - RNA, 19 nt, Artificial Sequence
  Description of Artificial Sequence: Synthetic oligonucleotide
  Antisense strand to SEQ ID NO: 2567052
aagugaccuaacuaauacg

SEQ ID NO: 2567054 - RNA, 19 nt, Artificial Sequence
  Description of Artificial Sequence: Synthetic oligonucleotide
  Sense strand starting at position 3082 of SEQ ID NO: 1888931
uuaguuaggucacuuuaaa

SEQ ID NO: 2567055 - RNA, 19 nt, Artificial Sequence
  Description of Artificial Sequence: Synthetic oligonucleotide
  Antisense strand to SEQ ID NO: 2567054
uuuaaagugaccuaacuaa

SEQ ID NO: 2567056 - RNA, 19 nt, Artificial Sequence
  Description of Artificial Sequence: Synthetic oligonucleotide
  Sense strand starting at position 3101 of SEQ ID NO: 1888931
aaauauagugguugcucua

SEQ ID NO: 2567057 - RNA, 19 nt, Artificial Sequence
  Description of Artificial Sequence: Synthetic oligonucleotide
  Antisense strand to SEQ ID NO: 2567056
uagagcaaccacuauauuu

SEQ ID NO: 2567058 - RNA, 19 nt, Artificial Sequence
  Description of Artificial Sequence: Synthetic oligonucleotide
  Sense strand starting at position 3342 of SEQ ID NO: 1888931
ucgccuuacccgggaaaca

SEQ ID NO: 2567059 - RNA, 19 nt, Artificial Sequence
  Description of Artificial Sequence: Synthetic oligonucleotide
  Antisense strand to SEQ ID NO: 2567058
uguuucccggguaaggcga

SEQ ID NO: 2567060 - RNA, 19 nt, Artificial Sequence
  Description of Artificial Sequence: Synthetic oligonucleotide
  Sense strand starting at position 3479 of SEQ ID NO: 1888931
aggugauucucuccugugu

SEQ ID NO: 2567061 - RNA, 19 nt, Artificial Sequence
  Description of Artificial Sequence: Synthetic oligonucleotide
  Antisense strand to SEQ ID NO: 2567060
acacaggagagaaucaccu

SEQ ID NO: 2567062 - RNA, 19 nt, Artificial Sequence
  Description of Artificial Sequence: Synthetic oligonucleotide
  Sense strand starting at position 3554 of SEQ ID NO: 1888931
gagaucgaucugugaggca

SEQ ID NO: 2567063 - RNA, 19 nt, Artificial Sequence
  Description of Artificial Sequence: Synthetic oligonucleotide
  Antisense strand to SEQ ID NO: 2567062
ugccucacagaucgaucuc

SEQ ID NO: 2567064 - RNA, 19 nt, Artificial Sequence
  Description of Artificial Sequence: Synthetic oligonucleotide
  Sense strand starting at position 43 of SEQ ID NO: 1888932
uuuagaagauucuaguuac

SEQ ID NO: 2567065 - RNA, 19 nt, Artificial Sequence
  Description of Artificial Sequence: Synthetic oligonucleotide
  Antisense strand to SEQ ID NO: 2567064
guaacuagaaucuucuaaa

SEQ ID NO: 2567066 - RNA, 19 nt, Artificial Sequence
  Description of Artificial Sequence: Synthetic oligonucleotide
  Sense strand starting at position 46 of SEQ ID NO: 1888932
agaagauucuaguuacuuu

SEQ ID NO: 2567067 - RNA, 19 nt, Artificial Sequence
  Description of Artificial Sequence: Synthetic oligonucleotide
  Antisense strand to SEQ ID NO: 2567066
aaaguaacuagaaucuucu

SEQ ID NO: 2567068 - RNA, 19 nt, Artificial Sequence
  Description of Artificial Sequence: Synthetic oligonucleotide
  Sense strand starting at position 99 of SEQ ID NO: 1888932
ucuagucaauacuauagua

SEQ ID NO: 2567069 - RNA, 19 nt, Artificial Sequence
  Description of Artificial Sequence: Synthetic oligonucleotide
  Antisense strand to SEQ ID NO: 2567068
uacuauaguauugacuaga

SEQ ID NO: 2567070 - RNA, 19 nt, Artificial Sequence
  Description of Artificial Sequence: Synthetic oligonucleotide
  Sense strand starting at position 256 of SEQ ID NO: 1888932
aaauaugaugcuuacgagu

SEQ ID NO: 2567071 - RNA, 19 nt, Artificial Sequence
  Description of Artificial Sequence: Synthetic oligonucleotide
  Antisense strand to SEQ ID NO: 2567070
acucguaagcaucauauuu

SEQ ID NO: 2567072 - RNA, 19 nt, Artificial Sequence
  Description of Artificial Sequence: Synthetic oligonucleotide
  Sense strand starting at position 279 of SEQ ID NO: 1888932
ggguuacauugugaacauu

SEQ ID NO: 2567073 - RNA, 19 nt, Artificial Sequence
  Description of Artificial Sequence: Synthetic oligonucleotide
  Antisense strand to SEQ ID NO: 2567072
aauguucacaauguaaccc

SEQ ID NO: 2567074 - RNA, 19 nt, Artificial Sequence
  Description of Artificial Sequence: Synthetic oligonucleotide
  Sense strand starting at position 572 of SEQ ID NO: 1888932
gagaaaucauaacagaggu

SEQ ID NO: 2567075 - RNA, 19 nt, Artificial Sequence
  Description of Artificial Sequence: Synthetic oligonucleotide
  Antisense strand to SEQ ID NO: 2567074
accucuguuaugauuucuc

SEQ ID NO: 2567076 - RNA, 19 nt, Artificial Sequence
  Description of Artificial Sequence: Synthetic oligonucleotide
  Sense strand starting at position 957 of SEQ ID NO: 1888932
uuucccuuucgguguuuau

SEQ ID NO: 2567077 - RNA, 19 nt, Artificial Sequence
  Description of Artificial Sequence: Synthetic oligonucleotide
  Antisense strand to SEQ ID NO: 2567076
auaaacaccgaaagggaaa

SEQ ID NO: 2567078 - RNA, 19 nt, Artificial Sequence
  Description of Artificial Sequence: Synthetic oligonucleotide
  Sense strand starting at position 1133 of SEQ ID NO: 1888932
gcuugucuuucucuugcau

SEQ ID NO: 2567079 - RNA, 19 nt, Artificial Sequence
  Description of Artificial Sequence: Synthetic oligonucleotide
  Antisense strand to SEQ ID NO: 2567078
augcaagagaaagacaagc

SEQ ID NO: 2567080 - RNA, 19 nt, Artificial Sequence
  Description of Artificial Sequence: Synthetic oligonucleotide
  Sense strand starting at position 1234 of SEQ ID NO: 1888932
guguguuuauuucccucua

SEQ ID NO: 2567081 - RNA, 19 nt, Artificial Sequence
  Description of Artificial Sequence: Synthetic oligonucleotide
  Antisense strand to SEQ ID NO: 2567080
uagagggaaauaaacacac

SEQ ID NO: 2567082 - RNA, 19 nt, Artificial Sequence
  Description of Artificial Sequence: Synthetic oligonucleotide
  Sense strand starting at position 1235 of SEQ ID NO: 1888932
uguguuuauuucccucuau

SEQ ID NO: 2567083 - RNA, 19 nt, Artificial Sequence
  Description of Artificial Sequence: Synthetic oligonucleotide
  Antisense strand to SEQ ID NO: 2567082
auagagggaaauaaacaca

SEQ ID NO: 2567084 - RNA, 19 nt, Artificial Sequence
  Description of Artificial Sequence: Synthetic oligonucleotide
  Sense strand starting at position 1236 of SEQ ID NO: 1888932
guguuuauuucccucuauu

SEQ ID NO: 2567085 - RNA, 19 nt, Artificial Sequence
  Description of Artificial Sequence: Synthetic oligonucleotide
  Antisense strand to SEQ ID NO: 2567084
aauagagggaaauaaacac

SEQ ID NO: 2567086 - RNA, 19 nt, Artificial Sequence
  Description of Artificial Sequence: Synthetic oligonucleotide
  Sense strand starting at position 1271 of SEQ ID NO: 1888932
agaguuaagcgucaccaaa

SEQ ID NO: 2567087 - RNA, 19 nt, Artificial Sequence
  Description of Artificial Sequence: Synthetic oligonucleotide
  Antisense strand to SEQ ID NO: 2567086
uuuggugacgcuuaacucu

SEQ ID NO: 2567088 - RNA, 19 nt, Artificial Sequence
  Description of Artificial Sequence: Synthetic oligonucleotide
  Sense strand starting at position 1301 of SEQ ID NO: 1888932
agagaagccuaggagauau

SEQ ID NO: 2567089 - RNA, 19 nt, Artificial Sequence
  Description of Artificial Sequence: Synthetic oligonucleotide
  Antisense strand to SEQ ID NO: 2567088
auaucuccuaggcuucucu

SEQ ID NO: 2567090 - RNA, 19 nt, Artificial Sequence
  Description of Artificial Sequence: Synthetic oligonucleotide
  Sense strand starting at position 1326 of SEQ ID NO: 1888932
aguaucaauucugucauac

SEQ ID NO: 2567091 - RNA, 19 nt, Artificial Sequence
  Description of Artificial Sequence: Synthetic oligonucleotide
  Antisense strand to SEQ ID NO: 2567090
guaugacagaauugauacu

SEQ ID NO: 2567092 - RNA, 19 nt, Artificial Sequence
  Description of Artificial Sequence: Synthetic oligonucleotide
  Sense strand starting at position 1574 of SEQ ID NO: 1888932
ggacaauccuugcaaauga

SEQ ID NO: 2567093 - RNA, 19 nt, Artificial Sequence
  Description of Artificial Sequence: Synthetic oligonucleotide
  Antisense strand to SEQ ID NO: 2567092
ucauuugcaaggauugucc

SEQ ID NO: 2567094 - RNA, 19 nt, Artificial Sequence
  Description of Artificial Sequence: Synthetic oligonucleotide
  Sense strand starting at position 1588 of SEQ ID NO: 1888932
aaugaugacuaguugauca

SEQ ID NO: 2567095 - RNA, 19 nt, Artificial Sequence
  Description of Artificial Sequence: Synthetic oligonucleotide
  Antisense strand to SEQ ID NO: 2567094
ugaucaacuagucaucauu

SEQ ID NO: 2567096 - RNA, 19 nt, Artificial Sequence
  Description of Artificial Sequence: Synthetic oligonucleotide
  Sense strand starting at position 1590 of SEQ ID NO: 1888932
ugaugacuaguugaucagu

SEQ ID NO: 2567097 - RNA, 19 nt, Artificial Sequence
  Description of Artificial Sequence: Synthetic oligonucleotide
  Antisense strand to SEQ ID NO: 2567096
acugaucaacuagucauca

SEQ ID NO: 2567098 - RNA, 19 nt, Artificial Sequence
  Description of Artificial Sequence: Synthetic oligonucleotide
  Sense strand starting at position 1592 of SEQ ID NO: 1888932
augacuaguugaucaguga

SEQ ID NO: 2567099 - RNA, 19 nt, Artificial Sequence
  Description of Artificial Sequence: Synthetic oligonucleotide
  Antisense strand to SEQ ID NO: 2567098
ucacugaucaacuagucau

SEQ ID NO: 2567100 - RNA, 19 nt, Artificial Sequence
  Description of Artificial Sequence: Synthetic oligonucleotide
  Sense strand starting at position 1647 of SEQ ID NO: 1888932
gucucagcugacgaagaau

SEQ ID NO: 2567101 - RNA, 19 nt, Artificial Sequence
  Description of Artificial Sequence: Synthetic oligonucleotide
  Antisense strand to SEQ ID NO: 2567100
auucuucgucagcugagac

SEQ ID NO: 2567102 - RNA, 19 nt, Artificial Sequence
  Description of Artificial Sequence: Synthetic oligonucleotide
  Sense strand starting at position 1673 of SEQ ID NO: 1888932
gccucuauacaacguauuu

SEQ ID NO: 2567103 - RNA, 19 nt, Artificial Sequence
  Description of Artificial Sequence: Synthetic oligonucleotide
  Antisense strand to SEQ ID NO: 2567102
aaauacguuguauagaggc

SEQ ID NO: 2567104 - RNA, 19 nt, Artificial Sequence
  Description of Artificial Sequence: Synthetic oligonucleotide
  Sense strand starting at position 1770 of SEQ ID NO: 1888932
cacaguucuuauguguagu

SEQ ID NO: 2567105 - RNA, 19 nt, Artificial Sequence
  Description of Artificial Sequence: Synthetic oligonucleotide
  Antisense strand to SEQ ID NO: 2567104
acuacacauaagaacugug

SEQ ID NO: 2567106 - RNA, 19 nt, Artificial Sequence
  Description of Artificial Sequence: Synthetic oligonucleotide
  Sense strand starting at position 1776 of SEQ ID NO: 1888932
ucuuauguguagucgucua

SEQ ID NO: 2567107 - RNA, 19 nt, Artificial Sequence
  Description of Artificial Sequence: Synthetic oligonucleotide
  Antisense strand to SEQ ID NO: 2567106
uagacgacuacacauaaga

SEQ ID NO: 2567108 - RNA, 19 nt, Artificial Sequence
  Description of Artificial Sequence: Synthetic oligonucleotide
  Sense strand starting at position 1781 of SEQ ID NO: 1888932
uguguagucgucuagaagg

SEQ ID NO: 2567109 - RNA, 19 nt, Artificial Sequence
  Description of Artificial Sequence: Synthetic oligonucleotide
  Antisense strand to SEQ ID NO: 2567108
ccuucuagacgacuacaca

SEQ ID NO: 2567110 - RNA, 19 nt, Artificial Sequence
  Description of Artificial Sequence: Synthetic oligonucleotide
  Sense strand starting at position 1783 of SEQ ID NO: 1888932
uguagucgucuagaaggca

SEQ ID NO: 2567111 - RNA, 19 nt, Artificial Sequence
  Description of Artificial Sequence: Synthetic oligonucleotide
  Antisense strand to SEQ ID NO: 2567110
ugccuucuagacgacuaca

SEQ ID NO: 2567112 - RNA, 19 nt, Artificial Sequence
  Description of Artificial Sequence: Synthetic oligonucleotide
  Sense strand starting at position 1921 of SEQ ID NO: 1888932
guacauuacucuucucaga

SEQ ID NO: 2567113 - RNA, 19 nt, Artificial Sequence
  Description of Artificial Sequence: Synthetic oligonucleotide
  Antisense strand to SEQ ID NO: 2567112
ucugagaagaguaauguac

SEQ ID NO: 2567114 - RNA, 19 nt, Artificial Sequence
  Description of Artificial Sequence: Synthetic oligonucleotide
  Sense strand starting at position 1926 of SEQ ID NO: 1888932
uuacucuucucagaaaggu

SEQ ID NO: 2567115 - RNA, 19 nt, Artificial Sequence
  Description of Artificial Sequence: Synthetic oligonucleotide
  Antisense strand to SEQ ID NO: 2567114
accuuucugagaagaguaa

SEQ ID NO: 2567116 - RNA, 19 nt, Artificial Sequence
  Description of Artificial Sequence: Synthetic oligonucleotide
  Sense strand starting at position 1970 of SEQ ID NO: 1888932
acgacaccuccuugagaaa

SEQ ID NO: 2567117 - RNA, 19 nt, Artificial Sequence
  Description of Artificial Sequence: Synthetic oligonucleotide
  Antisense strand to SEQ ID NO: 2567116
uuucucaaggaggugucgu

SEQ ID NO: 2567118 - RNA, 19 nt, Artificial Sequence
  Description of Artificial Sequence: Synthetic oligonucleotide
  Sense strand starting at position 2148 of SEQ ID NO: 1888932
cccugcccugagugagaua

SEQ ID NO: 2567119 - RNA, 19 nt, Artificial Sequence
  Description of Artificial Sequence: Synthetic oligonucleotide
  Antisense strand to SEQ ID NO: 2567118
uaucucacucagggcaggg

SEQ ID NO: 2567120 - RNA, 19 nt, Artificial Sequence
  Description of Artificial Sequence: Synthetic oligonucleotide
  Sense strand starting at position 2151 of SEQ ID NO: 1888932
ugcccugagugagauauua

SEQ ID NO: 2567121 - RNA, 19 nt, Artificial Sequence
  Description of Artificial Sequence: Synthetic oligonucleotide
  Antisense strand to SEQ ID NO: 2567120
uaauaucucacucagggca

SEQ ID NO: 2567122 - RNA, 19 nt, Artificial Sequence
  Description of Artificial Sequence: Synthetic oligonucleotide
  Sense strand starting at position 2159 of SEQ ID NO: 1888932
gugagauauuaacaugcag

SEQ ID NO: 2567123 - RNA, 19 nt, Artificial Sequence
  Description of Artificial Sequence: Synthetic oligonucleotide
  Antisense strand to SEQ ID NO: 2567122
cugcauguuaauaucucac

SEQ ID NO: 2567124 - RNA, 19 nt, Artificial Sequence
  Description of Artificial Sequence: Synthetic oligonucleotide
  Sense strand starting at position 2218 of SEQ ID NO: 1888932
caugcauuggcgugaucuu

SEQ ID NO: 2567125 - RNA, 19 nt, Artificial Sequence
  Description of Artificial Sequence: Synthetic oligonucleotide
  Antisense strand to SEQ ID NO: 2567124
aagaucacgccaaugcaug

SEQ ID NO: 2567126 - RNA, 19 nt, Artificial Sequence
  Description of Artificial Sequence: Synthetic oligonucleotide
  Sense strand starting at position 2299 of SEQ ID NO: 1888932
ggauuaaagcugugcacca

SEQ ID NO: 2567127 - RNA, 19 nt, Artificial Sequence
  Description of Artificial Sequence: Synthetic oligonucleotide
  Antisense strand to SEQ ID NO: 2567126
uggugcacagcuuuaaucc

SEQ ID NO: 2567128 - RNA, 19 nt, Artificial Sequence
  Description of Artificial Sequence: Synthetic oligonucleotide
  Sense strand starting at position 2353 of SEQ ID NO: 1888932
ugagcaaugauagagcuuu

SEQ ID NO: 2567129 - RNA, 19 nt, Artificial Sequence
  Description of Artificial Sequence: Synthetic oligonucleotide
  Antisense strand to SEQ ID NO: 2567128
aaagcucuaucauugcuca

SEQ ID NO: 2567130 - RNA, 19 nt, Artificial Sequence
  Description of Artificial Sequence: Synthetic oligonucleotide
  Sense strand starting at position 2390 of SEQ ID NO: 1888932
agaggugaguuauccuugu

SEQ ID NO: 2567131 - RNA, 19 nt, Artificial Sequence
  Description of Artificial Sequence: Synthetic oligonucleotide
  Antisense strand to SEQ ID NO: 2567130
acaaggauaacucaccucu

SEQ ID NO: 2567132 - RNA, 19 nt, Artificial Sequence
  Description of Artificial Sequence: Synthetic oligonucleotide
  Sense strand starting at position 2394 of SEQ ID NO: 1888932
gugaguuauccuugucuga

SEQ ID NO: 2567133 - RNA, 19 nt, Artificial Sequence
  Description of Artificial Sequence: Synthetic oligonucleotide
  Antisense strand to SEQ ID NO: 2567132
ucagacaaggauaacucac

SEQ ID NO: 2567134 - RNA, 19 nt, Artificial Sequence
  Description of Artificial Sequence: Synthetic oligonucleotide
  Sense strand starting at position 2396 of SEQ ID NO: 1888932
gaguuauccuugucugaau

SEQ ID NO: 2567135 - RNA, 19 nt, Artificial Sequence
  Description of Artificial Sequence: Synthetic oligonucleotide
  Antisense strand to SEQ ID NO: 2567134
auucagacaaggauaacuc

SEQ ID NO: 2567136 - RNA, 19 nt, Artificial Sequence
  Description of Artificial Sequence: Synthetic oligonucleotide
  Sense strand starting at position 2397 of SEQ ID NO: 1888932
aguuauccuugucugaauu

SEQ ID NO: 2567137 - RNA, 19 nt, Artificial Sequence
  Description of Artificial Sequence: Synthetic oligonucleotide
  Antisense strand to SEQ ID NO: 2567136
aauucagacaaggauaacu

SEQ ID NO: 2567138 - RNA, 19 nt, Artificial Sequence
  Description of Artificial Sequence: Synthetic oligonucleotide
  Sense strand starting at position 2398 of SEQ ID NO: 1888932
guuauccuugucugaauua

SEQ ID NO: 2567139 - RNA, 19 nt, Artificial Sequence
  Description of Artificial Sequence: Synthetic oligonucleotide
  Antisense strand to SEQ ID NO: 2567138
uaauucagacaaggauaac

SEQ ID NO: 2567140 - RNA, 19 nt, Artificial Sequence
  Description of Artificial Sequence: Synthetic oligonucleotide
  Sense strand starting at position 2408 of SEQ ID NO: 1888932
ucugaauuaucccauuggu

SEQ ID NO: 2567141 - RNA, 19 nt, Artificial Sequence
  Description of Artificial Sequence: Synthetic oligonucleotide
  Antisense strand to SEQ ID NO: 2567140
accaaugggauaauucaga

SEQ ID NO: 2567142 - RNA, 19 nt, Artificial Sequence
  Description of Artificial Sequence: Synthetic oligonucleotide
  Sense strand starting at position 2533 of SEQ ID NO: 1888932
uauagucauuuggguuaua

SEQ ID NO: 2567143 - RNA, 19 nt, Artificial Sequence
  Description of Artificial Sequence: Synthetic oligonucleotide
  Antisense strand to SEQ ID NO: 2567142
uauaacccaaaugacuaua

SEQ ID NO: 2567144 - RNA, 19 nt, Artificial Sequence
  Description of Artificial Sequence: Synthetic oligonucleotide
  Sense strand starting at position 31 of SEQ ID NO: 1888933
agccauagagaaugguuau

SEQ ID NO: 2567145 - RNA, 19 nt, Artificial Sequence
  Description of Artificial Sequence: Synthetic oligonucleotide
  Antisense strand to SEQ ID NO: 2567144
auaaccauucucuauggcu

SEQ ID NO: 2567146 - RNA, 19 nt, Artificial Sequence
  Description of Artificial Sequence: Synthetic oligonucleotide
  Sense strand starting at position 32 of SEQ ID NO: 1888933
gccauagagaaugguuaug

SEQ ID NO: 2567147 - RNA, 19 nt, Artificial Sequence
  Description of Artificial Sequence: Synthetic oligonucleotide
  Antisense strand to SEQ ID NO: 2567146
cauaaccauucucuauggc

SEQ ID NO: 2567148 - RNA, 19 nt, Artificial Sequence
  Description of Artificial Sequence: Synthetic oligonucleotide
  Sense strand starting at position 85 of SEQ ID NO: 1888933
gggcaacuguaacuaugau

SEQ ID NO: 2567149 - RNA, 19 nt, Artificial Sequence
  Description of Artificial Sequence: Synthetic oligonucleotide
  Antisense strand to SEQ ID NO: 2567148
aucauaguuacaguugccc

SEQ ID NO: 2567150 - RNA, 19 nt, Artificial Sequence
  Description of Artificial Sequence: Synthetic oligonucleotide
  Sense strand starting at position 250 of SEQ ID NO: 1888933
cacauacgucuguaugcaa

SEQ ID NO: 2567151 - RNA, 19 nt, Artificial Sequence
  Description of Artificial Sequence: Synthetic oligonucleotide
  Antisense strand to SEQ ID NO: 2567150
uugcauacagacguaugug

SEQ ID NO: 2567152 - RNA, 19 nt, Artificial Sequence
  Description of Artificial Sequence: Synthetic oligonucleotide
  Sense strand starting at position 261 of SEQ ID NO: 1888933
guaugcaaacuuuacagua

SEQ ID NO: 2567153 - RNA, 19 nt, Artificial Sequence
  Description of Artificial Sequence: Synthetic oligonucleotide
  Antisense strand to SEQ ID NO: 2567152
uacuguaaaguuugcauac

SEQ ID NO: 2567154 - RNA, 19 nt, Artificial Sequence
  Description of Artificial Sequence: Synthetic oligonucleotide
  Sense strand starting at position 435 of SEQ ID NO: 1888933
auagcaugagacugcaauu

SEQ ID NO: 2567155 - RNA, 19 nt, Artificial Sequence
  Description of Artificial Sequence: Synthetic oligonucleotide
  Antisense strand to SEQ ID NO: 2567154
aauugcagucucaugcuau

SEQ ID NO: 2567156 - RNA, 19 nt, Artificial Sequence
  Description of Artificial Sequence: Synthetic oligonucleotide
  Sense strand starting at position 580 of SEQ ID NO: 1888933
ucucuaucaugaucauagu

SEQ ID NO: 2567157 - RNA, 19 nt, Artificial Sequence
  Description of Artificial Sequence: Synthetic oligonucleotide
  Antisense strand to SEQ ID NO: 2567156
acuaugaucaugauagaga

SEQ ID NO: 2567158 - RNA, 19 nt, Artificial Sequence
  Description of Artificial Sequence: Synthetic oligonucleotide
  Sense strand starting at position 586 of SEQ ID NO: 1888933
ucaugaucauaguaauaga

SEQ ID NO: 2567159 - RNA, 19 nt, Artificial Sequence
  Description of Artificial Sequence: Synthetic oligonucleotide
  Antisense strand to SEQ ID NO: 2567158
ucuauuacuaugaucauga

SEQ ID NO: 2567160 - RNA, 19 nt, Artificial Sequence
  Description of Artificial Sequence: Synthetic oligonucleotide
  Sense strand starting at position 721 of SEQ ID NO: 1888933
ucugacacacucuggaauu

SEQ ID NO: 2567161 - RNA, 19 nt, Artificial Sequence
  Description of Artificial Sequence: Synthetic oligonucleotide
  Antisense strand to SEQ ID NO: 2567160
aauuccagagugugucaga

SEQ ID NO: 2567162 - RNA, 19 nt, Artificial Sequence
  Description of Artificial Sequence: Synthetic oligonucleotide
  Sense strand starting at position 979 of SEQ ID NO: 1888933
cgguguggccaugauaaga

SEQ ID NO: 2567163 - RNA, 19 nt, Artificial Sequence
  Description of Artificial Sequence: Synthetic oligonucleotide
  Antisense strand to SEQ ID NO: 2567162
ucuuaucauggccacaccg

SEQ ID NO: 2567164 - RNA, 19 nt, Artificial Sequence
  Description of Artificial Sequence: Synthetic oligonucleotide
  Sense strand starting at position 984 of SEQ ID NO: 1888933
uggccaugauaagaaauaa

SEQ ID NO: 2567165 - RNA, 19 nt, Artificial Sequence
  Description of Artificial Sequence: Synthetic oligonucleotide
  Antisense strand to SEQ ID NO: 2567164
uuauuucuuaucauggcca

SEQ ID NO: 2567166 - RNA, 19 nt, Artificial Sequence
  Description of Artificial Sequence: Synthetic oligonucleotide
  Sense strand starting at position 1013 of SEQ ID NO: 1888933
ucuccugucuugguaagua

SEQ ID NO: 2567167 - RNA, 19 nt, Artificial Sequence
  Description of Artificial Sequence: Synthetic oligonucleotide
  Antisense strand to SEQ ID NO: 2567166
uacuuaccaagacaggaga

SEQ ID NO: 2567168 - RNA, 19 nt, Artificial Sequence
  Description of Artificial Sequence: Synthetic oligonucleotide
  Sense strand starting at position 1017 of SEQ ID NO: 1888933
cugucuugguaaguaaaug

SEQ ID NO: 2567169 - RNA, 19 nt, Artificial Sequence
  Description of Artificial Sequence: Synthetic oligonucleotide
  Antisense strand to SEQ ID NO: 2567168
cauuuacuuaccaagacag

SEQ ID NO: 2567170 - RNA, 19 nt, Artificial Sequence
  Description of Artificial Sequence: Synthetic oligonucleotide
  Sense strand starting at position 1018 of SEQ ID NO: 1888933
ugucuugguaaguaaaugu

SEQ ID NO: 2567171 - RNA, 19 nt, Artificial Sequence
  Description of Artificial Sequence: Synthetic oligonucleotide
  Antisense strand to SEQ ID NO: 2567170
acauuuacuuaccaagaca

SEQ ID NO: 2567172 - RNA, 19 nt, Artificial Sequence
  Description of Artificial Sequence: Synthetic oligonucleotide
  Sense strand starting at position 1043 of SEQ ID NO: 1888933
aggauugaaguauggugau

SEQ ID NO: 2567173 - RNA, 19 nt, Artificial Sequence
  Description of Artificial Sequence: Synthetic oligonucleotide
  Antisense strand to SEQ ID NO: 2567172
aucaccauacuucaauccu

SEQ ID NO: 2567174 - RNA, 19 nt, Artificial Sequence
  Description of Artificial Sequence: Synthetic oligonucleotide
  Sense strand starting at position 1056 of SEQ ID NO: 1888933
ggugauacauaugccuuau

SEQ ID NO: 2567175 - RNA, 19 nt, Artificial Sequence
  Description of Artificial Sequence: Synthetic oligonucleotide
  Antisense strand to SEQ ID NO: 2567174
auaaggcauauguaucacc

SEQ ID NO: 2567176 - RNA, 19 nt, Artificial Sequence
  Description of Artificial Sequence: Synthetic oligonucleotide
  Sense strand starting at position 1183 of SEQ ID NO: 1888933
auuugugucuugcuccuua

SEQ ID NO: 2567177 - RNA, 19 nt, Artificial Sequence
  Description of Artificial Sequence: Synthetic oligonucleotide
  Antisense strand to SEQ ID NO: 2567176
uaaggagcaagacacaaau

SEQ ID NO: 2567178 - RNA, 19 nt, Artificial Sequence
  Description of Artificial Sequence: Synthetic oligonucleotide
  Sense strand starting at position 1344 of SEQ ID NO: 1888933
acgcauaagcccuaauaaa

SEQ ID NO: 2567179 - RNA, 19 nt, Artificial Sequence
  Description of Artificial Sequence: Synthetic oligonucleotide
  Antisense strand to SEQ ID NO: 2567178
uuuauuagggcuuaugcgu

SEQ ID NO: 2567180 - RNA, 19 nt, Artificial Sequence
  Description of Artificial Sequence: Synthetic oligonucleotide
  Sense strand starting at position 1362 of SEQ ID NO: 1888933
acugaugacuuguagagga

SEQ ID NO: 2567181 - RNA, 19 nt, Artificial Sequence
  Description of Artificial Sequence: Synthetic oligonucleotide
  Antisense strand to SEQ ID NO: 2567180
uccucuacaagucaucagu

SEQ ID NO: 2567182 - RNA, 19 nt, Artificial Sequence
  Description of Artificial Sequence: Synthetic oligonucleotide
  Sense strand starting at position 1459 of SEQ ID NO: 1888933
ugagcuucagcagaguaga

SEQ ID NO: 2567183 - RNA, 19 nt, Artificial Sequence
  Description of Artificial Sequence: Synthetic oligonucleotide
  Antisense strand to SEQ ID NO: 2567182
ucuacucugcugaagcuca

SEQ ID NO: 2567184 - RNA, 19 nt, Artificial Sequence
  Description of Artificial Sequence: Synthetic oligonucleotide
  Sense strand starting at position 1560 of SEQ ID NO: 1888933
guuaaaggauuugagggau

SEQ ID NO: 2567185 - RNA, 19 nt, Artificial Sequence
  Description of Artificial Sequence: Synthetic oligonucleotide
  Antisense strand to SEQ ID NO: 2567184
aucccucaaauccuuuaac

SEQ ID NO: 2567186 - RNA, 19 nt, Artificial Sequence
  Description of Artificial Sequence: Synthetic oligonucleotide
  Sense strand starting at position 1660 of SEQ ID NO: 1888933
ggcacacugucaucacacu

SEQ ID NO: 2567187 - RNA, 19 nt, Artificial Sequence
  Description of Artificial Sequence: Synthetic oligonucleotide
  Antisense strand to SEQ ID NO: 2567186
agugugaugacagugugcc

SEQ ID NO: 2567188 - RNA, 19 nt, Artificial Sequence
  Description of Artificial Sequence: Synthetic oligonucleotide
  Sense strand starting at position 1754 of SEQ ID NO: 1888933
aggacuugccucugaaagg

SEQ ID NO: 2567189 - RNA, 19 nt, Artificial Sequence
  Description of Artificial Sequence: Synthetic oligonucleotide
  Antisense strand to SEQ ID NO: 2567188
ccuuucagaggcaaguccu

SEQ ID NO: 2567190 - RNA, 19 nt, Artificial Sequence
  Description of Artificial Sequence: Synthetic oligonucleotide
  Sense strand starting at position 1818 of SEQ ID NO: 1888933
agagguauuauacgugcau

SEQ ID NO: 2567191 - RNA, 19 nt, Artificial Sequence
  Description of Artificial Sequence: Synthetic oligonucleotide
  Antisense strand to SEQ ID NO: 2567190
augcacguauaauaccucu

SEQ ID NO: 2567192 - RNA, 19 nt, Artificial Sequence
  Description of Artificial Sequence: Synthetic oligonucleotide
  Sense strand starting at position 1819 of SEQ ID NO: 1888933
gagguauuauacgugcauu

SEQ ID NO: 2567193 - RNA, 19 nt, Artificial Sequence
  Description of Artificial Sequence: Synthetic oligonucleotide
  Antisense strand to SEQ ID NO: 2567192
aaugcacguauaauaccuc

SEQ ID NO: 2567194 - RNA, 19 nt, Artificial Sequence
  Description of Artificial Sequence: Synthetic oligonucleotide
  Sense strand starting at position 1820 of SEQ ID NO: 1888933
agguauuauacgugcauuu

SEQ ID NO: 2567195 - RNA, 19 nt, Artificial Sequence
  Description of Artificial Sequence: Synthetic oligonucleotide
  Antisense strand to SEQ ID NO: 2567194
aaaugcacguauaauaccu

SEQ ID NO: 2567196 - RNA, 19 nt, Artificial Sequence
  Description of Artificial Sequence: Synthetic oligonucleotide
  Sense strand starting at position 1906 of SEQ ID NO: 1888933
acgugucaugcguuacucu

SEQ ID NO: 2567197 - RNA, 19 nt, Artificial Sequence
  Description of Artificial Sequence: Synthetic oligonucleotide
  Antisense strand to SEQ ID NO: 2567196
agaguaacgcaugacacgu

SEQ ID NO: 2567198 - RNA, 19 nt, Artificial Sequence
  Description of Artificial Sequence: Synthetic oligonucleotide
  Sense strand starting at position 1951 of SEQ ID NO: 1888933
auuauacaugauugucacu

SEQ ID NO: 2567199 - RNA, 19 nt, Artificial Sequence
  Description of Artificial Sequence: Synthetic oligonucleotide
  Antisense strand to SEQ ID NO: 2567198
agugacaaucauguauaau

SEQ ID NO: 2567200 - RNA, 19 nt, Artificial Sequence
  Description of Artificial Sequence: Synthetic oligonucleotide
  Sense strand starting at position 2070 of SEQ ID NO: 1888933
gugaguagacacugacagu

SEQ ID NO: 2567201 - RNA, 19 nt, Artificial Sequence
  Description of Artificial Sequence: Synthetic oligonucleotide
  Antisense strand to SEQ ID NO: 2567200
acugucagugucuacucac

SEQ ID NO: 2567202 - RNA, 19 nt, Artificial Sequence
  Description of Artificial Sequence: Synthetic oligonucleotide
  Sense strand starting at position 2080 of SEQ ID NO: 1888933
acugacaguuguccaaaua

SEQ ID NO: 2567203 - RNA, 19 nt, Artificial Sequence
  Description of Artificial Sequence: Synthetic oligonucleotide
  Antisense strand to SEQ ID NO: 2567202
uauuuggacaacugucagu

SEQ ID NO: 2567204 - RNA, 19 nt, Artificial Sequence
  Description of Artificial Sequence: Synthetic oligonucleotide
  Sense strand starting at position 2241 of SEQ ID NO: 1888933
cgcaaugaaucagcaguau

SEQ ID NO: 2567205 - RNA, 19 nt, Artificial Sequence
  Description of Artificial Sequence: Synthetic oligonucleotide
  Antisense strand to SEQ ID NO: 2567204
auacugcugauucauugcg

SEQ ID NO: 2567206 - RNA, 19 nt, Artificial Sequence
  Description of Artificial Sequence: Synthetic oligonucleotide
  Sense strand starting at position 2453 of SEQ ID NO: 1888933
uuucuuagacccuggagua

SEQ ID NO: 2567207 - RNA, 19 nt, Artificial Sequence
  Description of Artificial Sequence: Synthetic oligonucleotide
  Antisense strand to SEQ ID NO: 2567206
uacuccagggucuaagaaa

SEQ ID NO: 2567208 - RNA, 19 nt, Artificial Sequence
  Description of Artificial Sequence: Synthetic oligonucleotide
  Sense strand starting at position 2454 of SEQ ID NO: 1888933
uucuuagacccuggaguaa

SEQ ID NO: 2567209 - RNA, 19 nt, Artificial Sequence
  Description of Artificial Sequence: Synthetic oligonucleotide
  Antisense strand to SEQ ID NO: 2567208
uuacuccagggucuaagaa

SEQ ID NO: 2567210 - RNA, 19 nt, Artificial Sequence
  Description of Artificial Sequence: Synthetic oligonucleotide
  Sense strand starting at position 3434 of SEQ ID NO: 1888933
uuuguuaucagagagcuug

SEQ ID NO: 2567211 - RNA, 19 nt, Artificial Sequence
  Description of Artificial Sequence: Synthetic oligonucleotide
  Antisense strand to SEQ ID NO: 2567210
caagcucucugauaacaaa

SEQ ID NO: 2567212 - RNA, 19 nt, Artificial Sequence
  Description of Artificial Sequence: Synthetic oligonucleotide
  Sense strand starting at position 3440 of SEQ ID NO: 1888933
aucagagagcuugacugua

SEQ ID NO: 2567213 - RNA, 19 nt, Artificial Sequence
  Description of Artificial Sequence: Synthetic oligonucleotide
  Antisense strand to SEQ ID NO: 2567212
uacagucaagcucucugau

SEQ ID NO: 2567214 - RNA, 19 nt, Artificial Sequence
  Description of Artificial Sequence: Synthetic oligonucleotide
  Sense strand starting at position 3442 of SEQ ID NO: 1888933
cagagagcuugacuguaau

SEQ ID NO: 2567215 - RNA, 19 nt, Artificial Sequence
  Description of Artificial Sequence: Synthetic oligonucleotide
  Antisense strand to SEQ ID NO: 2567214
auuacagucaagcucucug

SEQ ID NO: 2567216 - RNA, 19 nt, Artificial Sequence
  Description of Artificial Sequence: Synthetic oligonucleotide
  Sense strand starting at position 3625 of SEQ ID NO: 1888933
agacauaccugugcacagu

SEQ ID NO: 2567217 - RNA, 19 nt, Artificial Sequence
  Description of Artificial Sequence: Synthetic oligonucleotide
  Antisense strand to SEQ ID NO: 2567216
acugugcacagguaugucu

SEQ ID NO: 2567218 - RNA, 19 nt, Artificial Sequence
  Description of Artificial Sequence: Synthetic oligonucleotide
  Sense strand starting at position 3712 of SEQ ID NO: 1888933
uuuccuuguggucaaggau

SEQ ID NO: 2567219 - RNA, 19 nt, Artificial Sequence
  Description of Artificial Sequence: Synthetic oligonucleotide
  Antisense strand to SEQ ID NO: 2567218
auccuugaccacaaggaaa

SEQ ID NO: 2567220 - RNA, 19 nt, Artificial Sequence
  Description of Artificial Sequence: Synthetic oligonucleotide
  Sense strand starting at position 3715 of SEQ ID NO: 1888933
ccuuguggucaaggauauu

SEQ ID NO: 2567221 - RNA, 19 nt, Artificial Sequence
  Description of Artificial Sequence: Synthetic oligonucleotide
  Antisense strand to SEQ ID NO: 2567220
aauauccuugaccacaagg

SEQ ID NO: 2567222 - RNA, 19 nt, Artificial Sequence
  Description of Artificial Sequence: Synthetic oligonucleotide
  Sense strand starting at position 3877 of SEQ ID NO: 1888933
cugccuugggauuauacua

SEQ ID NO: 2567223 - RNA, 19 nt, Artificial Sequence
  Description of Artificial Sequence: Synthetic oligonucleotide
  Antisense strand to SEQ ID NO: 2567222
uaguauaaucccaaggcag

SEQ ID NO: 2567224 - RNA, 19 nt, Artificial Sequence
  Description of Artificial Sequence: Synthetic oligonucleotide
  Sense strand starting at position 731 of SEQ ID NO: 1888934
uguggacacugacaaguuu

SEQ ID NO: 2567225 - RNA, 19 nt, Artificial Sequence
  Description of Artificial Sequence: Synthetic oligonucleotide
  Antisense strand to SEQ ID NO: 2567224
aaacuugucaguguccaca

SEQ ID NO: 2567226 - RNA, 19 nt, Artificial Sequence
  Description of Artificial Sequence: Synthetic oligonucleotide
  Sense strand starting at position 748 of SEQ ID NO: 1888934
uuuguuaucagagagcuug

SEQ ID NO: 2567227 - RNA, 19 nt, Artificial Sequence
  Description of Artificial Sequence: Synthetic oligonucleotide
  Antisense strand to SEQ ID NO: 2567226
caagcucucugauaacaaa

SEQ ID NO: 2567228 - RNA, 19 nt, Artificial Sequence
  Description of Artificial Sequence: Synthetic oligonucleotide
  Sense strand starting at position 754 of SEQ ID NO: 1888934
aucagagagcuugacugua

SEQ ID NO: 2567229 - RNA, 19 nt, Artificial Sequence
  Description of Artificial Sequence: Synthetic oligonucleotide
  Antisense strand to SEQ ID NO: 2567228
uacagucaagcucucugau

SEQ ID NO: 2567230 - RNA, 19 nt, Artificial Sequence
  Description of Artificial Sequence: Synthetic oligonucleotide
  Sense strand starting at position 756 of SEQ ID NO: 1888934
cagagagcuugacuguaau

SEQ ID NO: 2567231 - RNA, 19 nt, Artificial Sequence
  Description of Artificial Sequence: Synthetic oligonucleotide
  Antisense strand to SEQ ID NO: 2567230
auuacagucaagcucucug

SEQ ID NO: 2567232 - RNA, 19 nt, Artificial Sequence
  Description of Artificial Sequence: Synthetic oligonucleotide
  Sense strand starting at position 939 of SEQ ID NO: 1888934
agacauaccugugcacagu

SEQ ID NO: 2567233 - RNA, 19 nt, Artificial Sequence
  Description of Artificial Sequence: Synthetic oligonucleotide
  Antisense strand to SEQ ID NO: 2567232
acugugcacagguaugucu

SEQ ID NO: 2567234 - RNA, 19 nt, Artificial Sequence
  Description of Artificial Sequence: Synthetic oligonucleotide
  Sense strand starting at position 1026 of SEQ ID NO: 1888934
uuuccuuguggucaaggau

SEQ ID NO: 2567235 - RNA, 19 nt, Artificial Sequence
  Description of Artificial Sequence: Synthetic oligonucleotide
  Antisense strand to SEQ ID NO: 2567234
auccuugaccacaaggaaa

SEQ ID NO: 2567236 - RNA, 19 nt, Artificial Sequence
  Description of Artificial Sequence: Synthetic oligonucleotide
  Sense strand starting at position 1029 of SEQ ID NO: 1888934
ccuuguggucaaggauauu

SEQ ID NO: 2567237 - RNA, 19 nt, Artificial Sequence
  Description of Artificial Sequence: Synthetic oligonucleotide
  Antisense strand to SEQ ID NO: 2567236
aauauccuugaccacaagg

SEQ ID NO: 2567238 - RNA, 19 nt, Artificial Sequence
  Description of Artificial Sequence: Synthetic oligonucleotide
  Sense strand starting at position 1191 of SEQ ID NO: 1888934
cugccuugggauuauacua

SEQ ID NO: 2567239 - RNA, 19 nt, Artificial Sequence
  Description of Artificial Sequence: Synthetic oligonucleotide
  Antisense strand to SEQ ID NO: 2567238
uaguauaaucccaaggcag

SEQ ID NO: 2567240 - RNA, 19 nt, Artificial Sequence
  Description of Artificial Sequence: Synthetic oligonucleotide
  Sense strand starting at position 1729 of SEQ ID NO: 1888934
ugaugugcuugaugauuuc

SEQ ID NO: 2567241 - RNA, 19 nt, Artificial Sequence
  Description of Artificial Sequence: Synthetic oligonucleotide
  Antisense strand to SEQ ID NO: 2567240
gaaaucaucaagcacauca

SEQ ID NO: 2567242 - RNA, 19 nt, Artificial Sequence
  Description of Artificial Sequence: Synthetic oligonucleotide
  Sense strand starting at position 1735 of SEQ ID NO: 1888934
gcuugaugauuuccuguug

SEQ ID NO: 2567243 - RNA, 19 nt, Artificial Sequence
  Description of Artificial Sequence: Synthetic oligonucleotide
  Antisense strand to SEQ ID NO: 2567242
caacaggaaaucaucaagc

SEQ ID NO: 2567244 - RNA, 19 nt, Artificial Sequence
  Description of Artificial Sequence: Synthetic oligonucleotide
  Sense strand starting at position 1740 of SEQ ID NO: 1888934
augauuuccuguugaacaa

SEQ ID NO: 2567245 - RNA, 19 nt, Artificial Sequence
  Description of Artificial Sequence: Synthetic oligonucleotide
  Antisense strand to SEQ ID NO: 2567244
uuguucaacaggaaaucau

SEQ ID NO: 2567246 - RNA, 19 nt, Artificial Sequence
  Description of Artificial Sequence: Synthetic oligonucleotide
  Sense strand starting at position 2253 of SEQ ID NO: 1888934
ugcaaugaaucagcaguau

SEQ ID NO: 2567247 - RNA, 19 nt, Artificial Sequence
  Description of Artificial Sequence: Synthetic oligonucleotide
  Antisense strand to SEQ ID NO: 2567246
auacugcugauucauugca

SEQ ID NO: 2567248 - RNA, 19 nt, Artificial Sequence
  Description of Artificial Sequence: Synthetic oligonucleotide
  Sense strand starting at position 2916 of SEQ ID NO: 1888934
acauguuacuuacacguau

SEQ ID NO: 2567249 - RNA, 19 nt, Artificial Sequence
  Description of Artificial Sequence: Synthetic oligonucleotide
  Antisense strand to SEQ ID NO: 2567248
auacguguaaguaacaugu

SEQ ID NO: 2567250 - RNA, 19 nt, Artificial Sequence
  Description of Artificial Sequence: Synthetic oligonucleotide
  Sense strand starting at position 3236 of SEQ ID NO: 1888934
cuaagaagaugucaacucu

SEQ ID NO: 2567251 - RNA, 19 nt, Artificial Sequence
  Description of Artificial Sequence: Synthetic oligonucleotide
  Antisense strand to SEQ ID NO: 2567250
agaguugacaucuucuuag

SEQ ID NO: 2567252 - RNA, 19 nt, Artificial Sequence
  Description of Artificial Sequence: Synthetic oligonucleotide
  Sense strand starting at position 218 of SEQ ID NO: 1888935
acauguuacuuacacguau

SEQ ID NO: 2567253 - RNA, 19 nt, Artificial Sequence
  Description of Artificial Sequence: Synthetic oligonucleotide
  Antisense strand to SEQ ID NO: 2567252
auacguguaaguaacaugu

SEQ ID NO: 2567254 - RNA, 19 nt, Artificial Sequence
  Description of Artificial Sequence: Synthetic oligonucleotide
  Sense strand starting at position 731 of SEQ ID NO: 1888935
uguggacacugauaaguuu

SEQ ID NO: 2567255 - RNA, 19 nt, Artificial Sequence
  Description of Artificial Sequence: Synthetic oligonucleotide
  Antisense strand to SEQ ID NO: 2567254
aaacuuaucaguguccaca

SEQ ID NO: 2567256 - RNA, 19 nt, Artificial Sequence
  Description of Artificial Sequence: Synthetic oligonucleotide
  Sense strand starting at position 748 of SEQ ID NO: 1888935
uuuguuaucggagagcuug

SEQ ID NO: 2567257 - RNA, 19 nt, Artificial Sequence
  Description of Artificial Sequence: Synthetic oligonucleotide
  Antisense strand to SEQ ID NO: 2567256
caagcucuccgauaacaaa

SEQ ID NO: 2567258 - RNA, 19 nt, Artificial Sequence
  Description of Artificial Sequence: Synthetic oligonucleotide
  Sense strand starting at position 754 of SEQ ID NO: 1888935
aucggagagcuugacugua

SEQ ID NO: 2567259 - RNA, 19 nt, Artificial Sequence
  Description of Artificial Sequence: Synthetic oligonucleotide
  Antisense strand to SEQ ID NO: 2567258
uacagucaagcucuccgau

SEQ ID NO: 2567260 - RNA, 19 nt, Artificial Sequence
  Description of Artificial Sequence: Synthetic oligonucleotide
  Sense strand starting at position 756 of SEQ ID NO: 1888935
cggagagcuugacuguaau

SEQ ID NO: 2567261 - RNA, 19 nt, Artificial Sequence
  Description of Artificial Sequence: Synthetic oligonucleotide
  Antisense strand to SEQ ID NO: 2567260
auuacagucaagcucuccg

SEQ ID NO: 2567262 - RNA, 19 nt, Artificial Sequence
  Description of Artificial Sequence: Synthetic oligonucleotide
  Sense strand starting at position 1029 of SEQ ID NO: 1888935
ccucguggucaaggauauu

SEQ ID NO: 2567263 - RNA, 19 nt, Artificial Sequence
  Description of Artificial Sequence: Synthetic oligonucleotide
  Antisense strand to SEQ ID NO: 2567262
aauauccuugaccacgagg

SEQ ID NO: 2567264 - RNA, 19 nt, Artificial Sequence
  Description of Artificial Sequence: Synthetic oligonucleotide
  Sense strand starting at position 1191 of SEQ ID NO: 1888935
cugccuugggauuaugcua

SEQ ID NO: 2567265 - RNA, 19 nt, Artificial Sequence
  Description of Artificial Sequence: Synthetic oligonucleotide
  Antisense strand to SEQ ID NO: 2567264
uagcauaaucccaaggcag

SEQ ID NO: 2567266 - RNA, 19 nt, Artificial Sequence
  Description of Artificial Sequence: Synthetic oligonucleotide
  Sense strand starting at position 1198 of SEQ ID NO: 1888935
gggauuaugcuacacagcu

SEQ ID NO: 2567267 - RNA, 19 nt, Artificial Sequence
  Description of Artificial Sequence: Synthetic oligonucleotide
  Antisense strand to SEQ ID NO: 2567266
agcuguguagcauaauccc

SEQ ID NO: 2567268 - RNA, 19 nt, Artificial Sequence
  Description of Artificial Sequence: Synthetic oligonucleotide
  Sense strand starting at position 2062 of SEQ ID NO: 1888935
augcuuucaggaugugagu

SEQ ID NO: 2567269 - RNA, 19 nt, Artificial Sequence
  Description of Artificial Sequence: Synthetic oligonucleotide
  Antisense strand to SEQ ID NO: 2567268
acucacauccugaaagcau

SEQ ID NO: 2567270 - RNA, 19 nt, Artificial Sequence
  Description of Artificial Sequence: Synthetic oligonucleotide
  Sense strand starting at position 3237 of SEQ ID NO: 1888935
cuaagaagaugucaucucu

SEQ ID NO: 2567271 - RNA, 19 nt, Artificial Sequence
  Description of Artificial Sequence: Synthetic oligonucleotide
  Antisense strand to SEQ ID NO: 2567270
agagaugacaucuucuuag

SEQ ID NO: 2567272 - RNA, 19 nt, Artificial Sequence
  Description of Artificial Sequence: Synthetic oligonucleotide
  Sense strand starting at position 3246 of SEQ ID NO: 1888935
ugucaucucuucucagcau

SEQ ID NO: 2567273 - RNA, 19 nt, Artificial Sequence
  Description of Artificial Sequence: Synthetic oligonucleotide
  Antisense strand to SEQ ID NO: 2567272
augcugagaagagaugaca

SEQ ID NO: 2567274 - RNA, 19 nt, Artificial Sequence
  Description of Artificial Sequence: Synthetic oligonucleotide
  Sense strand starting at position 3247 of SEQ ID NO: 1888935
gucaucucuucucagcauu

SEQ ID NO: 2567275 - RNA, 19 nt, Artificial Sequence
  Description of Artificial Sequence: Synthetic oligonucleotide
  Antisense strand to SEQ ID NO: 2567274
aaugcugagaagagaugac

SEQ ID NO: 2567276 - RNA, 19 nt, Artificial Sequence
  Description of Artificial Sequence: Synthetic oligonucleotide
  Sense strand starting at position 3335 of SEQ ID NO: 1888935
cucugugaagcuugccaaa

SEQ ID NO: 2567277 - RNA, 19 nt, Artificial Sequence
  Description of Artificial Sequence: Synthetic oligonucleotide
  Antisense strand to SEQ ID NO: 2567276
uuuggcaagcuucacagag

SEQ ID NO: 2567278 - RNA, 19 nt, Artificial Sequence
  Description of Artificial Sequence: Synthetic oligonucleotide
  Sense strand starting at position 731 of SEQ ID NO: 1888936
uguggacacugacaaguuu

SEQ ID NO: 2567279 - RNA, 19 nt, Artificial Sequence
  Description of Artificial Sequence: Synthetic oligonucleotide
  Antisense strand to SEQ ID NO: 2567278
aaacuugucaguguccaca

SEQ ID NO: 2567280 - RNA, 19 nt, Artificial Sequence
  Description of Artificial Sequence: Synthetic oligonucleotide
  Sense strand starting at position 748 of SEQ ID NO: 1888936
uuuguuaucagagagcuug

SEQ ID NO: 2567281 - RNA, 19 nt, Artificial Sequence
  Description of Artificial Sequence: Synthetic oligonucleotide
  Antisense strand to SEQ ID NO: 2567280
caagcucucugauaacaaa

SEQ ID NO: 2567282 - RNA, 19 nt, Artificial Sequence
  Description of Artificial Sequence: Synthetic oligonucleotide
  Sense strand starting at position 754 of SEQ ID NO: 1888936
aucagagagcuugacugua

SEQ ID NO: 2567283 - RNA, 19 nt, Artificial Sequence
  Description of Artificial Sequence: Synthetic oligonucleotide
  Antisense strand to SEQ ID NO: 2567282
uacagucaagcucucugau

SEQ ID NO: 2567284 - RNA, 19 nt, Artificial Sequence
  Description of Artificial Sequence: Synthetic oligonucleotide
  Sense strand starting at position 756 of SEQ ID NO: 1888936
cagagagcuugacuguaau

SEQ ID NO: 2567285 - RNA, 19 nt, Artificial Sequence
  Description of Artificial Sequence: Synthetic oligonucleotide
  Antisense strand to SEQ ID NO: 2567284
auuacagucaagcucucug

SEQ ID NO: 2567286 - RNA, 19 nt, Artificial Sequence
  Description of Artificial Sequence: Synthetic oligonucleotide
  Sense strand starting at position 939 of SEQ ID NO: 1888936
agacauaccugugcacagu

SEQ ID NO: 2567287 - RNA, 19 nt, Artificial Sequence
  Description of Artificial Sequence: Synthetic oligonucleotide
  Antisense strand to SEQ ID NO: 2567286
acugugcacagguaugucu

SEQ ID NO: 2567288 - RNA, 19 nt, Artificial Sequence
  Description of Artificial Sequence: Synthetic oligonucleotide
  Sense strand starting at position 1026 of SEQ ID NO: 1888936
uuuccuuguggucaaggau

SEQ ID NO: 2567289 - RNA, 19 nt, Artificial Sequence
  Description of Artificial Sequence: Synthetic oligonucleotide
  Antisense strand to SEQ ID NO: 2567288
auccuugaccacaaggaaa

SEQ ID NO: 2567290 - RNA, 19 nt, Artificial Sequence
  Description of Artificial Sequence: Synthetic oligonucleotide
  Sense strand starting at position 1029 of SEQ ID NO: 1888936
ccuuguggucaaggauauu

SEQ ID NO: 2567291 - RNA, 19 nt, Artificial Sequence
  Description of Artificial Sequence: Synthetic oligonucleotide
  Antisense strand to SEQ ID NO: 2567290
aauauccuugaccacaagg

SEQ ID NO: 2567292 - RNA, 19 nt, Artificial Sequence
  Description of Artificial Sequence: Synthetic oligonucleotide
  Sense strand starting at position 1191 of SEQ ID NO: 1888936
cugccuugggauuauacua

SEQ ID NO: 2567293 - RNA, 19 nt, Artificial Sequence
  Description of Artificial Sequence: Synthetic oligonucleotide
  Antisense strand to SEQ ID NO: 2567292
uaguauaaucccaaggcag

SEQ ID NO: 2567294 - RNA, 19 nt, Artificial Sequence
  Description of Artificial Sequence: Synthetic oligonucleotide
  Sense strand starting at position 1729 of SEQ ID NO: 1888936
ugaugugcuugaugauuuc

SEQ ID NO: 2567295 - RNA, 19 nt, Artificial Sequence
  Description of Artificial Sequence: Synthetic oligonucleotide
  Antisense strand to SEQ ID NO: 2567294
gaaaucaucaagcacauca

SEQ ID NO: 2567296 - RNA, 19 nt, Artificial Sequence
  Description of Artificial Sequence: Synthetic oligonucleotide
  Sense strand starting at position 1735 of SEQ ID NO: 1888936
gcuugaugauuuccuguug

SEQ ID NO: 2567297 - RNA, 19 nt, Artificial Sequence
  Description of Artificial Sequence: Synthetic oligonucleotide
  Antisense strand to SEQ ID NO: 2567296
caacaggaaaucaucaagc

SEQ ID NO: 2567298 - RNA, 19 nt, Artificial Sequence
  Description of Artificial Sequence: Synthetic oligonucleotide
  Sense strand starting at position 1740 of SEQ ID NO: 1888936
augauuuccuguugaacaa

SEQ ID NO: 2567299 - RNA, 19 nt, Artificial Sequence
  Description of Artificial Sequence: Synthetic oligonucleotide
  Antisense strand to SEQ ID NO: 2567298
uuguucaacaggaaaucau

SEQ ID NO: 2567300 - RNA, 19 nt, Artificial Sequence
  Description of Artificial Sequence: Synthetic oligonucleotide
  Sense strand starting at position 2253 of SEQ ID NO: 1888936
ugcaaugaaucagcaguau

SEQ ID NO: 2567301 - RNA, 19 nt, Artificial Sequence
  Description of Artificial Sequence: Synthetic oligonucleotide
  Antisense strand to SEQ ID NO: 2567300
auacugcugauucauugca

SEQ ID NO: 2567302 - RNA, 19 nt, Artificial Sequence
  Description of Artificial Sequence: Synthetic oligonucleotide
  Sense strand starting at position 2916 of SEQ ID NO: 1888936
acauguuacuuacacguau

SEQ ID NO: 2567303 - RNA, 19 nt, Artificial Sequence
  Description of Artificial Sequence: Synthetic oligonucleotide
  Antisense strand to SEQ ID NO: 2567302
auacguguaaguaacaugu

SEQ ID NO: 2567304 - RNA, 19 nt, Artificial Sequence
  Description of Artificial Sequence: Synthetic oligonucleotide
  Sense strand starting at position 3236 of SEQ ID NO: 1888936
cuaagaagaugucaacucu

SEQ ID NO: 2567305 - RNA, 19 nt, Artificial Sequence
  Description of Artificial Sequence: Synthetic oligonucleotide
  Antisense strand to SEQ ID NO: 2567304
agaguugacaucuucuuag

SEQ ID NO: 2567306 - RNA, 19 nt, Artificial Sequence
  Description of Artificial Sequence: Synthetic oligonucleotide
  Sense strand starting at position 218 of SEQ ID NO: 1888937
acauguuacuuacacguau

SEQ ID NO: 2567307 - RNA, 19 nt, Artificial Sequence
  Description of Artificial Sequence: Synthetic oligonucleotide
  Antisense strand to SEQ ID NO: 2567306
auacguguaaguaacaugu

SEQ ID NO: 2567308 - RNA, 19 nt, Artificial Sequence
  Description of Artificial Sequence: Synthetic oligonucleotide
  Sense strand starting at position 731 of SEQ ID NO: 1888937
uguggacacugauaaguuu

SEQ ID NO: 2567309 - RNA, 19 nt, Artificial Sequence
  Description of Artificial Sequence: Synthetic oligonucleotide
  Antisense strand to SEQ ID NO: 2567308
aaacuuaucaguguccaca

SEQ ID NO: 2567310 - RNA, 19 nt, Artificial Sequence
  Description of Artificial Sequence: Synthetic oligonucleotide
  Sense strand starting at position 748 of SEQ ID NO: 1888937
uuuguuaucggagagcuug

SEQ ID NO: 2567311 - RNA, 19 nt, Artificial Sequence
  Description of Artificial Sequence: Synthetic oligonucleotide
  Antisense strand to SEQ ID NO: 2567310
caagcucuccgauaacaaa

SEQ ID NO: 2567312 - RNA, 19 nt, Artificial Sequence
  Description of Artificial Sequence: Synthetic oligonucleotide
  Sense strand starting at position 754 of SEQ ID NO: 1888937
aucggagagcuugacugua

SEQ ID NO: 2567313 - RNA, 19 nt, Artificial Sequence
  Description of Artificial Sequence: Synthetic oligonucleotide
  Antisense strand to SEQ ID NO: 2567312
uacagucaagcucuccgau

SEQ ID NO: 2567314 - RNA, 19 nt, Artificial Sequence
  Description of Artificial Sequence: Synthetic oligonucleotide
  Sense strand starting at position 756 of SEQ ID NO: 1888937
cggagagcuugacuguaau

SEQ ID NO: 2567315 - RNA, 19 nt, Artificial Sequence
  Description of Artificial Sequence: Synthetic oligonucleotide
  Antisense strand to SEQ ID NO: 2567314
auuacagucaagcucuccg

SEQ ID NO: 2567316 - RNA, 19 nt, Artificial Sequence
  Description of Artificial Sequence: Synthetic oligonucleotide
  Sense strand starting at position 1029 of SEQ ID NO: 1888937
ccucguggucaaggauauu

SEQ ID NO: 2567317 - RNA, 19 nt, Artificial Sequence
  Description of Artificial Sequence: Synthetic oligonucleotide
  Antisense strand to SEQ ID NO: 2567316
aauauccuugaccacgagg

SEQ ID NO: 2567318 - RNA, 19 nt, Artificial Sequence
  Description of Artificial Sequence: Synthetic oligonucleotide
  Sense strand starting at position 1191 of SEQ ID NO: 1888937
cugccuugggauuaugcua

SEQ ID NO: 2567319 - RNA, 19 nt, Artificial Sequence
  Description of Artificial Sequence: Synthetic oligonucleotide
  Antisense strand to SEQ ID NO: 2567318
uagcauaaucccaaggcag

SEQ ID NO: 2567320 - RNA, 19 nt, Artificial Sequence
  Description of Artificial Sequence: Synthetic oligonucleotide
  Sense strand starting at position 1198 of SEQ ID NO: 1888937
gggauuaugcuacacagcu

SEQ ID NO: 2567321 - RNA, 19 nt, Artificial Sequence
  Description of Artificial Sequence: Synthetic oligonucleotide
  Antisense strand to SEQ ID NO: 2567320
agcuguguagcauaauccc

SEQ ID NO: 2567322 - RNA, 19 nt, Artificial Sequence
  Description of Artificial Sequence: Synthetic oligonucleotide
  Sense strand starting at position 2062 of SEQ ID NO: 1888937
augcuuucaggaugugagu

SEQ ID NO: 2567323 - RNA, 19 nt, Artificial Sequence
  Description of Artificial Sequence: Synthetic oligonucleotide
  Antisense strand to SEQ ID NO: 2567322
acucacauccugaaagcau

SEQ ID NO: 2567324 - RNA, 19 nt, Artificial Sequence
  Description of Artificial Sequence: Synthetic oligonucleotide
  Sense strand starting at position 3237 of SEQ ID NO: 1888937
cuaagaagaugucaucucu

SEQ ID NO: 2567325 - RNA, 19 nt, Artificial Sequence
  Description of Artificial Sequence: Synthetic oligonucleotide
  Antisense strand to SEQ ID NO: 2567324
agagaugacaucuucuuag

SEQ ID NO: 2567326 - RNA, 19 nt, Artificial Sequence
  Description of Artificial Sequence: Synthetic oligonucleotide
  Sense strand starting at position 3246 of SEQ ID NO: 1888937
ugucaucucuucucagcau

SEQ ID NO: 2567327 - RNA, 19 nt, Artificial Sequence
  Description of Artificial Sequence: Synthetic oligonucleotide
  Antisense strand to SEQ ID NO: 2567326
augcugagaagagaugaca

SEQ ID NO: 2567328 - RNA, 19 nt, Artificial Sequence
  Description of Artificial Sequence: Synthetic oligonucleotide
  Sense strand starting at position 3247 of SEQ ID NO: 1888937
gucaucucuucucagcauu

SEQ ID NO: 2567329 - RNA, 19 nt, Artificial Sequence
  Description of Artificial Sequence: Synthetic oligonucleotide
  Antisense strand to SEQ ID NO: 2567328
aaugcugagaagagaugac

SEQ ID NO: 2567330 - RNA, 19 nt, Artificial Sequence
  Description of Artificial Sequence: Synthetic oligonucleotide
  Sense strand starting at position 3335 of SEQ ID NO: 1888937
cucugugaagcuugccaaa

SEQ ID NO: 2567331 - RNA, 19 nt, Artificial Sequence
  Description of Artificial Sequence: Synthetic oligonucleotide
  Antisense strand to SEQ ID NO: 2567330
uuuggcaagcuucacagag

SEQ ID NO: 2567332 - RNA, 19 nt, Artificial Sequence
  Description of Artificial Sequence: Synthetic oligonucleotide
  Sense strand starting at position 42 of SEQ ID NO: 1888938
gaggacugcuacuuaaugu

SEQ ID NO: 2567333 - RNA, 19 nt, Artificial Sequence
  Description of Artificial Sequence: Synthetic oligonucleotide
  Antisense strand to SEQ ID NO: 2567332
acauuaaguagcaguccuc

SEQ ID NO: 2567334 - RNA, 19 nt, Artificial Sequence
  Description of Artificial Sequence: Synthetic oligonucleotide
  Sense strand starting at position 125 of SEQ ID NO: 1888938
ggauauacuuuagccucaa

SEQ ID NO: 2567335 - RNA, 19 nt, Artificial Sequence
  Description of Artificial Sequence: Synthetic oligonucleotide
  Antisense strand to SEQ ID NO: 2567334
uugaggcuaaaguauaucc

SEQ ID NO: 2567336 - RNA, 19 nt, Artificial Sequence
  Description of Artificial Sequence: Synthetic oligonucleotide
  Sense strand starting at position 146 of SEQ ID NO: 1888938
cuggaugugguccaguaaa

SEQ ID NO: 2567337 - RNA, 19 nt, Artificial Sequence
  Description of Artificial Sequence: Synthetic oligonucleotide
  Antisense strand to SEQ ID NO: 2567336
uuuacuggaccacauccag

SEQ ID NO: 2567338 - RNA, 19 nt, Artificial Sequence
  Description of Artificial Sequence: Synthetic oligonucleotide
  Sense strand starting at position 181 of SEQ ID NO: 1888938
aucuauauguacguacaaa

SEQ ID NO: 2567339 - RNA, 19 nt, Artificial Sequence
  Description of Artificial Sequence: Synthetic oligonucleotide
  Antisense strand to SEQ ID NO: 2567338
uuuguacguacauauagau

SEQ ID NO: 2567340 - RNA, 19 nt, Artificial Sequence
  Description of Artificial Sequence: Synthetic oligonucleotide
  Sense strand starting at position 288 of SEQ ID NO: 1888938
ucugaugagggcugaagau

SEQ ID NO: 2567341 - RNA, 19 nt, Artificial Sequence
  Description of Artificial Sequence: Synthetic oligonucleotide
  Antisense strand to SEQ ID NO: 2567340
aucuucagcccucaucaga

SEQ ID NO: 2567342 - RNA, 19 nt, Artificial Sequence
  Description of Artificial Sequence: Synthetic oligonucleotide
  Sense strand starting at position 301 of SEQ ID NO: 1888938
gaagauccuggaugcaagu

SEQ ID NO: 2567343 - RNA, 19 nt, Artificial Sequence
  Description of Artificial Sequence: Synthetic oligonucleotide
  Antisense strand to SEQ ID NO: 2567342
acuugcauccaggaucuuc

SEQ ID NO: 2567344 - RNA, 19 nt, Artificial Sequence
  Description of Artificial Sequence: Synthetic oligonucleotide
  Sense strand starting at position 688 of SEQ ID NO: 1888938
ugaauuccugugcauuaag

SEQ ID NO: 2567345 - RNA, 19 nt, Artificial Sequence
  Description of Artificial Sequence: Synthetic oligonucleotide
  Antisense strand to SEQ ID NO: 2567344
cuuaaugcacaggaauuca

SEQ ID NO: 2567346 - RNA, 19 nt, Artificial Sequence
  Description of Artificial Sequence: Synthetic oligonucleotide
  Sense strand starting at position 699 of SEQ ID NO: 1888938
gcauuaagagcuuagaauu

SEQ ID NO: 2567347 - RNA, 19 nt, Artificial Sequence
  Description of Artificial Sequence: Synthetic oligonucleotide
  Antisense strand to SEQ ID NO: 2567346
aauucuaagcucuuaaugc

SEQ ID NO: 2567348 - RNA, 19 nt, Artificial Sequence
  Description of Artificial Sequence: Synthetic oligonucleotide
  Sense strand starting at position 1062 of SEQ ID NO: 1888938
uguccuuuacagggaaaua

SEQ ID NO: 2567349 - RNA, 19 nt, Artificial Sequence
  Description of Artificial Sequence: Synthetic oligonucleotide
  Antisense strand to SEQ ID NO: 2567348
uauuucccuguaaaggaca

SEQ ID NO: 2567350 - RNA, 19 nt, Artificial Sequence
  Description of Artificial Sequence: Synthetic oligonucleotide
  Sense strand starting at position 1143 of SEQ ID NO: 1888938
uguucucaugcauaaguaa

SEQ ID NO: 2567351 - RNA, 19 nt, Artificial Sequence
  Description of Artificial Sequence: Synthetic oligonucleotide
  Antisense strand to SEQ ID NO: 2567350
uuacuuaugcaugagaaca

SEQ ID NO: 2567352 - RNA, 19 nt, Artificial Sequence
  Description of Artificial Sequence: Synthetic oligonucleotide
  Sense strand starting at position 1450 of SEQ ID NO: 1888938
agcuuuaauaccugggaga

SEQ ID NO: 2567353 - RNA, 19 nt, Artificial Sequence
  Description of Artificial Sequence: Synthetic oligonucleotide
  Antisense strand to SEQ ID NO: 2567352
ucucccagguauuaaagcu

SEQ ID NO: 2567354 - RNA, 19 nt, Artificial Sequence
  Description of Artificial Sequence: Synthetic oligonucleotide
  Sense strand starting at position 1451 of SEQ ID NO: 1888938
gcuuuaauaccugggagaa

SEQ ID NO: 2567355 - RNA, 19 nt, Artificial Sequence
  Description of Artificial Sequence: Synthetic oligonucleotide
  Antisense strand to SEQ ID NO: 2567354
uucucccagguauuaaagc

SEQ ID NO: 2567356 - RNA, 19 nt, Artificial Sequence
  Description of Artificial Sequence: Synthetic oligonucleotide
  Sense strand starting at position 1484 of SEQ ID NO: 1888938
ucuuuaguaggguaaggau

SEQ ID NO: 2567357 - RNA, 19 nt, Artificial Sequence
  Description of Artificial Sequence: Synthetic oligonucleotide
  Antisense strand to SEQ ID NO: 2567356
auccuuacccuacuaaaga

SEQ ID NO: 2567358 - RNA, 19 nt, Artificial Sequence
  Description of Artificial Sequence: Synthetic oligonucleotide
  Sense strand starting at position 1515 of SEQ ID NO: 1888938
ggaacugauggaugccuaa

SEQ ID NO: 2567359 - RNA, 19 nt, Artificial Sequence
  Description of Artificial Sequence: Synthetic oligonucleotide
  Antisense strand to SEQ ID NO: 2567358
uuaggcauccaucaguucc

SEQ ID NO: 2567360 - RNA, 19 nt, Artificial Sequence
  Description of Artificial Sequence: Synthetic oligonucleotide
  Sense strand starting at position 1790 of SEQ ID NO: 1888938
agaauuaacugagcuaguc

SEQ ID NO: 2567361 - RNA, 19 nt, Artificial Sequence
  Description of Artificial Sequence: Synthetic oligonucleotide
  Antisense strand to SEQ ID NO: 2567360
gacuagcucaguuaauucu

SEQ ID NO: 2567362 - RNA, 19 nt, Artificial Sequence
  Description of Artificial Sequence: Synthetic oligonucleotide
  Sense strand starting at position 1816 of SEQ ID NO: 1888938
gggagggugucaguagaaa

SEQ ID NO: 2567363 - RNA, 19 nt, Artificial Sequence
  Description of Artificial Sequence: Synthetic oligonucleotide
  Antisense strand to SEQ ID NO: 2567362
uuucuacugacacccuccc

SEQ ID NO: 2567364 - RNA, 19 nt, Artificial Sequence
  Description of Artificial Sequence: Synthetic oligonucleotide
  Sense strand starting at position 1836 of SEQ ID NO: 1888938
gucugcauucuagggaaag

SEQ ID NO: 2567365 - RNA, 19 nt, Artificial Sequence
  Description of Artificial Sequence: Synthetic oligonucleotide
  Antisense strand to SEQ ID NO: 2567364
cuuucccuagaaugcagac

SEQ ID NO: 2567366 - RNA, 19 nt, Artificial Sequence
  Description of Artificial Sequence: Synthetic oligonucleotide
  Sense strand starting at position 1838 of SEQ ID NO: 1888938
cugcauucuagggaaagua

SEQ ID NO: 2567367 - RNA, 19 nt, Artificial Sequence
  Description of Artificial Sequence: Synthetic oligonucleotide
  Antisense strand to SEQ ID NO: 2567366
uacuuucccuagaaugcag

SEQ ID NO: 2567368 - RNA, 19 nt, Artificial Sequence
  Description of Artificial Sequence: Synthetic oligonucleotide
  Sense strand starting at position 2301 of SEQ ID NO: 1888938
auuagauagccagagcuua

SEQ ID NO: 2567369 - RNA, 19 nt, Artificial Sequence
  Description of Artificial Sequence: Synthetic oligonucleotide
  Antisense strand to SEQ ID NO: 2567368
uaagcucuggcuaucuaau

SEQ ID NO: 2567370 - RNA, 19 nt, Artificial Sequence
  Description of Artificial Sequence: Synthetic oligonucleotide
  Sense strand starting at position 2306 of SEQ ID NO: 1888938
auagccagagcuuaucuau

SEQ ID NO: 2567371 - RNA, 19 nt, Artificial Sequence
  Description of Artificial Sequence: Synthetic oligonucleotide
  Antisense strand to SEQ ID NO: 2567370
auagauaagcucuggcuau

SEQ ID NO: 2567372 - RNA, 19 nt, Artificial Sequence
  Description of Artificial Sequence: Synthetic oligonucleotide
  Sense strand starting at position 2481 of SEQ ID NO: 1888938
augguuuggaguuaugaca

SEQ ID NO: 2567373 - RNA, 19 nt, Artificial Sequence
  Description of Artificial Sequence: Synthetic oligonucleotide
  Antisense strand to SEQ ID NO: 2567372
ugucauaacuccaaaccau

SEQ ID NO: 2567374 - RNA, 19 nt, Artificial Sequence
  Description of Artificial Sequence: Synthetic oligonucleotide
  Sense strand starting at position 2488 of SEQ ID NO: 1888938
ggaguuaugacauggcaau

SEQ ID NO: 2567375 - RNA, 19 nt, Artificial Sequence
  Description of Artificial Sequence: Synthetic oligonucleotide
  Antisense strand to SEQ ID NO: 2567374
auugccaugucauaacucc

SEQ ID NO: 2567376 - RNA, 19 nt, Artificial Sequence
  Description of Artificial Sequence: Synthetic oligonucleotide
  Sense strand starting at position 2489 of SEQ ID NO: 1888938
gaguuaugacauggcaauu

SEQ ID NO: 2567377 - RNA, 19 nt, Artificial Sequence
  Description of Artificial Sequence: Synthetic oligonucleotide
  Antisense strand to SEQ ID NO: 2567376
aauugccaugucauaacuc

SEQ ID NO: 2567378 - RNA, 19 nt, Artificial Sequence
  Description of Artificial Sequence: Synthetic oligonucleotide
  Sense strand starting at position 2608 of SEQ ID NO: 1888938
aguguuagaaagcaguuua

SEQ ID NO: 2567379 - RNA, 19 nt, Artificial Sequence
  Description of Artificial Sequence: Synthetic oligonucleotide
  Antisense strand to SEQ ID NO: 2567378
uaaacugcuuucuaacacu

SEQ ID NO: 2567380 - RNA, 19 nt, Artificial Sequence
  Description of Artificial Sequence: Synthetic oligonucleotide
  Sense strand starting at position 2628 of SEQ ID NO: 1888938
auuccucaggucuaauagu

SEQ ID NO: 2567381 - RNA, 19 nt, Artificial Sequence
  Description of Artificial Sequence: Synthetic oligonucleotide
  Antisense strand to SEQ ID NO: 2567380
acuauuagaccugaggaau

SEQ ID NO: 2567382 - RNA, 19 nt, Artificial Sequence
  Description of Artificial Sequence: Synthetic oligonucleotide
  Sense strand starting at position 2698 of SEQ ID NO: 1888938
cccucuaccugaguuacau

SEQ ID NO: 2567383 - RNA, 19 nt, Artificial Sequence
  Description of Artificial Sequence: Synthetic oligonucleotide
  Antisense strand to SEQ ID NO: 2567382
auguaacucagguagaggg

SEQ ID NO: 2567384 - RNA, 19 nt, Artificial Sequence
  Description of Artificial Sequence: Synthetic oligonucleotide
  Sense strand starting at position 2773 of SEQ ID NO: 1888938
gaugguaaucacugaugug

SEQ ID NO: 2567385 - RNA, 19 nt, Artificial Sequence
  Description of Artificial Sequence: Synthetic oligonucleotide
  Antisense strand to SEQ ID NO: 2567384
cacaucagugauuaccauc

SEQ ID NO: 2567386 - RNA, 19 nt, Artificial Sequence
  Description of Artificial Sequence: Synthetic oligonucleotide
  Sense strand starting at position 2782 of SEQ ID NO: 1888938
cacugaugugauggagagu

SEQ ID NO: 2567387 - RNA, 19 nt, Artificial Sequence
  Description of Artificial Sequence: Synthetic oligonucleotide
  Antisense strand to SEQ ID NO: 2567386
acucuccaucacaucagug

SEQ ID NO: 2567388 - RNA, 19 nt, Artificial Sequence
  Description of Artificial Sequence: Synthetic oligonucleotide
  Sense strand starting at position 2882 of SEQ ID NO: 1888938
guucuuggcaucuauggau

SEQ ID NO: 2567389 - RNA, 19 nt, Artificial Sequence
  Description of Artificial Sequence: Synthetic oligonucleotide
  Antisense strand to SEQ ID NO: 2567388
auccauagaugccaagaac

SEQ ID NO: 2567390 - RNA, 19 nt, Artificial Sequence
  Description of Artificial Sequence: Synthetic oligonucleotide
  Sense strand starting at position 3066 of SEQ ID NO: 1888938
augguaaauggaugucaga

SEQ ID NO: 2567391 - RNA, 19 nt, Artificial Sequence
  Description of Artificial Sequence: Synthetic oligonucleotide
  Antisense strand to SEQ ID NO: 2567390
ucugacauccauuuaccau

SEQ ID NO: 2567392 - RNA, 19 nt, Artificial Sequence
  Description of Artificial Sequence: Synthetic oligonucleotide
  Sense strand starting at position 3099 of SEQ ID NO: 1888938
gaaagaggugauuguaagu

SEQ ID NO: 2567393 - RNA, 19 nt, Artificial Sequence
  Description of Artificial Sequence: Synthetic oligonucleotide
  Antisense strand to SEQ ID NO: 2567392
acuuacaaucaccucuuuc

SEQ ID NO: 2567394 - RNA, 19 nt, Artificial Sequence
  Description of Artificial Sequence: Synthetic oligonucleotide
  Sense strand starting at position 3230 of SEQ ID NO: 1888938
gcaacagguacagauguua

SEQ ID NO: 2567395 - RNA, 19 nt, Artificial Sequence
  Description of Artificial Sequence: Synthetic oligonucleotide
  Antisense strand to SEQ ID NO: 2567394
uaacaucuguaccuguugc

SEQ ID NO: 2567396 - RNA, 19 nt, Artificial Sequence
  Description of Artificial Sequence: Synthetic oligonucleotide
  Sense strand starting at position 3485 of SEQ ID NO: 1888938
agagcagugagucagagau

SEQ ID NO: 2567397 - RNA, 19 nt, Artificial Sequence
  Description of Artificial Sequence: Synthetic oligonucleotide
  Antisense strand to SEQ ID NO: 2567396
aucucugacucacugcucu

SEQ ID NO: 2567398 - RNA, 19 nt, Artificial Sequence
  Description of Artificial Sequence: Synthetic oligonucleotide
  Sense strand starting at position 3573 of SEQ ID NO: 1888938
ggacuuuauuuauagcaga

SEQ ID NO: 2567399 - RNA, 19 nt, Artificial Sequence
  Description of Artificial Sequence: Synthetic oligonucleotide
  Antisense strand to SEQ ID NO: 2567398
ucugcuauaaauaaagucc

SEQ ID NO: 2567400 - RNA, 19 nt, Artificial Sequence
  Description of Artificial Sequence: Synthetic oligonucleotide
  Sense strand starting at position 3599 of SEQ ID NO: 1888938
aaagcucaggcuuaacgau

SEQ ID NO: 2567401 - RNA, 19 nt, Artificial Sequence
  Description of Artificial Sequence: Synthetic oligonucleotide
  Antisense strand to SEQ ID NO: 2567400
aucguuaagccugagcuuu

SEQ ID NO: 2567402 - RNA, 19 nt, Artificial Sequence
  Description of Artificial Sequence: Synthetic oligonucleotide
  Sense strand starting at position 3642 of SEQ ID NO: 1888938
ggagguaaguaaguaagau

SEQ ID NO: 2567403 - RNA, 19 nt, Artificial Sequence
  Description of Artificial Sequence: Synthetic oligonucleotide
  Antisense strand to SEQ ID NO: 2567402
aucuuacuuacuuaccucc

SEQ ID NO: 2567404 - RNA, 19 nt, Artificial Sequence
  Description of Artificial Sequence: Synthetic oligonucleotide
  Sense strand starting at position 3674 of SEQ ID NO: 1888938
guaugagagcaacaagcua

SEQ ID NO: 2567405 - RNA, 19 nt, Artificial Sequence
  Description of Artificial Sequence: Synthetic oligonucleotide
  Antisense strand to SEQ ID NO: 2567404
uagcuuguugcucucauac

SEQ ID NO: 2567406 - RNA, 19 nt, Artificial Sequence
  Description of Artificial Sequence: Synthetic oligonucleotide
  Sense strand starting at position 3711 of SEQ ID NO: 1888938
uuaccagaguauccgauaa

SEQ ID NO: 2567407 - RNA, 19 nt, Artificial Sequence
  Description of Artificial Sequence: Synthetic oligonucleotide
  Antisense strand to SEQ ID NO: 2567406
uuaucggauacucugguaa

SEQ ID NO: 2567408 - RNA, 19 nt, Artificial Sequence
  Description of Artificial Sequence: Synthetic oligonucleotide
  Sense strand starting at position 3769 of SEQ ID NO: 1888938
cugaaagacuugccuuuaa

SEQ ID NO: 2567409 - RNA, 19 nt, Artificial Sequence
  Description of Artificial Sequence: Synthetic oligonucleotide
  Antisense strand to SEQ ID NO: 2567408
uuaaaggcaagucuuucag

SEQ ID NO: 2567410 - RNA, 19 nt, Artificial Sequence
  Description of Artificial Sequence: Synthetic oligonucleotide
  Sense strand starting at position 3797 of SEQ ID NO: 1888938
uuccaaguggcuuaaauua

SEQ ID NO: 2567411 - RNA, 19 nt, Artificial Sequence
  Description of Artificial Sequence: Synthetic oligonucleotide
  Antisense strand to SEQ ID NO: 2567410
uaauuuaagccacuuggaa

SEQ ID NO: 2567412 - RNA, 19 nt, Artificial Sequence
  Description of Artificial Sequence: Synthetic oligonucleotide
  Sense strand starting at position 158 of SEQ ID NO: 1888939
ugauauuucugagacaagu

SEQ ID NO: 2567413 - RNA, 19 nt, Artificial Sequence
  Description of Artificial Sequence: Synthetic oligonucleotide
  Antisense strand to SEQ ID NO: 2567412
acuugucucagaaauauca

SEQ ID NO: 2567414 - RNA, 19 nt, Artificial Sequence
  Description of Artificial Sequence: Synthetic oligonucleotide
  Sense strand starting at position 537 of SEQ ID NO: 1888939
aagugugauaaugguauga

SEQ ID NO: 2567415 - RNA, 19 nt, Artificial Sequence
  Description of Artificial Sequence: Synthetic oligonucleotide
  Antisense strand to SEQ ID NO: 2567414
ucauaccauuaucacacuu

SEQ ID NO: 2567416 - RNA, 19 nt, Artificial Sequence
  Description of Artificial Sequence: Synthetic oligonucleotide
  Sense strand starting at position 782 of SEQ ID NO: 1888939
gccuuauuauucuccagag

SEQ ID NO: 2567417 - RNA, 19 nt, Artificial Sequence
  Description of Artificial Sequence: Synthetic oligonucleotide
  Antisense strand to SEQ ID NO: 2567416
cucuggagaauaauaaggc

SEQ ID NO: 2567418 - RNA, 19 nt, Artificial Sequence
  Description of Artificial Sequence: Synthetic oligonucleotide
  Sense strand starting at position 965 of SEQ ID NO: 1888939
augaguggcucaccaaaug

SEQ ID NO: 2567419 - RNA, 19 nt, Artificial Sequence
  Description of Artificial Sequence: Synthetic oligonucleotide
  Antisense strand to SEQ ID NO: 2567418
cauuuggugagccacucau

SEQ ID NO: 2567420 - RNA, 19 nt, Artificial Sequence
  Description of Artificial Sequence: Synthetic oligonucleotide
  Sense strand starting at position 1041 of SEQ ID NO: 1888939
auaucuacaugagugucua

SEQ ID NO: 2567421 - RNA, 19 nt, Artificial Sequence
  Description of Artificial Sequence: Synthetic oligonucleotide
  Antisense strand to SEQ ID NO: 2567420
uagacacucauguagauau

SEQ ID NO: 2567422 - RNA, 19 nt, Artificial Sequence
  Description of Artificial Sequence: Synthetic oligonucleotide
  Sense strand starting at position 1045 of SEQ ID NO: 1888939
cuacaugagugucuaagaa

SEQ ID NO: 2567423 - RNA, 19 nt, Artificial Sequence
  Description of Artificial Sequence: Synthetic oligonucleotide
  Antisense strand to SEQ ID NO: 2567422
uucuuagacacucauguag

SEQ ID NO: 2567424 - RNA, 19 nt, Artificial Sequence
  Description of Artificial Sequence: Synthetic oligonucleotide
  Sense strand starting at position 1126 of SEQ ID NO: 1888939
aguggauucuacuuucuga

SEQ ID NO: 2567425 - RNA, 19 nt, Artificial Sequence
  Description of Artificial Sequence: Synthetic oligonucleotide
  Antisense strand to SEQ ID NO: 2567424
ucagaaaguagaauccacu

SEQ ID NO: 2567426 - RNA, 19 nt, Artificial Sequence
  Description of Artificial Sequence: Synthetic oligonucleotide
  Sense strand starting at position 1208 of SEQ ID NO: 1888939
acaaacuggguuugugaga

SEQ ID NO: 2567427 - RNA, 19 nt, Artificial Sequence
  Description of Artificial Sequence: Synthetic oligonucleotide
  Antisense strand to SEQ ID NO: 2567426
ucucacaaacccaguuugu

SEQ ID NO: 2567428 - RNA, 19 nt, Artificial Sequence
  Description of Artificial Sequence: Synthetic oligonucleotide
  Sense strand starting at position 1209 of SEQ ID NO: 1888939
caaacuggguuugugagaa

SEQ ID NO: 2567429 - RNA, 19 nt, Artificial Sequence
  Description of Artificial Sequence: Synthetic oligonucleotide
  Antisense strand to SEQ ID NO: 2567428
uucucacaaacccaguuug

SEQ ID NO: 2567430 - RNA, 19 nt, Artificial Sequence
  Description of Artificial Sequence: Synthetic oligonucleotide
  Sense strand starting at position 1217 of SEQ ID NO: 1888939
guuugugagaauuagcuag

SEQ ID NO: 2567431 - RNA, 19 nt, Artificial Sequence
  Description of Artificial Sequence: Synthetic oligonucleotide
  Antisense strand to SEQ ID NO: 2567430
cuagcuaauucucacaaac

SEQ ID NO: 2567432 - RNA, 19 nt, Artificial Sequence
  Description of Artificial Sequence: Synthetic oligonucleotide
  Sense strand starting at position 1219 of SEQ ID NO: 1888939
uugugagaauuagcuagaa

SEQ ID NO: 2567433 - RNA, 19 nt, Artificial Sequence
  Description of Artificial Sequence: Synthetic oligonucleotide
  Antisense strand to SEQ ID NO: 2567432
uucuagcuaauucucacaa

SEQ ID NO: 2567434 - RNA, 19 nt, Artificial Sequence
  Description of Artificial Sequence: Synthetic oligonucleotide
  Sense strand starting at position 1659 of SEQ ID NO: 1888939
cucucuuggcacgacauau

SEQ ID NO: 2567435 - RNA, 19 nt, Artificial Sequence
  Description of Artificial Sequence: Synthetic oligonucleotide
  Antisense strand to SEQ ID NO: 2567434
auaugucgugccaagagag

SEQ ID NO: 2567436 - RNA, 19 nt, Artificial Sequence
  Description of Artificial Sequence: Synthetic oligonucleotide
  Sense strand starting at position 1671 of SEQ ID NO: 1888939
gacauauggguaugcucua

SEQ ID NO: 2567437 - RNA, 19 nt, Artificial Sequence
  Description of Artificial Sequence: Synthetic oligonucleotide
  Antisense strand to SEQ ID NO: 2567436
uagagcauacccauauguc

SEQ ID NO: 2567438 - RNA, 19 nt, Artificial Sequence
  Description of Artificial Sequence: Synthetic oligonucleotide
  Sense strand starting at position 1718 of SEQ ID NO: 1888939
gcaagugggcagcaagaua

SEQ ID NO: 2567439 - RNA, 19 nt, Artificial Sequence
  Description of Artificial Sequence: Synthetic oligonucleotide
  Antisense strand to SEQ ID NO: 2567438
uaucuugcugcccacuugc

SEQ ID NO: 2567440 - RNA, 19 nt, Artificial Sequence
  Description of Artificial Sequence: Synthetic oligonucleotide
  Sense strand starting at position 1729 of SEQ ID NO: 1888939
gcaagauagccacaggagu

SEQ ID NO: 2567441 - RNA, 19 nt, Artificial Sequence
  Description of Artificial Sequence: Synthetic oligonucleotide
  Antisense strand to SEQ ID NO: 2567440
acuccuguggcuaucuugc

SEQ ID NO: 2567442 - RNA, 19 nt, Artificial Sequence
  Description of Artificial Sequence: Synthetic oligonucleotide
  Sense strand starting at position 1745 of SEQ ID NO: 1888939
agugcugauggguaaacua

SEQ ID NO: 2567443 - RNA, 19 nt, Artificial Sequence
  Description of Artificial Sequence: Synthetic oligonucleotide
  Antisense strand to SEQ ID NO: 2567442
uaguuuacccaucagcacu

SEQ ID NO: 2567444 - RNA, 19 nt, Artificial Sequence
  Description of Artificial Sequence: Synthetic oligonucleotide
  Sense strand starting at position 1782 of SEQ ID NO: 1888939
gcaggacagucauccagau

SEQ ID NO: 2567445 - RNA, 19 nt, Artificial Sequence
  Description of Artificial Sequence: Synthetic oligonucleotide
  Antisense strand to SEQ ID NO: 2567444
aucuggaugacuguccugc

SEQ ID NO: 2567446 - RNA, 19 nt, Artificial Sequence
  Description of Artificial Sequence: Synthetic oligonucleotide
  Sense strand starting at position 2048 of SEQ ID NO: 1888939
cuuggacuucuaugacugu

SEQ ID NO: 2567447 - RNA, 19 nt, Artificial Sequence
  Description of Artificial Sequence: Synthetic oligonucleotide
  Antisense strand to SEQ ID NO: 2567446
acagucauagaaguccaag

SEQ ID NO: 2567448 - RNA, 19 nt, Artificial Sequence
  Description of Artificial Sequence: Synthetic oligonucleotide
  Sense strand starting at position 2187 of SEQ ID NO: 1888939
uccuaacaccaguauagua

SEQ ID NO: 2567449 - RNA, 19 nt, Artificial Sequence
  Description of Artificial Sequence: Synthetic oligonucleotide
  Antisense strand to SEQ ID NO: 2567448
uacuauacugguguuagga

SEQ ID NO: 2567450 - RNA, 19 nt, Artificial Sequence
  Description of Artificial Sequence: Synthetic oligonucleotide
  Sense strand starting at position 2276 of SEQ ID NO: 1888939
aggugaucauuaucccuau

SEQ ID NO: 2567451 - RNA, 19 nt, Artificial Sequence
  Description of Artificial Sequence: Synthetic oligonucleotide
  Antisense strand to SEQ ID NO: 2567450
auagggauaaugaucaccu

SEQ ID NO: 2567452 - RNA, 19 nt, Artificial Sequence
  Description of Artificial Sequence: Synthetic oligonucleotide
  Sense strand starting at position 2277 of SEQ ID NO: 1888939
ggugaucauuaucccuauu

SEQ ID NO: 2567453 - RNA, 19 nt, Artificial Sequence
  Description of Artificial Sequence: Synthetic oligonucleotide
  Antisense strand to SEQ ID NO: 2567452
aauagggauaaugaucacc

SEQ ID NO: 2567454 - RNA, 19 nt, Artificial Sequence
  Description of Artificial Sequence: Synthetic oligonucleotide
  Sense strand starting at position 2610 of SEQ ID NO: 1888939
ggcuguguggucagauuag

SEQ ID NO: 2567455 - RNA, 19 nt, Artificial Sequence
  Description of Artificial Sequence: Synthetic oligonucleotide
  Antisense strand to SEQ ID NO: 2567454
cuaaucugaccacacagcc

SEQ ID NO: 2567456 - RNA, 19 nt, Artificial Sequence
  Description of Artificial Sequence: Synthetic oligonucleotide
  Sense strand starting at position 2739 of SEQ ID NO: 1888939
uccauauccuuggcauaug

SEQ ID NO: 2567457 - RNA, 19 nt, Artificial Sequence
  Description of Artificial Sequence: Synthetic oligonucleotide
  Antisense strand to SEQ ID NO: 2567456
cauaugccaaggauaugga

SEQ ID NO: 2567458 - RNA, 19 nt, Artificial Sequence
  Description of Artificial Sequence: Synthetic oligonucleotide
  Sense strand starting at position 2742 of SEQ ID NO: 1888939
auauccuuggcauaugcaa

SEQ ID NO: 2567459 - RNA, 19 nt, Artificial Sequence
  Description of Artificial Sequence: Synthetic oligonucleotide
  Antisense strand to SEQ ID NO: 2567458
uugcauaugccaaggauau

SEQ ID NO: 2567460 - RNA, 19 nt, Artificial Sequence
  Description of Artificial Sequence: Synthetic oligonucleotide
  Sense strand starting at position 2750 of SEQ ID NO: 1888939
ggcauaugcaauugggaaa

SEQ ID NO: 2567461 - RNA, 19 nt, Artificial Sequence
  Description of Artificial Sequence: Synthetic oligonucleotide
  Antisense strand to SEQ ID NO: 2567460
uuucccaauugcauaugcc

SEQ ID NO: 2567462 - RNA, 19 nt, Artificial Sequence
  Description of Artificial Sequence: Synthetic oligonucleotide
  Sense strand starting at position 2888 of SEQ ID NO: 1888939
gcagauguccaguacauag

SEQ ID NO: 2567463 - RNA, 19 nt, Artificial Sequence
  Description of Artificial Sequence: Synthetic oligonucleotide
  Antisense strand to SEQ ID NO: 2567462
cuauguacuggacaucugc

SEQ ID NO: 2567464 - RNA, 19 nt, Artificial Sequence
  Description of Artificial Sequence: Synthetic oligonucleotide
  Sense strand starting at position 2897 of SEQ ID NO: 1888939
caguacauaguuggacaua

SEQ ID NO: 2567465 - RNA, 19 nt, Artificial Sequence
  Description of Artificial Sequence: Synthetic oligonucleotide
  Antisense strand to SEQ ID NO: 2567464
uauguccaacuauguacug

SEQ ID NO: 2567466 - RNA, 19 nt, Artificial Sequence
  Description of Artificial Sequence: Synthetic oligonucleotide
  Sense strand starting at position 2932 of SEQ ID NO: 1888939
gagagaaguccaggcugga

SEQ ID NO: 2567467 - RNA, 19 nt, Artificial Sequence
  Description of Artificial Sequence: Synthetic oligonucleotide
  Antisense strand to SEQ ID NO: 2567466
uccagccuggacuucucuc

SEQ ID NO: 2567468 - RNA, 19 nt, Artificial Sequence
  Description of Artificial Sequence: Synthetic oligonucleotide
  Sense strand starting at position 2935 of SEQ ID NO: 1888939
agaaguccaggcuggaaau

SEQ ID NO: 2567469 - RNA, 19 nt, Artificial Sequence
  Description of Artificial Sequence: Synthetic oligonucleotide
  Antisense strand to SEQ ID NO: 2567468
auuuccagccuggacuucu

SEQ ID NO: 2567470 - RNA, 19 nt, Artificial Sequence
  Description of Artificial Sequence: Synthetic oligonucleotide
  Sense strand starting at position 2936 of SEQ ID NO: 1888939
gaaguccaggcuggaaaua

SEQ ID NO: 2567471 - RNA, 19 nt, Artificial Sequence
  Description of Artificial Sequence: Synthetic oligonucleotide
  Antisense strand to SEQ ID NO: 2567470
uauuuccagccuggacuuc

SEQ ID NO: 2567472 - RNA, 19 nt, Artificial Sequence
  Description of Artificial Sequence: Synthetic oligonucleotide
  Sense strand starting at position 3132 of SEQ ID NO: 1888939
aggcuugugagguaagaag

SEQ ID NO: 2567473 - RNA, 19 nt, Artificial Sequence
  Description of Artificial Sequence: Synthetic oligonucleotide
  Antisense strand to SEQ ID NO: 2567472
cuucuuaccucacaagccu

SEQ ID NO: 2567474 - RNA, 19 nt, Artificial Sequence
  Description of Artificial Sequence: Synthetic oligonucleotide
  Sense strand starting at position 3152 of SEQ ID NO: 1888939
caaccucaugaguguggaa

SEQ ID NO: 2567475 - RNA, 19 nt, Artificial Sequence
  Description of Artificial Sequence: Synthetic oligonucleotide
  Antisense strand to SEQ ID NO: 2567474
uuccacacucaugagguug

SEQ ID NO: 2567476 - RNA, 19 nt, Artificial Sequence
  Description of Artificial Sequence: Synthetic oligonucleotide
  Sense strand starting at position 3239 of SEQ ID NO: 1888939
ugacaacauugcccaguaa

SEQ ID NO: 2567477 - RNA, 19 nt, Artificial Sequence
  Description of Artificial Sequence: Synthetic oligonucleotide
  Antisense strand to SEQ ID NO: 2567476
uuacugggcaauguuguca

SEQ ID NO: 2567478 - RNA, 19 nt, Artificial Sequence
  Description of Artificial Sequence: Synthetic oligonucleotide
  Sense strand starting at position 3248 of SEQ ID NO: 1888939
ugcccaguaaauugggaaa

SEQ ID NO: 2567479 - RNA, 19 nt, Artificial Sequence
  Description of Artificial Sequence: Synthetic oligonucleotide
  Antisense strand to SEQ ID NO: 2567478
uuucccaauuuacugggca

SEQ ID NO: 2567480 - RNA, 19 nt, Artificial Sequence
  Description of Artificial Sequence: Synthetic oligonucleotide
  Sense strand starting at position 3283 of SEQ ID NO: 1888939
gaccuugaccagggucauu

SEQ ID NO: 2567481 - RNA, 19 nt, Artificial Sequence
  Description of Artificial Sequence: Synthetic oligonucleotide
  Antisense strand to SEQ ID NO: 2567480
aaugacccuggucaagguc

SEQ ID NO: 2567482 - RNA, 19 nt, Artificial Sequence
  Description of Artificial Sequence: Synthetic oligonucleotide
  Sense strand starting at position 3294 of SEQ ID NO: 1888939
gggucauuuaagugcugca

SEQ ID NO: 2567483 - RNA, 19 nt, Artificial Sequence
  Description of Artificial Sequence: Synthetic oligonucleotide
  Antisense strand to SEQ ID NO: 2567482
ugcagcacuuaaaugaccc

SEQ ID NO: 2567484 - RNA, 19 nt, Artificial Sequence
  Description of Artificial Sequence: Synthetic oligonucleotide
  Sense strand starting at position 3680 of SEQ ID NO: 1888939
aagaguaaaugggagaaau

SEQ ID NO: 2567485 - RNA, 19 nt, Artificial Sequence
  Description of Artificial Sequence: Synthetic oligonucleotide
  Antisense strand to SEQ ID NO: 2567484
auuucucccauuuacucuu

SEQ ID NO: 2567486 - RNA, 19 nt, Artificial Sequence
  Description of Artificial Sequence: Synthetic oligonucleotide
  Sense strand starting at position 3924 of SEQ ID NO: 1888939
gaucaauugcaggagcacu

SEQ ID NO: 2567487 - RNA, 19 nt, Artificial Sequence
  Description of Artificial Sequence: Synthetic oligonucleotide
  Antisense strand to SEQ ID NO: 2567486
agugcuccugcaauugauc

SEQ ID NO: 2567488 - RNA, 19 nt, Artificial Sequence
  Description of Artificial Sequence: Synthetic oligonucleotide
  Sense strand starting at position 3935 of SEQ ID NO: 1888939
ggagcacugucacugaaua

SEQ ID NO: 2567489 - RNA, 19 nt, Artificial Sequence
  Description of Artificial Sequence: Synthetic oligonucleotide
  Antisense strand to SEQ ID NO: 2567488
uauucagugacagugcucc

SEQ ID NO: 2567490 - RNA, 19 nt, Artificial Sequence
  Description of Artificial Sequence: Synthetic oligonucleotide
  Sense strand starting at position 3936 of SEQ ID NO: 1888939
gagcacugucacugaauag

SEQ ID NO: 2567491 - RNA, 19 nt, Artificial Sequence
  Description of Artificial Sequence: Synthetic oligonucleotide
  Antisense strand to SEQ ID NO: 2567490
cuauucagugacagugcuc

SEQ ID NO: 2567492 - RNA, 19 nt, Artificial Sequence
  Description of Artificial Sequence: Synthetic oligonucleotide
  Sense strand starting at position 28 of SEQ ID NO: 1888940
gaacaaggaucgccuaaau

SEQ ID NO: 2567493 - RNA, 19 nt, Artificial Sequence
  Description of Artificial Sequence: Synthetic oligonucleotide
  Antisense strand to SEQ ID NO: 2567492
auuuaggcgauccuuguuc

SEQ ID NO: 2567494 - RNA, 19 nt, Artificial Sequence
  Description of Artificial Sequence: Synthetic oligonucleotide
  Sense strand starting at position 141 of SEQ ID NO: 1888940
gaaguuggcugaguggaaa

SEQ ID NO: 2567495 - RNA, 19 nt, Artificial Sequence
  Description of Artificial Sequence: Synthetic oligonucleotide
  Antisense strand to SEQ ID NO: 2567494
uuuccacucagccaacuuc

SEQ ID NO: 2567496 - RNA, 19 nt, Artificial Sequence
  Description of Artificial Sequence: Synthetic oligonucleotide
  Sense strand starting at position 144 of SEQ ID NO: 1888940
guuggcugaguggaaauaa

SEQ ID NO: 2567497 - RNA, 19 nt, Artificial Sequence
  Description of Artificial Sequence: Synthetic oligonucleotide
  Antisense strand to SEQ ID NO: 2567496
uuauuuccacucagccaac

SEQ ID NO: 2567498 - RNA, 19 nt, Artificial Sequence
  Description of Artificial Sequence: Synthetic oligonucleotide
  Sense strand starting at position 181 of SEQ ID NO: 1888940
cugacuugggcauaucuca

SEQ ID NO: 2567499 - RNA, 19 nt, Artificial Sequence
  Description of Artificial Sequence: Synthetic oligonucleotide
  Antisense strand to SEQ ID NO: 2567498
ugagauaugcccaagucag

SEQ ID NO: 2567500 - RNA, 19 nt, Artificial Sequence
  Description of Artificial Sequence: Synthetic oligonucleotide
  Sense strand starting at position 305 of SEQ ID NO: 1888940
auguuacuuugauuagaca

SEQ ID NO: 2567501 - RNA, 19 nt, Artificial Sequence
  Description of Artificial Sequence: Synthetic oligonucleotide
  Antisense strand to SEQ ID NO: 2567500
ugucuaaucaaaguaacau

SEQ ID NO: 2567502 - RNA, 19 nt, Artificial Sequence
  Description of Artificial Sequence: Synthetic oligonucleotide
  Sense strand starting at position 306 of SEQ ID NO: 1888940
uguuacuuugauuagacau

SEQ ID NO: 2567503 - RNA, 19 nt, Artificial Sequence
  Description of Artificial Sequence: Synthetic oligonucleotide
  Antisense strand to SEQ ID NO: 2567502
augucuaaucaaaguaaca

SEQ ID NO: 2567504 - RNA, 19 nt, Artificial Sequence
  Description of Artificial Sequence: Synthetic oligonucleotide
  Sense strand starting at position 360 of SEQ ID NO: 1888940
cucugucgugguuauauuu

SEQ ID NO: 2567505 - RNA, 19 nt, Artificial Sequence
  Description of Artificial Sequence: Synthetic oligonucleotide
  Antisense strand to SEQ ID NO: 2567504
aaauauaaccacgacagag

SEQ ID NO: 2567506 - RNA, 19 nt, Artificial Sequence
  Description of Artificial Sequence: Synthetic oligonucleotide
  Sense strand starting at position 397 of SEQ ID NO: 1888940
uuucuuugccaagagcaaa

SEQ ID NO: 2567507 - RNA, 19 nt, Artificial Sequence
  Description of Artificial Sequence: Synthetic oligonucleotide
  Antisense strand to SEQ ID NO: 2567506
uuugcucuuggcaaagaaa

SEQ ID NO: 2567508 - RNA, 19 nt, Artificial Sequence
  Description of Artificial Sequence: Synthetic oligonucleotide
  Sense strand starting at position 452 of SEQ ID NO: 1888940
guacaaagguuucccagau

SEQ ID NO: 2567509 - RNA, 19 nt, Artificial Sequence
  Description of Artificial Sequence: Synthetic oligonucleotide
  Antisense strand to SEQ ID NO: 2567508
aucugggaaaccuuuguac

SEQ ID NO: 2567510 - RNA, 19 nt, Artificial Sequence
  Description of Artificial Sequence: Synthetic oligonucleotide
  Sense strand starting at position 461 of SEQ ID NO: 1888940
uuucccagauauguuugaa

SEQ ID NO: 2567511 - RNA, 19 nt, Artificial Sequence
  Description of Artificial Sequence: Synthetic oligonucleotide
  Antisense strand to SEQ ID NO: 2567510
uucaaacauaucugggaaa

SEQ ID NO: 2567512 - RNA, 19 nt, Artificial Sequence
  Description of Artificial Sequence: Synthetic oligonucleotide
  Sense strand starting at position 623 of SEQ ID NO: 1888940
augcaaauauuacuuggaa

SEQ ID NO: 2567513 - RNA, 19 nt, Artificial Sequence
  Description of Artificial Sequence: Synthetic oligonucleotide
  Antisense strand to SEQ ID NO: 2567512
uuccaaguaauauuugcau

SEQ ID NO: 2567514 - RNA, 19 nt, Artificial Sequence
  Description of Artificial Sequence: Synthetic oligonucleotide
  Sense strand starting at position 1009 of SEQ ID NO: 1888940
ugacacaagucagcgauaa

SEQ ID NO: 2567515 - RNA, 19 nt, Artificial Sequence
  Description of Artificial Sequence: Synthetic oligonucleotide
  Antisense strand to SEQ ID NO: 2567514
uuaucgcugacuuguguca

SEQ ID NO: 2567516 - RNA, 19 nt, Artificial Sequence
  Description of Artificial Sequence: Synthetic oligonucleotide
  Sense strand starting at position 1010 of SEQ ID NO: 1888940
gacacaagucagcgauaac

SEQ ID NO: 2567517 - RNA, 19 nt, Artificial Sequence
  Description of Artificial Sequence: Synthetic oligonucleotide
  Antisense strand to SEQ ID NO: 2567516
guuaucgcugacuuguguc

SEQ ID NO: 2567518 - RNA, 19 nt, Artificial Sequence
  Description of Artificial Sequence: Synthetic oligonucleotide
  Sense strand starting at position 1042 of SEQ ID NO: 1888940
uugguauacuuccugauag

SEQ ID NO: 2567519 - RNA, 19 nt, Artificial Sequence
  Description of Artificial Sequence: Synthetic oligonucleotide
  Antisense strand to SEQ ID NO: 2567518
cuaucaggaaguauaccaa

SEQ ID NO: 2567520 - RNA, 19 nt, Artificial Sequence
  Description of Artificial Sequence: Synthetic oligonucleotide
  Sense strand starting at position 1348 of SEQ ID NO: 1888940
gcacauucucaugacauga

SEQ ID NO: 2567521 - RNA, 19 nt, Artificial Sequence
  Description of Artificial Sequence: Synthetic oligonucleotide
  Antisense strand to SEQ ID NO: 2567520
ucaugucaugagaaugugc

SEQ ID NO: 2567522 - RNA, 19 nt, Artificial Sequence
  Description of Artificial Sequence: Synthetic oligonucleotide
  Sense strand starting at position 1471 of SEQ ID NO: 1888940
ggauguuccuaacuuccau

SEQ ID NO: 2567523 - RNA, 19 nt, Artificial Sequence
  Description of Artificial Sequence: Synthetic oligonucleotide
  Antisense strand to SEQ ID NO: 2567522
auggaaguuaggaacaucc

SEQ ID NO: 2567524 - RNA, 19 nt, Artificial Sequence
  Description of Artificial Sequence: Synthetic oligonucleotide
  Sense strand starting at position 1673 of SEQ ID NO: 1888940
agcauucuagcacaaguau

SEQ ID NO: 2567525 - RNA, 19 nt, Artificial Sequence
  Description of Artificial Sequence: Synthetic oligonucleotide
  Antisense strand to SEQ ID NO: 2567524
auacuugugcuagaaugcu

SEQ ID NO: 2567526 - RNA, 19 nt, Artificial Sequence
  Description of Artificial Sequence: Synthetic oligonucleotide
  Sense strand starting at position 1931 of SEQ ID NO: 1888940
aguuaucaaucugucacaa

SEQ ID NO: 2567527 - RNA, 19 nt, Artificial Sequence
  Description of Artificial Sequence: Synthetic oligonucleotide
  Antisense strand to SEQ ID NO: 2567526
uugugacagauugauaacu

SEQ ID NO: 2567528 - RNA, 19 nt, Artificial Sequence
  Description of Artificial Sequence: Synthetic oligonucleotide
  Sense strand starting at position 1957 of SEQ ID NO: 1888940
cugguaucucgugacauga

SEQ ID NO: 2567529 - RNA, 19 nt, Artificial Sequence
  Description of Artificial Sequence: Synthetic oligonucleotide
  Antisense strand to SEQ ID NO: 2567528
ucaugucacgagauaccag

SEQ ID NO: 2567530 - RNA, 19 nt, Artificial Sequence
  Description of Artificial Sequence: Synthetic oligonucleotide
  Sense strand starting at position 1991 of SEQ ID NO: 1888940
cugagaucugugcauccuu

SEQ ID NO: 2567531 - RNA, 19 nt, Artificial Sequence
  Description of Artificial Sequence: Synthetic oligonucleotide
  Antisense strand to SEQ ID NO: 2567530
aaggaugcacagaucucag

SEQ ID NO: 2567532 - RNA, 19 nt, Artificial Sequence
  Description of Artificial Sequence: Synthetic oligonucleotide
  Sense strand starting at position 2257 of SEQ ID NO: 1888940
aaucaugguguccauguga

SEQ ID NO: 2567533 - RNA, 19 nt, Artificial Sequence
  Description of Artificial Sequence: Synthetic oligonucleotide
  Antisense strand to SEQ ID NO: 2567532
ucacauggacaccaugauu

SEQ ID NO: 2567534 - RNA, 19 nt, Artificial Sequence
  Description of Artificial Sequence: Synthetic oligonucleotide
  Sense strand starting at position 2372 of SEQ ID NO: 1888940
uccauugagugagugacua

SEQ ID NO: 2567535 - RNA, 19 nt, Artificial Sequence
  Description of Artificial Sequence: Synthetic oligonucleotide
  Antisense strand to SEQ ID NO: 2567534
uagucacucacucaaugga

SEQ ID NO: 2567536 - RNA, 19 nt, Artificial Sequence
  Description of Artificial Sequence: Synthetic oligonucleotide
  Sense strand starting at position 2376 of SEQ ID NO: 1888940
uugagugagugacuagauu

SEQ ID NO: 2567537 - RNA, 19 nt, Artificial Sequence
  Description of Artificial Sequence: Synthetic oligonucleotide
  Antisense strand to SEQ ID NO: 2567536
aaucuagucacucacucaa

SEQ ID NO: 2567538 - RNA, 19 nt, Artificial Sequence
  Description of Artificial Sequence: Synthetic oligonucleotide
  Sense strand starting at position 2541 of SEQ ID NO: 1888940
gguaacuuauagucacuau

SEQ ID NO: 2567539 - RNA, 19 nt, Artificial Sequence
  Description of Artificial Sequence: Synthetic oligonucleotide
  Antisense strand to SEQ ID NO: 2567538
auagugacuauaaguuacc

SEQ ID NO: 2567540 - RNA, 19 nt, Artificial Sequence
  Description of Artificial Sequence: Synthetic oligonucleotide
  Sense strand starting at position 2592 of SEQ ID NO: 1888940
ccaggaaguguccaaugua

SEQ ID NO: 2567541 - RNA, 19 nt, Artificial Sequence
  Description of Artificial Sequence: Synthetic oligonucleotide
  Antisense strand to SEQ ID NO: 2567540
uacauuggacacuuccugg

SEQ ID NO: 2567542 - RNA, 19 nt, Artificial Sequence
  Description of Artificial Sequence: Synthetic oligonucleotide
  Sense strand starting at position 2595 of SEQ ID NO: 1888940
ggaaguguccaauguauag

SEQ ID NO: 2567543 - RNA, 19 nt, Artificial Sequence
  Description of Artificial Sequence: Synthetic oligonucleotide
  Antisense strand to SEQ ID NO: 2567542
cuauacauuggacacuucc

SEQ ID NO: 2567544 - RNA, 19 nt, Artificial Sequence
  Description of Artificial Sequence: Synthetic oligonucleotide
  Sense strand starting at position 2613 of SEQ ID NO: 1888940
ggccaaagcucaucauaag

SEQ ID NO: 2567545 - RNA, 19 nt, Artificial Sequence
  Description of Artificial Sequence: Synthetic oligonucleotide
  Antisense strand to SEQ ID NO: 2567544
cuuaugaugagcuuuggcc

SEQ ID NO: 2567546 - RNA, 19 nt, Artificial Sequence
  Description of Artificial Sequence: Synthetic oligonucleotide
  Sense strand starting at position 2614 of SEQ ID NO: 1888940
gccaaagcucaucauaaga

SEQ ID NO: 2567547 - RNA, 19 nt, Artificial Sequence
  Description of Artificial Sequence: Synthetic oligonucleotide
  Antisense strand to SEQ ID NO: 2567546
ucuuaugaugagcuuuggc

SEQ ID NO: 2567548 - RNA, 19 nt, Artificial Sequence
  Description of Artificial Sequence: Synthetic oligonucleotide
  Sense strand starting at position 2991 of SEQ ID NO: 1888940
cuggucuuaggguaauagu

SEQ ID NO: 2567549 - RNA, 19 nt, Artificial Sequence
  Description of Artificial Sequence: Synthetic oligonucleotide
  Antisense strand to SEQ ID NO: 2567548
acuauuacccuaagaccag

SEQ ID NO: 2567550 - RNA, 19 nt, Artificial Sequence
  Description of Artificial Sequence: Synthetic oligonucleotide
  Sense strand starting at position 3185 of SEQ ID NO: 1888940
gauuauagagcucaguagu

SEQ ID NO: 2567551 - RNA, 19 nt, Artificial Sequence
  Description of Artificial Sequence: Synthetic oligonucleotide
  Antisense strand to SEQ ID NO: 2567550
acuacugagcucuauaauc

SEQ ID NO: 2567552 - RNA, 19 nt, Artificial Sequence
  Description of Artificial Sequence: Synthetic oligonucleotide
  Sense strand starting at position 3357 of SEQ ID NO: 1888940
gguggcagauaggugaaau

SEQ ID NO: 2567553 - RNA, 19 nt, Artificial Sequence
  Description of Artificial Sequence: Synthetic oligonucleotide
  Antisense strand to SEQ ID NO: 2567552
auuucaccuaucugccacc

SEQ ID NO: 2567554 - RNA, 19 nt, Artificial Sequence
  Description of Artificial Sequence: Synthetic oligonucleotide
  Sense strand starting at position 3358 of SEQ ID NO: 1888940
guggcagauaggugaaaua

SEQ ID NO: 2567555 - RNA, 19 nt, Artificial Sequence
  Description of Artificial Sequence: Synthetic oligonucleotide
  Antisense strand to SEQ ID NO: 2567554
uauuucaccuaucugccac

SEQ ID NO: 2567556 - RNA, 19 nt, Artificial Sequence
  Description of Artificial Sequence: Synthetic oligonucleotide
  Sense strand starting at position 3555 of SEQ ID NO: 1888940
uuaugagauuaagucauac

SEQ ID NO: 2567557 - RNA, 19 nt, Artificial Sequence
  Description of Artificial Sequence: Synthetic oligonucleotide
  Antisense strand to SEQ ID NO: 2567556
guaugacuuaaucucauaa

SEQ ID NO: 2567558 - RNA, 19 nt, Artificial Sequence
  Description of Artificial Sequence: Synthetic oligonucleotide
  Sense strand starting at position 3618 of SEQ ID NO: 1888940
ugcauauagccagacucaa

SEQ ID NO: 2567559 - RNA, 19 nt, Artificial Sequence
  Description of Artificial Sequence: Synthetic oligonucleotide
  Antisense strand to SEQ ID NO: 2567558
uugagucuggcuauaugca

SEQ ID NO: 2567560 - RNA, 19 nt, Artificial Sequence
  Description of Artificial Sequence: Synthetic oligonucleotide
  Sense strand starting at position 3652 of SEQ ID NO: 1888940
ucgauaaacucauugaucu

SEQ ID NO: 2567561 - RNA, 19 nt, Artificial Sequence
  Description of Artificial Sequence: Synthetic oligonucleotide
  Antisense strand to SEQ ID NO: 2567560
agaucaaugaguuuaucga

SEQ ID NO: 2567562 - RNA, 19 nt, Artificial Sequence
  Description of Artificial Sequence: Synthetic oligonucleotide
  Sense strand starting at position 3653 of SEQ ID NO: 1888940
cgauaaacucauugaucuu

SEQ ID NO: 2567563 - RNA, 19 nt, Artificial Sequence
  Description of Artificial Sequence: Synthetic oligonucleotide
  Antisense strand to SEQ ID NO: 2567562
aagaucaaugaguuuaucg

SEQ ID NO: 2567564 - RNA, 19 nt, Artificial Sequence
  Description of Artificial Sequence: Synthetic oligonucleotide
  Sense strand starting at position 3722 of SEQ ID NO: 1888940
aggaaagcugccuauaacu

SEQ ID NO: 2567565 - RNA, 19 nt, Artificial Sequence
  Description of Artificial Sequence: Synthetic oligonucleotide
  Antisense strand to SEQ ID NO: 2567564
aguuauaggcagcuuuccu

SEQ ID NO: 2567566 - RNA, 19 nt, Artificial Sequence
  Description of Artificial Sequence: Synthetic oligonucleotide
  Sense strand starting at position 3784 of SEQ ID NO: 1888940
ucuauagcaguccaggauu

SEQ ID NO: 2567567 - RNA, 19 nt, Artificial Sequence
  Description of Artificial Sequence: Synthetic oligonucleotide
  Antisense strand to SEQ ID NO: 2567566
aauccuggacugcuauaga

SEQ ID NO: 2567568 - RNA, 19 nt, Artificial Sequence
  Description of Artificial Sequence: Synthetic oligonucleotide
  Sense strand starting at position 3838 of SEQ ID NO: 1888940
ccuugaugaguugauaggu

SEQ ID NO: 2567569 - RNA, 19 nt, Artificial Sequence
  Description of Artificial Sequence: Synthetic oligonucleotide
  Antisense strand to SEQ ID NO: 2567568
accuaucaacucaucaagg

SEQ ID NO: 2567570 - RNA, 19 nt, Artificial Sequence
  Description of Artificial Sequence: Synthetic oligonucleotide
  Sense strand starting at position 3923 of SEQ ID NO: 1888940
uggacaguugcccauauua

SEQ ID NO: 2567571 - RNA, 19 nt, Artificial Sequence
  Description of Artificial Sequence: Synthetic oligonucleotide
  Antisense strand to SEQ ID NO: 2567570
uaauaugggcaacugucca

SEQ ID NO: 2567572 - RNA, 19 nt, Artificial Sequence
  Description of Artificial Sequence: Synthetic oligonucleotide
  Sense strand starting at position 197 of SEQ ID NO: 1888941
gucuuuaagcaacacauga

SEQ ID NO: 2567573 - RNA, 19 nt, Artificial Sequence
  Description of Artificial Sequence: Synthetic oligonucleotide
  Antisense strand to SEQ ID NO: 2567572
ucauguguugcuuaaagac

SEQ ID NO: 2567574 - RNA, 19 nt, Artificial Sequence
  Description of Artificial Sequence: Synthetic oligonucleotide
  Sense strand starting at position 212 of SEQ ID NO: 1888941
augacuguauaguuaaaug

SEQ ID NO: 2567575 - RNA, 19 nt, Artificial Sequence
  Description of Artificial Sequence: Synthetic oligonucleotide
  Antisense strand to SEQ ID NO: 2567574
cauuuaacuauacagucau

SEQ ID NO: 2567576 - RNA, 19 nt, Artificial Sequence
  Description of Artificial Sequence: Synthetic oligonucleotide
  Sense strand starting at position 399 of SEQ ID NO: 1888941
ggaugauccuauccaacga

SEQ ID NO: 2567577 - RNA, 19 nt, Artificial Sequence
  Description of Artificial Sequence: Synthetic oligonucleotide
  Antisense strand to SEQ ID NO: 2567576
ucguuggauaggaucaucc

SEQ ID NO: 2567578 - RNA, 19 nt, Artificial Sequence
  Description of Artificial Sequence: Synthetic oligonucleotide
  Sense strand starting at position 403 of SEQ ID NO: 1888941
gauccuauccaacgagaug

SEQ ID NO: 2567579 - RNA, 19 nt, Artificial Sequence
  Description of Artificial Sequence: Synthetic oligonucleotide
  Antisense strand to SEQ ID NO: 2567578
caucucguuggauaggauc

SEQ ID NO: 2567580 - RNA, 19 nt, Artificial Sequence
  Description of Artificial Sequence: Synthetic oligonucleotide
  Sense strand starting at position 530 of SEQ ID NO: 1888941
gcagguuaccaagauagua

SEQ ID NO: 2567581 - RNA, 19 nt, Artificial Sequence
  Description of Artificial Sequence: Synthetic oligonucleotide
  Antisense strand to SEQ ID NO: 2567580
uacuaucuugguaaccugc

SEQ ID NO: 2567582 - RNA, 19 nt, Artificial Sequence
  Description of Artificial Sequence: Synthetic oligonucleotide
  Sense strand starting at position 603 of SEQ ID NO: 1888941
gcucacuaucuguauacau

SEQ ID NO: 2567583 - RNA, 19 nt, Artificial Sequence
  Description of Artificial Sequence: Synthetic oligonucleotide
  Antisense strand to SEQ ID NO: 2567582
auguauacagauagugagc

SEQ ID NO: 2567584 - RNA, 19 nt, Artificial Sequence
  Description of Artificial Sequence: Synthetic oligonucleotide
  Sense strand starting at position 752 of SEQ ID NO: 1888941
ugcaaagaacuguguagga

SEQ ID NO: 2567585 - RNA, 19 nt, Artificial Sequence
  Description of Artificial Sequence: Synthetic oligonucleotide
  Antisense strand to SEQ ID NO: 2567584
uccuacacaguucuuugca

SEQ ID NO: 2567586 - RNA, 19 nt, Artificial Sequence
  Description of Artificial Sequence: Synthetic oligonucleotide
  Sense strand starting at position 983 of SEQ ID NO: 1888941
ugucacaagcaaugacaaa

SEQ ID NO: 2567587 - RNA, 19 nt, Artificial Sequence
  Description of Artificial Sequence: Synthetic oligonucleotide
  Antisense strand to SEQ ID NO: 2567586
uuugucauugcuugugaca

SEQ ID NO: 2567588 - RNA, 19 nt, Artificial Sequence
  Description of Artificial Sequence: Synthetic oligonucleotide
  Sense strand starting at position 1053 of SEQ ID NO: 1888941
accaucacugucgagugau

SEQ ID NO: 2567589 - RNA, 19 nt, Artificial Sequence
  Description of Artificial Sequence: Synthetic oligonucleotide
  Antisense strand to SEQ ID NO: 2567588
aucacucgacagugauggu

SEQ ID NO: 2567590 - RNA, 19 nt, Artificial Sequence
  Description of Artificial Sequence: Synthetic oligonucleotide
  Sense strand starting at position 1248 of SEQ ID NO: 1888941
uccaauauagaaugguauu

SEQ ID NO: 2567591 - RNA, 19 nt, Artificial Sequence
  Description of Artificial Sequence: Synthetic oligonucleotide
  Antisense strand to SEQ ID NO: 2567590
aauaccauucuauauugga

SEQ ID NO: 2567592 - RNA, 19 nt, Artificial Sequence
  Description of Artificial Sequence: Synthetic oligonucleotide
  Sense strand starting at position 1281 of SEQ ID NO: 1888941
gcccaugggcaauaaaguu

SEQ ID NO: 2567593 - RNA, 19 nt, Artificial Sequence
  Description of Artificial Sequence: Synthetic oligonucleotide
  Antisense strand to SEQ ID NO: 2567592
aacuuuauugcccaugggc

SEQ ID NO: 2567594 - RNA, 19 nt, Artificial Sequence
  Description of Artificial Sequence: Synthetic oligonucleotide
  Sense strand starting at position 1303 of SEQ ID NO: 1888941
ccacccuugguuuagaaua

SEQ ID NO: 2567595 - RNA, 19 nt, Artificial Sequence
  Description of Artificial Sequence: Synthetic oligonucleotide
  Antisense strand to SEQ ID NO: 2567594
uauucuaaaccaagggugg

SEQ ID NO: 2567596 - RNA, 19 nt, Artificial Sequence
  Description of Artificial Sequence: Synthetic oligonucleotide
  Sense strand starting at position 1593 of SEQ ID NO: 1888941
gugagaaccugucccuuaa

SEQ ID NO: 2567597 - RNA, 19 nt, Artificial Sequence
  Description of Artificial Sequence: Synthetic oligonucleotide
  Antisense strand to SEQ ID NO: 2567596
uuaagggacagguucucac

SEQ ID NO: 2567598 - RNA, 19 nt, Artificial Sequence
  Description of Artificial Sequence: Synthetic oligonucleotide
  Sense strand starting at position 1652 of SEQ ID NO: 1888941
agaauacuauuuggaugau

SEQ ID NO: 2567599 - RNA, 19 nt, Artificial Sequence
  Description of Artificial Sequence: Synthetic oligonucleotide
  Antisense strand to SEQ ID NO: 2567598
aucauccaaauaguauucu

SEQ ID NO: 2567600 - RNA, 19 nt, Artificial Sequence
  Description of Artificial Sequence: Synthetic oligonucleotide
  Sense strand starting at position 1921 of SEQ ID NO: 1888941
acaauaaauguuugcugau

SEQ ID NO: 2567601 - RNA, 19 nt, Artificial Sequence
  Description of Artificial Sequence: Synthetic oligonucleotide
  Antisense strand to SEQ ID NO: 2567600
aucagcaaacauuuauugu

SEQ ID NO: 2567602 - RNA, 19 nt, Artificial Sequence
  Description of Artificial Sequence: Synthetic oligonucleotide
  Sense strand starting at position 1922 of SEQ ID NO: 1888941
caauaaauguuugcugaug

SEQ ID NO: 2567603 - RNA, 19 nt, Artificial Sequence
  Description of Artificial Sequence: Synthetic oligonucleotide
  Antisense strand to SEQ ID NO: 2567602
caucagcaaacauuuauug

SEQ ID NO: 2567604 - RNA, 19 nt, Artificial Sequence
  Description of Artificial Sequence: Synthetic oligonucleotide
  Sense strand starting at position 1969 of SEQ ID NO: 1888941
uuuacugaggccuacuaau

SEQ ID NO: 2567605 - RNA, 19 nt, Artificial Sequence
  Description of Artificial Sequence: Synthetic oligonucleotide
  Antisense strand to SEQ ID NO: 2567604
auuaguaggccucaguaaa

SEQ ID NO: 2567606 - RNA, 19 nt, Artificial Sequence
  Description of Artificial Sequence: Synthetic oligonucleotide
  Sense strand starting at position 2101 of SEQ ID NO: 1888941
ugauaagugcuauaacacu

SEQ ID NO: 2567607 - RNA, 19 nt, Artificial Sequence
  Description of Artificial Sequence: Synthetic oligonucleotide
  Antisense strand to SEQ ID NO: 2567606
aguguuauagcacuuauca

SEQ ID NO: 2567608 - RNA, 19 nt, Artificial Sequence
  Description of Artificial Sequence: Synthetic oligonucleotide
  Sense strand starting at position 2131 of SEQ ID NO: 1888941
auuauaauggccgauguaa

SEQ ID NO: 2567609 - RNA, 19 nt, Artificial Sequence
  Description of Artificial Sequence: Synthetic oligonucleotide
  Antisense strand to SEQ ID NO: 2567608
uuacaucggccauuauaau

SEQ ID NO: 2567610 - RNA, 19 nt, Artificial Sequence
  Description of Artificial Sequence: Synthetic oligonucleotide
  Sense strand starting at position 2304 of SEQ ID NO: 1888941
uagacacuggcaugaugua

SEQ ID NO: 2567611 - RNA, 19 nt, Artificial Sequence
  Description of Artificial Sequence: Synthetic oligonucleotide
  Antisense strand to SEQ ID NO: 2567610
uacaucaugccagugucua

SEQ ID NO: 2567612 - RNA, 19 nt, Artificial Sequence
  Description of Artificial Sequence: Synthetic oligonucleotide
  Sense strand starting at position 2443 of SEQ ID NO: 1888941
acaugagccugguuuaaua

SEQ ID NO: 2567613 - RNA, 19 nt, Artificial Sequence
  Description of Artificial Sequence: Synthetic oligonucleotide
  Antisense strand to SEQ ID NO: 2567612
uauuaaaccaggcucaugu

SEQ ID NO: 2567614 - RNA, 19 nt, Artificial Sequence
  Description of Artificial Sequence: Synthetic oligonucleotide
  Sense strand starting at position 2454 of SEQ ID NO: 1888941
guuuaauaucuacagcuag

SEQ ID NO: 2567615 - RNA, 19 nt, Artificial Sequence
  Description of Artificial Sequence: Synthetic oligonucleotide
  Antisense strand to SEQ ID NO: 2567614
cuagcuguagauauuaaac

SEQ ID NO: 2567616 - RNA, 19 nt, Artificial Sequence
  Description of Artificial Sequence: Synthetic oligonucleotide
  Sense strand starting at position 2493 of SEQ ID NO: 1888941
gcuuacaacuaacuggauu

SEQ ID NO: 2567617 - RNA, 19 nt, Artificial Sequence
  Description of Artificial Sequence: Synthetic oligonucleotide
  Antisense strand to SEQ ID NO: 2567616
aauccaguuaguuguaagc

SEQ ID NO: 2567618 - RNA, 19 nt, Artificial Sequence
  Description of Artificial Sequence: Synthetic oligonucleotide
  Sense strand starting at position 2507 of SEQ ID NO: 1888941
ggauuaacccaguguaacc

SEQ ID NO: 2567619 - RNA, 19 nt, Artificial Sequence
  Description of Artificial Sequence: Synthetic oligonucleotide
  Antisense strand to SEQ ID NO: 2567618
gguuacacuggguuaaucc

SEQ ID NO: 2567620 - RNA, 19 nt, Artificial Sequence
  Description of Artificial Sequence: Synthetic oligonucleotide
  Sense strand starting at position 2517 of SEQ ID NO: 1888941
aguguaaccggauagcaaa

SEQ ID NO: 2567621 - RNA, 19 nt, Artificial Sequence
  Description of Artificial Sequence: Synthetic oligonucleotide
  Antisense strand to SEQ ID NO: 2567620
uuugcuauccgguuacacu

SEQ ID NO: 2567622 - RNA, 19 nt, Artificial Sequence
  Description of Artificial Sequence: Synthetic oligonucleotide
  Sense strand starting at position 2544 of SEQ ID NO: 1888941
aguaauagcucauuuggca

SEQ ID NO: 2567623 - RNA, 19 nt, Artificial Sequence
  Description of Artificial Sequence: Synthetic oligonucleotide
  Antisense strand to SEQ ID NO: 2567622
ugccaaaugagcuauuacu

SEQ ID NO: 2567624 - RNA, 19 nt, Artificial Sequence
  Description of Artificial Sequence: Synthetic oligonucleotide
  Sense strand starting at position 2746 of SEQ ID NO: 1888941
cuccaagaccuuugagaau

SEQ ID NO: 2567625 - RNA, 19 nt, Artificial Sequence
  Description of Artificial Sequence: Synthetic oligonucleotide
  Antisense strand to SEQ ID NO: 2567624
auucucaaaggucuuggag

SEQ ID NO: 2567626 - RNA, 19 nt, Artificial Sequence
  Description of Artificial Sequence: Synthetic oligonucleotide
  Sense strand starting at position 2839 of SEQ ID NO: 1888941
aaaucaugugagugauagu

SEQ ID NO: 2567627 - RNA, 19 nt, Artificial Sequence
  Description of Artificial Sequence: Synthetic oligonucleotide
  Antisense strand to SEQ ID NO: 2567626
acuaucacucacaugauuu

SEQ ID NO: 2567628 - RNA, 19 nt, Artificial Sequence
  Description of Artificial Sequence: Synthetic oligonucleotide
  Sense strand starting at position 2873 of SEQ ID NO: 1888941
gcaagauuauuacuguaau

SEQ ID NO: 2567629 - RNA, 19 nt, Artificial Sequence
  Description of Artificial Sequence: Synthetic oligonucleotide
  Antisense strand to SEQ ID NO: 2567628
auuacaguaauaaucuugc

SEQ ID NO: 2567630 - RNA, 19 nt, Artificial Sequence
  Description of Artificial Sequence: Synthetic oligonucleotide
  Sense strand starting at position 3010 of SEQ ID NO: 1888941
cugauaacaucagcaaguu

SEQ ID NO: 2567631 - RNA, 19 nt, Artificial Sequence
  Description of Artificial Sequence: Synthetic oligonucleotide
  Antisense strand to SEQ ID NO: 2567630
aacuugcugauguuaucag

SEQ ID NO: 2567632 - RNA, 19 nt, Artificial Sequence
  Description of Artificial Sequence: Synthetic oligonucleotide
  Sense strand starting at position 3026 of SEQ ID NO: 1888941
guuguugacaguuauacug

SEQ ID NO: 2567633 - RNA, 19 nt, Artificial Sequence
  Description of Artificial Sequence: Synthetic oligonucleotide
  Antisense strand to SEQ ID NO: 2567632
caguauaacugucaacaac

SEQ ID NO: 2567634 - RNA, 19 nt, Artificial Sequence
  Description of Artificial Sequence: Synthetic oligonucleotide
  Sense strand starting at position 3060 of SEQ ID NO: 1888941
gacccaaugucucuaugag

SEQ ID NO: 2567635 - RNA, 19 nt, Artificial Sequence
  Description of Artificial Sequence: Synthetic oligonucleotide
  Antisense strand to SEQ ID NO: 2567634
cucauagagacauuggguc

SEQ ID NO: 2567636 - RNA, 19 nt, Artificial Sequence
  Description of Artificial Sequence: Synthetic oligonucleotide
  Sense strand starting at position 3187 of SEQ ID NO: 1888941
caugcuagcguguuccuau

SEQ ID NO: 2567637 - RNA, 19 nt, Artificial Sequence
  Description of Artificial Sequence: Synthetic oligonucleotide
  Antisense strand to SEQ ID NO: 2567636
auaggaacacgcuagcaug

SEQ ID NO: 2567638 - RNA, 19 nt, Artificial Sequence
  Description of Artificial Sequence: Synthetic oligonucleotide
  Sense strand starting at position 3239 of SEQ ID NO: 1888941
uguauaaauguggacacuu

SEQ ID NO: 2567639 - RNA, 19 nt, Artificial Sequence
  Description of Artificial Sequence: Synthetic oligonucleotide
  Antisense strand to SEQ ID NO: 2567638
aaguguccacauuuauaca

SEQ ID NO: 2567640 - RNA, 19 nt, Artificial Sequence
  Description of Artificial Sequence: Synthetic oligonucleotide
  Sense strand starting at position 3362 of SEQ ID NO: 1888941
auuaguuucucauuaggga

SEQ ID NO: 2567641 - RNA, 19 nt, Artificial Sequence
  Description of Artificial Sequence: Synthetic oligonucleotide
  Antisense strand to SEQ ID NO: 2567640
ucccuaaugagaaacuaau

SEQ ID NO: 2567642 - RNA, 19 nt, Artificial Sequence
  Description of Artificial Sequence: Synthetic oligonucleotide
  Sense strand starting at position 3428 of SEQ ID NO: 1888941
acuguuguacaguacucaa

SEQ ID NO: 2567643 - RNA, 19 nt, Artificial Sequence
  Description of Artificial Sequence: Synthetic oligonucleotide
  Antisense strand to SEQ ID NO: 2567642
uugaguacuguacaacagu

SEQ ID NO: 2567644 - RNA, 19 nt, Artificial Sequence
  Description of Artificial Sequence: Synthetic oligonucleotide
  Sense strand starting at position 3592 of SEQ ID NO: 1888941
gggcaagaccuccacucua

SEQ ID NO: 2567645 - RNA, 19 nt, Artificial Sequence
  Description of Artificial Sequence: Synthetic oligonucleotide
  Antisense strand to SEQ ID NO: 2567644
uagaguggaggucuugccc

SEQ ID NO: 2567646 - RNA, 19 nt, Artificial Sequence
  Description of Artificial Sequence: Synthetic oligonucleotide
  Sense strand starting at position 3673 of SEQ ID NO: 1888941
ccagacauguauccacaca

SEQ ID NO: 2567647 - RNA, 19 nt, Artificial Sequence
  Description of Artificial Sequence: Synthetic oligonucleotide
  Antisense strand to SEQ ID NO: 2567646
uguguggauacaugucugg

SEQ ID NO: 2567648 - RNA, 19 nt, Artificial Sequence
  Description of Artificial Sequence: Synthetic oligonucleotide
  Sense strand starting at position 3750 of SEQ ID NO: 1888941
ggagcauaucugcaacaaa

SEQ ID NO: 2567649 - RNA, 19 nt, Artificial Sequence
  Description of Artificial Sequence: Synthetic oligonucleotide
  Antisense strand to SEQ ID NO: 2567648
uuuguugcagauaugcucc

SEQ ID NO: 2567650 - RNA, 19 nt, Artificial Sequence
  Description of Artificial Sequence: Synthetic oligonucleotide
  Sense strand starting at position 3894 of SEQ ID NO: 1888941
aaagauaucggccagguau

SEQ ID NO: 2567651 - RNA, 19 nt, Artificial Sequence
  Description of Artificial Sequence: Synthetic oligonucleotide
  Antisense strand to SEQ ID NO: 2567650
auaccuggccgauaucuuu

SEQ ID NO: 2567652 - RNA, 19 nt, Artificial Sequence
  Description of Artificial Sequence: Synthetic oligonucleotide
  Sense strand starting at position 184 of SEQ ID NO: 1888942
auugcaaaccaguaaguuu

SEQ ID NO: 2567653 - RNA, 19 nt, Artificial Sequence
  Description of Artificial Sequence: Synthetic oligonucleotide
  Antisense strand to SEQ ID NO: 2567652
aaacuuacugguuugcaau

SEQ ID NO: 2567654 - RNA, 19 nt, Artificial Sequence
  Description of Artificial Sequence: Synthetic oligonucleotide
  Sense strand starting at position 264 of SEQ ID NO: 1888942
gauacaguguuacuguaag

SEQ ID NO: 2567655 - RNA, 19 nt, Artificial Sequence
  Description of Artificial Sequence: Synthetic oligonucleotide
  Antisense strand to SEQ ID NO: 2567654
cuuacaguaacacuguauc

SEQ ID NO: 2567656 - RNA, 19 nt, Artificial Sequence
  Description of Artificial Sequence: Synthetic oligonucleotide
  Sense strand starting at position 272 of SEQ ID NO: 1888942
guuacuguaagagaaguau

SEQ ID NO: 2567657 - RNA, 19 nt, Artificial Sequence
  Description of Artificial Sequence: Synthetic oligonucleotide
  Antisense strand to SEQ ID NO: 2567656
auacuucucuuacaguaac

SEQ ID NO: 2567658 - RNA, 19 nt, Artificial Sequence
  Description of Artificial Sequence: Synthetic oligonucleotide
  Sense strand starting at position 384 of SEQ ID NO: 1888942
uacaguucugaagguuaaa

SEQ ID NO: 2567659 - RNA, 19 nt, Artificial Sequence
  Description of Artificial Sequence: Synthetic oligonucleotide
  Antisense strand to SEQ ID NO: 2567658
uuuaaccuucagaacugua

SEQ ID NO: 2567660 - RNA, 19 nt, Artificial Sequence
  Description of Artificial Sequence: Synthetic oligonucleotide
  Sense strand starting at position 634 of SEQ ID NO: 1888942
uugugauuacauugggauc

SEQ ID NO: 2567661 - RNA, 19 nt, Artificial Sequence
  Description of Artificial Sequence: Synthetic oligonucleotide
  Antisense strand to SEQ ID NO: 2567660
gaucccaauguaaucacaa

SEQ ID NO: 2567662 - RNA, 19 nt, Artificial Sequence
  Description of Artificial Sequence: Synthetic oligonucleotide
  Sense strand starting at position 635 of SEQ ID NO: 1888942
ugugauuacauugggauca

SEQ ID NO: 2567663 - RNA, 19 nt, Artificial Sequence
  Description of Artificial Sequence: Synthetic oligonucleotide
  Antisense strand to SEQ ID NO: 2567662
ugaucccaauguaaucaca

SEQ ID NO: 2567664 - RNA, 19 nt, Artificial Sequence
  Description of Artificial Sequence: Synthetic oligonucleotide
  Sense strand starting at position 762 of SEQ ID NO: 1888942
uggacuucucugggagcca

SEQ ID NO: 2567665 - RNA, 19 nt, Artificial Sequence
  Description of Artificial Sequence: Synthetic oligonucleotide
  Antisense strand to SEQ ID NO: 2567664
uggcucccagagaagucca

SEQ ID NO: 2567666 - RNA, 19 nt, Artificial Sequence
  Description of Artificial Sequence: Synthetic oligonucleotide
  Sense strand starting at position 829 of SEQ ID NO: 1888942
uaaguagaucccuguggau

SEQ ID NO: 2567667 - RNA, 19 nt, Artificial Sequence
  Description of Artificial Sequence: Synthetic oligonucleotide
  Antisense strand to SEQ ID NO: 2567666
auccacagggaucuacuua

SEQ ID NO: 2567668 - RNA, 19 nt, Artificial Sequence
  Description of Artificial Sequence: Synthetic oligonucleotide
  Sense strand starting at position 831 of SEQ ID NO: 1888942
aguagaucccuguggauac

SEQ ID NO: 2567669 - RNA, 19 nt, Artificial Sequence
  Description of Artificial Sequence: Synthetic oligonucleotide
  Antisense strand to SEQ ID NO: 2567668
guauccacagggaucuacu

SEQ ID NO: 2567670 - RNA, 19 nt, Artificial Sequence
  Description of Artificial Sequence: Synthetic oligonucleotide
  Sense strand starting at position 838 of SEQ ID NO: 1888942
cccuguggauacuuaggaa

SEQ ID NO: 2567671 - RNA, 19 nt, Artificial Sequence
  Description of Artificial Sequence: Synthetic oligonucleotide
  Antisense strand to SEQ ID NO: 2567670
uuccuaaguauccacaggg

SEQ ID NO: 2567672 - RNA, 19 nt, Artificial Sequence
  Description of Artificial Sequence: Synthetic oligonucleotide
  Sense strand starting at position 877 of SEQ ID NO: 1888942
ggaaguaucccaggcagag

SEQ ID NO: 2567673 - RNA, 19 nt, Artificial Sequence
  Description of Artificial Sequence: Synthetic oligonucleotide
  Antisense strand to SEQ ID NO: 2567672
cucugccugggauacuucc

SEQ ID NO: 2567674 - RNA, 19 nt, Artificial Sequence
  Description of Artificial Sequence: Synthetic oligonucleotide
  Sense strand starting at position 1337 of SEQ ID NO: 1888942
acaccuuauugguucuuga

SEQ ID NO: 2567675 - RNA, 19 nt, Artificial Sequence
  Description of Artificial Sequence: Synthetic oligonucleotide
  Antisense strand to SEQ ID NO: 2567674
ucaagaaccaauaaggugu

SEQ ID NO: 2567676 - RNA, 19 nt, Artificial Sequence
  Description of Artificial Sequence: Synthetic oligonucleotide
  Sense strand starting at position 1614 of SEQ ID NO: 1888942
cucgcaauauaacuuagau

SEQ ID NO: 2567677 - RNA, 19 nt, Artificial Sequence
  Description of Artificial Sequence: Synthetic oligonucleotide
  Antisense strand to SEQ ID NO: 2567676
aucuaaguuauauugcgag

SEQ ID NO: 2567678 - RNA, 19 nt, Artificial Sequence
  Description of Artificial Sequence: Synthetic oligonucleotide
  Sense strand starting at position 2007 of SEQ ID NO: 1888942
aacugagagcucugugaaa

SEQ ID NO: 2567679 - RNA, 19 nt, Artificial Sequence
  Description of Artificial Sequence: Synthetic oligonucleotide
  Antisense strand to SEQ ID NO: 2567678
uuucacagagcucucaguu

SEQ ID NO: 2567680 - RNA, 19 nt, Artificial Sequence
  Description of Artificial Sequence: Synthetic oligonucleotide
  Sense strand starting at position 2049 of SEQ ID NO: 1888942
cugagaaguucuguagaaa

SEQ ID NO: 2567681 - RNA, 19 nt, Artificial Sequence
  Description of Artificial Sequence: Synthetic oligonucleotide
  Antisense strand to SEQ ID NO: 2567680
uuucuacagaacuucucag

SEQ ID NO: 2567682 - RNA, 19 nt, Artificial Sequence
  Description of Artificial Sequence: Synthetic oligonucleotide
  Sense strand starting at position 2415 of SEQ ID NO: 1888942
augugaguccauuaaagcu

SEQ ID NO: 2567683 - RNA, 19 nt, Artificial Sequence
  Description of Artificial Sequence: Synthetic oligonucleotide
  Antisense strand to SEQ ID NO: 2567682
agcuuuaauggacucacau

SEQ ID NO: 2567684 - RNA, 19 nt, Artificial Sequence
  Description of Artificial Sequence: Synthetic oligonucleotide
  Sense strand starting at position 2491 of SEQ ID NO: 1888942
ggacuaauacagcacuguu

SEQ ID NO: 2567685 - RNA, 19 nt, Artificial Sequence
  Description of Artificial Sequence: Synthetic oligonucleotide
  Antisense strand to SEQ ID NO: 2567684
aacagugcuguauuagucc

SEQ ID NO: 2567686 - RNA, 19 nt, Artificial Sequence
  Description of Artificial Sequence: Synthetic oligonucleotide
  Sense strand starting at position 2544 of SEQ ID NO: 1888942
ggauacuguuguuccauga

SEQ ID NO: 2567687 - RNA, 19 nt, Artificial Sequence
  Description of Artificial Sequence: Synthetic oligonucleotide
  Antisense strand to SEQ ID NO: 2567686
ucauggaacaacaguaucc

SEQ ID NO: 2567688 - RNA, 19 nt, Artificial Sequence
  Description of Artificial Sequence: Synthetic oligonucleotide
  Sense strand starting at position 2726 of SEQ ID NO: 1888942
ucauaaggauuaguugaau

SEQ ID NO: 2567689 - RNA, 19 nt, Artificial Sequence
  Description of Artificial Sequence: Synthetic oligonucleotide
  Antisense strand to SEQ ID NO: 2567688
auucaacuaauccuuauga

SEQ ID NO: 2567690 - RNA, 19 nt, Artificial Sequence
  Description of Artificial Sequence: Synthetic oligonucleotide
  Sense strand starting at position 2732 of SEQ ID NO: 1888942
ggauuaguugaauaagugu

SEQ ID NO: 2567691 - RNA, 19 nt, Artificial Sequence
  Description of Artificial Sequence: Synthetic oligonucleotide
  Antisense strand to SEQ ID NO: 2567690
acacuuauucaacuaaucc

SEQ ID NO: 2567692 - RNA, 19 nt, Artificial Sequence
  Description of Artificial Sequence: Synthetic oligonucleotide
  Sense strand starting at position 2753 of SEQ ID NO: 1888942
gugguuauuauuuggagca

SEQ ID NO: 2567693 - RNA, 19 nt, Artificial Sequence
  Description of Artificial Sequence: Synthetic oligonucleotide
  Antisense strand to SEQ ID NO: 2567692
ugcuccaaauaauaaccac

SEQ ID NO: 2567694 - RNA, 19 nt, Artificial Sequence
  Description of Artificial Sequence: Synthetic oligonucleotide
  Sense strand starting at position 2775 of SEQ ID NO: 1888942
ugaggauacugcucuugaa

SEQ ID NO: 2567695 - RNA, 19 nt, Artificial Sequence
  Description of Artificial Sequence: Synthetic oligonucleotide
  Antisense strand to SEQ ID NO: 2567694
uucaagagcaguauccuca

SEQ ID NO: 2567696 - RNA, 19 nt, Artificial Sequence
  Description of Artificial Sequence: Synthetic oligonucleotide
  Sense strand starting at position 2779 of SEQ ID NO: 1888942
gauacugcucuugaaguau

SEQ ID NO: 2567697 - RNA, 19 nt, Artificial Sequence
  Description of Artificial Sequence: Synthetic oligonucleotide
  Antisense strand to SEQ ID NO: 2567696
auacuucaagagcaguauc

SEQ ID NO: 2567698 - RNA, 19 nt, Artificial Sequence
  Description of Artificial Sequence: Synthetic oligonucleotide
  Sense strand starting at position 2787 of SEQ ID NO: 1888942
ucuugaaguauugguauga

SEQ ID NO: 2567699 - RNA, 19 nt, Artificial Sequence
  Description of Artificial Sequence: Synthetic oligonucleotide
  Antisense strand to SEQ ID NO: 2567698
ucauaccaauacuucaaga

SEQ ID NO: 2567700 - RNA, 19 nt, Artificial Sequence
  Description of Artificial Sequence: Synthetic oligonucleotide
  Sense strand starting at position 2788 of SEQ ID NO: 1888942
cuugaaguauugguaugaa

SEQ ID NO: 2567701 - RNA, 19 nt, Artificial Sequence
  Description of Artificial Sequence: Synthetic oligonucleotide
  Antisense strand to SEQ ID NO: 2567700
uucauaccaauacuucaag

SEQ ID NO: 2567702 - RNA, 19 nt, Artificial Sequence
  Description of Artificial Sequence: Synthetic oligonucleotide
  Sense strand starting at position 2791 of SEQ ID NO: 1888942
gaaguauugguaugaaguu

SEQ ID NO: 2567703 - RNA, 19 nt, Artificial Sequence
  Description of Artificial Sequence: Synthetic oligonucleotide
  Antisense strand to SEQ ID NO: 2567702
aacuucauaccaauacuuc

SEQ ID NO: 2567704 - RNA, 19 nt, Artificial Sequence
  Description of Artificial Sequence: Synthetic oligonucleotide
  Sense strand starting at position 2884 of SEQ ID NO: 1888942
auggcacucccauauaaug

SEQ ID NO: 2567705 - RNA, 19 nt, Artificial Sequence
  Description of Artificial Sequence: Synthetic oligonucleotide
  Antisense strand to SEQ ID NO: 2567704
cauuauaugggagugccau

SEQ ID NO: 2567706 - RNA, 19 nt, Artificial Sequence
  Description of Artificial Sequence: Synthetic oligonucleotide
  Sense strand starting at position 3107 of SEQ ID NO: 1888942
caggaugacugcuccucua

SEQ ID NO: 2567707 - RNA, 19 nt, Artificial Sequence
  Description of Artificial Sequence: Synthetic oligonucleotide
  Antisense strand to SEQ ID NO: 2567706
uagaggagcagucauccug

SEQ ID NO: 2567708 - RNA, 19 nt, Artificial Sequence
  Description of Artificial Sequence: Synthetic oligonucleotide
  Sense strand starting at position 3132 of SEQ ID NO: 1888942
aggcauccucaaggguauu

SEQ ID NO: 2567709 - RNA, 19 nt, Artificial Sequence
  Description of Artificial Sequence: Synthetic oligonucleotide
  Antisense strand to SEQ ID NO: 2567708
aauacccuugaggaugccu

SEQ ID NO: 2567710 - RNA, 19 nt, Artificial Sequence
  Description of Artificial Sequence: Synthetic oligonucleotide
  Sense strand starting at position 3153 of SEQ ID NO: 1888942
gcguaugugauuuagcuug

SEQ ID NO: 2567711 - RNA, 19 nt, Artificial Sequence
  Description of Artificial Sequence: Synthetic oligonucleotide
  Antisense strand to SEQ ID NO: 2567710
caagcuaaaucacauacgc

SEQ ID NO: 2567712 - RNA, 19 nt, Artificial Sequence
  Description of Artificial Sequence: Synthetic oligonucleotide
  Sense strand starting at position 3155 of SEQ ID NO: 1888942
guaugugauuuagcuugua

SEQ ID NO: 2567713 - RNA, 19 nt, Artificial Sequence
  Description of Artificial Sequence: Synthetic oligonucleotide
  Antisense strand to SEQ ID NO: 2567712
uacaagcuaaaucacauac

SEQ ID NO: 2567714 - RNA, 19 nt, Artificial Sequence
  Description of Artificial Sequence: Synthetic oligonucleotide
  Sense strand starting at position 3158 of SEQ ID NO: 1888942
ugugauuuagcuuguauuc

SEQ ID NO: 2567715 - RNA, 19 nt, Artificial Sequence
  Description of Artificial Sequence: Synthetic oligonucleotide
  Antisense strand to SEQ ID NO: 2567714
gaauacaagcuaaaucaca

SEQ ID NO: 2567716 - RNA, 19 nt, Artificial Sequence
  Description of Artificial Sequence: Synthetic oligonucleotide
  Sense strand starting at position 3493 of SEQ ID NO: 1888942
guuaaugacuuguccaaag

SEQ ID NO: 2567717 - RNA, 19 nt, Artificial Sequence
  Description of Artificial Sequence: Synthetic oligonucleotide
  Antisense strand to SEQ ID NO: 2567716
cuuuggacaagucauuaac

SEQ ID NO: 2567718 - RNA, 19 nt, Artificial Sequence
  Description of Artificial Sequence: Synthetic oligonucleotide
  Sense strand starting at position 3587 of SEQ ID NO: 1888942
caaaguuacuggccacaga

SEQ ID NO: 2567719 - RNA, 19 nt, Artificial Sequence
  Description of Artificial Sequence: Synthetic oligonucleotide
  Antisense strand to SEQ ID NO: 2567718
ucuguggccaguaacuuug

SEQ ID NO: 2567720 - RNA, 19 nt, Artificial Sequence
  Description of Artificial Sequence: Synthetic oligonucleotide
  Sense strand starting at position 3637 of SEQ ID NO: 1888942
agaucuguuuaaguuagga

SEQ ID NO: 2567721 - RNA, 19 nt, Artificial Sequence
  Description of Artificial Sequence: Synthetic oligonucleotide
  Antisense strand to SEQ ID NO: 2567720
uccuaacuuaaacagaucu

SEQ ID NO: 2567722 - RNA, 19 nt, Artificial Sequence
  Description of Artificial Sequence: Synthetic oligonucleotide
  Sense strand starting at position 3688 of SEQ ID NO: 1888942
uccuaaucugacuaguguu

SEQ ID NO: 2567723 - RNA, 19 nt, Artificial Sequence
  Description of Artificial Sequence: Synthetic oligonucleotide
  Antisense strand to SEQ ID NO: 2567722
aacacuagucagauuagga

SEQ ID NO: 2567724 - RNA, 19 nt, Artificial Sequence
  Description of Artificial Sequence: Synthetic oligonucleotide
  Sense strand starting at position 3787 of SEQ ID NO: 1888942
ggauucuccaggugaggua

SEQ ID NO: 2567725 - RNA, 19 nt, Artificial Sequence
  Description of Artificial Sequence: Synthetic oligonucleotide
  Antisense strand to SEQ ID NO: 2567724
uaccucaccuggagaaucc

SEQ ID NO: 2567726 - RNA, 19 nt, Artificial Sequence
  Description of Artificial Sequence: Synthetic oligonucleotide
  Sense strand starting at position 3794 of SEQ ID NO: 1888942
ccaggugagguaugaaauc

SEQ ID NO: 2567727 - RNA, 19 nt, Artificial Sequence
  Description of Artificial Sequence: Synthetic oligonucleotide
  Antisense strand to SEQ ID NO: 2567726
gauuucauaccucaccugg

SEQ ID NO: 2567728 - RNA, 19 nt, Artificial Sequence
  Description of Artificial Sequence: Synthetic oligonucleotide
  Sense strand starting at position 3800 of SEQ ID NO: 1888942
gagguaugaaaucgcugaa

SEQ ID NO: 2567729 - RNA, 19 nt, Artificial Sequence
  Description of Artificial Sequence: Synthetic oligonucleotide
  Antisense strand to SEQ ID NO: 2567728
uucagcgauuucauaccuc

SEQ ID NO: 2567730 - RNA, 19 nt, Artificial Sequence
  Description of Artificial Sequence: Synthetic oligonucleotide
  Sense strand starting at position 3833 of SEQ ID NO: 1888942
gaugauauauccucaggug

SEQ ID NO: 2567731 - RNA, 19 nt, Artificial Sequence
  Description of Artificial Sequence: Synthetic oligonucleotide
  Antisense strand to SEQ ID NO: 2567730
caccugaggauauaucauc

SEQ ID NO: 2567732 - RNA, 19 nt, Artificial Sequence
  Description of Artificial Sequence: Synthetic oligonucleotide
  Sense strand starting at position 403 of SEQ ID NO: 1888943
cacaguagugucuaggagu

SEQ ID NO: 2567733 - RNA, 19 nt, Artificial Sequence
  Description of Artificial Sequence: Synthetic oligonucleotide
  Antisense strand to SEQ ID NO: 2567732
acuccuagacacuacugug

SEQ ID NO: 2567734 - RNA, 19 nt, Artificial Sequence
  Description of Artificial Sequence: Synthetic oligonucleotide
  Sense strand starting at position 481 of SEQ ID NO: 1888943
guccauagauggcuuaagu

SEQ ID NO: 2567735 - RNA, 19 nt, Artificial Sequence
  Description of Artificial Sequence: Synthetic oligonucleotide
  Antisense strand to SEQ ID NO: 2567734
acuuaagccaucuauggac

SEQ ID NO: 2567736 - RNA, 19 nt, Artificial Sequence
  Description of Artificial Sequence: Synthetic oligonucleotide
  Sense strand starting at position 531 of SEQ ID NO: 1888943
gguucuuguccggaauuca

SEQ ID NO: 2567737 - RNA, 19 nt, Artificial Sequence
  Description of Artificial Sequence: Synthetic oligonucleotide
  Antisense strand to SEQ ID NO: 2567736
ugaauuccggacaagaacc

SEQ ID NO: 2567738 - RNA, 19 nt, Artificial Sequence
  Description of Artificial Sequence: Synthetic oligonucleotide
  Sense strand starting at position 570 of SEQ ID NO: 1888943
gggcuugaaggauggugaa

SEQ ID NO: 2567739 - RNA, 19 nt, Artificial Sequence
  Description of Artificial Sequence: Synthetic oligonucleotide
  Antisense strand to SEQ ID NO: 2567738
uucaccauccuucaagccc

SEQ ID NO: 2567740 - RNA, 19 nt, Artificial Sequence
  Description of Artificial Sequence: Synthetic oligonucleotide
  Sense strand starting at position 868 of SEQ ID NO: 1888943
caggaaugcuuguucuuau

SEQ ID NO: 2567741 - RNA, 19 nt, Artificial Sequence
  Description of Artificial Sequence: Synthetic oligonucleotide
  Antisense strand to SEQ ID NO: 2567740
auaagaacaagcauuccug

SEQ ID NO: 2567742 - RNA, 19 nt, Artificial Sequence
  Description of Artificial Sequence: Synthetic oligonucleotide
  Sense strand starting at position 869 of SEQ ID NO: 1888943
aggaaugcuuguucuuauu

SEQ ID NO: 2567743 - RNA, 19 nt, Artificial Sequence
  Description of Artificial Sequence: Synthetic oligonucleotide
  Antisense strand to SEQ ID NO: 2567742
aauaagaacaagcauuccu

SEQ ID NO: 2567744 - RNA, 19 nt, Artificial Sequence
  Description of Artificial Sequence: Synthetic oligonucleotide
  Sense strand starting at position 918 of SEQ ID NO: 1888943
gggccuuugccagagaauc

SEQ ID NO: 2567745 - RNA, 19 nt, Artificial Sequence
  Description of Artificial Sequence: Synthetic oligonucleotide
  Antisense strand to SEQ ID NO: 2567744
gauucucuggcaaaggccc

SEQ ID NO: 2567746 - RNA, 19 nt, Artificial Sequence
  Description of Artificial Sequence: Synthetic oligonucleotide
  Sense strand starting at position 971 of SEQ ID NO: 1888943
ccauaucaucuagaguagu

SEQ ID NO: 2567747 - RNA, 19 nt, Artificial Sequence
  Description of Artificial Sequence: Synthetic oligonucleotide
  Antisense strand to SEQ ID NO: 2567746
acuacucuagaugauaugg

SEQ ID NO: 2567748 - RNA, 19 nt, Artificial Sequence
  Description of Artificial Sequence: Synthetic oligonucleotide
  Sense strand starting at position 1365 of SEQ ID NO: 1888943
uggguauaguuucuaguuu

SEQ ID NO: 2567749 - RNA, 19 nt, Artificial Sequence
  Description of Artificial Sequence: Synthetic oligonucleotide
  Antisense strand to SEQ ID NO: 2567748
aaacuagaaacuauaccca

SEQ ID NO: 2567750 - RNA, 19 nt, Artificial Sequence
  Description of Artificial Sequence: Synthetic oligonucleotide
  Sense strand starting at position 1871 of SEQ ID NO: 1888943
ggugccauaucuccuauuu

SEQ ID NO: 2567751 - RNA, 19 nt, Artificial Sequence
  Description of Artificial Sequence: Synthetic oligonucleotide
  Antisense strand to SEQ ID NO: 2567750
aaauaggagauauggcacc

SEQ ID NO: 2567752 - RNA, 19 nt, Artificial Sequence
  Description of Artificial Sequence: Synthetic oligonucleotide
  Sense strand starting at position 2179 of SEQ ID NO: 1888943
ugugcaagaauuugcugau

SEQ ID NO: 2567753 - RNA, 19 nt, Artificial Sequence
  Description of Artificial Sequence: Synthetic oligonucleotide
  Antisense strand to SEQ ID NO: 2567752
aucagcaaauucuugcaca

SEQ ID NO: 2567754 - RNA, 19 nt, Artificial Sequence
  Description of Artificial Sequence: Synthetic oligonucleotide
  Sense strand starting at position 2189 of SEQ ID NO: 1888943
uuugcugaugcuuaucuaa

SEQ ID NO: 2567755 - RNA, 19 nt, Artificial Sequence
  Description of Artificial Sequence: Synthetic oligonucleotide
  Antisense strand to SEQ ID NO: 2567754
uuagauaagcaucagcaaa

SEQ ID NO: 2567756 - RNA, 19 nt, Artificial Sequence
  Description of Artificial Sequence: Synthetic oligonucleotide
  Sense strand starting at position 2191 of SEQ ID NO: 1888943
ugcugaugcuuaucuaauu

SEQ ID NO: 2567757 - RNA, 19 nt, Artificial Sequence
  Description of Artificial Sequence: Synthetic oligonucleotide
  Antisense strand to SEQ ID NO: 2567756
aauuagauaagcaucagca

SEQ ID NO: 2567758 - RNA, 19 nt, Artificial Sequence
  Description of Artificial Sequence: Synthetic oligonucleotide
  Sense strand starting at position 2250 of SEQ ID NO: 1888943
ggugcagauauuuguugua

SEQ ID NO: 2567759 - RNA, 19 nt, Artificial Sequence
  Description of Artificial Sequence: Synthetic oligonucleotide
  Antisense strand to SEQ ID NO: 2567758
uacaacaaauaucugcacc

SEQ ID NO: 2567760 - RNA, 19 nt, Artificial Sequence
  Description of Artificial Sequence: Synthetic oligonucleotide
  Sense strand starting at position 2252 of SEQ ID NO: 1888943
ugcagauauuuguuguauu

SEQ ID NO: 2567761 - RNA, 19 nt, Artificial Sequence
  Description of Artificial Sequence: Synthetic oligonucleotide
  Antisense strand to SEQ ID NO: 2567760
aauacaacaaauaucugca

SEQ ID NO: 2567762 - RNA, 19 nt, Artificial Sequence
  Description of Artificial Sequence: Synthetic oligonucleotide
  Sense strand starting at position 2253 of SEQ ID NO: 1888943
gcagauauuuguuguauuu

SEQ ID NO: 2567763 - RNA, 19 nt, Artificial Sequence
  Description of Artificial Sequence: Synthetic oligonucleotide
  Antisense strand to SEQ ID NO: 2567762
aaauacaacaaauaucugc

SEQ ID NO: 2567764 - RNA, 19 nt, Artificial Sequence
  Description of Artificial Sequence: Synthetic oligonucleotide
  Sense strand starting at position 2264 of SEQ ID NO: 1888943
uuguauuucgcuugcagag

SEQ ID NO: 2567765 - RNA, 19 nt, Artificial Sequence
  Description of Artificial Sequence: Synthetic oligonucleotide
  Antisense strand to SEQ ID NO: 2567764
cucugcaagcgaaauacaa

SEQ ID NO: 2567766 - RNA, 19 nt, Artificial Sequence
  Description of Artificial Sequence: Synthetic oligonucleotide
  Sense strand starting at position 2312 of SEQ ID NO: 1888943
guaaauaaguugccaacau

SEQ ID NO: 2567767 - RNA, 19 nt, Artificial Sequence
  Description of Artificial Sequence: Synthetic oligonucleotide
  Antisense strand to SEQ ID NO: 2567766
auguuggcaacuuauuuac

SEQ ID NO: 2567768 - RNA, 19 nt, Artificial Sequence
  Description of Artificial Sequence: Synthetic oligonucleotide
  Sense strand starting at position 2329 of SEQ ID NO: 1888943
auuuaaacgucaggagauu

SEQ ID NO: 2567769 - RNA, 19 nt, Artificial Sequence
  Description of Artificial Sequence: Synthetic oligonucleotide
  Antisense strand to SEQ ID NO: 2567768
aaucuccugacguuuaaau

SEQ ID NO: 2567770 - RNA, 19 nt, Artificial Sequence
  Description of Artificial Sequence: Synthetic oligonucleotide
  Sense strand starting at position 2438 of SEQ ID NO: 1888943
ggaagucacuucuuugaug

SEQ ID NO: 2567771 - RNA, 19 nt, Artificial Sequence
  Description of Artificial Sequence: Synthetic oligonucleotide
  Antisense strand to SEQ ID NO: 2567770
caucaaagaagugacuucc

SEQ ID NO: 2567772 - RNA, 19 nt, Artificial Sequence
  Description of Artificial Sequence: Synthetic oligonucleotide
  Sense strand starting at position 2458 of SEQ ID NO: 1888943
ggcacaugcuugcugauuu

SEQ ID NO: 2567773 - RNA, 19 nt, Artificial Sequence
  Description of Artificial Sequence: Synthetic oligonucleotide
  Antisense strand to SEQ ID NO: 2567772
aaaucagcaagcaugugcc

SEQ ID NO: 2567774 - RNA, 19 nt, Artificial Sequence
  Description of Artificial Sequence: Synthetic oligonucleotide
  Sense strand starting at position 2535 of SEQ ID NO: 1888943
gcugauuguugagcuuaag

SEQ ID NO: 2567775 - RNA, 19 nt, Artificial Sequence
  Description of Artificial Sequence: Synthetic oligonucleotide
  Antisense strand to SEQ ID NO: 2567774
cuuaagcucaacaaucagc

SEQ ID NO: 2567776 - RNA, 19 nt, Artificial Sequence
  Description of Artificial Sequence: Synthetic oligonucleotide
  Sense strand starting at position 2596 of SEQ ID NO: 1888943
ccuagaugcucagugcaaa

SEQ ID NO: 2567777 - RNA, 19 nt, Artificial Sequence
  Description of Artificial Sequence: Synthetic oligonucleotide
  Antisense strand to SEQ ID NO: 2567776
uuugcacugagcaucuagg

SEQ ID NO: 2567778 - RNA, 19 nt, Artificial Sequence
  Description of Artificial Sequence: Synthetic oligonucleotide
  Sense strand starting at position 2629 of SEQ ID NO: 1888943
ugugucuauccuuaagcua

SEQ ID NO: 2567779 - RNA, 19 nt, Artificial Sequence
  Description of Artificial Sequence: Synthetic oligonucleotide
  Antisense strand to SEQ ID NO: 2567778
uagcuuaaggauagacaca

SEQ ID NO: 2567780 - RNA, 19 nt, Artificial Sequence
  Description of Artificial Sequence: Synthetic oligonucleotide
  Sense strand starting at position 2755 of SEQ ID NO: 1888943
uucucaggauucucaguga

SEQ ID NO: 2567781 - RNA, 19 nt, Artificial Sequence
  Description of Artificial Sequence: Synthetic oligonucleotide
  Antisense strand to SEQ ID NO: 2567780
ucacugagaauccugagaa

SEQ ID NO: 2567782 - RNA, 19 nt, Artificial Sequence
  Description of Artificial Sequence: Synthetic oligonucleotide
  Sense strand starting at position 2813 of SEQ ID NO: 1888943
ccucuucuuugauuaaggu

SEQ ID NO: 2567783 - RNA, 19 nt, Artificial Sequence
  Description of Artificial Sequence: Synthetic oligonucleotide
  Antisense strand to SEQ ID NO: 2567782
accuuaaucaaagaagagg

SEQ ID NO: 2567784 - RNA, 19 nt, Artificial Sequence
  Description of Artificial Sequence: Synthetic oligonucleotide
  Sense strand starting at position 2856 of SEQ ID NO: 1888943
gucaaagagucagcucaau

SEQ ID NO: 2567785 - RNA, 19 nt, Artificial Sequence
  Description of Artificial Sequence: Synthetic oligonucleotide
  Antisense strand to SEQ ID NO: 2567784
auugagcugacucuuugac

SEQ ID NO: 2567786 - RNA, 19 nt, Artificial Sequence
  Description of Artificial Sequence: Synthetic oligonucleotide
  Sense strand starting at position 2862 of SEQ ID NO: 1888943
gagucagcucaaugacuuu

SEQ ID NO: 2567787 - RNA, 19 nt, Artificial Sequence
  Description of Artificial Sequence: Synthetic oligonucleotide
  Antisense strand to SEQ ID NO: 2567786
aaagucauugagcugacuc

SEQ ID NO: 2567788 - RNA, 19 nt, Artificial Sequence
  Description of Artificial Sequence: Synthetic oligonucleotide
  Sense strand starting at position 2886 of SEQ ID NO: 1888943
aagugaccuggaugaguga

SEQ ID NO: 2567789 - RNA, 19 nt, Artificial Sequence
  Description of Artificial Sequence: Synthetic oligonucleotide
  Antisense strand to SEQ ID NO: 2567788
ucacucauccaggucacuu

SEQ ID NO: 2567790 - RNA, 19 nt, Artificial Sequence
  Description of Artificial Sequence: Synthetic oligonucleotide
  Sense strand starting at position 2893 of SEQ ID NO: 1888943
cuggaugagugacuuaacu

SEQ ID NO: 2567791 - RNA, 19 nt, Artificial Sequence
  Description of Artificial Sequence: Synthetic oligonucleotide
  Antisense strand to SEQ ID NO: 2567790
aguuaagucacucauccag

SEQ ID NO: 2567792 - RNA, 19 nt, Artificial Sequence
  Description of Artificial Sequence: Synthetic oligonucleotide
  Sense strand starting at position 2901 of SEQ ID NO: 1888943
gugacuuaacuuugcuaag

SEQ ID NO: 2567793 - RNA, 19 nt, Artificial Sequence
  Description of Artificial Sequence: Synthetic oligonucleotide
  Antisense strand to SEQ ID NO: 2567792
cuuagcaaaguuaagucac

SEQ ID NO: 2567794 - RNA, 19 nt, Artificial Sequence
  Description of Artificial Sequence: Synthetic oligonucleotide
  Sense strand starting at position 2902 of SEQ ID NO: 1888943
ugacuuaacuuugcuaaga

SEQ ID NO: 2567795 - RNA, 19 nt, Artificial Sequence
  Description of Artificial Sequence: Synthetic oligonucleotide
  Antisense strand to SEQ ID NO: 2567794
ucuuagcaaaguuaaguca

SEQ ID NO: 2567796 - RNA, 19 nt, Artificial Sequence
  Description of Artificial Sequence: Synthetic oligonucleotide
  Sense strand starting at position 2961 of SEQ ID NO: 1888943
ugaugagagcaaugucuua

SEQ ID NO: 2567797 - RNA, 19 nt, Artificial Sequence
  Description of Artificial Sequence: Synthetic oligonucleotide
  Antisense strand to SEQ ID NO: 2567796
uaagacauugcucucauca

SEQ ID NO: 2567798 - RNA, 19 nt, Artificial Sequence
  Description of Artificial Sequence: Synthetic oligonucleotide
  Sense strand starting at position 2978 of SEQ ID NO: 1888943
uaauuacuggugugcagaa

SEQ ID NO: 2567799 - RNA, 19 nt, Artificial Sequence
  Description of Artificial Sequence: Synthetic oligonucleotide
  Antisense strand to SEQ ID NO: 2567798
uucugcacaccaguaauua

SEQ ID NO: 2567800 - RNA, 19 nt, Artificial Sequence
  Description of Artificial Sequence: Synthetic oligonucleotide
  Sense strand starting at position 2979 of SEQ ID NO: 1888943
aauuacuggugugcagaaa

SEQ ID NO: 2567801 - RNA, 19 nt, Artificial Sequence
  Description of Artificial Sequence: Synthetic oligonucleotide
  Antisense strand to SEQ ID NO: 2567800
uuucugcacaccaguaauu

SEQ ID NO: 2567802 - RNA, 19 nt, Artificial Sequence
  Description of Artificial Sequence: Synthetic oligonucleotide
  Sense strand starting at position 3018 of SEQ ID NO: 1888943
acagcuggcuccuuuauuu

SEQ ID NO: 2567803 - RNA, 19 nt, Artificial Sequence
  Description of Artificial Sequence: Synthetic oligonucleotide
  Antisense strand to SEQ ID NO: 2567802
aaauaaaggagccagcugu

SEQ ID NO: 2567804 - RNA, 19 nt, Artificial Sequence
  Description of Artificial Sequence: Synthetic oligonucleotide
  Sense strand starting at position 3645 of SEQ ID NO: 1888943
gaucuuaugcauuggcaag

SEQ ID NO: 2567805 - RNA, 19 nt, Artificial Sequence
  Description of Artificial Sequence: Synthetic oligonucleotide
  Antisense strand to SEQ ID NO: 2567804
cuugccaaugcauaagauc

SEQ ID NO: 2567806 - RNA, 19 nt, Artificial Sequence
  Description of Artificial Sequence: Synthetic oligonucleotide
  Sense strand starting at position 3759 of SEQ ID NO: 1888943
uucuuaaugccaggucacu

SEQ ID NO: 2567807 - RNA, 19 nt, Artificial Sequence
  Description of Artificial Sequence: Synthetic oligonucleotide
  Antisense strand to SEQ ID NO: 2567806
agugaccuggcauuaagaa

SEQ ID NO: 2567808 - RNA, 19 nt, Artificial Sequence
  Description of Artificial Sequence: Synthetic oligonucleotide
  Sense strand starting at position 3810 of SEQ ID NO: 1888943
acaggucaaugcucucaaa

SEQ ID NO: 2567809 - RNA, 19 nt, Artificial Sequence
  Description of Artificial Sequence: Synthetic oligonucleotide
  Antisense strand to SEQ ID NO: 2567808
uuugagagcauugaccugu

SEQ ID NO: 2567810 - RNA, 19 nt, Artificial Sequence
  Description of Artificial Sequence: Synthetic oligonucleotide
  Sense strand starting at position 3877 of SEQ ID NO: 1888943
agggcucccgcauaucauu

SEQ ID NO: 2567811 - RNA, 19 nt, Artificial Sequence
  Description of Artificial Sequence: Synthetic oligonucleotide
  Antisense strand to SEQ ID NO: 2567810
aaugauaugcgggagcccu

SEQ ID NO: 2567812 - RNA, 19 nt, Artificial Sequence
  Description of Artificial Sequence: Synthetic oligonucleotide
  Sense strand starting at position 16 of SEQ ID NO: 1888944
gagacuaccuccuugguuu

SEQ ID NO: 2567813 - RNA, 19 nt, Artificial Sequence
  Description of Artificial Sequence: Synthetic oligonucleotide
  Antisense strand to SEQ ID NO: 2567812
aaaccaaggagguagucuc

SEQ ID NO: 2567814 - RNA, 19 nt, Artificial Sequence
  Description of Artificial Sequence: Synthetic oligonucleotide
  Sense strand starting at position 28 of SEQ ID NO: 1888944
uugguuucagaggacaagu

SEQ ID NO: 2567815 - RNA, 19 nt, Artificial Sequence
  Description of Artificial Sequence: Synthetic oligonucleotide
  Antisense strand to SEQ ID NO: 2567814
acuuguccucugaaaccaa

SEQ ID NO: 2567816 - RNA, 19 nt, Artificial Sequence
  Description of Artificial Sequence: Synthetic oligonucleotide
  Sense strand starting at position 37 of SEQ ID NO: 1888944
gaggacaagugcucccuuu

SEQ ID NO: 2567817 - RNA, 19 nt, Artificial Sequence
  Description of Artificial Sequence: Synthetic oligonucleotide
  Antisense strand to SEQ ID NO: 2567816
aaagggagcacuuguccuc

SEQ ID NO: 2567818 - RNA, 19 nt, Artificial Sequence
  Description of Artificial Sequence: Synthetic oligonucleotide
  Sense strand starting at position 101 of SEQ ID NO: 1888944
gccaucacccaggauugua

SEQ ID NO: 2567819 - RNA, 19 nt, Artificial Sequence
  Description of Artificial Sequence: Synthetic oligonucleotide
  Antisense strand to SEQ ID NO: 2567818
uacaauccugggugauggc

SEQ ID NO: 2567820 - RNA, 19 nt, Artificial Sequence
  Description of Artificial Sequence: Synthetic oligonucleotide
  Sense strand starting at position 152 of SEQ ID NO: 1888944
gacauaagacuguggcgaa

SEQ ID NO: 2567821 - RNA, 19 nt, Artificial Sequence
  Description of Artificial Sequence: Synthetic oligonucleotide
  Antisense strand to SEQ ID NO: 2567820
uucgccacagucuuauguc

SEQ ID NO: 2567822 - RNA, 19 nt, Artificial Sequence
  Description of Artificial Sequence: Synthetic oligonucleotide
  Sense strand starting at position 159 of SEQ ID NO: 1888944
gacuguggcgaagagaaua

SEQ ID NO: 2567823 - RNA, 19 nt, Artificial Sequence
  Description of Artificial Sequence: Synthetic oligonucleotide
  Antisense strand to SEQ ID NO: 2567822
uauucucuucgccacaguc

SEQ ID NO: 2567824 - RNA, 19 nt, Artificial Sequence
  Description of Artificial Sequence: Synthetic oligonucleotide
  Sense strand starting at position 276 of SEQ ID NO: 1888944
ucagaaugggagugucuau

SEQ ID NO: 2567825 - RNA, 19 nt, Artificial Sequence
  Description of Artificial Sequence: Synthetic oligonucleotide
  Antisense strand to SEQ ID NO: 2567824
auagacacucccauucuga

SEQ ID NO: 2567826 - RNA, 19 nt, Artificial Sequence
  Description of Artificial Sequence: Synthetic oligonucleotide
  Sense strand starting at position 283 of SEQ ID NO: 1888944
gggagugucuauccuauac

SEQ ID NO: 2567827 - RNA, 19 nt, Artificial Sequence
  Description of Artificial Sequence: Synthetic oligonucleotide
  Antisense strand to SEQ ID NO: 2567826
guauaggauagacacuccc

SEQ ID NO: 2567828 - RNA, 19 nt, Artificial Sequence
  Description of Artificial Sequence: Synthetic oligonucleotide
  Sense strand starting at position 287 of SEQ ID NO: 1888944
gugucuauccuauaccuau

SEQ ID NO: 2567829 - RNA, 19 nt, Artificial Sequence
  Description of Artificial Sequence: Synthetic oligonucleotide
  Antisense strand to SEQ ID NO: 2567828
auagguauaggauagacac

SEQ ID NO: 2567830 - RNA, 19 nt, Artificial Sequence
  Description of Artificial Sequence: Synthetic oligonucleotide
  Sense strand starting at position 324 of SEQ ID NO: 1888944
acagauaacuuguuugauu

SEQ ID NO: 2567831 - RNA, 19 nt, Artificial Sequence
  Description of Artificial Sequence: Synthetic oligonucleotide
  Antisense strand to SEQ ID NO: 2567830
aaucaaacaaguuaucugu

SEQ ID NO: 2567832 - RNA, 19 nt, Artificial Sequence
  Description of Artificial Sequence: Synthetic oligonucleotide
  Sense strand starting at position 438 of SEQ ID NO: 1888944
uuggauuagaauugauggu

SEQ ID NO: 2567833 - RNA, 19 nt, Artificial Sequence
  Description of Artificial Sequence: Synthetic oligonucleotide
  Antisense strand to SEQ ID NO: 2567832
accaucaauucuaauccaa

SEQ ID NO: 2567834 - RNA, 19 nt, Artificial Sequence
  Description of Artificial Sequence: Synthetic oligonucleotide
  Sense strand starting at position 442 of SEQ ID NO: 1888944
auuagaauugauggugcua

SEQ ID NO: 2567835 - RNA, 19 nt, Artificial Sequence
  Description of Artificial Sequence: Synthetic oligonucleotide
  Antisense strand to SEQ ID NO: 2567834
uagcaccaucaauucuaau

SEQ ID NO: 2567836 - RNA, 19 nt, Artificial Sequence
  Description of Artificial Sequence: Synthetic oligonucleotide
  Sense strand starting at position 454 of SEQ ID NO: 1888944
ggugcuaugggauaagacu

SEQ ID NO: 2567837 - RNA, 19 nt, Artificial Sequence
  Description of Artificial Sequence: Synthetic oligonucleotide
  Antisense strand to SEQ ID NO: 2567836
agucuuaucccauagcacc

SEQ ID NO: 2567838 - RNA, 19 nt, Artificial Sequence
  Description of Artificial Sequence: Synthetic oligonucleotide
  Sense strand starting at position 478 of SEQ ID NO: 1888944
ggauguugugaugagguga

SEQ ID NO: 2567839 - RNA, 19 nt, Artificial Sequence
  Description of Artificial Sequence: Synthetic oligonucleotide
  Antisense strand to SEQ ID NO: 2567838
ucaccucaucacaacaucc

SEQ ID NO: 2567840 - RNA, 19 nt, Artificial Sequence
  Description of Artificial Sequence: Synthetic oligonucleotide
  Sense strand starting at position 483 of SEQ ID NO: 1888944
uugugaugaggugaaccua

SEQ ID NO: 2567841 - RNA, 19 nt, Artificial Sequence
  Description of Artificial Sequence: Synthetic oligonucleotide
  Antisense strand to SEQ ID NO: 2567840
uagguucaccucaucacaa

SEQ ID NO: 2567842 - RNA, 19 nt, Artificial Sequence
  Description of Artificial Sequence: Synthetic oligonucleotide
  Sense strand starting at position 542 of SEQ ID NO: 1888944
ggcagacuuauggguuaaa

SEQ ID NO: 2567843 - RNA, 19 nt, Artificial Sequence
  Description of Artificial Sequence: Synthetic oligonucleotide
  Antisense strand to SEQ ID NO: 2567842
uuuaacccauaagucugcc

SEQ ID NO: 2567844 - RNA, 19 nt, Artificial Sequence
  Description of Artificial Sequence: Synthetic oligonucleotide
  Sense strand starting at position 543 of SEQ ID NO: 1888944
gcagacuuauggguuaaau

SEQ ID NO: 2567845 - RNA, 19 nt, Artificial Sequence
  Description of Artificial Sequence: Synthetic oligonucleotide
  Antisense strand to SEQ ID NO: 2567844
auuuaacccauaagucugc

SEQ ID NO: 2567846 - RNA, 19 nt, Artificial Sequence
  Description of Artificial Sequence: Synthetic oligonucleotide
  Sense strand starting at position 633 of SEQ ID NO: 1888944
agggucauagcagauguua

SEQ ID NO: 2567847 - RNA, 19 nt, Artificial Sequence
  Description of Artificial Sequence: Synthetic oligonucleotide
  Antisense strand to SEQ ID NO: 2567846
uaacaucugcuaugacccu

SEQ ID NO: 2567848 - RNA, 19 nt, Artificial Sequence
  Description of Artificial Sequence: Synthetic oligonucleotide
  Sense strand starting at position 693 of SEQ ID NO: 1888944
auccaauaugagugguauc

SEQ ID NO: 2567849 - RNA, 19 nt, Artificial Sequence
  Description of Artificial Sequence: Synthetic oligonucleotide
  Antisense strand to SEQ ID NO: 2567848
gauaccacucauauuggau

SEQ ID NO: 2567850 - RNA, 19 nt, Artificial Sequence
  Description of Artificial Sequence: Synthetic oligonucleotide
  Sense strand starting at position 1638 of SEQ ID NO: 1888944
aguuauagaaccuggguaa

SEQ ID NO: 2567851 - RNA, 19 nt, Artificial Sequence
  Description of Artificial Sequence: Synthetic oligonucleotide
  Antisense strand to SEQ ID NO: 2567850
uuacccagguucuauaacu

SEQ ID NO: 2567852 - RNA, 19 nt, Artificial Sequence
  Description of Artificial Sequence: Synthetic oligonucleotide
  Sense strand starting at position 1653 of SEQ ID NO: 1888944
guaagacuacuaugccaga

SEQ ID NO: 2567853 - RNA, 19 nt, Artificial Sequence
  Description of Artificial Sequence: Synthetic oligonucleotide
  Antisense strand to SEQ ID NO: 2567852
ucuggcauaguagucuuac

SEQ ID NO: 2567854 - RNA, 19 nt, Artificial Sequence
  Description of Artificial Sequence: Synthetic oligonucleotide
  Sense strand starting at position 1688 of SEQ ID NO: 1888944
uaugaaagcuuuccuguag

SEQ ID NO: 2567855 - RNA, 19 nt, Artificial Sequence
  Description of Artificial Sequence: Synthetic oligonucleotide
  Antisense strand to SEQ ID NO: 2567854
cuacaggaaagcuuucaua

SEQ ID NO: 2567856 - RNA, 19 nt, Artificial Sequence
  Description of Artificial Sequence: Synthetic oligonucleotide
  Sense strand starting at position 1704 of SEQ ID NO: 1888944
uaguacuggccuggacaaa

SEQ ID NO: 2567857 - RNA, 19 nt, Artificial Sequence
  Description of Artificial Sequence: Synthetic oligonucleotide
  Antisense strand to SEQ ID NO: 2567856
uuuguccaggccaguacua

SEQ ID NO: 2567858 - RNA, 19 nt, Artificial Sequence
  Description of Artificial Sequence: Synthetic oligonucleotide
  Sense strand starting at position 1836 of SEQ ID NO: 1888944
augucaagaggcuauaauc

SEQ ID NO: 2567859 - RNA, 19 nt, Artificial Sequence
  Description of Artificial Sequence: Synthetic oligonucleotide
  Antisense strand to SEQ ID NO: 2567858
gauuauagccucuugacau

SEQ ID NO: 2567860 - RNA, 19 nt, Artificial Sequence
  Description of Artificial Sequence: Synthetic oligonucleotide
  Sense strand starting at position 2011 of SEQ ID NO: 1888944
aggcuuacauuauuaagag

SEQ ID NO: 2567861 - RNA, 19 nt, Artificial Sequence
  Description of Artificial Sequence: Synthetic oligonucleotide
  Antisense strand to SEQ ID NO: 2567860
cucuuaauaauguaagccu

SEQ ID NO: 2567862 - RNA, 19 nt, Artificial Sequence
  Description of Artificial Sequence: Synthetic oligonucleotide
  Sense strand starting at position 2345 of SEQ ID NO: 1888944
gaauuagauuugcaaugua

SEQ ID NO: 2567863 - RNA, 19 nt, Artificial Sequence
  Description of Artificial Sequence: Synthetic oligonucleotide
  Antisense strand to SEQ ID NO: 2567862
uacauugcaaaucuaauuc

SEQ ID NO: 2567864 - RNA, 19 nt, Artificial Sequence
  Description of Artificial Sequence: Synthetic oligonucleotide
  Sense strand starting at position 2391 of SEQ ID NO: 1888944
cuacauuaacugugagaca

SEQ ID NO: 2567865 - RNA, 19 nt, Artificial Sequence
  Description of Artificial Sequence: Synthetic oligonucleotide
  Antisense strand to SEQ ID NO: 2567864
ugucucacaguuaauguag

SEQ ID NO: 2567866 - RNA, 19 nt, Artificial Sequence
  Description of Artificial Sequence: Synthetic oligonucleotide
  Sense strand starting at position 2402 of SEQ ID NO: 1888944
gugagacacuguguuuaua

SEQ ID NO: 2567867 - RNA, 19 nt, Artificial Sequence
  Description of Artificial Sequence: Synthetic oligonucleotide
  Antisense strand to SEQ ID NO: 2567866
uauaaacacagugucucac

SEQ ID NO: 2567868 - RNA, 19 nt, Artificial Sequence
  Description of Artificial Sequence: Synthetic oligonucleotide
  Sense strand starting at position 2404 of SEQ ID NO: 1888944
gagacacuguguuuauauc

SEQ ID NO: 2567869 - RNA, 19 nt, Artificial Sequence
  Description of Artificial Sequence: Synthetic oligonucleotide
  Antisense strand to SEQ ID NO: 2567868
gauauaaacacagugucuc

SEQ ID NO: 2567870 - RNA, 19 nt, Artificial Sequence
  Description of Artificial Sequence: Synthetic oligonucleotide
  Sense strand starting at position 2642 of SEQ ID NO: 1888944
uguauaagaggaugccaau

SEQ ID NO: 2567871 - RNA, 19 nt, Artificial Sequence
  Description of Artificial Sequence: Synthetic oligonucleotide
  Antisense strand to SEQ ID NO: 2567870
auuggcauccucuuauaca

SEQ ID NO: 2567872 - RNA, 19 nt, Artificial Sequence
  Description of Artificial Sequence: Synthetic oligonucleotide
  Sense strand starting at position 2654 of SEQ ID NO: 1888944
ugccaauauuuagaugaug

SEQ ID NO: 2567873 - RNA, 19 nt, Artificial Sequence
  Description of Artificial Sequence: Synthetic oligonucleotide
  Antisense strand to SEQ ID NO: 2567872
caucaucuaaauauuggca

SEQ ID NO: 2567874 - RNA, 19 nt, Artificial Sequence
  Description of Artificial Sequence: Synthetic oligonucleotide
  Sense strand starting at position 2668 of SEQ ID NO: 1888944
ugaugauagguccgcauuu

SEQ ID NO: 2567875 - RNA, 19 nt, Artificial Sequence
  Description of Artificial Sequence: Synthetic oligonucleotide
  Antisense strand to SEQ ID NO: 2567874
aaaugcggaccuaucauca

SEQ ID NO: 2567876 - RNA, 19 nt, Artificial Sequence
  Description of Artificial Sequence: Synthetic oligonucleotide
  Sense strand starting at position 2916 of SEQ ID NO: 1888944
acaagagucgcauaauaca

SEQ ID NO: 2567877 - RNA, 19 nt, Artificial Sequence
  Description of Artificial Sequence: Synthetic oligonucleotide
  Antisense strand to SEQ ID NO: 2567876
uguauuaugcgacucuugu

SEQ ID NO: 2567878 - RNA, 19 nt, Artificial Sequence
  Description of Artificial Sequence: Synthetic oligonucleotide
  Sense strand starting at position 2970 of SEQ ID NO: 1888944
uccuuuagauaucuuuagu

SEQ ID NO: 2567879 - RNA, 19 nt, Artificial Sequence
  Description of Artificial Sequence: Synthetic oligonucleotide
  Antisense strand to SEQ ID NO: 2567878
acuaaagauaucuaaagga

SEQ ID NO: 2567880 - RNA, 19 nt, Artificial Sequence
  Description of Artificial Sequence: Synthetic oligonucleotide
  Sense strand starting at position 2984 of SEQ ID NO: 1888944
uuagucuuucuguauaaca

SEQ ID NO: 2567881 - RNA, 19 nt, Artificial Sequence
  Description of Artificial Sequence: Synthetic oligonucleotide
  Antisense strand to SEQ ID NO: 2567880
uguuauacagaaagacuaa

SEQ ID NO: 2567882 - RNA, 19 nt, Artificial Sequence
  Description of Artificial Sequence: Synthetic oligonucleotide
  Sense strand starting at position 2986 of SEQ ID NO: 1888944
agucuuucuguauaacauc

SEQ ID NO: 2567883 - RNA, 19 nt, Artificial Sequence
  Description of Artificial Sequence: Synthetic oligonucleotide
  Antisense strand to SEQ ID NO: 2567882
gauguuauacagaaagacu

SEQ ID NO: 2567884 - RNA, 19 nt, Artificial Sequence
  Description of Artificial Sequence: Synthetic oligonucleotide
  Sense strand starting at position 3034 of SEQ ID NO: 1888944
augugaucucaaugacauu

SEQ ID NO: 2567885 - RNA, 19 nt, Artificial Sequence
  Description of Artificial Sequence: Synthetic oligonucleotide
  Antisense strand to SEQ ID NO: 2567884
aaugucauugagaucacau

SEQ ID NO: 2567886 - RNA, 19 nt, Artificial Sequence
  Description of Artificial Sequence: Synthetic oligonucleotide
  Sense strand starting at position 3667 of SEQ ID NO: 1888944
aguauuaaucuuuagagca

SEQ ID NO: 2567887 - RNA, 19 nt, Artificial Sequence
  Description of Artificial Sequence: Synthetic oligonucleotide
  Antisense strand to SEQ ID NO: 2567886
ugcucuaaagauuaauacu

SEQ ID NO: 2567888 - RNA, 19 nt, Artificial Sequence
  Description of Artificial Sequence: Synthetic oligonucleotide
  Sense strand starting at position 3754 of SEQ ID NO: 1888944
aagcuauuaucggugaaug

SEQ ID NO: 2567889 - RNA, 19 nt, Artificial Sequence
  Description of Artificial Sequence: Synthetic oligonucleotide
  Antisense strand to SEQ ID NO: 2567888
cauucaccgauaauagcuu

SEQ ID NO: 2567890 - RNA, 19 nt, Artificial Sequence
  Description of Artificial Sequence: Synthetic oligonucleotide
  Sense strand starting at position 3772 of SEQ ID NO: 1888944
guugcuaaacuuuagauca

SEQ ID NO: 2567891 - RNA, 19 nt, Artificial Sequence
  Description of Artificial Sequence: Synthetic oligonucleotide
  Antisense strand to SEQ ID NO: 2567890
ugaucuaaaguuuagcaac

SEQ ID NO: 2567892 - RNA, 19 nt, Artificial Sequence
  Description of Artificial Sequence: Synthetic oligonucleotide
  Sense strand starting at position 227 of SEQ ID NO: 1888945
uaguaaugaugccugaauu

SEQ ID NO: 2567893 - RNA, 19 nt, Artificial Sequence
  Description of Artificial Sequence: Synthetic oligonucleotide
  Antisense strand to SEQ ID NO: 2567892
aauucaggcaucauuacua

SEQ ID NO: 2567894 - RNA, 19 nt, Artificial Sequence
  Description of Artificial Sequence: Synthetic oligonucleotide
  Sense strand starting at position 228 of SEQ ID NO: 1888945
aguaaugaugccugaauuc

SEQ ID NO: 2567895 - RNA, 19 nt, Artificial Sequence
  Description of Artificial Sequence: Synthetic oligonucleotide
  Antisense strand to SEQ ID NO: 2567894
gaauucaggcaucauuacu

SEQ ID NO: 2567896 - RNA, 19 nt, Artificial Sequence
  Description of Artificial Sequence: Synthetic oligonucleotide
  Sense strand starting at position 274 of SEQ ID NO: 1888945
cuauuauaugacggguauu

SEQ ID NO: 2567897 - RNA, 19 nt, Artificial Sequence
  Description of Artificial Sequence: Synthetic oligonucleotide
  Antisense strand to SEQ ID NO: 2567896
aauacccgucauauaauag

SEQ ID NO: 2567898 - RNA, 19 nt, Artificial Sequence
  Description of Artificial Sequence: Synthetic oligonucleotide
  Sense strand starting at position 286 of SEQ ID NO: 1888945
ggguauuuauuguucuggu

SEQ ID NO: 2567899 - RNA, 19 nt, Artificial Sequence
  Description of Artificial Sequence: Synthetic oligonucleotide
  Antisense strand to SEQ ID NO: 2567898
accagaacaauaaauaccc

SEQ ID NO: 2567900 - RNA, 19 nt, Artificial Sequence
  Description of Artificial Sequence: Synthetic oligonucleotide
  Sense strand starting at position 308 of SEQ ID NO: 1888945
caguguauagcauggacau

SEQ ID NO: 2567901 - RNA, 19 nt, Artificial Sequence
  Description of Artificial Sequence: Synthetic oligonucleotide
  Antisense strand to SEQ ID NO: 2567900
auguccaugcuauacacug

SEQ ID NO: 2567902 - RNA, 19 nt, Artificial Sequence
  Description of Artificial Sequence: Synthetic oligonucleotide
  Sense strand starting at position 350 of SEQ ID NO: 1888945
ugagcugaucuugguaaua

SEQ ID NO: 2567903 - RNA, 19 nt, Artificial Sequence
  Description of Artificial Sequence: Synthetic oligonucleotide
  Antisense strand to SEQ ID NO: 2567902
uauuaccaagaucagcuca

SEQ ID NO: 2567904 - RNA, 19 nt, Artificial Sequence
  Description of Artificial Sequence: Synthetic oligonucleotide
  Sense strand starting at position 378 of SEQ ID NO: 1888945
acccacgauugaucucaga

SEQ ID NO: 2567905 - RNA, 19 nt, Artificial Sequence
  Description of Artificial Sequence: Synthetic oligonucleotide
  Antisense strand to SEQ ID NO: 2567904
ucugagaucaaucgugggu

SEQ ID NO: 2567906 - RNA, 19 nt, Artificial Sequence
  Description of Artificial Sequence: Synthetic oligonucleotide
  Sense strand starting at position 461 of SEQ ID NO: 1888945
uuggaaauguuuccuagaa

SEQ ID NO: 2567907 - RNA, 19 nt, Artificial Sequence
  Description of Artificial Sequence: Synthetic oligonucleotide
  Antisense strand to SEQ ID NO: 2567906
uucuaggaaacauuuccaa

SEQ ID NO: 2567908 - RNA, 19 nt, Artificial Sequence
  Description of Artificial Sequence: Synthetic oligonucleotide
  Sense strand starting at position 473 of SEQ ID NO: 1888945
ccuagaauguaagugaguu

SEQ ID NO: 2567909 - RNA, 19 nt, Artificial Sequence
  Description of Artificial Sequence: Synthetic oligonucleotide
  Antisense strand to SEQ ID NO: 2567908
aacucacuuacauucuagg

SEQ ID NO: 2567910 - RNA, 19 nt, Artificial Sequence
  Description of Artificial Sequence: Synthetic oligonucleotide
  Sense strand starting at position 474 of SEQ ID NO: 1888945
cuagaauguaagugaguua

SEQ ID NO: 2567911 - RNA, 19 nt, Artificial Sequence
  Description of Artificial Sequence: Synthetic oligonucleotide
  Antisense strand to SEQ ID NO: 2567910
uaacucacuuacauucuag

SEQ ID NO: 2567912 - RNA, 19 nt, Artificial Sequence
  Description of Artificial Sequence: Synthetic oligonucleotide
  Sense strand starting at position 477 of SEQ ID NO: 1888945
gaauguaagugaguuauag

SEQ ID NO: 2567913 - RNA, 19 nt, Artificial Sequence
  Description of Artificial Sequence: Synthetic oligonucleotide
  Antisense strand to SEQ ID NO: 2567912
cuauaacucacuuacauuc

SEQ ID NO: 2567914 - RNA, 19 nt, Artificial Sequence
  Description of Artificial Sequence: Synthetic oligonucleotide
  Sense strand starting at position 513 of SEQ ID NO: 1888945
ucuucuaugccagaguuac

SEQ ID NO: 2567915 - RNA, 19 nt, Artificial Sequence
  Description of Artificial Sequence: Synthetic oligonucleotide
  Antisense strand to SEQ ID NO: 2567914
guaacucuggcauagaaga

SEQ ID NO: 2567916 - RNA, 19 nt, Artificial Sequence
  Description of Artificial Sequence: Synthetic oligonucleotide
  Sense strand starting at position 524 of SEQ ID NO: 1888945
agaguuacucagcacuauu

SEQ ID NO: 2567917 - RNA, 19 nt, Artificial Sequence
  Description of Artificial Sequence: Synthetic oligonucleotide
  Antisense strand to SEQ ID NO: 2567916
aauagugcugaguaacucu

SEQ ID NO: 2567918 - RNA, 19 nt, Artificial Sequence
  Description of Artificial Sequence: Synthetic oligonucleotide
  Sense strand starting at position 587 of SEQ ID NO: 1888945
caccgaagauguuuagaag

SEQ ID NO: 2567919 - RNA, 19 nt, Artificial Sequence
  Description of Artificial Sequence: Synthetic oligonucleotide
  Antisense strand to SEQ ID NO: 2567918
cuucuaaacaucuucggug

SEQ ID NO: 2567920 - RNA, 19 nt, Artificial Sequence
  Description of Artificial Sequence: Synthetic oligonucleotide
  Sense strand starting at position 768 of SEQ ID NO: 1888945
uugcuaucagccuagaggu

SEQ ID NO: 2567921 - RNA, 19 nt, Artificial Sequence
  Description of Artificial Sequence: Synthetic oligonucleotide
  Antisense strand to SEQ ID NO: 2567920
accucuaggcugauagcaa

SEQ ID NO: 2567922 - RNA, 19 nt, Artificial Sequence
  Description of Artificial Sequence: Synthetic oligonucleotide
  Sense strand starting at position 828 of SEQ ID NO: 1888945
aggucaagucacuggauga

SEQ ID NO: 2567923 - RNA, 19 nt, Artificial Sequence
  Description of Artificial Sequence: Synthetic oligonucleotide
  Antisense strand to SEQ ID NO: 2567922
ucauccagugacuugaccu

SEQ ID NO: 2567924 - RNA, 19 nt, Artificial Sequence
  Description of Artificial Sequence: Synthetic oligonucleotide
  Sense strand starting at position 829 of SEQ ID NO: 1888945
ggucaagucacuggaugaa

SEQ ID NO: 2567925 - RNA, 19 nt, Artificial Sequence
  Description of Artificial Sequence: Synthetic oligonucleotide
  Antisense strand to SEQ ID NO: 2567924
uucauccagugacuugacc

SEQ ID NO: 2567926 - RNA, 19 nt, Artificial Sequence
  Description of Artificial Sequence: Synthetic oligonucleotide
  Sense strand starting at position 1002 of SEQ ID NO: 1888945
gcaucauacugcuuggaga

SEQ ID NO: 2567927 - RNA, 19 nt, Artificial Sequence
  Description of Artificial Sequence: Synthetic oligonucleotide
  Antisense strand to SEQ ID NO: 2567926
ucuccaagcaguaugaugc

SEQ ID NO: 2567928 - RNA, 19 nt, Artificial Sequence
  Description of Artificial Sequence: Synthetic oligonucleotide
  Sense strand starting at position 1004 of SEQ ID NO: 1888945
aucauacugcuuggagaaa

SEQ ID NO: 2567929 - RNA, 19 nt, Artificial Sequence
  Description of Artificial Sequence: Synthetic oligonucleotide
  Antisense strand to SEQ ID NO: 2567928
uuucuccaagcaguaugau

SEQ ID NO: 2567930 - RNA, 19 nt, Artificial Sequence
  Description of Artificial Sequence: Synthetic oligonucleotide
  Sense strand starting at position 1054 of SEQ ID NO: 1888945
auaguacagcuuuacauga

SEQ ID NO: 2567931 - RNA, 19 nt, Artificial Sequence
  Description of Artificial Sequence: Synthetic oligonucleotide
  Antisense strand to SEQ ID NO: 2567930
ucauguaaagcuguacuau

SEQ ID NO: 2567932 - RNA, 19 nt, Artificial Sequence
  Description of Artificial Sequence: Synthetic oligonucleotide
  Sense strand starting at position 1403 of SEQ ID NO: 1888945
ggcuuuaacgucuacauca

SEQ ID NO: 2567933 - RNA, 19 nt, Artificial Sequence
  Description of Artificial Sequence: Synthetic oligonucleotide
  Antisense strand to SEQ ID NO: 2567932
ugauguagacguuaaagcc

SEQ ID NO: 2567934 - RNA, 19 nt, Artificial Sequence
  Description of Artificial Sequence: Synthetic oligonucleotide
  Sense strand starting at position 1433 of SEQ ID NO: 1888945
acagcagacuuccugucau

SEQ ID NO: 2567935 - RNA, 19 nt, Artificial Sequence
  Description of Artificial Sequence: Synthetic oligonucleotide
  Antisense strand to SEQ ID NO: 2567934
augacaggaagucugcugu

SEQ ID NO: 2567936 - RNA, 19 nt, Artificial Sequence
  Description of Artificial Sequence: Synthetic oligonucleotide
  Sense strand starting at position 1520 of SEQ ID NO: 1888945
auagauacagcuggcauaa

SEQ ID NO: 2567937 - RNA, 19 nt, Artificial Sequence
  Description of Artificial Sequence: Synthetic oligonucleotide
  Antisense strand to SEQ ID NO: 2567936
uuaugccagcuguaucuau

SEQ ID NO: 2567938 - RNA, 19 nt, Artificial Sequence
  Description of Artificial Sequence: Synthetic oligonucleotide
  Sense strand starting at position 1891 of SEQ ID NO: 1888945
aacagugcugcauaugaau

SEQ ID NO: 2567939 - RNA, 19 nt, Artificial Sequence
  Description of Artificial Sequence: Synthetic oligonucleotide
  Antisense strand to SEQ ID NO: 2567938
auucauaugcagcacuguu

SEQ ID NO: 2567940 - RNA, 19 nt, Artificial Sequence
  Description of Artificial Sequence: Synthetic oligonucleotide
  Sense strand starting at position 1902 of SEQ ID NO: 1888945
auaugaauaguuggcugaa

SEQ ID NO: 2567941 - RNA, 19 nt, Artificial Sequence
  Description of Artificial Sequence: Synthetic oligonucleotide
  Antisense strand to SEQ ID NO: 2567940
uucagccaacuauucauau

SEQ ID NO: 2567942 - RNA, 19 nt, Artificial Sequence
  Description of Artificial Sequence: Synthetic oligonucleotide
  Sense strand starting at position 1903 of SEQ ID NO: 1888945
uaugaauaguuggcugaaa

SEQ ID NO: 2567943 - RNA, 19 nt, Artificial Sequence
  Description of Artificial Sequence: Synthetic oligonucleotide
  Antisense strand to SEQ ID NO: 2567942
uuucagccaacuauucaua

SEQ ID NO: 2567944 - RNA, 19 nt, Artificial Sequence
  Description of Artificial Sequence: Synthetic oligonucleotide
  Sense strand starting at position 1904 of SEQ ID NO: 1888945
augaauaguuggcugaaau

SEQ ID NO: 2567945 - RNA, 19 nt, Artificial Sequence
  Description of Artificial Sequence: Synthetic oligonucleotide
  Antisense strand to SEQ ID NO: 2567944
auuucagccaacuauucau

SEQ ID NO: 2567946 - RNA, 19 nt, Artificial Sequence
  Description of Artificial Sequence: Synthetic oligonucleotide
  Sense strand starting at position 1905 of SEQ ID NO: 1888945
ugaauaguuggcugaaauu

SEQ ID NO: 2567947 - RNA, 19 nt, Artificial Sequence
  Description of Artificial Sequence: Synthetic oligonucleotide
  Antisense strand to SEQ ID NO: 2567946
aauuucagccaacuauuca

SEQ ID NO: 2567948 - RNA, 19 nt, Artificial Sequence
  Description of Artificial Sequence: Synthetic oligonucleotide
  Sense strand starting at position 2071 of SEQ ID NO: 1888945
gaccaauauguaggauauu

SEQ ID NO: 2567949 - RNA, 19 nt, Artificial Sequence
  Description of Artificial Sequence: Synthetic oligonucleotide
  Antisense strand to SEQ ID NO: 2567948
aauauccuacauauugguc

SEQ ID NO: 2567950 - RNA, 19 nt, Artificial Sequence
  Description of Artificial Sequence: Synthetic oligonucleotide
  Sense strand starting at position 2074 of SEQ ID NO: 1888945
caauauguaggauauuguu

SEQ ID NO: 2567951 - RNA, 19 nt, Artificial Sequence
  Description of Artificial Sequence: Synthetic oligonucleotide
  Antisense strand to SEQ ID NO: 2567950
aacaauauccuacauauug

SEQ ID NO: 2567952 - RNA, 19 nt, Artificial Sequence
  Description of Artificial Sequence: Synthetic oligonucleotide
  Sense strand starting at position 2422 of SEQ ID NO: 1888945
cugugaugguaacuccaca

SEQ ID NO: 2567953 - RNA, 19 nt, Artificial Sequence
  Description of Artificial Sequence: Synthetic oligonucleotide
  Antisense strand to SEQ ID NO: 2567952
uguggaguuaccaucacag

SEQ ID NO: 2567954 - RNA, 19 nt, Artificial Sequence
  Description of Artificial Sequence: Synthetic oligonucleotide
  Sense strand starting at position 2645 of SEQ ID NO: 1888945
uggaguaugcaucagaauc

SEQ ID NO: 2567955 - RNA, 19 nt, Artificial Sequence
  Description of Artificial Sequence: Synthetic oligonucleotide
  Antisense strand to SEQ ID NO: 2567954
gauucugaugcauacucca

SEQ ID NO: 2567956 - RNA, 19 nt, Artificial Sequence
  Description of Artificial Sequence: Synthetic oligonucleotide
  Sense strand starting at position 3063 of SEQ ID NO: 1888945
gugguacauuucuugcuuu

SEQ ID NO: 2567957 - RNA, 19 nt, Artificial Sequence
  Description of Artificial Sequence: Synthetic oligonucleotide
  Antisense strand to SEQ ID NO: 2567956
aaagcaagaaauguaccac

SEQ ID NO: 2567958 - RNA, 19 nt, Artificial Sequence
  Description of Artificial Sequence: Synthetic oligonucleotide
  Sense strand starting at position 3103 of SEQ ID NO: 1888945
ggcuucuaacuugauguau

SEQ ID NO: 2567959 - RNA, 19 nt, Artificial Sequence
  Description of Artificial Sequence: Synthetic oligonucleotide
  Antisense strand to SEQ ID NO: 2567958
auacaucaaguuagaagcc

SEQ ID NO: 2567960 - RNA, 19 nt, Artificial Sequence
  Description of Artificial Sequence: Synthetic oligonucleotide
  Sense strand starting at position 3288 of SEQ ID NO: 1888945
gauguuauucgcguaacuu

SEQ ID NO: 2567961 - RNA, 19 nt, Artificial Sequence
  Description of Artificial Sequence: Synthetic oligonucleotide
  Antisense strand to SEQ ID NO: 2567960
aaguuacgcgaauaacauc

SEQ ID NO: 2567962 - RNA, 19 nt, Artificial Sequence
  Description of Artificial Sequence: Synthetic oligonucleotide
  Sense strand starting at position 3400 of SEQ ID NO: 1888945
ucacauuggagaugugagu

SEQ ID NO: 2567963 - RNA, 19 nt, Artificial Sequence
  Description of Artificial Sequence: Synthetic oligonucleotide
  Antisense strand to SEQ ID NO: 2567962
acucacaucuccaauguga

SEQ ID NO: 2567964 - RNA, 19 nt, Artificial Sequence
  Description of Artificial Sequence: Synthetic oligonucleotide
  Sense strand starting at position 3436 of SEQ ID NO: 1888945
cagagacagcucuguggau

SEQ ID NO: 2567965 - RNA, 19 nt, Artificial Sequence
  Description of Artificial Sequence: Synthetic oligonucleotide
  Antisense strand to SEQ ID NO: 2567964
auccacagagcugucucug

SEQ ID NO: 2567966 - RNA, 19 nt, Artificial Sequence
  Description of Artificial Sequence: Synthetic oligonucleotide
  Sense strand starting at position 3524 of SEQ ID NO: 1888945
ggaacacaguuccucagau

SEQ ID NO: 2567967 - RNA, 19 nt, Artificial Sequence
  Description of Artificial Sequence: Synthetic oligonucleotide
  Antisense strand to SEQ ID NO: 2567966
aucugaggaacuguguucc

SEQ ID NO: 2567968 - RNA, 19 nt, Artificial Sequence
  Description of Artificial Sequence: Synthetic oligonucleotide
  Sense strand starting at position 3786 of SEQ ID NO: 1888945
guuauaucuccagaaagca

SEQ ID NO: 2567969 - RNA, 19 nt, Artificial Sequence
  Description of Artificial Sequence: Synthetic oligonucleotide
  Antisense strand to SEQ ID NO: 2567968
ugcuuucuggagauauaac

SEQ ID NO: 2567970 - RNA, 19 nt, Artificial Sequence
  Description of Artificial Sequence: Synthetic oligonucleotide
  Sense strand starting at position 3873 of SEQ ID NO: 1888945
ggaauuaacgugugacaag

SEQ ID NO: 2567971 - RNA, 19 nt, Artificial Sequence
  Description of Artificial Sequence: Synthetic oligonucleotide
  Antisense strand to SEQ ID NO: 2567970
cuugucacacguuaauucc

SEQ ID NO: 2567972 - RNA, 19 nt, Artificial Sequence
  Description of Artificial Sequence: Synthetic oligonucleotide
  Sense strand starting at position 106 of SEQ ID NO: 1888946
aucaaaugagagugugguu

SEQ ID NO: 2567973 - RNA, 19 nt, Artificial Sequence
  Description of Artificial Sequence: Synthetic oligonucleotide
  Antisense strand to SEQ ID NO: 2567972
aaccacacucucauuugau

SEQ ID NO: 2567974 - RNA, 19 nt, Artificial Sequence
  Description of Artificial Sequence: Synthetic oligonucleotide
  Sense strand starting at position 111 of SEQ ID NO: 1888946
augagagugugguuaugaa

SEQ ID NO: 2567975 - RNA, 19 nt, Artificial Sequence
  Description of Artificial Sequence: Synthetic oligonucleotide
  Antisense strand to SEQ ID NO: 2567974
uucauaaccacacucucau

SEQ ID NO: 2567976 - RNA, 19 nt, Artificial Sequence
  Description of Artificial Sequence: Synthetic oligonucleotide
  Sense strand starting at position 118 of SEQ ID NO: 1888946
ugugguuaugaaggagaaa

SEQ ID NO: 2567977 - RNA, 19 nt, Artificial Sequence
  Description of Artificial Sequence: Synthetic oligonucleotide
  Antisense strand to SEQ ID NO: 2567976
uuucuccuucauaaccaca

SEQ ID NO: 2567978 - RNA, 19 nt, Artificial Sequence
  Description of Artificial Sequence: Synthetic oligonucleotide
  Sense strand starting at position 156 of SEQ ID NO: 1888946
augguuaucuuuccugaca

SEQ ID NO: 2567979 - RNA, 19 nt, Artificial Sequence
  Description of Artificial Sequence: Synthetic oligonucleotide
  Antisense strand to SEQ ID NO: 2567978
ugucaggaaagauaaccau

SEQ ID NO: 2567980 - RNA, 19 nt, Artificial Sequence
  Description of Artificial Sequence: Synthetic oligonucleotide
  Sense strand starting at position 159 of SEQ ID NO: 1888946
guuaucuuuccugacauuc

SEQ ID NO: 2567981 - RNA, 19 nt, Artificial Sequence
  Description of Artificial Sequence: Synthetic oligonucleotide
  Antisense strand to SEQ ID NO: 2567980
gaaugucaggaaagauaac

SEQ ID NO: 2567982 - RNA, 19 nt, Artificial Sequence
  Description of Artificial Sequence: Synthetic oligonucleotide
  Sense strand starting at position 281 of SEQ ID NO: 1888946
agcuauacucuuugggaaa

SEQ ID NO: 2567983 - RNA, 19 nt, Artificial Sequence
  Description of Artificial Sequence: Synthetic oligonucleotide
  Antisense strand to SEQ ID NO: 2567982
uuucccaaagaguauagcu

SEQ ID NO: 2567984 - RNA, 19 nt, Artificial Sequence
  Description of Artificial Sequence: Synthetic oligonucleotide
  Sense strand starting at position 598 of SEQ ID NO: 1888946
agugacaugguaugguaaa

SEQ ID NO: 2567985 - RNA, 19 nt, Artificial Sequence
  Description of Artificial Sequence: Synthetic oligonucleotide
  Antisense strand to SEQ ID NO: 2567984
uuuaccauaccaugucacu

SEQ ID NO: 2567986 - RNA, 19 nt, Artificial Sequence
  Description of Artificial Sequence: Synthetic oligonucleotide
  Sense strand starting at position 977 of SEQ ID NO: 1888946
augcaacuugaauaauagu

SEQ ID NO: 2567987 - RNA, 19 nt, Artificial Sequence
  Description of Artificial Sequence: Synthetic oligonucleotide
  Antisense strand to SEQ ID NO: 2567986
acuauuauucaaguugcau

SEQ ID NO: 2567988 - RNA, 19 nt, Artificial Sequence
  Description of Artificial Sequence: Synthetic oligonucleotide
  Sense strand starting at position 993 of SEQ ID NO: 1888946
aguaacugugggcacaaau

SEQ ID NO: 2567989 - RNA, 19 nt, Artificial Sequence
  Description of Artificial Sequence: Synthetic oligonucleotide
  Antisense strand to SEQ ID NO: 2567988
auuugugcccacaguuacu

SEQ ID NO: 2567990 - RNA, 19 nt, Artificial Sequence
  Description of Artificial Sequence: Synthetic oligonucleotide
  Sense strand starting at position 1145 of SEQ ID NO: 1888946
acuaccagcuggucuaaga

SEQ ID NO: 2567991 - RNA, 19 nt, Artificial Sequence
  Description of Artificial Sequence: Synthetic oligonucleotide
  Antisense strand to SEQ ID NO: 2567990
ucuuagaccagcugguagu

SEQ ID NO: 2567992 - RNA, 19 nt, Artificial Sequence
  Description of Artificial Sequence: Synthetic oligonucleotide
  Sense strand starting at position 1161 of SEQ ID NO: 1888946
agacacuacugugucuuaa

SEQ ID NO: 2567993 - RNA, 19 nt, Artificial Sequence
  Description of Artificial Sequence: Synthetic oligonucleotide
  Antisense strand to SEQ ID NO: 2567992
uuaagacacaguagugucu

SEQ ID NO: 2567994 - RNA, 19 nt, Artificial Sequence
  Description of Artificial Sequence: Synthetic oligonucleotide
  Sense strand starting at position 1286 of SEQ ID NO: 1888946
uugcacuuagucuagaauu

SEQ ID NO: 2567995 - RNA, 19 nt, Artificial Sequence
  Description of Artificial Sequence: Synthetic oligonucleotide
  Antisense strand to SEQ ID NO: 2567994
aauucuagacuaagugcaa

SEQ ID NO: 2567996 - RNA, 19 nt, Artificial Sequence
  Description of Artificial Sequence: Synthetic oligonucleotide
  Sense strand starting at position 1510 of SEQ ID NO: 1888946
ccuugugaucugcaaauag

SEQ ID NO: 2567997 - RNA, 19 nt, Artificial Sequence
  Description of Artificial Sequence: Synthetic oligonucleotide
  Antisense strand to SEQ ID NO: 2567996
cuauuugcagaucacaagg

SEQ ID NO: 2567998 - RNA, 19 nt, Artificial Sequence
  Description of Artificial Sequence: Synthetic oligonucleotide
  Sense strand starting at position 1743 of SEQ ID NO: 1888946
ccagaccuuguaugaucau

SEQ ID NO: 2567999 - RNA, 19 nt, Artificial Sequence
  Description of Artificial Sequence: Synthetic oligonucleotide
  Antisense strand to SEQ ID NO: 2567998
augaucauacaaggucugg

SEQ ID NO: 2568000 - RNA, 19 nt, Artificial Sequence
  Description of Artificial Sequence: Synthetic oligonucleotide
  Sense strand starting at position 1749 of SEQ ID NO: 1888946
cuuguaugaucauuauuga

SEQ ID NO: 2568001 - RNA, 19 nt, Artificial Sequence
  Description of Artificial Sequence: Synthetic oligonucleotide
  Antisense strand to SEQ ID NO: 2568000
ucaauaaugaucauacaag

SEQ ID NO: 2568002 - RNA, 19 nt, Artificial Sequence
  Description of Artificial Sequence: Synthetic oligonucleotide
  Sense strand starting at position 2006 of SEQ ID NO: 1888946
uauguugguagauaggauu

SEQ ID NO: 2568003 - RNA, 19 nt, Artificial Sequence
  Description of Artificial Sequence: Synthetic oligonucleotide
  Antisense strand to SEQ ID NO: 2568002
aauccuaucuaccaacaua

SEQ ID NO: 2568004 - RNA, 19 nt, Artificial Sequence
  Description of Artificial Sequence: Synthetic oligonucleotide
  Sense strand starting at position 2190 of SEQ ID NO: 1888946
aaggcuuaggcaggaaaua

SEQ ID NO: 2568005 - RNA, 19 nt, Artificial Sequence
  Description of Artificial Sequence: Synthetic oligonucleotide
  Antisense strand to SEQ ID NO: 2568004
uauuuccugccuaagccuu

SEQ ID NO: 2568006 - RNA, 19 nt, Artificial Sequence
  Description of Artificial Sequence: Synthetic oligonucleotide
  Sense strand starting at position 2201 of SEQ ID NO: 1888946
aggaaauaauggcuuccga

SEQ ID NO: 2568007 - RNA, 19 nt, Artificial Sequence
  Description of Artificial Sequence: Synthetic oligonucleotide
  Antisense strand to SEQ ID NO: 2568006
ucggaagccauuauuuccu

SEQ ID NO: 2568008 - RNA, 19 nt, Artificial Sequence
  Description of Artificial Sequence: Synthetic oligonucleotide
  Sense strand starting at position 2291 of SEQ ID NO: 1888946
guaaucuucuacucugaag

SEQ ID NO: 2568009 - RNA, 19 nt, Artificial Sequence
  Description of Artificial Sequence: Synthetic oligonucleotide
  Antisense strand to SEQ ID NO: 2568008
cuucagaguagaagauuac

SEQ ID NO: 2568010 - RNA, 19 nt, Artificial Sequence
  Description of Artificial Sequence: Synthetic oligonucleotide
  Sense strand starting at position 2333 of SEQ ID NO: 1888946
uagguaaugcuccaaguug

SEQ ID NO: 2568011 - RNA, 19 nt, Artificial Sequence
  Description of Artificial Sequence: Synthetic oligonucleotide
  Antisense strand to SEQ ID NO: 2568010
caacuuggagcauuaccua

SEQ ID NO: 2568012 - RNA, 19 nt, Artificial Sequence
  Description of Artificial Sequence: Synthetic oligonucleotide
  Sense strand starting at position 2350 of SEQ ID NO: 1888946
ugaagcuaaucauuggaga

SEQ ID NO: 2568013 - RNA, 19 nt, Artificial Sequence
  Description of Artificial Sequence: Synthetic oligonucleotide
  Antisense strand to SEQ ID NO: 2568012
ucuccaaugauuagcuuca

SEQ ID NO: 2568014 - RNA, 19 nt, Artificial Sequence
  Description of Artificial Sequence: Synthetic oligonucleotide
  Sense strand starting at position 2351 of SEQ ID NO: 1888946
gaagcuaaucauuggagau

SEQ ID NO: 2568015 - RNA, 19 nt, Artificial Sequence
  Description of Artificial Sequence: Synthetic oligonucleotide
  Antisense strand to SEQ ID NO: 2568014
aucuccaaugauuagcuuc

SEQ ID NO: 2568016 - RNA, 19 nt, Artificial Sequence
  Description of Artificial Sequence: Synthetic oligonucleotide
  Sense strand starting at position 2400 of SEQ ID NO: 1888946
cugaacagguuauaauuua

SEQ ID NO: 2568017 - RNA, 19 nt, Artificial Sequence
  Description of Artificial Sequence: Synthetic oligonucleotide
  Antisense strand to SEQ ID NO: 2568016
uaaauuauaaccuguucag

SEQ ID NO: 2568018 - RNA, 19 nt, Artificial Sequence
  Description of Artificial Sequence: Synthetic oligonucleotide
  Sense strand starting at position 2547 of SEQ ID NO: 1888946
ggcuuaucacauuagaauu

SEQ ID NO: 2568019 - RNA, 19 nt, Artificial Sequence
  Description of Artificial Sequence: Synthetic oligonucleotide
  Antisense strand to SEQ ID NO: 2568018
aauucuaaugugauaagcc

SEQ ID NO: 2568020 - RNA, 19 nt, Artificial Sequence
  Description of Artificial Sequence: Synthetic oligonucleotide
  Sense strand starting at position 2585 of SEQ ID NO: 1888946
acacauacauagucaaagu

SEQ ID NO: 2568021 - RNA, 19 nt, Artificial Sequence
  Description of Artificial Sequence: Synthetic oligonucleotide
  Antisense strand to SEQ ID NO: 2568020
acuuugacuauguaugugu

SEQ ID NO: 2568022 - RNA, 19 nt, Artificial Sequence
  Description of Artificial Sequence: Synthetic oligonucleotide
  Sense strand starting at position 2607 of SEQ ID NO: 1888946
aaggaagacuguuauuuau

SEQ ID NO: 2568023 - RNA, 19 nt, Artificial Sequence
  Description of Artificial Sequence: Synthetic oligonucleotide
  Antisense strand to SEQ ID NO: 2568022
auaaauaacagucuuccuu

SEQ ID NO: 2568024 - RNA, 19 nt, Artificial Sequence
  Description of Artificial Sequence: Synthetic oligonucleotide
  Sense strand starting at position 2645 of SEQ ID NO: 1888946
gaauuuguguugcucaaau

SEQ ID NO: 2568025 - RNA, 19 nt, Artificial Sequence
  Description of Artificial Sequence: Synthetic oligonucleotide
  Antisense strand to SEQ ID NO: 2568024
auuugagcaacacaaauuc

SEQ ID NO: 2568026 - RNA, 19 nt, Artificial Sequence
  Description of Artificial Sequence: Synthetic oligonucleotide
  Sense strand starting at position 2708 of SEQ ID NO: 1888946
augugauagaagugguuac

SEQ ID NO: 2568027 - RNA, 19 nt, Artificial Sequence
  Description of Artificial Sequence: Synthetic oligonucleotide
  Antisense strand to SEQ ID NO: 2568026
guaaccacuucuaucacau

SEQ ID NO: 2568028 - RNA, 19 nt, Artificial Sequence
  Description of Artificial Sequence: Synthetic oligonucleotide
  Sense strand starting at position 2709 of SEQ ID NO: 1888946
ugugauagaagugguuaca

SEQ ID NO: 2568029 - RNA, 19 nt, Artificial Sequence
  Description of Artificial Sequence: Synthetic oligonucleotide
  Antisense strand to SEQ ID NO: 2568028
uguaaccacuucuaucaca

SEQ ID NO: 2568030 - RNA, 19 nt, Artificial Sequence
  Description of Artificial Sequence: Synthetic oligonucleotide
  Sense strand starting at position 2712 of SEQ ID NO: 1888946
gauagaagugguuacaugu

SEQ ID NO: 2568031 - RNA, 19 nt, Artificial Sequence
  Description of Artificial Sequence: Synthetic oligonucleotide
  Antisense strand to SEQ ID NO: 2568030
acauguaaccacuucuauc

SEQ ID NO: 2568032 - RNA, 19 nt, Artificial Sequence
  Description of Artificial Sequence: Synthetic oligonucleotide
  Sense strand starting at position 2725 of SEQ ID NO: 1888946
acauguacgugucucauuu

SEQ ID NO: 2568033 - RNA, 19 nt, Artificial Sequence
  Description of Artificial Sequence: Synthetic oligonucleotide
  Antisense strand to SEQ ID NO: 2568032
aaaugagacacguacaugu

SEQ ID NO: 2568034 - RNA, 19 nt, Artificial Sequence
  Description of Artificial Sequence: Synthetic oligonucleotide
  Sense strand starting at position 2844 of SEQ ID NO: 1888946
cuugaaucuucccuaagga

SEQ ID NO: 2568035 - RNA, 19 nt, Artificial Sequence
  Description of Artificial Sequence: Synthetic oligonucleotide
  Antisense strand to SEQ ID NO: 2568034
uccuuagggaagauucaag

SEQ ID NO: 2568036 - RNA, 19 nt, Artificial Sequence
  Description of Artificial Sequence: Synthetic oligonucleotide
  Sense strand starting at position 3294 of SEQ ID NO: 1888946
cuauuauggcaaggacagu

SEQ ID NO: 2568037 - RNA, 19 nt, Artificial Sequence
  Description of Artificial Sequence: Synthetic oligonucleotide
  Antisense strand to SEQ ID NO: 2568036
acuguccuugccauaauag

SEQ ID NO: 2568038 - RNA, 19 nt, Artificial Sequence
  Description of Artificial Sequence: Synthetic oligonucleotide
  Sense strand starting at position 3400 of SEQ ID NO: 1888946
ugaagaauguuggcauaug

SEQ ID NO: 2568039 - RNA, 19 nt, Artificial Sequence
  Description of Artificial Sequence: Synthetic oligonucleotide
  Antisense strand to SEQ ID NO: 2568038
cauaugccaacauucuuca

SEQ ID NO: 2568040 - RNA, 19 nt, Artificial Sequence
  Description of Artificial Sequence: Synthetic oligonucleotide
  Sense strand starting at position 3446 of SEQ ID NO: 1888946
aucgauaauagauggagua

SEQ ID NO: 2568041 - RNA, 19 nt, Artificial Sequence
  Description of Artificial Sequence: Synthetic oligonucleotide
  Antisense strand to SEQ ID NO: 2568040
uacuccaucuauuaucgau

SEQ ID NO: 2568042 - RNA, 19 nt, Artificial Sequence
  Description of Artificial Sequence: Synthetic oligonucleotide
  Sense strand starting at position 3447 of SEQ ID NO: 1888946
ucgauaauagauggaguaa

SEQ ID NO: 2568043 - RNA, 19 nt, Artificial Sequence
  Description of Artificial Sequence: Synthetic oligonucleotide
  Antisense strand to SEQ ID NO: 2568042
uuacuccaucuauuaucga

SEQ ID NO: 2568044 - RNA, 19 nt, Artificial Sequence
  Description of Artificial Sequence: Synthetic oligonucleotide
  Sense strand starting at position 3549 of SEQ ID NO: 1888946
ugacaaucaucaccacgau

SEQ ID NO: 2568045 - RNA, 19 nt, Artificial Sequence
  Description of Artificial Sequence: Synthetic oligonucleotide
  Antisense strand to SEQ ID NO: 2568044
aucguggugaugauuguca

SEQ ID NO: 2568046 - RNA, 19 nt, Artificial Sequence
  Description of Artificial Sequence: Synthetic oligonucleotide
  Sense strand starting at position 3609 of SEQ ID NO: 1888946
ccuggcuuggaauacauau

SEQ ID NO: 2568047 - RNA, 19 nt, Artificial Sequence
  Description of Artificial Sequence: Synthetic oligonucleotide
  Antisense strand to SEQ ID NO: 2568046
auauguauuccaagccagg

SEQ ID NO: 2568048 - RNA, 19 nt, Artificial Sequence
  Description of Artificial Sequence: Synthetic oligonucleotide
  Sense strand starting at position 3719 of SEQ ID NO: 1888946
acuauaauuuaguacugga

SEQ ID NO: 2568049 - RNA, 19 nt, Artificial Sequence
  Description of Artificial Sequence: Synthetic oligonucleotide
  Antisense strand to SEQ ID NO: 2568048
uccaguacuaaauuauagu

SEQ ID NO: 2568050 - RNA, 19 nt, Artificial Sequence
  Description of Artificial Sequence: Synthetic oligonucleotide
  Sense strand starting at position 3919 of SEQ ID NO: 1888946
cuugauaggcuuuacauga

SEQ ID NO: 2568051 - RNA, 19 nt, Artificial Sequence
  Description of Artificial Sequence: Synthetic oligonucleotide
  Antisense strand to SEQ ID NO: 2568050
ucauguaaagccuaucaag

SEQ ID NO: 2568052 - RNA, 19 nt, Artificial Sequence
  Description of Artificial Sequence: Synthetic oligonucleotide
  Sense strand starting at position 216 of SEQ ID NO: 1888947
agaagagaauuccaaacaa

SEQ ID NO: 2568053 - RNA, 19 nt, Artificial Sequence
  Description of Artificial Sequence: Synthetic oligonucleotide
  Antisense strand to SEQ ID NO: 2568052
uuguuuggaauucucuucu

SEQ ID NO: 2568054 - RNA, 19 nt, Artificial Sequence
  Description of Artificial Sequence: Synthetic oligonucleotide
  Sense strand starting at position 565 of SEQ ID NO: 1888947
cuggcugguuucuuuauuu

SEQ ID NO: 2568055 - RNA, 19 nt, Artificial Sequence
  Description of Artificial Sequence: Synthetic oligonucleotide
  Antisense strand to SEQ ID NO: 2568054
aaauaaagaaaccagccag

SEQ ID NO: 2568056 - RNA, 19 nt, Artificial Sequence
  Description of Artificial Sequence: Synthetic oligonucleotide
  Sense strand starting at position 662 of SEQ ID NO: 1888947
agauuaaagguauggguca

SEQ ID NO: 2568057 - RNA, 19 nt, Artificial Sequence
  Description of Artificial Sequence: Synthetic oligonucleotide
  Antisense strand to SEQ ID NO: 2568056
ugacccauaccuuuaaucu

SEQ ID NO: 2568058 - RNA, 19 nt, Artificial Sequence
  Description of Artificial Sequence: Synthetic oligonucleotide
  Sense strand starting at position 897 of SEQ ID NO: 1888947
aggguaggucuagaaaugu

SEQ ID NO: 2568059 - RNA, 19 nt, Artificial Sequence
  Description of Artificial Sequence: Synthetic oligonucleotide
  Antisense strand to SEQ ID NO: 2568058
acauuucuagaccuacccu

SEQ ID NO: 2568060 - RNA, 19 nt, Artificial Sequence
  Description of Artificial Sequence: Synthetic oligonucleotide
  Sense strand starting at position 908 of SEQ ID NO: 1888947
agaaauguuguccaggagu

SEQ ID NO: 2568061 - RNA, 19 nt, Artificial Sequence
  Description of Artificial Sequence: Synthetic oligonucleotide
  Antisense strand to SEQ ID NO: 2568060
acuccuggacaacauuucu

SEQ ID NO: 2568062 - RNA, 19 nt, Artificial Sequence
  Description of Artificial Sequence: Synthetic oligonucleotide
  Sense strand starting at position 910 of SEQ ID NO: 1888947
aaauguuguccaggaguua

SEQ ID NO: 2568063 - RNA, 19 nt, Artificial Sequence
  Description of Artificial Sequence: Synthetic oligonucleotide
  Antisense strand to SEQ ID NO: 2568062
uaacuccuggacaacauuu

SEQ ID NO: 2568064 - RNA, 19 nt, Artificial Sequence
  Description of Artificial Sequence: Synthetic oligonucleotide
  Sense strand starting at position 911 of SEQ ID NO: 1888947
aauguuguccaggaguuag

SEQ ID NO: 2568065 - RNA, 19 nt, Artificial Sequence
  Description of Artificial Sequence: Synthetic oligonucleotide
  Antisense strand to SEQ ID NO: 2568064
cuaacuccuggacaacauu

SEQ ID NO: 2568066 - RNA, 19 nt, Artificial Sequence
  Description of Artificial Sequence: Synthetic oligonucleotide
  Sense strand starting at position 949 of SEQ ID NO: 1888947
aggacucugcuugauguuu

SEQ ID NO: 2568067 - RNA, 19 nt, Artificial Sequence
  Description of Artificial Sequence: Synthetic oligonucleotide
  Antisense strand to SEQ ID NO: 2568066
aaacaucaagcagaguccu

SEQ ID NO: 2568068 - RNA, 19 nt, Artificial Sequence
  Description of Artificial Sequence: Synthetic oligonucleotide
  Sense strand starting at position 1034 of SEQ ID NO: 1888947
uccugucaucaagggaaag

SEQ ID NO: 2568069 - RNA, 19 nt, Artificial Sequence
  Description of Artificial Sequence: Synthetic oligonucleotide
  Antisense strand to SEQ ID NO: 2568068
cuuucccuugaugacagga

SEQ ID NO: 2568070 - RNA, 19 nt, Artificial Sequence
  Description of Artificial Sequence: Synthetic oligonucleotide
  Sense strand starting at position 1193 of SEQ ID NO: 1888947
ggacuugccagggaauugu

SEQ ID NO: 2568071 - RNA, 19 nt, Artificial Sequence
  Description of Artificial Sequence: Synthetic oligonucleotide
  Antisense strand to SEQ ID NO: 2568070
acaauucccuggcaagucc

SEQ ID NO: 2568072 - RNA, 19 nt, Artificial Sequence
  Description of Artificial Sequence: Synthetic oligonucleotide
  Sense strand starting at position 1377 of SEQ ID NO: 1888947
uguugcuuuccgcuggaca

SEQ ID NO: 2568073 - RNA, 19 nt, Artificial Sequence
  Description of Artificial Sequence: Synthetic oligonucleotide
  Antisense strand to SEQ ID NO: 2568072
uguccagcggaaagcaaca

SEQ ID NO: 2568074 - RNA, 19 nt, Artificial Sequence
  Description of Artificial Sequence: Synthetic oligonucleotide
  Sense strand starting at position 1600 of SEQ ID NO: 1888947
aggugcuuucucgugugga

SEQ ID NO: 2568075 - RNA, 19 nt, Artificial Sequence
  Description of Artificial Sequence: Synthetic oligonucleotide
  Antisense strand to SEQ ID NO: 2568074
uccacacgagaaagcaccu

SEQ ID NO: 2568076 - RNA, 19 nt, Artificial Sequence
  Description of Artificial Sequence: Synthetic oligonucleotide
  Sense strand starting at position 1602 of SEQ ID NO: 1888947
gugcuuucucguguggaua

SEQ ID NO: 2568077 - RNA, 19 nt, Artificial Sequence
  Description of Artificial Sequence: Synthetic oligonucleotide
  Antisense strand to SEQ ID NO: 2568076
uauccacacgagaaagcac

SEQ ID NO: 2568078 - RNA, 19 nt, Artificial Sequence
  Description of Artificial Sequence: Synthetic oligonucleotide
  Sense strand starting at position 1697 of SEQ ID NO: 1888947
gccuccugucucuauaaga

SEQ ID NO: 2568079 - RNA, 19 nt, Artificial Sequence
  Description of Artificial Sequence: Synthetic oligonucleotide
  Antisense strand to SEQ ID NO: 2568078
ucuuauagagacaggaggc

SEQ ID NO: 2568080 - RNA, 19 nt, Artificial Sequence
  Description of Artificial Sequence: Synthetic oligonucleotide
  Sense strand starting at position 1717 of SEQ ID NO: 1888947
ucuugaauagacuguuucu

SEQ ID NO: 2568081 - RNA, 19 nt, Artificial Sequence
  Description of Artificial Sequence: Synthetic oligonucleotide
  Antisense strand to SEQ ID NO: 2568080
agaaacagucuauucaaga

SEQ ID NO: 2568082 - RNA, 19 nt, Artificial Sequence
  Description of Artificial Sequence: Synthetic oligonucleotide
  Sense strand starting at position 1754 of SEQ ID NO: 1888947
acuccugaauggucucaga

SEQ ID NO: 2568083 - RNA, 19 nt, Artificial Sequence
  Description of Artificial Sequence: Synthetic oligonucleotide
  Antisense strand to SEQ ID NO: 2568082
ucugagaccauucaggagu

SEQ ID NO: 2568084 - RNA, 19 nt, Artificial Sequence
  Description of Artificial Sequence: Synthetic oligonucleotide
  Sense strand starting at position 1842 of SEQ ID NO: 1888947
ucuaguuacccugauguga

SEQ ID NO: 2568085 - RNA, 19 nt, Artificial Sequence
  Description of Artificial Sequence: Synthetic oligonucleotide
  Antisense strand to SEQ ID NO: 2568084
ucacaucaggguaacuaga

SEQ ID NO: 2568086 - RNA, 19 nt, Artificial Sequence
  Description of Artificial Sequence: Synthetic oligonucleotide
  Sense strand starting at position 1934 of SEQ ID NO: 1888947
gcaauaauauuugugguuu

SEQ ID NO: 2568087 - RNA, 19 nt, Artificial Sequence
  Description of Artificial Sequence: Synthetic oligonucleotide
  Antisense strand to SEQ ID NO: 2568086
aaaccacaaauauuauugc

SEQ ID NO: 2568088 - RNA, 19 nt, Artificial Sequence
  Description of Artificial Sequence: Synthetic oligonucleotide
  Sense strand starting at position 2257 of SEQ ID NO: 1888947
uaguauagugcugaaacaa

SEQ ID NO: 2568089 - RNA, 19 nt, Artificial Sequence
  Description of Artificial Sequence: Synthetic oligonucleotide
  Antisense strand to SEQ ID NO: 2568088
uuguuucagcacuauacua

SEQ ID NO: 2568090 - RNA, 19 nt, Artificial Sequence
  Description of Artificial Sequence: Synthetic oligonucleotide
  Sense strand starting at position 2267 of SEQ ID NO: 1888947
cugaaacaaugugcuuuaa

SEQ ID NO: 2568091 - RNA, 19 nt, Artificial Sequence
  Description of Artificial Sequence: Synthetic oligonucleotide
  Antisense strand to SEQ ID NO: 2568090
uuaaagcacauuguuucag

SEQ ID NO: 2568092 - RNA, 19 nt, Artificial Sequence
  Description of Artificial Sequence: Synthetic oligonucleotide
  Sense strand starting at position 2388 of SEQ ID NO: 1888947
ucugaauugcuguauaauu

SEQ ID NO: 2568093 - RNA, 19 nt, Artificial Sequence
  Description of Artificial Sequence: Synthetic oligonucleotide
  Antisense strand to SEQ ID NO: 2568092
aauuauacagcaauucaga

SEQ ID NO: 2568094 - RNA, 19 nt, Artificial Sequence
  Description of Artificial Sequence: Synthetic oligonucleotide
  Sense strand starting at position 2624 of SEQ ID NO: 1888947
gccuaugugcuaugauuua

SEQ ID NO: 2568095 - RNA, 19 nt, Artificial Sequence
  Description of Artificial Sequence: Synthetic oligonucleotide
  Antisense strand to SEQ ID NO: 2568094
uaaaucauagcacauaggc

SEQ ID NO: 2568096 - RNA, 19 nt, Artificial Sequence
  Description of Artificial Sequence: Synthetic oligonucleotide
  Sense strand starting at position 2657 of SEQ ID NO: 1888947
aggcacaugccucaaacua

SEQ ID NO: 2568097 - RNA, 19 nt, Artificial Sequence
  Description of Artificial Sequence: Synthetic oligonucleotide
  Antisense strand to SEQ ID NO: 2568096
uaguuugaggcaugugccu

SEQ ID NO: 2568098 - RNA, 19 nt, Artificial Sequence
  Description of Artificial Sequence: Synthetic oligonucleotide
  Sense strand starting at position 2834 of SEQ ID NO: 1888947
uguaguacuuuaucagaua

SEQ ID NO: 2568099 - RNA, 19 nt, Artificial Sequence
  Description of Artificial Sequence: Synthetic oligonucleotide
  Antisense strand to SEQ ID NO: 2568098
uaucugauaaaguacuaca

SEQ ID NO: 2568100 - RNA, 19 nt, Artificial Sequence
  Description of Artificial Sequence: Synthetic oligonucleotide
  Sense strand starting at position 2886 of SEQ ID NO: 1888947
ucauucuauguuggaaagu

SEQ ID NO: 2568101 - RNA, 19 nt, Artificial Sequence
  Description of Artificial Sequence: Synthetic oligonucleotide
  Antisense strand to SEQ ID NO: 2568100
acuuuccaacauagaauga

SEQ ID NO: 2568102 - RNA, 19 nt, Artificial Sequence
  Description of Artificial Sequence: Synthetic oligonucleotide
  Sense strand starting at position 3037 of SEQ ID NO: 1888947
cuuguaaaugcagaauaau

SEQ ID NO: 2568103 - RNA, 19 nt, Artificial Sequence
  Description of Artificial Sequence: Synthetic oligonucleotide
  Antisense strand to SEQ ID NO: 2568102
auuauucugcauuuacaag

SEQ ID NO: 2568104 - RNA, 19 nt, Artificial Sequence
  Description of Artificial Sequence: Synthetic oligonucleotide
  Sense strand starting at position 3040 of SEQ ID NO: 1888947
guaaaugcagaauaauagu

SEQ ID NO: 2568105 - RNA, 19 nt, Artificial Sequence
  Description of Artificial Sequence: Synthetic oligonucleotide
  Antisense strand to SEQ ID NO: 2568104
acuauuauucugcauuuac

SEQ ID NO: 2568106 - RNA, 19 nt, Artificial Sequence
  Description of Artificial Sequence: Synthetic oligonucleotide
  Sense strand starting at position 3067 of SEQ ID NO: 1888947
ggacaugguguaugaguua

SEQ ID NO: 2568107 - RNA, 19 nt, Artificial Sequence
  Description of Artificial Sequence: Synthetic oligonucleotide
  Antisense strand to SEQ ID NO: 2568106
uaacucauacaccaugucc

SEQ ID NO: 2568108 - RNA, 19 nt, Artificial Sequence
  Description of Artificial Sequence: Synthetic oligonucleotide
  Sense strand starting at position 3070 of SEQ ID NO: 1888947
caugguguaugaguuaaca

SEQ ID NO: 2568109 - RNA, 19 nt, Artificial Sequence
  Description of Artificial Sequence: Synthetic oligonucleotide
  Antisense strand to SEQ ID NO: 2568108
uguuaacucauacaccaug

SEQ ID NO: 2568110 - RNA, 19 nt, Artificial Sequence
  Description of Artificial Sequence: Synthetic oligonucleotide
  Sense strand starting at position 3072 of SEQ ID NO: 1888947
ugguguaugaguuaacauu

SEQ ID NO: 2568111 - RNA, 19 nt, Artificial Sequence
  Description of Artificial Sequence: Synthetic oligonucleotide
  Antisense strand to SEQ ID NO: 2568110
aauguuaacucauacacca

SEQ ID NO: 2568112 - RNA, 19 nt, Artificial Sequence
  Description of Artificial Sequence: Synthetic oligonucleotide
  Sense strand starting at position 3078 of SEQ ID NO: 1888947
augaguuaacauuguaauc

SEQ ID NO: 2568113 - RNA, 19 nt, Artificial Sequence
  Description of Artificial Sequence: Synthetic oligonucleotide
  Antisense strand to SEQ ID NO: 2568112
gauuacaauguuaacucau

SEQ ID NO: 2568114 - RNA, 19 nt, Artificial Sequence
  Description of Artificial Sequence: Synthetic oligonucleotide
  Sense strand starting at position 3132 of SEQ ID NO: 1888947
uagaaaugguacuugguga

SEQ ID NO: 2568115 - RNA, 19 nt, Artificial Sequence
  Description of Artificial Sequence: Synthetic oligonucleotide
  Antisense strand to SEQ ID NO: 2568114
ucaccaaguaccauuucua

SEQ ID NO: 2568116 - RNA, 19 nt, Artificial Sequence
  Description of Artificial Sequence: Synthetic oligonucleotide
  Sense strand starting at position 3133 of SEQ ID NO: 1888947
agaaaugguacuuggugaa

SEQ ID NO: 2568117 - RNA, 19 nt, Artificial Sequence
  Description of Artificial Sequence: Synthetic oligonucleotide
  Antisense strand to SEQ ID NO: 2568116
uucaccaaguaccauuucu

SEQ ID NO: 2568118 - RNA, 19 nt, Artificial Sequence
  Description of Artificial Sequence: Synthetic oligonucleotide
  Sense strand starting at position 3174 of SEQ ID NO: 1888947
ggagaaauauuugaagugu

SEQ ID NO: 2568119 - RNA, 19 nt, Artificial Sequence
  Description of Artificial Sequence: Synthetic oligonucleotide
  Antisense strand to SEQ ID NO: 2568118
acacuucaaauauuucucc

SEQ ID NO: 2568120 - RNA, 19 nt, Artificial Sequence
  Description of Artificial Sequence: Synthetic oligonucleotide
  Sense strand starting at position 3330 of SEQ ID NO: 1888947
uggaucguuuacccugaga

SEQ ID NO: 2568121 - RNA, 19 nt, Artificial Sequence
  Description of Artificial Sequence: Synthetic oligonucleotide
  Antisense strand to SEQ ID NO: 2568120
ucucaggguaaacgaucca

SEQ ID NO: 2568122 - RNA, 19 nt, Artificial Sequence
  Description of Artificial Sequence: Synthetic oligonucleotide
  Sense strand starting at position 3332 of SEQ ID NO: 1888947
gaucguuuacccugagaua

SEQ ID NO: 2568123 - RNA, 19 nt, Artificial Sequence
  Description of Artificial Sequence: Synthetic oligonucleotide
  Antisense strand to SEQ ID NO: 2568122
uaucucaggguaaacgauc

SEQ ID NO: 2568124 - RNA, 19 nt, Artificial Sequence
  Description of Artificial Sequence: Synthetic oligonucleotide
  Sense strand starting at position 3333 of SEQ ID NO: 1888947
aucguuuacccugagauaa

SEQ ID NO: 2568125 - RNA, 19 nt, Artificial Sequence
  Description of Artificial Sequence: Synthetic oligonucleotide
  Antisense strand to SEQ ID NO: 2568124
uuaucucaggguaaacgau

SEQ ID NO: 2568126 - RNA, 19 nt, Artificial Sequence
  Description of Artificial Sequence: Synthetic oligonucleotide
  Sense strand starting at position 3599 of SEQ ID NO: 1888947
uucugaaauggaugauucu

SEQ ID NO: 2568127 - RNA, 19 nt, Artificial Sequence
  Description of Artificial Sequence: Synthetic oligonucleotide
  Antisense strand to SEQ ID NO: 2568126
agaaucauccauuucagaa

SEQ ID NO: 2568128 - RNA, 19 nt, Artificial Sequence
  Description of Artificial Sequence: Synthetic oligonucleotide
  Sense strand starting at position 3799 of SEQ ID NO: 1888947
cuagaaauuguuuggaaau

SEQ ID NO: 2568129 - RNA, 19 nt, Artificial Sequence
  Description of Artificial Sequence: Synthetic oligonucleotide
  Antisense strand to SEQ ID NO: 2568128
auuuccaaacaauuucuag

SEQ ID NO: 2568130 - RNA, 19 nt, Artificial Sequence
  Description of Artificial Sequence: Synthetic oligonucleotide
  Sense strand starting at position 3937 of SEQ ID NO: 1888947
accugaaagcuguaauuga

SEQ ID NO: 2568131 - RNA, 19 nt, Artificial Sequence
  Description of Artificial Sequence: Synthetic oligonucleotide
  Antisense strand to SEQ ID NO: 2568130
ucaauuacagcuuucaggu

SEQ ID NO: 2568132 - RNA, 19 nt, Artificial Sequence
  Description of Artificial Sequence: Synthetic oligonucleotide
  Sense strand starting at position 192 of SEQ ID NO: 1888948
agugaauuucuuuguaugu

SEQ ID NO: 2568133 - RNA, 19 nt, Artificial Sequence
  Description of Artificial Sequence: Synthetic oligonucleotide
  Antisense strand to SEQ ID NO: 2568132
acauacaaagaaauucacu

SEQ ID NO: 2568134 - RNA, 19 nt, Artificial Sequence
  Description of Artificial Sequence: Synthetic oligonucleotide
  Sense strand starting at position 193 of SEQ ID NO: 1888948
gugaauuucuuuguaugug

SEQ ID NO: 2568135 - RNA, 19 nt, Artificial Sequence
  Description of Artificial Sequence: Synthetic oligonucleotide
  Antisense strand to SEQ ID NO: 2568134
cacauacaaagaaauucac

SEQ ID NO: 2568136 - RNA, 19 nt, Artificial Sequence
  Description of Artificial Sequence: Synthetic oligonucleotide
  Sense strand starting at position 291 of SEQ ID NO: 1888948
ggaagauauaagugcugau

SEQ ID NO: 2568137 - RNA, 19 nt, Artificial Sequence
  Description of Artificial Sequence: Synthetic oligonucleotide
  Antisense strand to SEQ ID NO: 2568136
aucagcacuuauaucuucc

SEQ ID NO: 2568138 - RNA, 19 nt, Artificial Sequence
  Description of Artificial Sequence: Synthetic oligonucleotide
  Sense strand starting at position 307 of SEQ ID NO: 1888948
gaugauaaaugagaaggau

SEQ ID NO: 2568139 - RNA, 19 nt, Artificial Sequence
  Description of Artificial Sequence: Synthetic oligonucleotide
  Antisense strand to SEQ ID NO: 2568138
auccuucucauuuaucauc

SEQ ID NO: 2568140 - RNA, 19 nt, Artificial Sequence
  Description of Artificial Sequence: Synthetic oligonucleotide
  Sense strand starting at position 549 of SEQ ID NO: 1888948
cuaaauaucuuggugcaaa

SEQ ID NO: 2568141 - RNA, 19 nt, Artificial Sequence
  Description of Artificial Sequence: Synthetic oligonucleotide
  Antisense strand to SEQ ID NO: 2568140
uuugcaccaagauauuuag

SEQ ID NO: 2568142 - RNA, 19 nt, Artificial Sequence
  Description of Artificial Sequence: Synthetic oligonucleotide
  Sense strand starting at position 589 of SEQ ID NO: 1888948
acauucuguuggguauaaa

SEQ ID NO: 2568143 - RNA, 19 nt, Artificial Sequence
  Description of Artificial Sequence: Synthetic oligonucleotide
  Antisense strand to SEQ ID NO: 2568142
uuuauacccaacagaaugu

SEQ ID NO: 2568144 - RNA, 19 nt, Artificial Sequence
  Description of Artificial Sequence: Synthetic oligonucleotide
  Sense strand starting at position 633 of SEQ ID NO: 1888948
caagcuauugaucagaggu

SEQ ID NO: 2568145 - RNA, 19 nt, Artificial Sequence
  Description of Artificial Sequence: Synthetic oligonucleotide
  Antisense strand to SEQ ID NO: 2568144
accucugaucaauagcuug

SEQ ID NO: 2568146 - RNA, 19 nt, Artificial Sequence
  Description of Artificial Sequence: Synthetic oligonucleotide
  Sense strand starting at position 716 of SEQ ID NO: 1888948
accacuuacugaguuccua

SEQ ID NO: 2568147 - RNA, 19 nt, Artificial Sequence
  Description of Artificial Sequence: Synthetic oligonucleotide
  Antisense strand to SEQ ID NO: 2568146
uaggaacucaguaaguggu

SEQ ID NO: 2568148 - RNA, 19 nt, Artificial Sequence
  Description of Artificial Sequence: Synthetic oligonucleotide
  Sense strand starting at position 720 of SEQ ID NO: 1888948
cuuacugaguuccuacuau

SEQ ID NO: 2568149 - RNA, 19 nt, Artificial Sequence
  Description of Artificial Sequence: Synthetic oligonucleotide
  Antisense strand to SEQ ID NO: 2568148
auaguaggaacucaguaag

SEQ ID NO: 2568150 - RNA, 19 nt, Artificial Sequence
  Description of Artificial Sequence: Synthetic oligonucleotide
  Sense strand starting at position 832 of SEQ ID NO: 1888948
guaccauucccagagucuu

SEQ ID NO: 2568151 - RNA, 19 nt, Artificial Sequence
  Description of Artificial Sequence: Synthetic oligonucleotide
  Antisense strand to SEQ ID NO: 2568150
aagacucugggaaugguac

SEQ ID NO: 2568152 - RNA, 19 nt, Artificial Sequence
  Description of Artificial Sequence: Synthetic oligonucleotide
  Sense strand starting at position 939 of SEQ ID NO: 1888948
agggacauauucguaggua

SEQ ID NO: 2568153 - RNA, 19 nt, Artificial Sequence
  Description of Artificial Sequence: Synthetic oligonucleotide
  Antisense strand to SEQ ID NO: 2568152
uaccuacgaauaugucccu

SEQ ID NO: 2568154 - RNA, 19 nt, Artificial Sequence
  Description of Artificial Sequence: Synthetic oligonucleotide
  Sense strand starting at position 1007 of SEQ ID NO: 1888948
auacuauugcaugagucuu

SEQ ID NO: 2568155 - RNA, 19 nt, Artificial Sequence
  Description of Artificial Sequence: Synthetic oligonucleotide
  Antisense strand to SEQ ID NO: 2568154
aagacucaugcaauaguau

SEQ ID NO: 2568156 - RNA, 19 nt, Artificial Sequence
  Description of Artificial Sequence: Synthetic oligonucleotide
  Sense strand starting at position 1142 of SEQ ID NO: 1888948
ccugcuauguacccaagaa

SEQ ID NO: 2568157 - RNA, 19 nt, Artificial Sequence
  Description of Artificial Sequence: Synthetic oligonucleotide
  Antisense strand to SEQ ID NO: 2568156
uucuuggguacauagcagg

SEQ ID NO: 2568158 - RNA, 19 nt, Artificial Sequence
  Description of Artificial Sequence: Synthetic oligonucleotide
  Sense strand starting at position 1184 of SEQ ID NO: 1888948
aagaguaauuguucuaaga

SEQ ID NO: 2568159 - RNA, 19 nt, Artificial Sequence
  Description of Artificial Sequence: Synthetic oligonucleotide
  Antisense strand to SEQ ID NO: 2568158
ucuuagaacaauuacucuu

SEQ ID NO: 2568160 - RNA, 19 nt, Artificial Sequence
  Description of Artificial Sequence: Synthetic oligonucleotide
  Sense strand starting at position 1290 of SEQ ID NO: 1888948
auuugaagcuguguucuga

SEQ ID NO: 2568161 - RNA, 19 nt, Artificial Sequence
  Description of Artificial Sequence: Synthetic oligonucleotide
  Antisense strand to SEQ ID NO: 2568160
ucagaacacagcuucaaau

SEQ ID NO: 2568162 - RNA, 19 nt, Artificial Sequence
  Description of Artificial Sequence: Synthetic oligonucleotide
  Sense strand starting at position 1507 of SEQ ID NO: 1888948
guucauugaggcuaugagu

SEQ ID NO: 2568163 - RNA, 19 nt, Artificial Sequence
  Description of Artificial Sequence: Synthetic oligonucleotide
  Antisense strand to SEQ ID NO: 2568162
acucauagccucaaugaac

SEQ ID NO: 2568164 - RNA, 19 nt, Artificial Sequence
  Description of Artificial Sequence: Synthetic oligonucleotide
  Sense strand starting at position 1515 of SEQ ID NO: 1888948
aggcuaugaguuuaccaag

SEQ ID NO: 2568165 - RNA, 19 nt, Artificial Sequence
  Description of Artificial Sequence: Synthetic oligonucleotide
  Antisense strand to SEQ ID NO: 2568164
cuugguaaacucauagccu

SEQ ID NO: 2568166 - RNA, 19 nt, Artificial Sequence
  Description of Artificial Sequence: Synthetic oligonucleotide
  Sense strand starting at position 1560 of SEQ ID NO: 1888948
aaagaagaacuguggucuu

SEQ ID NO: 2568167 - RNA, 19 nt, Artificial Sequence
  Description of Artificial Sequence: Synthetic oligonucleotide
  Antisense strand to SEQ ID NO: 2568166
aagaccacaguucuucuuu

SEQ ID NO: 2568168 - RNA, 19 nt, Artificial Sequence
  Description of Artificial Sequence: Synthetic oligonucleotide
  Sense strand starting at position 1563 of SEQ ID NO: 1888948
gaagaacuguggucuucca

SEQ ID NO: 2568169 - RNA, 19 nt, Artificial Sequence
  Description of Artificial Sequence: Synthetic oligonucleotide
  Antisense strand to SEQ ID NO: 2568168
uggaagaccacaguucuuc

SEQ ID NO: 2568170 - RNA, 19 nt, Artificial Sequence
  Description of Artificial Sequence: Synthetic oligonucleotide
  Sense strand starting at position 1700 of SEQ ID NO: 1888948
gugauaagauuugaaaugu

SEQ ID NO: 2568171 - RNA, 19 nt, Artificial Sequence
  Description of Artificial Sequence: Synthetic oligonucleotide
  Antisense strand to SEQ ID NO: 2568170
acauuucaaaucuuaucac

SEQ ID NO: 2568172 - RNA, 19 nt, Artificial Sequence
  Description of Artificial Sequence: Synthetic oligonucleotide
  Sense strand starting at position 2283 of SEQ ID NO: 1888948
agccauucugaagaguagu

SEQ ID NO: 2568173 - RNA, 19 nt, Artificial Sequence
  Description of Artificial Sequence: Synthetic oligonucleotide
  Antisense strand to SEQ ID NO: 2568172
acuacucuucagaauggcu

SEQ ID NO: 2568174 - RNA, 19 nt, Artificial Sequence
  Description of Artificial Sequence: Synthetic oligonucleotide
  Sense strand starting at position 2343 of SEQ ID NO: 1888948
accuauuaaccuggguuaa

SEQ ID NO: 2568175 - RNA, 19 nt, Artificial Sequence
  Description of Artificial Sequence: Synthetic oligonucleotide
  Antisense strand to SEQ ID NO: 2568174
uuaacccagguuaauaggu

SEQ ID NO: 2568176 - RNA, 19 nt, Artificial Sequence
  Description of Artificial Sequence: Synthetic oligonucleotide
  Sense strand starting at position 2344 of SEQ ID NO: 1888948
ccuauuaaccuggguuaau

SEQ ID NO: 2568177 - RNA, 19 nt, Artificial Sequence
  Description of Artificial Sequence: Synthetic oligonucleotide
  Antisense strand to SEQ ID NO: 2568176
auuaacccagguuaauagg

SEQ ID NO: 2568178 - RNA, 19 nt, Artificial Sequence
  Description of Artificial Sequence: Synthetic oligonucleotide
  Sense strand starting at position 2345 of SEQ ID NO: 1888948
cuauuaaccuggguuaaua

SEQ ID NO: 2568179 - RNA, 19 nt, Artificial Sequence
  Description of Artificial Sequence: Synthetic oligonucleotide
  Antisense strand to SEQ ID NO: 2568178
uauuaacccagguuaauag

SEQ ID NO: 2568180 - RNA, 19 nt, Artificial Sequence
  Description of Artificial Sequence: Synthetic oligonucleotide
  Sense strand starting at position 2403 of SEQ ID NO: 1888948
auaggaucauaggagaaua

SEQ ID NO: 2568181 - RNA, 19 nt, Artificial Sequence
  Description of Artificial Sequence: Synthetic oligonucleotide
  Antisense strand to SEQ ID NO: 2568180
uauucuccuaugauccuau

SEQ ID NO: 2568182 - RNA, 19 nt, Artificial Sequence
  Description of Artificial Sequence: Synthetic oligonucleotide
  Sense strand starting at position 2437 of SEQ ID NO: 1888948
auugcuugugauuauagaa

SEQ ID NO: 2568183 - RNA, 19 nt, Artificial Sequence
  Description of Artificial Sequence: Synthetic oligonucleotide
  Antisense strand to SEQ ID NO: 2568182
uucuauaaucacaagcaau

SEQ ID NO: 2568184 - RNA, 19 nt, Artificial Sequence
  Description of Artificial Sequence: Synthetic oligonucleotide
  Sense strand starting at position 2499 of SEQ ID NO: 1888948
augaguaauacauggugaa

SEQ ID NO: 2568185 - RNA, 19 nt, Artificial Sequence
  Description of Artificial Sequence: Synthetic oligonucleotide
  Antisense strand to SEQ ID NO: 2568184
uucaccauguauuacucau

SEQ ID NO: 2568186 - RNA, 19 nt, Artificial Sequence
  Description of Artificial Sequence: Synthetic oligonucleotide
  Sense strand starting at position 2500 of SEQ ID NO: 1888948
ugaguaauacauggugaau

SEQ ID NO: 2568187 - RNA, 19 nt, Artificial Sequence
  Description of Artificial Sequence: Synthetic oligonucleotide
  Antisense strand to SEQ ID NO: 2568186
auucaccauguauuacuca

SEQ ID NO: 2568188 - RNA, 19 nt, Artificial Sequence
  Description of Artificial Sequence: Synthetic oligonucleotide
  Sense strand starting at position 2727 of SEQ ID NO: 1888948
gaagaugucagugaauguu

SEQ ID NO: 2568189 - RNA, 19 nt, Artificial Sequence
  Description of Artificial Sequence: Synthetic oligonucleotide
  Antisense strand to SEQ ID NO: 2568188
aacauucacugacaucuuc

SEQ ID NO: 2568190 - RNA, 19 nt, Artificial Sequence
  Description of Artificial Sequence: Synthetic oligonucleotide
  Sense strand starting at position 2807 of SEQ ID NO: 1888948
cuaggauuagaguguaaag

SEQ ID NO: 2568191 - RNA, 19 nt, Artificial Sequence
  Description of Artificial Sequence: Synthetic oligonucleotide
  Antisense strand to SEQ ID NO: 2568190
cuuuacacucuaauccuag

SEQ ID NO: 2568192 - RNA, 19 nt, Artificial Sequence
  Description of Artificial Sequence: Synthetic oligonucleotide
  Sense strand starting at position 2809 of SEQ ID NO: 1888948
aggauuagaguguaaaguc

SEQ ID NO: 2568193 - RNA, 19 nt, Artificial Sequence
  Description of Artificial Sequence: Synthetic oligonucleotide
  Antisense strand to SEQ ID NO: 2568192
gacuuuacacucuaauccu

SEQ ID NO: 2568194 - RNA, 19 nt, Artificial Sequence
  Description of Artificial Sequence: Synthetic oligonucleotide
  Sense strand starting at position 2817 of SEQ ID NO: 1888948
aguguaaagucuuuaaugg

SEQ ID NO: 2568195 - RNA, 19 nt, Artificial Sequence
  Description of Artificial Sequence: Synthetic oligonucleotide
  Antisense strand to SEQ ID NO: 2568194
ccauuaaagacuuuacacu

SEQ ID NO: 2568196 - RNA, 19 nt, Artificial Sequence
  Description of Artificial Sequence: Synthetic oligonucleotide
  Sense strand starting at position 2826 of SEQ ID NO: 1888948
ucuuuaaugguguaaauac

SEQ ID NO: 2568197 - RNA, 19 nt, Artificial Sequence
  Description of Artificial Sequence: Synthetic oligonucleotide
  Antisense strand to SEQ ID NO: 2568196
guauuuacaccauuaaaga

SEQ ID NO: 2568198 - RNA, 19 nt, Artificial Sequence
  Description of Artificial Sequence: Synthetic oligonucleotide
  Sense strand starting at position 2881 of SEQ ID NO: 1888948
ggaacuuuaccaggugauc

SEQ ID NO: 2568199 - RNA, 19 nt, Artificial Sequence
  Description of Artificial Sequence: Synthetic oligonucleotide
  Antisense strand to SEQ ID NO: 2568198
gaucaccugguaaaguucc

SEQ ID NO: 2568200 - RNA, 19 nt, Artificial Sequence
  Description of Artificial Sequence: Synthetic oligonucleotide
  Sense strand starting at position 3070 of SEQ ID NO: 1888948
caaggaauguuaucaggua

SEQ ID NO: 2568201 - RNA, 19 nt, Artificial Sequence
  Description of Artificial Sequence: Synthetic oligonucleotide
  Antisense strand to SEQ ID NO: 2568200
uaccugauaacauuccuug

SEQ ID NO: 2568202 - RNA, 19 nt, Artificial Sequence
  Description of Artificial Sequence: Synthetic oligonucleotide
  Sense strand starting at position 3442 of SEQ ID NO: 1888948
gguggaugauauucugaac

SEQ ID NO: 2568203 - RNA, 19 nt, Artificial Sequence
  Description of Artificial Sequence: Synthetic oligonucleotide
  Antisense strand to SEQ ID NO: 2568202
guucagaauaucauccacc

SEQ ID NO: 2568204 - RNA, 19 nt, Artificial Sequence
  Description of Artificial Sequence: Synthetic oligonucleotide
  Sense strand starting at position 3504 of SEQ ID NO: 1888948
aaguguguucuagacuaga

SEQ ID NO: 2568205 - RNA, 19 nt, Artificial Sequence
  Description of Artificial Sequence: Synthetic oligonucleotide
  Antisense strand to SEQ ID NO: 2568204
ucuagucuagaacacacuu

SEQ ID NO: 2568206 - RNA, 19 nt, Artificial Sequence
  Description of Artificial Sequence: Synthetic oligonucleotide
  Sense strand starting at position 3507 of SEQ ID NO: 1888948
uguguucuagacuagacaa

SEQ ID NO: 2568207 - RNA, 19 nt, Artificial Sequence
  Description of Artificial Sequence: Synthetic oligonucleotide
  Antisense strand to SEQ ID NO: 2568206
uugucuagucuagaacaca

SEQ ID NO: 2568208 - RNA, 19 nt, Artificial Sequence
  Description of Artificial Sequence: Synthetic oligonucleotide
  Sense strand starting at position 3561 of SEQ ID NO: 1888948
ucaagaacauuugggaauu

SEQ ID NO: 2568209 - RNA, 19 nt, Artificial Sequence
  Description of Artificial Sequence: Synthetic oligonucleotide
  Antisense strand to SEQ ID NO: 2568208
aauucccaaauguucuuga

SEQ ID NO: 2568210 - RNA, 19 nt, Artificial Sequence
  Description of Artificial Sequence: Synthetic oligonucleotide
  Sense strand starting at position 3683 of SEQ ID NO: 1888948
guaggaugccacuaaagug

SEQ ID NO: 2568211 - RNA, 19 nt, Artificial Sequence
  Description of Artificial Sequence: Synthetic oligonucleotide
  Antisense strand to SEQ ID NO: 2568210
cacuuuaguggcauccuac

SEQ ID NO: 2568212 - RNA, 19 nt, Artificial Sequence
  Description of Artificial Sequence: Synthetic oligonucleotide
  Sense strand starting at position 2 of SEQ ID NO: 1888949
cuuuguuauggauauguac

SEQ ID NO: 2568213 - RNA, 19 nt, Artificial Sequence
  Description of Artificial Sequence: Synthetic oligonucleotide
  Antisense strand to SEQ ID NO: 2568212
guacauauccauaacaaag

SEQ ID NO: 2568214 - RNA, 19 nt, Artificial Sequence
  Description of Artificial Sequence: Synthetic oligonucleotide
  Sense strand starting at position 9 of SEQ ID NO: 1888949
auggauauguacuuggagu

SEQ ID NO: 2568215 - RNA, 19 nt, Artificial Sequence
  Description of Artificial Sequence: Synthetic oligonucleotide
  Antisense strand to SEQ ID NO: 2568214
acuccaaguacauauccau

SEQ ID NO: 2568216 - RNA, 19 nt, Artificial Sequence
  Description of Artificial Sequence: Synthetic oligonucleotide
  Sense strand starting at position 10 of SEQ ID NO: 1888949
uggauauguacuuggaguu

SEQ ID NO: 2568217 - RNA, 19 nt, Artificial Sequence
  Description of Artificial Sequence: Synthetic oligonucleotide
  Antisense strand to SEQ ID NO: 2568216
aacuccaaguacauaucca

SEQ ID NO: 2568218 - RNA, 19 nt, Artificial Sequence
  Description of Artificial Sequence: Synthetic oligonucleotide
  Sense strand starting at position 11 of SEQ ID NO: 1888949
ggauauguacuuggaguug

SEQ ID NO: 2568219 - RNA, 19 nt, Artificial Sequence
  Description of Artificial Sequence: Synthetic oligonucleotide
  Antisense strand to SEQ ID NO: 2568218
caacuccaaguacauaucc

SEQ ID NO: 2568220 - RNA, 19 nt, Artificial Sequence
  Description of Artificial Sequence: Synthetic oligonucleotide
  Sense strand starting at position 82 of SEQ ID NO: 1888949
ccugaagaccucuaguugu

SEQ ID NO: 2568221 - RNA, 19 nt, Artificial Sequence
  Description of Artificial Sequence: Synthetic oligonucleotide
  Antisense strand to SEQ ID NO: 2568220
acaacuagaggucuucagg

SEQ ID NO: 2568222 - RNA, 19 nt, Artificial Sequence
  Description of Artificial Sequence: Synthetic oligonucleotide
  Sense strand starting at position 95 of SEQ ID NO: 1888949
aguuguucccuggaaacug

SEQ ID NO: 2568223 - RNA, 19 nt, Artificial Sequence
  Description of Artificial Sequence: Synthetic oligonucleotide
  Antisense strand to SEQ ID NO: 2568222
caguuuccagggaacaacu

SEQ ID NO: 2568224 - RNA, 19 nt, Artificial Sequence
  Description of Artificial Sequence: Synthetic oligonucleotide
  Sense strand starting at position 235 of SEQ ID NO: 1888949
aacuuuggaucugugacuu

SEQ ID NO: 2568225 - RNA, 19 nt, Artificial Sequence
  Description of Artificial Sequence: Synthetic oligonucleotide
  Antisense strand to SEQ ID NO: 2568224
aagucacagauccaaaguu

SEQ ID NO: 2568226 - RNA, 19 nt, Artificial Sequence
  Description of Artificial Sequence: Synthetic oligonucleotide
  Sense strand starting at position 506 of SEQ ID NO: 1888949
gcuagaaggcuccaggaua

SEQ ID NO: 2568227 - RNA, 19 nt, Artificial Sequence
  Description of Artificial Sequence: Synthetic oligonucleotide
  Antisense strand to SEQ ID NO: 2568226
uauccuggagccuucuagc

SEQ ID NO: 2568228 - RNA, 19 nt, Artificial Sequence
  Description of Artificial Sequence: Synthetic oligonucleotide
  Sense strand starting at position 664 of SEQ ID NO: 1888949
ccacaacucuggcuuagaa

SEQ ID NO: 2568229 - RNA, 19 nt, Artificial Sequence
  Description of Artificial Sequence: Synthetic oligonucleotide
  Antisense strand to SEQ ID NO: 2568228
uucuaagccagaguugugg

SEQ ID NO: 2568230 - RNA, 19 nt, Artificial Sequence
  Description of Artificial Sequence: Synthetic oligonucleotide
  Sense strand starting at position 691 of SEQ ID NO: 1888949
cccagcaaucagggaauaa

SEQ ID NO: 2568231 - RNA, 19 nt, Artificial Sequence
  Description of Artificial Sequence: Synthetic oligonucleotide
  Antisense strand to SEQ ID NO: 2568230
uuauucccugauugcuggg

SEQ ID NO: 2568232 - RNA, 19 nt, Artificial Sequence
  Description of Artificial Sequence: Synthetic oligonucleotide
  Sense strand starting at position 702 of SEQ ID NO: 1888949
gggaauaacuacccuguua

SEQ ID NO: 2568233 - RNA, 19 nt, Artificial Sequence
  Description of Artificial Sequence: Synthetic oligonucleotide
  Antisense strand to SEQ ID NO: 2568232
uaacaggguaguuauuccc

SEQ ID NO: 2568234 - RNA, 19 nt, Artificial Sequence
  Description of Artificial Sequence: Synthetic oligonucleotide
  Sense strand starting at position 1079 of SEQ ID NO: 1888949
uguuauguugugucuagca

SEQ ID NO: 2568235 - RNA, 19 nt, Artificial Sequence
  Description of Artificial Sequence: Synthetic oligonucleotide
  Antisense strand to SEQ ID NO: 2568234
ugcuagacacaacauaaca

SEQ ID NO: 2568236 - RNA, 19 nt, Artificial Sequence
  Description of Artificial Sequence: Synthetic oligonucleotide
  Sense strand starting at position 1132 of SEQ ID NO: 1888949
uggugcuuuaaugacgaga

SEQ ID NO: 2568237 - RNA, 19 nt, Artificial Sequence
  Description of Artificial Sequence: Synthetic oligonucleotide
  Antisense strand to SEQ ID NO: 2568236
ucucgucauuaaagcacca

SEQ ID NO: 2568238 - RNA, 19 nt, Artificial Sequence
  Description of Artificial Sequence: Synthetic oligonucleotide
  Sense strand starting at position 1135 of SEQ ID NO: 1888949
ugcuuuaaugacgagaagu

SEQ ID NO: 2568239 - RNA, 19 nt, Artificial Sequence
  Description of Artificial Sequence: Synthetic oligonucleotide
  Antisense strand to SEQ ID NO: 2568238
acuucucgucauuaaagca

SEQ ID NO: 2568240 - RNA, 19 nt, Artificial Sequence
  Description of Artificial Sequence: Synthetic oligonucleotide
  Sense strand starting at position 1137 of SEQ ID NO: 1888949
cuuuaaugacgagaagucu

SEQ ID NO: 2568241 - RNA, 19 nt, Artificial Sequence
  Description of Artificial Sequence: Synthetic oligonucleotide
  Antisense strand to SEQ ID NO: 2568240
agacuucucgucauuaaag

SEQ ID NO: 2568242 - RNA, 19 nt, Artificial Sequence
  Description of Artificial Sequence: Synthetic oligonucleotide
  Sense strand starting at position 1145 of SEQ ID NO: 1888949
acgagaagucugugaugag

SEQ ID NO: 2568243 - RNA, 19 nt, Artificial Sequence
  Description of Artificial Sequence: Synthetic oligonucleotide
  Antisense strand to SEQ ID NO: 2568242
cucaucacagacuucucgu

SEQ ID NO: 2568244 - RNA, 19 nt, Artificial Sequence
  Description of Artificial Sequence: Synthetic oligonucleotide
  Sense strand starting at position 1155 of SEQ ID NO: 1888949
ugugaugagaauuauuggu

SEQ ID NO: 2568245 - RNA, 19 nt, Artificial Sequence
  Description of Artificial Sequence: Synthetic oligonucleotide
  Antisense strand to SEQ ID NO: 2568244
accaauaauucucaucaca

SEQ ID NO: 2568246 - RNA, 19 nt, Artificial Sequence
  Description of Artificial Sequence: Synthetic oligonucleotide
  Sense strand starting at position 1160 of SEQ ID NO: 1888949
ugagaauuauugguccuuc

SEQ ID NO: 2568247 - RNA, 19 nt, Artificial Sequence
  Description of Artificial Sequence: Synthetic oligonucleotide
  Antisense strand to SEQ ID NO: 2568246
gaaggaccaauaauucuca

SEQ ID NO: 2568248 - RNA, 19 nt, Artificial Sequence
  Description of Artificial Sequence: Synthetic oligonucleotide
  Sense strand starting at position 1177 of SEQ ID NO: 1888949
uccugaaggaaugguaauu

SEQ ID NO: 2568249 - RNA, 19 nt, Artificial Sequence
  Description of Artificial Sequence: Synthetic oligonucleotide
  Antisense strand to SEQ ID NO: 2568248
aauuaccauuccuucagga

SEQ ID NO: 2568250 - RNA, 19 nt, Artificial Sequence
  Description of Artificial Sequence: Synthetic oligonucleotide
  Sense strand starting at position 1189 of SEQ ID NO: 1888949
gguaauuuaugagguauuu

SEQ ID NO: 2568251 - RNA, 19 nt, Artificial Sequence
  Description of Artificial Sequence: Synthetic oligonucleotide
  Antisense strand to SEQ ID NO: 2568250
aaauaccucauaaauuacc

SEQ ID NO: 2568252 - RNA, 19 nt, Artificial Sequence
  Description of Artificial Sequence: Synthetic oligonucleotide
  Sense strand starting at position 1211 of SEQ ID NO: 1888949
augcaugccagguaaugaa

SEQ ID NO: 2568253 - RNA, 19 nt, Artificial Sequence
  Description of Artificial Sequence: Synthetic oligonucleotide
  Antisense strand to SEQ ID NO: 2568252
uucauuaccuggcaugcau

SEQ ID NO: 2568254 - RNA, 19 nt, Artificial Sequence
  Description of Artificial Sequence: Synthetic oligonucleotide
  Sense strand starting at position 1298 of SEQ ID NO: 1888949
gaaauugagccuuagcuag

SEQ ID NO: 2568255 - RNA, 19 nt, Artificial Sequence
  Description of Artificial Sequence: Synthetic oligonucleotide
  Antisense strand to SEQ ID NO: 2568254
cuagcuaaggcucaauuuc

SEQ ID NO: 2568256 - RNA, 19 nt, Artificial Sequence
  Description of Artificial Sequence: Synthetic oligonucleotide
  Sense strand starting at position 1368 of SEQ ID NO: 1888949
gcccuugaucaugacacua

SEQ ID NO: 2568257 - RNA, 19 nt, Artificial Sequence
  Description of Artificial Sequence: Synthetic oligonucleotide
  Antisense strand to SEQ ID NO: 2568256
uagugucaugaucaagggc

SEQ ID NO: 2568258 - RNA, 19 nt, Artificial Sequence
  Description of Artificial Sequence: Synthetic oligonucleotide
  Sense strand starting at position 1457 of SEQ ID NO: 1888949
uaucuaagugggcaaugau

SEQ ID NO: 2568259 - RNA, 19 nt, Artificial Sequence
  Description of Artificial Sequence: Synthetic oligonucleotide
  Antisense strand to SEQ ID NO: 2568258
aucauugcccacuuagaua

SEQ ID NO: 2568260 - RNA, 19 nt, Artificial Sequence
  Description of Artificial Sequence: Synthetic oligonucleotide
  Sense strand starting at position 1460 of SEQ ID NO: 1888949
cuaagugggcaaugaugau

SEQ ID NO: 2568261 - RNA, 19 nt, Artificial Sequence
  Description of Artificial Sequence: Synthetic oligonucleotide
  Antisense strand to SEQ ID NO: 2568260
aucaucauugcccacuuag

SEQ ID NO: 2568262 - RNA, 19 nt, Artificial Sequence
  Description of Artificial Sequence: Synthetic oligonucleotide
  Sense strand starting at position 1525 of SEQ ID NO: 1888949
gcaaacuaugauggcagaa

SEQ ID NO: 2568263 - RNA, 19 nt, Artificial Sequence
  Description of Artificial Sequence: Synthetic oligonucleotide
  Antisense strand to SEQ ID NO: 2568262
uucugccaucauaguuugc

SEQ ID NO: 2568264 - RNA, 19 nt, Artificial Sequence
  Description of Artificial Sequence: Synthetic oligonucleotide
  Sense strand starting at position 1764 of SEQ ID NO: 1888949
cuguguuguuaucccauuu

SEQ ID NO: 2568265 - RNA, 19 nt, Artificial Sequence
  Description of Artificial Sequence: Synthetic oligonucleotide
  Antisense strand to SEQ ID NO: 2568264
aaaugggauaacaacacag

SEQ ID NO: 2568266 - RNA, 19 nt, Artificial Sequence
  Description of Artificial Sequence: Synthetic oligonucleotide
  Sense strand starting at position 1847 of SEQ ID NO: 1888949
agacuacugcccugaagga

SEQ ID NO: 2568267 - RNA, 19 nt, Artificial Sequence
  Description of Artificial Sequence: Synthetic oligonucleotide
  Antisense strand to SEQ ID NO: 2568266
uccuucagggcaguagucu

SEQ ID NO: 2568268 - RNA, 19 nt, Artificial Sequence
  Description of Artificial Sequence: Synthetic oligonucleotide
  Sense strand starting at position 2130 of SEQ ID NO: 1888949
augcauauguaccuugaaa

SEQ ID NO: 2568269 - RNA, 19 nt, Artificial Sequence
  Description of Artificial Sequence: Synthetic oligonucleotide
  Antisense strand to SEQ ID NO: 2568268
uuucaagguacauaugcau

SEQ ID NO: 2568270 - RNA, 19 nt, Artificial Sequence
  Description of Artificial Sequence: Synthetic oligonucleotide
  Sense strand starting at position 2237 of SEQ ID NO: 1888949
cugguugggugauuaauaa

SEQ ID NO: 2568271 - RNA, 19 nt, Artificial Sequence
  Description of Artificial Sequence: Synthetic oligonucleotide
  Antisense strand to SEQ ID NO: 2568270
uuauuaaucacccaaccag

SEQ ID NO: 2568272 - RNA, 19 nt, Artificial Sequence
  Description of Artificial Sequence: Synthetic oligonucleotide
  Sense strand starting at position 2484 of SEQ ID NO: 1888949
gaacccagaccuugguuau

SEQ ID NO: 2568273 - RNA, 19 nt, Artificial Sequence
  Description of Artificial Sequence: Synthetic oligonucleotide
  Antisense strand to SEQ ID NO: 2568272
auaaccaaggucuggguuc

SEQ ID NO: 2568274 - RNA, 19 nt, Artificial Sequence
  Description of Artificial Sequence: Synthetic oligonucleotide
  Sense strand starting at position 2515 of SEQ ID NO: 1888949
auguccuugccugagagau

SEQ ID NO: 2568275 - RNA, 19 nt, Artificial Sequence
  Description of Artificial Sequence: Synthetic oligonucleotide
  Antisense strand to SEQ ID NO: 2568274
aucucucaggcaaggacau

SEQ ID NO: 2568276 - RNA, 19 nt, Artificial Sequence
  Description of Artificial Sequence: Synthetic oligonucleotide
  Sense strand starting at position 2968 of SEQ ID NO: 1888949
ggcacaugaagauguccaa

SEQ ID NO: 2568277 - RNA, 19 nt, Artificial Sequence
  Description of Artificial Sequence: Synthetic oligonucleotide
  Antisense strand to SEQ ID NO: 2568276
uuggacaucuucaugugcc

SEQ ID NO: 2568278 - RNA, 19 nt, Artificial Sequence
  Description of Artificial Sequence: Synthetic oligonucleotide
  Sense strand starting at position 3092 of SEQ ID NO: 1888949
ggcuuugucccagaccaga

SEQ ID NO: 2568279 - RNA, 19 nt, Artificial Sequence
  Description of Artificial Sequence: Synthetic oligonucleotide
  Antisense strand to SEQ ID NO: 2568278
ucuggucugggacaaagcc

SEQ ID NO: 2568280 - RNA, 19 nt, Artificial Sequence
  Description of Artificial Sequence: Synthetic oligonucleotide
  Sense strand starting at position 3355 of SEQ ID NO: 1888949
agcagagaucggcaaacau

SEQ ID NO: 2568281 - RNA, 19 nt, Artificial Sequence
  Description of Artificial Sequence: Synthetic oligonucleotide
  Antisense strand to SEQ ID NO: 2568280
auguuugccgaucucugcu

SEQ ID NO: 2568282 - RNA, 19 nt, Artificial Sequence
  Description of Artificial Sequence: Synthetic oligonucleotide
  Sense strand starting at position 3409 of SEQ ID NO: 1888949
uuuguagggccauaagaua

SEQ ID NO: 2568283 - RNA, 19 nt, Artificial Sequence
  Description of Artificial Sequence: Synthetic oligonucleotide
  Antisense strand to SEQ ID NO: 2568282
uaucuuauggcccuacaaa

SEQ ID NO: 2568284 - RNA, 19 nt, Artificial Sequence
  Description of Artificial Sequence: Synthetic oligonucleotide
  Sense strand starting at position 3447 of SEQ ID NO: 1888949
agccauaggcaauaguaaa

SEQ ID NO: 2568285 - RNA, 19 nt, Artificial Sequence
  Description of Artificial Sequence: Synthetic oligonucleotide
  Antisense strand to SEQ ID NO: 2568284
uuuacuauugccuauggcu

SEQ ID NO: 2568286 - RNA, 19 nt, Artificial Sequence
  Description of Artificial Sequence: Synthetic oligonucleotide
  Sense strand starting at position 3788 of SEQ ID NO: 1888949
gcuaccagacuuugaagga

SEQ ID NO: 2568287 - RNA, 19 nt, Artificial Sequence
  Description of Artificial Sequence: Synthetic oligonucleotide
  Antisense strand to SEQ ID NO: 2568286
uccuucaaagucugguagc

SEQ ID NO: 2568288 - RNA, 19 nt, Artificial Sequence
  Description of Artificial Sequence: Synthetic oligonucleotide
  Sense strand starting at position 3835 of SEQ ID NO: 1888949
ggcugugauuauuuccuua

SEQ ID NO: 2568289 - RNA, 19 nt, Artificial Sequence
  Description of Artificial Sequence: Synthetic oligonucleotide
  Antisense strand to SEQ ID NO: 2568288
uaaggaaauaaucacagcc

SEQ ID NO: 2568290 - RNA, 19 nt, Artificial Sequence
  Description of Artificial Sequence: Synthetic oligonucleotide
  Sense strand starting at position 3971 of SEQ ID NO: 1888949
agucaaggucgggaaguua

SEQ ID NO: 2568291 - RNA, 19 nt, Artificial Sequence
  Description of Artificial Sequence: Synthetic oligonucleotide
  Antisense strand to SEQ ID NO: 2568290
uaacuucccgaccuugacu

SEQ ID NO: 2568292 - RNA, 19 nt, Artificial Sequence
  Description of Artificial Sequence: Synthetic oligonucleotide
  Sense strand starting at position 1355 of SEQ ID NO: 1888950
guuaaagucuccuauuauc

SEQ ID NO: 2568293 - RNA, 19 nt, Artificial Sequence
  Description of Artificial Sequence: Synthetic oligonucleotide
  Antisense strand to SEQ ID NO: 2568292
gauaauaggagacuuuaac

SEQ ID NO: 2568294 - RNA, 19 nt, Artificial Sequence
  Description of Artificial Sequence: Synthetic oligonucleotide
  Sense strand starting at position 1366 of SEQ ID NO: 1888950
cuauuaucauuguguggga

SEQ ID NO: 2568295 - RNA, 19 nt, Artificial Sequence
  Description of Artificial Sequence: Synthetic oligonucleotide
  Antisense strand to SEQ ID NO: 2568294
ucccacacaaugauaauag

SEQ ID NO: 2568296 - RNA, 19 nt, Artificial Sequence
  Description of Artificial Sequence: Synthetic oligonucleotide
  Sense strand starting at position 2475 of SEQ ID NO: 1888950
aaugauacagcauggucaa

SEQ ID NO: 2568297 - RNA, 19 nt, Artificial Sequence
  Description of Artificial Sequence: Synthetic oligonucleotide
  Antisense strand to SEQ ID NO: 2568296
uugaccaugcuguaucauu

SEQ ID NO: 2568298 - RNA, 19 nt, Artificial Sequence
  Description of Artificial Sequence: Synthetic oligonucleotide
  Sense strand starting at position 2701 of SEQ ID NO: 1888950
cguggacucuucucugaga

SEQ ID NO: 2568299 - RNA, 19 nt, Artificial Sequence
  Description of Artificial Sequence: Synthetic oligonucleotide
  Antisense strand to SEQ ID NO: 2568298
ucucagagaagaguccacg

SEQ ID NO: 2568300 - RNA, 19 nt, Artificial Sequence
  Description of Artificial Sequence: Synthetic oligonucleotide
  Sense strand starting at position 2702 of SEQ ID NO: 1888950
guggacucuucucugagaa

SEQ ID NO: 2568301 - RNA, 19 nt, Artificial Sequence
  Description of Artificial Sequence: Synthetic oligonucleotide
  Antisense strand to SEQ ID NO: 2568300
uucucagagaagaguccac

SEQ ID NO: 2568302 - RNA, 19 nt, Artificial Sequence
  Description of Artificial Sequence: Synthetic oligonucleotide
  Sense strand starting at position 2703 of SEQ ID NO: 1888950
uggacucuucucugagaac

SEQ ID NO: 2568303 - RNA, 19 nt, Artificial Sequence
  Description of Artificial Sequence: Synthetic oligonucleotide
  Antisense strand to SEQ ID NO: 2568302
guucucagagaagagucca

SEQ ID NO: 2568304 - RNA, 19 nt, Artificial Sequence
  Description of Artificial Sequence: Synthetic oligonucleotide
  Sense strand starting at position 2704 of SEQ ID NO: 1888950
ggacucuucucugagaacu

SEQ ID NO: 2568305 - RNA, 19 nt, Artificial Sequence
  Description of Artificial Sequence: Synthetic oligonucleotide
  Antisense strand to SEQ ID NO: 2568304
aguucucagagaagagucc

SEQ ID NO: 2568306 - RNA, 19 nt, Artificial Sequence
  Description of Artificial Sequence: Synthetic oligonucleotide
  Sense strand starting at position 2845 of SEQ ID NO: 1888950
auugucuaucuuuguugau

SEQ ID NO: 2568307 - RNA, 19 nt, Artificial Sequence
  Description of Artificial Sequence: Synthetic oligonucleotide
  Antisense strand to SEQ ID NO: 2568306
aucaacaaagauagacaau

SEQ ID NO: 2568308 - RNA, 19 nt, Artificial Sequence
  Description of Artificial Sequence: Synthetic oligonucleotide
  Sense strand starting at position 2847 of SEQ ID NO: 1888950
ugucuaucuuuguugauga

SEQ ID NO: 2568309 - RNA, 19 nt, Artificial Sequence
  Description of Artificial Sequence: Synthetic oligonucleotide
  Antisense strand to SEQ ID NO: 2568308
ucaucaacaaagauagaca

SEQ ID NO: 2568310 - RNA, 19 nt, Artificial Sequence
  Description of Artificial Sequence: Synthetic oligonucleotide
  Sense strand starting at position 2848 of SEQ ID NO: 1888950
gucuaucuuuguugaugac

SEQ ID NO: 2568311 - RNA, 19 nt, Artificial Sequence
  Description of Artificial Sequence: Synthetic oligonucleotide
  Antisense strand to SEQ ID NO: 2568310
gucaucaacaaagauagac

SEQ ID NO: 2568312 - RNA, 19 nt, Artificial Sequence
  Description of Artificial Sequence: Synthetic oligonucleotide
  Sense strand starting at position 2849 of SEQ ID NO: 1888950
ucuaucuuuguugaugaca

SEQ ID NO: 2568313 - RNA, 19 nt, Artificial Sequence
  Description of Artificial Sequence: Synthetic oligonucleotide
  Antisense strand to SEQ ID NO: 2568312
ugucaucaacaaagauaga

SEQ ID NO: 2568314 - RNA, 19 nt, Artificial Sequence
  Description of Artificial Sequence: Synthetic oligonucleotide
  Sense strand starting at position 2851 of SEQ ID NO: 1888950
uaucuuuguugaugacaug

SEQ ID NO: 2568315 - RNA, 19 nt, Artificial Sequence
  Description of Artificial Sequence: Synthetic oligonucleotide
  Antisense strand to SEQ ID NO: 2568314
caugucaucaacaaagaua

SEQ ID NO: 2568316 - RNA, 19 nt, Artificial Sequence
  Description of Artificial Sequence: Synthetic oligonucleotide
  Sense strand starting at position 2933 of SEQ ID NO: 1888950
gucuccagauaugaaauua

SEQ ID NO: 2568317 - RNA, 19 nt, Artificial Sequence
  Description of Artificial Sequence: Synthetic oligonucleotide
  Antisense strand to SEQ ID NO: 2568316
uaauuucauaucuggagac

SEQ ID NO: 2568318 - RNA, 19 nt, Artificial Sequence
  Description of Artificial Sequence: Synthetic oligonucleotide
  Sense strand starting at position 2954 of SEQ ID NO: 1888950
auacaaaucagucguguuu

SEQ ID NO: 2568319 - RNA, 19 nt, Artificial Sequence
  Description of Artificial Sequence: Synthetic oligonucleotide
  Antisense strand to SEQ ID NO: 2568318
aaacacgacugauuuguau

SEQ ID NO: 2568320 - RNA, 19 nt, Artificial Sequence
  Description of Artificial Sequence: Synthetic oligonucleotide
  Sense strand starting at position 2956 of SEQ ID NO: 1888950
acaaaucagucguguuucu

SEQ ID NO: 2568321 - RNA, 19 nt, Artificial Sequence
  Description of Artificial Sequence: Synthetic oligonucleotide
  Antisense strand to SEQ ID NO: 2568320
agaaacacgacugauuugu

SEQ ID NO: 2568322 - RNA, 19 nt, Artificial Sequence
  Description of Artificial Sequence: Synthetic oligonucleotide
  Sense strand starting at position 2961 of SEQ ID NO: 1888950
ucagucguguuucuuuaua

SEQ ID NO: 2568323 - RNA, 19 nt, Artificial Sequence
  Description of Artificial Sequence: Synthetic oligonucleotide
  Antisense strand to SEQ ID NO: 2568322
uauaaagaaacacgacuga

SEQ ID NO: 2568324 - RNA, 19 nt, Artificial Sequence
  Description of Artificial Sequence: Synthetic oligonucleotide
  Sense strand starting at position 2963 of SEQ ID NO: 1888950
agucguguuucuuuauacu

SEQ ID NO: 2568325 - RNA, 19 nt, Artificial Sequence
  Description of Artificial Sequence: Synthetic oligonucleotide
  Antisense strand to SEQ ID NO: 2568324
aguauaaagaaacacgacu

SEQ ID NO: 2568326 - RNA, 19 nt, Artificial Sequence
  Description of Artificial Sequence: Synthetic oligonucleotide
  Sense strand starting at position 2966 of SEQ ID NO: 1888950
cguguuucuuuauacuaau

SEQ ID NO: 2568327 - RNA, 19 nt, Artificial Sequence
  Description of Artificial Sequence: Synthetic oligonucleotide
  Antisense strand to SEQ ID NO: 2568326
auuaguauaaagaaacacg

SEQ ID NO: 2568328 - RNA, 19 nt, Artificial Sequence
  Description of Artificial Sequence: Synthetic oligonucleotide
  Sense strand starting at position 3102 of SEQ ID NO: 1888950
acuaaagucuaaugaaaga

SEQ ID NO: 2568329 - RNA, 19 nt, Artificial Sequence
  Description of Artificial Sequence: Synthetic oligonucleotide
  Antisense strand to SEQ ID NO: 2568328
ucuuucauuagacuuuagu

SEQ ID NO: 2568330 - RNA, 19 nt, Artificial Sequence
  Description of Artificial Sequence: Synthetic oligonucleotide
  Sense strand starting at position 3145 of SEQ ID NO: 1888950
agagacacuccaugcuuau

SEQ ID NO: 2568331 - RNA, 19 nt, Artificial Sequence
  Description of Artificial Sequence: Synthetic oligonucleotide
  Antisense strand to SEQ ID NO: 2568330
auaagcauggagugucucu

SEQ ID NO: 2568332 - RNA, 19 nt, Artificial Sequence
  Description of Artificial Sequence: Synthetic oligonucleotide
  Sense strand starting at position 3350 of SEQ ID NO: 1888950
guaauacaguaccuaacuu

SEQ ID NO: 2568333 - RNA, 19 nt, Artificial Sequence
  Description of Artificial Sequence: Synthetic oligonucleotide
  Antisense strand to SEQ ID NO: 2568332
aaguuagguacuguauuac

SEQ ID NO: 2568334 - RNA, 19 nt, Artificial Sequence
  Description of Artificial Sequence: Synthetic oligonucleotide
  Sense strand starting at position 3375 of SEQ ID NO: 1888950
auguuacaagguuagagua

SEQ ID NO: 2568335 - RNA, 19 nt, Artificial Sequence
  Description of Artificial Sequence: Synthetic oligonucleotide
  Antisense strand to SEQ ID NO: 2568334
uacucuaaccuuguaacau

SEQ ID NO: 2568336 - RNA, 19 nt, Artificial Sequence
  Description of Artificial Sequence: Synthetic oligonucleotide
  Sense strand starting at position 3377 of SEQ ID NO: 1888950
guuacaagguuagaguaau

SEQ ID NO: 2568337 - RNA, 19 nt, Artificial Sequence
  Description of Artificial Sequence: Synthetic oligonucleotide
  Antisense strand to SEQ ID NO: 2568336
auuacucuaaccuuguaac

SEQ ID NO: 2568338 - RNA, 19 nt, Artificial Sequence
  Description of Artificial Sequence: Synthetic oligonucleotide
  Sense strand starting at position 3399 of SEQ ID NO: 1888950
aaaucaucguauugggaua

SEQ ID NO: 2568339 - RNA, 19 nt, Artificial Sequence
  Description of Artificial Sequence: Synthetic oligonucleotide
  Antisense strand to SEQ ID NO: 2568338
uaucccaauacgaugauuu

SEQ ID NO: 2568340 - RNA, 19 nt, Artificial Sequence
  Description of Artificial Sequence: Synthetic oligonucleotide
  Sense strand starting at position 3401 of SEQ ID NO: 1888950
aucaucguauugggauaaa

SEQ ID NO: 2568341 - RNA, 19 nt, Artificial Sequence
  Description of Artificial Sequence: Synthetic oligonucleotide
  Antisense strand to SEQ ID NO: 2568340
uuuaucccaauacgaugau

SEQ ID NO: 2568342 - RNA, 19 nt, Artificial Sequence
  Description of Artificial Sequence: Synthetic oligonucleotide
  Sense strand starting at position 3598 of SEQ ID NO: 1888950
aggagaguuugguugguga

SEQ ID NO: 2568343 - RNA, 19 nt, Artificial Sequence
  Description of Artificial Sequence: Synthetic oligonucleotide
  Antisense strand to SEQ ID NO: 2568342
ucaccaaccaaacucuccu

SEQ ID NO: 2568344 - RNA, 19 nt, Artificial Sequence
  Description of Artificial Sequence: Synthetic oligonucleotide
  Sense strand starting at position 3600 of SEQ ID NO: 1888950
gagaguuugguuggugaga

SEQ ID NO: 2568345 - RNA, 19 nt, Artificial Sequence
  Description of Artificial Sequence: Synthetic oligonucleotide
  Antisense strand to SEQ ID NO: 2568344
ucucaccaaccaaacucuc

SEQ ID NO: 2568346 - RNA, 19 nt, Artificial Sequence
  Description of Artificial Sequence: Synthetic oligonucleotide
  Sense strand starting at position 3601 of SEQ ID NO: 1888950
agaguuugguuggugagaa

SEQ ID NO: 2568347 - RNA, 19 nt, Artificial Sequence
  Description of Artificial Sequence: Synthetic oligonucleotide
  Antisense strand to SEQ ID NO: 2568346
uucucaccaaccaaacucu

SEQ ID NO: 2568348 - RNA, 19 nt, Artificial Sequence
  Description of Artificial Sequence: Synthetic oligonucleotide
  Sense strand starting at position 3602 of SEQ ID NO: 1888950
gaguuugguuggugagaac

SEQ ID NO: 2568349 - RNA, 19 nt, Artificial Sequence
  Description of Artificial Sequence: Synthetic oligonucleotide
  Antisense strand to SEQ ID NO: 2568348
guucucaccaaccaaacuc

SEQ ID NO: 2568350 - RNA, 19 nt, Artificial Sequence
  Description of Artificial Sequence: Synthetic oligonucleotide
  Sense strand starting at position 3666 of SEQ ID NO: 1888950
ugaguagggucacuauagu

SEQ ID NO: 2568351 - RNA, 19 nt, Artificial Sequence
  Description of Artificial Sequence: Synthetic oligonucleotide
  Antisense strand to SEQ ID NO: 2568350
acuauagugacccuacuca

SEQ ID NO: 2568352 - RNA, 19 nt, Artificial Sequence
  Description of Artificial Sequence: Synthetic oligonucleotide
  Sense strand starting at position 3672 of SEQ ID NO: 1888950
gggucacuauaguuaggaa

SEQ ID NO: 2568353 - RNA, 19 nt, Artificial Sequence
  Description of Artificial Sequence: Synthetic oligonucleotide
  Antisense strand to SEQ ID NO: 2568352
uuccuaacuauagugaccc

SEQ ID NO: 2568354 - RNA, 19 nt, Artificial Sequence
  Description of Artificial Sequence: Synthetic oligonucleotide
  Sense strand starting at position 3675 of SEQ ID NO: 1888950
ucacuauaguuaggaauac

SEQ ID NO: 2568355 - RNA, 19 nt, Artificial Sequence
  Description of Artificial Sequence: Synthetic oligonucleotide
  Antisense strand to SEQ ID NO: 2568354
guauuccuaacuauaguga

SEQ ID NO: 2568356 - RNA, 19 nt, Artificial Sequence
  Description of Artificial Sequence: Synthetic oligonucleotide
  Sense strand starting at position 3686 of SEQ ID NO: 1888950
aggaauacauauugcauau

SEQ ID NO: 2568357 - RNA, 19 nt, Artificial Sequence
  Description of Artificial Sequence: Synthetic oligonucleotide
  Antisense strand to SEQ ID NO: 2568356
auaugcaauauguauuccu

SEQ ID NO: 2568358 - RNA, 19 nt, Artificial Sequence
  Description of Artificial Sequence: Synthetic oligonucleotide
  Sense strand starting at position 3801 of SEQ ID NO: 1888950
uuacaaguucuuugcaugu

SEQ ID NO: 2568359 - RNA, 19 nt, Artificial Sequence
  Description of Artificial Sequence: Synthetic oligonucleotide
  Antisense strand to SEQ ID NO: 2568358
acaugcaaagaacuuguaa

SEQ ID NO: 2568360 - RNA, 19 nt, Artificial Sequence
  Description of Artificial Sequence: Synthetic oligonucleotide
  Sense strand starting at position 3803 of SEQ ID NO: 1888950
acaaguucuuugcauguaa

SEQ ID NO: 2568361 - RNA, 19 nt, Artificial Sequence
  Description of Artificial Sequence: Synthetic oligonucleotide
  Antisense strand to SEQ ID NO: 2568360
uuacaugcaaagaacuugu

SEQ ID NO: 2568362 - RNA, 19 nt, Artificial Sequence
  Description of Artificial Sequence: Synthetic oligonucleotide
  Sense strand starting at position 132 of SEQ ID NO: 1888952
gguguuacaaugcauguaa

SEQ ID NO: 2568363 - RNA, 19 nt, Artificial Sequence
  Description of Artificial Sequence: Synthetic oligonucleotide
  Antisense strand to SEQ ID NO: 2568362
uuacaugcauuguaacacc

SEQ ID NO: 2568364 - RNA, 19 nt, Artificial Sequence
  Description of Artificial Sequence: Synthetic oligonucleotide
  Sense strand starting at position 173 of SEQ ID NO: 1888952
gguuuaucacuuugaguga

SEQ ID NO: 2568365 - RNA, 19 nt, Artificial Sequence
  Description of Artificial Sequence: Synthetic oligonucleotide
  Antisense strand to SEQ ID NO: 2568364
ucacucaaagugauaaacc

SEQ ID NO: 2568366 - RNA, 19 nt, Artificial Sequence
  Description of Artificial Sequence: Synthetic oligonucleotide
  Sense strand starting at position 176 of SEQ ID NO: 1888952
uuaucacuuugagugaagu

SEQ ID NO: 2568367 - RNA, 19 nt, Artificial Sequence
  Description of Artificial Sequence: Synthetic oligonucleotide
  Antisense strand to SEQ ID NO: 2568366
acuucacucaaagugauaa

SEQ ID NO: 2568368 - RNA, 19 nt, Artificial Sequence
  Description of Artificial Sequence: Synthetic oligonucleotide
  Sense strand starting at position 178 of SEQ ID NO: 1888952
aucacuuugagugaagugu

SEQ ID NO: 2568369 - RNA, 19 nt, Artificial Sequence
  Description of Artificial Sequence: Synthetic oligonucleotide
  Antisense strand to SEQ ID NO: 2568368
acacuucacucaaagugau

SEQ ID NO: 2568370 - RNA, 19 nt, Artificial Sequence
  Description of Artificial Sequence: Synthetic oligonucleotide
  Sense strand starting at position 184 of SEQ ID NO: 1888952
uugagugaaguguagaaau

SEQ ID NO: 2568371 - RNA, 19 nt, Artificial Sequence
  Description of Artificial Sequence: Synthetic oligonucleotide
  Antisense strand to SEQ ID NO: 2568370
auuucuacacuucacucaa

SEQ ID NO: 2568372 - RNA, 19 nt, Artificial Sequence
  Description of Artificial Sequence: Synthetic oligonucleotide
  Sense strand starting at position 531 of SEQ ID NO: 1888952
accugagaaugucuuuauu

SEQ ID NO: 2568373 - RNA, 19 nt, Artificial Sequence
  Description of Artificial Sequence: Synthetic oligonucleotide
  Antisense strand to SEQ ID NO: 2568372
aauaaagacauucucaggu

SEQ ID NO: 2568374 - RNA, 19 nt, Artificial Sequence
  Description of Artificial Sequence: Synthetic oligonucleotide
  Sense strand starting at position 540 of SEQ ID NO: 1888952
ugucuuuauuucccguuua

SEQ ID NO: 2568375 - RNA, 19 nt, Artificial Sequence
  Description of Artificial Sequence: Synthetic oligonucleotide
  Antisense strand to SEQ ID NO: 2568374
uaaacgggaaauaaagaca

SEQ ID NO: 2568376 - RNA, 19 nt, Artificial Sequence
  Description of Artificial Sequence: Synthetic oligonucleotide
  Sense strand starting at position 552 of SEQ ID NO: 1888952
ccguuuauuccugaagaau

SEQ ID NO: 2568377 - RNA, 19 nt, Artificial Sequence
  Description of Artificial Sequence: Synthetic oligonucleotide
  Antisense strand to SEQ ID NO: 2568376
auucuucaggaauaaacgg

SEQ ID NO: 2568378 - RNA, 19 nt, Artificial Sequence
  Description of Artificial Sequence: Synthetic oligonucleotide
  Sense strand starting at position 583 of SEQ ID NO: 1888952
ugcagaauucuggguugau

SEQ ID NO: 2568379 - RNA, 19 nt, Artificial Sequence
  Description of Artificial Sequence: Synthetic oligonucleotide
  Antisense strand to SEQ ID NO: 2568378
aucaacccagaauucugca

SEQ ID NO: 2568380 - RNA, 19 nt, Artificial Sequence
  Description of Artificial Sequence: Synthetic oligonucleotide
  Sense strand starting at position 584 of SEQ ID NO: 1888952
gcagaauucuggguugaua

SEQ ID NO: 2568381 - RNA, 19 nt, Artificial Sequence
  Description of Artificial Sequence: Synthetic oligonucleotide
  Antisense strand to SEQ ID NO: 2568380
uaucaacccagaauucugc

SEQ ID NO: 2568382 - RNA, 19 nt, Artificial Sequence
  Description of Artificial Sequence: Synthetic oligonucleotide
  Sense strand starting at position 586 of SEQ ID NO: 1888952
agaauucuggguugauauu

SEQ ID NO: 2568383 - RNA, 19 nt, Artificial Sequence
  Description of Artificial Sequence: Synthetic oligonucleotide
  Antisense strand to SEQ ID NO: 2568382
aauaucaacccagaauucu

SEQ ID NO: 2568384 - RNA, 19 nt, Artificial Sequence
  Description of Artificial Sequence: Synthetic oligonucleotide
  Sense strand starting at position 778 of SEQ ID NO: 1888952
ugugucuuugcauacauuu

SEQ ID NO: 2568385 - RNA, 19 nt, Artificial Sequence
  Description of Artificial Sequence: Synthetic oligonucleotide
  Antisense strand to SEQ ID NO: 2568384
aaauguaugcaaagacaca

SEQ ID NO: 2568386 - RNA, 19 nt, Artificial Sequence
  Description of Artificial Sequence: Synthetic oligonucleotide
  Sense strand starting at position 855 of SEQ ID NO: 1888952
ucacuaaauuuggagaguu

SEQ ID NO: 2568387 - RNA, 19 nt, Artificial Sequence
  Description of Artificial Sequence: Synthetic oligonucleotide
  Antisense strand to SEQ ID NO: 2568386
aacucuccaaauuuaguga

SEQ ID NO: 2568388 - RNA, 19 nt, Artificial Sequence
  Description of Artificial Sequence: Synthetic oligonucleotide
  Sense strand starting at position 905 of SEQ ID NO: 1888952
cuucucagacucugaugau

SEQ ID NO: 2568389 - RNA, 19 nt, Artificial Sequence
  Description of Artificial Sequence: Synthetic oligonucleotide
  Antisense strand to SEQ ID NO: 2568388
aucaucagagucugagaag

SEQ ID NO: 2568390 - RNA, 19 nt, Artificial Sequence
  Description of Artificial Sequence: Synthetic oligonucleotide
  Sense strand starting at position 959 of SEQ ID NO: 1888952
cccugauacuuuguuuauu

SEQ ID NO: 2568391 - RNA, 19 nt, Artificial Sequence
  Description of Artificial Sequence: Synthetic oligonucleotide
  Antisense strand to SEQ ID NO: 2568390
aauaaacaaaguaucaggg

SEQ ID NO: 2568392 - RNA, 19 nt, Artificial Sequence
  Description of Artificial Sequence: Synthetic oligonucleotide
  Sense strand starting at position 1014 of SEQ ID NO: 1888952
guccuaaaguucccugaua

SEQ ID NO: 2568393 - RNA, 19 nt, Artificial Sequence
  Description of Artificial Sequence: Synthetic oligonucleotide
  Antisense strand to SEQ ID NO: 2568392
uaucagggaacuuuaggac

SEQ ID NO: 2568394 - RNA, 19 nt, Artificial Sequence
  Description of Artificial Sequence: Synthetic oligonucleotide
  Sense strand starting at position 1092 of SEQ ID NO: 1888952
agugcauuccaauaaucug

SEQ ID NO: 2568395 - RNA, 19 nt, Artificial Sequence
  Description of Artificial Sequence: Synthetic oligonucleotide
  Antisense strand to SEQ ID NO: 2568394
cagauuauuggaaugcacu

SEQ ID NO: 2568396 - RNA, 19 nt, Artificial Sequence
  Description of Artificial Sequence: Synthetic oligonucleotide
  Sense strand starting at position 1135 of SEQ ID NO: 1888952
ucuugugaucuccaaugua

SEQ ID NO: 2568397 - RNA, 19 nt, Artificial Sequence
  Description of Artificial Sequence: Synthetic oligonucleotide
  Antisense strand to SEQ ID NO: 2568396
uacauuggagaucacaaga

SEQ ID NO: 2568398 - RNA, 19 nt, Artificial Sequence
  Description of Artificial Sequence: Synthetic oligonucleotide
  Sense strand starting at position 1275 of SEQ ID NO: 1888952
ucaagaguauauguaauug

SEQ ID NO: 2568399 - RNA, 19 nt, Artificial Sequence
  Description of Artificial Sequence: Synthetic oligonucleotide
  Antisense strand to SEQ ID NO: 2568398
caauuacauauacucuuga

SEQ ID NO: 2568400 - RNA, 19 nt, Artificial Sequence
  Description of Artificial Sequence: Synthetic oligonucleotide
  Sense strand starting at position 1659 of SEQ ID NO: 1888952
gagguuuagccacaccuuu

SEQ ID NO: 2568401 - RNA, 19 nt, Artificial Sequence
  Description of Artificial Sequence: Synthetic oligonucleotide
  Antisense strand to SEQ ID NO: 2568400
aaagguguggcuaaaccuc

SEQ ID NO: 2568402 - RNA, 19 nt, Artificial Sequence
  Description of Artificial Sequence: Synthetic oligonucleotide
  Sense strand starting at position 1812 of SEQ ID NO: 1888952
accucuuuguuacuacaga

SEQ ID NO: 2568403 - RNA, 19 nt, Artificial Sequence
  Description of Artificial Sequence: Synthetic oligonucleotide
  Antisense strand to SEQ ID NO: 2568402
ucuguaguaacaaagaggu

SEQ ID NO: 2568404 - RNA, 19 nt, Artificial Sequence
  Description of Artificial Sequence: Synthetic oligonucleotide
  Sense strand starting at position 1876 of SEQ ID NO: 1888952
aagcacaggguuugagaaa

SEQ ID NO: 2568405 - RNA, 19 nt, Artificial Sequence
  Description of Artificial Sequence: Synthetic oligonucleotide
  Antisense strand to SEQ ID NO: 2568404
uuucucaaacccugugcuu

SEQ ID NO: 2568406 - RNA, 19 nt, Artificial Sequence
  Description of Artificial Sequence: Synthetic oligonucleotide
  Sense strand starting at position 1961 of SEQ ID NO: 1888952
gggucaguucccuacugag

SEQ ID NO: 2568407 - RNA, 19 nt, Artificial Sequence
  Description of Artificial Sequence: Synthetic oligonucleotide
  Antisense strand to SEQ ID NO: 2568406
cucaguagggaacugaccc

SEQ ID NO: 2568408 - RNA, 19 nt, Artificial Sequence
  Description of Artificial Sequence: Synthetic oligonucleotide
  Sense strand starting at position 2047 of SEQ ID NO: 1888952
caaugaaaugcuuggugac

SEQ ID NO: 2568409 - RNA, 19 nt, Artificial Sequence
  Description of Artificial Sequence: Synthetic oligonucleotide
  Antisense strand to SEQ ID NO: 2568408
gucaccaagcauuucauug

SEQ ID NO: 2568410 - RNA, 19 nt, Artificial Sequence
  Description of Artificial Sequence: Synthetic oligonucleotide
  Sense strand starting at position 2053 of SEQ ID NO: 1888952
aaugcuuggugacccaaau

SEQ ID NO: 2568411 - RNA, 19 nt, Artificial Sequence
  Description of Artificial Sequence: Synthetic oligonucleotide
  Antisense strand to SEQ ID NO: 2568410
auuugggucaccaagcauu

SEQ ID NO: 2568412 - RNA, 19 nt, Artificial Sequence
  Description of Artificial Sequence: Synthetic oligonucleotide
  Sense strand starting at position 2091 of SEQ ID NO: 1888952
cucacuaauccuggguaca

SEQ ID NO: 2568413 - RNA, 19 nt, Artificial Sequence
  Description of Artificial Sequence: Synthetic oligonucleotide
  Antisense strand to SEQ ID NO: 2568412
uguacccaggauuagugag

SEQ ID NO: 2568414 - RNA, 19 nt, Artificial Sequence
  Description of Artificial Sequence: Synthetic oligonucleotide
  Sense strand starting at position 2092 of SEQ ID NO: 1888952
ucacuaauccuggguacag

SEQ ID NO: 2568415 - RNA, 19 nt, Artificial Sequence
  Description of Artificial Sequence: Synthetic oligonucleotide
  Antisense strand to SEQ ID NO: 2568414
cuguacccaggauuaguga

SEQ ID NO: 2568416 - RNA, 19 nt, Artificial Sequence
  Description of Artificial Sequence: Synthetic oligonucleotide
  Sense strand starting at position 2093 of SEQ ID NO: 1888952
cacuaauccuggguacaga

SEQ ID NO: 2568417 - RNA, 19 nt, Artificial Sequence
  Description of Artificial Sequence: Synthetic oligonucleotide
  Antisense strand to SEQ ID NO: 2568416
ucuguacccaggauuagug

SEQ ID NO: 2568418 - RNA, 19 nt, Artificial Sequence
  Description of Artificial Sequence: Synthetic oligonucleotide
  Sense strand starting at position 2162 of SEQ ID NO: 1888952
ucagaauacugccugagac

SEQ ID NO: 2568419 - RNA, 19 nt, Artificial Sequence
  Description of Artificial Sequence: Synthetic oligonucleotide
  Antisense strand to SEQ ID NO: 2568418
gucucaggcaguauucuga

SEQ ID NO: 2568420 - RNA, 19 nt, Artificial Sequence
  Description of Artificial Sequence: Synthetic oligonucleotide
  Sense strand starting at position 2257 of SEQ ID NO: 1888952
ccugguucugcugaaugga

SEQ ID NO: 2568421 - RNA, 19 nt, Artificial Sequence
  Description of Artificial Sequence: Synthetic oligonucleotide
  Antisense strand to SEQ ID NO: 2568420
uccauucagcagaaccagg

SEQ ID NO: 2568422 - RNA, 19 nt, Artificial Sequence
  Description of Artificial Sequence: Synthetic oligonucleotide
  Sense strand starting at position 2430 of SEQ ID NO: 1888952
gcuuucauagaguagggua

SEQ ID NO: 2568423 - RNA, 19 nt, Artificial Sequence
  Description of Artificial Sequence: Synthetic oligonucleotide
  Antisense strand to SEQ ID NO: 2568422
uacccuacucuaugaaagc

SEQ ID NO: 2568424 - RNA, 19 nt, Artificial Sequence
  Description of Artificial Sequence: Synthetic oligonucleotide
  Sense strand starting at position 2584 of SEQ ID NO: 1888952
gucaauuagcuagggaaga

SEQ ID NO: 2568425 - RNA, 19 nt, Artificial Sequence
  Description of Artificial Sequence: Synthetic oligonucleotide
  Antisense strand to SEQ ID NO: 2568424
ucuucccuagcuaauugac

SEQ ID NO: 2568426 - RNA, 19 nt, Artificial Sequence
  Description of Artificial Sequence: Synthetic oligonucleotide
  Sense strand starting at position 2669 of SEQ ID NO: 1888952
gagcccugucugggauaua

SEQ ID NO: 2568427 - RNA, 19 nt, Artificial Sequence
  Description of Artificial Sequence: Synthetic oligonucleotide
  Antisense strand to SEQ ID NO: 2568426
uauaucccagacagggcuc

SEQ ID NO: 2568428 - RNA, 19 nt, Artificial Sequence
  Description of Artificial Sequence: Synthetic oligonucleotide
  Sense strand starting at position 2678 of SEQ ID NO: 1888952
cugggauauaugggcuaua

SEQ ID NO: 2568429 - RNA, 19 nt, Artificial Sequence
  Description of Artificial Sequence: Synthetic oligonucleotide
  Antisense strand to SEQ ID NO: 2568428
uauagcccauauaucccag

SEQ ID NO: 2568430 - RNA, 19 nt, Artificial Sequence
  Description of Artificial Sequence: Synthetic oligonucleotide
  Sense strand starting at position 2679 of SEQ ID NO: 1888952
ugggauauaugggcuauau

SEQ ID NO: 2568431 - RNA, 19 nt, Artificial Sequence
  Description of Artificial Sequence: Synthetic oligonucleotide
  Antisense strand to SEQ ID NO: 2568430
auauagcccauauauccca

SEQ ID NO: 2568432 - RNA, 19 nt, Artificial Sequence
  Description of Artificial Sequence: Synthetic oligonucleotide
  Sense strand starting at position 2901 of SEQ ID NO: 1888952
aauuuaaguugacagugaa

SEQ ID NO: 2568433 - RNA, 19 nt, Artificial Sequence
  Description of Artificial Sequence: Synthetic oligonucleotide
  Antisense strand to SEQ ID NO: 2568432
uucacugucaacuuaaauu

SEQ ID NO: 2568434 - RNA, 19 nt, Artificial Sequence
  Description of Artificial Sequence: Synthetic oligonucleotide
  Sense strand starting at position 2924 of SEQ ID NO: 1888952
ccauucgaguggguaaauu

SEQ ID NO: 2568435 - RNA, 19 nt, Artificial Sequence
  Description of Artificial Sequence: Synthetic oligonucleotide
  Antisense strand to SEQ ID NO: 2568434
aauuuacccacucgaaugg

SEQ ID NO: 2568436 - RNA, 19 nt, Artificial Sequence
  Description of Artificial Sequence: Synthetic oligonucleotide
  Sense strand starting at position 3044 of SEQ ID NO: 1888952
cuucuaagagcugauuaug

SEQ ID NO: 2568437 - RNA, 19 nt, Artificial Sequence
  Description of Artificial Sequence: Synthetic oligonucleotide
  Antisense strand to SEQ ID NO: 2568436
cauaaucagcucuuagaag

SEQ ID NO: 2568438 - RNA, 19 nt, Artificial Sequence
  Description of Artificial Sequence: Synthetic oligonucleotide
  Sense strand starting at position 3047 of SEQ ID NO: 1888952
cuaagagcugauuauggua

SEQ ID NO: 2568439 - RNA, 19 nt, Artificial Sequence
  Description of Artificial Sequence: Synthetic oligonucleotide
  Antisense strand to SEQ ID NO: 2568438
uaccauaaucagcucuuag

SEQ ID NO: 2568440 - RNA, 19 nt, Artificial Sequence
  Description of Artificial Sequence: Synthetic oligonucleotide
  Sense strand starting at position 3201 of SEQ ID NO: 1888952
ggcaucauguaacuaacuu

SEQ ID NO: 2568441 - RNA, 19 nt, Artificial Sequence
  Description of Artificial Sequence: Synthetic oligonucleotide
  Antisense strand to SEQ ID NO: 2568440
aaguuaguuacaugaugcc

SEQ ID NO: 2568442 - RNA, 19 nt, Artificial Sequence
  Description of Artificial Sequence: Synthetic oligonucleotide
  Sense strand starting at position 80 of SEQ ID NO: 1888953
auggaaauagcguauguaa

SEQ ID NO: 2568443 - RNA, 19 nt, Artificial Sequence
  Description of Artificial Sequence: Synthetic oligonucleotide
  Antisense strand to SEQ ID NO: 2568442
uuacauacgcuauuuccau

SEQ ID NO: 2568444 - RNA, 19 nt, Artificial Sequence
  Description of Artificial Sequence: Synthetic oligonucleotide
  Sense strand starting at position 106 of SEQ ID NO: 1888953
ugcagaauuccugacauau

SEQ ID NO: 2568445 - RNA, 19 nt, Artificial Sequence
  Description of Artificial Sequence: Synthetic oligonucleotide
  Antisense strand to SEQ ID NO: 2568444
auaugucaggaauucugca

SEQ ID NO: 2568446 - RNA, 19 nt, Artificial Sequence
  Description of Artificial Sequence: Synthetic oligonucleotide
  Sense strand starting at position 312 of SEQ ID NO: 1888953
aauccagagccguauggau

SEQ ID NO: 2568447 - RNA, 19 nt, Artificial Sequence
  Description of Artificial Sequence: Synthetic oligonucleotide
  Antisense strand to SEQ ID NO: 2568446
auccauacggcucuggauu

SEQ ID NO: 2568448 - RNA, 19 nt, Artificial Sequence
  Description of Artificial Sequence: Synthetic oligonucleotide
  Sense strand starting at position 350 of SEQ ID NO: 1888953
ugaagaaagaguuguaugu

SEQ ID NO: 2568449 - RNA, 19 nt, Artificial Sequence
  Description of Artificial Sequence: Synthetic oligonucleotide
  Antisense strand to SEQ ID NO: 2568448
acauacaacucuuucuuca

SEQ ID NO: 2568450 - RNA, 19 nt, Artificial Sequence
  Description of Artificial Sequence: Synthetic oligonucleotide
  Sense strand starting at position 354 of SEQ ID NO: 1888953
gaaagaguuguauguaauc

SEQ ID NO: 2568451 - RNA, 19 nt, Artificial Sequence
  Description of Artificial Sequence: Synthetic oligonucleotide
  Antisense strand to SEQ ID NO: 2568450
gauuacauacaacucuuuc

SEQ ID NO: 2568452 - RNA, 19 nt, Artificial Sequence
  Description of Artificial Sequence: Synthetic oligonucleotide
  Sense strand starting at position 398 of SEQ ID NO: 1888953
uggugcaaucaaugaauga

SEQ ID NO: 2568453 - RNA, 19 nt, Artificial Sequence
  Description of Artificial Sequence: Synthetic oligonucleotide
  Antisense strand to SEQ ID NO: 2568452
ucauucauugauugcacca

SEQ ID NO: 2568454 - RNA, 19 nt, Artificial Sequence
  Description of Artificial Sequence: Synthetic oligonucleotide
  Sense strand starting at position 411 of SEQ ID NO: 1888953
gaaugaaugcuuuguggag

SEQ ID NO: 2568455 - RNA, 19 nt, Artificial Sequence
  Description of Artificial Sequence: Synthetic oligonucleotide
  Antisense strand to SEQ ID NO: 2568454
cuccacaaagcauucauuc

SEQ ID NO: 2568456 - RNA, 19 nt, Artificial Sequence
  Description of Artificial Sequence: Synthetic oligonucleotide
  Sense strand starting at position 417 of SEQ ID NO: 1888953
augcuuuguggaggaugga

SEQ ID NO: 2568457 - RNA, 19 nt, Artificial Sequence
  Description of Artificial Sequence: Synthetic oligonucleotide
  Antisense strand to SEQ ID NO: 2568456
uccauccuccacaaagcau

SEQ ID NO: 2568458 - RNA, 19 nt, Artificial Sequence
  Description of Artificial Sequence: Synthetic oligonucleotide
  Sense strand starting at position 454 of SEQ ID NO: 1888953
gaagaaagguugcuauaga

SEQ ID NO: 2568459 - RNA, 19 nt, Artificial Sequence
  Description of Artificial Sequence: Synthetic oligonucleotide
  Antisense strand to SEQ ID NO: 2568458
ucuauagcaaccuuucuuc

SEQ ID NO: 2568460 - RNA, 19 nt, Artificial Sequence
  Description of Artificial Sequence: Synthetic oligonucleotide
  Sense strand starting at position 463 of SEQ ID NO: 1888953
uugcuauagacagagguau

SEQ ID NO: 2568461 - RNA, 19 nt, Artificial Sequence
  Description of Artificial Sequence: Synthetic oligonucleotide
  Antisense strand to SEQ ID NO: 2568460
auaccucugucuauagcaa

SEQ ID NO: 2568462 - RNA, 19 nt, Artificial Sequence
  Description of Artificial Sequence: Synthetic oligonucleotide
  Sense strand starting at position 465 of SEQ ID NO: 1888953
gcuauagacagagguauca

SEQ ID NO: 2568463 - RNA, 19 nt, Artificial Sequence
  Description of Artificial Sequence: Synthetic oligonucleotide
  Antisense strand to SEQ ID NO: 2568462
ugauaccucugucuauagc

SEQ ID NO: 2568464 - RNA, 19 nt, Artificial Sequence
  Description of Artificial Sequence: Synthetic oligonucleotide
  Sense strand starting at position 572 of SEQ ID NO: 1888953
gggauuccaguugauguaa

SEQ ID NO: 2568465 - RNA, 19 nt, Artificial Sequence
  Description of Artificial Sequence: Synthetic oligonucleotide
  Antisense strand to SEQ ID NO: 2568464
uuacaucaacuggaauccc

SEQ ID NO: 2568466 - RNA, 19 nt, Artificial Sequence
  Description of Artificial Sequence: Synthetic oligonucleotide
  Sense strand starting at position 588 of SEQ ID NO: 1888953
uaaggccaugucugggaaa

SEQ ID NO: 2568467 - RNA, 19 nt, Artificial Sequence
  Description of Artificial Sequence: Synthetic oligonucleotide
  Antisense strand to SEQ ID NO: 2568466
uuucccagacauggccuua

SEQ ID NO: 2568468 - RNA, 19 nt, Artificial Sequence
  Description of Artificial Sequence: Synthetic oligonucleotide
  Sense strand starting at position 590 of SEQ ID NO: 1888953
aggccaugucugggaaaga

SEQ ID NO: 2568469 - RNA, 19 nt, Artificial Sequence
  Description of Artificial Sequence: Synthetic oligonucleotide
  Antisense strand to SEQ ID NO: 2568468
ucuuucccagacauggccu

SEQ ID NO: 2568470 - RNA, 19 nt, Artificial Sequence
  Description of Artificial Sequence: Synthetic oligonucleotide
  Sense strand starting at position 1045 of SEQ ID NO: 1888953
gcuaaagaugaaugcaaug

SEQ ID NO: 2568471 - RNA, 19 nt, Artificial Sequence
  Description of Artificial Sequence: Synthetic oligonucleotide
  Antisense strand to SEQ ID NO: 2568470
cauugcauucaucuuuagc

SEQ ID NO: 2568472 - RNA, 19 nt, Artificial Sequence
  Description of Artificial Sequence: Synthetic oligonucleotide
  Sense strand starting at position 1050 of SEQ ID NO: 1888953
agaugaaugcaauguauca

SEQ ID NO: 2568473 - RNA, 19 nt, Artificial Sequence
  Description of Artificial Sequence: Synthetic oligonucleotide
  Antisense strand to SEQ ID NO: 2568472
ugauacauugcauucaucu

SEQ ID NO: 2568474 - RNA, 19 nt, Artificial Sequence
  Description of Artificial Sequence: Synthetic oligonucleotide
  Sense strand starting at position 1063 of SEQ ID NO: 1888953
guaucauagcaucaucuua

SEQ ID NO: 2568475 - RNA, 19 nt, Artificial Sequence
  Description of Artificial Sequence: Synthetic oligonucleotide
  Antisense strand to SEQ ID NO: 2568474
uaagaugaugcuaugauac

SEQ ID NO: 2568476 - RNA, 19 nt, Artificial Sequence
  Description of Artificial Sequence: Synthetic oligonucleotide
  Sense strand starting at position 1199 of SEQ ID NO: 1888953
uagagugauuccuccugau

SEQ ID NO: 2568477 - RNA, 19 nt, Artificial Sequence
  Description of Artificial Sequence: Synthetic oligonucleotide
  Antisense strand to SEQ ID NO: 2568476
aucaggaggaaucacucua

SEQ ID NO: 2568478 - RNA, 19 nt, Artificial Sequence
  Description of Artificial Sequence: Synthetic oligonucleotide
  Sense strand starting at position 1203 of SEQ ID NO: 1888953
gugauuccuccugauacaa

SEQ ID NO: 2568479 - RNA, 19 nt, Artificial Sequence
  Description of Artificial Sequence: Synthetic oligonucleotide
  Antisense strand to SEQ ID NO: 2568478
uuguaucaggaggaaucac

SEQ ID NO: 2568480 - RNA, 19 nt, Artificial Sequence
  Description of Artificial Sequence: Synthetic oligonucleotide
  Sense strand starting at position 1300 of SEQ ID NO: 1888953
acuggcuuaguugagauua

SEQ ID NO: 2568481 - RNA, 19 nt, Artificial Sequence
  Description of Artificial Sequence: Synthetic oligonucleotide
  Antisense strand to SEQ ID NO: 2568480
uaaucucaacuaagccagu

SEQ ID NO: 2568482 - RNA, 19 nt, Artificial Sequence
  Description of Artificial Sequence: Synthetic oligonucleotide
  Sense strand starting at position 1395 of SEQ ID NO: 1888953
ucauuaauaucagugugag

SEQ ID NO: 2568483 - RNA, 19 nt, Artificial Sequence
  Description of Artificial Sequence: Synthetic oligonucleotide
  Antisense strand to SEQ ID NO: 2568482
cucacacugauauuaauga

SEQ ID NO: 2568484 - RNA, 19 nt, Artificial Sequence
  Description of Artificial Sequence: Synthetic oligonucleotide
  Sense strand starting at position 1396 of SEQ ID NO: 1888953
cauuaauaucagugugagg

SEQ ID NO: 2568485 - RNA, 19 nt, Artificial Sequence
  Description of Artificial Sequence: Synthetic oligonucleotide
  Antisense strand to SEQ ID NO: 2568484
ccucacacugauauuaaug

SEQ ID NO: 2568486 - RNA, 19 nt, Artificial Sequence
  Description of Artificial Sequence: Synthetic oligonucleotide
  Sense strand starting at position 1398 of SEQ ID NO: 1888953
uuaauaucagugugaggag

SEQ ID NO: 2568487 - RNA, 19 nt, Artificial Sequence
  Description of Artificial Sequence: Synthetic oligonucleotide
  Antisense strand to SEQ ID NO: 2568486
cuccucacacugauauuaa

SEQ ID NO: 2568488 - RNA, 19 nt, Artificial Sequence
  Description of Artificial Sequence: Synthetic oligonucleotide
  Sense strand starting at position 1640 of SEQ ID NO: 1888953
agacauaggaaguguauua

SEQ ID NO: 2568489 - RNA, 19 nt, Artificial Sequence
  Description of Artificial Sequence: Synthetic oligonucleotide
  Antisense strand to SEQ ID NO: 2568488
uaauacacuuccuaugucu

SEQ ID NO: 2568490 - RNA, 19 nt, Artificial Sequence
  Description of Artificial Sequence: Synthetic oligonucleotide
  Sense strand starting at position 1685 of SEQ ID NO: 1888953
caggaucaacguugaauaa

SEQ ID NO: 2568491 - RNA, 19 nt, Artificial Sequence
  Description of Artificial Sequence: Synthetic oligonucleotide
  Antisense strand to SEQ ID NO: 2568490
uuauucaacguugauccug

SEQ ID NO: 2568492 - RNA, 19 nt, Artificial Sequence
  Description of Artificial Sequence: Synthetic oligonucleotide
  Sense strand starting at position 2002 of SEQ ID NO: 1888953
ucuguagaucuagggaauu

SEQ ID NO: 2568493 - RNA, 19 nt, Artificial Sequence
  Description of Artificial Sequence: Synthetic oligonucleotide
  Antisense strand to SEQ ID NO: 2568492
aauucccuagaucuacaga

SEQ ID NO: 2568494 - RNA, 19 nt, Artificial Sequence
  Description of Artificial Sequence: Synthetic oligonucleotide
  Sense strand starting at position 2004 of SEQ ID NO: 1888953
uguagaucuagggaauugu

SEQ ID NO: 2568495 - RNA, 19 nt, Artificial Sequence
  Description of Artificial Sequence: Synthetic oligonucleotide
  Antisense strand to SEQ ID NO: 2568494
acaauucccuagaucuaca

SEQ ID NO: 2568496 - RNA, 19 nt, Artificial Sequence
  Description of Artificial Sequence: Synthetic oligonucleotide
  Sense strand starting at position 2078 of SEQ ID NO: 1888953
cuguuuagaguugaacuaa

SEQ ID NO: 2568497 - RNA, 19 nt, Artificial Sequence
  Description of Artificial Sequence: Synthetic oligonucleotide
  Antisense strand to SEQ ID NO: 2568496
uuaguucaacucuaaacag

SEQ ID NO: 2568498 - RNA, 19 nt, Artificial Sequence
  Description of Artificial Sequence: Synthetic oligonucleotide
  Sense strand starting at position 2152 of SEQ ID NO: 1888953
cuuccauggcauuauggaa

SEQ ID NO: 2568499 - RNA, 19 nt, Artificial Sequence
  Description of Artificial Sequence: Synthetic oligonucleotide
  Antisense strand to SEQ ID NO: 2568498
uuccauaaugccauggaag

SEQ ID NO: 2568500 - RNA, 19 nt, Artificial Sequence
  Description of Artificial Sequence: Synthetic oligonucleotide
  Sense strand starting at position 2173 of SEQ ID NO: 1888953
augcgcaaucuguugucaa

SEQ ID NO: 2568501 - RNA, 19 nt, Artificial Sequence
  Description of Artificial Sequence: Synthetic oligonucleotide
  Antisense strand to SEQ ID NO: 2568500
uugacaacagauugcgcau

SEQ ID NO: 2568502 - RNA, 19 nt, Artificial Sequence
  Description of Artificial Sequence: Synthetic oligonucleotide
  Sense strand starting at position 2255 of SEQ ID NO: 1888953
uuaccuagaucguuacaaa

SEQ ID NO: 2568503 - RNA, 19 nt, Artificial Sequence
  Description of Artificial Sequence: Synthetic oligonucleotide
  Antisense strand to SEQ ID NO: 2568502
uuuguaacgaucuagguaa

SEQ ID NO: 2568504 - RNA, 19 nt, Artificial Sequence
  Description of Artificial Sequence: Synthetic oligonucleotide
  Sense strand starting at position 2340 of SEQ ID NO: 1888953
guuagaaagaauggucaau

SEQ ID NO: 2568505 - RNA, 19 nt, Artificial Sequence
  Description of Artificial Sequence: Synthetic oligonucleotide
  Antisense strand to SEQ ID NO: 2568504
auugaccauucuuucuaac

SEQ ID NO: 2568506 - RNA, 19 nt, Artificial Sequence
  Description of Artificial Sequence: Synthetic oligonucleotide
  Sense strand starting at position 2571 of SEQ ID NO: 1888953
cucugauuuccuggugccu

SEQ ID NO: 2568507 - RNA, 19 nt, Artificial Sequence
  Description of Artificial Sequence: Synthetic oligonucleotide
  Antisense strand to SEQ ID NO: 2568506
aggcaccaggaaaucagag

SEQ ID NO: 2568508 - RNA, 19 nt, Artificial Sequence
  Description of Artificial Sequence: Synthetic oligonucleotide
  Sense strand starting at position 2686 of SEQ ID NO: 1888953
guguuuggugaugaaauga

SEQ ID NO: 2568509 - RNA, 19 nt, Artificial Sequence
  Description of Artificial Sequence: Synthetic oligonucleotide
  Antisense strand to SEQ ID NO: 2568508
ucauuucaucaccaaacac

SEQ ID NO: 2568510 - RNA, 19 nt, Artificial Sequence
  Description of Artificial Sequence: Synthetic oligonucleotide
  Sense strand starting at position 2733 of SEQ ID NO: 1888953
guugauugcagaugauaag

SEQ ID NO: 2568511 - RNA, 19 nt, Artificial Sequence
  Description of Artificial Sequence: Synthetic oligonucleotide
  Antisense strand to SEQ ID NO: 2568510
cuuaucaucugcaaucaac

SEQ ID NO: 2568512 - RNA, 19 nt, Artificial Sequence
  Description of Artificial Sequence: Synthetic oligonucleotide
  Sense strand starting at position 3167 of SEQ ID NO: 1888953
gcauuugugcucgacacug

SEQ ID NO: 2568513 - RNA, 19 nt, Artificial Sequence
  Description of Artificial Sequence: Synthetic oligonucleotide
  Antisense strand to SEQ ID NO: 2568512
cagugucgagcacaaaugc

SEQ ID NO: 2568514 - RNA, 19 nt, Artificial Sequence
  Description of Artificial Sequence: Synthetic oligonucleotide
  Sense strand starting at position 3228 of SEQ ID NO: 1888953
cagucuuucccuuauggag

SEQ ID NO: 2568515 - RNA, 19 nt, Artificial Sequence
  Description of Artificial Sequence: Synthetic oligonucleotide
  Antisense strand to SEQ ID NO: 2568514
cuccauaagggaaagacug

SEQ ID NO: 2568516 - RNA, 19 nt, Artificial Sequence
  Description of Artificial Sequence: Synthetic oligonucleotide
  Sense strand starting at position 3652 of SEQ ID NO: 1888953
augggacaugcuuauacuu

SEQ ID NO: 2568517 - RNA, 19 nt, Artificial Sequence
  Description of Artificial Sequence: Synthetic oligonucleotide
  Antisense strand to SEQ ID NO: 2568516
aaguauaagcaugucccau

SEQ ID NO: 2568518 - RNA, 19 nt, Artificial Sequence
  Description of Artificial Sequence: Synthetic oligonucleotide
  Sense strand starting at position 3818 of SEQ ID NO: 1888953
gcaacuuuaguccaguaag

SEQ ID NO: 2568519 - RNA, 19 nt, Artificial Sequence
  Description of Artificial Sequence: Synthetic oligonucleotide
  Antisense strand to SEQ ID NO: 2568518
cuuacuggacuaaaguugc

SEQ ID NO: 2568520 - RNA, 19 nt, Artificial Sequence
  Description of Artificial Sequence: Synthetic oligonucleotide
  Sense strand starting at position 3821 of SEQ ID NO: 1888953
acuuuaguccaguaaggua

SEQ ID NO: 2568521 - RNA, 19 nt, Artificial Sequence
  Description of Artificial Sequence: Synthetic oligonucleotide
  Antisense strand to SEQ ID NO: 2568520
uaccuuacuggacuaaagu

SEQ ID NO: 2568522 - RNA, 19 nt, Artificial Sequence
  Description of Artificial Sequence: Synthetic oligonucleotide
  Sense strand starting at position 84 of SEQ ID NO: 1888954
uguaaauuagucuaacuca

SEQ ID NO: 2568523 - RNA, 19 nt, Artificial Sequence
  Description of Artificial Sequence: Synthetic oligonucleotide
  Antisense strand to SEQ ID NO: 2568522
ugaguuagacuaauuuaca

SEQ ID NO: 2568524 - RNA, 19 nt, Artificial Sequence
  Description of Artificial Sequence: Synthetic oligonucleotide
  Sense strand starting at position 99 of SEQ ID NO: 1888954
cucauagaagcugaguaua

SEQ ID NO: 2568525 - RNA, 19 nt, Artificial Sequence
  Description of Artificial Sequence: Synthetic oligonucleotide
  Antisense strand to SEQ ID NO: 2568524
uauacucagcuucuaugag

SEQ ID NO: 2568526 - RNA, 19 nt, Artificial Sequence
  Description of Artificial Sequence: Synthetic oligonucleotide
  Sense strand starting at position 101 of SEQ ID NO: 1888954
cauagaagcugaguauaaa

SEQ ID NO: 2568527 - RNA, 19 nt, Artificial Sequence
  Description of Artificial Sequence: Synthetic oligonucleotide
  Antisense strand to SEQ ID NO: 2568526
uuuauacucagcuucuaug

SEQ ID NO: 2568528 - RNA, 19 nt, Artificial Sequence
  Description of Artificial Sequence: Synthetic oligonucleotide
  Sense strand starting at position 145 of SEQ ID NO: 1888954
gggaaaguaagauguuagu

SEQ ID NO: 2568529 - RNA, 19 nt, Artificial Sequence
  Description of Artificial Sequence: Synthetic oligonucleotide
  Antisense strand to SEQ ID NO: 2568528
acuaacaucuuacuuuccc

SEQ ID NO: 2568530 - RNA, 19 nt, Artificial Sequence
  Description of Artificial Sequence: Synthetic oligonucleotide
  Sense strand starting at position 194 of SEQ ID NO: 1888954
caaguaaguccuggauauc

SEQ ID NO: 2568531 - RNA, 19 nt, Artificial Sequence
  Description of Artificial Sequence: Synthetic oligonucleotide
  Antisense strand to SEQ ID NO: 2568530
gauauccaggacuuacuug

SEQ ID NO: 2568532 - RNA, 19 nt, Artificial Sequence
  Description of Artificial Sequence: Synthetic oligonucleotide
  Sense strand starting at position 195 of SEQ ID NO: 1888954
aaguaaguccuggauaucu

SEQ ID NO: 2568533 - RNA, 19 nt, Artificial Sequence
  Description of Artificial Sequence: Synthetic oligonucleotide
  Antisense strand to SEQ ID NO: 2568532
agauauccaggacuuacuu

SEQ ID NO: 2568534 - RNA, 19 nt, Artificial Sequence
  Description of Artificial Sequence: Synthetic oligonucleotide
  Sense strand starting at position 197 of SEQ ID NO: 1888954
guaaguccuggauaucuaa

SEQ ID NO: 2568535 - RNA, 19 nt, Artificial Sequence
  Description of Artificial Sequence: Synthetic oligonucleotide
  Antisense strand to SEQ ID NO: 2568534
uuagauauccaggacuuac

SEQ ID NO: 2568536 - RNA, 19 nt, Artificial Sequence
  Description of Artificial Sequence: Synthetic oligonucleotide
  Sense strand starting at position 325 of SEQ ID NO: 1888954
augauaacucuaugaugua

SEQ ID NO: 2568537 - RNA, 19 nt, Artificial Sequence
  Description of Artificial Sequence: Synthetic oligonucleotide
  Antisense strand to SEQ ID NO: 2568536
uacaucauagaguuaucau

SEQ ID NO: 2568538 - RNA, 19 nt, Artificial Sequence
  Description of Artificial Sequence: Synthetic oligonucleotide
  Sense strand starting at position 663 of SEQ ID NO: 1888954
uuauacugucgguagggau

SEQ ID NO: 2568539 - RNA, 19 nt, Artificial Sequence
  Description of Artificial Sequence: Synthetic oligonucleotide
  Antisense strand to SEQ ID NO: 2568538
aucccuaccgacaguauaa

SEQ ID NO: 2568540 - RNA, 19 nt, Artificial Sequence
  Description of Artificial Sequence: Synthetic oligonucleotide
  Sense strand starting at position 719 of SEQ ID NO: 1888954
agcuccuugagagguuaaa

SEQ ID NO: 2568541 - RNA, 19 nt, Artificial Sequence
  Description of Artificial Sequence: Synthetic oligonucleotide
  Antisense strand to SEQ ID NO: 2568540
uuuaaccucucaaggagcu

SEQ ID NO: 2568542 - RNA, 19 nt, Artificial Sequence
  Description of Artificial Sequence: Synthetic oligonucleotide
  Sense strand starting at position 848 of SEQ ID NO: 1888954
acagaaguauuaucuguaa

SEQ ID NO: 2568543 - RNA, 19 nt, Artificial Sequence
  Description of Artificial Sequence: Synthetic oligonucleotide
  Antisense strand to SEQ ID NO: 2568542
uuacagauaauacuucugu

SEQ ID NO: 2568544 - RNA, 19 nt, Artificial Sequence
  Description of Artificial Sequence: Synthetic oligonucleotide
  Sense strand starting at position 1166 of SEQ ID NO: 1888954
cuaaaucguauggaguuau

SEQ ID NO: 2568545 - RNA, 19 nt, Artificial Sequence
  Description of Artificial Sequence: Synthetic oligonucleotide
  Antisense strand to SEQ ID NO: 2568544
auaacuccauacgauuuag

SEQ ID NO: 2568546 - RNA, 19 nt, Artificial Sequence
  Description of Artificial Sequence: Synthetic oligonucleotide
  Sense strand starting at position 1708 of SEQ ID NO: 1888954
guaguucuccuauaugaug

SEQ ID NO: 2568547 - RNA, 19 nt, Artificial Sequence
  Description of Artificial Sequence: Synthetic oligonucleotide
  Antisense strand to SEQ ID NO: 2568546
caucauauaggagaacuac

SEQ ID NO: 2568548 - RNA, 19 nt, Artificial Sequence
  Description of Artificial Sequence: Synthetic oligonucleotide
  Sense strand starting at position 1726 of SEQ ID NO: 1888954
ggcucucauuuacagagaa

SEQ ID NO: 2568549 - RNA, 19 nt, Artificial Sequence
  Description of Artificial Sequence: Synthetic oligonucleotide
  Antisense strand to SEQ ID NO: 2568548
uucucuguaaaugagagcc

SEQ ID NO: 2568550 - RNA, 19 nt, Artificial Sequence
  Description of Artificial Sequence: Synthetic oligonucleotide
  Sense strand starting at position 1890 of SEQ ID NO: 1888954
cgccgaguacaguugugua

SEQ ID NO: 2568551 - RNA, 19 nt, Artificial Sequence
  Description of Artificial Sequence: Synthetic oligonucleotide
  Antisense strand to SEQ ID NO: 2568550
uacacaacuguacucggcg

SEQ ID NO: 2568552 - RNA, 19 nt, Artificial Sequence
  Description of Artificial Sequence: Synthetic oligonucleotide
  Sense strand starting at position 2013 of SEQ ID NO: 1888954
uuggaaacauuccuagugu

SEQ ID NO: 2568553 - RNA, 19 nt, Artificial Sequence
  Description of Artificial Sequence: Synthetic oligonucleotide
  Antisense strand to SEQ ID NO: 2568552
acacuaggaauguuuccaa

SEQ ID NO: 2568554 - RNA, 19 nt, Artificial Sequence
  Description of Artificial Sequence: Synthetic oligonucleotide
  Sense strand starting at position 2020 of SEQ ID NO: 1888954
cauuccuaguguuugagaa

SEQ ID NO: 2568555 - RNA, 19 nt, Artificial Sequence
  Description of Artificial Sequence: Synthetic oligonucleotide
  Antisense strand to SEQ ID NO: 2568554
uucucaaacacuaggaaug

SEQ ID NO: 2568556 - RNA, 19 nt, Artificial Sequence
  Description of Artificial Sequence: Synthetic oligonucleotide
  Sense strand starting at position 2021 of SEQ ID NO: 1888954
auuccuaguguuugagaac

SEQ ID NO: 2568557 - RNA, 19 nt, Artificial Sequence
  Description of Artificial Sequence: Synthetic oligonucleotide
  Antisense strand to SEQ ID NO: 2568556
guucucaaacacuaggaau

SEQ ID NO: 2568558 - RNA, 19 nt, Artificial Sequence
  Description of Artificial Sequence: Synthetic oligonucleotide
  Sense strand starting at position 2060 of SEQ ID NO: 1888954
augagagaaucacuauguu

SEQ ID NO: 2568559 - RNA, 19 nt, Artificial Sequence
  Description of Artificial Sequence: Synthetic oligonucleotide
  Antisense strand to SEQ ID NO: 2568558
aacauagugauucucucau

SEQ ID NO: 2568560 - RNA, 19 nt, Artificial Sequence
  Description of Artificial Sequence: Synthetic oligonucleotide
  Sense strand starting at position 2063 of SEQ ID NO: 1888954
agagaaucacuauguuguc

SEQ ID NO: 2568561 - RNA, 19 nt, Artificial Sequence
  Description of Artificial Sequence: Synthetic oligonucleotide
  Antisense strand to SEQ ID NO: 2568560
gacaacauagugauucucu

SEQ ID NO: 2568562 - RNA, 19 nt, Artificial Sequence
  Description of Artificial Sequence: Synthetic oligonucleotide
  Sense strand starting at position 2129 of SEQ ID NO: 1888954
aagagaauagcauggccau

SEQ ID NO: 2568563 - RNA, 19 nt, Artificial Sequence
  Description of Artificial Sequence: Synthetic oligonucleotide
  Antisense strand to SEQ ID NO: 2568562
auggccaugcuauucucuu

SEQ ID NO: 2568564 - RNA, 19 nt, Artificial Sequence
  Description of Artificial Sequence: Synthetic oligonucleotide
  Sense strand starting at position 2130 of SEQ ID NO: 1888954
agagaauagcauggccaua

SEQ ID NO: 2568565 - RNA, 19 nt, Artificial Sequence
  Description of Artificial Sequence: Synthetic oligonucleotide
  Antisense strand to SEQ ID NO: 2568564
uauggccaugcuauucucu

SEQ ID NO: 2568566 - RNA, 19 nt, Artificial Sequence
  Description of Artificial Sequence: Synthetic oligonucleotide
  Sense strand starting at position 2313 of SEQ ID NO: 1888954
gccuauauggucucgcuca

SEQ ID NO: 2568567 - RNA, 19 nt, Artificial Sequence
  Description of Artificial Sequence: Synthetic oligonucleotide
  Antisense strand to SEQ ID NO: 2568566
ugagcgagaccauauaggc

SEQ ID NO: 2568568 - RNA, 19 nt, Artificial Sequence
  Description of Artificial Sequence: Synthetic oligonucleotide
  Sense strand starting at position 2420 of SEQ ID NO: 1888954
ggcugauacacacaagugu

SEQ ID NO: 2568569 - RNA, 19 nt, Artificial Sequence
  Description of Artificial Sequence: Synthetic oligonucleotide
  Antisense strand to SEQ ID NO: 2568568
acacuuguguguaucagcc

SEQ ID NO: 2568570 - RNA, 19 nt, Artificial Sequence
  Description of Artificial Sequence: Synthetic oligonucleotide
  Sense strand starting at position 2521 of SEQ ID NO: 1888954
gggagugugacccaaucca

SEQ ID NO: 2568571 - RNA, 19 nt, Artificial Sequence
  Description of Artificial Sequence: Synthetic oligonucleotide
  Antisense strand to SEQ ID NO: 2568570
uggauugggucacacuccc

SEQ ID NO: 2568572 - RNA, 19 nt, Artificial Sequence
  Description of Artificial Sequence: Synthetic oligonucleotide
  Sense strand starting at position 2728 of SEQ ID NO: 1888954
gccauaaaggacuggacau

SEQ ID NO: 2568573 - RNA, 19 nt, Artificial Sequence
  Description of Artificial Sequence: Synthetic oligonucleotide
  Antisense strand to SEQ ID NO: 2568572
auguccaguccuuuauggc

SEQ ID NO: 2568574 - RNA, 19 nt, Artificial Sequence
  Description of Artificial Sequence: Synthetic oligonucleotide
  Sense strand starting at position 2791 of SEQ ID NO: 1888954
ccagauguugcguuuguuu

SEQ ID NO: 2568575 - RNA, 19 nt, Artificial Sequence
  Description of Artificial Sequence: Synthetic oligonucleotide
  Antisense strand to SEQ ID NO: 2568574
aaacaaacgcaacaucugg

SEQ ID NO: 2568576 - RNA, 19 nt, Artificial Sequence
  Description of Artificial Sequence: Synthetic oligonucleotide
  Sense strand starting at position 2859 of SEQ ID NO: 1888954
uugcuccaccuggaauauu

SEQ ID NO: 2568577 - RNA, 19 nt, Artificial Sequence
  Description of Artificial Sequence: Synthetic oligonucleotide
  Antisense strand to SEQ ID NO: 2568576
aauauuccagguggagcaa

SEQ ID NO: 2568578 - RNA, 19 nt, Artificial Sequence
  Description of Artificial Sequence: Synthetic oligonucleotide
  Sense strand starting at position 2890 of SEQ ID NO: 1888954
uucugucuccucuagagau

SEQ ID NO: 2568579 - RNA, 19 nt, Artificial Sequence
  Description of Artificial Sequence: Synthetic oligonucleotide
  Antisense strand to SEQ ID NO: 2568578
aucucuagaggagacagaa

SEQ ID NO: 2568580 - RNA, 19 nt, Artificial Sequence
  Description of Artificial Sequence: Synthetic oligonucleotide
  Sense strand starting at position 2944 of SEQ ID NO: 1888954
ucugaacuccauugguauu

SEQ ID NO: 2568581 - RNA, 19 nt, Artificial Sequence
  Description of Artificial Sequence: Synthetic oligonucleotide
  Antisense strand to SEQ ID NO: 2568580
aauaccaauggaguucaga

SEQ ID NO: 2568582 - RNA, 19 nt, Artificial Sequence
  Description of Artificial Sequence: Synthetic oligonucleotide
  Sense strand starting at position 2955 of SEQ ID NO: 1888954
uugguauuuguugguacuu

SEQ ID NO: 2568583 - RNA, 19 nt, Artificial Sequence
  Description of Artificial Sequence: Synthetic oligonucleotide
  Antisense strand to SEQ ID NO: 2568582
aaguaccaacaaauaccaa

SEQ ID NO: 2568584 - RNA, 19 nt, Artificial Sequence
  Description of Artificial Sequence: Synthetic oligonucleotide
  Sense strand starting at position 2956 of SEQ ID NO: 1888954
ugguauuuguugguacuua

SEQ ID NO: 2568585 - RNA, 19 nt, Artificial Sequence
  Description of Artificial Sequence: Synthetic oligonucleotide
  Antisense strand to SEQ ID NO: 2568584
uaaguaccaacaaauacca

SEQ ID NO: 2568586 - RNA, 19 nt, Artificial Sequence
  Description of Artificial Sequence: Synthetic oligonucleotide
  Sense strand starting at position 3017 of SEQ ID NO: 1888954
caauaauggcaguaguuau

SEQ ID NO: 2568587 - RNA, 19 nt, Artificial Sequence
  Description of Artificial Sequence: Synthetic oligonucleotide
  Antisense strand to SEQ ID NO: 2568586
auaacuacugccauuauug

SEQ ID NO: 2568588 - RNA, 19 nt, Artificial Sequence
  Description of Artificial Sequence: Synthetic oligonucleotide
  Sense strand starting at position 3250 of SEQ ID NO: 1888954
ucugauuccagaggucaug

SEQ ID NO: 2568589 - RNA, 19 nt, Artificial Sequence
  Description of Artificial Sequence: Synthetic oligonucleotide
  Antisense strand to SEQ ID NO: 2568588
caugaccucuggaaucaga

SEQ ID NO: 2568590 - RNA, 19 nt, Artificial Sequence
  Description of Artificial Sequence: Synthetic oligonucleotide
  Sense strand starting at position 3253 of SEQ ID NO: 1888954
gauuccagaggucauguuu

SEQ ID NO: 2568591 - RNA, 19 nt, Artificial Sequence
  Description of Artificial Sequence: Synthetic oligonucleotide
  Antisense strand to SEQ ID NO: 2568590
aaacaugaccucuggaauc

SEQ ID NO: 2568592 - RNA, 19 nt, Artificial Sequence
  Description of Artificial Sequence: Synthetic oligonucleotide
  Sense strand starting at position 3586 of SEQ ID NO: 1888954
ugaccugguuaccuugaaa

SEQ ID NO: 2568593 - RNA, 19 nt, Artificial Sequence
  Description of Artificial Sequence: Synthetic oligonucleotide
  Antisense strand to SEQ ID NO: 2568592
uuucaagguaaccagguca

SEQ ID NO: 2568594 - RNA, 19 nt, Artificial Sequence
  Description of Artificial Sequence: Synthetic oligonucleotide
  Sense strand starting at position 3597 of SEQ ID NO: 1888954
ccuugaaacucgucaagaa

SEQ ID NO: 2568595 - RNA, 19 nt, Artificial Sequence
  Description of Artificial Sequence: Synthetic oligonucleotide
  Antisense strand to SEQ ID NO: 2568594
uucuugacgaguuucaagg

SEQ ID NO: 2568596 - RNA, 19 nt, Artificial Sequence
  Description of Artificial Sequence: Synthetic oligonucleotide
  Sense strand starting at position 3750 of SEQ ID NO: 1888954
ugaacucuauggccaaagu

SEQ ID NO: 2568597 - RNA, 19 nt, Artificial Sequence
  Description of Artificial Sequence: Synthetic oligonucleotide
  Antisense strand to SEQ ID NO: 2568596
acuuuggccauagaguuca

SEQ ID NO: 2568598 - RNA, 19 nt, Artificial Sequence
  Description of Artificial Sequence: Synthetic oligonucleotide
  Sense strand starting at position 3751 of SEQ ID NO: 1888954
gaacucuauggccaaaguu

SEQ ID NO: 2568599 - RNA, 19 nt, Artificial Sequence
  Description of Artificial Sequence: Synthetic oligonucleotide
  Antisense strand to SEQ ID NO: 2568598
aacuuuggccauagaguuc

SEQ ID NO: 2568600 - RNA, 19 nt, Artificial Sequence
  Description of Artificial Sequence: Synthetic oligonucleotide
  Sense strand starting at position 3977 of SEQ ID NO: 1888954
cacagugaugcaggacaua

SEQ ID NO: 2568601 - RNA, 19 nt, Artificial Sequence
  Description of Artificial Sequence: Synthetic oligonucleotide
  Antisense strand to SEQ ID NO: 2568600
uauguccugcaucacugug

SEQ ID NO: 2568602 - RNA, 19 nt, Artificial Sequence
  Description of Artificial Sequence: Synthetic oligonucleotide
  Sense strand starting at position 14 of SEQ ID NO: 1888955
aucauuugugcccgucuga

SEQ ID NO: 2568603 - RNA, 19 nt, Artificial Sequence
  Description of Artificial Sequence: Synthetic oligonucleotide
  Antisense strand to SEQ ID NO: 2568602
ucagacgggcacaaaugau

SEQ ID NO: 2568604 - RNA, 19 nt, Artificial Sequence
  Description of Artificial Sequence: Synthetic oligonucleotide
  Sense strand starting at position 172 of SEQ ID NO: 1888955
augcacucaguccauauau

SEQ ID NO: 2568605 - RNA, 19 nt, Artificial Sequence
  Description of Artificial Sequence: Synthetic oligonucleotide
  Antisense strand to SEQ ID NO: 2568604
auauauggacugagugcau

SEQ ID NO: 2568606 - RNA, 19 nt, Artificial Sequence
  Description of Artificial Sequence: Synthetic oligonucleotide
  Sense strand starting at position 209 of SEQ ID NO: 1888955
ggcuccaucucauugaauc

SEQ ID NO: 2568607 - RNA, 19 nt, Artificial Sequence
  Description of Artificial Sequence: Synthetic oligonucleotide
  Antisense strand to SEQ ID NO: 2568606
gauucaaugagauggagcc

SEQ ID NO: 2568608 - RNA, 19 nt, Artificial Sequence
  Description of Artificial Sequence: Synthetic oligonucleotide
  Sense strand starting at position 220 of SEQ ID NO: 1888955
auugaauccuuggcuuaau

SEQ ID NO: 2568609 - RNA, 19 nt, Artificial Sequence
  Description of Artificial Sequence: Synthetic oligonucleotide
  Antisense strand to SEQ ID NO: 2568608
auuaagccaaggauucaau

SEQ ID NO: 2568610 - RNA, 19 nt, Artificial Sequence
  Description of Artificial Sequence: Synthetic oligonucleotide
  Sense strand starting at position 221 of SEQ ID NO: 1888955
uugaauccuuggcuuaaua

SEQ ID NO: 2568611 - RNA, 19 nt, Artificial Sequence
  Description of Artificial Sequence: Synthetic oligonucleotide
  Antisense strand to SEQ ID NO: 2568610
uauuaagccaaggauucaa

SEQ ID NO: 2568612 - RNA, 19 nt, Artificial Sequence
  Description of Artificial Sequence: Synthetic oligonucleotide
  Sense strand starting at position 365 of SEQ ID NO: 1888955
ucuggauaccugcauacau

SEQ ID NO: 2568613 - RNA, 19 nt, Artificial Sequence
  Description of Artificial Sequence: Synthetic oligonucleotide
  Antisense strand to SEQ ID NO: 2568612
auguaugcagguauccaga

SEQ ID NO: 2568614 - RNA, 19 nt, Artificial Sequence
  Description of Artificial Sequence: Synthetic oligonucleotide
  Sense strand starting at position 375 of SEQ ID NO: 1888955
ugcauacauggacauuauu

SEQ ID NO: 2568615 - RNA, 19 nt, Artificial Sequence
  Description of Artificial Sequence: Synthetic oligonucleotide
  Antisense strand to SEQ ID NO: 2568614
aauaauguccauguaugca

SEQ ID NO: 2568616 - RNA, 19 nt, Artificial Sequence
  Description of Artificial Sequence: Synthetic oligonucleotide
  Sense strand starting at position 679 of SEQ ID NO: 1888955
cagagaagguucucuguua

SEQ ID NO: 2568617 - RNA, 19 nt, Artificial Sequence
  Description of Artificial Sequence: Synthetic oligonucleotide
  Antisense strand to SEQ ID NO: 2568616
uaacagagaaccuucucug

SEQ ID NO: 2568618 - RNA, 19 nt, Artificial Sequence
  Description of Artificial Sequence: Synthetic oligonucleotide
  Sense strand starting at position 745 of SEQ ID NO: 1888955
guugggagagggugucaau

SEQ ID NO: 2568619 - RNA, 19 nt, Artificial Sequence
  Description of Artificial Sequence: Synthetic oligonucleotide
  Antisense strand to SEQ ID NO: 2568618
auugacacccucucccaac

SEQ ID NO: 2568620 - RNA, 19 nt, Artificial Sequence
  Description of Artificial Sequence: Synthetic oligonucleotide
  Sense strand starting at position 838 of SEQ ID NO: 1888955
acacauauucuuugaggca

SEQ ID NO: 2568621 - RNA, 19 nt, Artificial Sequence
  Description of Artificial Sequence: Synthetic oligonucleotide
  Antisense strand to SEQ ID NO: 2568620
ugccucaaagaauaugugu

SEQ ID NO: 2568622 - RNA, 19 nt, Artificial Sequence
  Description of Artificial Sequence: Synthetic oligonucleotide
  Sense strand starting at position 919 of SEQ ID NO: 1888955
guacuaagugcucaauacu

SEQ ID NO: 2568623 - RNA, 19 nt, Artificial Sequence
  Description of Artificial Sequence: Synthetic oligonucleotide
  Antisense strand to SEQ ID NO: 2568622
aguauugagcacuuaguac

SEQ ID NO: 2568624 - RNA, 19 nt, Artificial Sequence
  Description of Artificial Sequence: Synthetic oligonucleotide
  Sense strand starting at position 1065 of SEQ ID NO: 1888955
acauuuagguggcaaggau

SEQ ID NO: 2568625 - RNA, 19 nt, Artificial Sequence
  Description of Artificial Sequence: Synthetic oligonucleotide
  Antisense strand to SEQ ID NO: 2568624
auccuugccaccuaaaugu

SEQ ID NO: 2568626 - RNA, 19 nt, Artificial Sequence
  Description of Artificial Sequence: Synthetic oligonucleotide
  Sense strand starting at position 1146 of SEQ ID NO: 1888955
augucugugggagggaaua

SEQ ID NO: 2568627 - RNA, 19 nt, Artificial Sequence
  Description of Artificial Sequence: Synthetic oligonucleotide
  Antisense strand to SEQ ID NO: 2568626
uauucccucccacagacau

SEQ ID NO: 2568628 - RNA, 19 nt, Artificial Sequence
  Description of Artificial Sequence: Synthetic oligonucleotide
  Sense strand starting at position 1217 of SEQ ID NO: 1888955
augacaugaggaugcuuau

SEQ ID NO: 2568629 - RNA, 19 nt, Artificial Sequence
  Description of Artificial Sequence: Synthetic oligonucleotide
  Antisense strand to SEQ ID NO: 2568628
auaagcauccucaugucau

SEQ ID NO: 2568630 - RNA, 19 nt, Artificial Sequence
  Description of Artificial Sequence: Synthetic oligonucleotide
  Sense strand starting at position 1223 of SEQ ID NO: 1888955
ugaggaugcuuauucucca

SEQ ID NO: 2568631 - RNA, 19 nt, Artificial Sequence
  Description of Artificial Sequence: Synthetic oligonucleotide
  Antisense strand to SEQ ID NO: 2568630
uggagaauaagcauccuca

SEQ ID NO: 2568632 - RNA, 19 nt, Artificial Sequence
  Description of Artificial Sequence: Synthetic oligonucleotide
  Sense strand starting at position 1224 of SEQ ID NO: 1888955
gaggaugcuuauucuccau

SEQ ID NO: 2568633 - RNA, 19 nt, Artificial Sequence
  Description of Artificial Sequence: Synthetic oligonucleotide
  Antisense strand to SEQ ID NO: 2568632
auggagaauaagcauccuc

SEQ ID NO: 2568634 - RNA, 19 nt, Artificial Sequence
  Description of Artificial Sequence: Synthetic oligonucleotide
  Sense strand starting at position 1226 of SEQ ID NO: 1888955
ggaugcuuauucuccauga

SEQ ID NO: 2568635 - RNA, 19 nt, Artificial Sequence
  Description of Artificial Sequence: Synthetic oligonucleotide
  Antisense strand to SEQ ID NO: 2568634
ucauggagaauaagcaucc

SEQ ID NO: 2568636 - RNA, 19 nt, Artificial Sequence
  Description of Artificial Sequence: Synthetic oligonucleotide
  Sense strand starting at position 1571 of SEQ ID NO: 1888955
guguguggcaaggaaacuu

SEQ ID NO: 2568637 - RNA, 19 nt, Artificial Sequence
  Description of Artificial Sequence: Synthetic oligonucleotide
  Antisense strand to SEQ ID NO: 2568636
aaguuuccuugccacacac

SEQ ID NO: 2568638 - RNA, 19 nt, Artificial Sequence
  Description of Artificial Sequence: Synthetic oligonucleotide
  Sense strand starting at position 1715 of SEQ ID NO: 1888955
ggcucaauuccugacacac

SEQ ID NO: 2568639 - RNA, 19 nt, Artificial Sequence
  Description of Artificial Sequence: Synthetic oligonucleotide
  Antisense strand to SEQ ID NO: 2568638
gugugucaggaauugagcc

SEQ ID NO: 2568640 - RNA, 19 nt, Artificial Sequence
  Description of Artificial Sequence: Synthetic oligonucleotide
  Sense strand starting at position 1787 of SEQ ID NO: 1888955
auaggaagucccggagaga

SEQ ID NO: 2568641 - RNA, 19 nt, Artificial Sequence
  Description of Artificial Sequence: Synthetic oligonucleotide
  Antisense strand to SEQ ID NO: 2568640
ucucuccgggacuuccuau

SEQ ID NO: 2568642 - RNA, 19 nt, Artificial Sequence
  Description of Artificial Sequence: Synthetic oligonucleotide
  Sense strand starting at position 1802 of SEQ ID NO: 1888955
gagagacacuguccauuau

SEQ ID NO: 2568643 - RNA, 19 nt, Artificial Sequence
  Description of Artificial Sequence: Synthetic oligonucleotide
  Antisense strand to SEQ ID NO: 2568642
auaauggacagugucucuc

SEQ ID NO: 2568644 - RNA, 19 nt, Artificial Sequence
  Description of Artificial Sequence: Synthetic oligonucleotide
  Sense strand starting at position 1883 of SEQ ID NO: 1888955
uuggauuguucagcagaag

SEQ ID NO: 2568645 - RNA, 19 nt, Artificial Sequence
  Description of Artificial Sequence: Synthetic oligonucleotide
  Antisense strand to SEQ ID NO: 2568644
cuucugcugaacaauccaa

SEQ ID NO: 2568646 - RNA, 19 nt, Artificial Sequence
  Description of Artificial Sequence: Synthetic oligonucleotide
  Sense strand starting at position 2106 of SEQ ID NO: 1888955
gagacagauugagauuaaa

SEQ ID NO: 2568647 - RNA, 19 nt, Artificial Sequence
  Description of Artificial Sequence: Synthetic oligonucleotide
  Antisense strand to SEQ ID NO: 2568646
uuuaaucucaaucugucuc

SEQ ID NO: 2568648 - RNA, 19 nt, Artificial Sequence
  Description of Artificial Sequence: Synthetic oligonucleotide
  Sense strand starting at position 2211 of SEQ ID NO: 1888955
cugaaugugugguuaugga

SEQ ID NO: 2568649 - RNA, 19 nt, Artificial Sequence
  Description of Artificial Sequence: Synthetic oligonucleotide
  Antisense strand to SEQ ID NO: 2568648
uccauaaccacacauucag

SEQ ID NO: 2568650 - RNA, 19 nt, Artificial Sequence
  Description of Artificial Sequence: Synthetic oligonucleotide
  Sense strand starting at position 2397 of SEQ ID NO: 1888955
uuaagugagcaucagaauc

SEQ ID NO: 2568651 - RNA, 19 nt, Artificial Sequence
  Description of Artificial Sequence: Synthetic oligonucleotide
  Antisense strand to SEQ ID NO: 2568650
gauucugaugcucacuuaa

SEQ ID NO: 2568652 - RNA, 19 nt, Artificial Sequence
  Description of Artificial Sequence: Synthetic oligonucleotide
  Sense strand starting at position 2405 of SEQ ID NO: 1888955
gcaucagaaucaguugaga

SEQ ID NO: 2568653 - RNA, 19 nt, Artificial Sequence
  Description of Artificial Sequence: Synthetic oligonucleotide
  Antisense strand to SEQ ID NO: 2568652
ucucaacugauucugaugc

SEQ ID NO: 2568654 - RNA, 19 nt, Artificial Sequence
  Description of Artificial Sequence: Synthetic oligonucleotide
  Sense strand starting at position 2416 of SEQ ID NO: 1888955
aguugagagccuugguaaa

SEQ ID NO: 2568655 - RNA, 19 nt, Artificial Sequence
  Description of Artificial Sequence: Synthetic oligonucleotide
  Antisense strand to SEQ ID NO: 2568654
uuuaccaaggcucucaacu

SEQ ID NO: 2568656 - RNA, 19 nt, Artificial Sequence
  Description of Artificial Sequence: Synthetic oligonucleotide
  Sense strand starting at position 2456 of SEQ ID NO: 1888955
gguguaguaggucagggau

SEQ ID NO: 2568657 - RNA, 19 nt, Artificial Sequence
  Description of Artificial Sequence: Synthetic oligonucleotide
  Antisense strand to SEQ ID NO: 2568656
aucccugaccuacuacacc

SEQ ID NO: 2568658 - RNA, 19 nt, Artificial Sequence
  Description of Artificial Sequence: Synthetic oligonucleotide
  Sense strand starting at position 2629 of SEQ ID NO: 1888955
ggaugagauucccucucug

SEQ ID NO: 2568659 - RNA, 19 nt, Artificial Sequence
  Description of Artificial Sequence: Synthetic oligonucleotide
  Antisense strand to SEQ ID NO: 2568658
cagagagggaaucucaucc

SEQ ID NO: 2568660 - RNA, 19 nt, Artificial Sequence
  Description of Artificial Sequence: Synthetic oligonucleotide
  Sense strand starting at position 2850 of SEQ ID NO: 1888955
gugugagaugacugacaag

SEQ ID NO: 2568661 - RNA, 19 nt, Artificial Sequence
  Description of Artificial Sequence: Synthetic oligonucleotide
  Antisense strand to SEQ ID NO: 2568660
cuugucagucaucucacac

SEQ ID NO: 2568662 - RNA, 19 nt, Artificial Sequence
  Description of Artificial Sequence: Synthetic oligonucleotide
  Sense strand starting at position 3092 of SEQ ID NO: 1888955
auacguaugcaugaacaau

SEQ ID NO: 2568663 - RNA, 19 nt, Artificial Sequence
  Description of Artificial Sequence: Synthetic oligonucleotide
  Antisense strand to SEQ ID NO: 2568662
auuguucaugcauacguau

SEQ ID NO: 2568664 - RNA, 19 nt, Artificial Sequence
  Description of Artificial Sequence: Synthetic oligonucleotide
  Sense strand starting at position 3120 of SEQ ID NO: 1888955
ggaaguuccuucucuuaaa

SEQ ID NO: 2568665 - RNA, 19 nt, Artificial Sequence
  Description of Artificial Sequence: Synthetic oligonucleotide
  Antisense strand to SEQ ID NO: 2568664
uuuaagagaaggaacuucc

SEQ ID NO: 2568666 - RNA, 19 nt, Artificial Sequence
  Description of Artificial Sequence: Synthetic oligonucleotide
  Sense strand starting at position 3196 of SEQ ID NO: 1888955
ccaugucuggugcaugaca

SEQ ID NO: 2568667 - RNA, 19 nt, Artificial Sequence
  Description of Artificial Sequence: Synthetic oligonucleotide
  Antisense strand to SEQ ID NO: 2568666
ugucaugcaccagacaugg

SEQ ID NO: 2568668 - RNA, 19 nt, Artificial Sequence
  Description of Artificial Sequence: Synthetic oligonucleotide
  Sense strand starting at position 3229 of SEQ ID NO: 1888955
gcuuguuaaaggugggaau

SEQ ID NO: 2568669 - RNA, 19 nt, Artificial Sequence
  Description of Artificial Sequence: Synthetic oligonucleotide
  Antisense strand to SEQ ID NO: 2568668
auucccaccuuuaacaagc

SEQ ID NO: 2568670 - RNA, 19 nt, Artificial Sequence
  Description of Artificial Sequence: Synthetic oligonucleotide
  Sense strand starting at position 3261 of SEQ ID NO: 1888955
ggauuauaaacagguguuc

SEQ ID NO: 2568671 - RNA, 19 nt, Artificial Sequence
  Description of Artificial Sequence: Synthetic oligonucleotide
  Antisense strand to SEQ ID NO: 2568670
gaacaccuguuuauaaucc

SEQ ID NO: 2568672 - RNA, 19 nt, Artificial Sequence
  Description of Artificial Sequence: Synthetic oligonucleotide
  Sense strand starting at position 3274 of SEQ ID NO: 1888955
guguucuucgcucuaugca

SEQ ID NO: 2568673 - RNA, 19 nt, Artificial Sequence
  Description of Artificial Sequence: Synthetic oligonucleotide
  Antisense strand to SEQ ID NO: 2568672
ugcauagagcgaagaacac

SEQ ID NO: 2568674 - RNA, 19 nt, Artificial Sequence
  Description of Artificial Sequence: Synthetic oligonucleotide
  Sense strand starting at position 3715 of SEQ ID NO: 1888955
gugucugguguacaaggau

SEQ ID NO: 2568675 - RNA, 19 nt, Artificial Sequence
  Description of Artificial Sequence: Synthetic oligonucleotide
  Antisense strand to SEQ ID NO: 2568674
auccuuguacaccagacac

SEQ ID NO: 2568676 - RNA, 19 nt, Artificial Sequence
  Description of Artificial Sequence: Synthetic oligonucleotide
  Sense strand starting at position 3875 of SEQ ID NO: 1888955
gagucccuaccagaaugua

SEQ ID NO: 2568677 - RNA, 19 nt, Artificial Sequence
  Description of Artificial Sequence: Synthetic oligonucleotide
  Antisense strand to SEQ ID NO: 2568676
uacauucugguagggacuc

SEQ ID NO: 2568678 - RNA, 19 nt, Artificial Sequence
  Description of Artificial Sequence: Synthetic oligonucleotide
  Sense strand starting at position 3946 of SEQ ID NO: 1888955
auaccugcugucuaauaga

SEQ ID NO: 2568679 - RNA, 19 nt, Artificial Sequence
  Description of Artificial Sequence: Synthetic oligonucleotide
  Antisense strand to SEQ ID NO: 2568678
ucuauuagacagcagguau

SEQ ID NO: 2568680 - RNA, 19 nt, Artificial Sequence
  Description of Artificial Sequence: Synthetic oligonucleotide
  Sense strand starting at position 3966 of SEQ ID NO: 1888955
acuugaguaucuguggaag

SEQ ID NO: 2568681 - RNA, 19 nt, Artificial Sequence
  Description of Artificial Sequence: Synthetic oligonucleotide
  Antisense strand to SEQ ID NO: 2568680
cuuccacagauacucaagu

SEQ ID NO: 2568682 - RNA, 19 nt, Artificial Sequence
  Description of Artificial Sequence: Synthetic oligonucleotide
  Sense strand starting at position 1 of SEQ ID NO: 1888956
gccaccucacugugcuaua

SEQ ID NO: 2568683 - RNA, 19 nt, Artificial Sequence
  Description of Artificial Sequence: Synthetic oligonucleotide
  Antisense strand to SEQ ID NO: 2568682
uauagcacagugagguggc

SEQ ID NO: 2568684 - RNA, 19 nt, Artificial Sequence
  Description of Artificial Sequence: Synthetic oligonucleotide
  Sense strand starting at position 85 of SEQ ID NO: 1888956
ucuagagacucacaaguau

SEQ ID NO: 2568685 - RNA, 19 nt, Artificial Sequence
  Description of Artificial Sequence: Synthetic oligonucleotide
  Antisense strand to SEQ ID NO: 2568684
auacuugugagucucuaga

SEQ ID NO: 2568686 - RNA, 19 nt, Artificial Sequence
  Description of Artificial Sequence: Synthetic oligonucleotide
  Sense strand starting at position 466 of SEQ ID NO: 1888956
uccuccuuaugaggagaaa

SEQ ID NO: 2568687 - RNA, 19 nt, Artificial Sequence
  Description of Artificial Sequence: Synthetic oligonucleotide
  Antisense strand to SEQ ID NO: 2568686
uuucuccucauaaggagga

SEQ ID NO: 2568688 - RNA, 19 nt, Artificial Sequence
  Description of Artificial Sequence: Synthetic oligonucleotide
  Sense strand starting at position 495 of SEQ ID NO: 1888956
acuggagauccaggcaaua

SEQ ID NO: 2568689 - RNA, 19 nt, Artificial Sequence
  Description of Artificial Sequence: Synthetic oligonucleotide
  Antisense strand to SEQ ID NO: 2568688
uauugccuggaucuccagu

SEQ ID NO: 2568690 - RNA, 19 nt, Artificial Sequence
  Description of Artificial Sequence: Synthetic oligonucleotide
  Sense strand starting at position 511 of SEQ ID NO: 1888956
auaacaggcucuuaaagaa

SEQ ID NO: 2568691 - RNA, 19 nt, Artificial Sequence
  Description of Artificial Sequence: Synthetic oligonucleotide
  Antisense strand to SEQ ID NO: 2568690
uucuuuaagagccuguuau

SEQ ID NO: 2568692 - RNA, 19 nt, Artificial Sequence
  Description of Artificial Sequence: Synthetic oligonucleotide
  Sense strand starting at position 542 of SEQ ID NO: 1888956
auuacugagcccuguugaa

SEQ ID NO: 2568693 - RNA, 19 nt, Artificial Sequence
  Description of Artificial Sequence: Synthetic oligonucleotide
  Antisense strand to SEQ ID NO: 2568692
uucaacagggcucaguaau

SEQ ID NO: 2568694 - RNA, 19 nt, Artificial Sequence
  Description of Artificial Sequence: Synthetic oligonucleotide
  Sense strand starting at position 572 of SEQ ID NO: 1888956
aaagucuuggugcagaauu

SEQ ID NO: 2568695 - RNA, 19 nt, Artificial Sequence
  Description of Artificial Sequence: Synthetic oligonucleotide
  Antisense strand to SEQ ID NO: 2568694
aauucugcaccaagacuuu

SEQ ID NO: 2568696 - RNA, 19 nt, Artificial Sequence
  Description of Artificial Sequence: Synthetic oligonucleotide
  Sense strand starting at position 725 of SEQ ID NO: 1888956
agaagccaaugguuugaua

SEQ ID NO: 2568697 - RNA, 19 nt, Artificial Sequence
  Description of Artificial Sequence: Synthetic oligonucleotide
  Antisense strand to SEQ ID NO: 2568696
uaucaaaccauuggcuucu

SEQ ID NO: 2568698 - RNA, 19 nt, Artificial Sequence
  Description of Artificial Sequence: Synthetic oligonucleotide
  Sense strand starting at position 727 of SEQ ID NO: 1888956
aagccaaugguuugauaag

SEQ ID NO: 2568699 - RNA, 19 nt, Artificial Sequence
  Description of Artificial Sequence: Synthetic oligonucleotide
  Antisense strand to SEQ ID NO: 2568698
cuuaucaaaccauuggcuu

SEQ ID NO: 2568700 - RNA, 19 nt, Artificial Sequence
  Description of Artificial Sequence: Synthetic oligonucleotide
  Sense strand starting at position 758 of SEQ ID NO: 1888956
cauuuauguuguccacugu

SEQ ID NO: 2568701 - RNA, 19 nt, Artificial Sequence
  Description of Artificial Sequence: Synthetic oligonucleotide
  Antisense strand to SEQ ID NO: 2568700
acaguggacaacauaaaug

SEQ ID NO: 2568702 - RNA, 19 nt, Artificial Sequence
  Description of Artificial Sequence: Synthetic oligonucleotide
  Sense strand starting at position 798 of SEQ ID NO: 1888956
cuauuauggugccaucuuu

SEQ ID NO: 2568703 - RNA, 19 nt, Artificial Sequence
  Description of Artificial Sequence: Synthetic oligonucleotide
  Antisense strand to SEQ ID NO: 2568702
aaagauggcaccauaauag

SEQ ID NO: 2568704 - RNA, 19 nt, Artificial Sequence
  Description of Artificial Sequence: Synthetic oligonucleotide
  Sense strand starting at position 965 of SEQ ID NO: 1888956
aggccaacucucugaucau

SEQ ID NO: 2568705 - RNA, 19 nt, Artificial Sequence
  Description of Artificial Sequence: Synthetic oligonucleotide
  Antisense strand to SEQ ID NO: 2568704
augaucagagaguuggccu

SEQ ID NO: 2568706 - RNA, 19 nt, Artificial Sequence
  Description of Artificial Sequence: Synthetic oligonucleotide
  Sense strand starting at position 966 of SEQ ID NO: 1888956
ggccaacucucugaucauc

SEQ ID NO: 2568707 - RNA, 19 nt, Artificial Sequence
  Description of Artificial Sequence: Synthetic oligonucleotide
  Antisense strand to SEQ ID NO: 2568706
gaugaucagagaguuggcc

SEQ ID NO: 2568708 - RNA, 19 nt, Artificial Sequence
  Description of Artificial Sequence: Synthetic oligonucleotide
  Sense strand starting at position 1113 of SEQ ID NO: 1888956
ggccuaaugugccuuauuu

SEQ ID NO: 2568709 - RNA, 19 nt, Artificial Sequence
  Description of Artificial Sequence: Synthetic oligonucleotide
  Antisense strand to SEQ ID NO: 2568708
aaauaaggcacauuaggcc

SEQ ID NO: 2568710 - RNA, 19 nt, Artificial Sequence
  Description of Artificial Sequence: Synthetic oligonucleotide
  Sense strand starting at position 1166 of SEQ ID NO: 1888956
uuaauauacuugguuugga

SEQ ID NO: 2568711 - RNA, 19 nt, Artificial Sequence
  Description of Artificial Sequence: Synthetic oligonucleotide
  Antisense strand to SEQ ID NO: 2568710
uccaaaccaaguauauuaa

SEQ ID NO: 2568712 - RNA, 19 nt, Artificial Sequence
  Description of Artificial Sequence: Synthetic oligonucleotide
  Sense strand starting at position 1230 of SEQ ID NO: 1888956
aagccucaucuuuggagua

SEQ ID NO: 2568713 - RNA, 19 nt, Artificial Sequence
  Description of Artificial Sequence: Synthetic oligonucleotide
  Antisense strand to SEQ ID NO: 2568712
uacuccaaagaugaggcuu

SEQ ID NO: 2568714 - RNA, 19 nt, Artificial Sequence
  Description of Artificial Sequence: Synthetic oligonucleotide
  Sense strand starting at position 1242 of SEQ ID NO: 1888956
uggaguacguucuuuccaa

SEQ ID NO: 2568715 - RNA, 19 nt, Artificial Sequence
  Description of Artificial Sequence: Synthetic oligonucleotide
  Antisense strand to SEQ ID NO: 2568714
uuggaaagaacguacucca

SEQ ID NO: 2568716 - RNA, 19 nt, Artificial Sequence
  Description of Artificial Sequence: Synthetic oligonucleotide
  Sense strand starting at position 1243 of SEQ ID NO: 1888956
ggaguacguucuuuccaaa

SEQ ID NO: 2568717 - RNA, 19 nt, Artificial Sequence
  Description of Artificial Sequence: Synthetic oligonucleotide
  Antisense strand to SEQ ID NO: 2568716
uuuggaaagaacguacucc

SEQ ID NO: 2568718 - RNA, 19 nt, Artificial Sequence
  Description of Artificial Sequence: Synthetic oligonucleotide
  Sense strand starting at position 1246 of SEQ ID NO: 1888956
guacguucuuuccaaauau

SEQ ID NO: 2568719 - RNA, 19 nt, Artificial Sequence
  Description of Artificial Sequence: Synthetic oligonucleotide
  Antisense strand to SEQ ID NO: 2568718
auauuuggaaagaacguac

SEQ ID NO: 2568720 - RNA, 19 nt, Artificial Sequence
  Description of Artificial Sequence: Synthetic oligonucleotide
  Sense strand starting at position 1459 of SEQ ID NO: 1888956
ucaguuuauuuguaucuca

SEQ ID NO: 2568721 - RNA, 19 nt, Artificial Sequence
  Description of Artificial Sequence: Synthetic oligonucleotide
  Antisense strand to SEQ ID NO: 2568720
ugagauacaaauaaacuga

SEQ ID NO: 2568722 - RNA, 19 nt, Artificial Sequence
  Description of Artificial Sequence: Synthetic oligonucleotide
  Sense strand starting at position 2338 of SEQ ID NO: 1888956
auacaucacugguugagaa

SEQ ID NO: 2568723 - RNA, 19 nt, Artificial Sequence
  Description of Artificial Sequence: Synthetic oligonucleotide
  Antisense strand to SEQ ID NO: 2568722
uucucaaccagugauguau

SEQ ID NO: 2568724 - RNA, 19 nt, Artificial Sequence
  Description of Artificial Sequence: Synthetic oligonucleotide
  Sense strand starting at position 2339 of SEQ ID NO: 1888956
uacaucacugguugagaaa

SEQ ID NO: 2568725 - RNA, 19 nt, Artificial Sequence
  Description of Artificial Sequence: Synthetic oligonucleotide
  Antisense strand to SEQ ID NO: 2568724
uuucucaaccagugaugua

SEQ ID NO: 2568726 - RNA, 19 nt, Artificial Sequence
  Description of Artificial Sequence: Synthetic oligonucleotide
  Sense strand starting at position 2346 of SEQ ID NO: 1888956
cugguugagaaaugcaguu

SEQ ID NO: 2568727 - RNA, 19 nt, Artificial Sequence
  Description of Artificial Sequence: Synthetic oligonucleotide
  Antisense strand to SEQ ID NO: 2568726
aacugcauuucucaaccag

SEQ ID NO: 2568728 - RNA, 19 nt, Artificial Sequence
  Description of Artificial Sequence: Synthetic oligonucleotide
  Sense strand starting at position 2348 of SEQ ID NO: 1888956
gguugagaaaugcaguuau

SEQ ID NO: 2568729 - RNA, 19 nt, Artificial Sequence
  Description of Artificial Sequence: Synthetic oligonucleotide
  Antisense strand to SEQ ID NO: 2568728
auaacugcauuucucaacc

SEQ ID NO: 2568730 - RNA, 19 nt, Artificial Sequence
  Description of Artificial Sequence: Synthetic oligonucleotide
  Sense strand starting at position 2417 of SEQ ID NO: 1888956
auaagcauuugcuguaaag

SEQ ID NO: 2568731 - RNA, 19 nt, Artificial Sequence
  Description of Artificial Sequence: Synthetic oligonucleotide
  Antisense strand to SEQ ID NO: 2568730
cuuuacagcaaaugcuuau

SEQ ID NO: 2568732 - RNA, 19 nt, Artificial Sequence
  Description of Artificial Sequence: Synthetic oligonucleotide
  Sense strand starting at position 2428 of SEQ ID NO: 1888956
cuguaaagaucuguaauuc

SEQ ID NO: 2568733 - RNA, 19 nt, Artificial Sequence
  Description of Artificial Sequence: Synthetic oligonucleotide
  Antisense strand to SEQ ID NO: 2568732
gaauuacagaucuuuacag

SEQ ID NO: 2568734 - RNA, 19 nt, Artificial Sequence
  Description of Artificial Sequence: Synthetic oligonucleotide
  Sense strand starting at position 2429 of SEQ ID NO: 1888956
uguaaagaucuguaauucu

SEQ ID NO: 2568735 - RNA, 19 nt, Artificial Sequence
  Description of Artificial Sequence: Synthetic oligonucleotide
  Antisense strand to SEQ ID NO: 2568734
agaauuacagaucuuuaca

SEQ ID NO: 2568736 - RNA, 19 nt, Artificial Sequence
  Description of Artificial Sequence: Synthetic oligonucleotide
  Sense strand starting at position 2757 of SEQ ID NO: 1888956
cuguaauucugauauuagc

SEQ ID NO: 2568737 - RNA, 19 nt, Artificial Sequence
  Description of Artificial Sequence: Synthetic oligonucleotide
  Antisense strand to SEQ ID NO: 2568736
gcuaauaucagaauuacag

SEQ ID NO: 2568738 - RNA, 19 nt, Artificial Sequence
  Description of Artificial Sequence: Synthetic oligonucleotide
  Sense strand starting at position 2763 of SEQ ID NO: 1888956
uucugauauuagcagaauu

SEQ ID NO: 2568739 - RNA, 19 nt, Artificial Sequence
  Description of Artificial Sequence: Synthetic oligonucleotide
  Antisense strand to SEQ ID NO: 2568738
aauucugcuaauaucagaa

SEQ ID NO: 2568740 - RNA, 19 nt, Artificial Sequence
  Description of Artificial Sequence: Synthetic oligonucleotide
  Sense strand starting at position 2788 of SEQ ID NO: 1888956
acuuaaguugcagguauau

SEQ ID NO: 2568741 - RNA, 19 nt, Artificial Sequence
  Description of Artificial Sequence: Synthetic oligonucleotide
  Antisense strand to SEQ ID NO: 2568740
auauaccugcaacuuaagu

SEQ ID NO: 2568742 - RNA, 19 nt, Artificial Sequence
  Description of Artificial Sequence: Synthetic oligonucleotide
  Sense strand starting at position 2840 of SEQ ID NO: 1888956
uuggcauugucuuaaauuu

SEQ ID NO: 2568743 - RNA, 19 nt, Artificial Sequence
  Description of Artificial Sequence: Synthetic oligonucleotide
  Antisense strand to SEQ ID NO: 2568742
aaauuuaagacaaugccaa

SEQ ID NO: 2568744 - RNA, 19 nt, Artificial Sequence
  Description of Artificial Sequence: Synthetic oligonucleotide
  Sense strand starting at position 3161 of SEQ ID NO: 1888956
agaacagaauccugaagaa

SEQ ID NO: 2568745 - RNA, 19 nt, Artificial Sequence
  Description of Artificial Sequence: Synthetic oligonucleotide
  Antisense strand to SEQ ID NO: 2568744
uucuucaggauucuguucu

SEQ ID NO: 2568746 - RNA, 19 nt, Artificial Sequence
  Description of Artificial Sequence: Synthetic oligonucleotide
  Sense strand starting at position 3327 of SEQ ID NO: 1888956
cagaguuucuagggccuaa

SEQ ID NO: 2568747 - RNA, 19 nt, Artificial Sequence
  Description of Artificial Sequence: Synthetic oligonucleotide
  Antisense strand to SEQ ID NO: 2568746
uuaggcccuagaaacucug

SEQ ID NO: 2568748 - RNA, 19 nt, Artificial Sequence
  Description of Artificial Sequence: Synthetic oligonucleotide
  Sense strand starting at position 3483 of SEQ ID NO: 1888956
ggcucagagauccaaguca

SEQ ID NO: 2568749 - RNA, 19 nt, Artificial Sequence
  Description of Artificial Sequence: Synthetic oligonucleotide
  Antisense strand to SEQ ID NO: 2568748
ugacuuggaucucugagcc

SEQ ID NO: 2568750 - RNA, 19 nt, Artificial Sequence
  Description of Artificial Sequence: Synthetic oligonucleotide
  Sense strand starting at position 3507 of SEQ ID NO: 1888956
ggguguccucccuacaauu

SEQ ID NO: 2568751 - RNA, 19 nt, Artificial Sequence
  Description of Artificial Sequence: Synthetic oligonucleotide
  Antisense strand to SEQ ID NO: 2568750
aauuguagggaggacaccc

SEQ ID NO: 2568752 - RNA, 19 nt, Artificial Sequence
  Description of Artificial Sequence: Synthetic oligonucleotide
  Sense strand starting at position 256 of SEQ ID NO: 1888957
ugugcacugucuucucaau

SEQ ID NO: 2568753 - RNA, 19 nt, Artificial Sequence
  Description of Artificial Sequence: Synthetic oligonucleotide
  Antisense strand to SEQ ID NO: 2568752
auugagaagacagugcaca

SEQ ID NO: 2568754 - RNA, 19 nt, Artificial Sequence
  Description of Artificial Sequence: Synthetic oligonucleotide
  Sense strand starting at position 262 of SEQ ID NO: 1888957
cugucuucucaauaauguc

SEQ ID NO: 2568755 - RNA, 19 nt, Artificial Sequence
  Description of Artificial Sequence: Synthetic oligonucleotide
  Antisense strand to SEQ ID NO: 2568754
gacauuauugagaagacag

SEQ ID NO: 2568756 - RNA, 19 nt, Artificial Sequence
  Description of Artificial Sequence: Synthetic oligonucleotide
  Sense strand starting at position 309 of SEQ ID NO: 1888957
ugaucugaguuauaauuuc

SEQ ID NO: 2568757 - RNA, 19 nt, Artificial Sequence
  Description of Artificial Sequence: Synthetic oligonucleotide
  Antisense strand to SEQ ID NO: 2568756
gaaauuauaacucagauca

SEQ ID NO: 2568758 - RNA, 19 nt, Artificial Sequence
  Description of Artificial Sequence: Synthetic oligonucleotide
  Sense strand starting at position 350 of SEQ ID NO: 1888957
aguuaagaacuacauguuu

SEQ ID NO: 2568759 - RNA, 19 nt, Artificial Sequence
  Description of Artificial Sequence: Synthetic oligonucleotide
  Antisense strand to SEQ ID NO: 2568758
aaacauguaguucuuaacu

SEQ ID NO: 2568760 - RNA, 19 nt, Artificial Sequence
  Description of Artificial Sequence: Synthetic oligonucleotide
  Sense strand starting at position 395 of SEQ ID NO: 1888957
acagaauaucuugguggua

SEQ ID NO: 2568761 - RNA, 19 nt, Artificial Sequence
  Description of Artificial Sequence: Synthetic oligonucleotide
  Antisense strand to SEQ ID NO: 2568760
uaccaccaagauauucugu

SEQ ID NO: 2568762 - RNA, 19 nt, Artificial Sequence
  Description of Artificial Sequence: Synthetic oligonucleotide
  Sense strand starting at position 398 of SEQ ID NO: 1888957
gaauaucuuggugguaagu

SEQ ID NO: 2568763 - RNA, 19 nt, Artificial Sequence
  Description of Artificial Sequence: Synthetic oligonucleotide
  Antisense strand to SEQ ID NO: 2568762
acuuaccaccaagauauuc

SEQ ID NO: 2568764 - RNA, 19 nt, Artificial Sequence
  Description of Artificial Sequence: Synthetic oligonucleotide
  Sense strand starting at position 430 of SEQ ID NO: 1888957
agggaaagguuuccucacu

SEQ ID NO: 2568765 - RNA, 19 nt, Artificial Sequence
  Description of Artificial Sequence: Synthetic oligonucleotide
  Antisense strand to SEQ ID NO: 2568764
agugaggaaaccuuucccu

SEQ ID NO: 2568766 - RNA, 19 nt, Artificial Sequence
  Description of Artificial Sequence: Synthetic oligonucleotide
  Sense strand starting at position 572 of SEQ ID NO: 1888957
accagaguacccuaguguu

SEQ ID NO: 2568767 - RNA, 19 nt, Artificial Sequence
  Description of Artificial Sequence: Synthetic oligonucleotide
  Antisense strand to SEQ ID NO: 2568766
aacacuaggguacucuggu

SEQ ID NO: 2568768 - RNA, 19 nt, Artificial Sequence
  Description of Artificial Sequence: Synthetic oligonucleotide
  Sense strand starting at position 844 of SEQ ID NO: 1888957
acuguucugucuuuggauu

SEQ ID NO: 2568769 - RNA, 19 nt, Artificial Sequence
  Description of Artificial Sequence: Synthetic oligonucleotide
  Antisense strand to SEQ ID NO: 2568768
aauccaaagacagaacagu

SEQ ID NO: 2568770 - RNA, 19 nt, Artificial Sequence
  Description of Artificial Sequence: Synthetic oligonucleotide
  Sense strand starting at position 850 of SEQ ID NO: 1888957
cugucuuuggauugauucu

SEQ ID NO: 2568771 - RNA, 19 nt, Artificial Sequence
  Description of Artificial Sequence: Synthetic oligonucleotide
  Antisense strand to SEQ ID NO: 2568770
agaaucaauccaaagacag

SEQ ID NO: 2568772 - RNA, 19 nt, Artificial Sequence
  Description of Artificial Sequence: Synthetic oligonucleotide
  Sense strand starting at position 856 of SEQ ID NO: 1888957
uuggauugauucuccucuu

SEQ ID NO: 2568773 - RNA, 19 nt, Artificial Sequence
  Description of Artificial Sequence: Synthetic oligonucleotide
  Antisense strand to SEQ ID NO: 2568772
aagaggagaaucaauccaa

SEQ ID NO: 2568774 - RNA, 19 nt, Artificial Sequence
  Description of Artificial Sequence: Synthetic oligonucleotide
  Sense strand starting at position 857 of SEQ ID NO: 1888957
uggauugauucuccucuuu

SEQ ID NO: 2568775 - RNA, 19 nt, Artificial Sequence
  Description of Artificial Sequence: Synthetic oligonucleotide
  Antisense strand to SEQ ID NO: 2568774
aaagaggagaaucaaucca

SEQ ID NO: 2568776 - RNA, 19 nt, Artificial Sequence
  Description of Artificial Sequence: Synthetic oligonucleotide
  Sense strand starting at position 904 of SEQ ID NO: 1888957
gggccaguuucauugcaag

SEQ ID NO: 2568777 - RNA, 19 nt, Artificial Sequence
  Description of Artificial Sequence: Synthetic oligonucleotide
  Antisense strand to SEQ ID NO: 2568776
cuugcaaugaaacuggccc

SEQ ID NO: 2568778 - RNA, 19 nt, Artificial Sequence
  Description of Artificial Sequence: Synthetic oligonucleotide
  Sense strand starting at position 956 of SEQ ID NO: 1888957
aauggaagcugcuuugaaa

SEQ ID NO: 2568779 - RNA, 19 nt, Artificial Sequence
  Description of Artificial Sequence: Synthetic oligonucleotide
  Antisense strand to SEQ ID NO: 2568778
uuucaaagcagcuuccauu

SEQ ID NO: 2568780 - RNA, 19 nt, Artificial Sequence
  Description of Artificial Sequence: Synthetic oligonucleotide
  Sense strand starting at position 978 of SEQ ID NO: 1888957
cuaaauggucaggguacua

SEQ ID NO: 2568781 - RNA, 19 nt, Artificial Sequence
  Description of Artificial Sequence: Synthetic oligonucleotide
  Antisense strand to SEQ ID NO: 2568780
uaguacccugaccauuuag

SEQ ID NO: 2568782 - RNA, 19 nt, Artificial Sequence
  Description of Artificial Sequence: Synthetic oligonucleotide
  Sense strand starting at position 1058 of SEQ ID NO: 1888957
uucccugacucuuugggaa

SEQ ID NO: 2568783 - RNA, 19 nt, Artificial Sequence
  Description of Artificial Sequence: Synthetic oligonucleotide
  Antisense strand to SEQ ID NO: 2568782
uucccaaagagucagggaa

SEQ ID NO: 2568784 - RNA, 19 nt, Artificial Sequence
  Description of Artificial Sequence: Synthetic oligonucleotide
  Sense strand starting at position 1062 of SEQ ID NO: 1888957
cugacucuuugggaaauca

SEQ ID NO: 2568785 - RNA, 19 nt, Artificial Sequence
  Description of Artificial Sequence: Synthetic oligonucleotide
  Antisense strand to SEQ ID NO: 2568784
ugauuucccaaagagucag

SEQ ID NO: 2568786 - RNA, 19 nt, Artificial Sequence
  Description of Artificial Sequence: Synthetic oligonucleotide
  Sense strand starting at position 1705 of SEQ ID NO: 1888957
gauagucacuaggagggau

SEQ ID NO: 2568787 - RNA, 19 nt, Artificial Sequence
  Description of Artificial Sequence: Synthetic oligonucleotide
  Antisense strand to SEQ ID NO: 2568786
aucccuccuagugacuauc

SEQ ID NO: 2568788 - RNA, 19 nt, Artificial Sequence
  Description of Artificial Sequence: Synthetic oligonucleotide
  Sense strand starting at position 1993 of SEQ ID NO: 1888957
gagucaugcguucagguga

SEQ ID NO: 2568789 - RNA, 19 nt, Artificial Sequence
  Description of Artificial Sequence: Synthetic oligonucleotide
  Antisense strand to SEQ ID NO: 2568788
ucaccugaacgcaugacuc

SEQ ID NO: 2568790 - RNA, 19 nt, Artificial Sequence
  Description of Artificial Sequence: Synthetic oligonucleotide
  Sense strand starting at position 1998 of SEQ ID NO: 1888957
augcguucaggugagaauc

SEQ ID NO: 2568791 - RNA, 19 nt, Artificial Sequence
  Description of Artificial Sequence: Synthetic oligonucleotide
  Antisense strand to SEQ ID NO: 2568790
gauucucaccugaacgcau

SEQ ID NO: 2568792 - RNA, 19 nt, Artificial Sequence
  Description of Artificial Sequence: Synthetic oligonucleotide
  Sense strand starting at position 2006 of SEQ ID NO: 1888957
aggugagaaucugauauga

SEQ ID NO: 2568793 - RNA, 19 nt, Artificial Sequence
  Description of Artificial Sequence: Synthetic oligonucleotide
  Antisense strand to SEQ ID NO: 2568792
ucauaucagauucucaccu

SEQ ID NO: 2568794 - RNA, 19 nt, Artificial Sequence
  Description of Artificial Sequence: Synthetic oligonucleotide
  Sense strand starting at position 2008 of SEQ ID NO: 1888957
gugagaaucugauaugaag

SEQ ID NO: 2568795 - RNA, 19 nt, Artificial Sequence
  Description of Artificial Sequence: Synthetic oligonucleotide
  Antisense strand to SEQ ID NO: 2568794
cuucauaucagauucucac

SEQ ID NO: 2568796 - RNA, 19 nt, Artificial Sequence
  Description of Artificial Sequence: Synthetic oligonucleotide
  Sense strand starting at position 2099 of SEQ ID NO: 1888957
gucacuuccuuaucaugau

SEQ ID NO: 2568797 - RNA, 19 nt, Artificial Sequence
  Description of Artificial Sequence: Synthetic oligonucleotide
  Antisense strand to SEQ ID NO: 2568796
aucaugauaaggaagugac

SEQ ID NO: 2568798 - RNA, 19 nt, Artificial Sequence
  Description of Artificial Sequence: Synthetic oligonucleotide
  Sense strand starting at position 2594 of SEQ ID NO: 1888957
ggaaauuacuucuaaggaa

SEQ ID NO: 2568799 - RNA, 19 nt, Artificial Sequence
  Description of Artificial Sequence: Synthetic oligonucleotide
  Antisense strand to SEQ ID NO: 2568798
uuccuuagaaguaauuucc

SEQ ID NO: 2568800 - RNA, 19 nt, Artificial Sequence
  Description of Artificial Sequence: Synthetic oligonucleotide
  Sense strand starting at position 2652 of SEQ ID NO: 1888957
guguuucuaacauaguuag

SEQ ID NO: 2568801 - RNA, 19 nt, Artificial Sequence
  Description of Artificial Sequence: Synthetic oligonucleotide
  Antisense strand to SEQ ID NO: 2568800
cuaacuauguuagaaacac

SEQ ID NO: 2568802 - RNA, 19 nt, Artificial Sequence
  Description of Artificial Sequence: Synthetic oligonucleotide
  Sense strand starting at position 2828 of SEQ ID NO: 1888957
acauuaaaccacugucagu

SEQ ID NO: 2568803 - RNA, 19 nt, Artificial Sequence
  Description of Artificial Sequence: Synthetic oligonucleotide
  Antisense strand to SEQ ID NO: 2568802
acugacagugguuuaaugu

SEQ ID NO: 2568804 - RNA, 19 nt, Artificial Sequence
  Description of Artificial Sequence: Synthetic oligonucleotide
  Sense strand starting at position 2935 of SEQ ID NO: 1888957
gcaacaaacguggaaugau

SEQ ID NO: 2568805 - RNA, 19 nt, Artificial Sequence
  Description of Artificial Sequence: Synthetic oligonucleotide
  Antisense strand to SEQ ID NO: 2568804
aucauuccacguuuguugc

SEQ ID NO: 2568806 - RNA, 19 nt, Artificial Sequence
  Description of Artificial Sequence: Synthetic oligonucleotide
  Sense strand starting at position 2944 of SEQ ID NO: 1888957
guggaaugaucucuaacua

SEQ ID NO: 2568807 - RNA, 19 nt, Artificial Sequence
  Description of Artificial Sequence: Synthetic oligonucleotide
  Antisense strand to SEQ ID NO: 2568806
uaguuagagaucauuccac

SEQ ID NO: 2568808 - RNA, 19 nt, Artificial Sequence
  Description of Artificial Sequence: Synthetic oligonucleotide
  Sense strand starting at position 2964 of SEQ ID NO: 1888957
aagagcaggcccuauuaga

SEQ ID NO: 2568809 - RNA, 19 nt, Artificial Sequence
  Description of Artificial Sequence: Synthetic oligonucleotide
  Antisense strand to SEQ ID NO: 2568808
ucuaauagggccugcucuu

SEQ ID NO: 2568810 - RNA, 19 nt, Artificial Sequence
  Description of Artificial Sequence: Synthetic oligonucleotide
  Sense strand starting at position 2971 of SEQ ID NO: 1888957
ggcccuauuagagaucagu

SEQ ID NO: 2568811 - RNA, 19 nt, Artificial Sequence
  Description of Artificial Sequence: Synthetic oligonucleotide
  Antisense strand to SEQ ID NO: 2568810
acugaucucuaauagggcc

SEQ ID NO: 2568812 - RNA, 19 nt, Artificial Sequence
  Description of Artificial Sequence: Synthetic oligonucleotide
  Sense strand starting at position 2985 of SEQ ID NO: 1888957
ucaguaaagucucuaaccu

SEQ ID NO: 2568813 - RNA, 19 nt, Artificial Sequence
  Description of Artificial Sequence: Synthetic oligonucleotide
  Antisense strand to SEQ ID NO: 2568812
agguuagagacuuuacuga

SEQ ID NO: 2568814 - RNA, 19 nt, Artificial Sequence
  Description of Artificial Sequence: Synthetic oligonucleotide
  Sense strand starting at position 3050 of SEQ ID NO: 1888957
aaaccaaugucuguguaga

SEQ ID NO: 2568815 - RNA, 19 nt, Artificial Sequence
  Description of Artificial Sequence: Synthetic oligonucleotide
  Antisense strand to SEQ ID NO: 2568814
ucuacacagacauugguuu

SEQ ID NO: 2568816 - RNA, 19 nt, Artificial Sequence
  Description of Artificial Sequence: Synthetic oligonucleotide
  Sense strand starting at position 3051 of SEQ ID NO: 1888957
aaccaaugucuguguagac

SEQ ID NO: 2568817 - RNA, 19 nt, Artificial Sequence
  Description of Artificial Sequence: Synthetic oligonucleotide
  Antisense strand to SEQ ID NO: 2568816
gucuacacagacauugguu

SEQ ID NO: 2568818 - RNA, 19 nt, Artificial Sequence
  Description of Artificial Sequence: Synthetic oligonucleotide
  Sense strand starting at position 3052 of SEQ ID NO: 1888957
accaaugucuguguagacu

SEQ ID NO: 2568819 - RNA, 19 nt, Artificial Sequence
  Description of Artificial Sequence: Synthetic oligonucleotide
  Antisense strand to SEQ ID NO: 2568818
agucuacacagacauuggu

SEQ ID NO: 2568820 - RNA, 19 nt, Artificial Sequence
  Description of Artificial Sequence: Synthetic oligonucleotide
  Sense strand starting at position 3147 of SEQ ID NO: 1888957
uguacuuaaggucaugaau

SEQ ID NO: 2568821 - RNA, 19 nt, Artificial Sequence
  Description of Artificial Sequence: Synthetic oligonucleotide
  Antisense strand to SEQ ID NO: 2568820
auucaugaccuuaaguaca

SEQ ID NO: 2568822 - RNA, 19 nt, Artificial Sequence
  Description of Artificial Sequence: Synthetic oligonucleotide
  Sense strand starting at position 3540 of SEQ ID NO: 1888957
aaggguaagcacuguuaua

SEQ ID NO: 2568823 - RNA, 19 nt, Artificial Sequence
  Description of Artificial Sequence: Synthetic oligonucleotide
  Antisense strand to SEQ ID NO: 2568822
uauaacagugcuuacccuu

SEQ ID NO: 2568824 - RNA, 19 nt, Artificial Sequence
  Description of Artificial Sequence: Synthetic oligonucleotide
  Sense strand starting at position 3682 of SEQ ID NO: 1888957
acaguugaauagggaaaua

SEQ ID NO: 2568825 - RNA, 19 nt, Artificial Sequence
  Description of Artificial Sequence: Synthetic oligonucleotide
  Antisense strand to SEQ ID NO: 2568824
uauuucccuauucaacugu

SEQ ID NO: 2568826 - RNA, 19 nt, Artificial Sequence
  Description of Artificial Sequence: Synthetic oligonucleotide
  Sense strand starting at position 3750 of SEQ ID NO: 1888957
acaaauagcuuccuggaga

SEQ ID NO: 2568827 - RNA, 19 nt, Artificial Sequence
  Description of Artificial Sequence: Synthetic oligonucleotide
  Antisense strand to SEQ ID NO: 2568826
ucuccaggaagcuauuugu

SEQ ID NO: 2568828 - RNA, 19 nt, Artificial Sequence
  Description of Artificial Sequence: Synthetic oligonucleotide
  Sense strand starting at position 3763 of SEQ ID NO: 1888957
uggagaaggucugacuuaa

SEQ ID NO: 2568829 - RNA, 19 nt, Artificial Sequence
  Description of Artificial Sequence: Synthetic oligonucleotide
  Antisense strand to SEQ ID NO: 2568828
uuaagucagaccuucucca

SEQ ID NO: 2568830 - RNA, 19 nt, Artificial Sequence
  Description of Artificial Sequence: Synthetic oligonucleotide
  Sense strand starting at position 3979 of SEQ ID NO: 1888957
agaagucuucuauguauau

SEQ ID NO: 2568831 - RNA, 19 nt, Artificial Sequence
  Description of Artificial Sequence: Synthetic oligonucleotide
  Antisense strand to SEQ ID NO: 2568830
auauacauagaagacuucu

SEQ ID NO: 2568832 - RNA, 19 nt, Artificial Sequence
  Description of Artificial Sequence: Synthetic oligonucleotide
  Sense strand starting at position 56 of SEQ ID NO: 1888958
ucugaaugauccucuugau

SEQ ID NO: 2568833 - RNA, 19 nt, Artificial Sequence
  Description of Artificial Sequence: Synthetic oligonucleotide
  Antisense strand to SEQ ID NO: 2568832
aucaagaggaucauucaga

SEQ ID NO: 2568834 - RNA, 19 nt, Artificial Sequence
  Description of Artificial Sequence: Synthetic oligonucleotide
  Sense strand starting at position 215 of SEQ ID NO: 1888958
gggcuagcucuccacaacu

SEQ ID NO: 2568835 - RNA, 19 nt, Artificial Sequence
  Description of Artificial Sequence: Synthetic oligonucleotide
  Antisense strand to SEQ ID NO: 2568834
aguuguggagagcuagccc

SEQ ID NO: 2568836 - RNA, 19 nt, Artificial Sequence
  Description of Artificial Sequence: Synthetic oligonucleotide
  Sense strand starting at position 217 of SEQ ID NO: 1888958
gcuagcucuccacaacuga

SEQ ID NO: 2568837 - RNA, 19 nt, Artificial Sequence
  Description of Artificial Sequence: Synthetic oligonucleotide
  Antisense strand to SEQ ID NO: 2568836
ucaguuguggagagcuagc

SEQ ID NO: 2568838 - RNA, 19 nt, Artificial Sequence
  Description of Artificial Sequence: Synthetic oligonucleotide
  Sense strand starting at position 234 of SEQ ID NO: 1888958
gagagaaccuggcuuagca

SEQ ID NO: 2568839 - RNA, 19 nt, Artificial Sequence
  Description of Artificial Sequence: Synthetic oligonucleotide
  Antisense strand to SEQ ID NO: 2568838
ugcuaagccagguucucuc

SEQ ID NO: 2568840 - RNA, 19 nt, Artificial Sequence
  Description of Artificial Sequence: Synthetic oligonucleotide
  Sense strand starting at position 250 of SEQ ID NO: 1888958
gcacuacugcccuagucaa

SEQ ID NO: 2568841 - RNA, 19 nt, Artificial Sequence
  Description of Artificial Sequence: Synthetic oligonucleotide
  Antisense strand to SEQ ID NO: 2568840
uugacuagggcaguagugc

SEQ ID NO: 2568842 - RNA, 19 nt, Artificial Sequence
  Description of Artificial Sequence: Synthetic oligonucleotide
  Sense strand starting at position 584 of SEQ ID NO: 1888958
cugaaaugcccauagcuca

SEQ ID NO: 2568843 - RNA, 19 nt, Artificial Sequence
  Description of Artificial Sequence: Synthetic oligonucleotide
  Antisense strand to SEQ ID NO: 2568842
ugagcuaugggcauuucag

SEQ ID NO: 2568844 - RNA, 19 nt, Artificial Sequence
  Description of Artificial Sequence: Synthetic oligonucleotide
  Sense strand starting at position 717 of SEQ ID NO: 1888958
ccuauaaaguagguaucau

SEQ ID NO: 2568845 - RNA, 19 nt, Artificial Sequence
  Description of Artificial Sequence: Synthetic oligonucleotide
  Antisense strand to SEQ ID NO: 2568844
augauaccuacuuuauagg

SEQ ID NO: 2568846 - RNA, 19 nt, Artificial Sequence
  Description of Artificial Sequence: Synthetic oligonucleotide
  Sense strand starting at position 952 of SEQ ID NO: 1888958
ucaggugauccacagguga

SEQ ID NO: 2568847 - RNA, 19 nt, Artificial Sequence
  Description of Artificial Sequence: Synthetic oligonucleotide
  Antisense strand to SEQ ID NO: 2568846
ucaccuguggaucaccuga

SEQ ID NO: 2568848 - RNA, 19 nt, Artificial Sequence
  Description of Artificial Sequence: Synthetic oligonucleotide
  Sense strand starting at position 954 of SEQ ID NO: 1888958
aggugauccacaggugauc

SEQ ID NO: 2568849 - RNA, 19 nt, Artificial Sequence
  Description of Artificial Sequence: Synthetic oligonucleotide
  Antisense strand to SEQ ID NO: 2568848
gaucaccuguggaucaccu

SEQ ID NO: 2568850 - RNA, 19 nt, Artificial Sequence
  Description of Artificial Sequence: Synthetic oligonucleotide
  Sense strand starting at position 1023 of SEQ ID NO: 1888958
agaugugaagguugacacu

SEQ ID NO: 2568851 - RNA, 19 nt, Artificial Sequence
  Description of Artificial Sequence: Synthetic oligonucleotide
  Antisense strand to SEQ ID NO: 2568850
agugucaaccuucacaucu

SEQ ID NO: 2568852 - RNA, 19 nt, Artificial Sequence
  Description of Artificial Sequence: Synthetic oligonucleotide
  Sense strand starting at position 1205 of SEQ ID NO: 1888958
guggauggccuuuggagaa

SEQ ID NO: 2568853 - RNA, 19 nt, Artificial Sequence
  Description of Artificial Sequence: Synthetic oligonucleotide
  Antisense strand to SEQ ID NO: 2568852
uucuccaaaggccauccac

SEQ ID NO: 2568854 - RNA, 19 nt, Artificial Sequence
  Description of Artificial Sequence: Synthetic oligonucleotide
  Sense strand starting at position 1258 of SEQ ID NO: 1888958
gggcuagaugucgugucuu

SEQ ID NO: 2568855 - RNA, 19 nt, Artificial Sequence
  Description of Artificial Sequence: Synthetic oligonucleotide
  Antisense strand to SEQ ID NO: 2568854
aagacacgacaucuagccc

SEQ ID NO: 2568856 - RNA, 19 nt, Artificial Sequence
  Description of Artificial Sequence: Synthetic oligonucleotide
  Sense strand starting at position 1320 of SEQ ID NO: 1888958
aguccaugggccugagacu

SEQ ID NO: 2568857 - RNA, 19 nt, Artificial Sequence
  Description of Artificial Sequence: Synthetic oligonucleotide
  Antisense strand to SEQ ID NO: 2568856
agucucaggcccauggacu

SEQ ID NO: 2568858 - RNA, 19 nt, Artificial Sequence
  Description of Artificial Sequence: Synthetic oligonucleotide
  Sense strand starting at position 1375 of SEQ ID NO: 1888958
ucaucugcuccugaaggga

SEQ ID NO: 2568859 - RNA, 19 nt, Artificial Sequence
  Description of Artificial Sequence: Synthetic oligonucleotide
  Antisense strand to SEQ ID NO: 2568858
ucccuucaggagcagauga

SEQ ID NO: 2568860 - RNA, 19 nt, Artificial Sequence
  Description of Artificial Sequence: Synthetic oligonucleotide
  Sense strand starting at position 1789 of SEQ ID NO: 1888958
agggcauugccacaagcau

SEQ ID NO: 2568861 - RNA, 19 nt, Artificial Sequence
  Description of Artificial Sequence: Synthetic oligonucleotide
  Antisense strand to SEQ ID NO: 2568860
augcuuguggcaaugcccu

SEQ ID NO: 2568862 - RNA, 19 nt, Artificial Sequence
  Description of Artificial Sequence: Synthetic oligonucleotide
  Sense strand starting at position 2185 of SEQ ID NO: 1888958
ggccguacugaguaaagua

SEQ ID NO: 2568863 - RNA, 19 nt, Artificial Sequence
  Description of Artificial Sequence: Synthetic oligonucleotide
  Antisense strand to SEQ ID NO: 2568862
uacuuuacucaguacggcc

SEQ ID NO: 2568864 - RNA, 19 nt, Artificial Sequence
  Description of Artificial Sequence: Synthetic oligonucleotide
  Sense strand starting at position 2299 of SEQ ID NO: 1888958
agugaaugcaacuguauug

SEQ ID NO: 2568865 - RNA, 19 nt, Artificial Sequence
  Description of Artificial Sequence: Synthetic oligonucleotide
  Antisense strand to SEQ ID NO: 2568864
caauacaguugcauucacu

SEQ ID NO: 2568866 - RNA, 19 nt, Artificial Sequence
  Description of Artificial Sequence: Synthetic oligonucleotide
  Sense strand starting at position 2314 of SEQ ID NO: 1888958
auugccuagugguuaagau

SEQ ID NO: 2568867 - RNA, 19 nt, Artificial Sequence
  Description of Artificial Sequence: Synthetic oligonucleotide
  Antisense strand to SEQ ID NO: 2568866
aucuuaaccacuaggcaau

SEQ ID NO: 2568868 - RNA, 19 nt, Artificial Sequence
  Description of Artificial Sequence: Synthetic oligonucleotide
  Sense strand starting at position 2315 of SEQ ID NO: 1888958
uugccuagugguuaagaua

SEQ ID NO: 2568869 - RNA, 19 nt, Artificial Sequence
  Description of Artificial Sequence: Synthetic oligonucleotide
  Antisense strand to SEQ ID NO: 2568868
uaucuuaaccacuaggcaa

SEQ ID NO: 2568870 - RNA, 19 nt, Artificial Sequence
  Description of Artificial Sequence: Synthetic oligonucleotide
  Sense strand starting at position 2477 of SEQ ID NO: 1888958
ccacuaguucuguacccau

SEQ ID NO: 2568871 - RNA, 19 nt, Artificial Sequence
  Description of Artificial Sequence: Synthetic oligonucleotide
  Antisense strand to SEQ ID NO: 2568870
auggguacagaacuagugg

SEQ ID NO: 2568872 - RNA, 19 nt, Artificial Sequence
  Description of Artificial Sequence: Synthetic oligonucleotide
  Sense strand starting at position 2504 of SEQ ID NO: 1888958
acccuaucugaaugagacu

SEQ ID NO: 2568873 - RNA, 19 nt, Artificial Sequence
  Description of Artificial Sequence: Synthetic oligonucleotide
  Antisense strand to SEQ ID NO: 2568872
agucucauucagauagggu

SEQ ID NO: 2568874 - RNA, 19 nt, Artificial Sequence
  Description of Artificial Sequence: Synthetic oligonucleotide
  Sense strand starting at position 2591 of SEQ ID NO: 1888958
auccuaacgucccuuugaa

SEQ ID NO: 2568875 - RNA, 19 nt, Artificial Sequence
  Description of Artificial Sequence: Synthetic oligonucleotide
  Antisense strand to SEQ ID NO: 2568874
uucaaagggacguuaggau

SEQ ID NO: 2568876 - RNA, 19 nt, Artificial Sequence
  Description of Artificial Sequence: Synthetic oligonucleotide
  Sense strand starting at position 2599 of SEQ ID NO: 1888958
gucccuuugaaagguggaa

SEQ ID NO: 2568877 - RNA, 19 nt, Artificial Sequence
  Description of Artificial Sequence: Synthetic oligonucleotide
  Antisense strand to SEQ ID NO: 2568876
uuccaccuuucaaagggac

SEQ ID NO: 2568878 - RNA, 19 nt, Artificial Sequence
  Description of Artificial Sequence: Synthetic oligonucleotide
  Sense strand starting at position 2721 of SEQ ID NO: 1888958
augauauugucucuuagca

SEQ ID NO: 2568879 - RNA, 19 nt, Artificial Sequence
  Description of Artificial Sequence: Synthetic oligonucleotide
  Antisense strand to SEQ ID NO: 2568878
ugcuaagagacaauaucau

SEQ ID NO: 2568880 - RNA, 19 nt, Artificial Sequence
  Description of Artificial Sequence: Synthetic oligonucleotide
  Sense strand starting at position 2771 of SEQ ID NO: 1888958
uauguuugccgagaacacu

SEQ ID NO: 2568881 - RNA, 19 nt, Artificial Sequence
  Description of Artificial Sequence: Synthetic oligonucleotide
  Antisense strand to SEQ ID NO: 2568880
aguguucucggcaaacaua

SEQ ID NO: 2568882 - RNA, 19 nt, Artificial Sequence
  Description of Artificial Sequence: Synthetic oligonucleotide
  Sense strand starting at position 2896 of SEQ ID NO: 1888958
auuaaugacucagugggau

SEQ ID NO: 2568883 - RNA, 19 nt, Artificial Sequence
  Description of Artificial Sequence: Synthetic oligonucleotide
  Antisense strand to SEQ ID NO: 2568882
aucccacugagucauuaau

SEQ ID NO: 2568884 - RNA, 19 nt, Artificial Sequence
  Description of Artificial Sequence: Synthetic oligonucleotide
  Sense strand starting at position 3244 of SEQ ID NO: 1888958
auuacaugauuguucugau

SEQ ID NO: 2568885 - RNA, 19 nt, Artificial Sequence
  Description of Artificial Sequence: Synthetic oligonucleotide
  Antisense strand to SEQ ID NO: 2568884
aucagaacaaucauguaau

SEQ ID NO: 2568886 - RNA, 19 nt, Artificial Sequence
  Description of Artificial Sequence: Synthetic oligonucleotide
  Sense strand starting at position 3245 of SEQ ID NO: 1888958
uuacaugauuguucugaug

SEQ ID NO: 2568887 - RNA, 19 nt, Artificial Sequence
  Description of Artificial Sequence: Synthetic oligonucleotide
  Antisense strand to SEQ ID NO: 2568886
caucagaacaaucauguaa

SEQ ID NO: 2568888 - RNA, 19 nt, Artificial Sequence
  Description of Artificial Sequence: Synthetic oligonucleotide
  Sense strand starting at position 3252 of SEQ ID NO: 1888958
auuguucugauguaaggga

SEQ ID NO: 2568889 - RNA, 19 nt, Artificial Sequence
  Description of Artificial Sequence: Synthetic oligonucleotide
  Antisense strand to SEQ ID NO: 2568888
ucccuuacaucagaacaau

SEQ ID NO: 2568890 - RNA, 19 nt, Artificial Sequence
  Description of Artificial Sequence: Synthetic oligonucleotide
  Sense strand starting at position 3261 of SEQ ID NO: 1888958
auguaagggaucuguguuu

SEQ ID NO: 2568891 - RNA, 19 nt, Artificial Sequence
  Description of Artificial Sequence: Synthetic oligonucleotide
  Antisense strand to SEQ ID NO: 2568890
aaacacagaucccuuacau

SEQ ID NO: 2568892 - RNA, 19 nt, Artificial Sequence
  Description of Artificial Sequence: Synthetic oligonucleotide
  Sense strand starting at position 3266 of SEQ ID NO: 1888958
agggaucuguguuugaaga

SEQ ID NO: 2568893 - RNA, 19 nt, Artificial Sequence
  Description of Artificial Sequence: Synthetic oligonucleotide
  Antisense strand to SEQ ID NO: 2568892
ucuucaaacacagaucccu

SEQ ID NO: 2568894 - RNA, 19 nt, Artificial Sequence
  Description of Artificial Sequence: Synthetic oligonucleotide
  Sense strand starting at position 3267 of SEQ ID NO: 1888958
gggaucuguguuugaagau

SEQ ID NO: 2568895 - RNA, 19 nt, Artificial Sequence
  Description of Artificial Sequence: Synthetic oligonucleotide
  Antisense strand to SEQ ID NO: 2568894
aucuucaaacacagauccc

SEQ ID NO: 2568896 - RNA, 19 nt, Artificial Sequence
  Description of Artificial Sequence: Synthetic oligonucleotide
  Sense strand starting at position 3330 of SEQ ID NO: 1888958
ccgugaguuccugacacac

SEQ ID NO: 2568897 - RNA, 19 nt, Artificial Sequence
  Description of Artificial Sequence: Synthetic oligonucleotide
  Antisense strand to SEQ ID NO: 2568896
gugugucaggaacucacgg

SEQ ID NO: 2568898 - RNA, 19 nt, Artificial Sequence
  Description of Artificial Sequence: Synthetic oligonucleotide
  Sense strand starting at position 3373 of SEQ ID NO: 1888958
aggaaugagcagugucuuu

SEQ ID NO: 2568899 - RNA, 19 nt, Artificial Sequence
  Description of Artificial Sequence: Synthetic oligonucleotide
  Antisense strand to SEQ ID NO: 2568898
aaagacacugcucauuccu

SEQ ID NO: 2568900 - RNA, 19 nt, Artificial Sequence
  Description of Artificial Sequence: Synthetic oligonucleotide
  Sense strand starting at position 3533 of SEQ ID NO: 1888958
gguugaacugaucaccgau

SEQ ID NO: 2568901 - RNA, 19 nt, Artificial Sequence
  Description of Artificial Sequence: Synthetic oligonucleotide
  Antisense strand to SEQ ID NO: 2568900
aucggugaucaguucaacc

SEQ ID NO: 2568902 - RNA, 19 nt, Artificial Sequence
  Description of Artificial Sequence: Synthetic oligonucleotide
  Sense strand starting at position 3791 of SEQ ID NO: 1888958
agggauucucgggaacugu

SEQ ID NO: 2568903 - RNA, 19 nt, Artificial Sequence
  Description of Artificial Sequence: Synthetic oligonucleotide
  Antisense strand to SEQ ID NO: 2568902
acaguucccgagaaucccu

SEQ ID NO: 2568904 - RNA, 19 nt, Artificial Sequence
  Description of Artificial Sequence: Synthetic oligonucleotide
  Sense strand starting at position 3795 of SEQ ID NO: 1888958
auucucgggaacuguaauu

SEQ ID NO: 2568905 - RNA, 19 nt, Artificial Sequence
  Description of Artificial Sequence: Synthetic oligonucleotide
  Antisense strand to SEQ ID NO: 2568904
aauuacaguucccgagaau

SEQ ID NO: 2568906 - RNA, 19 nt, Artificial Sequence
  Description of Artificial Sequence: Synthetic oligonucleotide
  Sense strand starting at position 3865 of SEQ ID NO: 1888958
accugaagucuuggacuga

SEQ ID NO: 2568907 - RNA, 19 nt, Artificial Sequence
  Description of Artificial Sequence: Synthetic oligonucleotide
  Antisense strand to SEQ ID NO: 2568906
ucaguccaagacuucaggu

SEQ ID NO: 2568908 - RNA, 19 nt, Artificial Sequence
  Description of Artificial Sequence: Synthetic oligonucleotide
  Sense strand starting at position 3903 of SEQ ID NO: 1888958
ugaugcuaucuccagauaa

SEQ ID NO: 2568909 - RNA, 19 nt, Artificial Sequence
  Description of Artificial Sequence: Synthetic oligonucleotide
  Antisense strand to SEQ ID NO: 2568908
uuaucuggagauagcauca

SEQ ID NO: 2568910 - RNA, 19 nt, Artificial Sequence
  Description of Artificial Sequence: Synthetic oligonucleotide
  Sense strand starting at position 3933 of SEQ ID NO: 1888958
gcugaagugaauuauaggu

SEQ ID NO: 2568911 - RNA, 19 nt, Artificial Sequence
  Description of Artificial Sequence: Synthetic oligonucleotide
  Antisense strand to SEQ ID NO: 2568910
accuauaauucacuucagc

SEQ ID NO: 2568912 - RNA, 19 nt, Artificial Sequence
  Description of Artificial Sequence: Synthetic oligonucleotide
  Sense strand starting at position 119 of SEQ ID NO: 1888959
gcugacuucuugucauuug

SEQ ID NO: 2568913 - RNA, 19 nt, Artificial Sequence
  Description of Artificial Sequence: Synthetic oligonucleotide
  Antisense strand to SEQ ID NO: 2568912
caaaugacaagaagucagc

SEQ ID NO: 2568914 - RNA, 19 nt, Artificial Sequence
  Description of Artificial Sequence: Synthetic oligonucleotide
  Sense strand starting at position 126 of SEQ ID NO: 1888959
ucuugucauuuggauguca

SEQ ID NO: 2568915 - RNA, 19 nt, Artificial Sequence
  Description of Artificial Sequence: Synthetic oligonucleotide
  Antisense strand to SEQ ID NO: 2568914
ugacauccaaaugacaaga

SEQ ID NO: 2568916 - RNA, 19 nt, Artificial Sequence
  Description of Artificial Sequence: Synthetic oligonucleotide
  Sense strand starting at position 131 of SEQ ID NO: 1888959
ucauuuggaugucagcuua

SEQ ID NO: 2568917 - RNA, 19 nt, Artificial Sequence
  Description of Artificial Sequence: Synthetic oligonucleotide
  Antisense strand to SEQ ID NO: 2568916
uaagcugacauccaaauga

SEQ ID NO: 2568918 - RNA, 19 nt, Artificial Sequence
  Description of Artificial Sequence: Synthetic oligonucleotide
  Sense strand starting at position 170 of SEQ ID NO: 1888959
gccagcucaucuuguucua

SEQ ID NO: 2568919 - RNA, 19 nt, Artificial Sequence
  Description of Artificial Sequence: Synthetic oligonucleotide
  Antisense strand to SEQ ID NO: 2568918
uagaacaagaugagcuggc

SEQ ID NO: 2568920 - RNA, 19 nt, Artificial Sequence
  Description of Artificial Sequence: Synthetic oligonucleotide
  Sense strand starting at position 173 of SEQ ID NO: 1888959
agcucaucuuguucuacau

SEQ ID NO: 2568921 - RNA, 19 nt, Artificial Sequence
  Description of Artificial Sequence: Synthetic oligonucleotide
  Antisense strand to SEQ ID NO: 2568920
auguagaacaagaugagcu

SEQ ID NO: 2568922 - RNA, 19 nt, Artificial Sequence
  Description of Artificial Sequence: Synthetic oligonucleotide
  Sense strand starting at position 200 of SEQ ID NO: 1888959
guuuguuucccucucuguu

SEQ ID NO: 2568923 - RNA, 19 nt, Artificial Sequence
  Description of Artificial Sequence: Synthetic oligonucleotide
  Antisense strand to SEQ ID NO: 2568922
aacagagagggaaacaaac

SEQ ID NO: 2568924 - RNA, 19 nt, Artificial Sequence
  Description of Artificial Sequence: Synthetic oligonucleotide
  Sense strand starting at position 298 of SEQ ID NO: 1888959
gaccuuaucugguuccaga

SEQ ID NO: 2568925 - RNA, 19 nt, Artificial Sequence
  Description of Artificial Sequence: Synthetic oligonucleotide
  Antisense strand to SEQ ID NO: 2568924
ucuggaaccagauaagguc

SEQ ID NO: 2568926 - RNA, 19 nt, Artificial Sequence
  Description of Artificial Sequence: Synthetic oligonucleotide
  Sense strand starting at position 783 of SEQ ID NO: 1888959
ucaucucuauuccuaguga

SEQ ID NO: 2568927 - RNA, 19 nt, Artificial Sequence
  Description of Artificial Sequence: Synthetic oligonucleotide
  Antisense strand to SEQ ID NO: 2568926
ucacuaggaauagagauga

SEQ ID NO: 2568928 - RNA, 19 nt, Artificial Sequence
  Description of Artificial Sequence: Synthetic oligonucleotide
  Sense strand starting at position 912 of SEQ ID NO: 1888959
gggugauccuggccaguga

SEQ ID NO: 2568929 - RNA, 19 nt, Artificial Sequence
  Description of Artificial Sequence: Synthetic oligonucleotide
  Antisense strand to SEQ ID NO: 2568928
ucacuggccaggaucaccc

SEQ ID NO: 2568930 - RNA, 19 nt, Artificial Sequence
  Description of Artificial Sequence: Synthetic oligonucleotide
  Sense strand starting at position 1436 of SEQ ID NO: 1888959
guaugacacguccagaaca

SEQ ID NO: 2568931 - RNA, 19 nt, Artificial Sequence
  Description of Artificial Sequence: Synthetic oligonucleotide
  Antisense strand to SEQ ID NO: 2568930
uguucuggacgugucauac

SEQ ID NO: 2568932 - RNA, 19 nt, Artificial Sequence
  Description of Artificial Sequence: Synthetic oligonucleotide
  Sense strand starting at position 1545 of SEQ ID NO: 1888959
augagaauguccuggaagc

SEQ ID NO: 2568933 - RNA, 19 nt, Artificial Sequence
  Description of Artificial Sequence: Synthetic oligonucleotide
  Antisense strand to SEQ ID NO: 2568932
gcuuccaggacauucucau

SEQ ID NO: 2568934 - RNA, 19 nt, Artificial Sequence
  Description of Artificial Sequence: Synthetic oligonucleotide
  Sense strand starting at position 1587 of SEQ ID NO: 1888959
cauggcaaaugugcuaaau

SEQ ID NO: 2568935 - RNA, 19 nt, Artificial Sequence
  Description of Artificial Sequence: Synthetic oligonucleotide
  Antisense strand to SEQ ID NO: 2568934
auuuagcacauuugccaug

SEQ ID NO: 2568936 - RNA, 19 nt, Artificial Sequence
  Description of Artificial Sequence: Synthetic oligonucleotide
  Sense strand starting at position 1646 of SEQ ID NO: 1888959
ugaauuugguccgaacaca

SEQ ID NO: 2568937 - RNA, 19 nt, Artificial Sequence
  Description of Artificial Sequence: Synthetic oligonucleotide
  Antisense strand to SEQ ID NO: 2568936
uguguucggaccaaauuca

SEQ ID NO: 2568938 - RNA, 19 nt, Artificial Sequence
  Description of Artificial Sequence: Synthetic oligonucleotide
  Sense strand starting at position 1895 of SEQ ID NO: 1888959
gaucuagugugaggacaag

SEQ ID NO: 2568939 - RNA, 19 nt, Artificial Sequence
  Description of Artificial Sequence: Synthetic oligonucleotide
  Antisense strand to SEQ ID NO: 2568938
cuuguccucacacuagauc

SEQ ID NO: 2568940 - RNA, 19 nt, Artificial Sequence
  Description of Artificial Sequence: Synthetic oligonucleotide
  Sense strand starting at position 2579 of SEQ ID NO: 1888959
gacucacgugagggaugau

SEQ ID NO: 2568941 - RNA, 19 nt, Artificial Sequence
  Description of Artificial Sequence: Synthetic oligonucleotide
  Antisense strand to SEQ ID NO: 2568940
aucaucccucacgugaguc

SEQ ID NO: 2568942 - RNA, 19 nt, Artificial Sequence
  Description of Artificial Sequence: Synthetic oligonucleotide
  Sense strand starting at position 2582 of SEQ ID NO: 1888959
ucacgugagggaugaucaa

SEQ ID NO: 2568943 - RNA, 19 nt, Artificial Sequence
  Description of Artificial Sequence: Synthetic oligonucleotide
  Antisense strand to SEQ ID NO: 2568942
uugaucaucccucacguga

SEQ ID NO: 2568944 - RNA, 19 nt, Artificial Sequence
  Description of Artificial Sequence: Synthetic oligonucleotide
  Sense strand starting at position 2747 of SEQ ID NO: 1888959
gccaguuggcugugaggga

SEQ ID NO: 2568945 - RNA, 19 nt, Artificial Sequence
  Description of Artificial Sequence: Synthetic oligonucleotide
  Antisense strand to SEQ ID NO: 2568944
ucccucacagccaacuggc

SEQ ID NO: 2568946 - RNA, 19 nt, Artificial Sequence
  Description of Artificial Sequence: Synthetic oligonucleotide
  Sense strand starting at position 2761 of SEQ ID NO: 1888959
agggaagcuccaugguuua

SEQ ID NO: 2568947 - RNA, 19 nt, Artificial Sequence
  Description of Artificial Sequence: Synthetic oligonucleotide
  Antisense strand to SEQ ID NO: 2568946
uaaaccauggagcuucccu

SEQ ID NO: 2568948 - RNA, 19 nt, Artificial Sequence
  Description of Artificial Sequence: Synthetic oligonucleotide
  Sense strand starting at position 2773 of SEQ ID NO: 1888959
ugguuuagugagcacagga

SEQ ID NO: 2568949 - RNA, 19 nt, Artificial Sequence
  Description of Artificial Sequence: Synthetic oligonucleotide
  Antisense strand to SEQ ID NO: 2568948
uccugugcucacuaaacca

SEQ ID NO: 2568950 - RNA, 19 nt, Artificial Sequence
  Description of Artificial Sequence: Synthetic oligonucleotide
  Sense strand starting at position 3088 of SEQ ID NO: 1888959
ugcccuuucucaucuguau

SEQ ID NO: 2568951 - RNA, 19 nt, Artificial Sequence
  Description of Artificial Sequence: Synthetic oligonucleotide
  Antisense strand to SEQ ID NO: 2568950
auacagaugagaaagggca

SEQ ID NO: 2568952 - RNA, 19 nt, Artificial Sequence
  Description of Artificial Sequence: Synthetic oligonucleotide
  Sense strand starting at position 3096 of SEQ ID NO: 1888959
cucaucuguauccgggaau

SEQ ID NO: 2568953 - RNA, 19 nt, Artificial Sequence
  Description of Artificial Sequence: Synthetic oligonucleotide
  Antisense strand to SEQ ID NO: 2568952
auucccggauacagaugag

SEQ ID NO: 2568954 - RNA, 19 nt, Artificial Sequence
  Description of Artificial Sequence: Synthetic oligonucleotide
  Sense strand starting at position 3097 of SEQ ID NO: 1888959
ucaucuguauccgggaauc

SEQ ID NO: 2568955 - RNA, 19 nt, Artificial Sequence
  Description of Artificial Sequence: Synthetic oligonucleotide
  Antisense strand to SEQ ID NO: 2568954
gauucccggauacagauga

SEQ ID NO: 2568956 - RNA, 19 nt, Artificial Sequence
  Description of Artificial Sequence: Synthetic oligonucleotide
  Sense strand starting at position 3099 of SEQ ID NO: 1888959
aucuguauccgggaaucca

SEQ ID NO: 2568957 - RNA, 19 nt, Artificial Sequence
  Description of Artificial Sequence: Synthetic oligonucleotide
  Antisense strand to SEQ ID NO: 2568956
uggauucccggauacagau

SEQ ID NO: 2568958 - RNA, 19 nt, Artificial Sequence
  Description of Artificial Sequence: Synthetic oligonucleotide
  Sense strand starting at position 3251 of SEQ ID NO: 1888959
gccaguuauccucaggauc

SEQ ID NO: 2568959 - RNA, 19 nt, Artificial Sequence
  Description of Artificial Sequence: Synthetic oligonucleotide
  Antisense strand to SEQ ID NO: 2568958
gauccugaggauaacuggc

SEQ ID NO: 2568960 - RNA, 19 nt, Artificial Sequence
  Description of Artificial Sequence: Synthetic oligonucleotide
  Sense strand starting at position 3541 of SEQ ID NO: 1888959
gcgucugacuccgcaaaca

SEQ ID NO: 2568961 - RNA, 19 nt, Artificial Sequence
  Description of Artificial Sequence: Synthetic oligonucleotide
  Antisense strand to SEQ ID NO: 2568960
uguuugcggagucagacgc

SEQ ID NO: 2568962 - RNA, 19 nt, Artificial Sequence
  Description of Artificial Sequence: Synthetic oligonucleotide
  Sense strand starting at position 3827 of SEQ ID NO: 1888959
cguggugaucucuggaaca

SEQ ID NO: 2568963 - RNA, 19 nt, Artificial Sequence
  Description of Artificial Sequence: Synthetic oligonucleotide
  Antisense strand to SEQ ID NO: 2568962
uguuccagagaucaccacg

SEQ ID NO: 2568964 - RNA, 19 nt, Artificial Sequence
  Description of Artificial Sequence: Synthetic oligonucleotide
  Sense strand starting at position 3852 of SEQ ID NO: 1888959
agccgaauaucauagcauu

SEQ ID NO: 2568965 - RNA, 19 nt, Artificial Sequence
  Description of Artificial Sequence: Synthetic oligonucleotide
  Antisense strand to SEQ ID NO: 2568964
aaugcuaugauauucggcu

SEQ ID NO: 2568966 - RNA, 19 nt, Artificial Sequence
  Description of Artificial Sequence: Synthetic oligonucleotide
  Sense strand starting at position 3855 of SEQ ID NO: 1888959
cgaauaucauagcauuauu

SEQ ID NO: 2568967 - RNA, 19 nt, Artificial Sequence
  Description of Artificial Sequence: Synthetic oligonucleotide
  Antisense strand to SEQ ID NO: 2568966
aauaaugcuaugauauucg

SEQ ID NO: 2568968 - RNA, 19 nt, Artificial Sequence
  Description of Artificial Sequence: Synthetic oligonucleotide
  Sense strand starting at position 3912 of SEQ ID NO: 1888959
ccaagcauaccuugagaac

SEQ ID NO: 2568969 - RNA, 19 nt, Artificial Sequence
  Description of Artificial Sequence: Synthetic oligonucleotide
  Antisense strand to SEQ ID NO: 2568968
guucucaagguaugcuugg

SEQ ID NO: 2568970 - RNA, 19 nt, Artificial Sequence
  Description of Artificial Sequence: Synthetic oligonucleotide
  Sense strand starting at position 274 of SEQ ID NO: 1888960
acugacugcucauuagaau

SEQ ID NO: 2568971 - RNA, 19 nt, Artificial Sequence
  Description of Artificial Sequence: Synthetic oligonucleotide
  Antisense strand to SEQ ID NO: 2568970
auucuaaugagcagucagu

SEQ ID NO: 2568972 - RNA, 19 nt, Artificial Sequence
  Description of Artificial Sequence: Synthetic oligonucleotide
  Sense strand starting at position 275 of SEQ ID NO: 1888960
cugacugcucauuagaaug

SEQ ID NO: 2568973 - RNA, 19 nt, Artificial Sequence
  Description of Artificial Sequence: Synthetic oligonucleotide
  Antisense strand to SEQ ID NO: 2568972
cauucuaaugagcagucag

SEQ ID NO: 2568974 - RNA, 19 nt, Artificial Sequence
  Description of Artificial Sequence: Synthetic oligonucleotide
  Sense strand starting at position 720 of SEQ ID NO: 1888960
ccugucuugccugaacacu

SEQ ID NO: 2568975 - RNA, 19 nt, Artificial Sequence
  Description of Artificial Sequence: Synthetic oligonucleotide
  Antisense strand to SEQ ID NO: 2568974
aguguucaggcaagacagg

SEQ ID NO: 2568976 - RNA, 19 nt, Artificial Sequence
  Description of Artificial Sequence: Synthetic oligonucleotide
  Sense strand starting at position 728 of SEQ ID NO: 1888960
gccugaacacuuuaagcuu

SEQ ID NO: 2568977 - RNA, 19 nt, Artificial Sequence
  Description of Artificial Sequence: Synthetic oligonucleotide
  Antisense strand to SEQ ID NO: 2568976
aagcuuaaaguguucaggc

SEQ ID NO: 2568978 - RNA, 19 nt, Artificial Sequence
  Description of Artificial Sequence: Synthetic oligonucleotide
  Sense strand starting at position 898 of SEQ ID NO: 1888960
cagggucaucuguagacca

SEQ ID NO: 2568979 - RNA, 19 nt, Artificial Sequence
  Description of Artificial Sequence: Synthetic oligonucleotide
  Antisense strand to SEQ ID NO: 2568978
uggucuacagaugacccug

SEQ ID NO: 2568980 - RNA, 19 nt, Artificial Sequence
  Description of Artificial Sequence: Synthetic oligonucleotide
  Sense strand starting at position 935 of SEQ ID NO: 1888960
ugaaguaucacaugugagg

SEQ ID NO: 2568981 - RNA, 19 nt, Artificial Sequence
  Description of Artificial Sequence: Synthetic oligonucleotide
  Antisense strand to SEQ ID NO: 2568980
ccucacaugugauacuuca

SEQ ID NO: 2568982 - RNA, 19 nt, Artificial Sequence
  Description of Artificial Sequence: Synthetic oligonucleotide
  Sense strand starting at position 980 of SEQ ID NO: 1888960
cuccaugucuaugcuaaga

SEQ ID NO: 2568983 - RNA, 19 nt, Artificial Sequence
  Description of Artificial Sequence: Synthetic oligonucleotide
  Antisense strand to SEQ ID NO: 2568982
ucuuagcauagacauggag

SEQ ID NO: 2568984 - RNA, 19 nt, Artificial Sequence
  Description of Artificial Sequence: Synthetic oligonucleotide
  Sense strand starting at position 1056 of SEQ ID NO: 1888960
cccaauugcccagguuaga

SEQ ID NO: 2568985 - RNA, 19 nt, Artificial Sequence
  Description of Artificial Sequence: Synthetic oligonucleotide
  Antisense strand to SEQ ID NO: 2568984
ucuaaccugggcaauuggg

SEQ ID NO: 2568986 - RNA, 19 nt, Artificial Sequence
  Description of Artificial Sequence: Synthetic oligonucleotide
  Sense strand starting at position 1125 of SEQ ID NO: 1888960
agaaacuaauggguuguaa

SEQ ID NO: 2568987 - RNA, 19 nt, Artificial Sequence
  Description of Artificial Sequence: Synthetic oligonucleotide
  Antisense strand to SEQ ID NO: 2568986
uuacaacccauuaguuucu

SEQ ID NO: 2568988 - RNA, 19 nt, Artificial Sequence
  Description of Artificial Sequence: Synthetic oligonucleotide
  Sense strand starting at position 1127 of SEQ ID NO: 1888960
aaacuaauggguuguaaua

SEQ ID NO: 2568989 - RNA, 19 nt, Artificial Sequence
  Description of Artificial Sequence: Synthetic oligonucleotide
  Antisense strand to SEQ ID NO: 2568988
uauuacaacccauuaguuu

SEQ ID NO: 2568990 - RNA, 19 nt, Artificial Sequence
  Description of Artificial Sequence: Synthetic oligonucleotide
  Sense strand starting at position 1720 of SEQ ID NO: 1888960
guaggcaguauugaauaga

SEQ ID NO: 2568991 - RNA, 19 nt, Artificial Sequence
  Description of Artificial Sequence: Synthetic oligonucleotide
  Antisense strand to SEQ ID NO: 2568990
ucuauucaauacugccuac

SEQ ID NO: 2568992 - RNA, 19 nt, Artificial Sequence
  Description of Artificial Sequence: Synthetic oligonucleotide
  Sense strand starting at position 2052 of SEQ ID NO: 1888960
ggagcacuugcagagauca

SEQ ID NO: 2568993 - RNA, 19 nt, Artificial Sequence
  Description of Artificial Sequence: Synthetic oligonucleotide
  Antisense strand to SEQ ID NO: 2568992
ugaucucugcaagugcucc

SEQ ID NO: 2568994 - RNA, 19 nt, Artificial Sequence
  Description of Artificial Sequence: Synthetic oligonucleotide
  Sense strand starting at position 2060 of SEQ ID NO: 1888960
ugcagagaucauugaugug

SEQ ID NO: 2568995 - RNA, 19 nt, Artificial Sequence
  Description of Artificial Sequence: Synthetic oligonucleotide
  Antisense strand to SEQ ID NO: 2568994
cacaucaaugaucucugca

SEQ ID NO: 2568996 - RNA, 19 nt, Artificial Sequence
  Description of Artificial Sequence: Synthetic oligonucleotide
  Sense strand starting at position 2126 of SEQ ID NO: 1888960
acaggaaacacguagucuu

SEQ ID NO: 2568997 - RNA, 19 nt, Artificial Sequence
  Description of Artificial Sequence: Synthetic oligonucleotide
  Antisense strand to SEQ ID NO: 2568996
aagacuacguguuuccugu

SEQ ID NO: 2568998 - RNA, 19 nt, Artificial Sequence
  Description of Artificial Sequence: Synthetic oligonucleotide
  Sense strand starting at position 2218 of SEQ ID NO: 1888960
gggcauuuaaccuaugcgu

SEQ ID NO: 2568999 - RNA, 19 nt, Artificial Sequence
  Description of Artificial Sequence: Synthetic oligonucleotide
  Antisense strand to SEQ ID NO: 2568998
acgcauagguuaaaugccc

SEQ ID NO: 2569000 - RNA, 19 nt, Artificial Sequence
  Description of Artificial Sequence: Synthetic oligonucleotide
  Sense strand starting at position 2220 of SEQ ID NO: 1888960
gcauuuaaccuaugcguua

SEQ ID NO: 2569001 - RNA, 19 nt, Artificial Sequence
  Description of Artificial Sequence: Synthetic oligonucleotide
  Antisense strand to SEQ ID NO: 2569000
uaacgcauagguuaaaugc

SEQ ID NO: 2569002 - RNA, 19 nt, Artificial Sequence
  Description of Artificial Sequence: Synthetic oligonucleotide
  Sense strand starting at position 2353 of SEQ ID NO: 1888960
auaccugcccuuuguaaag

SEQ ID NO: 2569003 - RNA, 19 nt, Artificial Sequence
  Description of Artificial Sequence: Synthetic oligonucleotide
  Antisense strand to SEQ ID NO: 2569002
cuuuacaaagggcagguau

SEQ ID NO: 2569004 - RNA, 19 nt, Artificial Sequence
  Description of Artificial Sequence: Synthetic oligonucleotide
  Sense strand starting at position 2419 of SEQ ID NO: 1888960
gugugcgcugagucagaua

SEQ ID NO: 2569005 - RNA, 19 nt, Artificial Sequence
  Description of Artificial Sequence: Synthetic oligonucleotide
  Antisense strand to SEQ ID NO: 2569004
uaucugacucagcgcacac

SEQ ID NO: 2569006 - RNA, 19 nt, Artificial Sequence
  Description of Artificial Sequence: Synthetic oligonucleotide
  Sense strand starting at position 2482 of SEQ ID NO: 1888960
aagggucuugugggugaga

SEQ ID NO: 2569007 - RNA, 19 nt, Artificial Sequence
  Description of Artificial Sequence: Synthetic oligonucleotide
  Antisense strand to SEQ ID NO: 2569006
ucucacccacaagacccuu

SEQ ID NO: 2569008 - RNA, 19 nt, Artificial Sequence
  Description of Artificial Sequence: Synthetic oligonucleotide
  Sense strand starting at position 2483 of SEQ ID NO: 1888960
agggucuugugggugagaa

SEQ ID NO: 2569009 - RNA, 19 nt, Artificial Sequence
  Description of Artificial Sequence: Synthetic oligonucleotide
  Antisense strand to SEQ ID NO: 2569008
uucucacccacaagacccu

SEQ ID NO: 2569010 - RNA, 19 nt, Artificial Sequence
  Description of Artificial Sequence: Synthetic oligonucleotide
  Sense strand starting at position 2484 of SEQ ID NO: 1888960
gggucuugugggugagaag

SEQ ID NO: 2569011 - RNA, 19 nt, Artificial Sequence
  Description of Artificial Sequence: Synthetic oligonucleotide
  Antisense strand to SEQ ID NO: 2569010
cuucucacccacaagaccc

SEQ ID NO: 2569012 - RNA, 19 nt, Artificial Sequence
  Description of Artificial Sequence: Synthetic oligonucleotide
  Sense strand starting at position 2485 of SEQ ID NO: 1888960
ggucuugugggugagaagu

SEQ ID NO: 2569013 - RNA, 19 nt, Artificial Sequence
  Description of Artificial Sequence: Synthetic oligonucleotide
  Antisense strand to SEQ ID NO: 2569012
acuucucacccacaagacc

SEQ ID NO: 2569014 - RNA, 19 nt, Artificial Sequence
  Description of Artificial Sequence: Synthetic oligonucleotide
  Sense strand starting at position 2524 of SEQ ID NO: 1888960
auaccagagagguggcaau

SEQ ID NO: 2569015 - RNA, 19 nt, Artificial Sequence
  Description of Artificial Sequence: Synthetic oligonucleotide
  Antisense strand to SEQ ID NO: 2569014
auugccaccucucugguau

SEQ ID NO: 2569016 - RNA, 19 nt, Artificial Sequence
  Description of Artificial Sequence: Synthetic oligonucleotide
  Sense strand starting at position 2589 of SEQ ID NO: 1888960
ggaacaauaucggcuucca

SEQ ID NO: 2569017 - RNA, 19 nt, Artificial Sequence
  Description of Artificial Sequence: Synthetic oligonucleotide
  Antisense strand to SEQ ID NO: 2569016
uggaagccgauauuguucc

SEQ ID NO: 2569018 - RNA, 19 nt, Artificial Sequence
  Description of Artificial Sequence: Synthetic oligonucleotide
  Sense strand starting at position 2660 of SEQ ID NO: 1888960
ggagauacuugugcacaua

SEQ ID NO: 2569019 - RNA, 19 nt, Artificial Sequence
  Description of Artificial Sequence: Synthetic oligonucleotide
  Antisense strand to SEQ ID NO: 2569018
uaugugcacaaguaucucc

SEQ ID NO: 2569020 - RNA, 19 nt, Artificial Sequence
  Description of Artificial Sequence: Synthetic oligonucleotide
  Sense strand starting at position 2661 of SEQ ID NO: 1888960
gagauacuugugcacauau

SEQ ID NO: 2569021 - RNA, 19 nt, Artificial Sequence
  Description of Artificial Sequence: Synthetic oligonucleotide
  Antisense strand to SEQ ID NO: 2569020
auaugugcacaaguaucuc

SEQ ID NO: 2569022 - RNA, 19 nt, Artificial Sequence
  Description of Artificial Sequence: Synthetic oligonucleotide
  Sense strand starting at position 2781 of SEQ ID NO: 1888960
ucaucuguugcucagauaa

SEQ ID NO: 2569023 - RNA, 19 nt, Artificial Sequence
  Description of Artificial Sequence: Synthetic oligonucleotide
  Antisense strand to SEQ ID NO: 2569022
uuaucugagcaacagauga

SEQ ID NO: 2569024 - RNA, 19 nt, Artificial Sequence
  Description of Artificial Sequence: Synthetic oligonucleotide
  Sense strand starting at position 2838 of SEQ ID NO: 1888960
gcuauauuggaguaaucga

SEQ ID NO: 2569025 - RNA, 19 nt, Artificial Sequence
  Description of Artificial Sequence: Synthetic oligonucleotide
  Antisense strand to SEQ ID NO: 2569024
ucgauuacuccaauauagc

SEQ ID NO: 2569026 - RNA, 19 nt, Artificial Sequence
  Description of Artificial Sequence: Synthetic oligonucleotide
  Sense strand starting at position 2857 of SEQ ID NO: 1888960
gagacaacccaguguguau

SEQ ID NO: 2569027 - RNA, 19 nt, Artificial Sequence
  Description of Artificial Sequence: Synthetic oligonucleotide
  Antisense strand to SEQ ID NO: 2569026
auacacacuggguugucuc

SEQ ID NO: 2569028 - RNA, 19 nt, Artificial Sequence
  Description of Artificial Sequence: Synthetic oligonucleotide
  Sense strand starting at position 3007 of SEQ ID NO: 1888960
gugugaucaugaguaaauc

SEQ ID NO: 2569029 - RNA, 19 nt, Artificial Sequence
  Description of Artificial Sequence: Synthetic oligonucleotide
  Antisense strand to SEQ ID NO: 2569028
gauuuacucaugaucacac

SEQ ID NO: 2569030 - RNA, 19 nt, Artificial Sequence
  Description of Artificial Sequence: Synthetic oligonucleotide
  Sense strand starting at position 3091 of SEQ ID NO: 1888960
gguuguuaugaggauuaac

SEQ ID NO: 2569031 - RNA, 19 nt, Artificial Sequence
  Description of Artificial Sequence: Synthetic oligonucleotide
  Antisense strand to SEQ ID NO: 2569030
guuaauccucauaacaacc

SEQ ID NO: 2569032 - RNA, 19 nt, Artificial Sequence
  Description of Artificial Sequence: Synthetic oligonucleotide
  Sense strand starting at position 3270 of SEQ ID NO: 1888960
uugccaaacugaguuaauu

SEQ ID NO: 2569033 - RNA, 19 nt, Artificial Sequence
  Description of Artificial Sequence: Synthetic oligonucleotide
  Antisense strand to SEQ ID NO: 2569032
aauuaacucaguuuggcaa

SEQ ID NO: 2569034 - RNA, 19 nt, Artificial Sequence
  Description of Artificial Sequence: Synthetic oligonucleotide
  Sense strand starting at position 3317 of SEQ ID NO: 1888960
ggaugaagucucuaggguu

SEQ ID NO: 2569035 - RNA, 19 nt, Artificial Sequence
  Description of Artificial Sequence: Synthetic oligonucleotide
  Antisense strand to SEQ ID NO: 2569034
aacccuagagacuucaucc

SEQ ID NO: 2569036 - RNA, 19 nt, Artificial Sequence
  Description of Artificial Sequence: Synthetic oligonucleotide
  Sense strand starting at position 3432 of SEQ ID NO: 1888960
agacuaugguguccagaau

SEQ ID NO: 2569037 - RNA, 19 nt, Artificial Sequence
  Description of Artificial Sequence: Synthetic oligonucleotide
  Antisense strand to SEQ ID NO: 2569036
auucuggacaccauagucu

SEQ ID NO: 2569038 - RNA, 19 nt, Artificial Sequence
  Description of Artificial Sequence: Synthetic oligonucleotide
  Sense strand starting at position 3433 of SEQ ID NO: 1888960
gacuaugguguccagaaug

SEQ ID NO: 2569039 - RNA, 19 nt, Artificial Sequence
  Description of Artificial Sequence: Synthetic oligonucleotide
  Antisense strand to SEQ ID NO: 2569038
cauucuggacaccauaguc

SEQ ID NO: 2569040 - RNA, 19 nt, Artificial Sequence
  Description of Artificial Sequence: Synthetic oligonucleotide
  Sense strand starting at position 3444 of SEQ ID NO: 1888960
ccagaaugcuucucugagg

SEQ ID NO: 2569041 - RNA, 19 nt, Artificial Sequence
  Description of Artificial Sequence: Synthetic oligonucleotide
  Antisense strand to SEQ ID NO: 2569040
ccucagagaagcauucugg

SEQ ID NO: 2569042 - RNA, 19 nt, Artificial Sequence
  Description of Artificial Sequence: Synthetic oligonucleotide
  Sense strand starting at position 3445 of SEQ ID NO: 1888960
cagaaugcuucucugaggu

SEQ ID NO: 2569043 - RNA, 19 nt, Artificial Sequence
  Description of Artificial Sequence: Synthetic oligonucleotide
  Antisense strand to SEQ ID NO: 2569042
accucagagaagcauucug

SEQ ID NO: 2569044 - RNA, 19 nt, Artificial Sequence
  Description of Artificial Sequence: Synthetic oligonucleotide
  Sense strand starting at position 3672 of SEQ ID NO: 1888960
agcuauaguucucccuaua

SEQ ID NO: 2569045 - RNA, 19 nt, Artificial Sequence
  Description of Artificial Sequence: Synthetic oligonucleotide
  Antisense strand to SEQ ID NO: 2569044
uauagggagaacuauagcu

SEQ ID NO: 2569046 - RNA, 19 nt, Artificial Sequence
  Description of Artificial Sequence: Synthetic oligonucleotide
  Sense strand starting at position 3708 of SEQ ID NO: 1888960
agcuauaaaugagcuuuaa

SEQ ID NO: 2569047 - RNA, 19 nt, Artificial Sequence
  Description of Artificial Sequence: Synthetic oligonucleotide
  Antisense strand to SEQ ID NO: 2569046
uuaaagcucauuuauagcu

SEQ ID NO: 2569048 - RNA, 19 nt, Artificial Sequence
  Description of Artificial Sequence: Synthetic oligonucleotide
  Sense strand starting at position 3794 of SEQ ID NO: 1888960
augaaagacucucacaaag

SEQ ID NO: 2569049 - RNA, 19 nt, Artificial Sequence
  Description of Artificial Sequence: Synthetic oligonucleotide
  Antisense strand to SEQ ID NO: 2569048
cuuugugagagucuuucau

SEQ ID NO: 2569050 - RNA, 19 nt, Artificial Sequence
  Description of Artificial Sequence: Synthetic oligonucleotide
  Sense strand starting at position 140 of SEQ ID NO: 1888961
gcuccagaucuaggagguu

SEQ ID NO: 2569051 - RNA, 19 nt, Artificial Sequence
  Description of Artificial Sequence: Synthetic oligonucleotide
  Antisense strand to SEQ ID NO: 2569050
aaccuccuagaucuggagc

SEQ ID NO: 2569052 - RNA, 19 nt, Artificial Sequence
  Description of Artificial Sequence: Synthetic oligonucleotide
  Sense strand starting at position 336 of SEQ ID NO: 1888961
ugucuccauucuccaguaa

SEQ ID NO: 2569053 - RNA, 19 nt, Artificial Sequence
  Description of Artificial Sequence: Synthetic oligonucleotide
  Antisense strand to SEQ ID NO: 2569052
uuacuggagaauggagaca

SEQ ID NO: 2569054 - RNA, 19 nt, Artificial Sequence
  Description of Artificial Sequence: Synthetic oligonucleotide
  Sense strand starting at position 610 of SEQ ID NO: 1888961
agacaagaaucugaggaca

SEQ ID NO: 2569055 - RNA, 19 nt, Artificial Sequence
  Description of Artificial Sequence: Synthetic oligonucleotide
  Antisense strand to SEQ ID NO: 2569054
uguccucagauucuugucu

SEQ ID NO: 2569056 - RNA, 19 nt, Artificial Sequence
  Description of Artificial Sequence: Synthetic oligonucleotide
  Sense strand starting at position 636 of SEQ ID NO: 1888961
ggcugaguagcucaccuua

SEQ ID NO: 2569057 - RNA, 19 nt, Artificial Sequence
  Description of Artificial Sequence: Synthetic oligonucleotide
  Antisense strand to SEQ ID NO: 2569056
uaaggugagcuacucagcc

SEQ ID NO: 2569058 - RNA, 19 nt, Artificial Sequence
  Description of Artificial Sequence: Synthetic oligonucleotide
  Sense strand starting at position 959 of SEQ ID NO: 1888961
acaggaauuugguguccca

SEQ ID NO: 2569059 - RNA, 19 nt, Artificial Sequence
  Description of Artificial Sequence: Synthetic oligonucleotide
  Antisense strand to SEQ ID NO: 2569058
ugggacaccaaauuccugu

SEQ ID NO: 2569060 - RNA, 19 nt, Artificial Sequence
  Description of Artificial Sequence: Synthetic oligonucleotide
  Sense strand starting at position 1358 of SEQ ID NO: 1888961
ggacaagcggucugcucau

SEQ ID NO: 2569061 - RNA, 19 nt, Artificial Sequence
  Description of Artificial Sequence: Synthetic oligonucleotide
  Antisense strand to SEQ ID NO: 2569060
augagcagaccgcuugucc

SEQ ID NO: 2569062 - RNA, 19 nt, Artificial Sequence
  Description of Artificial Sequence: Synthetic oligonucleotide
  Sense strand starting at position 1481 of SEQ ID NO: 1888961
ccagcagcucugugucaga

SEQ ID NO: 2569063 - RNA, 19 nt, Artificial Sequence
  Description of Artificial Sequence: Synthetic oligonucleotide
  Antisense strand to SEQ ID NO: 2569062
ucugacacagagcugcugg

SEQ ID NO: 2569064 - RNA, 19 nt, Artificial Sequence
  Description of Artificial Sequence: Synthetic oligonucleotide
  Sense strand starting at position 1666 of SEQ ID NO: 1888961
auguuaucucaugagccau

SEQ ID NO: 2569065 - RNA, 19 nt, Artificial Sequence
  Description of Artificial Sequence: Synthetic oligonucleotide
  Antisense strand to SEQ ID NO: 2569064
auggcucaugagauaacau

SEQ ID NO: 2569066 - RNA, 19 nt, Artificial Sequence
  Description of Artificial Sequence: Synthetic oligonucleotide
  Sense strand starting at position 1800 of SEQ ID NO: 1888961
ccaggagugcgcugucagu

SEQ ID NO: 2569067 - RNA, 19 nt, Artificial Sequence
  Description of Artificial Sequence: Synthetic oligonucleotide
  Antisense strand to SEQ ID NO: 2569066
acugacagcgcacuccugg

SEQ ID NO: 2569068 - RNA, 19 nt, Artificial Sequence
  Description of Artificial Sequence: Synthetic oligonucleotide
  Sense strand starting at position 1907 of SEQ ID NO: 1888961
gguaguggucaccauucua

SEQ ID NO: 2569069 - RNA, 19 nt, Artificial Sequence
  Description of Artificial Sequence: Synthetic oligonucleotide
  Antisense strand to SEQ ID NO: 2569068
uagaauggugaccacuacc

SEQ ID NO: 2569070 - RNA, 19 nt, Artificial Sequence
  Description of Artificial Sequence: Synthetic oligonucleotide
  Sense strand starting at position 1989 of SEQ ID NO: 1888961
ggcccugagcuggaaagau

SEQ ID NO: 2569071 - RNA, 19 nt, Artificial Sequence
  Description of Artificial Sequence: Synthetic oligonucleotide
  Antisense strand to SEQ ID NO: 2569070
aucuuuccagcucagggcc

SEQ ID NO: 2569072 - RNA, 19 nt, Artificial Sequence
  Description of Artificial Sequence: Synthetic oligonucleotide
  Sense strand starting at position 2012 of SEQ ID NO: 1888961
ugggcucagucuugaggga

SEQ ID NO: 2569073 - RNA, 19 nt, Artificial Sequence
  Description of Artificial Sequence: Synthetic oligonucleotide
  Antisense strand to SEQ ID NO: 2569072
ucccucaagacugagccca

SEQ ID NO: 2569074 - RNA, 19 nt, Artificial Sequence
  Description of Artificial Sequence: Synthetic oligonucleotide
  Sense strand starting at position 2016 of SEQ ID NO: 1888961
cucagucuugagggauuaa

SEQ ID NO: 2569075 - RNA, 19 nt, Artificial Sequence
  Description of Artificial Sequence: Synthetic oligonucleotide
  Antisense strand to SEQ ID NO: 2569074
uuaaucccucaagacugag

SEQ ID NO: 2569076 - RNA, 19 nt, Artificial Sequence
  Description of Artificial Sequence: Synthetic oligonucleotide
  Sense strand starting at position 2043 of SEQ ID NO: 1888961
gugucauccuaaggaacaa

SEQ ID NO: 2569077 - RNA, 19 nt, Artificial Sequence
  Description of Artificial Sequence: Synthetic oligonucleotide
  Antisense strand to SEQ ID NO: 2569076
uuguuccuuaggaugacac

SEQ ID NO: 2569078 - RNA, 19 nt, Artificial Sequence
  Description of Artificial Sequence: Synthetic oligonucleotide
  Sense strand starting at position 2354 of SEQ ID NO: 1888961
agcacaucccaguguauau

SEQ ID NO: 2569079 - RNA, 19 nt, Artificial Sequence
  Description of Artificial Sequence: Synthetic oligonucleotide
  Antisense strand to SEQ ID NO: 2569078
auauacacugggaugugcu

SEQ ID NO: 2569080 - RNA, 19 nt, Artificial Sequence
  Description of Artificial Sequence: Synthetic oligonucleotide
  Sense strand starting at position 2468 of SEQ ID NO: 1888961
gcaagagccuccuugagag

SEQ ID NO: 2569081 - RNA, 19 nt, Artificial Sequence
  Description of Artificial Sequence: Synthetic oligonucleotide
  Antisense strand to SEQ ID NO: 2569080
cucucaaggaggcucuugc

SEQ ID NO: 2569082 - RNA, 19 nt, Artificial Sequence
  Description of Artificial Sequence: Synthetic oligonucleotide
  Sense strand starting at position 2478 of SEQ ID NO: 1888961
ccuugagagccuggauguu

SEQ ID NO: 2569083 - RNA, 19 nt, Artificial Sequence
  Description of Artificial Sequence: Synthetic oligonucleotide
  Antisense strand to SEQ ID NO: 2569082
aacauccaggcucucaagg

SEQ ID NO: 2569084 - RNA, 19 nt, Artificial Sequence
  Description of Artificial Sequence: Synthetic oligonucleotide
  Sense strand starting at position 2529 of SEQ ID NO: 1888961
ggauuauggccucaagugu

SEQ ID NO: 2569085 - RNA, 19 nt, Artificial Sequence
  Description of Artificial Sequence: Synthetic oligonucleotide
  Antisense strand to SEQ ID NO: 2569084
acacuugaggccauaaucc

SEQ ID NO: 2569086 - RNA, 19 nt, Artificial Sequence
  Description of Artificial Sequence: Synthetic oligonucleotide
  Sense strand starting at position 2556 of SEQ ID NO: 1888961
gaugcuucugccuaaaggu

SEQ ID NO: 2569087 - RNA, 19 nt, Artificial Sequence
  Description of Artificial Sequence: Synthetic oligonucleotide
  Antisense strand to SEQ ID NO: 2569086
accuuuaggcagaagcauc

SEQ ID NO: 2569088 - RNA, 19 nt, Artificial Sequence
  Description of Artificial Sequence: Synthetic oligonucleotide
  Sense strand starting at position 2583 of SEQ ID NO: 1888961
aaagaacgcucagucugau

SEQ ID NO: 2569089 - RNA, 19 nt, Artificial Sequence
  Description of Artificial Sequence: Synthetic oligonucleotide
  Antisense strand to SEQ ID NO: 2569088
aucagacugagcguucuuu

SEQ ID NO: 2569090 - RNA, 19 nt, Artificial Sequence
  Description of Artificial Sequence: Synthetic oligonucleotide
  Sense strand starting at position 2601 of SEQ ID NO: 1888961
uguggucugccugaccaga

SEQ ID NO: 2569091 - RNA, 19 nt, Artificial Sequence
  Description of Artificial Sequence: Synthetic oligonucleotide
  Antisense strand to SEQ ID NO: 2569090
ucuggucaggcagaccaca

SEQ ID NO: 2569092 - RNA, 19 nt, Artificial Sequence
  Description of Artificial Sequence: Synthetic oligonucleotide
  Sense strand starting at position 2626 of SEQ ID NO: 1888961
gccugaccaccagauauau

SEQ ID NO: 2569093 - RNA, 19 nt, Artificial Sequence
  Description of Artificial Sequence: Synthetic oligonucleotide
  Antisense strand to SEQ ID NO: 2569092
auauaucugguggucaggc

SEQ ID NO: 2569094 - RNA, 19 nt, Artificial Sequence
  Description of Artificial Sequence: Synthetic oligonucleotide
  Sense strand starting at position 2667 of SEQ ID NO: 1888961
uguuauuccugcugucacu

SEQ ID NO: 2569095 - RNA, 19 nt, Artificial Sequence
  Description of Artificial Sequence: Synthetic oligonucleotide
  Antisense strand to SEQ ID NO: 2569094
agugacagcaggaauaaca

SEQ ID NO: 2569096 - RNA, 19 nt, Artificial Sequence
  Description of Artificial Sequence: Synthetic oligonucleotide
  Sense strand starting at position 2687 of SEQ ID NO: 1888961
gggccuacuugcuuguauu

SEQ ID NO: 2569097 - RNA, 19 nt, Artificial Sequence
  Description of Artificial Sequence: Synthetic oligonucleotide
  Antisense strand to SEQ ID NO: 2569096
aauacaagcaaguaggccc

SEQ ID NO: 2569098 - RNA, 19 nt, Artificial Sequence
  Description of Artificial Sequence: Synthetic oligonucleotide
  Sense strand starting at position 2688 of SEQ ID NO: 1888961
ggccuacuugcuuguauuc

SEQ ID NO: 2569099 - RNA, 19 nt, Artificial Sequence
  Description of Artificial Sequence: Synthetic oligonucleotide
  Antisense strand to SEQ ID NO: 2569098
gaauacaagcaaguaggcc

SEQ ID NO: 2569100 - RNA, 19 nt, Artificial Sequence
  Description of Artificial Sequence: Synthetic oligonucleotide
  Sense strand starting at position 2815 of SEQ ID NO: 1888961
gcuagcaaugccuacauau

SEQ ID NO: 2569101 - RNA, 19 nt, Artificial Sequence
  Description of Artificial Sequence: Synthetic oligonucleotide
  Antisense strand to SEQ ID NO: 2569100
auauguaggcauugcuagc

SEQ ID NO: 2569102 - RNA, 19 nt, Artificial Sequence
  Description of Artificial Sequence: Synthetic oligonucleotide
  Sense strand starting at position 2845 of SEQ ID NO: 1888961
uguguaaucuguugcugca

SEQ ID NO: 2569103 - RNA, 19 nt, Artificial Sequence
  Description of Artificial Sequence: Synthetic oligonucleotide
  Antisense strand to SEQ ID NO: 2569102
ugcagcaacagauuacaca

SEQ ID NO: 2569104 - RNA, 19 nt, Artificial Sequence
  Description of Artificial Sequence: Synthetic oligonucleotide
  Sense strand starting at position 2848 of SEQ ID NO: 1888961
guaaucuguugcugcaguu

SEQ ID NO: 2569105 - RNA, 19 nt, Artificial Sequence
  Description of Artificial Sequence: Synthetic oligonucleotide
  Antisense strand to SEQ ID NO: 2569104
aacugcagcaacagauuac

SEQ ID NO: 2569106 - RNA, 19 nt, Artificial Sequence
  Description of Artificial Sequence: Synthetic oligonucleotide
  Sense strand starting at position 2885 of SEQ ID NO: 1888961
gggucuuucuaccaacauc

SEQ ID NO: 2569107 - RNA, 19 nt, Artificial Sequence
  Description of Artificial Sequence: Synthetic oligonucleotide
  Antisense strand to SEQ ID NO: 2569106
gauguugguagaaagaccc

SEQ ID NO: 2569108 - RNA, 19 nt, Artificial Sequence
  Description of Artificial Sequence: Synthetic oligonucleotide
  Sense strand starting at position 2953 of SEQ ID NO: 1888961
uagggcuagucuucuagau

SEQ ID NO: 2569109 - RNA, 19 nt, Artificial Sequence
  Description of Artificial Sequence: Synthetic oligonucleotide
  Antisense strand to SEQ ID NO: 2569108
aucuagaagacuagcccua

SEQ ID NO: 2569110 - RNA, 19 nt, Artificial Sequence
  Description of Artificial Sequence: Synthetic oligonucleotide
  Sense strand starting at position 2955 of SEQ ID NO: 1888961
gggcuagucuucuagauaa

SEQ ID NO: 2569111 - RNA, 19 nt, Artificial Sequence
  Description of Artificial Sequence: Synthetic oligonucleotide
  Antisense strand to SEQ ID NO: 2569110
uuaucuagaagacuagccc

SEQ ID NO: 2569112 - RNA, 19 nt, Artificial Sequence
  Description of Artificial Sequence: Synthetic oligonucleotide
  Sense strand starting at position 2957 of SEQ ID NO: 1888961
gcuagucuucuagauaauc

SEQ ID NO: 2569113 - RNA, 19 nt, Artificial Sequence
  Description of Artificial Sequence: Synthetic oligonucleotide
  Antisense strand to SEQ ID NO: 2569112
gauuaucuagaagacuagc

SEQ ID NO: 2569114 - RNA, 19 nt, Artificial Sequence
  Description of Artificial Sequence: Synthetic oligonucleotide
  Sense strand starting at position 3092 of SEQ ID NO: 1888961
acaggagcgugauaccuaa

SEQ ID NO: 2569115 - RNA, 19 nt, Artificial Sequence
  Description of Artificial Sequence: Synthetic oligonucleotide
  Antisense strand to SEQ ID NO: 2569114
uuagguaucacgcuccugu

SEQ ID NO: 2569116 - RNA, 19 nt, Artificial Sequence
  Description of Artificial Sequence: Synthetic oligonucleotide
  Sense strand starting at position 3146 of SEQ ID NO: 1888961
caacuuugauguuuggaau

SEQ ID NO: 2569117 - RNA, 19 nt, Artificial Sequence
  Description of Artificial Sequence: Synthetic oligonucleotide
  Antisense strand to SEQ ID NO: 2569116
auuccaaacaucaaaguug

SEQ ID NO: 2569118 - RNA, 19 nt, Artificial Sequence
  Description of Artificial Sequence: Synthetic oligonucleotide
  Sense strand starting at position 3147 of SEQ ID NO: 1888961
aacuuugauguuuggaaua

SEQ ID NO: 2569119 - RNA, 19 nt, Artificial Sequence
  Description of Artificial Sequence: Synthetic oligonucleotide
  Antisense strand to SEQ ID NO: 2569118
uauuccaaacaucaaaguu

SEQ ID NO: 2569120 - RNA, 19 nt, Artificial Sequence
  Description of Artificial Sequence: Synthetic oligonucleotide
  Sense strand starting at position 3152 of SEQ ID NO: 1888961
ugauguuuggaauagggca

SEQ ID NO: 2569121 - RNA, 19 nt, Artificial Sequence
  Description of Artificial Sequence: Synthetic oligonucleotide
  Antisense strand to SEQ ID NO: 2569120
ugcccuauuccaaacauca

SEQ ID NO: 2569122 - RNA, 19 nt, Artificial Sequence
  Description of Artificial Sequence: Synthetic oligonucleotide
  Sense strand starting at position 3623 of SEQ ID NO: 1888961
ggaaccuugucccaccuau

SEQ ID NO: 2569123 - RNA, 19 nt, Artificial Sequence
  Description of Artificial Sequence: Synthetic oligonucleotide
  Antisense strand to SEQ ID NO: 2569122
auaggugggacaagguucc

SEQ ID NO: 2569124 - RNA, 19 nt, Artificial Sequence
  Description of Artificial Sequence: Synthetic oligonucleotide
  Sense strand starting at position 3731 of SEQ ID NO: 1888961
acugacugcucauuagaau

SEQ ID NO: 2569125 - RNA, 19 nt, Artificial Sequence
  Description of Artificial Sequence: Synthetic oligonucleotide
  Antisense strand to SEQ ID NO: 2569124
auucuaaugagcagucagu

SEQ ID NO: 2569126 - RNA, 19 nt, Artificial Sequence
  Description of Artificial Sequence: Synthetic oligonucleotide
  Sense strand starting at position 3732 of SEQ ID NO: 1888961
cugacugcucauuagaaug

SEQ ID NO: 2569127 - RNA, 19 nt, Artificial Sequence
  Description of Artificial Sequence: Synthetic oligonucleotide
  Antisense strand to SEQ ID NO: 2569126
cauucuaaugagcagucag

SEQ ID NO: 2569128 - RNA, 19 nt, Artificial Sequence
  Description of Artificial Sequence: Synthetic oligonucleotide
  Sense strand starting at position 3790 of SEQ ID NO: 1888961
cugagagauucuuaauuaa

SEQ ID NO: 2569129 - RNA, 19 nt, Artificial Sequence
  Description of Artificial Sequence: Synthetic oligonucleotide
  Antisense strand to SEQ ID NO: 2569128
uuaauuaagaaucucucag

SEQ ID NO: 2569130 - RNA, 19 nt, Artificial Sequence
  Description of Artificial Sequence: Synthetic oligonucleotide
  Sense strand starting at position 79 of SEQ ID NO: 1888962
agccguucugagcacagua

SEQ ID NO: 2569131 - RNA, 19 nt, Artificial Sequence
  Description of Artificial Sequence: Synthetic oligonucleotide
  Antisense strand to SEQ ID NO: 2569130
uacugugcucagaacggcu

SEQ ID NO: 2569132 - RNA, 19 nt, Artificial Sequence
  Description of Artificial Sequence: Synthetic oligonucleotide
  Sense strand starting at position 107 of SEQ ID NO: 1888962
guccacaauguuuggguga

SEQ ID NO: 2569133 - RNA, 19 nt, Artificial Sequence
  Description of Artificial Sequence: Synthetic oligonucleotide
  Antisense strand to SEQ ID NO: 2569132
ucacccaaacauuguggac

SEQ ID NO: 2569134 - RNA, 19 nt, Artificial Sequence
  Description of Artificial Sequence: Synthetic oligonucleotide
  Sense strand starting at position 112 of SEQ ID NO: 1888962
caauguuugggugacgaaa

SEQ ID NO: 2569135 - RNA, 19 nt, Artificial Sequence
  Description of Artificial Sequence: Synthetic oligonucleotide
  Antisense strand to SEQ ID NO: 2569134
uuucgucacccaaacauug

SEQ ID NO: 2569136 - RNA, 19 nt, Artificial Sequence
  Description of Artificial Sequence: Synthetic oligonucleotide
  Sense strand starting at position 121 of SEQ ID NO: 1888962
ggugacgaaaccuguuuga

SEQ ID NO: 2569137 - RNA, 19 nt, Artificial Sequence
  Description of Artificial Sequence: Synthetic oligonucleotide
  Antisense strand to SEQ ID NO: 2569136
ucaaacagguuucgucacc

SEQ ID NO: 2569138 - RNA, 19 nt, Artificial Sequence
  Description of Artificial Sequence: Synthetic oligonucleotide
  Sense strand starting at position 244 of SEQ ID NO: 1888962
cuguggugugcggucugaa

SEQ ID NO: 2569139 - RNA, 19 nt, Artificial Sequence
  Description of Artificial Sequence: Synthetic oligonucleotide
  Antisense strand to SEQ ID NO: 2569138
uucagaccgcacaccacag

SEQ ID NO: 2569140 - RNA, 19 nt, Artificial Sequence
  Description of Artificial Sequence: Synthetic oligonucleotide
  Sense strand starting at position 245 of SEQ ID NO: 1888962
uguggugugcggucugaag

SEQ ID NO: 2569141 - RNA, 19 nt, Artificial Sequence
  Description of Artificial Sequence: Synthetic oligonucleotide
  Antisense strand to SEQ ID NO: 2569140
cuucagaccgcacaccaca

SEQ ID NO: 2569142 - RNA, 19 nt, Artificial Sequence
  Description of Artificial Sequence: Synthetic oligonucleotide
  Sense strand starting at position 554 of SEQ ID NO: 1888962
aguggugaggguuaucuga

SEQ ID NO: 2569143 - RNA, 19 nt, Artificial Sequence
  Description of Artificial Sequence: Synthetic oligonucleotide
  Antisense strand to SEQ ID NO: 2569142
ucagauaacccucaccacu

SEQ ID NO: 2569144 - RNA, 19 nt, Artificial Sequence
  Description of Artificial Sequence: Synthetic oligonucleotide
  Sense strand starting at position 556 of SEQ ID NO: 1888962
uggugaggguuaucugaug

SEQ ID NO: 2569145 - RNA, 19 nt, Artificial Sequence
  Description of Artificial Sequence: Synthetic oligonucleotide
  Antisense strand to SEQ ID NO: 2569144
caucagauaacccucacca

SEQ ID NO: 2569146 - RNA, 19 nt, Artificial Sequence
  Description of Artificial Sequence: Synthetic oligonucleotide
  Sense strand starting at position 911 of SEQ ID NO: 1888962
ggcucugcgcuacaucaaa

SEQ ID NO: 2569147 - RNA, 19 nt, Artificial Sequence
  Description of Artificial Sequence: Synthetic oligonucleotide
  Antisense strand to SEQ ID NO: 2569146
uuugauguagcgcagagcc

SEQ ID NO: 2569148 - RNA, 19 nt, Artificial Sequence
  Description of Artificial Sequence: Synthetic oligonucleotide
  Sense strand starting at position 943 of SEQ ID NO: 1888962
ccuccuugucucgaaucuu

SEQ ID NO: 2569149 - RNA, 19 nt, Artificial Sequence
  Description of Artificial Sequence: Synthetic oligonucleotide
  Antisense strand to SEQ ID NO: 2569148
aagauucgagacaaggagg

SEQ ID NO: 2569150 - RNA, 19 nt, Artificial Sequence
  Description of Artificial Sequence: Synthetic oligonucleotide
  Sense strand starting at position 977 of SEQ ID NO: 1888962
gacaccuaccuugguagaa

SEQ ID NO: 2569151 - RNA, 19 nt, Artificial Sequence
  Description of Artificial Sequence: Synthetic oligonucleotide
  Antisense strand to SEQ ID NO: 2569150
uucuaccaagguagguguc

SEQ ID NO: 2569152 - RNA, 19 nt, Artificial Sequence
  Description of Artificial Sequence: Synthetic oligonucleotide
  Sense strand starting at position 979 of SEQ ID NO: 1888962
caccuaccuugguagaaga

SEQ ID NO: 2569153 - RNA, 19 nt, Artificial Sequence
  Description of Artificial Sequence: Synthetic oligonucleotide
  Antisense strand to SEQ ID NO: 2569152
ucuucuaccaagguaggug

SEQ ID NO: 2569154 - RNA, 19 nt, Artificial Sequence
  Description of Artificial Sequence: Synthetic oligonucleotide
  Sense strand starting at position 1436 of SEQ ID NO: 1888962
gcucacaggcugugaugau

SEQ ID NO: 2569155 - RNA, 19 nt, Artificial Sequence
  Description of Artificial Sequence: Synthetic oligonucleotide
  Antisense strand to SEQ ID NO: 2569154
aucaucacagccugugagc

SEQ ID NO: 2569156 - RNA, 19 nt, Artificial Sequence
  Description of Artificial Sequence: Synthetic oligonucleotide
  Sense strand starting at position 1715 of SEQ ID NO: 1888962
gggcguccaucacuuugua

SEQ ID NO: 2569157 - RNA, 19 nt, Artificial Sequence
  Description of Artificial Sequence: Synthetic oligonucleotide
  Antisense strand to SEQ ID NO: 2569156
uacaaagugauggacgccc

SEQ ID NO: 2569158 - RNA, 19 nt, Artificial Sequence
  Description of Artificial Sequence: Synthetic oligonucleotide
  Sense strand starting at position 1718 of SEQ ID NO: 1888962
cguccaucacuuuguagaa

SEQ ID NO: 2569159 - RNA, 19 nt, Artificial Sequence
  Description of Artificial Sequence: Synthetic oligonucleotide
  Antisense strand to SEQ ID NO: 2569158
uucuacaaagugauggacg

SEQ ID NO: 2569160 - RNA, 19 nt, Artificial Sequence
  Description of Artificial Sequence: Synthetic oligonucleotide
  Sense strand starting at position 1719 of SEQ ID NO: 1888962
guccaucacuuuguagaag

SEQ ID NO: 2569161 - RNA, 19 nt, Artificial Sequence
  Description of Artificial Sequence: Synthetic oligonucleotide
  Antisense strand to SEQ ID NO: 2569160
cuucuacaaagugauggac

SEQ ID NO: 2569162 - RNA, 19 nt, Artificial Sequence
  Description of Artificial Sequence: Synthetic oligonucleotide
  Sense strand starting at position 2320 of SEQ ID NO: 1888962
cuccuuagguguccugaaa

SEQ ID NO: 2569163 - RNA, 19 nt, Artificial Sequence
  Description of Artificial Sequence: Synthetic oligonucleotide
  Antisense strand to SEQ ID NO: 2569162
uuucaggacaccuaaggag

SEQ ID NO: 2569164 - RNA, 19 nt, Artificial Sequence
  Description of Artificial Sequence: Synthetic oligonucleotide
  Sense strand starting at position 2335 of SEQ ID NO: 1888962
gaaauaugccgagaacgcu

SEQ ID NO: 2569165 - RNA, 19 nt, Artificial Sequence
  Description of Artificial Sequence: Synthetic oligonucleotide
  Antisense strand to SEQ ID NO: 2569164
agcguucucggcauauuuc

SEQ ID NO: 2569166 - RNA, 19 nt, Artificial Sequence
  Description of Artificial Sequence: Synthetic oligonucleotide
  Sense strand starting at position 2487 of SEQ ID NO: 1888962
ugggcaucguccuugauua

SEQ ID NO: 2569167 - RNA, 19 nt, Artificial Sequence
  Description of Artificial Sequence: Synthetic oligonucleotide
  Antisense strand to SEQ ID NO: 2569166
uaaucaaggacgaugccca

SEQ ID NO: 2569168 - RNA, 19 nt, Artificial Sequence
  Description of Artificial Sequence: Synthetic oligonucleotide
  Sense strand starting at position 2488 of SEQ ID NO: 1888962
gggcaucguccuugauuac

SEQ ID NO: 2569169 - RNA, 19 nt, Artificial Sequence
  Description of Artificial Sequence: Synthetic oligonucleotide
  Antisense strand to SEQ ID NO: 2569168
guaaucaaggacgaugccc

SEQ ID NO: 2569170 - RNA, 19 nt, Artificial Sequence
  Description of Artificial Sequence: Synthetic oligonucleotide
  Sense strand starting at position 2489 of SEQ ID NO: 1888962
ggcaucguccuugauuacu

SEQ ID NO: 2569171 - RNA, 19 nt, Artificial Sequence
  Description of Artificial Sequence: Synthetic oligonucleotide
  Antisense strand to SEQ ID NO: 2569170
aguaaucaaggacgaugcc

SEQ ID NO: 2569172 - RNA, 19 nt, Artificial Sequence
  Description of Artificial Sequence: Synthetic oligonucleotide
  Sense strand starting at position 2498 of SEQ ID NO: 1888962
cuugauuacuugucuggac

SEQ ID NO: 2569173 - RNA, 19 nt, Artificial Sequence
  Description of Artificial Sequence: Synthetic oligonucleotide
  Antisense strand to SEQ ID NO: 2569172
guccagacaaguaaucaag

SEQ ID NO: 2569174 - RNA, 19 nt, Artificial Sequence
  Description of Artificial Sequence: Synthetic oligonucleotide
  Sense strand starting at position 2729 of SEQ ID NO: 1888962
uggagucucuuuccugaag

SEQ ID NO: 2569175 - RNA, 19 nt, Artificial Sequence
  Description of Artificial Sequence: Synthetic oligonucleotide
  Antisense strand to SEQ ID NO: 2569174
cuucaggaaagagacucca

SEQ ID NO: 2569176 - RNA, 19 nt, Artificial Sequence
  Description of Artificial Sequence: Synthetic oligonucleotide
  Sense strand starting at position 2732 of SEQ ID NO: 1888962
agucucuuuccugaagcca

SEQ ID NO: 2569177 - RNA, 19 nt, Artificial Sequence
  Description of Artificial Sequence: Synthetic oligonucleotide
  Antisense strand to SEQ ID NO: 2569176
uggcuucaggaaagagacu

SEQ ID NO: 2569178 - RNA, 19 nt, Artificial Sequence
  Description of Artificial Sequence: Synthetic oligonucleotide
  Sense strand starting at position 2815 of SEQ ID NO: 1888962
gacagacuuuacugagaug

SEQ ID NO: 2569179 - RNA, 19 nt, Artificial Sequence
  Description of Artificial Sequence: Synthetic oligonucleotide
  Antisense strand to SEQ ID NO: 2569178
caucucaguaaagucuguc

SEQ ID NO: 2569180 - RNA, 19 nt, Artificial Sequence
  Description of Artificial Sequence: Synthetic oligonucleotide
  Sense strand starting at position 2818 of SEQ ID NO: 1888962
agacuuuacugagauguac

SEQ ID NO: 2569181 - RNA, 19 nt, Artificial Sequence
  Description of Artificial Sequence: Synthetic oligonucleotide
  Antisense strand to SEQ ID NO: 2569180
guacaucucaguaaagucu

SEQ ID NO: 2569182 - RNA, 19 nt, Artificial Sequence
  Description of Artificial Sequence: Synthetic oligonucleotide
  Sense strand starting at position 2839 of SEQ ID NO: 1888962
acucaaguaucugaaauga

SEQ ID NO: 2569183 - RNA, 19 nt, Artificial Sequence
  Description of Artificial Sequence: Synthetic oligonucleotide
  Antisense strand to SEQ ID NO: 2569182
ucauuucagauacuugagu

SEQ ID NO: 2569184 - RNA, 19 nt, Artificial Sequence
  Description of Artificial Sequence: Synthetic oligonucleotide
  Sense strand starting at position 2940 of SEQ ID NO: 1888962
auacgagaugcucaaugca

SEQ ID NO: 2569185 - RNA, 19 nt, Artificial Sequence
  Description of Artificial Sequence: Synthetic oligonucleotide
  Antisense strand to SEQ ID NO: 2569184
ugcauugagcaucucguau

SEQ ID NO: 2569186 - RNA, 19 nt, Artificial Sequence
  Description of Artificial Sequence: Synthetic oligonucleotide
  Sense strand starting at position 2943 of SEQ ID NO: 1888962
cgagaugcucaaugcauac

SEQ ID NO: 2569187 - RNA, 19 nt, Artificial Sequence
  Description of Artificial Sequence: Synthetic oligonucleotide
  Antisense strand to SEQ ID NO: 2569186
guaugcauugagcaucucg

SEQ ID NO: 2569188 - RNA, 19 nt, Artificial Sequence
  Description of Artificial Sequence: Synthetic oligonucleotide
  Sense strand starting at position 3021 of SEQ ID NO: 1888962
cuagcaugugcaugugaag

SEQ ID NO: 2569189 - RNA, 19 nt, Artificial Sequence
  Description of Artificial Sequence: Synthetic oligonucleotide
  Antisense strand to SEQ ID NO: 2569188
cuucacaugcacaugcuag

SEQ ID NO: 2569190 - RNA, 19 nt, Artificial Sequence
  Description of Artificial Sequence: Synthetic oligonucleotide
  Sense strand starting at position 3039 of SEQ ID NO: 1888962
gcuggacuccuuugagcag

SEQ ID NO: 2569191 - RNA, 19 nt, Artificial Sequence
  Description of Artificial Sequence: Synthetic oligonucleotide
  Antisense strand to SEQ ID NO: 2569190
cugcucaaaggaguccagc

SEQ ID NO: 2569192 - RNA, 19 nt, Artificial Sequence
  Description of Artificial Sequence: Synthetic oligonucleotide
  Sense strand starting at position 3155 of SEQ ID NO: 1888962
gcccuugccuggucagaga

SEQ ID NO: 2569193 - RNA, 19 nt, Artificial Sequence
  Description of Artificial Sequence: Synthetic oligonucleotide
  Antisense strand to SEQ ID NO: 2569192
ucucugaccaggcaagggc

SEQ ID NO: 2569194 - RNA, 19 nt, Artificial Sequence
  Description of Artificial Sequence: Synthetic oligonucleotide
  Sense strand starting at position 3389 of SEQ ID NO: 1888962
gagcacuggcuuggaagaa

SEQ ID NO: 2569195 - RNA, 19 nt, Artificial Sequence
  Description of Artificial Sequence: Synthetic oligonucleotide
  Antisense strand to SEQ ID NO: 2569194
uucuuccaagccagugcuc

SEQ ID NO: 2569196 - RNA, 19 nt, Artificial Sequence
  Description of Artificial Sequence: Synthetic oligonucleotide
  Sense strand starting at position 3548 of SEQ ID NO: 1888962
ggacuucugucuuauaaug

SEQ ID NO: 2569197 - RNA, 19 nt, Artificial Sequence
  Description of Artificial Sequence: Synthetic oligonucleotide
  Antisense strand to SEQ ID NO: 2569196
cauuauaagacagaagucc

SEQ ID NO: 2569198 - RNA, 19 nt, Artificial Sequence
  Description of Artificial Sequence: Synthetic oligonucleotide
  Sense strand starting at position 3648 of SEQ ID NO: 1888962
ggugcaaacgcgucacuua

SEQ ID NO: 2569199 - RNA, 19 nt, Artificial Sequence
  Description of Artificial Sequence: Synthetic oligonucleotide
  Antisense strand to SEQ ID NO: 2569198
uaagugacgcguuugcacc

SEQ ID NO: 2569200 - RNA, 19 nt, Artificial Sequence
  Description of Artificial Sequence: Synthetic oligonucleotide
  Sense strand starting at position 3651 of SEQ ID NO: 1888962
gcaaacgcgucacuuagaa

SEQ ID NO: 2569201 - RNA, 19 nt, Artificial Sequence
  Description of Artificial Sequence: Synthetic oligonucleotide
  Antisense strand to SEQ ID NO: 2569200
uucuaagugacgcguuugc

SEQ ID NO: 2569202 - RNA, 19 nt, Artificial Sequence
  Description of Artificial Sequence: Synthetic oligonucleotide
  Sense strand starting at position 3670 of SEQ ID NO: 1888962
aggcaugcugaguauucuu

SEQ ID NO: 2569203 - RNA, 19 nt, Artificial Sequence
  Description of Artificial Sequence: Synthetic oligonucleotide
  Antisense strand to SEQ ID NO: 2569202
aagaauacucagcaugccu

SEQ ID NO: 2569204 - RNA, 19 nt, Artificial Sequence
  Description of Artificial Sequence: Synthetic oligonucleotide
  Sense strand starting at position 3675 of SEQ ID NO: 1888962
ugcugaguauucuuugcuu

SEQ ID NO: 2569205 - RNA, 19 nt, Artificial Sequence
  Description of Artificial Sequence: Synthetic oligonucleotide
  Antisense strand to SEQ ID NO: 2569204
aagcaaagaauacucagca

SEQ ID NO: 2569206 - RNA, 19 nt, Artificial Sequence
  Description of Artificial Sequence: Synthetic oligonucleotide
  Sense strand starting at position 3677 of SEQ ID NO: 1888962
cugaguauucuuugcuuuc

SEQ ID NO: 2569207 - RNA, 19 nt, Artificial Sequence
  Description of Artificial Sequence: Synthetic oligonucleotide
  Antisense strand to SEQ ID NO: 2569206
gaaagcaaagaauacucag

SEQ ID NO: 2569208 - RNA, 19 nt, Artificial Sequence
  Description of Artificial Sequence: Synthetic oligonucleotide
  Sense strand starting at position 3918 of SEQ ID NO: 1888962
gguuuacugaaaugguaca

SEQ ID NO: 2569209 - RNA, 19 nt, Artificial Sequence
  Description of Artificial Sequence: Synthetic oligonucleotide
  Antisense strand to SEQ ID NO: 2569208
uguaccauuucaguaaacc

SEQ ID NO: 2569210 - RNA, 19 nt, Artificial Sequence
  Description of Artificial Sequence: Synthetic oligonucleotide
  Sense strand starting at position 319 of SEQ ID NO: 1888963
ugguguagacacugaugaa

SEQ ID NO: 2569211 - RNA, 19 nt, Artificial Sequence
  Description of Artificial Sequence: Synthetic oligonucleotide
  Antisense strand to SEQ ID NO: 2569210
uucaucagugucuacacca

SEQ ID NO: 2569212 - RNA, 19 nt, Artificial Sequence
  Description of Artificial Sequence: Synthetic oligonucleotide
  Sense strand starting at position 679 of SEQ ID NO: 1888963
acuguaagcuacuugaaug

SEQ ID NO: 2569213 - RNA, 19 nt, Artificial Sequence
  Description of Artificial Sequence: Synthetic oligonucleotide
  Antisense strand to SEQ ID NO: 2569212
cauucaaguagcuuacagu

SEQ ID NO: 2569214 - RNA, 19 nt, Artificial Sequence
  Description of Artificial Sequence: Synthetic oligonucleotide
  Sense strand starting at position 919 of SEQ ID NO: 1888963
agauuugagucuuauaaga

SEQ ID NO: 2569215 - RNA, 19 nt, Artificial Sequence
  Description of Artificial Sequence: Synthetic oligonucleotide
  Antisense strand to SEQ ID NO: 2569214
ucuuauaagacucaaaucu

SEQ ID NO: 2569216 - RNA, 19 nt, Artificial Sequence
  Description of Artificial Sequence: Synthetic oligonucleotide
  Sense strand starting at position 978 of SEQ ID NO: 1888963
auaagaugugauuggcaaa

SEQ ID NO: 2569217 - RNA, 19 nt, Artificial Sequence
  Description of Artificial Sequence: Synthetic oligonucleotide
  Antisense strand to SEQ ID NO: 2569216
uuugccaaucacaucuuau

SEQ ID NO: 2569218 - RNA, 19 nt, Artificial Sequence
  Description of Artificial Sequence: Synthetic oligonucleotide
  Sense strand starting at position 1052 of SEQ ID NO: 1888963
uuccgugucauauaagaag

SEQ ID NO: 2569219 - RNA, 19 nt, Artificial Sequence
  Description of Artificial Sequence: Synthetic oligonucleotide
  Antisense strand to SEQ ID NO: 2569218
cuucuuauaugacacggaa

SEQ ID NO: 2569220 - RNA, 19 nt, Artificial Sequence
  Description of Artificial Sequence: Synthetic oligonucleotide
  Sense strand starting at position 1203 of SEQ ID NO: 1888963
gaggauucguuaucaucag

SEQ ID NO: 2569221 - RNA, 19 nt, Artificial Sequence
  Description of Artificial Sequence: Synthetic oligonucleotide
  Antisense strand to SEQ ID NO: 2569220
cugaugauaacgaauccuc

SEQ ID NO: 2569222 - RNA, 19 nt, Artificial Sequence
  Description of Artificial Sequence: Synthetic oligonucleotide
  Sense strand starting at position 1207 of SEQ ID NO: 1888963
auucguuaucaucagucaa

SEQ ID NO: 2569223 - RNA, 19 nt, Artificial Sequence
  Description of Artificial Sequence: Synthetic oligonucleotide
  Antisense strand to SEQ ID NO: 2569222
uugacugaugauaacgaau

SEQ ID NO: 2569224 - RNA, 19 nt, Artificial Sequence
  Description of Artificial Sequence: Synthetic oligonucleotide
  Sense strand starting at position 1244 of SEQ ID NO: 1888963
ccaguauuagacugcuaaa

SEQ ID NO: 2569225 - RNA, 19 nt, Artificial Sequence
  Description of Artificial Sequence: Synthetic oligonucleotide
  Antisense strand to SEQ ID NO: 2569224
uuuagcagucuaauacugg

SEQ ID NO: 2569226 - RNA, 19 nt, Artificial Sequence
  Description of Artificial Sequence: Synthetic oligonucleotide
  Sense strand starting at position 1324 of SEQ ID NO: 1888963
auauaaauaugugucgaac

SEQ ID NO: 2569227 - RNA, 19 nt, Artificial Sequence
  Description of Artificial Sequence: Synthetic oligonucleotide
  Antisense strand to SEQ ID NO: 2569226
guucgacacauauuuauau

SEQ ID NO: 2569228 - RNA, 19 nt, Artificial Sequence
  Description of Artificial Sequence: Synthetic oligonucleotide
  Sense strand starting at position 1327 of SEQ ID NO: 1888963
uaaauaugugucgaacaaa

SEQ ID NO: 2569229 - RNA, 19 nt, Artificial Sequence
  Description of Artificial Sequence: Synthetic oligonucleotide
  Antisense strand to SEQ ID NO: 2569228
uuuguucgacacauauuua

SEQ ID NO: 2569230 - RNA, 19 nt, Artificial Sequence
  Description of Artificial Sequence: Synthetic oligonucleotide
  Sense strand starting at position 1600 of SEQ ID NO: 1888963
agcauuacacaagguuaaa

SEQ ID NO: 2569231 - RNA, 19 nt, Artificial Sequence
  Description of Artificial Sequence: Synthetic oligonucleotide
  Antisense strand to SEQ ID NO: 2569230
uuuaaccuuguguaaugcu

SEQ ID NO: 2569232 - RNA, 19 nt, Artificial Sequence
  Description of Artificial Sequence: Synthetic oligonucleotide
  Sense strand starting at position 1667 of SEQ ID NO: 1888963
uugccaauggaguauauau

SEQ ID NO: 2569233 - RNA, 19 nt, Artificial Sequence
  Description of Artificial Sequence: Synthetic oligonucleotide
  Antisense strand to SEQ ID NO: 2569232
auauauacuccauuggcaa

SEQ ID NO: 2569234 - RNA, 19 nt, Artificial Sequence
  Description of Artificial Sequence: Synthetic oligonucleotide
  Sense strand starting at position 1695 of SEQ ID NO: 1888963
gcaacauuauaaucuguga

SEQ ID NO: 2569235 - RNA, 19 nt, Artificial Sequence
  Description of Artificial Sequence: Synthetic oligonucleotide
  Antisense strand to SEQ ID NO: 2569234
ucacagauuauaauguugc

SEQ ID NO: 2569236 - RNA, 19 nt, Artificial Sequence
  Description of Artificial Sequence: Synthetic oligonucleotide
  Sense strand starting at position 1814 of SEQ ID NO: 1888963
guguucuaccuugaggagu

SEQ ID NO: 2569237 - RNA, 19 nt, Artificial Sequence
  Description of Artificial Sequence: Synthetic oligonucleotide
  Antisense strand to SEQ ID NO: 2569236
acuccucaagguagaacac

SEQ ID NO: 2569238 - RNA, 19 nt, Artificial Sequence
  Description of Artificial Sequence: Synthetic oligonucleotide
  Sense strand starting at position 1844 of SEQ ID NO: 1888963
cagucccacugaucugaga

SEQ ID NO: 2569239 - RNA, 19 nt, Artificial Sequence
  Description of Artificial Sequence: Synthetic oligonucleotide
  Antisense strand to SEQ ID NO: 2569238
ucucagaucagugggacug

SEQ ID NO: 2569240 - RNA, 19 nt, Artificial Sequence
  Description of Artificial Sequence: Synthetic oligonucleotide
  Sense strand starting at position 2035 of SEQ ID NO: 1888963
uucuuuauacuauggcaga

SEQ ID NO: 2569241 - RNA, 19 nt, Artificial Sequence
  Description of Artificial Sequence: Synthetic oligonucleotide
  Antisense strand to SEQ ID NO: 2569240
ucugccauaguauaaagaa

SEQ ID NO: 2569242 - RNA, 19 nt, Artificial Sequence
  Description of Artificial Sequence: Synthetic oligonucleotide
  Sense strand starting at position 2040 of SEQ ID NO: 1888963
uauacuauggcagaguaua

SEQ ID NO: 2569243 - RNA, 19 nt, Artificial Sequence
  Description of Artificial Sequence: Synthetic oligonucleotide
  Antisense strand to SEQ ID NO: 2569242
uauacucugccauaguaua

SEQ ID NO: 2569244 - RNA, 19 nt, Artificial Sequence
  Description of Artificial Sequence: Synthetic oligonucleotide
  Sense strand starting at position 2072 of SEQ ID NO: 1888963
ggccaagagucuccuaaug

SEQ ID NO: 2569245 - RNA, 19 nt, Artificial Sequence
  Description of Artificial Sequence: Synthetic oligonucleotide
  Antisense strand to SEQ ID NO: 2569244
cauuaggagacucuuggcc

SEQ ID NO: 2569246 - RNA, 19 nt, Artificial Sequence
  Description of Artificial Sequence: Synthetic oligonucleotide
  Sense strand starting at position 2185 of SEQ ID NO: 1888963
aucaauaaauggcauuuga

SEQ ID NO: 2569247 - RNA, 19 nt, Artificial Sequence
  Description of Artificial Sequence: Synthetic oligonucleotide
  Antisense strand to SEQ ID NO: 2569246
ucaaaugccauuuauugau

SEQ ID NO: 2569248 - RNA, 19 nt, Artificial Sequence
  Description of Artificial Sequence: Synthetic oligonucleotide
  Sense strand starting at position 2371 of SEQ ID NO: 1888963
auucgagaucauuaagguu

SEQ ID NO: 2569249 - RNA, 19 nt, Artificial Sequence
  Description of Artificial Sequence: Synthetic oligonucleotide
  Antisense strand to SEQ ID NO: 2569248
aaccuuaaugaucucgaau

SEQ ID NO: 2569250 - RNA, 19 nt, Artificial Sequence
  Description of Artificial Sequence: Synthetic oligonucleotide
  Sense strand starting at position 2973 of SEQ ID NO: 1888963
ucacuuuaagaagguuuaa

SEQ ID NO: 2569251 - RNA, 19 nt, Artificial Sequence
  Description of Artificial Sequence: Synthetic oligonucleotide
  Antisense strand to SEQ ID NO: 2569250
uuaaaccuucuuaaaguga

SEQ ID NO: 2569252 - RNA, 19 nt, Artificial Sequence
  Description of Artificial Sequence: Synthetic oligonucleotide
  Sense strand starting at position 3042 of SEQ ID NO: 1888963
ccuaaagaucuugguuaua

SEQ ID NO: 2569253 - RNA, 19 nt, Artificial Sequence
  Description of Artificial Sequence: Synthetic oligonucleotide
  Antisense strand to SEQ ID NO: 2569252
uauaaccaagaucuuuagg

SEQ ID NO: 2569254 - RNA, 19 nt, Artificial Sequence
  Description of Artificial Sequence: Synthetic oligonucleotide
  Sense strand starting at position 3095 of SEQ ID NO: 1888963
agugacagacauuguuaaa

SEQ ID NO: 2569255 - RNA, 19 nt, Artificial Sequence
  Description of Artificial Sequence: Synthetic oligonucleotide
  Antisense strand to SEQ ID NO: 2569254
uuuaacaaugucugucacu

SEQ ID NO: 2569256 - RNA, 19 nt, Artificial Sequence
  Description of Artificial Sequence: Synthetic oligonucleotide
  Sense strand starting at position 3136 of SEQ ID NO: 1888963
augacagacuuuguuucua

SEQ ID NO: 2569257 - RNA, 19 nt, Artificial Sequence
  Description of Artificial Sequence: Synthetic oligonucleotide
  Antisense strand to SEQ ID NO: 2569256
uagaaacaaagucugucau

SEQ ID NO: 2569258 - RNA, 19 nt, Artificial Sequence
  Description of Artificial Sequence: Synthetic oligonucleotide
  Sense strand starting at position 3194 of SEQ ID NO: 1888963
uuuguugcucgcucucaau

SEQ ID NO: 2569259 - RNA, 19 nt, Artificial Sequence
  Description of Artificial Sequence: Synthetic oligonucleotide
  Antisense strand to SEQ ID NO: 2569258
auugagagcgagcaacaaa

SEQ ID NO: 2569260 - RNA, 19 nt, Artificial Sequence
  Description of Artificial Sequence: Synthetic oligonucleotide
  Sense strand starting at position 3205 of SEQ ID NO: 1888963
cucucaauuuguguuuacu

SEQ ID NO: 2569261 - RNA, 19 nt, Artificial Sequence
  Description of Artificial Sequence: Synthetic oligonucleotide
  Antisense strand to SEQ ID NO: 2569260
aguaaacacaaauugagag

SEQ ID NO: 2569262 - RNA, 19 nt, Artificial Sequence
  Description of Artificial Sequence: Synthetic oligonucleotide
  Sense strand starting at position 3256 of SEQ ID NO: 1888963
gcucaucugagaggaaacu

SEQ ID NO: 2569263 - RNA, 19 nt, Artificial Sequence
  Description of Artificial Sequence: Synthetic oligonucleotide
  Antisense strand to SEQ ID NO: 2569262
aguuuccucucagaugagc

SEQ ID NO: 2569264 - RNA, 19 nt, Artificial Sequence
  Description of Artificial Sequence: Synthetic oligonucleotide
  Sense strand starting at position 3266 of SEQ ID NO: 1888963
gaggaaacucccuguuucu

SEQ ID NO: 2569265 - RNA, 19 nt, Artificial Sequence
  Description of Artificial Sequence: Synthetic oligonucleotide
  Antisense strand to SEQ ID NO: 2569264
agaaacagggaguuuccuc

SEQ ID NO: 2569266 - RNA, 19 nt, Artificial Sequence
  Description of Artificial Sequence: Synthetic oligonucleotide
  Sense strand starting at position 3328 of SEQ ID NO: 1888963
ucuguuuaaccugagucau

SEQ ID NO: 2569267 - RNA, 19 nt, Artificial Sequence
  Description of Artificial Sequence: Synthetic oligonucleotide
  Antisense strand to SEQ ID NO: 2569266
augacucagguuaaacaga

SEQ ID NO: 2569268 - RNA, 19 nt, Artificial Sequence
  Description of Artificial Sequence: Synthetic oligonucleotide
  Sense strand starting at position 3371 of SEQ ID NO: 1888963
ccuaguaguuaggcaaaga

SEQ ID NO: 2569269 - RNA, 19 nt, Artificial Sequence
  Description of Artificial Sequence: Synthetic oligonucleotide
  Antisense strand to SEQ ID NO: 2569268
ucuuugccuaacuacuagg

SEQ ID NO: 2569270 - RNA, 19 nt, Artificial Sequence
  Description of Artificial Sequence: Synthetic oligonucleotide
  Sense strand starting at position 3372 of SEQ ID NO: 1888963
cuaguaguuaggcaaagag

SEQ ID NO: 2569271 - RNA, 19 nt, Artificial Sequence
  Description of Artificial Sequence: Synthetic oligonucleotide
  Antisense strand to SEQ ID NO: 2569270
cucuuugccuaacuacuag

SEQ ID NO: 2569272 - RNA, 19 nt, Artificial Sequence
  Description of Artificial Sequence: Synthetic oligonucleotide
  Sense strand starting at position 3648 of SEQ ID NO: 1888963
uucuaagacugguuacuca

SEQ ID NO: 2569273 - RNA, 19 nt, Artificial Sequence
  Description of Artificial Sequence: Synthetic oligonucleotide
  Antisense strand to SEQ ID NO: 2569272
ugaguaaccagucuuagaa

SEQ ID NO: 2569274 - RNA, 19 nt, Artificial Sequence
  Description of Artificial Sequence: Synthetic oligonucleotide
  Sense strand starting at position 3722 of SEQ ID NO: 1888963
uacaaugacucuguaaggu

SEQ ID NO: 2569275 - RNA, 19 nt, Artificial Sequence
  Description of Artificial Sequence: Synthetic oligonucleotide
  Antisense strand to SEQ ID NO: 2569274
accuuacagagucauugua

SEQ ID NO: 2569276 - RNA, 19 nt, Artificial Sequence
  Description of Artificial Sequence: Synthetic oligonucleotide
  Sense strand starting at position 3737 of SEQ ID NO: 1888963
aggugucaauaaucucuga

SEQ ID NO: 2569277 - RNA, 19 nt, Artificial Sequence
  Description of Artificial Sequence: Synthetic oligonucleotide
  Antisense strand to SEQ ID NO: 2569276
ucagagauuauugacaccu

SEQ ID NO: 2569278 - RNA, 19 nt, Artificial Sequence
  Description of Artificial Sequence: Synthetic oligonucleotide
  Sense strand starting at position 3740 of SEQ ID NO: 1888963
ugucaauaaucucugaaag

SEQ ID NO: 2569279 - RNA, 19 nt, Artificial Sequence
  Description of Artificial Sequence: Synthetic oligonucleotide
  Antisense strand to SEQ ID NO: 2569278
cuuucagagauuauugaca

SEQ ID NO: 2569280 - RNA, 19 nt, Artificial Sequence
  Description of Artificial Sequence: Synthetic oligonucleotide
  Sense strand starting at position 3741 of SEQ ID NO: 1888963
gucaauaaucucugaaagu

SEQ ID NO: 2569281 - RNA, 19 nt, Artificial Sequence
  Description of Artificial Sequence: Synthetic oligonucleotide
  Antisense strand to SEQ ID NO: 2569280
acuuucagagauuauugac

SEQ ID NO: 2569282 - RNA, 19 nt, Artificial Sequence
  Description of Artificial Sequence: Synthetic oligonucleotide
  Sense strand starting at position 3752 of SEQ ID NO: 1888963
cugaaaguucugggaugag

SEQ ID NO: 2569283 - RNA, 19 nt, Artificial Sequence
  Description of Artificial Sequence: Synthetic oligonucleotide
  Antisense strand to SEQ ID NO: 2569282
cucaucccagaacuuucag

SEQ ID NO: 2569284 - RNA, 19 nt, Artificial Sequence
  Description of Artificial Sequence: Synthetic oligonucleotide
  Sense strand starting at position 3841 of SEQ ID NO: 1888963
acacgaugaguagagguuu

SEQ ID NO: 2569285 - RNA, 19 nt, Artificial Sequence
  Description of Artificial Sequence: Synthetic oligonucleotide
  Antisense strand to SEQ ID NO: 2569284
aaaccucuacucaucgugu

SEQ ID NO: 2569286 - RNA, 19 nt, Artificial Sequence
  Description of Artificial Sequence: Synthetic oligonucleotide
  Sense strand starting at position 3871 of SEQ ID NO: 1888963
gcuucuagacccugaaaua

SEQ ID NO: 2569287 - RNA, 19 nt, Artificial Sequence
  Description of Artificial Sequence: Synthetic oligonucleotide
  Antisense strand to SEQ ID NO: 2569286
uauuucagggucuagaagc

SEQ ID NO: 2569288 - RNA, 19 nt, Artificial Sequence
  Description of Artificial Sequence: Synthetic oligonucleotide
  Sense strand starting at position 3883 of SEQ ID NO: 1888963
ugaaauaauugagcucauu

SEQ ID NO: 2569289 - RNA, 19 nt, Artificial Sequence
  Description of Artificial Sequence: Synthetic oligonucleotide
  Antisense strand to SEQ ID NO: 2569288
aaugagcucaauuauuuca

SEQ ID NO: 2569290 - RNA, 19 nt, Artificial Sequence
  Description of Artificial Sequence: Synthetic oligonucleotide
  Sense strand starting at position 3 of SEQ ID NO: 1888964
acugaauaguuuguccaua

SEQ ID NO: 2569291 - RNA, 19 nt, Artificial Sequence
  Description of Artificial Sequence: Synthetic oligonucleotide
  Antisense strand to SEQ ID NO: 2569290
uauggacaaacuauucagu

SEQ ID NO: 2569292 - RNA, 19 nt, Artificial Sequence
  Description of Artificial Sequence: Synthetic oligonucleotide
  Sense strand starting at position 4 of SEQ ID NO: 1888964
cugaauaguuuguccauaa

SEQ ID NO: 2569293 - RNA, 19 nt, Artificial Sequence
  Description of Artificial Sequence: Synthetic oligonucleotide
  Antisense strand to SEQ ID NO: 2569292
uuauggacaaacuauucag

SEQ ID NO: 2569294 - RNA, 19 nt, Artificial Sequence
  Description of Artificial Sequence: Synthetic oligonucleotide
  Sense strand starting at position 5 of SEQ ID NO: 1888964
ugaauaguuuguccauaag

SEQ ID NO: 2569295 - RNA, 19 nt, Artificial Sequence
  Description of Artificial Sequence: Synthetic oligonucleotide
  Antisense strand to SEQ ID NO: 2569294
cuuauggacaaacuauuca

SEQ ID NO: 2569296 - RNA, 19 nt, Artificial Sequence
  Description of Artificial Sequence: Synthetic oligonucleotide
  Sense strand starting at position 8 of SEQ ID NO: 1888964
auaguuuguccauaagagu

SEQ ID NO: 2569297 - RNA, 19 nt, Artificial Sequence
  Description of Artificial Sequence: Synthetic oligonucleotide
  Antisense strand to SEQ ID NO: 2569296
acucuuauggacaaacuau

SEQ ID NO: 2569298 - RNA, 19 nt, Artificial Sequence
  Description of Artificial Sequence: Synthetic oligonucleotide
  Sense strand starting at position 17 of SEQ ID NO: 1888964
ccauaagaguuucucauug

SEQ ID NO: 2569299 - RNA, 19 nt, Artificial Sequence
  Description of Artificial Sequence: Synthetic oligonucleotide
  Antisense strand to SEQ ID NO: 2569298
caaugagaaacucuuaugg

SEQ ID NO: 2569300 - RNA, 19 nt, Artificial Sequence
  Description of Artificial Sequence: Synthetic oligonucleotide
  Sense strand starting at position 21 of SEQ ID NO: 1888964
aagaguuucucauugccug

SEQ ID NO: 2569301 - RNA, 19 nt, Artificial Sequence
  Description of Artificial Sequence: Synthetic oligonucleotide
  Antisense strand to SEQ ID NO: 2569300
caggcaaugagaaacucuu

SEQ ID NO: 2569302 - RNA, 19 nt, Artificial Sequence
  Description of Artificial Sequence: Synthetic oligonucleotide
  Sense strand starting at position 22 of SEQ ID NO: 1888964
agaguuucucauugccuga

SEQ ID NO: 2569303 - RNA, 19 nt, Artificial Sequence
  Description of Artificial Sequence: Synthetic oligonucleotide
  Antisense strand to SEQ ID NO: 2569302
ucaggcaaugagaaacucu

SEQ ID NO: 2569304 - RNA, 19 nt, Artificial Sequence
  Description of Artificial Sequence: Synthetic oligonucleotide
  Sense strand starting at position 24 of SEQ ID NO: 1888964
aguuucucauugccugaau

SEQ ID NO: 2569305 - RNA, 19 nt, Artificial Sequence
  Description of Artificial Sequence: Synthetic oligonucleotide
  Antisense strand to SEQ ID NO: 2569304
auucaggcaaugagaaacu

SEQ ID NO: 2569306 - RNA, 19 nt, Artificial Sequence
  Description of Artificial Sequence: Synthetic oligonucleotide
  Sense strand starting at position 37 of SEQ ID NO: 1888964
cugaauauugcuuagugca

SEQ ID NO: 2569307 - RNA, 19 nt, Artificial Sequence
  Description of Artificial Sequence: Synthetic oligonucleotide
  Antisense strand to SEQ ID NO: 2569306
ugcacuaagcaauauucag

SEQ ID NO: 2569308 - RNA, 19 nt, Artificial Sequence
  Description of Artificial Sequence: Synthetic oligonucleotide
  Sense strand starting at position 80 of SEQ ID NO: 1888964
uccucuguccuugauauuc

SEQ ID NO: 2569309 - RNA, 19 nt, Artificial Sequence
  Description of Artificial Sequence: Synthetic oligonucleotide
  Antisense strand to SEQ ID NO: 2569308
gaauaucaaggacagagga

SEQ ID NO: 2569310 - RNA, 19 nt, Artificial Sequence
  Description of Artificial Sequence: Synthetic oligonucleotide
  Sense strand starting at position 128 of SEQ ID NO: 1888964
agggcuauccaauagagcu

SEQ ID NO: 2569311 - RNA, 19 nt, Artificial Sequence
  Description of Artificial Sequence: Synthetic oligonucleotide
  Antisense strand to SEQ ID NO: 2569310
agcucuauuggauagcccu

SEQ ID NO: 2569312 - RNA, 19 nt, Artificial Sequence
  Description of Artificial Sequence: Synthetic oligonucleotide
  Sense strand starting at position 165 of SEQ ID NO: 1888964
guucuauaucugcauccuu

SEQ ID NO: 2569313 - RNA, 19 nt, Artificial Sequence
  Description of Artificial Sequence: Synthetic oligonucleotide
  Antisense strand to SEQ ID NO: 2569312
aaggaugcagauauagaac

SEQ ID NO: 2569314 - RNA, 19 nt, Artificial Sequence
  Description of Artificial Sequence: Synthetic oligonucleotide
  Sense strand starting at position 930 of SEQ ID NO: 1888964
guggcuagugacuauugaa

SEQ ID NO: 2569315 - RNA, 19 nt, Artificial Sequence
  Description of Artificial Sequence: Synthetic oligonucleotide
  Antisense strand to SEQ ID NO: 2569314
uucaauagucacuagccac

SEQ ID NO: 2569316 - RNA, 19 nt, Artificial Sequence
  Description of Artificial Sequence: Synthetic oligonucleotide
  Sense strand starting at position 1163 of SEQ ID NO: 1888964
aguagaguuagccaggaug

SEQ ID NO: 2569317 - RNA, 19 nt, Artificial Sequence
  Description of Artificial Sequence: Synthetic oligonucleotide
  Antisense strand to SEQ ID NO: 2569316
cauccuggcuaacucuacu

SEQ ID NO: 2569318 - RNA, 19 nt, Artificial Sequence
  Description of Artificial Sequence: Synthetic oligonucleotide
  Sense strand starting at position 1165 of SEQ ID NO: 1888964
uagaguuagccaggauggu

SEQ ID NO: 2569319 - RNA, 19 nt, Artificial Sequence
  Description of Artificial Sequence: Synthetic oligonucleotide
  Antisense strand to SEQ ID NO: 2569318
accauccuggcuaacucua

SEQ ID NO: 2569320 - RNA, 19 nt, Artificial Sequence
  Description of Artificial Sequence: Synthetic oligonucleotide
  Sense strand starting at position 1387 of SEQ ID NO: 1888964
cuugaucuccucugaggca

SEQ ID NO: 2569321 - RNA, 19 nt, Artificial Sequence
  Description of Artificial Sequence: Synthetic oligonucleotide
  Antisense strand to SEQ ID NO: 2569320
ugccucagaggagaucaag

SEQ ID NO: 2569322 - RNA, 19 nt, Artificial Sequence
  Description of Artificial Sequence: Synthetic oligonucleotide
  Sense strand starting at position 1568 of SEQ ID NO: 1888964
ggagcagacugauucucaa

SEQ ID NO: 2569323 - RNA, 19 nt, Artificial Sequence
  Description of Artificial Sequence: Synthetic oligonucleotide
  Antisense strand to SEQ ID NO: 2569322
uugagaaucagucugcucc

SEQ ID NO: 2569324 - RNA, 19 nt, Artificial Sequence
  Description of Artificial Sequence: Synthetic oligonucleotide
  Sense strand starting at position 1683 of SEQ ID NO: 1888964
ggaacuuaagucugucuuu

SEQ ID NO: 2569325 - RNA, 19 nt, Artificial Sequence
  Description of Artificial Sequence: Synthetic oligonucleotide
  Antisense strand to SEQ ID NO: 2569324
aaagacagacuuaaguucc

SEQ ID NO: 2569326 - RNA, 19 nt, Artificial Sequence
  Description of Artificial Sequence: Synthetic oligonucleotide
  Sense strand starting at position 1735 of SEQ ID NO: 1888964
cuaucaacacagugaaugu

SEQ ID NO: 2569327 - RNA, 19 nt, Artificial Sequence
  Description of Artificial Sequence: Synthetic oligonucleotide
  Antisense strand to SEQ ID NO: 2569326
acauucacuguguugauag

SEQ ID NO: 2569328 - RNA, 19 nt, Artificial Sequence
  Description of Artificial Sequence: Synthetic oligonucleotide
  Sense strand starting at position 1745 of SEQ ID NO: 1888964
agugaaugucaugguagau

SEQ ID NO: 2569329 - RNA, 19 nt, Artificial Sequence
  Description of Artificial Sequence: Synthetic oligonucleotide
  Antisense strand to SEQ ID NO: 2569328
aucuaccaugacauucacu

SEQ ID NO: 2569330 - RNA, 19 nt, Artificial Sequence
  Description of Artificial Sequence: Synthetic oligonucleotide
  Sense strand starting at position 2050 of SEQ ID NO: 1888964
ggauucuaauaguuccaua

SEQ ID NO: 2569331 - RNA, 19 nt, Artificial Sequence
  Description of Artificial Sequence: Synthetic oligonucleotide
  Antisense strand to SEQ ID NO: 2569330
uauggaacuauuagaaucc

SEQ ID NO: 2569332 - RNA, 19 nt, Artificial Sequence
  Description of Artificial Sequence: Synthetic oligonucleotide
  Sense strand starting at position 2122 of SEQ ID NO: 1888964
gauggagauucgcucucuu

SEQ ID NO: 2569333 - RNA, 19 nt, Artificial Sequence
  Description of Artificial Sequence: Synthetic oligonucleotide
  Antisense strand to SEQ ID NO: 2569332
aagagagcgaaucuccauc

SEQ ID NO: 2569334 - RNA, 19 nt, Artificial Sequence
  Description of Artificial Sequence: Synthetic oligonucleotide
  Sense strand starting at position 2579 of SEQ ID NO: 1888964
uuuggcuuucuguuucgua

SEQ ID NO: 2569335 - RNA, 19 nt, Artificial Sequence
  Description of Artificial Sequence: Synthetic oligonucleotide
  Antisense strand to SEQ ID NO: 2569334
uacgaaacagaaagccaaa

SEQ ID NO: 2569336 - RNA, 19 nt, Artificial Sequence
  Description of Artificial Sequence: Synthetic oligonucleotide
  Sense strand starting at position 2581 of SEQ ID NO: 1888964
uggcuuucuguuucguauu

SEQ ID NO: 2569337 - RNA, 19 nt, Artificial Sequence
  Description of Artificial Sequence: Synthetic oligonucleotide
  Antisense strand to SEQ ID NO: 2569336
aauacgaaacagaaagcca

SEQ ID NO: 2569338 - RNA, 19 nt, Artificial Sequence
  Description of Artificial Sequence: Synthetic oligonucleotide
  Sense strand starting at position 2610 of SEQ ID NO: 1888964
guuauugguuauucugaua

SEQ ID NO: 2569339 - RNA, 19 nt, Artificial Sequence
  Description of Artificial Sequence: Synthetic oligonucleotide
  Antisense strand to SEQ ID NO: 2569338
uaucagaauaaccaauaac

SEQ ID NO: 2569340 - RNA, 19 nt, Artificial Sequence
  Description of Artificial Sequence: Synthetic oligonucleotide
  Sense strand starting at position 2661 of SEQ ID NO: 1888964
ucuagaagauugucucuuu

SEQ ID NO: 2569341 - RNA, 19 nt, Artificial Sequence
  Description of Artificial Sequence: Synthetic oligonucleotide
  Antisense strand to SEQ ID NO: 2569340
aaagagacaaucuucuaga

SEQ ID NO: 2569342 - RNA, 19 nt, Artificial Sequence
  Description of Artificial Sequence: Synthetic oligonucleotide
  Sense strand starting at position 2806 of SEQ ID NO: 1888964
gcacaaugacuuuguaauc

SEQ ID NO: 2569343 - RNA, 19 nt, Artificial Sequence
  Description of Artificial Sequence: Synthetic oligonucleotide
  Antisense strand to SEQ ID NO: 2569342
gauuacaaagucauugugc

SEQ ID NO: 2569344 - RNA, 19 nt, Artificial Sequence
  Description of Artificial Sequence: Synthetic oligonucleotide
  Sense strand starting at position 2844 of SEQ ID NO: 1888964
gcaaaugugcaguaaaugu

SEQ ID NO: 2569345 - RNA, 19 nt, Artificial Sequence
  Description of Artificial Sequence: Synthetic oligonucleotide
  Antisense strand to SEQ ID NO: 2569344
acauuuacugcacauuugc

SEQ ID NO: 2569346 - RNA, 19 nt, Artificial Sequence
  Description of Artificial Sequence: Synthetic oligonucleotide
  Sense strand starting at position 3015 of SEQ ID NO: 1888964
gcuuaagaaugucccacua

SEQ ID NO: 2569347 - RNA, 19 nt, Artificial Sequence
  Description of Artificial Sequence: Synthetic oligonucleotide
  Antisense strand to SEQ ID NO: 2569346
uagugggacauucuuaagc

SEQ ID NO: 2569348 - RNA, 19 nt, Artificial Sequence
  Description of Artificial Sequence: Synthetic oligonucleotide
  Sense strand starting at position 3093 of SEQ ID NO: 1888964
aaaugacuguguccaguau

SEQ ID NO: 2569349 - RNA, 19 nt, Artificial Sequence
  Description of Artificial Sequence: Synthetic oligonucleotide
  Antisense strand to SEQ ID NO: 2569348
auacuggacacagucauuu

SEQ ID NO: 2569350 - RNA, 19 nt, Artificial Sequence
  Description of Artificial Sequence: Synthetic oligonucleotide
  Sense strand starting at position 3097 of SEQ ID NO: 1888964
gacuguguccaguaucaga

SEQ ID NO: 2569351 - RNA, 19 nt, Artificial Sequence
  Description of Artificial Sequence: Synthetic oligonucleotide
  Antisense strand to SEQ ID NO: 2569350
ucugauacuggacacaguc

SEQ ID NO: 2569352 - RNA, 19 nt, Artificial Sequence
  Description of Artificial Sequence: Synthetic oligonucleotide
  Sense strand starting at position 3438 of SEQ ID NO: 1888964
gaggccaucugauuauaga

SEQ ID NO: 2569353 - RNA, 19 nt, Artificial Sequence
  Description of Artificial Sequence: Synthetic oligonucleotide
  Antisense strand to SEQ ID NO: 2569352
ucuauaaucagauggccuc

SEQ ID NO: 2569354 - RNA, 19 nt, Artificial Sequence
  Description of Artificial Sequence: Synthetic oligonucleotide
  Sense strand starting at position 3638 of SEQ ID NO: 1888964
ggguggauugcccaggagu

SEQ ID NO: 2569355 - RNA, 19 nt, Artificial Sequence
  Description of Artificial Sequence: Synthetic oligonucleotide
  Antisense strand to SEQ ID NO: 2569354
acuccugggcaauccaccc

SEQ ID NO: 2569356 - RNA, 19 nt, Artificial Sequence
  Description of Artificial Sequence: Synthetic oligonucleotide
  Sense strand starting at position 3883 of SEQ ID NO: 1888964
ggaauacaugcuuguggag

SEQ ID NO: 2569357 - RNA, 19 nt, Artificial Sequence
  Description of Artificial Sequence: Synthetic oligonucleotide
  Antisense strand to SEQ ID NO: 2569356
cuccacaagcauguauucc

SEQ ID NO: 2569358 - RNA, 19 nt, Artificial Sequence
  Description of Artificial Sequence: Synthetic oligonucleotide
  Sense strand starting at position 3909 of SEQ ID NO: 1888964
aaaugauguccauggguaa

SEQ ID NO: 2569359 - RNA, 19 nt, Artificial Sequence
  Description of Artificial Sequence: Synthetic oligonucleotide
  Antisense strand to SEQ ID NO: 2569358
uuacccauggacaucauuu

SEQ ID NO: 2569360 - RNA, 19 nt, Artificial Sequence
  Description of Artificial Sequence: Synthetic oligonucleotide
  Sense strand starting at position 3910 of SEQ ID NO: 1888964
aaugauguccauggguaaa

SEQ ID NO: 2569361 - RNA, 19 nt, Artificial Sequence
  Description of Artificial Sequence: Synthetic oligonucleotide
  Antisense strand to SEQ ID NO: 2569360
uuuacccauggacaucauu

SEQ ID NO: 2569362 - RNA, 19 nt, Artificial Sequence
  Description of Artificial Sequence: Synthetic oligonucleotide
  Sense strand starting at position 3912 of SEQ ID NO: 1888964
ugauguccauggguaaaca

SEQ ID NO: 2569363 - RNA, 19 nt, Artificial Sequence
  Description of Artificial Sequence: Synthetic oligonucleotide
  Antisense strand to SEQ ID NO: 2569362
uguuuacccauggacauca

SEQ ID NO: 2569364 - RNA, 19 nt, Artificial Sequence
  Description of Artificial Sequence: Synthetic oligonucleotide
  Sense strand starting at position 3921 of SEQ ID NO: 1888964
uggguaaacaagugcgaua

SEQ ID NO: 2569365 - RNA, 19 nt, Artificial Sequence
  Description of Artificial Sequence: Synthetic oligonucleotide
  Antisense strand to SEQ ID NO: 2569364
uaucgcacuuguuuaccca

SEQ ID NO: 2569366 - RNA, 19 nt, Artificial Sequence
  Description of Artificial Sequence: Synthetic oligonucleotide
  Sense strand starting at position 3926 of SEQ ID NO: 1888964
aaacaagugcgauacaucu

SEQ ID NO: 2569367 - RNA, 19 nt, Artificial Sequence
  Description of Artificial Sequence: Synthetic oligonucleotide
  Antisense strand to SEQ ID NO: 2569366
agauguaucgcacuuguuu

SEQ ID NO: 2569368 - RNA, 19 nt, Artificial Sequence
  Description of Artificial Sequence: Synthetic oligonucleotide
  Sense strand starting at position 3934 of SEQ ID NO: 1888964
gcgauacaucuauacaaug

SEQ ID NO: 2569369 - RNA, 19 nt, Artificial Sequence
  Description of Artificial Sequence: Synthetic oligonucleotide
  Antisense strand to SEQ ID NO: 2569368
cauuguauagauguaucgc

SEQ ID NO: 2569370 - RNA, 19 nt, Artificial Sequence
  Description of Artificial Sequence: Synthetic oligonucleotide
  Sense strand starting at position 1057 of SEQ ID NO: 1888965
acugacuugugucuaacuu

SEQ ID NO: 2569371 - RNA, 19 nt, Artificial Sequence
  Description of Artificial Sequence: Synthetic oligonucleotide
  Antisense strand to SEQ ID NO: 2569370
aaguuagacacaagucagu

SEQ ID NO: 2569372 - RNA, 19 nt, Artificial Sequence
  Description of Artificial Sequence: Synthetic oligonucleotide
  Sense strand starting at position 1058 of SEQ ID NO: 1888965
cugacuugugucuaacuua

SEQ ID NO: 2569373 - RNA, 19 nt, Artificial Sequence
  Description of Artificial Sequence: Synthetic oligonucleotide
  Antisense strand to SEQ ID NO: 2569372
uaaguuagacacaagucag

SEQ ID NO: 2569374 - RNA, 19 nt, Artificial Sequence
  Description of Artificial Sequence: Synthetic oligonucleotide
  Sense strand starting at position 1061 of SEQ ID NO: 1888965
acuugugucuaacuuaaau

SEQ ID NO: 2569375 - RNA, 19 nt, Artificial Sequence
  Description of Artificial Sequence: Synthetic oligonucleotide
  Antisense strand to SEQ ID NO: 2569374
auuuaaguuagacacaagu

SEQ ID NO: 2569376 - RNA, 19 nt, Artificial Sequence
  Description of Artificial Sequence: Synthetic oligonucleotide
  Sense strand starting at position 1081 of SEQ ID NO: 1888965
cuucuuguacauuguaaag

SEQ ID NO: 2569377 - RNA, 19 nt, Artificial Sequence
  Description of Artificial Sequence: Synthetic oligonucleotide
  Antisense strand to SEQ ID NO: 2569376
cuuuacaauguacaagaag

SEQ ID NO: 2569378 - RNA, 19 nt, Artificial Sequence
  Description of Artificial Sequence: Synthetic oligonucleotide
  Sense strand starting at position 1109 of SEQ ID NO: 1888965
auccaauuggcgugaguua

SEQ ID NO: 2569379 - RNA, 19 nt, Artificial Sequence
  Description of Artificial Sequence: Synthetic oligonucleotide
  Antisense strand to SEQ ID NO: 2569378
uaacucacgccaauuggau

SEQ ID NO: 2569380 - RNA, 19 nt, Artificial Sequence
  Description of Artificial Sequence: Synthetic oligonucleotide
  Sense strand starting at position 1114 of SEQ ID NO: 1888965
auuggcgugaguuacuuua

SEQ ID NO: 2569381 - RNA, 19 nt, Artificial Sequence
  Description of Artificial Sequence: Synthetic oligonucleotide
  Antisense strand to SEQ ID NO: 2569380
uaaaguaacucacgccaau

SEQ ID NO: 2569382 - RNA, 19 nt, Artificial Sequence
  Description of Artificial Sequence: Synthetic oligonucleotide
  Sense strand starting at position 1173 of SEQ ID NO: 1888965
gacugcuuagcccagugaa

SEQ ID NO: 2569383 - RNA, 19 nt, Artificial Sequence
  Description of Artificial Sequence: Synthetic oligonucleotide
  Antisense strand to SEQ ID NO: 2569382
uucacugggcuaagcaguc

SEQ ID NO: 2569384 - RNA, 19 nt, Artificial Sequence
  Description of Artificial Sequence: Synthetic oligonucleotide
  Sense strand starting at position 1176 of SEQ ID NO: 1888965
ugcuuagcccagugaaaua

SEQ ID NO: 2569385 - RNA, 19 nt, Artificial Sequence
  Description of Artificial Sequence: Synthetic oligonucleotide
  Antisense strand to SEQ ID NO: 2569384
uauuucacugggcuaagca

SEQ ID NO: 2569386 - RNA, 19 nt, Artificial Sequence
  Description of Artificial Sequence: Synthetic oligonucleotide
  Sense strand starting at position 1264 of SEQ ID NO: 1888965
uggacaguguuucccaguu

SEQ ID NO: 2569387 - RNA, 19 nt, Artificial Sequence
  Description of Artificial Sequence: Synthetic oligonucleotide
  Antisense strand to SEQ ID NO: 2569386
aacugggaaacacugucca

SEQ ID NO: 2569388 - RNA, 19 nt, Artificial Sequence
  Description of Artificial Sequence: Synthetic oligonucleotide
  Sense strand starting at position 1270 of SEQ ID NO: 1888965
guguuucccaguuauguua

SEQ ID NO: 2569389 - RNA, 19 nt, Artificial Sequence
  Description of Artificial Sequence: Synthetic oligonucleotide
  Antisense strand to SEQ ID NO: 2569388
uaacauaacugggaaacac

SEQ ID NO: 2569390 - RNA, 19 nt, Artificial Sequence
  Description of Artificial Sequence: Synthetic oligonucleotide
  Sense strand starting at position 1487 of SEQ ID NO: 1888965
gucaauugccuuuguggga

SEQ ID NO: 2569391 - RNA, 19 nt, Artificial Sequence
  Description of Artificial Sequence: Synthetic oligonucleotide
  Antisense strand to SEQ ID NO: 2569390
ucccacaaaggcaauugac

SEQ ID NO: 2569392 - RNA, 19 nt, Artificial Sequence
  Description of Artificial Sequence: Synthetic oligonucleotide
  Sense strand starting at position 1488 of SEQ ID NO: 1888965
ucaauugccuuugugggaa

SEQ ID NO: 2569393 - RNA, 19 nt, Artificial Sequence
  Description of Artificial Sequence: Synthetic oligonucleotide
  Antisense strand to SEQ ID NO: 2569392
uucccacaaaggcaauuga

SEQ ID NO: 2569394 - RNA, 19 nt, Artificial Sequence
  Description of Artificial Sequence: Synthetic oligonucleotide
  Sense strand starting at position 1534 of SEQ ID NO: 1888965
auuaauggagcucagucaa

SEQ ID NO: 2569395 - RNA, 19 nt, Artificial Sequence
  Description of Artificial Sequence: Synthetic oligonucleotide
  Antisense strand to SEQ ID NO: 2569394
uugacugagcuccauuaau

SEQ ID NO: 2569396 - RNA, 19 nt, Artificial Sequence
  Description of Artificial Sequence: Synthetic oligonucleotide
  Sense strand starting at position 1649 of SEQ ID NO: 1888965
agucuacaaccuugagaga

SEQ ID NO: 2569397 - RNA, 19 nt, Artificial Sequence
  Description of Artificial Sequence: Synthetic oligonucleotide
  Antisense strand to SEQ ID NO: 2569396
ucucucaagguuguagacu

SEQ ID NO: 2569398 - RNA, 19 nt, Artificial Sequence
  Description of Artificial Sequence: Synthetic oligonucleotide
  Sense strand starting at position 1652 of SEQ ID NO: 1888965
cuacaaccuugagagauau

SEQ ID NO: 2569399 - RNA, 19 nt, Artificial Sequence
  Description of Artificial Sequence: Synthetic oligonucleotide
  Antisense strand to SEQ ID NO: 2569398
auaucucucaagguuguag

SEQ ID NO: 2569400 - RNA, 19 nt, Artificial Sequence
  Description of Artificial Sequence: Synthetic oligonucleotide
  Sense strand starting at position 1669 of SEQ ID NO: 1888965
aucagagcauggguugaaa

SEQ ID NO: 2569401 - RNA, 19 nt, Artificial Sequence
  Description of Artificial Sequence: Synthetic oligonucleotide
  Antisense strand to SEQ ID NO: 2569400
uuucaacccaugcucugau

SEQ ID NO: 2569402 - RNA, 19 nt, Artificial Sequence
  Description of Artificial Sequence: Synthetic oligonucleotide
  Sense strand starting at position 2073 of SEQ ID NO: 1888965
agcaauccucuguguauau

SEQ ID NO: 2569403 - RNA, 19 nt, Artificial Sequence
  Description of Artificial Sequence: Synthetic oligonucleotide
  Antisense strand to SEQ ID NO: 2569402
auauacacagaggauugcu

SEQ ID NO: 2569404 - RNA, 19 nt, Artificial Sequence
  Description of Artificial Sequence: Synthetic oligonucleotide
  Sense strand starting at position 2326 of SEQ ID NO: 1888965
agcugaaauugauugcauc

SEQ ID NO: 2569405 - RNA, 19 nt, Artificial Sequence
  Description of Artificial Sequence: Synthetic oligonucleotide
  Antisense strand to SEQ ID NO: 2569404
gaugcaaucaauuucagcu

SEQ ID NO: 2569406 - RNA, 19 nt, Artificial Sequence
  Description of Artificial Sequence: Synthetic oligonucleotide
  Sense strand starting at position 2327 of SEQ ID NO: 1888965
gcugaaauugauugcauca

SEQ ID NO: 2569407 - RNA, 19 nt, Artificial Sequence
  Description of Artificial Sequence: Synthetic oligonucleotide
  Antisense strand to SEQ ID NO: 2569406
ugaugcaaucaauuucagc

SEQ ID NO: 2569408 - RNA, 19 nt, Artificial Sequence
  Description of Artificial Sequence: Synthetic oligonucleotide
  Sense strand starting at position 2416 of SEQ ID NO: 1888965
ggaguaaguggugagugau

SEQ ID NO: 2569409 - RNA, 19 nt, Artificial Sequence
  Description of Artificial Sequence: Synthetic oligonucleotide
  Antisense strand to SEQ ID NO: 2569408
aucacucaccacuuacucc

SEQ ID NO: 2569410 - RNA, 19 nt, Artificial Sequence
  Description of Artificial Sequence: Synthetic oligonucleotide
  Sense strand starting at position 2426 of SEQ ID NO: 1888965
gugagugauuuaugauagg

SEQ ID NO: 2569411 - RNA, 19 nt, Artificial Sequence
  Description of Artificial Sequence: Synthetic oligonucleotide
  Antisense strand to SEQ ID NO: 2569410
ccuaucauaaaucacucac

SEQ ID NO: 2569412 - RNA, 19 nt, Artificial Sequence
  Description of Artificial Sequence: Synthetic oligonucleotide
  Sense strand starting at position 2429 of SEQ ID NO: 1888965
agugauuuaugauagggau

SEQ ID NO: 2569413 - RNA, 19 nt, Artificial Sequence
  Description of Artificial Sequence: Synthetic oligonucleotide
  Antisense strand to SEQ ID NO: 2569412
aucccuaucauaaaucacu

SEQ ID NO: 2569414 - RNA, 19 nt, Artificial Sequence
  Description of Artificial Sequence: Synthetic oligonucleotide
  Sense strand starting at position 2432 of SEQ ID NO: 1888965
gauuuaugauagggauaau

SEQ ID NO: 2569415 - RNA, 19 nt, Artificial Sequence
  Description of Artificial Sequence: Synthetic oligonucleotide
  Antisense strand to SEQ ID NO: 2569414
auuaucccuaucauaaauc

SEQ ID NO: 2569416 - RNA, 19 nt, Artificial Sequence
  Description of Artificial Sequence: Synthetic oligonucleotide
  Sense strand starting at position 2450 of SEQ ID NO: 1888965
uccugaauccacuggaauu

SEQ ID NO: 2569417 - RNA, 19 nt, Artificial Sequence
  Description of Artificial Sequence: Synthetic oligonucleotide
  Antisense strand to SEQ ID NO: 2569416
aauuccaguggauucagga

SEQ ID NO: 2569418 - RNA, 19 nt, Artificial Sequence
  Description of Artificial Sequence: Synthetic oligonucleotide
  Sense strand starting at position 3061 of SEQ ID NO: 1888965
cccgaaaguguuggaauua

SEQ ID NO: 2569419 - RNA, 19 nt, Artificial Sequence
  Description of Artificial Sequence: Synthetic oligonucleotide
  Antisense strand to SEQ ID NO: 2569418
uaauuccaacacuuucggg

SEQ ID NO: 2569420 - RNA, 19 nt, Artificial Sequence
  Description of Artificial Sequence: Synthetic oligonucleotide
  Sense strand starting at position 3226 of SEQ ID NO: 1888965
gccauaacagcaugcuuga

SEQ ID NO: 2569421 - RNA, 19 nt, Artificial Sequence
  Description of Artificial Sequence: Synthetic oligonucleotide
  Antisense strand to SEQ ID NO: 2569420
ucaagcaugcuguuauggc

SEQ ID NO: 2569422 - RNA, 19 nt, Artificial Sequence
  Description of Artificial Sequence: Synthetic oligonucleotide
  Sense strand starting at position 3351 of SEQ ID NO: 1888965
acuccuaauccaugaggua

SEQ ID NO: 2569423 - RNA, 19 nt, Artificial Sequence
  Description of Artificial Sequence: Synthetic oligonucleotide
  Antisense strand to SEQ ID NO: 2569422
uaccucauggauuaggagu

SEQ ID NO: 2569424 - RNA, 19 nt, Artificial Sequence
  Description of Artificial Sequence: Synthetic oligonucleotide
  Sense strand starting at position 3364 of SEQ ID NO: 1888965
gagguaccaagaugugguu

SEQ ID NO: 2569425 - RNA, 19 nt, Artificial Sequence
  Description of Artificial Sequence: Synthetic oligonucleotide
  Antisense strand to SEQ ID NO: 2569424
aaccacaucuugguaccuc

SEQ ID NO: 2569426 - RNA, 19 nt, Artificial Sequence
  Description of Artificial Sequence: Synthetic oligonucleotide
  Sense strand starting at position 3405 of SEQ ID NO: 1888965
ugaguacucucagucccua

SEQ ID NO: 2569427 - RNA, 19 nt, Artificial Sequence
  Description of Artificial Sequence: Synthetic oligonucleotide
  Antisense strand to SEQ ID NO: 2569426
uagggacugagaguacuca

SEQ ID NO: 2569428 - RNA, 19 nt, Artificial Sequence
  Description of Artificial Sequence: Synthetic oligonucleotide
  Sense strand starting at position 3468 of SEQ ID NO: 1888965
gacuuagggcaucaguguu

SEQ ID NO: 2569429 - RNA, 19 nt, Artificial Sequence
  Description of Artificial Sequence: Synthetic oligonucleotide
  Antisense strand to SEQ ID NO: 2569428
aacacugaugcccuaaguc

SEQ ID NO: 2569430 - RNA, 19 nt, Artificial Sequence
  Description of Artificial Sequence: Synthetic oligonucleotide
  Sense strand starting at position 3474 of SEQ ID NO: 1888965
gggcaucaguguucagaag

SEQ ID NO: 2569431 - RNA, 19 nt, Artificial Sequence
  Description of Artificial Sequence: Synthetic oligonucleotide
  Antisense strand to SEQ ID NO: 2569430
cuucugaacacugaugccc

SEQ ID NO: 2569432 - RNA, 19 nt, Artificial Sequence
  Description of Artificial Sequence: Synthetic oligonucleotide
  Sense strand starting at position 3504 of SEQ ID NO: 1888965
gacugauguccugagguga

SEQ ID NO: 2569433 - RNA, 19 nt, Artificial Sequence
  Description of Artificial Sequence: Synthetic oligonucleotide
  Antisense strand to SEQ ID NO: 2569432
ucaccucaggacaucaguc

SEQ ID NO: 2569434 - RNA, 19 nt, Artificial Sequence
  Description of Artificial Sequence: Synthetic oligonucleotide
  Sense strand starting at position 3753 of SEQ ID NO: 1888965
agauuugucuaagauggug

SEQ ID NO: 2569435 - RNA, 19 nt, Artificial Sequence
  Description of Artificial Sequence: Synthetic oligonucleotide
  Antisense strand to SEQ ID NO: 2569434
caccaucuuagacaaaucu

SEQ ID NO: 2569436 - RNA, 19 nt, Artificial Sequence
  Description of Artificial Sequence: Synthetic oligonucleotide
  Sense strand starting at position 3762 of SEQ ID NO: 1888965
uaagauggugauggugaua

SEQ ID NO: 2569437 - RNA, 19 nt, Artificial Sequence
  Description of Artificial Sequence: Synthetic oligonucleotide
  Antisense strand to SEQ ID NO: 2569436
uaucaccaucaccaucuua

SEQ ID NO: 2569438 - RNA, 19 nt, Artificial Sequence
  Description of Artificial Sequence: Synthetic oligonucleotide
  Sense strand starting at position 3847 of SEQ ID NO: 1888965
ugcuaauuuguuggccaau

SEQ ID NO: 2569439 - RNA, 19 nt, Artificial Sequence
  Description of Artificial Sequence: Synthetic oligonucleotide
  Antisense strand to SEQ ID NO: 2569438
auuggccaacaaauuagca

SEQ ID NO: 2569440 - RNA, 19 nt, Artificial Sequence
  Description of Artificial Sequence: Synthetic oligonucleotide
  Sense strand starting at position 3848 of SEQ ID NO: 1888965
gcuaauuuguuggccaauu

SEQ ID NO: 2569441 - RNA, 19 nt, Artificial Sequence
  Description of Artificial Sequence: Synthetic oligonucleotide
  Antisense strand to SEQ ID NO: 2569440
aauuggccaacaaauuagc

SEQ ID NO: 2569442 - RNA, 19 nt, Artificial Sequence
  Description of Artificial Sequence: Synthetic oligonucleotide
  Sense strand starting at position 3946 of SEQ ID NO: 1888965
uuacaaggcuuuccugagu

SEQ ID NO: 2569443 - RNA, 19 nt, Artificial Sequence
  Description of Artificial Sequence: Synthetic oligonucleotide
  Antisense strand to SEQ ID NO: 2569442
acucaggaaagccuuguaa

SEQ ID NO: 2569444 - RNA, 19 nt, Artificial Sequence
  Description of Artificial Sequence: Synthetic oligonucleotide
  Sense strand starting at position 3966 of SEQ ID NO: 1888965
uggcuauacccaggcauua

SEQ ID NO: 2569445 - RNA, 19 nt, Artificial Sequence
  Description of Artificial Sequence: Synthetic oligonucleotide
  Antisense strand to SEQ ID NO: 2569444
uaaugccuggguauagcca

SEQ ID NO: 2569446 - RNA, 19 nt, Artificial Sequence
  Description of Artificial Sequence: Synthetic oligonucleotide
  Sense strand starting at position 3978 of SEQ ID NO: 1888965
ggcauuaugucauuaggaa

SEQ ID NO: 2569447 - RNA, 19 nt, Artificial Sequence
  Description of Artificial Sequence: Synthetic oligonucleotide
  Antisense strand to SEQ ID NO: 2569446
uuccuaaugacauaaugcc

SEQ ID NO: 2569448 - RNA, 19 nt, Artificial Sequence
  Description of Artificial Sequence: Synthetic oligonucleotide
  Sense strand starting at position 3979 of SEQ ID NO: 1888965
gcauuaugucauuaggaaa

SEQ ID NO: 2569449 - RNA, 19 nt, Artificial Sequence
  Description of Artificial Sequence: Synthetic oligonucleotide
  Antisense strand to SEQ ID NO: 2569448
uuuccuaaugacauaaugc

SEQ ID NO: 2569450 - RNA, 19 nt, Artificial Sequence
  Description of Artificial Sequence: Synthetic oligonucleotide
  Sense strand starting at position 103 of SEQ ID NO: 1888966
auagaauaguagucaacua

SEQ ID NO: 2569451 - RNA, 19 nt, Artificial Sequence
  Description of Artificial Sequence: Synthetic oligonucleotide
  Antisense strand to SEQ ID NO: 2569450
uaguugacuacuauucuau

SEQ ID NO: 2569452 - RNA, 19 nt, Artificial Sequence
  Description of Artificial Sequence: Synthetic oligonucleotide
  Sense strand starting at position 175 of SEQ ID NO: 1888966
augaaugacuuugccaaag

SEQ ID NO: 2569453 - RNA, 19 nt, Artificial Sequence
  Description of Artificial Sequence: Synthetic oligonucleotide
  Antisense strand to SEQ ID NO: 2569452
cuuuggcaaagucauucau

SEQ ID NO: 2569454 - RNA, 19 nt, Artificial Sequence
  Description of Artificial Sequence: Synthetic oligonucleotide
  Sense strand starting at position 276 of SEQ ID NO: 1888966
uuagcaugugacuaaggua

SEQ ID NO: 2569455 - RNA, 19 nt, Artificial Sequence
  Description of Artificial Sequence: Synthetic oligonucleotide
  Antisense strand to SEQ ID NO: 2569454
uaccuuagucacaugcuaa

SEQ ID NO: 2569456 - RNA, 19 nt, Artificial Sequence
  Description of Artificial Sequence: Synthetic oligonucleotide
  Sense strand starting at position 602 of SEQ ID NO: 1888966
uccucauauggaugugaua

SEQ ID NO: 2569457 - RNA, 19 nt, Artificial Sequence
  Description of Artificial Sequence: Synthetic oligonucleotide
  Antisense strand to SEQ ID NO: 2569456
uaucacauccauaugagga

SEQ ID NO: 2569458 - RNA, 19 nt, Artificial Sequence
  Description of Artificial Sequence: Synthetic oligonucleotide
  Sense strand starting at position 907 of SEQ ID NO: 1888966
guacaauguagacaacgau

SEQ ID NO: 2569459 - RNA, 19 nt, Artificial Sequence
  Description of Artificial Sequence: Synthetic oligonucleotide
  Antisense strand to SEQ ID NO: 2569458
aucguugucuacauuguac

SEQ ID NO: 2569460 - RNA, 19 nt, Artificial Sequence
  Description of Artificial Sequence: Synthetic oligonucleotide
  Sense strand starting at position 1179 of SEQ ID NO: 1888966
guugaugaaagccauuagu

SEQ ID NO: 2569461 - RNA, 19 nt, Artificial Sequence
  Description of Artificial Sequence: Synthetic oligonucleotide
  Antisense strand to SEQ ID NO: 2569460
acuaauggcuuucaucaac

SEQ ID NO: 2569462 - RNA, 19 nt, Artificial Sequence
  Description of Artificial Sequence: Synthetic oligonucleotide
  Sense strand starting at position 1207 of SEQ ID NO: 1888966
cuguuugaucuugacuuac

SEQ ID NO: 2569463 - RNA, 19 nt, Artificial Sequence
  Description of Artificial Sequence: Synthetic oligonucleotide
  Antisense strand to SEQ ID NO: 2569462
guaagucaagaucaaacag

SEQ ID NO: 2569464 - RNA, 19 nt, Artificial Sequence
  Description of Artificial Sequence: Synthetic oligonucleotide
  Sense strand starting at position 1409 of SEQ ID NO: 1888966
guagaugucagauauguca

SEQ ID NO: 2569465 - RNA, 19 nt, Artificial Sequence
  Description of Artificial Sequence: Synthetic oligonucleotide
  Antisense strand to SEQ ID NO: 2569464
ugacauaucugacaucuac

SEQ ID NO: 2569466 - RNA, 19 nt, Artificial Sequence
  Description of Artificial Sequence: Synthetic oligonucleotide
  Sense strand starting at position 1450 of SEQ ID NO: 1888966
ucagaugaccauugcauga

SEQ ID NO: 2569467 - RNA, 19 nt, Artificial Sequence
  Description of Artificial Sequence: Synthetic oligonucleotide
  Antisense strand to SEQ ID NO: 2569466
ucaugcaauggucaucuga

SEQ ID NO: 2569468 - RNA, 19 nt, Artificial Sequence
  Description of Artificial Sequence: Synthetic oligonucleotide
  Sense strand starting at position 1614 of SEQ ID NO: 1888966
uucuuuagucugggagaag

SEQ ID NO: 2569469 - RNA, 19 nt, Artificial Sequence
  Description of Artificial Sequence: Synthetic oligonucleotide
  Antisense strand to SEQ ID NO: 2569468
cuucucccagacuaaagaa

SEQ ID NO: 2569470 - RNA, 19 nt, Artificial Sequence
  Description of Artificial Sequence: Synthetic oligonucleotide
  Sense strand starting at position 1641 of SEQ ID NO: 1888966
gauuaaacgggugaaguua

SEQ ID NO: 2569471 - RNA, 19 nt, Artificial Sequence
  Description of Artificial Sequence: Synthetic oligonucleotide
  Antisense strand to SEQ ID NO: 2569470
uaacuucacccguuuaauc

SEQ ID NO: 2569472 - RNA, 19 nt, Artificial Sequence
  Description of Artificial Sequence: Synthetic oligonucleotide
  Sense strand starting at position 1742 of SEQ ID NO: 1888966
agcccagugacaugagaua

SEQ ID NO: 2569473 - RNA, 19 nt, Artificial Sequence
  Description of Artificial Sequence: Synthetic oligonucleotide
  Antisense strand to SEQ ID NO: 2569472
uaucucaugucacugggcu

SEQ ID NO: 2569474 - RNA, 19 nt, Artificial Sequence
  Description of Artificial Sequence: Synthetic oligonucleotide
  Sense strand starting at position 1803 of SEQ ID NO: 1888966
gcagaagugaucuaagagu

SEQ ID NO: 2569475 - RNA, 19 nt, Artificial Sequence
  Description of Artificial Sequence: Synthetic oligonucleotide
  Antisense strand to SEQ ID NO: 2569474
acucuuagaucacuucugc

SEQ ID NO: 2569476 - RNA, 19 nt, Artificial Sequence
  Description of Artificial Sequence: Synthetic oligonucleotide
  Sense strand starting at position 1884 of SEQ ID NO: 1888966
ccuguaaagcaguagacaa

SEQ ID NO: 2569477 - RNA, 19 nt, Artificial Sequence
  Description of Artificial Sequence: Synthetic oligonucleotide
  Antisense strand to SEQ ID NO: 2569476
uugucuacugcuuuacagg

SEQ ID NO: 2569478 - RNA, 19 nt, Artificial Sequence
  Description of Artificial Sequence: Synthetic oligonucleotide
  Sense strand starting at position 1892 of SEQ ID NO: 1888966
gcaguagacaaugaagguu

SEQ ID NO: 2569479 - RNA, 19 nt, Artificial Sequence
  Description of Artificial Sequence: Synthetic oligonucleotide
  Antisense strand to SEQ ID NO: 2569478
aaccuucauugucuacugc

SEQ ID NO: 2569480 - RNA, 19 nt, Artificial Sequence
  Description of Artificial Sequence: Synthetic oligonucleotide
  Sense strand starting at position 1905 of SEQ ID NO: 1888966
aagguuccugcucagaaac

SEQ ID NO: 2569481 - RNA, 19 nt, Artificial Sequence
  Description of Artificial Sequence: Synthetic oligonucleotide
  Antisense strand to SEQ ID NO: 2569480
guuucugagcaggaaccuu

SEQ ID NO: 2569482 - RNA, 19 nt, Artificial Sequence
  Description of Artificial Sequence: Synthetic oligonucleotide
  Sense strand starting at position 2003 of SEQ ID NO: 1888966
gugggugugauacaagagu

SEQ ID NO: 2569483 - RNA, 19 nt, Artificial Sequence
  Description of Artificial Sequence: Synthetic oligonucleotide
  Antisense strand to SEQ ID NO: 2569482
acucuuguaucacacccac

SEQ ID NO: 2569484 - RNA, 19 nt, Artificial Sequence
  Description of Artificial Sequence: Synthetic oligonucleotide
  Sense strand starting at position 2033 of SEQ ID NO: 1888966
ugaggaauaugcccagaug

SEQ ID NO: 2569485 - RNA, 19 nt, Artificial Sequence
  Description of Artificial Sequence: Synthetic oligonucleotide
  Antisense strand to SEQ ID NO: 2569484
caucugggcauauuccuca

SEQ ID NO: 2569486 - RNA, 19 nt, Artificial Sequence
  Description of Artificial Sequence: Synthetic oligonucleotide
  Sense strand starting at position 2678 of SEQ ID NO: 1888966
aacugauguguccaagauc

SEQ ID NO: 2569487 - RNA, 19 nt, Artificial Sequence
  Description of Artificial Sequence: Synthetic oligonucleotide
  Antisense strand to SEQ ID NO: 2569486
gaucuuggacacaucaguu

SEQ ID NO: 2569488 - RNA, 19 nt, Artificial Sequence
  Description of Artificial Sequence: Synthetic oligonucleotide
  Sense strand starting at position 2681 of SEQ ID NO: 1888966
ugauguguccaagaucuca

SEQ ID NO: 2569489 - RNA, 19 nt, Artificial Sequence
  Description of Artificial Sequence: Synthetic oligonucleotide
  Antisense strand to SEQ ID NO: 2569488
ugagaucuuggacacauca

SEQ ID NO: 2569490 - RNA, 19 nt, Artificial Sequence
  Description of Artificial Sequence: Synthetic oligonucleotide
  Sense strand starting at position 2943 of SEQ ID NO: 1888966
agcauuugaccacgaugca

SEQ ID NO: 2569491 - RNA, 19 nt, Artificial Sequence
  Description of Artificial Sequence: Synthetic oligonucleotide
  Antisense strand to SEQ ID NO: 2569490
ugcaucguggucaaaugcu

SEQ ID NO: 2569492 - RNA, 19 nt, Artificial Sequence
  Description of Artificial Sequence: Synthetic oligonucleotide
  Sense strand starting at position 3088 of SEQ ID NO: 1888966
acucauucccaguacaagu

SEQ ID NO: 2569493 - RNA, 19 nt, Artificial Sequence
  Description of Artificial Sequence: Synthetic oligonucleotide
  Antisense strand to SEQ ID NO: 2569492
acuuguacugggaaugagu

SEQ ID NO: 2569494 - RNA, 19 nt, Artificial Sequence
  Description of Artificial Sequence: Synthetic oligonucleotide
  Sense strand starting at position 3101 of SEQ ID NO: 1888966
acaaguagacaaugauugu

SEQ ID NO: 2569495 - RNA, 19 nt, Artificial Sequence
  Description of Artificial Sequence: Synthetic oligonucleotide
  Antisense strand to SEQ ID NO: 2569494
acaaucauugucuacuugu

SEQ ID NO: 2569496 - RNA, 19 nt, Artificial Sequence
  Description of Artificial Sequence: Synthetic oligonucleotide
  Sense strand starting at position 3138 of SEQ ID NO: 1888966
gguguuuaaguuuaaauac

SEQ ID NO: 2569497 - RNA, 19 nt, Artificial Sequence
  Description of Artificial Sequence: Synthetic oligonucleotide
  Antisense strand to SEQ ID NO: 2569496
guauuuaaacuuaaacacc

SEQ ID NO: 2569498 - RNA, 19 nt, Artificial Sequence
  Description of Artificial Sequence: Synthetic oligonucleotide
  Sense strand starting at position 3176 of SEQ ID NO: 1888966
aguauaugagcacaaauuc

SEQ ID NO: 2569499 - RNA, 19 nt, Artificial Sequence
  Description of Artificial Sequence: Synthetic oligonucleotide
  Antisense strand to SEQ ID NO: 2569498
gaauuugugcucauauacu

SEQ ID NO: 2569500 - RNA, 19 nt, Artificial Sequence
  Description of Artificial Sequence: Synthetic oligonucleotide
  Sense strand starting at position 3252 of SEQ ID NO: 1888966
uagauaugguaucccagga

SEQ ID NO: 2569501 - RNA, 19 nt, Artificial Sequence
  Description of Artificial Sequence: Synthetic oligonucleotide
  Antisense strand to SEQ ID NO: 2569500
uccugggauaccauaucua

SEQ ID NO: 2569502 - RNA, 19 nt, Artificial Sequence
  Description of Artificial Sequence: Synthetic oligonucleotide
  Sense strand starting at position 3459 of SEQ ID NO: 1888966
ugcagauggacaugauaug

SEQ ID NO: 2569503 - RNA, 19 nt, Artificial Sequence
  Description of Artificial Sequence: Synthetic oligonucleotide
  Antisense strand to SEQ ID NO: 2569502
cauaucauguccaucugca

SEQ ID NO: 2569504 - RNA, 19 nt, Artificial Sequence
  Description of Artificial Sequence: Synthetic oligonucleotide
  Sense strand starting at position 3494 of SEQ ID NO: 1888966
ugauucuuacuuggguaga

SEQ ID NO: 2569505 - RNA, 19 nt, Artificial Sequence
  Description of Artificial Sequence: Synthetic oligonucleotide
  Antisense strand to SEQ ID NO: 2569504
ucuacccaaguaagaauca

SEQ ID NO: 2569506 - RNA, 19 nt, Artificial Sequence
  Description of Artificial Sequence: Synthetic oligonucleotide
  Sense strand starting at position 3496 of SEQ ID NO: 1888966
auucuuacuuggguagaua

SEQ ID NO: 2569507 - RNA, 19 nt, Artificial Sequence
  Description of Artificial Sequence: Synthetic oligonucleotide
  Antisense strand to SEQ ID NO: 2569506
uaucuacccaaguaagaau

SEQ ID NO: 2569508 - RNA, 19 nt, Artificial Sequence
  Description of Artificial Sequence: Synthetic oligonucleotide
  Sense strand starting at position 3497 of SEQ ID NO: 1888966
uucuuacuuggguagauau

SEQ ID NO: 2569509 - RNA, 19 nt, Artificial Sequence
  Description of Artificial Sequence: Synthetic oligonucleotide
  Antisense strand to SEQ ID NO: 2569508
auaucuacccaaguaagaa

SEQ ID NO: 2569510 - RNA, 19 nt, Artificial Sequence
  Description of Artificial Sequence: Synthetic oligonucleotide
  Sense strand starting at position 3509 of SEQ ID NO: 1888966
uagauaugguauguaauca

SEQ ID NO: 2569511 - RNA, 19 nt, Artificial Sequence
  Description of Artificial Sequence: Synthetic oligonucleotide
  Antisense strand to SEQ ID NO: 2569510
ugauuacauaccauaucua

SEQ ID NO: 2569512 - RNA, 19 nt, Artificial Sequence
  Description of Artificial Sequence: Synthetic oligonucleotide
  Sense strand starting at position 3629 of SEQ ID NO: 1888966
cauggugauugacucuaca

SEQ ID NO: 2569513 - RNA, 19 nt, Artificial Sequence
  Description of Artificial Sequence: Synthetic oligonucleotide
  Antisense strand to SEQ ID NO: 2569512
uguagagucaaucaccaug

SEQ ID NO: 2569514 - RNA, 19 nt, Artificial Sequence
  Description of Artificial Sequence: Synthetic oligonucleotide
  Sense strand starting at position 3645 of SEQ ID NO: 1888966
acacauuuguguuugggca

SEQ ID NO: 2569515 - RNA, 19 nt, Artificial Sequence
  Description of Artificial Sequence: Synthetic oligonucleotide
  Antisense strand to SEQ ID NO: 2569514
ugcccaaacacaaaugugu

SEQ ID NO: 2569516 - RNA, 19 nt, Artificial Sequence
  Description of Artificial Sequence: Synthetic oligonucleotide
  Sense strand starting at position 3646 of SEQ ID NO: 1888966
cacauuuguguuugggcau

SEQ ID NO: 2569517 - RNA, 19 nt, Artificial Sequence
  Description of Artificial Sequence: Synthetic oligonucleotide
  Antisense strand to SEQ ID NO: 2569516
augcccaaacacaaaugug

SEQ ID NO: 2569518 - RNA, 19 nt, Artificial Sequence
  Description of Artificial Sequence: Synthetic oligonucleotide
  Sense strand starting at position 3649 of SEQ ID NO: 1888966
auuuguguuugggcaugau

SEQ ID NO: 2569519 - RNA, 19 nt, Artificial Sequence
  Description of Artificial Sequence: Synthetic oligonucleotide
  Antisense strand to SEQ ID NO: 2569518
aucaugcccaaacacaaau

SEQ ID NO: 2569520 - RNA, 19 nt, Artificial Sequence
  Description of Artificial Sequence: Synthetic oligonucleotide
  Sense strand starting at position 3833 of SEQ ID NO: 1888966
gaaggagauuauguuuauu

SEQ ID NO: 2569521 - RNA, 19 nt, Artificial Sequence
  Description of Artificial Sequence: Synthetic oligonucleotide
  Antisense strand to SEQ ID NO: 2569520
aauaaacauaaucuccuuc

SEQ ID NO: 2569522 - RNA, 19 nt, Artificial Sequence
  Description of Artificial Sequence: Synthetic oligonucleotide
  Sense strand starting at position 3860 of SEQ ID NO: 1888966
auuaaugaugggugagcaa

SEQ ID NO: 2569523 - RNA, 19 nt, Artificial Sequence
  Description of Artificial Sequence: Synthetic oligonucleotide
  Antisense strand to SEQ ID NO: 2569522
uugcucacccaucauuaau

SEQ ID NO: 2569524 - RNA, 19 nt, Artificial Sequence
  Description of Artificial Sequence: Synthetic oligonucleotide
  Sense strand starting at position 3863 of SEQ ID NO: 1888966
aaugaugggugagcaauau

SEQ ID NO: 2569525 - RNA, 19 nt, Artificial Sequence
  Description of Artificial Sequence: Synthetic oligonucleotide
  Antisense strand to SEQ ID NO: 2569524
auauugcucacccaucauu

SEQ ID NO: 2569526 - RNA, 19 nt, Artificial Sequence
  Description of Artificial Sequence: Synthetic oligonucleotide
  Sense strand starting at position 3867 of SEQ ID NO: 1888966
augggugagcaauaucuau

SEQ ID NO: 2569527 - RNA, 19 nt, Artificial Sequence
  Description of Artificial Sequence: Synthetic oligonucleotide
  Antisense strand to SEQ ID NO: 2569526
auagauauugcucacccau

SEQ ID NO: 2569528 - RNA, 19 nt, Artificial Sequence
  Description of Artificial Sequence: Synthetic oligonucleotide
  Sense strand starting at position 3871 of SEQ ID NO: 1888966
gugagcaauaucuaugaug

SEQ ID NO: 2569529 - RNA, 19 nt, Artificial Sequence
  Description of Artificial Sequence: Synthetic oligonucleotide
  Antisense strand to SEQ ID NO: 2569528
caucauagauauugcucac

SEQ ID NO: 2569530 - RNA, 19 nt, Artificial Sequence
  Description of Artificial Sequence: Synthetic oligonucleotide
  Sense strand starting at position 153 of SEQ ID NO: 1888967
uaucuugugagguagauga

SEQ ID NO: 2569531 - RNA, 19 nt, Artificial Sequence
  Description of Artificial Sequence: Synthetic oligonucleotide
  Antisense strand to SEQ ID NO: 2569530
ucaucuaccucacaagaua

SEQ ID NO: 2569532 - RNA, 19 nt, Artificial Sequence
  Description of Artificial Sequence: Synthetic oligonucleotide
  Sense strand starting at position 229 of SEQ ID NO: 1888967
guaacauugucauuaccaa

SEQ ID NO: 2569533 - RNA, 19 nt, Artificial Sequence
  Description of Artificial Sequence: Synthetic oligonucleotide
  Antisense strand to SEQ ID NO: 2569532
uugguaaugacaauguuac

SEQ ID NO: 2569534 - RNA, 19 nt, Artificial Sequence
  Description of Artificial Sequence: Synthetic oligonucleotide
  Sense strand starting at position 264 of SEQ ID NO: 1888967
ugaauccuagcugaaucua

SEQ ID NO: 2569535 - RNA, 19 nt, Artificial Sequence
  Description of Artificial Sequence: Synthetic oligonucleotide
  Antisense strand to SEQ ID NO: 2569534
uagauucagcuaggauuca

SEQ ID NO: 2569536 - RNA, 19 nt, Artificial Sequence
  Description of Artificial Sequence: Synthetic oligonucleotide
  Sense strand starting at position 446 of SEQ ID NO: 1888967
gcaugcaaucaugacucua

SEQ ID NO: 2569537 - RNA, 19 nt, Artificial Sequence
  Description of Artificial Sequence: Synthetic oligonucleotide
  Antisense strand to SEQ ID NO: 2569536
uagagucaugauugcaugc

SEQ ID NO: 2569538 - RNA, 19 nt, Artificial Sequence
  Description of Artificial Sequence: Synthetic oligonucleotide
  Sense strand starting at position 531 of SEQ ID NO: 1888967
agcaucauucuauaaggca

SEQ ID NO: 2569539 - RNA, 19 nt, Artificial Sequence
  Description of Artificial Sequence: Synthetic oligonucleotide
  Antisense strand to SEQ ID NO: 2569538
ugccuuauagaaugaugcu

SEQ ID NO: 2569540 - RNA, 19 nt, Artificial Sequence
  Description of Artificial Sequence: Synthetic oligonucleotide
  Sense strand starting at position 704 of SEQ ID NO: 1888967
caucuauuuggcugccgaa

SEQ ID NO: 2569541 - RNA, 19 nt, Artificial Sequence
  Description of Artificial Sequence: Synthetic oligonucleotide
  Antisense strand to SEQ ID NO: 2569540
uucggcagccaaauagaug

SEQ ID NO: 2569542 - RNA, 19 nt, Artificial Sequence
  Description of Artificial Sequence: Synthetic oligonucleotide
  Sense strand starting at position 717 of SEQ ID NO: 1888967
gccgaaucacuggaauucu

SEQ ID NO: 2569543 - RNA, 19 nt, Artificial Sequence
  Description of Artificial Sequence: Synthetic oligonucleotide
  Antisense strand to SEQ ID NO: 2569542
agaauuccagugauucggc

SEQ ID NO: 2569544 - RNA, 19 nt, Artificial Sequence
  Description of Artificial Sequence: Synthetic oligonucleotide
  Sense strand starting at position 726 of SEQ ID NO: 1888967
cuggaauucuccucacuga

SEQ ID NO: 2569545 - RNA, 19 nt, Artificial Sequence
  Description of Artificial Sequence: Synthetic oligonucleotide
  Antisense strand to SEQ ID NO: 2569544
ucagugaggagaauuccag

SEQ ID NO: 2569546 - RNA, 19 nt, Artificial Sequence
  Description of Artificial Sequence: Synthetic oligonucleotide
  Sense strand starting at position 889 of SEQ ID NO: 1888967
ucucauauguagguuaaga

SEQ ID NO: 2569547 - RNA, 19 nt, Artificial Sequence
  Description of Artificial Sequence: Synthetic oligonucleotide
  Antisense strand to SEQ ID NO: 2569546
ucuuaaccuacauaugaga

SEQ ID NO: 2569548 - RNA, 19 nt, Artificial Sequence
  Description of Artificial Sequence: Synthetic oligonucleotide
  Sense strand starting at position 891 of SEQ ID NO: 1888967
ucauauguagguuaagacu

SEQ ID NO: 2569549 - RNA, 19 nt, Artificial Sequence
  Description of Artificial Sequence: Synthetic oligonucleotide
  Antisense strand to SEQ ID NO: 2569548
agucuuaaccuacauauga

SEQ ID NO: 2569550 - RNA, 19 nt, Artificial Sequence
  Description of Artificial Sequence: Synthetic oligonucleotide
  Sense strand starting at position 904 of SEQ ID NO: 1888967
aagacuuccguguauugga

SEQ ID NO: 2569551 - RNA, 19 nt, Artificial Sequence
  Description of Artificial Sequence: Synthetic oligonucleotide
  Antisense strand to SEQ ID NO: 2569550
uccaauacacggaagucuu

SEQ ID NO: 2569552 - RNA, 19 nt, Artificial Sequence
  Description of Artificial Sequence: Synthetic oligonucleotide
  Sense strand starting at position 964 of SEQ ID NO: 1888967
gaguacauuuccgucccua

SEQ ID NO: 2569553 - RNA, 19 nt, Artificial Sequence
  Description of Artificial Sequence: Synthetic oligonucleotide
  Antisense strand to SEQ ID NO: 2569552
uagggacggaaauguacuc

SEQ ID NO: 2569554 - RNA, 19 nt, Artificial Sequence
  Description of Artificial Sequence: Synthetic oligonucleotide
  Sense strand starting at position 972 of SEQ ID NO: 1888967
uuccgucccuauuuaucua

SEQ ID NO: 2569555 - RNA, 19 nt, Artificial Sequence
  Description of Artificial Sequence: Synthetic oligonucleotide
  Antisense strand to SEQ ID NO: 2569554
uagauaaauagggacggaa

SEQ ID NO: 2569556 - RNA, 19 nt, Artificial Sequence
  Description of Artificial Sequence: Synthetic oligonucleotide
  Sense strand starting at position 1300 of SEQ ID NO: 1888967
uauggugauuccucacuga

SEQ ID NO: 2569557 - RNA, 19 nt, Artificial Sequence
  Description of Artificial Sequence: Synthetic oligonucleotide
  Antisense strand to SEQ ID NO: 2569556
ucagugaggaaucaccaua

SEQ ID NO: 2569558 - RNA, 19 nt, Artificial Sequence
  Description of Artificial Sequence: Synthetic oligonucleotide
  Sense strand starting at position 1673 of SEQ ID NO: 1888967
ggacuuaugccacagucac

SEQ ID NO: 2569559 - RNA, 19 nt, Artificial Sequence
  Description of Artificial Sequence: Synthetic oligonucleotide
  Antisense strand to SEQ ID NO: 2569558
gugacuguggcauaagucc

SEQ ID NO: 2569560 - RNA, 19 nt, Artificial Sequence
  Description of Artificial Sequence: Synthetic oligonucleotide
  Sense strand starting at position 1779 of SEQ ID NO: 1888967
ucuauugagagucacgauu

SEQ ID NO: 2569561 - RNA, 19 nt, Artificial Sequence
  Description of Artificial Sequence: Synthetic oligonucleotide
  Antisense strand to SEQ ID NO: 2569560
aaucgugacucucaauaga

SEQ ID NO: 2569562 - RNA, 19 nt, Artificial Sequence
  Description of Artificial Sequence: Synthetic oligonucleotide
  Sense strand starting at position 1855 of SEQ ID NO: 1888967
uguuauucucuggagucag

SEQ ID NO: 2569563 - RNA, 19 nt, Artificial Sequence
  Description of Artificial Sequence: Synthetic oligonucleotide
  Antisense strand to SEQ ID NO: 2569562
cugacuccagagaauaaca

SEQ ID NO: 2569564 - RNA, 19 nt, Artificial Sequence
  Description of Artificial Sequence: Synthetic oligonucleotide
  Sense strand starting at position 1863 of SEQ ID NO: 1888967
ucuggagucagauggauua

SEQ ID NO: 2569565 - RNA, 19 nt, Artificial Sequence
  Description of Artificial Sequence: Synthetic oligonucleotide
  Antisense strand to SEQ ID NO: 2569564
uaauccaucugacuccaga

SEQ ID NO: 2569566 - RNA, 19 nt, Artificial Sequence
  Description of Artificial Sequence: Synthetic oligonucleotide
  Sense strand starting at position 1908 of SEQ ID NO: 1888967
auggaucugagcugaguga

SEQ ID NO: 2569567 - RNA, 19 nt, Artificial Sequence
  Description of Artificial Sequence: Synthetic oligonucleotide
  Antisense strand to SEQ ID NO: 2569566
ucacucagcucagauccau

SEQ ID NO: 2569568 - RNA, 19 nt, Artificial Sequence
  Description of Artificial Sequence: Synthetic oligonucleotide
  Sense strand starting at position 1932 of SEQ ID NO: 1888967
ugccgauaagaagaauguu

SEQ ID NO: 2569569 - RNA, 19 nt, Artificial Sequence
  Description of Artificial Sequence: Synthetic oligonucleotide
  Antisense strand to SEQ ID NO: 2569568
aacauucuucuuaucggca

SEQ ID NO: 2569570 - RNA, 19 nt, Artificial Sequence
  Description of Artificial Sequence: Synthetic oligonucleotide
  Sense strand starting at position 2014 of SEQ ID NO: 1888967
uuggaucucaggugagaau

SEQ ID NO: 2569571 - RNA, 19 nt, Artificial Sequence
  Description of Artificial Sequence: Synthetic oligonucleotide
  Antisense strand to SEQ ID NO: 2569570
auucucaccugagauccaa

SEQ ID NO: 2569572 - RNA, 19 nt, Artificial Sequence
  Description of Artificial Sequence: Synthetic oligonucleotide
  Sense strand starting at position 2059 of SEQ ID NO: 1888967
gggauagauaugugguaga

SEQ ID NO: 2569573 - RNA, 19 nt, Artificial Sequence
  Description of Artificial Sequence: Synthetic oligonucleotide
  Antisense strand to SEQ ID NO: 2569572
ucuaccacauaucuauccc

SEQ ID NO: 2569574 - RNA, 19 nt, Artificial Sequence
  Description of Artificial Sequence: Synthetic oligonucleotide
  Sense strand starting at position 2064 of SEQ ID NO: 1888967
agauaugugguagaggguu

SEQ ID NO: 2569575 - RNA, 19 nt, Artificial Sequence
  Description of Artificial Sequence: Synthetic oligonucleotide
  Antisense strand to SEQ ID NO: 2569574
aacccucuaccacauaucu

SEQ ID NO: 2569576 - RNA, 19 nt, Artificial Sequence
  Description of Artificial Sequence: Synthetic oligonucleotide
  Sense strand starting at position 2275 of SEQ ID NO: 1888967
gggcucagaccaugggaaa

SEQ ID NO: 2569577 - RNA, 19 nt, Artificial Sequence
  Description of Artificial Sequence: Synthetic oligonucleotide
  Antisense strand to SEQ ID NO: 2569576
uuucccauggucugagccc

SEQ ID NO: 2569578 - RNA, 19 nt, Artificial Sequence
  Description of Artificial Sequence: Synthetic oligonucleotide
  Sense strand starting at position 2276 of SEQ ID NO: 1888967
ggcucagaccaugggaaau

SEQ ID NO: 2569579 - RNA, 19 nt, Artificial Sequence
  Description of Artificial Sequence: Synthetic oligonucleotide
  Antisense strand to SEQ ID NO: 2569578
auuucccauggucugagcc

SEQ ID NO: 2569580 - RNA, 19 nt, Artificial Sequence
  Description of Artificial Sequence: Synthetic oligonucleotide
  Sense strand starting at position 2444 of SEQ ID NO: 1888967
uguugucagggucaauaua

SEQ ID NO: 2569581 - RNA, 19 nt, Artificial Sequence
  Description of Artificial Sequence: Synthetic oligonucleotide
  Antisense strand to SEQ ID NO: 2569580
uauauugacccugacaaca

SEQ ID NO: 2569582 - RNA, 19 nt, Artificial Sequence
  Description of Artificial Sequence: Synthetic oligonucleotide
  Sense strand starting at position 2623 of SEQ ID NO: 1888967
uggugcauuuacuugcuaa

SEQ ID NO: 2569583 - RNA, 19 nt, Artificial Sequence
  Description of Artificial Sequence: Synthetic oligonucleotide
  Antisense strand to SEQ ID NO: 2569582
uuagcaaguaaaugcacca

SEQ ID NO: 2569584 - RNA, 19 nt, Artificial Sequence
  Description of Artificial Sequence: Synthetic oligonucleotide
  Sense strand starting at position 2624 of SEQ ID NO: 1888967
ggugcauuuacuugcuaag

SEQ ID NO: 2569585 - RNA, 19 nt, Artificial Sequence
  Description of Artificial Sequence: Synthetic oligonucleotide
  Antisense strand to SEQ ID NO: 2569584
cuuagcaaguaaaugcacc

SEQ ID NO: 2569586 - RNA, 19 nt, Artificial Sequence
  Description of Artificial Sequence: Synthetic oligonucleotide
  Sense strand starting at position 2667 of SEQ ID NO: 1888967
gcauaaccucuguacugga

SEQ ID NO: 2569587 - RNA, 19 nt, Artificial Sequence
  Description of Artificial Sequence: Synthetic oligonucleotide
  Antisense strand to SEQ ID NO: 2569586
uccaguacagagguuaugc

SEQ ID NO: 2569588 - RNA, 19 nt, Artificial Sequence
  Description of Artificial Sequence: Synthetic oligonucleotide
  Sense strand starting at position 2705 of SEQ ID NO: 1888967
uggaguuaugucuaaucug

SEQ ID NO: 2569589 - RNA, 19 nt, Artificial Sequence
  Description of Artificial Sequence: Synthetic oligonucleotide
  Antisense strand to SEQ ID NO: 2569588
cagauuagacauaacucca

SEQ ID NO: 2569590 - RNA, 19 nt, Artificial Sequence
  Description of Artificial Sequence: Synthetic oligonucleotide
  Sense strand starting at position 2823 of SEQ ID NO: 1888967
acuccuuuccaagacgauu

SEQ ID NO: 2569591 - RNA, 19 nt, Artificial Sequence
  Description of Artificial Sequence: Synthetic oligonucleotide
  Antisense strand to SEQ ID NO: 2569590
aaucgucuuggaaaggagu

SEQ ID NO: 2569592 - RNA, 19 nt, Artificial Sequence
  Description of Artificial Sequence: Synthetic oligonucleotide
  Sense strand starting at position 2846 of SEQ ID NO: 1888967
guguguauggcuuucgagu

SEQ ID NO: 2569593 - RNA, 19 nt, Artificial Sequence
  Description of Artificial Sequence: Synthetic oligonucleotide
  Antisense strand to SEQ ID NO: 2569592
acucgaaagccauacacac

SEQ ID NO: 2569594 - RNA, 19 nt, Artificial Sequence
  Description of Artificial Sequence: Synthetic oligonucleotide
  Sense strand starting at position 2891 of SEQ ID NO: 1888967
augacaucuuauguugacu

SEQ ID NO: 2569595 - RNA, 19 nt, Artificial Sequence
  Description of Artificial Sequence: Synthetic oligonucleotide
  Antisense strand to SEQ ID NO: 2569594
agucaacauaagaugucau

SEQ ID NO: 2569596 - RNA, 19 nt, Artificial Sequence
  Description of Artificial Sequence: Synthetic oligonucleotide
  Sense strand starting at position 2987 of SEQ ID NO: 1888967
cauuucucuggcuggugua

SEQ ID NO: 2569597 - RNA, 19 nt, Artificial Sequence
  Description of Artificial Sequence: Synthetic oligonucleotide
  Antisense strand to SEQ ID NO: 2569596
uacaccagccagagaaaug

SEQ ID NO: 2569598 - RNA, 19 nt, Artificial Sequence
  Description of Artificial Sequence: Synthetic oligonucleotide
  Sense strand starting at position 2988 of SEQ ID NO: 1888967
auuucucuggcugguguaa

SEQ ID NO: 2569599 - RNA, 19 nt, Artificial Sequence
  Description of Artificial Sequence: Synthetic oligonucleotide
  Antisense strand to SEQ ID NO: 2569598
uuacaccagccagagaaau

SEQ ID NO: 2569600 - RNA, 19 nt, Artificial Sequence
  Description of Artificial Sequence: Synthetic oligonucleotide
  Sense strand starting at position 3353 of SEQ ID NO: 1888967
gaaguaaacugaguccuaa

SEQ ID NO: 2569601 - RNA, 19 nt, Artificial Sequence
  Description of Artificial Sequence: Synthetic oligonucleotide
  Antisense strand to SEQ ID NO: 2569600
uuaggacucaguuuacuuc

SEQ ID NO: 2569602 - RNA, 19 nt, Artificial Sequence
  Description of Artificial Sequence: Synthetic oligonucleotide
  Sense strand starting at position 3468 of SEQ ID NO: 1888967
ugaugagagucucuuaccu

SEQ ID NO: 2569603 - RNA, 19 nt, Artificial Sequence
  Description of Artificial Sequence: Synthetic oligonucleotide
  Antisense strand to SEQ ID NO: 2569602
agguaagagacucucauca

SEQ ID NO: 2569604 - RNA, 19 nt, Artificial Sequence
  Description of Artificial Sequence: Synthetic oligonucleotide
  Sense strand starting at position 3476 of SEQ ID NO: 1888967
gucucuuaccuccaucuga

SEQ ID NO: 2569605 - RNA, 19 nt, Artificial Sequence
  Description of Artificial Sequence: Synthetic oligonucleotide
  Antisense strand to SEQ ID NO: 2569604
ucagauggagguaagagac

SEQ ID NO: 2569606 - RNA, 19 nt, Artificial Sequence
  Description of Artificial Sequence: Synthetic oligonucleotide
  Sense strand starting at position 3568 of SEQ ID NO: 1888967
acauaaggauucccauagu

SEQ ID NO: 2569607 - RNA, 19 nt, Artificial Sequence
  Description of Artificial Sequence: Synthetic oligonucleotide
  Antisense strand to SEQ ID NO: 2569606
acuaugggaauccuuaugu

SEQ ID NO: 2569608 - RNA, 19 nt, Artificial Sequence
  Description of Artificial Sequence: Synthetic oligonucleotide
  Sense strand starting at position 3617 of SEQ ID NO: 1888967
auuuguacuuucucuugua

SEQ ID NO: 2569609 - RNA, 19 nt, Artificial Sequence
  Description of Artificial Sequence: Synthetic oligonucleotide
  Antisense strand to SEQ ID NO: 2569608
uacaagagaaaguacaaau

SEQ ID NO: 2569610 - RNA, 19 nt, Artificial Sequence
  Description of Artificial Sequence: Synthetic oligonucleotide
  Sense strand starting at position 302 of SEQ ID NO: 1888968
ucuugaggaucccugaguu

SEQ ID NO: 2569611 - RNA, 19 nt, Artificial Sequence
  Description of Artificial Sequence: Synthetic oligonucleotide
  Antisense strand to SEQ ID NO: 2569610
aacucagggauccucaaga

SEQ ID NO: 2569612 - RNA, 19 nt, Artificial Sequence
  Description of Artificial Sequence: Synthetic oligonucleotide
  Sense strand starting at position 330 of SEQ ID NO: 1888968
uuccaaaucucuccuggga

SEQ ID NO: 2569613 - RNA, 19 nt, Artificial Sequence
  Description of Artificial Sequence: Synthetic oligonucleotide
  Antisense strand to SEQ ID NO: 2569612
ucccaggagagauuuggaa

SEQ ID NO: 2569614 - RNA, 19 nt, Artificial Sequence
  Description of Artificial Sequence: Synthetic oligonucleotide
  Sense strand starting at position 790 of SEQ ID NO: 1888968
gcauguguucauguuguua

SEQ ID NO: 2569615 - RNA, 19 nt, Artificial Sequence
  Description of Artificial Sequence: Synthetic oligonucleotide
  Antisense strand to SEQ ID NO: 2569614
uaacaacaugaacacaugc

SEQ ID NO: 2569616 - RNA, 19 nt, Artificial Sequence
  Description of Artificial Sequence: Synthetic oligonucleotide
  Sense strand starting at position 803 of SEQ ID NO: 1888968
uuguuagggacagacgauu

SEQ ID NO: 2569617 - RNA, 19 nt, Artificial Sequence
  Description of Artificial Sequence: Synthetic oligonucleotide
  Antisense strand to SEQ ID NO: 2569616
aaucgucugucccuaacaa

SEQ ID NO: 2569618 - RNA, 19 nt, Artificial Sequence
  Description of Artificial Sequence: Synthetic oligonucleotide
  Sense strand starting at position 821 of SEQ ID NO: 1888968
uuagaauaucucgacgaug

SEQ ID NO: 2569619 - RNA, 19 nt, Artificial Sequence
  Description of Artificial Sequence: Synthetic oligonucleotide
  Antisense strand to SEQ ID NO: 2569618
caucgucgagauauucuaa

SEQ ID NO: 2569620 - RNA, 19 nt, Artificial Sequence
  Description of Artificial Sequence: Synthetic oligonucleotide
  Sense strand starting at position 857 of SEQ ID NO: 1888968
caacuaaggucuccuggua

SEQ ID NO: 2569621 - RNA, 19 nt, Artificial Sequence
  Description of Artificial Sequence: Synthetic oligonucleotide
  Antisense strand to SEQ ID NO: 2569620
uaccaggagaccuuaguug

SEQ ID NO: 2569622 - RNA, 19 nt, Artificial Sequence
  Description of Artificial Sequence: Synthetic oligonucleotide
  Sense strand starting at position 909 of SEQ ID NO: 1888968
acccuaucauggguccaaa

SEQ ID NO: 2569623 - RNA, 19 nt, Artificial Sequence
  Description of Artificial Sequence: Synthetic oligonucleotide
  Antisense strand to SEQ ID NO: 2569622
uuuggacccaugauagggu

SEQ ID NO: 2569624 - RNA, 19 nt, Artificial Sequence
  Description of Artificial Sequence: Synthetic oligonucleotide
  Sense strand starting at position 946 of SEQ ID NO: 1888968
cuuguugagccuuacacua

SEQ ID NO: 2569625 - RNA, 19 nt, Artificial Sequence
  Description of Artificial Sequence: Synthetic oligonucleotide
  Antisense strand to SEQ ID NO: 2569624
uaguguaaggcucaacaag

SEQ ID NO: 2569626 - RNA, 19 nt, Artificial Sequence
  Description of Artificial Sequence: Synthetic oligonucleotide
  Sense strand starting at position 976 of SEQ ID NO: 1888968
accagugauguauaaucua

SEQ ID NO: 2569627 - RNA, 19 nt, Artificial Sequence
  Description of Artificial Sequence: Synthetic oligonucleotide
  Antisense strand to SEQ ID NO: 2569626
uagauuauacaucacuggu

SEQ ID NO: 2569628 - RNA, 19 nt, Artificial Sequence
  Description of Artificial Sequence: Synthetic oligonucleotide
  Sense strand starting at position 979 of SEQ ID NO: 1888968
agugauguauaaucuagga

SEQ ID NO: 2569629 - RNA, 19 nt, Artificial Sequence
  Description of Artificial Sequence: Synthetic oligonucleotide
  Antisense strand to SEQ ID NO: 2569628
uccuagauuauacaucacu

SEQ ID NO: 2569630 - RNA, 19 nt, Artificial Sequence
  Description of Artificial Sequence: Synthetic oligonucleotide
  Sense strand starting at position 1119 of SEQ ID NO: 1888968
ugucucacucaaugagaca

SEQ ID NO: 2569631 - RNA, 19 nt, Artificial Sequence
  Description of Artificial Sequence: Synthetic oligonucleotide
  Antisense strand to SEQ ID NO: 2569630
ugucucauugagugagaca

SEQ ID NO: 2569632 - RNA, 19 nt, Artificial Sequence
  Description of Artificial Sequence: Synthetic oligonucleotide
  Sense strand starting at position 1146 of SEQ ID NO: 1888968
gcuccauauuugcccagau

SEQ ID NO: 2569633 - RNA, 19 nt, Artificial Sequence
  Description of Artificial Sequence: Synthetic oligonucleotide
  Antisense strand to SEQ ID NO: 2569632
aucugggcaaauauggagc

SEQ ID NO: 2569634 - RNA, 19 nt, Artificial Sequence
  Description of Artificial Sequence: Synthetic oligonucleotide
  Sense strand starting at position 1399 of SEQ ID NO: 1888968
augaacuuguacuugguaa

SEQ ID NO: 2569635 - RNA, 19 nt, Artificial Sequence
  Description of Artificial Sequence: Synthetic oligonucleotide
  Antisense strand to SEQ ID NO: 2569634
uuaccaaguacaaguucau

SEQ ID NO: 2569636 - RNA, 19 nt, Artificial Sequence
  Description of Artificial Sequence: Synthetic oligonucleotide
  Sense strand starting at position 1401 of SEQ ID NO: 1888968
gaacuuguacuugguaaga

SEQ ID NO: 2569637 - RNA, 19 nt, Artificial Sequence
  Description of Artificial Sequence: Synthetic oligonucleotide
  Antisense strand to SEQ ID NO: 2569636
ucuuaccaaguacaaguuc

SEQ ID NO: 2569638 - RNA, 19 nt, Artificial Sequence
  Description of Artificial Sequence: Synthetic oligonucleotide
  Sense strand starting at position 1412 of SEQ ID NO: 1888968
ugguaagacuuacucuacu

SEQ ID NO: 2569639 - RNA, 19 nt, Artificial Sequence
  Description of Artificial Sequence: Synthetic oligonucleotide
  Antisense strand to SEQ ID NO: 2569638
aguagaguaagucuuacca

SEQ ID NO: 2569640 - RNA, 19 nt, Artificial Sequence
  Description of Artificial Sequence: Synthetic oligonucleotide
  Sense strand starting at position 1773 of SEQ ID NO: 1888968
guaggugcucacguuguua

SEQ ID NO: 2569641 - RNA, 19 nt, Artificial Sequence
  Description of Artificial Sequence: Synthetic oligonucleotide
  Antisense strand to SEQ ID NO: 2569640
uaacaacgugagcaccuac

SEQ ID NO: 2569642 - RNA, 19 nt, Artificial Sequence
  Description of Artificial Sequence: Synthetic oligonucleotide
  Sense strand starting at position 1833 of SEQ ID NO: 1888968
caagguucuccugggauca

SEQ ID NO: 2569643 - RNA, 19 nt, Artificial Sequence
  Description of Artificial Sequence: Synthetic oligonucleotide
  Antisense strand to SEQ ID NO: 2569642
ugaucccaggagaaccuug

SEQ ID NO: 2569644 - RNA, 19 nt, Artificial Sequence
  Description of Artificial Sequence: Synthetic oligonucleotide
  Sense strand starting at position 1834 of SEQ ID NO: 1888968
aagguucuccugggaucaa

SEQ ID NO: 2569645 - RNA, 19 nt, Artificial Sequence
  Description of Artificial Sequence: Synthetic oligonucleotide
  Antisense strand to SEQ ID NO: 2569644
uugaucccaggagaaccuu

SEQ ID NO: 2569646 - RNA, 19 nt, Artificial Sequence
  Description of Artificial Sequence: Synthetic oligonucleotide
  Sense strand starting at position 1943 of SEQ ID NO: 1888968
agaggugucagucacaugu

SEQ ID NO: 2569647 - RNA, 19 nt, Artificial Sequence
  Description of Artificial Sequence: Synthetic oligonucleotide
  Antisense strand to SEQ ID NO: 2569646
acaugugacugacaccucu

SEQ ID NO: 2569648 - RNA, 19 nt, Artificial Sequence
  Description of Artificial Sequence: Synthetic oligonucleotide
  Sense strand starting at position 2031 of SEQ ID NO: 1888968
gcaucuugcguguucucca

SEQ ID NO: 2569649 - RNA, 19 nt, Artificial Sequence
  Description of Artificial Sequence: Synthetic oligonucleotide
  Antisense strand to SEQ ID NO: 2569648
uggagaacacgcaagaugc

SEQ ID NO: 2569650 - RNA, 19 nt, Artificial Sequence
  Description of Artificial Sequence: Synthetic oligonucleotide
  Sense strand starting at position 2038 of SEQ ID NO: 1888968
gcguguucuccaccuguag

SEQ ID NO: 2569651 - RNA, 19 nt, Artificial Sequence
  Description of Artificial Sequence: Synthetic oligonucleotide
  Antisense strand to SEQ ID NO: 2569650
cuacagguggagaacacgc

SEQ ID NO: 2569652 - RNA, 19 nt, Artificial Sequence
  Description of Artificial Sequence: Synthetic oligonucleotide
  Sense strand starting at position 2110 of SEQ ID NO: 1888968
ucaucaguccuggaucaug

SEQ ID NO: 2569653 - RNA, 19 nt, Artificial Sequence
  Description of Artificial Sequence: Synthetic oligonucleotide
  Antisense strand to SEQ ID NO: 2569652
caugauccaggacugauga

SEQ ID NO: 2569654 - RNA, 19 nt, Artificial Sequence
  Description of Artificial Sequence: Synthetic oligonucleotide
  Sense strand starting at position 2184 of SEQ ID NO: 1888968
acucuauguuuaucuggau

SEQ ID NO: 2569655 - RNA, 19 nt, Artificial Sequence
  Description of Artificial Sequence: Synthetic oligonucleotide
  Antisense strand to SEQ ID NO: 2569654
auccagauaaacauagagu

SEQ ID NO: 2569656 - RNA, 19 nt, Artificial Sequence
  Description of Artificial Sequence: Synthetic oligonucleotide
  Sense strand starting at position 2199 of SEQ ID NO: 1888968
ggaugauugccaggaccag

SEQ ID NO: 2569657 - RNA, 19 nt, Artificial Sequence
  Description of Artificial Sequence: Synthetic oligonucleotide
  Antisense strand to SEQ ID NO: 2569656
cugguccuggcaaucaucc

SEQ ID NO: 2569658 - RNA, 19 nt, Artificial Sequence
  Description of Artificial Sequence: Synthetic oligonucleotide
  Sense strand starting at position 2221 of SEQ ID NO: 1888968
agagcaagauuguucccau

SEQ ID NO: 2569659 - RNA, 19 nt, Artificial Sequence
  Description of Artificial Sequence: Synthetic oligonucleotide
  Antisense strand to SEQ ID NO: 2569658
augggaacaaucuugcucu

SEQ ID NO: 2569660 - RNA, 19 nt, Artificial Sequence
  Description of Artificial Sequence: Synthetic oligonucleotide
  Sense strand starting at position 2373 of SEQ ID NO: 1888968
gcuggucucagggaaggua

SEQ ID NO: 2569661 - RNA, 19 nt, Artificial Sequence
  Description of Artificial Sequence: Synthetic oligonucleotide
  Antisense strand to SEQ ID NO: 2569660
uaccuucccugagaccagc

SEQ ID NO: 2569662 - RNA, 19 nt, Artificial Sequence
  Description of Artificial Sequence: Synthetic oligonucleotide
  Sense strand starting at position 2413 of SEQ ID NO: 1888968
acacuaucauggguccaaa

SEQ ID NO: 2569663 - RNA, 19 nt, Artificial Sequence
  Description of Artificial Sequence: Synthetic oligonucleotide
  Antisense strand to SEQ ID NO: 2569662
uuuggacccaugauagugu

SEQ ID NO: 2569664 - RNA, 19 nt, Artificial Sequence
  Description of Artificial Sequence: Synthetic oligonucleotide
  Sense strand starting at position 2458 of SEQ ID NO: 1888968
gccuuacucuaccuggaaa

SEQ ID NO: 2569665 - RNA, 19 nt, Artificial Sequence
  Description of Artificial Sequence: Synthetic oligonucleotide
  Antisense strand to SEQ ID NO: 2569664
uuuccagguagaguaaggc

SEQ ID NO: 2569666 - RNA, 19 nt, Artificial Sequence
  Description of Artificial Sequence: Synthetic oligonucleotide
  Sense strand starting at position 2485 of SEQ ID NO: 1888968
ugacauauaaucugggcga

SEQ ID NO: 2569667 - RNA, 19 nt, Artificial Sequence
  Description of Artificial Sequence: Synthetic oligonucleotide
  Antisense strand to SEQ ID NO: 2569666
ucgcccagauuauauguca

SEQ ID NO: 2569668 - RNA, 19 nt, Artificial Sequence
  Description of Artificial Sequence: Synthetic oligonucleotide
  Sense strand starting at position 2489 of SEQ ID NO: 1888968
auauaaucugggcgacuga

SEQ ID NO: 2569669 - RNA, 19 nt, Artificial Sequence
  Description of Artificial Sequence: Synthetic oligonucleotide
  Antisense strand to SEQ ID NO: 2569668
ucagucgcccagauuauau

SEQ ID NO: 2569670 - RNA, 19 nt, Artificial Sequence
  Description of Artificial Sequence: Synthetic oligonucleotide
  Sense strand starting at position 2571 of SEQ ID NO: 1888968
acaguuauacccuacagcu

SEQ ID NO: 2569671 - RNA, 19 nt, Artificial Sequence
  Description of Artificial Sequence: Synthetic oligonucleotide
  Antisense strand to SEQ ID NO: 2569670
agcuguaggguauaacugu

SEQ ID NO: 2569672 - RNA, 19 nt, Artificial Sequence
  Description of Artificial Sequence: Synthetic oligonucleotide
  Sense strand starting at position 2718 of SEQ ID NO: 1888968
uuuguuuagccagauaauu

SEQ ID NO: 2569673 - RNA, 19 nt, Artificial Sequence
  Description of Artificial Sequence: Synthetic oligonucleotide
  Antisense strand to SEQ ID NO: 2569672
aauuaucuggcuaaacaaa

SEQ ID NO: 2569674 - RNA, 19 nt, Artificial Sequence
  Description of Artificial Sequence: Synthetic oligonucleotide
  Sense strand starting at position 3062 of SEQ ID NO: 1888968
auacauuauggcugaauac

SEQ ID NO: 2569675 - RNA, 19 nt, Artificial Sequence
  Description of Artificial Sequence: Synthetic oligonucleotide
  Antisense strand to SEQ ID NO: 2569674
guauucagccauaauguau

SEQ ID NO: 2569676 - RNA, 19 nt, Artificial Sequence
  Description of Artificial Sequence: Synthetic oligonucleotide
  Sense strand starting at position 3205 of SEQ ID NO: 1888968
cuccaauuugcguaucuca

SEQ ID NO: 2569677 - RNA, 19 nt, Artificial Sequence
  Description of Artificial Sequence: Synthetic oligonucleotide
  Antisense strand to SEQ ID NO: 2569676
ugagauacgcaaauuggag

SEQ ID NO: 2569678 - RNA, 19 nt, Artificial Sequence
  Description of Artificial Sequence: Synthetic oligonucleotide
  Sense strand starting at position 3610 of SEQ ID NO: 1888968
cggccaucuuguuccauuu

SEQ ID NO: 2569679 - RNA, 19 nt, Artificial Sequence
  Description of Artificial Sequence: Synthetic oligonucleotide
  Antisense strand to SEQ ID NO: 2569678
aaauggaacaagauggccg

SEQ ID NO: 2569680 - RNA, 19 nt, Artificial Sequence
  Description of Artificial Sequence: Synthetic oligonucleotide
  Sense strand starting at position 3726 of SEQ ID NO: 1888968
aggaucucccggcauuauu

SEQ ID NO: 2569681 - RNA, 19 nt, Artificial Sequence
  Description of Artificial Sequence: Synthetic oligonucleotide
  Antisense strand to SEQ ID NO: 2569680
aauaaugccgggagauccu

SEQ ID NO: 2569682 - RNA, 19 nt, Artificial Sequence
  Description of Artificial Sequence: Synthetic oligonucleotide
  Sense strand starting at position 3792 of SEQ ID NO: 1888968
acaaacuuguacuuaguga

SEQ ID NO: 2569683 - RNA, 19 nt, Artificial Sequence
  Description of Artificial Sequence: Synthetic oligonucleotide
  Antisense strand to SEQ ID NO: 2569682
ucacuaaguacaaguuugu

SEQ ID NO: 2569684 - RNA, 19 nt, Artificial Sequence
  Description of Artificial Sequence: Synthetic oligonucleotide
  Sense strand starting at position 3803 of SEQ ID NO: 1888968
cuuagugagccuuacucua

SEQ ID NO: 2569685 - RNA, 19 nt, Artificial Sequence
  Description of Artificial Sequence: Synthetic oligonucleotide
  Antisense strand to SEQ ID NO: 2569684
uagaguaaggcucacuaag

SEQ ID NO: 2569686 - RNA, 19 nt, Artificial Sequence
  Description of Artificial Sequence: Synthetic oligonucleotide
  Sense strand starting at position 3838 of SEQ ID NO: 1888968
ugacauguaguguaaguga

SEQ ID NO: 2569687 - RNA, 19 nt, Artificial Sequence
  Description of Artificial Sequence: Synthetic oligonucleotide
  Antisense strand to SEQ ID NO: 2569686
ucacuuacacuacauguca

SEQ ID NO: 2569688 - RNA, 19 nt, Artificial Sequence
  Description of Artificial Sequence: Synthetic oligonucleotide
  Sense strand starting at position 3861 of SEQ ID NO: 1888968
caccuuucugaguaaggca

SEQ ID NO: 2569689 - RNA, 19 nt, Artificial Sequence
  Description of Artificial Sequence: Synthetic oligonucleotide
  Antisense strand to SEQ ID NO: 2569688
ugccuuacucagaaaggug

SEQ ID NO: 2569690 - RNA, 19 nt, Artificial Sequence
  Description of Artificial Sequence: Synthetic oligonucleotide
  Sense strand starting at position 234 of SEQ ID NO: 1888969
ucauauagguauucucauu

SEQ ID NO: 2569691 - RNA, 19 nt, Artificial Sequence
  Description of Artificial Sequence: Synthetic oligonucleotide
  Antisense strand to SEQ ID NO: 2569690
aaugagaauaccuauauga

SEQ ID NO: 2569692 - RNA, 19 nt, Artificial Sequence
  Description of Artificial Sequence: Synthetic oligonucleotide
  Sense strand starting at position 242 of SEQ ID NO: 1888969
guauucucauuauuaggaa

SEQ ID NO: 2569693 - RNA, 19 nt, Artificial Sequence
  Description of Artificial Sequence: Synthetic oligonucleotide
  Antisense strand to SEQ ID NO: 2569692
uuccuaauaaugagaauac

SEQ ID NO: 2569694 - RNA, 19 nt, Artificial Sequence
  Description of Artificial Sequence: Synthetic oligonucleotide
  Sense strand starting at position 274 of SEQ ID NO: 1888969
ucaucuagaggaugucuga

SEQ ID NO: 2569695 - RNA, 19 nt, Artificial Sequence
  Description of Artificial Sequence: Synthetic oligonucleotide
  Antisense strand to SEQ ID NO: 2569694
ucagacauccucuagauga

SEQ ID NO: 2569696 - RNA, 19 nt, Artificial Sequence
  Description of Artificial Sequence: Synthetic oligonucleotide
  Sense strand starting at position 383 of SEQ ID NO: 1888969
acacacuuguacuugguaa

SEQ ID NO: 2569697 - RNA, 19 nt, Artificial Sequence
  Description of Artificial Sequence: Synthetic oligonucleotide
  Antisense strand to SEQ ID NO: 2569696
uuaccaaguacaagugugu

SEQ ID NO: 2569698 - RNA, 19 nt, Artificial Sequence
  Description of Artificial Sequence: Synthetic oligonucleotide
  Sense strand starting at position 447 of SEQ ID NO: 1888969
acuggcaccuuucugaaua

SEQ ID NO: 2569699 - RNA, 19 nt, Artificial Sequence
  Description of Artificial Sequence: Synthetic oligonucleotide
  Antisense strand to SEQ ID NO: 2569698
uauucagaaaggugccagu

SEQ ID NO: 2569700 - RNA, 19 nt, Artificial Sequence
  Description of Artificial Sequence: Synthetic oligonucleotide
  Sense strand starting at position 811 of SEQ ID NO: 1888969
ucuugaggaucccugaguu

SEQ ID NO: 2569701 - RNA, 19 nt, Artificial Sequence
  Description of Artificial Sequence: Synthetic oligonucleotide
  Antisense strand to SEQ ID NO: 2569700
aacucagggauccucaaga

SEQ ID NO: 2569702 - RNA, 19 nt, Artificial Sequence
  Description of Artificial Sequence: Synthetic oligonucleotide
  Sense strand starting at position 839 of SEQ ID NO: 1888969
uuccaaaucucuccuggga

SEQ ID NO: 2569703 - RNA, 19 nt, Artificial Sequence
  Description of Artificial Sequence: Synthetic oligonucleotide
  Antisense strand to SEQ ID NO: 2569702
ucccaggagagauuuggaa

SEQ ID NO: 2569704 - RNA, 19 nt, Artificial Sequence
  Description of Artificial Sequence: Synthetic oligonucleotide
  Sense strand starting at position 1299 of SEQ ID NO: 1888969
gcauguguucauguuguua

SEQ ID NO: 2569705 - RNA, 19 nt, Artificial Sequence
  Description of Artificial Sequence: Synthetic oligonucleotide
  Antisense strand to SEQ ID NO: 2569704
uaacaacaugaacacaugc

SEQ ID NO: 2569706 - RNA, 19 nt, Artificial Sequence
  Description of Artificial Sequence: Synthetic oligonucleotide
  Sense strand starting at position 1312 of SEQ ID NO: 1888969
uuguuagggacagacgauu

SEQ ID NO: 2569707 - RNA, 19 nt, Artificial Sequence
  Description of Artificial Sequence: Synthetic oligonucleotide
  Antisense strand to SEQ ID NO: 2569706
aaucgucugucccuaacaa

SEQ ID NO: 2569708 - RNA, 19 nt, Artificial Sequence
  Description of Artificial Sequence: Synthetic oligonucleotide
  Sense strand starting at position 1330 of SEQ ID NO: 1888969
uuagaauaucucgacgaug

SEQ ID NO: 2569709 - RNA, 19 nt, Artificial Sequence
  Description of Artificial Sequence: Synthetic oligonucleotide
  Antisense strand to SEQ ID NO: 2569708
caucgucgagauauucuaa

SEQ ID NO: 2569710 - RNA, 19 nt, Artificial Sequence
  Description of Artificial Sequence: Synthetic oligonucleotide
  Sense strand starting at position 1366 of SEQ ID NO: 1888969
caacuaaggucuccuggua

SEQ ID NO: 2569711 - RNA, 19 nt, Artificial Sequence
  Description of Artificial Sequence: Synthetic oligonucleotide
  Antisense strand to SEQ ID NO: 2569710
uaccaggagaccuuaguug

SEQ ID NO: 2569712 - RNA, 19 nt, Artificial Sequence
  Description of Artificial Sequence: Synthetic oligonucleotide
  Sense strand starting at position 1418 of SEQ ID NO: 1888969
acccuaucauggguccaaa

SEQ ID NO: 2569713 - RNA, 19 nt, Artificial Sequence
  Description of Artificial Sequence: Synthetic oligonucleotide
  Antisense strand to SEQ ID NO: 2569712
uuuggacccaugauagggu

SEQ ID NO: 2569714 - RNA, 19 nt, Artificial Sequence
  Description of Artificial Sequence: Synthetic oligonucleotide
  Sense strand starting at position 1455 of SEQ ID NO: 1888969
cuuguugagccuuacacua

SEQ ID NO: 2569715 - RNA, 19 nt, Artificial Sequence
  Description of Artificial Sequence: Synthetic oligonucleotide
  Antisense strand to SEQ ID NO: 2569714
uaguguaaggcucaacaag

SEQ ID NO: 2569716 - RNA, 19 nt, Artificial Sequence
  Description of Artificial Sequence: Synthetic oligonucleotide
  Sense strand starting at position 1485 of SEQ ID NO: 1888969
accagugauguauaaucua

SEQ ID NO: 2569717 - RNA, 19 nt, Artificial Sequence
  Description of Artificial Sequence: Synthetic oligonucleotide
  Antisense strand to SEQ ID NO: 2569716
uagauuauacaucacuggu

SEQ ID NO: 2569718 - RNA, 19 nt, Artificial Sequence
  Description of Artificial Sequence: Synthetic oligonucleotide
  Sense strand starting at position 1488 of SEQ ID NO: 1888969
agugauguauaaucuagga

SEQ ID NO: 2569719 - RNA, 19 nt, Artificial Sequence
  Description of Artificial Sequence: Synthetic oligonucleotide
  Antisense strand to SEQ ID NO: 2569718
uccuagauuauacaucacu

SEQ ID NO: 2569720 - RNA, 19 nt, Artificial Sequence
  Description of Artificial Sequence: Synthetic oligonucleotide
  Sense strand starting at position 1628 of SEQ ID NO: 1888969
ugucucacucaaugagaca

SEQ ID NO: 2569721 - RNA, 19 nt, Artificial Sequence
  Description of Artificial Sequence: Synthetic oligonucleotide
  Antisense strand to SEQ ID NO: 2569720
ugucucauugagugagaca

SEQ ID NO: 2569722 - RNA, 19 nt, Artificial Sequence
  Description of Artificial Sequence: Synthetic oligonucleotide
  Sense strand starting at position 1655 of SEQ ID NO: 1888969
gcuccauauuugcccagau

SEQ ID NO: 2569723 - RNA, 19 nt, Artificial Sequence
  Description of Artificial Sequence: Synthetic oligonucleotide
  Antisense strand to SEQ ID NO: 2569722
aucugggcaaauauggagc

SEQ ID NO: 2569724 - RNA, 19 nt, Artificial Sequence
  Description of Artificial Sequence: Synthetic oligonucleotide
  Sense strand starting at position 1908 of SEQ ID NO: 1888969
augaacuuguacuugguaa

SEQ ID NO: 2569725 - RNA, 19 nt, Artificial Sequence
  Description of Artificial Sequence: Synthetic oligonucleotide
  Antisense strand to SEQ ID NO: 2569724
uuaccaaguacaaguucau

SEQ ID NO: 2569726 - RNA, 19 nt, Artificial Sequence
  Description of Artificial Sequence: Synthetic oligonucleotide
  Sense strand starting at position 1910 of SEQ ID NO: 1888969
gaacuuguacuugguaaga

SEQ ID NO: 2569727 - RNA, 19 nt, Artificial Sequence
  Description of Artificial Sequence: Synthetic oligonucleotide
  Antisense strand to SEQ ID NO: 2569726
ucuuaccaaguacaaguuc

SEQ ID NO: 2569728 - RNA, 19 nt, Artificial Sequence
  Description of Artificial Sequence: Synthetic oligonucleotide
  Sense strand starting at position 1921 of SEQ ID NO: 1888969
ugguaagacuuacucuacu

SEQ ID NO: 2569729 - RNA, 19 nt, Artificial Sequence
  Description of Artificial Sequence: Synthetic oligonucleotide
  Antisense strand to SEQ ID NO: 2569728
aguagaguaagucuuacca

SEQ ID NO: 2569730 - RNA, 19 nt, Artificial Sequence
  Description of Artificial Sequence: Synthetic oligonucleotide
  Sense strand starting at position 2282 of SEQ ID NO: 1888969
guaggugcucacguuguua

SEQ ID NO: 2569731 - RNA, 19 nt, Artificial Sequence
  Description of Artificial Sequence: Synthetic oligonucleotide
  Antisense strand to SEQ ID NO: 2569730
uaacaacgugagcaccuac

SEQ ID NO: 2569732 - RNA, 19 nt, Artificial Sequence
  Description of Artificial Sequence: Synthetic oligonucleotide
  Sense strand starting at position 2342 of SEQ ID NO: 1888969
caagguucuccugggauca

SEQ ID NO: 2569733 - RNA, 19 nt, Artificial Sequence
  Description of Artificial Sequence: Synthetic oligonucleotide
  Antisense strand to SEQ ID NO: 2569732
ugaucccaggagaaccuug

SEQ ID NO: 2569734 - RNA, 19 nt, Artificial Sequence
  Description of Artificial Sequence: Synthetic oligonucleotide
  Sense strand starting at position 2343 of SEQ ID NO: 1888969
aagguucuccugggaucaa

SEQ ID NO: 2569735 - RNA, 19 nt, Artificial Sequence
  Description of Artificial Sequence: Synthetic oligonucleotide
  Antisense strand to SEQ ID NO: 2569734
uugaucccaggagaaccuu

SEQ ID NO: 2569736 - RNA, 19 nt, Artificial Sequence
  Description of Artificial Sequence: Synthetic oligonucleotide
  Sense strand starting at position 2452 of SEQ ID NO: 1888969
agaggugucagucacaugu

SEQ ID NO: 2569737 - RNA, 19 nt, Artificial Sequence
  Description of Artificial Sequence: Synthetic oligonucleotide
  Antisense strand to SEQ ID NO: 2569736
acaugugacugacaccucu

SEQ ID NO: 2569738 - RNA, 19 nt, Artificial Sequence
  Description of Artificial Sequence: Synthetic oligonucleotide
  Sense strand starting at position 2540 of SEQ ID NO: 1888969
gcaucuugcguguucucca

SEQ ID NO: 2569739 - RNA, 19 nt, Artificial Sequence
  Description of Artificial Sequence: Synthetic oligonucleotide
  Antisense strand to SEQ ID NO: 2569738
uggagaacacgcaagaugc

SEQ ID NO: 2569740 - RNA, 19 nt, Artificial Sequence
  Description of Artificial Sequence: Synthetic oligonucleotide
  Sense strand starting at position 2547 of SEQ ID NO: 1888969
gcguguucuccaccuguag

SEQ ID NO: 2569741 - RNA, 19 nt, Artificial Sequence
  Description of Artificial Sequence: Synthetic oligonucleotide
  Antisense strand to SEQ ID NO: 2569740
cuacagguggagaacacgc

SEQ ID NO: 2569742 - RNA, 19 nt, Artificial Sequence
  Description of Artificial Sequence: Synthetic oligonucleotide
  Sense strand starting at position 2619 of SEQ ID NO: 1888969
ucaucaguccuggaucaug

SEQ ID NO: 2569743 - RNA, 19 nt, Artificial Sequence
  Description of Artificial Sequence: Synthetic oligonucleotide
  Antisense strand to SEQ ID NO: 2569742
caugauccaggacugauga

SEQ ID NO: 2569744 - RNA, 19 nt, Artificial Sequence
  Description of Artificial Sequence: Synthetic oligonucleotide
  Sense strand starting at position 2693 of SEQ ID NO: 1888969
acucuauguuuaucuggau

SEQ ID NO: 2569745 - RNA, 19 nt, Artificial Sequence
  Description of Artificial Sequence: Synthetic oligonucleotide
  Antisense strand to SEQ ID NO: 2569744
auccagauaaacauagagu

SEQ ID NO: 2569746 - RNA, 19 nt, Artificial Sequence
  Description of Artificial Sequence: Synthetic oligonucleotide
  Sense strand starting at position 2708 of SEQ ID NO: 1888969
ggaugauugccaggaccag

SEQ ID NO: 2569747 - RNA, 19 nt, Artificial Sequence
  Description of Artificial Sequence: Synthetic oligonucleotide
  Antisense strand to SEQ ID NO: 2569746
cugguccuggcaaucaucc

SEQ ID NO: 2569748 - RNA, 19 nt, Artificial Sequence
  Description of Artificial Sequence: Synthetic oligonucleotide
  Sense strand starting at position 2730 of SEQ ID NO: 1888969
agagcaagauuguucccau

SEQ ID NO: 2569749 - RNA, 19 nt, Artificial Sequence
  Description of Artificial Sequence: Synthetic oligonucleotide
  Antisense strand to SEQ ID NO: 2569748
augggaacaaucuugcucu

SEQ ID NO: 2569750 - RNA, 19 nt, Artificial Sequence
  Description of Artificial Sequence: Synthetic oligonucleotide
  Sense strand starting at position 2882 of SEQ ID NO: 1888969
gcuggucucagggaaggua

SEQ ID NO: 2569751 - RNA, 19 nt, Artificial Sequence
  Description of Artificial Sequence: Synthetic oligonucleotide
  Antisense strand to SEQ ID NO: 2569750
uaccuucccugagaccagc

SEQ ID NO: 2569752 - RNA, 19 nt, Artificial Sequence
  Description of Artificial Sequence: Synthetic oligonucleotide
  Sense strand starting at position 2922 of SEQ ID NO: 1888969
acacuaucauggguccaaa

SEQ ID NO: 2569753 - RNA, 19 nt, Artificial Sequence
  Description of Artificial Sequence: Synthetic oligonucleotide
  Antisense strand to SEQ ID NO: 2569752
uuuggacccaugauagugu

SEQ ID NO: 2569754 - RNA, 19 nt, Artificial Sequence
  Description of Artificial Sequence: Synthetic oligonucleotide
  Sense strand starting at position 2967 of SEQ ID NO: 1888969
gccuuacucuaccuggaaa

SEQ ID NO: 2569755 - RNA, 19 nt, Artificial Sequence
  Description of Artificial Sequence: Synthetic oligonucleotide
  Antisense strand to SEQ ID NO: 2569754
uuuccagguagaguaaggc

SEQ ID NO: 2569756 - RNA, 19 nt, Artificial Sequence
  Description of Artificial Sequence: Synthetic oligonucleotide
  Sense strand starting at position 2994 of SEQ ID NO: 1888969
ugacauauaaucugggcga

SEQ ID NO: 2569757 - RNA, 19 nt, Artificial Sequence
  Description of Artificial Sequence: Synthetic oligonucleotide
  Antisense strand to SEQ ID NO: 2569756
ucgcccagauuauauguca

SEQ ID NO: 2569758 - RNA, 19 nt, Artificial Sequence
  Description of Artificial Sequence: Synthetic oligonucleotide
  Sense strand starting at position 2996 of SEQ ID NO: 1888969
acauauaaucugggcgacu

SEQ ID NO: 2569759 - RNA, 19 nt, Artificial Sequence
  Description of Artificial Sequence: Synthetic oligonucleotide
  Antisense strand to SEQ ID NO: 2569758
agucgcccagauuauaugu

SEQ ID NO: 2569760 - RNA, 19 nt, Artificial Sequence
  Description of Artificial Sequence: Synthetic oligonucleotide
  Sense strand starting at position 2998 of SEQ ID NO: 1888969
auauaaucugggcgacuga

SEQ ID NO: 2569761 - RNA, 19 nt, Artificial Sequence
  Description of Artificial Sequence: Synthetic oligonucleotide
  Antisense strand to SEQ ID NO: 2569760
ucagucgcccagauuauau

SEQ ID NO: 2569762 - RNA, 19 nt, Artificial Sequence
  Description of Artificial Sequence: Synthetic oligonucleotide
  Sense strand starting at position 3080 of SEQ ID NO: 1888969
acaguuauacccuacagcu

SEQ ID NO: 2569763 - RNA, 19 nt, Artificial Sequence
  Description of Artificial Sequence: Synthetic oligonucleotide
  Antisense strand to SEQ ID NO: 2569762
agcuguaggguauaacugu

SEQ ID NO: 2569764 - RNA, 19 nt, Artificial Sequence
  Description of Artificial Sequence: Synthetic oligonucleotide
  Sense strand starting at position 3227 of SEQ ID NO: 1888969
uuuguuuagccagauaauu

SEQ ID NO: 2569765 - RNA, 19 nt, Artificial Sequence
  Description of Artificial Sequence: Synthetic oligonucleotide
  Antisense strand to SEQ ID NO: 2569764
aauuaucuggcuaaacaaa

SEQ ID NO: 2569766 - RNA, 19 nt, Artificial Sequence
  Description of Artificial Sequence: Synthetic oligonucleotide
  Sense strand starting at position 3571 of SEQ ID NO: 1888969
auacauuauggcugaauac

SEQ ID NO: 2569767 - RNA, 19 nt, Artificial Sequence
  Description of Artificial Sequence: Synthetic oligonucleotide
  Antisense strand to SEQ ID NO: 2569766
guauucagccauaauguau

SEQ ID NO: 2569768 - RNA, 19 nt, Artificial Sequence
  Description of Artificial Sequence: Synthetic oligonucleotide
  Sense strand starting at position 3714 of SEQ ID NO: 1888969
cuccaauuugcguaucuca

SEQ ID NO: 2569769 - RNA, 19 nt, Artificial Sequence
  Description of Artificial Sequence: Synthetic oligonucleotide
  Antisense strand to SEQ ID NO: 2569768
ugagauacgcaaauuggag

SEQ ID NO: 2569770 - RNA, 19 nt, Artificial Sequence
  Description of Artificial Sequence: Synthetic oligonucleotide
  Sense strand starting at position 229 of SEQ ID NO: 1888970
agaugaauuagguggagca

SEQ ID NO: 2569771 - RNA, 19 nt, Artificial Sequence
  Description of Artificial Sequence: Synthetic oligonucleotide
  Antisense strand to SEQ ID NO: 2569770
ugcuccaccuaauucaucu

SEQ ID NO: 2569772 - RNA, 19 nt, Artificial Sequence
  Description of Artificial Sequence: Synthetic oligonucleotide
  Sense strand starting at position 230 of SEQ ID NO: 1888970
gaugaauuagguggagcaa

SEQ ID NO: 2569773 - RNA, 19 nt, Artificial Sequence
  Description of Artificial Sequence: Synthetic oligonucleotide
  Antisense strand to SEQ ID NO: 2569772
uugcuccaccuaauucauc

SEQ ID NO: 2569774 - RNA, 19 nt, Artificial Sequence
  Description of Artificial Sequence: Synthetic oligonucleotide
  Sense strand starting at position 242 of SEQ ID NO: 1888970
ggagcaaugcuuuacugaa

SEQ ID NO: 2569775 - RNA, 19 nt, Artificial Sequence
  Description of Artificial Sequence: Synthetic oligonucleotide
  Antisense strand to SEQ ID NO: 2569774
uucaguaaagcauugcucc

SEQ ID NO: 2569776 - RNA, 19 nt, Artificial Sequence
  Description of Artificial Sequence: Synthetic oligonucleotide
  Sense strand starting at position 273 of SEQ ID NO: 1888970
auccuauagguguaaacau

SEQ ID NO: 2569777 - RNA, 19 nt, Artificial Sequence
  Description of Artificial Sequence: Synthetic oligonucleotide
  Antisense strand to SEQ ID NO: 2569776
auguuuacaccuauaggau

SEQ ID NO: 2569778 - RNA, 19 nt, Artificial Sequence
  Description of Artificial Sequence: Synthetic oligonucleotide
  Sense strand starting at position 293 of SEQ ID NO: 1888970
ucacuagaauggucucaaa

SEQ ID NO: 2569779 - RNA, 19 nt, Artificial Sequence
  Description of Artificial Sequence: Synthetic oligonucleotide
  Antisense strand to SEQ ID NO: 2569778
uuugagaccauucuaguga

SEQ ID NO: 2569780 - RNA, 19 nt, Artificial Sequence
  Description of Artificial Sequence: Synthetic oligonucleotide
  Sense strand starting at position 338 of SEQ ID NO: 1888970
ugguaaugaauagguaaua

SEQ ID NO: 2569781 - RNA, 19 nt, Artificial Sequence
  Description of Artificial Sequence: Synthetic oligonucleotide
  Antisense strand to SEQ ID NO: 2569780
uauuaccuauucauuacca

SEQ ID NO: 2569782 - RNA, 19 nt, Artificial Sequence
  Description of Artificial Sequence: Synthetic oligonucleotide
  Sense strand starting at position 339 of SEQ ID NO: 1888970
gguaaugaauagguaauau

SEQ ID NO: 2569783 - RNA, 19 nt, Artificial Sequence
  Description of Artificial Sequence: Synthetic oligonucleotide
  Antisense strand to SEQ ID NO: 2569782
auauuaccuauucauuacc

SEQ ID NO: 2569784 - RNA, 19 nt, Artificial Sequence
  Description of Artificial Sequence: Synthetic oligonucleotide
  Sense strand starting at position 387 of SEQ ID NO: 1888970
ccucuacaugucuaaggau

SEQ ID NO: 2569785 - RNA, 19 nt, Artificial Sequence
  Description of Artificial Sequence: Synthetic oligonucleotide
  Antisense strand to SEQ ID NO: 2569784
auccuuagacauguagagg

SEQ ID NO: 2569786 - RNA, 19 nt, Artificial Sequence
  Description of Artificial Sequence: Synthetic oligonucleotide
  Sense strand starting at position 423 of SEQ ID NO: 1888970
uugguaaucggagauuacu

SEQ ID NO: 2569787 - RNA, 19 nt, Artificial Sequence
  Description of Artificial Sequence: Synthetic oligonucleotide
  Antisense strand to SEQ ID NO: 2569786
aguaaucuccgauuaccaa

SEQ ID NO: 2569788 - RNA, 19 nt, Artificial Sequence
  Description of Artificial Sequence: Synthetic oligonucleotide
  Sense strand starting at position 432 of SEQ ID NO: 1888970
ggagauuacuguuuccaga

SEQ ID NO: 2569789 - RNA, 19 nt, Artificial Sequence
  Description of Artificial Sequence: Synthetic oligonucleotide
  Antisense strand to SEQ ID NO: 2569788
ucuggaaacaguaaucucc

SEQ ID NO: 2569790 - RNA, 19 nt, Artificial Sequence
  Description of Artificial Sequence: Synthetic oligonucleotide
  Sense strand starting at position 434 of SEQ ID NO: 1888970
agauuacuguuuccagauc

SEQ ID NO: 2569791 - RNA, 19 nt, Artificial Sequence
  Description of Artificial Sequence: Synthetic oligonucleotide
  Antisense strand to SEQ ID NO: 2569790
gaucuggaaacaguaaucu

SEQ ID NO: 2569792 - RNA, 19 nt, Artificial Sequence
  Description of Artificial Sequence: Synthetic oligonucleotide
  Sense strand starting at position 607 of SEQ ID NO: 1888970
agagaauauugacuccagu

SEQ ID NO: 2569793 - RNA, 19 nt, Artificial Sequence
  Description of Artificial Sequence: Synthetic oligonucleotide
  Antisense strand to SEQ ID NO: 2569792
acuggagucaauauucucu

SEQ ID NO: 2569794 - RNA, 19 nt, Artificial Sequence
  Description of Artificial Sequence: Synthetic oligonucleotide
  Sense strand starting at position 610 of SEQ ID NO: 1888970
gaauauugacuccagugca

SEQ ID NO: 2569795 - RNA, 19 nt, Artificial Sequence
  Description of Artificial Sequence: Synthetic oligonucleotide
  Antisense strand to SEQ ID NO: 2569794
ugcacuggagucaauauuc

SEQ ID NO: 2569796 - RNA, 19 nt, Artificial Sequence
  Description of Artificial Sequence: Synthetic oligonucleotide
  Sense strand starting at position 711 of SEQ ID NO: 1888970
cggagaaauaugugacuaa

SEQ ID NO: 2569797 - RNA, 19 nt, Artificial Sequence
  Description of Artificial Sequence: Synthetic oligonucleotide
  Antisense strand to SEQ ID NO: 2569796
uuagucacauauuucuccg

SEQ ID NO: 2569798 - RNA, 19 nt, Artificial Sequence
  Description of Artificial Sequence: Synthetic oligonucleotide
  Sense strand starting at position 760 of SEQ ID NO: 1888970
gcaaaucaggcauagaauc

SEQ ID NO: 2569799 - RNA, 19 nt, Artificial Sequence
  Description of Artificial Sequence: Synthetic oligonucleotide
  Antisense strand to SEQ ID NO: 2569798
gauucuaugccugauuugc

SEQ ID NO: 2569800 - RNA, 19 nt, Artificial Sequence
  Description of Artificial Sequence: Synthetic oligonucleotide
  Sense strand starting at position 767 of SEQ ID NO: 1888970
aggcauagaaucgaguaua

SEQ ID NO: 2569801 - RNA, 19 nt, Artificial Sequence
  Description of Artificial Sequence: Synthetic oligonucleotide
  Antisense strand to SEQ ID NO: 2569800
uauacucgauucuaugccu

SEQ ID NO: 2569802 - RNA, 19 nt, Artificial Sequence
  Description of Artificial Sequence: Synthetic oligonucleotide
  Sense strand starting at position 968 of SEQ ID NO: 1888970
ugcaaucauggaugaauaa

SEQ ID NO: 2569803 - RNA, 19 nt, Artificial Sequence
  Description of Artificial Sequence: Synthetic oligonucleotide
  Antisense strand to SEQ ID NO: 2569802
uuauucauccaugauugca

SEQ ID NO: 2569804 - RNA, 19 nt, Artificial Sequence
  Description of Artificial Sequence: Synthetic oligonucleotide
  Sense strand starting at position 1066 of SEQ ID NO: 1888970
uuaucucuaugggcauaga

SEQ ID NO: 2569805 - RNA, 19 nt, Artificial Sequence
  Description of Artificial Sequence: Synthetic oligonucleotide
  Antisense strand to SEQ ID NO: 2569804
ucuaugcccauagagauaa

SEQ ID NO: 2569806 - RNA, 19 nt, Artificial Sequence
  Description of Artificial Sequence: Synthetic oligonucleotide
  Sense strand starting at position 1067 of SEQ ID NO: 1888970
uaucucuaugggcauagau

SEQ ID NO: 2569807 - RNA, 19 nt, Artificial Sequence
  Description of Artificial Sequence: Synthetic oligonucleotide
  Antisense strand to SEQ ID NO: 2569806
aucuaugcccauagagaua

SEQ ID NO: 2569808 - RNA, 19 nt, Artificial Sequence
  Description of Artificial Sequence: Synthetic oligonucleotide
  Sense strand starting at position 1069 of SEQ ID NO: 1888970
ucucuaugggcauagauau

SEQ ID NO: 2569809 - RNA, 19 nt, Artificial Sequence
  Description of Artificial Sequence: Synthetic oligonucleotide
  Antisense strand to SEQ ID NO: 2569808
auaucuaugcccauagaga

SEQ ID NO: 2569810 - RNA, 19 nt, Artificial Sequence
  Description of Artificial Sequence: Synthetic oligonucleotide
  Sense strand starting at position 1087 of SEQ ID NO: 1888970
uccacaggguauucuagaa

SEQ ID NO: 2569811 - RNA, 19 nt, Artificial Sequence
  Description of Artificial Sequence: Synthetic oligonucleotide
  Antisense strand to SEQ ID NO: 2569810
uucuagaauacccugugga

SEQ ID NO: 2569812 - RNA, 19 nt, Artificial Sequence
  Description of Artificial Sequence: Synthetic oligonucleotide
  Sense strand starting at position 1377 of SEQ ID NO: 1888970
agaaacgauauccgaaagu

SEQ ID NO: 2569813 - RNA, 19 nt, Artificial Sequence
  Description of Artificial Sequence: Synthetic oligonucleotide
  Antisense strand to SEQ ID NO: 2569812
acuuucggauaucguuucu

SEQ ID NO: 2569814 - RNA, 19 nt, Artificial Sequence
  Description of Artificial Sequence: Synthetic oligonucleotide
  Sense strand starting at position 1402 of SEQ ID NO: 1888970
uugucagugauugaggaca

SEQ ID NO: 2569815 - RNA, 19 nt, Artificial Sequence
  Description of Artificial Sequence: Synthetic oligonucleotide
  Antisense strand to SEQ ID NO: 2569814
uguccucaaucacugacaa

SEQ ID NO: 2569816 - RNA, 19 nt, Artificial Sequence
  Description of Artificial Sequence: Synthetic oligonucleotide
  Sense strand starting at position 1415 of SEQ ID NO: 1888970
aggacauguauauaacgua

SEQ ID NO: 2569817 - RNA, 19 nt, Artificial Sequence
  Description of Artificial Sequence: Synthetic oligonucleotide
  Antisense strand to SEQ ID NO: 2569816
uacguuauauacauguccu

SEQ ID NO: 2569818 - RNA, 19 nt, Artificial Sequence
  Description of Artificial Sequence: Synthetic oligonucleotide
  Sense strand starting at position 1606 of SEQ ID NO: 1888970
cuaaucaugugaucauaga

SEQ ID NO: 2569819 - RNA, 19 nt, Artificial Sequence
  Description of Artificial Sequence: Synthetic oligonucleotide
  Antisense strand to SEQ ID NO: 2569818
ucuaugaucacaugauuag

SEQ ID NO: 2569820 - RNA, 19 nt, Artificial Sequence
  Description of Artificial Sequence: Synthetic oligonucleotide
  Sense strand starting at position 1645 of SEQ ID NO: 1888970
cagcguuaaccucacagaa

SEQ ID NO: 2569821 - RNA, 19 nt, Artificial Sequence
  Description of Artificial Sequence: Synthetic oligonucleotide
  Antisense strand to SEQ ID NO: 2569820
uucugugagguuaacgcug

SEQ ID NO: 2569822 - RNA, 19 nt, Artificial Sequence
  Description of Artificial Sequence: Synthetic oligonucleotide
  Sense strand starting at position 1899 of SEQ ID NO: 1888970
ccaugaggccuguagagau

SEQ ID NO: 2569823 - RNA, 19 nt, Artificial Sequence
  Description of Artificial Sequence: Synthetic oligonucleotide
  Antisense strand to SEQ ID NO: 2569822
aucucuacaggccucaugg

SEQ ID NO: 2569824 - RNA, 19 nt, Artificial Sequence
  Description of Artificial Sequence: Synthetic oligonucleotide
  Sense strand starting at position 2009 of SEQ ID NO: 1888970
uuuguagacucuuugggaa

SEQ ID NO: 2569825 - RNA, 19 nt, Artificial Sequence
  Description of Artificial Sequence: Synthetic oligonucleotide
  Antisense strand to SEQ ID NO: 2569824
uucccaaagagucuacaaa

SEQ ID NO: 2569826 - RNA, 19 nt, Artificial Sequence
  Description of Artificial Sequence: Synthetic oligonucleotide
  Sense strand starting at position 2114 of SEQ ID NO: 1888970
ucacaaccuguguaacuau

SEQ ID NO: 2569827 - RNA, 19 nt, Artificial Sequence
  Description of Artificial Sequence: Synthetic oligonucleotide
  Antisense strand to SEQ ID NO: 2569826
auaguuacacagguuguga

SEQ ID NO: 2569828 - RNA, 19 nt, Artificial Sequence
  Description of Artificial Sequence: Synthetic oligonucleotide
  Sense strand starting at position 2216 of SEQ ID NO: 1888970
guaguaaagcucuaccaau

SEQ ID NO: 2569829 - RNA, 19 nt, Artificial Sequence
  Description of Artificial Sequence: Synthetic oligonucleotide
  Antisense strand to SEQ ID NO: 2569828
auugguagagcuuuacuac

SEQ ID NO: 2569830 - RNA, 19 nt, Artificial Sequence
  Description of Artificial Sequence: Synthetic oligonucleotide
  Sense strand starting at position 2266 of SEQ ID NO: 1888970
gcaaaucacugauuaugau

SEQ ID NO: 2569831 - RNA, 19 nt, Artificial Sequence
  Description of Artificial Sequence: Synthetic oligonucleotide
  Antisense strand to SEQ ID NO: 2569830
aucauaaucagugauuugc

SEQ ID NO: 2569832 - RNA, 19 nt, Artificial Sequence
  Description of Artificial Sequence: Synthetic oligonucleotide
  Sense strand starting at position 2291 of SEQ ID NO: 1888970
ugaggcuaucuauaccgaa

SEQ ID NO: 2569833 - RNA, 19 nt, Artificial Sequence
  Description of Artificial Sequence: Synthetic oligonucleotide
  Antisense strand to SEQ ID NO: 2569832
uucgguauagauagccuca

SEQ ID NO: 2569834 - RNA, 19 nt, Artificial Sequence
  Description of Artificial Sequence: Synthetic oligonucleotide
  Sense strand starting at position 2439 of SEQ ID NO: 1888970
agcgauaauugagugaaga

SEQ ID NO: 2569835 - RNA, 19 nt, Artificial Sequence
  Description of Artificial Sequence: Synthetic oligonucleotide
  Antisense strand to SEQ ID NO: 2569834
ucuucacucaauuaucgcu

SEQ ID NO: 2569836 - RNA, 19 nt, Artificial Sequence
  Description of Artificial Sequence: Synthetic oligonucleotide
  Sense strand starting at position 2907 of SEQ ID NO: 1888970
gaaacuuauguugagcuga

SEQ ID NO: 2569837 - RNA, 19 nt, Artificial Sequence
  Description of Artificial Sequence: Synthetic oligonucleotide
  Antisense strand to SEQ ID NO: 2569836
ucagcucaacauaaguuuc

SEQ ID NO: 2569838 - RNA, 19 nt, Artificial Sequence
  Description of Artificial Sequence: Synthetic oligonucleotide
  Sense strand starting at position 2997 of SEQ ID NO: 1888970
cuguuuaugcaggauauua

SEQ ID NO: 2569839 - RNA, 19 nt, Artificial Sequence
  Description of Artificial Sequence: Synthetic oligonucleotide
  Antisense strand to SEQ ID NO: 2569838
uaauauccugcauaaacag

SEQ ID NO: 2569840 - RNA, 19 nt, Artificial Sequence
  Description of Artificial Sequence: Synthetic oligonucleotide
  Sense strand starting at position 2999 of SEQ ID NO: 1888970
guuuaugcaggauauuaau

SEQ ID NO: 2569841 - RNA, 19 nt, Artificial Sequence
  Description of Artificial Sequence: Synthetic oligonucleotide
  Antisense strand to SEQ ID NO: 2569840
auuaauauccugcauaaac

SEQ ID NO: 2569842 - RNA, 19 nt, Artificial Sequence
  Description of Artificial Sequence: Synthetic oligonucleotide
  Sense strand starting at position 3044 of SEQ ID NO: 1888970
aagggaggugguuaucuuu

SEQ ID NO: 2569843 - RNA, 19 nt, Artificial Sequence
  Description of Artificial Sequence: Synthetic oligonucleotide
  Antisense strand to SEQ ID NO: 2569842
aaagauaaccaccucccuu

SEQ ID NO: 2569844 - RNA, 19 nt, Artificial Sequence
  Description of Artificial Sequence: Synthetic oligonucleotide
  Sense strand starting at position 3054 of SEQ ID NO: 1888970
guuaucuuucuggaaucau

SEQ ID NO: 2569845 - RNA, 19 nt, Artificial Sequence
  Description of Artificial Sequence: Synthetic oligonucleotide
  Antisense strand to SEQ ID NO: 2569844
augauuccagaaagauaac

SEQ ID NO: 2569846 - RNA, 19 nt, Artificial Sequence
  Description of Artificial Sequence: Synthetic oligonucleotide
  Sense strand starting at position 3249 of SEQ ID NO: 1888970
cuauuuaguuuccuuuagu

SEQ ID NO: 2569847 - RNA, 19 nt, Artificial Sequence
  Description of Artificial Sequence: Synthetic oligonucleotide
  Antisense strand to SEQ ID NO: 2569846
acuaaaggaaacuaaauag

SEQ ID NO: 2569848 - RNA, 19 nt, Artificial Sequence
  Description of Artificial Sequence: Synthetic oligonucleotide
  Sense strand starting at position 3899 of SEQ ID NO: 1888970
cuugaagaauuagcucaaa

SEQ ID NO: 2569849 - RNA, 19 nt, Artificial Sequence
  Description of Artificial Sequence: Synthetic oligonucleotide
  Antisense strand to SEQ ID NO: 2569848
uuugagcuaauucuucaag

SEQ ID NO: 2569850 - RNA, 19 nt, Artificial Sequence
  Description of Artificial Sequence: Synthetic oligonucleotide
  Sense strand starting at position 116 of SEQ ID NO: 1888971
auuaguaagguugggagaa

SEQ ID NO: 2569851 - RNA, 19 nt, Artificial Sequence
  Description of Artificial Sequence: Synthetic oligonucleotide
  Antisense strand to SEQ ID NO: 2569850
uucucccaaccuuacuaau

SEQ ID NO: 2569852 - RNA, 19 nt, Artificial Sequence
  Description of Artificial Sequence: Synthetic oligonucleotide
  Sense strand starting at position 328 of SEQ ID NO: 1888971
agaugaauuagguggugca

SEQ ID NO: 2569853 - RNA, 19 nt, Artificial Sequence
  Description of Artificial Sequence: Synthetic oligonucleotide
  Antisense strand to SEQ ID NO: 2569852
ugcaccaccuaauucaucu

SEQ ID NO: 2569854 - RNA, 19 nt, Artificial Sequence
  Description of Artificial Sequence: Synthetic oligonucleotide
  Sense strand starting at position 329 of SEQ ID NO: 1888971
gaugaauuagguggugcaa

SEQ ID NO: 2569855 - RNA, 19 nt, Artificial Sequence
  Description of Artificial Sequence: Synthetic oligonucleotide
  Antisense strand to SEQ ID NO: 2569854
uugcaccaccuaauucauc

SEQ ID NO: 2569856 - RNA, 19 nt, Artificial Sequence
  Description of Artificial Sequence: Synthetic oligonucleotide
  Sense strand starting at position 375 of SEQ ID NO: 1888971
cuagucuuguaaucauaca

SEQ ID NO: 2569857 - RNA, 19 nt, Artificial Sequence
  Description of Artificial Sequence: Synthetic oligonucleotide
  Antisense strand to SEQ ID NO: 2569856
uguaugauuacaagacuag

SEQ ID NO: 2569858 - RNA, 19 nt, Artificial Sequence
  Description of Artificial Sequence: Synthetic oligonucleotide
  Sense strand starting at position 486 of SEQ ID NO: 1888971
ccucuacaugucuagggau

SEQ ID NO: 2569859 - RNA, 19 nt, Artificial Sequence
  Description of Artificial Sequence: Synthetic oligonucleotide
  Antisense strand to SEQ ID NO: 2569858
aucccuagacauguagagg

SEQ ID NO: 2569860 - RNA, 19 nt, Artificial Sequence
  Description of Artificial Sequence: Synthetic oligonucleotide
  Sense strand starting at position 866 of SEQ ID NO: 1888971
aggcauagcacagaguaua

SEQ ID NO: 2569861 - RNA, 19 nt, Artificial Sequence
  Description of Artificial Sequence: Synthetic oligonucleotide
  Antisense strand to SEQ ID NO: 2569860
uauacucugugcuaugccu

SEQ ID NO: 2569862 - RNA, 19 nt, Artificial Sequence
  Description of Artificial Sequence: Synthetic oligonucleotide
  Sense strand starting at position 1066 of SEQ ID NO: 1888971
uuugcaaucauggaugagu

SEQ ID NO: 2569863 - RNA, 19 nt, Artificial Sequence
  Description of Artificial Sequence: Synthetic oligonucleotide
  Antisense strand to SEQ ID NO: 2569862
acucauccaugauugcaaa

SEQ ID NO: 2569864 - RNA, 19 nt, Artificial Sequence
  Description of Artificial Sequence: Synthetic oligonucleotide
  Sense strand starting at position 1068 of SEQ ID NO: 1888971
ugcaaucauggaugaguaa

SEQ ID NO: 2569865 - RNA, 19 nt, Artificial Sequence
  Description of Artificial Sequence: Synthetic oligonucleotide
  Antisense strand to SEQ ID NO: 2569864
uuacucauccaugauugca

SEQ ID NO: 2569866 - RNA, 19 nt, Artificial Sequence
  Description of Artificial Sequence: Synthetic oligonucleotide
  Sense strand starting at position 1086 of SEQ ID NO: 1888971
aaaucaggagucugucauc

SEQ ID NO: 2569867 - RNA, 19 nt, Artificial Sequence
  Description of Artificial Sequence: Synthetic oligonucleotide
  Antisense strand to SEQ ID NO: 2569866
gaugacagacuccugauuu

SEQ ID NO: 2569868 - RNA, 19 nt, Artificial Sequence
  Description of Artificial Sequence: Synthetic oligonucleotide
  Sense strand starting at position 1189 of SEQ ID NO: 1888971
uccacagaguauucuagaa

SEQ ID NO: 2569869 - RNA, 19 nt, Artificial Sequence
  Description of Artificial Sequence: Synthetic oligonucleotide
  Antisense strand to SEQ ID NO: 2569868
uucuagaauacucugugga

SEQ ID NO: 2569870 - RNA, 19 nt, Artificial Sequence
  Description of Artificial Sequence: Synthetic oligonucleotide
  Sense strand starting at position 1277 of SEQ ID NO: 1888971
aaugaaauccuuugaguga

SEQ ID NO: 2569871 - RNA, 19 nt, Artificial Sequence
  Description of Artificial Sequence: Synthetic oligonucleotide
  Antisense strand to SEQ ID NO: 2569870
ucacucaaaggauuucauu

SEQ ID NO: 2569872 - RNA, 19 nt, Artificial Sequence
  Description of Artificial Sequence: Synthetic oligonucleotide
  Sense strand starting at position 1280 of SEQ ID NO: 1888971
gaaauccuuugagugauaa

SEQ ID NO: 2569873 - RNA, 19 nt, Artificial Sequence
  Description of Artificial Sequence: Synthetic oligonucleotide
  Antisense strand to SEQ ID NO: 2569872
uuaucacucaaaggauuuc

SEQ ID NO: 2569874 - RNA, 19 nt, Artificial Sequence
  Description of Artificial Sequence: Synthetic oligonucleotide
  Sense strand starting at position 1288 of SEQ ID NO: 1888971
uugagugauaacugaugau

SEQ ID NO: 2569875 - RNA, 19 nt, Artificial Sequence
  Description of Artificial Sequence: Synthetic oligonucleotide
  Antisense strand to SEQ ID NO: 2569874
aucaucaguuaucacucaa

SEQ ID NO: 2569876 - RNA, 19 nt, Artificial Sequence
  Description of Artificial Sequence: Synthetic oligonucleotide
  Sense strand starting at position 1409 of SEQ ID NO: 1888971
ugauuacaugucuggcaga

SEQ ID NO: 2569877 - RNA, 19 nt, Artificial Sequence
  Description of Artificial Sequence: Synthetic oligonucleotide
  Antisense strand to SEQ ID NO: 2569876
ucugccagacauguaauca

SEQ ID NO: 2569878 - RNA, 19 nt, Artificial Sequence
  Description of Artificial Sequence: Synthetic oligonucleotide
  Sense strand starting at position 1414 of SEQ ID NO: 1888971
acaugucuggcagauaugu

SEQ ID NO: 2569879 - RNA, 19 nt, Artificial Sequence
  Description of Artificial Sequence: Synthetic oligonucleotide
  Antisense strand to SEQ ID NO: 2569878
acauaucugccagacaugu

SEQ ID NO: 2569880 - RNA, 19 nt, Artificial Sequence
  Description of Artificial Sequence: Synthetic oligonucleotide
  Sense strand starting at position 1514 of SEQ ID NO: 1888971
uugucauggugauugagga

SEQ ID NO: 2569881 - RNA, 19 nt, Artificial Sequence
  Description of Artificial Sequence: Synthetic oligonucleotide
  Antisense strand to SEQ ID NO: 2569880
uccucaaucaccaugacaa

SEQ ID NO: 2569882 - RNA, 19 nt, Artificial Sequence
  Description of Artificial Sequence: Synthetic oligonucleotide
  Sense strand starting at position 1521 of SEQ ID NO: 1888971
ggugauugaggacaugugu

SEQ ID NO: 2569883 - RNA, 19 nt, Artificial Sequence
  Description of Artificial Sequence: Synthetic oligonucleotide
  Antisense strand to SEQ ID NO: 2569882
acacauguccucaaucacc

SEQ ID NO: 2569884 - RNA, 19 nt, Artificial Sequence
  Description of Artificial Sequence: Synthetic oligonucleotide
  Sense strand starting at position 1785 of SEQ ID NO: 1888971
cuaguaauauagucucuac

SEQ ID NO: 2569885 - RNA, 19 nt, Artificial Sequence
  Description of Artificial Sequence: Synthetic oligonucleotide
  Antisense strand to SEQ ID NO: 2569884
guagagacuauauuacuag

SEQ ID NO: 2569886 - RNA, 19 nt, Artificial Sequence
  Description of Artificial Sequence: Synthetic oligonucleotide
  Sense strand starting at position 1788 of SEQ ID NO: 1888971
guaauauagucucuacuag

SEQ ID NO: 2569887 - RNA, 19 nt, Artificial Sequence
  Description of Artificial Sequence: Synthetic oligonucleotide
  Antisense strand to SEQ ID NO: 2569886
cuaguagagacuauauuac

SEQ ID NO: 2569888 - RNA, 19 nt, Artificial Sequence
  Description of Artificial Sequence: Synthetic oligonucleotide
  Sense strand starting at position 1902 of SEQ ID NO: 1888971
aggccuuuagauggauuau

SEQ ID NO: 2569889 - RNA, 19 nt, Artificial Sequence
  Description of Artificial Sequence: Synthetic oligonucleotide
  Antisense strand to SEQ ID NO: 2569888
auaauccaucuaaaggccu

SEQ ID NO: 2569890 - RNA, 19 nt, Artificial Sequence
  Description of Artificial Sequence: Synthetic oligonucleotide
  Sense strand starting at position 1903 of SEQ ID NO: 1888971
ggccuuuagauggauuauc

SEQ ID NO: 2569891 - RNA, 19 nt, Artificial Sequence
  Description of Artificial Sequence: Synthetic oligonucleotide
  Antisense strand to SEQ ID NO: 2569890
gauaauccaucuaaaggcc

SEQ ID NO: 2569892 - RNA, 19 nt, Artificial Sequence
  Description of Artificial Sequence: Synthetic oligonucleotide
  Sense strand starting at position 1908 of SEQ ID NO: 1888971
uuagauggauuaucucuuu

SEQ ID NO: 2569893 - RNA, 19 nt, Artificial Sequence
  Description of Artificial Sequence: Synthetic oligonucleotide
  Antisense strand to SEQ ID NO: 2569892
aaagagauaauccaucuaa

SEQ ID NO: 2569894 - RNA, 19 nt, Artificial Sequence
  Description of Artificial Sequence: Synthetic oligonucleotide
  Sense strand starting at position 1981 of SEQ ID NO: 1888971
guaaguugcaaggauuaag

SEQ ID NO: 2569895 - RNA, 19 nt, Artificial Sequence
  Description of Artificial Sequence: Synthetic oligonucleotide
  Antisense strand to SEQ ID NO: 2569894
cuuaauccuugcaacuuac

SEQ ID NO: 2569896 - RNA, 19 nt, Artificial Sequence
  Description of Artificial Sequence: Synthetic oligonucleotide
  Sense strand starting at position 2216 of SEQ ID NO: 1888971
gcaguaaagcucuaccaau

SEQ ID NO: 2569897 - RNA, 19 nt, Artificial Sequence
  Description of Artificial Sequence: Synthetic oligonucleotide
  Antisense strand to SEQ ID NO: 2569896
auugguagagcuuuacugc

SEQ ID NO: 2569898 - RNA, 19 nt, Artificial Sequence
  Description of Artificial Sequence: Synthetic oligonucleotide
  Sense strand starting at position 2370 of SEQ ID NO: 1888971
gauaguuuaaagugggaag

SEQ ID NO: 2569899 - RNA, 19 nt, Artificial Sequence
  Description of Artificial Sequence: Synthetic oligonucleotide
  Antisense strand to SEQ ID NO: 2569898
cuucccacuuuaaacuauc

SEQ ID NO: 2569900 - RNA, 19 nt, Artificial Sequence
  Description of Artificial Sequence: Synthetic oligonucleotide
  Sense strand starting at position 2435 of SEQ ID NO: 1888971
gcaauaauugugugaagac

SEQ ID NO: 2569901 - RNA, 19 nt, Artificial Sequence
  Description of Artificial Sequence: Synthetic oligonucleotide
  Antisense strand to SEQ ID NO: 2569900
gucuucacacaauuauugc

SEQ ID NO: 2569902 - RNA, 19 nt, Artificial Sequence
  Description of Artificial Sequence: Synthetic oligonucleotide
  Sense strand starting at position 2566 of SEQ ID NO: 1888971
gggauuauguaacucagac

SEQ ID NO: 2569903 - RNA, 19 nt, Artificial Sequence
  Description of Artificial Sequence: Synthetic oligonucleotide
  Antisense strand to SEQ ID NO: 2569902
gucugaguuacauaauccc

SEQ ID NO: 2569904 - RNA, 19 nt, Artificial Sequence
  Description of Artificial Sequence: Synthetic oligonucleotide
  Sense strand starting at position 2822 of SEQ ID NO: 1888971
agguaaucauggcuuacaa

SEQ ID NO: 2569905 - RNA, 19 nt, Artificial Sequence
  Description of Artificial Sequence: Synthetic oligonucleotide
  Antisense strand to SEQ ID NO: 2569904
uuguaagccaugauuaccu

SEQ ID NO: 2569906 - RNA, 19 nt, Artificial Sequence
  Description of Artificial Sequence: Synthetic oligonucleotide
  Sense strand starting at position 2824 of SEQ ID NO: 1888971
guaaucauggcuuacaaau

SEQ ID NO: 2569907 - RNA, 19 nt, Artificial Sequence
  Description of Artificial Sequence: Synthetic oligonucleotide
  Antisense strand to SEQ ID NO: 2569906
auuuguaagccaugauuac

SEQ ID NO: 2569908 - RNA, 19 nt, Artificial Sequence
  Description of Artificial Sequence: Synthetic oligonucleotide
  Sense strand starting at position 2906 of SEQ ID NO: 1888971
ccauauugagcugacaguu

SEQ ID NO: 2569909 - RNA, 19 nt, Artificial Sequence
  Description of Artificial Sequence: Synthetic oligonucleotide
  Antisense strand to SEQ ID NO: 2569908
aacugucagcucaauaugg

SEQ ID NO: 2569910 - RNA, 19 nt, Artificial Sequence
  Description of Artificial Sequence: Synthetic oligonucleotide
  Sense strand starting at position 2934 of SEQ ID NO: 1888971
caugaugugauaggugagu

SEQ ID NO: 2569911 - RNA, 19 nt, Artificial Sequence
  Description of Artificial Sequence: Synthetic oligonucleotide
  Antisense strand to SEQ ID NO: 2569910
acucaccuaucacaucaug

SEQ ID NO: 2569912 - RNA, 19 nt, Artificial Sequence
  Description of Artificial Sequence: Synthetic oligonucleotide
  Sense strand starting at position 3040 of SEQ ID NO: 1888971
gguuguuaucuuuauggaa

SEQ ID NO: 2569913 - RNA, 19 nt, Artificial Sequence
  Description of Artificial Sequence: Synthetic oligonucleotide
  Antisense strand to SEQ ID NO: 2569912
uuccauaaagauaacaacc

SEQ ID NO: 2569914 - RNA, 19 nt, Artificial Sequence
  Description of Artificial Sequence: Synthetic oligonucleotide
  Sense strand starting at position 3253 of SEQ ID NO: 1888971
ugguuuccuuuauuagaca

SEQ ID NO: 2569915 - RNA, 19 nt, Artificial Sequence
  Description of Artificial Sequence: Synthetic oligonucleotide
  Antisense strand to SEQ ID NO: 2569914
ugucuaauaaaggaaacca

SEQ ID NO: 2569916 - RNA, 19 nt, Artificial Sequence
  Description of Artificial Sequence: Synthetic oligonucleotide
  Sense strand starting at position 3273 of SEQ ID NO: 1888971
aacauagguuugcuuggau

SEQ ID NO: 2569917 - RNA, 19 nt, Artificial Sequence
  Description of Artificial Sequence: Synthetic oligonucleotide
  Antisense strand to SEQ ID NO: 2569916
auccaagcaaaccuauguu

SEQ ID NO: 2569918 - RNA, 19 nt, Artificial Sequence
  Description of Artificial Sequence: Synthetic oligonucleotide
  Sense strand starting at position 3276 of SEQ ID NO: 1888971
auagguuugcuuggauaag

SEQ ID NO: 2569919 - RNA, 19 nt, Artificial Sequence
  Description of Artificial Sequence: Synthetic oligonucleotide
  Antisense strand to SEQ ID NO: 2569918
cuuauccaagcaaaccuau

SEQ ID NO: 2569920 - RNA, 19 nt, Artificial Sequence
  Description of Artificial Sequence: Synthetic oligonucleotide
  Sense strand starting at position 3389 of SEQ ID NO: 1888971
aggucagaaguuugagagu

SEQ ID NO: 2569921 - RNA, 19 nt, Artificial Sequence
  Description of Artificial Sequence: Synthetic oligonucleotide
  Antisense strand to SEQ ID NO: 2569920
acucucaaacuucugaccu

SEQ ID NO: 2569922 - RNA, 19 nt, Artificial Sequence
  Description of Artificial Sequence: Synthetic oligonucleotide
  Sense strand starting at position 3447 of SEQ ID NO: 1888971
acauuagcugaguaugguu

SEQ ID NO: 2569923 - RNA, 19 nt, Artificial Sequence
  Description of Artificial Sequence: Synthetic oligonucleotide
  Antisense strand to SEQ ID NO: 2569922
aaccauacucagcuaaugu

SEQ ID NO: 2569924 - RNA, 19 nt, Artificial Sequence
  Description of Artificial Sequence: Synthetic oligonucleotide
  Sense strand starting at position 3616 of SEQ ID NO: 1888971
cuaggaagcuaacauuuaa

SEQ ID NO: 2569925 - RNA, 19 nt, Artificial Sequence
  Description of Artificial Sequence: Synthetic oligonucleotide
  Antisense strand to SEQ ID NO: 2569924
uuaaauguuagcuuccuag

SEQ ID NO: 2569926 - RNA, 19 nt, Artificial Sequence
  Description of Artificial Sequence: Synthetic oligonucleotide
  Sense strand starting at position 3623 of SEQ ID NO: 1888971
gcuaacauuuaagaaagau

SEQ ID NO: 2569927 - RNA, 19 nt, Artificial Sequence
  Description of Artificial Sequence: Synthetic oligonucleotide
  Antisense strand to SEQ ID NO: 2569926
aucuuucuuaaauguuagc

SEQ ID NO: 2569928 - RNA, 19 nt, Artificial Sequence
  Description of Artificial Sequence: Synthetic oligonucleotide
  Sense strand starting at position 3981 of SEQ ID NO: 1888971
uuaauuugauagcacagau

SEQ ID NO: 2569929 - RNA, 19 nt, Artificial Sequence
  Description of Artificial Sequence: Synthetic oligonucleotide
  Antisense strand to SEQ ID NO: 2569928
aucugugcuaucaaauuaa

SEQ ID NO: 2569930 - RNA, 19 nt, Artificial Sequence
  Description of Artificial Sequence: Synthetic oligonucleotide
  Sense strand starting at position 60 of SEQ ID NO: 1888972
agaggugucagucacaugu

SEQ ID NO: 2569931 - RNA, 19 nt, Artificial Sequence
  Description of Artificial Sequence: Synthetic oligonucleotide
  Antisense strand to SEQ ID NO: 2569930
acaugugacugacaccucu

SEQ ID NO: 2569932 - RNA, 19 nt, Artificial Sequence
  Description of Artificial Sequence: Synthetic oligonucleotide
  Sense strand starting at position 148 of SEQ ID NO: 1888972
gcaucuugcguguucucca

SEQ ID NO: 2569933 - RNA, 19 nt, Artificial Sequence
  Description of Artificial Sequence: Synthetic oligonucleotide
  Antisense strand to SEQ ID NO: 2569932
uggagaacacgcaagaugc

SEQ ID NO: 2569934 - RNA, 19 nt, Artificial Sequence
  Description of Artificial Sequence: Synthetic oligonucleotide
  Sense strand starting at position 155 of SEQ ID NO: 1888972
gcguguucuccaccuguag

SEQ ID NO: 2569935 - RNA, 19 nt, Artificial Sequence
  Description of Artificial Sequence: Synthetic oligonucleotide
  Antisense strand to SEQ ID NO: 2569934
cuacagguggagaacacgc

SEQ ID NO: 2569936 - RNA, 19 nt, Artificial Sequence
  Description of Artificial Sequence: Synthetic oligonucleotide
  Sense strand starting at position 227 of SEQ ID NO: 1888972
ucaucaguccuggaucaug

SEQ ID NO: 2569937 - RNA, 19 nt, Artificial Sequence
  Description of Artificial Sequence: Synthetic oligonucleotide
  Antisense strand to SEQ ID NO: 2569936
caugauccaggacugauga

SEQ ID NO: 2569938 - RNA, 19 nt, Artificial Sequence
  Description of Artificial Sequence: Synthetic oligonucleotide
  Sense strand starting at position 301 of SEQ ID NO: 1888972
acucuauguuuaucuggau

SEQ ID NO: 2569939 - RNA, 19 nt, Artificial Sequence
  Description of Artificial Sequence: Synthetic oligonucleotide
  Antisense strand to SEQ ID NO: 2569938
auccagauaaacauagagu

SEQ ID NO: 2569940 - RNA, 19 nt, Artificial Sequence
  Description of Artificial Sequence: Synthetic oligonucleotide
  Sense strand starting at position 316 of SEQ ID NO: 1888972
ggaugauugccaggaccag

SEQ ID NO: 2569941 - RNA, 19 nt, Artificial Sequence
  Description of Artificial Sequence: Synthetic oligonucleotide
  Antisense strand to SEQ ID NO: 2569940
cugguccuggcaaucaucc

SEQ ID NO: 2569942 - RNA, 19 nt, Artificial Sequence
  Description of Artificial Sequence: Synthetic oligonucleotide
  Sense strand starting at position 338 of SEQ ID NO: 1888972
agagcaagauuguucccau

SEQ ID NO: 2569943 - RNA, 19 nt, Artificial Sequence
  Description of Artificial Sequence: Synthetic oligonucleotide
  Antisense strand to SEQ ID NO: 2569942
augggaacaaucuugcucu

SEQ ID NO: 2569944 - RNA, 19 nt, Artificial Sequence
  Description of Artificial Sequence: Synthetic oligonucleotide
  Sense strand starting at position 490 of SEQ ID NO: 1888972
gcuggucucagggaaggua

SEQ ID NO: 2569945 - RNA, 19 nt, Artificial Sequence
  Description of Artificial Sequence: Synthetic oligonucleotide
  Antisense strand to SEQ ID NO: 2569944
uaccuucccugagaccagc

SEQ ID NO: 2569946 - RNA, 19 nt, Artificial Sequence
  Description of Artificial Sequence: Synthetic oligonucleotide
  Sense strand starting at position 530 of SEQ ID NO: 1888972
acacuaucauggguccaaa

SEQ ID NO: 2569947 - RNA, 19 nt, Artificial Sequence
  Description of Artificial Sequence: Synthetic oligonucleotide
  Antisense strand to SEQ ID NO: 2569946
uuuggacccaugauagugu

SEQ ID NO: 2569948 - RNA, 19 nt, Artificial Sequence
  Description of Artificial Sequence: Synthetic oligonucleotide
  Sense strand starting at position 575 of SEQ ID NO: 1888972
gccuuacucuaccuggaaa

SEQ ID NO: 2569949 - RNA, 19 nt, Artificial Sequence
  Description of Artificial Sequence: Synthetic oligonucleotide
  Antisense strand to SEQ ID NO: 2569948
uuuccagguagaguaaggc

SEQ ID NO: 2569950 - RNA, 19 nt, Artificial Sequence
  Description of Artificial Sequence: Synthetic oligonucleotide
  Sense strand starting at position 602 of SEQ ID NO: 1888972
ugacauauaaucugggcga

SEQ ID NO: 2569951 - RNA, 19 nt, Artificial Sequence
  Description of Artificial Sequence: Synthetic oligonucleotide
  Antisense strand to SEQ ID NO: 2569950
ucgcccagauuauauguca

SEQ ID NO: 2569952 - RNA, 19 nt, Artificial Sequence
  Description of Artificial Sequence: Synthetic oligonucleotide
  Sense strand starting at position 606 of SEQ ID NO: 1888972
auauaaucugggcgacuga

SEQ ID NO: 2569953 - RNA, 19 nt, Artificial Sequence
  Description of Artificial Sequence: Synthetic oligonucleotide
  Antisense strand to SEQ ID NO: 2569952
ucagucgcccagauuauau

SEQ ID NO: 2569954 - RNA, 19 nt, Artificial Sequence
  Description of Artificial Sequence: Synthetic oligonucleotide
  Sense strand starting at position 688 of SEQ ID NO: 1888972
acaguuauacccuacagcu

SEQ ID NO: 2569955 - RNA, 19 nt, Artificial Sequence
  Description of Artificial Sequence: Synthetic oligonucleotide
  Antisense strand to SEQ ID NO: 2569954
agcuguaggguauaacugu

SEQ ID NO: 2569956 - RNA, 19 nt, Artificial Sequence
  Description of Artificial Sequence: Synthetic oligonucleotide
  Sense strand starting at position 835 of SEQ ID NO: 1888972
uuuguuuagccagauaauu

SEQ ID NO: 2569957 - RNA, 19 nt, Artificial Sequence
  Description of Artificial Sequence: Synthetic oligonucleotide
  Antisense strand to SEQ ID NO: 2569956
aauuaucuggcuaaacaaa

SEQ ID NO: 2569958 - RNA, 19 nt, Artificial Sequence
  Description of Artificial Sequence: Synthetic oligonucleotide
  Sense strand starting at position 1179 of SEQ ID NO: 1888972
auacauuauggcugaauac

SEQ ID NO: 2569959 - RNA, 19 nt, Artificial Sequence
  Description of Artificial Sequence: Synthetic oligonucleotide
  Antisense strand to SEQ ID NO: 2569958
guauucagccauaauguau

SEQ ID NO: 2569960 - RNA, 19 nt, Artificial Sequence
  Description of Artificial Sequence: Synthetic oligonucleotide
  Sense strand starting at position 1322 of SEQ ID NO: 1888972
cuccaauuugcguaucuca

SEQ ID NO: 2569961 - RNA, 19 nt, Artificial Sequence
  Description of Artificial Sequence: Synthetic oligonucleotide
  Antisense strand to SEQ ID NO: 2569960
ugagauacgcaaauuggag

SEQ ID NO: 2569962 - RNA, 19 nt, Artificial Sequence
  Description of Artificial Sequence: Synthetic oligonucleotide
  Sense strand starting at position 1727 of SEQ ID NO: 1888972
cggccaucuuguuccauuu

SEQ ID NO: 2569963 - RNA, 19 nt, Artificial Sequence
  Description of Artificial Sequence: Synthetic oligonucleotide
  Antisense strand to SEQ ID NO: 2569962
aaauggaacaagauggccg

SEQ ID NO: 2569964 - RNA, 19 nt, Artificial Sequence
  Description of Artificial Sequence: Synthetic oligonucleotide
  Sense strand starting at position 1843 of SEQ ID NO: 1888972
aggaucucccggcauuauu

SEQ ID NO: 2569965 - RNA, 19 nt, Artificial Sequence
  Description of Artificial Sequence: Synthetic oligonucleotide
  Antisense strand to SEQ ID NO: 2569964
aauaaugccgggagauccu

SEQ ID NO: 2569966 - RNA, 19 nt, Artificial Sequence
  Description of Artificial Sequence: Synthetic oligonucleotide
  Sense strand starting at position 1909 of SEQ ID NO: 1888972
acaaacuuguacuuaguga

SEQ ID NO: 2569967 - RNA, 19 nt, Artificial Sequence
  Description of Artificial Sequence: Synthetic oligonucleotide
  Antisense strand to SEQ ID NO: 2569966
ucacuaaguacaaguuugu

SEQ ID NO: 2569968 - RNA, 19 nt, Artificial Sequence
  Description of Artificial Sequence: Synthetic oligonucleotide
  Sense strand starting at position 1955 of SEQ ID NO: 1888972
ugacauguaguguaaguga

SEQ ID NO: 2569969 - RNA, 19 nt, Artificial Sequence
  Description of Artificial Sequence: Synthetic oligonucleotide
  Antisense strand to SEQ ID NO: 2569968
ucacuuacacuacauguca

SEQ ID NO: 2569970 - RNA, 19 nt, Artificial Sequence
  Description of Artificial Sequence: Synthetic oligonucleotide
  Sense strand starting at position 1978 of SEQ ID NO: 1888972
caccuuucugaguaaggca

SEQ ID NO: 2569971 - RNA, 19 nt, Artificial Sequence
  Description of Artificial Sequence: Synthetic oligonucleotide
  Antisense strand to SEQ ID NO: 2569970
ugccuuacucagaaaggug

SEQ ID NO: 2569972 - RNA, 19 nt, Artificial Sequence
  Description of Artificial Sequence: Synthetic oligonucleotide
  Sense strand starting at position 2155 of SEQ ID NO: 1888972
augccugacucagugagaa

SEQ ID NO: 2569973 - RNA, 19 nt, Artificial Sequence
  Description of Artificial Sequence: Synthetic oligonucleotide
  Antisense strand to SEQ ID NO: 2569972
uucucacugagucaggcau

SEQ ID NO: 2569974 - RNA, 19 nt, Artificial Sequence
  Description of Artificial Sequence: Synthetic oligonucleotide
  Sense strand starting at position 2373 of SEQ ID NO: 1888972
ccuguuaucagggaaggca

SEQ ID NO: 2569975 - RNA, 19 nt, Artificial Sequence
  Description of Artificial Sequence: Synthetic oligonucleotide
  Antisense strand to SEQ ID NO: 2569974
ugccuucccugauaacagg

SEQ ID NO: 2569976 - RNA, 19 nt, Artificial Sequence
  Description of Artificial Sequence: Synthetic oligonucleotide
  Sense strand starting at position 2645 of SEQ ID NO: 1888972
agagaaugcucaucccacu

SEQ ID NO: 2569977 - RNA, 19 nt, Artificial Sequence
  Description of Artificial Sequence: Synthetic oligonucleotide
  Antisense strand to SEQ ID NO: 2569976
agugggaugagcauucucu

SEQ ID NO: 2569978 - RNA, 19 nt, Artificial Sequence
  Description of Artificial Sequence: Synthetic oligonucleotide
  Sense strand starting at position 2842 of SEQ ID NO: 1888972
guuugaucucccuaaaguu

SEQ ID NO: 2569979 - RNA, 19 nt, Artificial Sequence
  Description of Artificial Sequence: Synthetic oligonucleotide
  Antisense strand to SEQ ID NO: 2569978
aacuuuagggagaucaaac

SEQ ID NO: 2569980 - RNA, 19 nt, Artificial Sequence
  Description of Artificial Sequence: Synthetic oligonucleotide
  Sense strand starting at position 2978 of SEQ ID NO: 1888972
guacauuagagaugugaaa

SEQ ID NO: 2569981 - RNA, 19 nt, Artificial Sequence
  Description of Artificial Sequence: Synthetic oligonucleotide
  Antisense strand to SEQ ID NO: 2569980
uuucacaucucuaauguac

SEQ ID NO: 2569982 - RNA, 19 nt, Artificial Sequence
  Description of Artificial Sequence: Synthetic oligonucleotide
  Sense strand starting at position 3109 of SEQ ID NO: 1888972
gaaucagagggagguugua

SEQ ID NO: 2569983 - RNA, 19 nt, Artificial Sequence
  Description of Artificial Sequence: Synthetic oligonucleotide
  Antisense strand to SEQ ID NO: 2569982
uacaaccucccucugauuc

SEQ ID NO: 2569984 - RNA, 19 nt, Artificial Sequence
  Description of Artificial Sequence: Synthetic oligonucleotide
  Sense strand starting at position 3213 of SEQ ID NO: 1888972
accaauaccuacgugauca

SEQ ID NO: 2569985 - RNA, 19 nt, Artificial Sequence
  Description of Artificial Sequence: Synthetic oligonucleotide
  Antisense strand to SEQ ID NO: 2569984
ugaucacguagguauuggu

SEQ ID NO: 2569986 - RNA, 19 nt, Artificial Sequence
  Description of Artificial Sequence: Synthetic oligonucleotide
  Sense strand starting at position 3303 of SEQ ID NO: 1888972
aacguaauuguugauagga

SEQ ID NO: 2569987 - RNA, 19 nt, Artificial Sequence
  Description of Artificial Sequence: Synthetic oligonucleotide
  Antisense strand to SEQ ID NO: 2569986
uccuaucaacaauuacguu

SEQ ID NO: 2569988 - RNA, 19 nt, Artificial Sequence
  Description of Artificial Sequence: Synthetic oligonucleotide
  Sense strand starting at position 3353 of SEQ ID NO: 1888972
gacccuuaguggucuagaa

SEQ ID NO: 2569989 - RNA, 19 nt, Artificial Sequence
  Description of Artificial Sequence: Synthetic oligonucleotide
  Antisense strand to SEQ ID NO: 2569988
uucuagaccacuaaggguc

SEQ ID NO: 2569990 - RNA, 19 nt, Artificial Sequence
  Description of Artificial Sequence: Synthetic oligonucleotide
  Sense strand starting at position 3449 of SEQ ID NO: 1888972
uuaggauguuuaucucaca

SEQ ID NO: 2569991 - RNA, 19 nt, Artificial Sequence
  Description of Artificial Sequence: Synthetic oligonucleotide
  Antisense strand to SEQ ID NO: 2569990
ugugagauaaacauccuaa

SEQ ID NO: 2569992 - RNA, 19 nt, Artificial Sequence
  Description of Artificial Sequence: Synthetic oligonucleotide
  Sense strand starting at position 3663 of SEQ ID NO: 1888972
acaucaauguacuugggaa

SEQ ID NO: 2569993 - RNA, 19 nt, Artificial Sequence
  Description of Artificial Sequence: Synthetic oligonucleotide
  Antisense strand to SEQ ID NO: 2569992
uucccaaguacauugaugu

SEQ ID NO: 2569994 - RNA, 19 nt, Artificial Sequence
  Description of Artificial Sequence: Synthetic oligonucleotide
  Sense strand starting at position 3665 of SEQ ID NO: 1888972
aucaauguacuugggaauu

SEQ ID NO: 2569995 - RNA, 19 nt, Artificial Sequence
  Description of Artificial Sequence: Synthetic oligonucleotide
  Antisense strand to SEQ ID NO: 2569994
aauucccaaguacauugau

SEQ ID NO: 2569996 - RNA, 19 nt, Artificial Sequence
  Description of Artificial Sequence: Synthetic oligonucleotide
  Sense strand starting at position 3686 of SEQ ID NO: 1888972
augugaaucuucucauaug

SEQ ID NO: 2569997 - RNA, 19 nt, Artificial Sequence
  Description of Artificial Sequence: Synthetic oligonucleotide
  Antisense strand to SEQ ID NO: 2569996
cauaugagaagauucacau

SEQ ID NO: 2569998 - RNA, 19 nt, Artificial Sequence
  Description of Artificial Sequence: Synthetic oligonucleotide
  Sense strand starting at position 3796 of SEQ ID NO: 1888972
aggagauauuaugcuuaug

SEQ ID NO: 2569999 - RNA, 19 nt, Artificial Sequence
  Description of Artificial Sequence: Synthetic oligonucleotide
  Antisense strand to SEQ ID NO: 2569998
cauaagcauaauaucuccu

SEQ ID NO: 2570000 - RNA, 19 nt, Artificial Sequence
  Description of Artificial Sequence: Synthetic oligonucleotide
  Sense strand starting at position 3799 of SEQ ID NO: 1888972
agauauuaugcuuauggca

SEQ ID NO: 2570001 - RNA, 19 nt, Artificial Sequence
  Description of Artificial Sequence: Synthetic oligonucleotide
  Antisense strand to SEQ ID NO: 2570000
ugccauaagcauaauaucu

SEQ ID NO: 2570002 - RNA, 19 nt, Artificial Sequence
  Description of Artificial Sequence: Synthetic oligonucleotide
  Sense strand starting at position 3896 of SEQ ID NO: 1888972
guggguaguucuaucacgu

SEQ ID NO: 2570003 - RNA, 19 nt, Artificial Sequence
  Description of Artificial Sequence: Synthetic oligonucleotide
  Antisense strand to SEQ ID NO: 2570002
acgugauagaacuacccac

SEQ ID NO: 2570004 - RNA, 19 nt, Artificial Sequence
  Description of Artificial Sequence: Synthetic oligonucleotide
  Sense strand starting at position 3951 of SEQ ID NO: 1888972
ccaaauggucccgagaucu

SEQ ID NO: 2570005 - RNA, 19 nt, Artificial Sequence
  Description of Artificial Sequence: Synthetic oligonucleotide
  Antisense strand to SEQ ID NO: 2570004
agaucucgggaccauuugg

SEQ ID NO: 2570006 - RNA, 19 nt, Artificial Sequence
  Description of Artificial Sequence: Synthetic oligonucleotide
  Sense strand starting at position 3959 of SEQ ID NO: 1888972
ucccgagaucuugauaauu

SEQ ID NO: 2570007 - RNA, 19 nt, Artificial Sequence
  Description of Artificial Sequence: Synthetic oligonucleotide
  Antisense strand to SEQ ID NO: 2570006
aauuaucaagaucucggga

SEQ ID NO: 2570008 - RNA, 19 nt, Artificial Sequence
  Description of Artificial Sequence: Synthetic oligonucleotide
  Sense strand starting at position 3974 of SEQ ID NO: 1888972
aauucugaugcaugagaga

SEQ ID NO: 2570009 - RNA, 19 nt, Artificial Sequence
  Description of Artificial Sequence: Synthetic oligonucleotide
  Antisense strand to SEQ ID NO: 2570008
ucucucaugcaucagaauu

SEQ ID NO: 2570010 - RNA, 19 nt, Artificial Sequence
  Description of Artificial Sequence: Synthetic oligonucleotide
  Sense strand starting at position 44 of SEQ ID NO: 1888973
gccuuacucuaccuggaaa

SEQ ID NO: 2570011 - RNA, 19 nt, Artificial Sequence
  Description of Artificial Sequence: Synthetic oligonucleotide
  Antisense strand to SEQ ID NO: 2570010
uuuccagguagaguaaggc

SEQ ID NO: 2570012 - RNA, 19 nt, Artificial Sequence
  Description of Artificial Sequence: Synthetic oligonucleotide
  Sense strand starting at position 71 of SEQ ID NO: 1888973
ugacauauaaucugggcga

SEQ ID NO: 2570013 - RNA, 19 nt, Artificial Sequence
  Description of Artificial Sequence: Synthetic oligonucleotide
  Antisense strand to SEQ ID NO: 2570012
ucgcccagauuauauguca

SEQ ID NO: 2570014 - RNA, 19 nt, Artificial Sequence
  Description of Artificial Sequence: Synthetic oligonucleotide
  Sense strand starting at position 73 of SEQ ID NO: 1888973
acauauaaucugggcgacu

SEQ ID NO: 2570015 - RNA, 19 nt, Artificial Sequence
  Description of Artificial Sequence: Synthetic oligonucleotide
  Antisense strand to SEQ ID NO: 2570014
agucgcccagauuauaugu

SEQ ID NO: 2570016 - RNA, 19 nt, Artificial Sequence
  Description of Artificial Sequence: Synthetic oligonucleotide
  Sense strand starting at position 75 of SEQ ID NO: 1888973
auauaaucugggcgacuga

SEQ ID NO: 2570017 - RNA, 19 nt, Artificial Sequence
  Description of Artificial Sequence: Synthetic oligonucleotide
  Antisense strand to SEQ ID NO: 2570016
ucagucgcccagauuauau

SEQ ID NO: 2570018 - RNA, 19 nt, Artificial Sequence
  Description of Artificial Sequence: Synthetic oligonucleotide
  Sense strand starting at position 157 of SEQ ID NO: 1888973
acaguuauacccuacagcu

SEQ ID NO: 2570019 - RNA, 19 nt, Artificial Sequence
  Description of Artificial Sequence: Synthetic oligonucleotide
  Antisense strand to SEQ ID NO: 2570018
agcuguaggguauaacugu

SEQ ID NO: 2570020 - RNA, 19 nt, Artificial Sequence
  Description of Artificial Sequence: Synthetic oligonucleotide
  Sense strand starting at position 304 of SEQ ID NO: 1888973
uuuguuuagccagauaauu

SEQ ID NO: 2570021 - RNA, 19 nt, Artificial Sequence
  Description of Artificial Sequence: Synthetic oligonucleotide
  Antisense strand to SEQ ID NO: 2570020
aauuaucuggcuaaacaaa

SEQ ID NO: 2570022 - RNA, 19 nt, Artificial Sequence
  Description of Artificial Sequence: Synthetic oligonucleotide
  Sense strand starting at position 648 of SEQ ID NO: 1888973
auacauuauggcugaauac

SEQ ID NO: 2570023 - RNA, 19 nt, Artificial Sequence
  Description of Artificial Sequence: Synthetic oligonucleotide
  Antisense strand to SEQ ID NO: 2570022
guauucagccauaauguau

SEQ ID NO: 2570024 - RNA, 19 nt, Artificial Sequence
  Description of Artificial Sequence: Synthetic oligonucleotide
  Sense strand starting at position 791 of SEQ ID NO: 1888973
cuccaauuugcguaucuca

SEQ ID NO: 2570025 - RNA, 19 nt, Artificial Sequence
  Description of Artificial Sequence: Synthetic oligonucleotide
  Antisense strand to SEQ ID NO: 2570024
ugagauacgcaaauuggag

SEQ ID NO: 2570026 - RNA, 19 nt, Artificial Sequence
  Description of Artificial Sequence: Synthetic oligonucleotide
  Sense strand starting at position 1196 of SEQ ID NO: 1888973
cggccaucuuguuccauuu

SEQ ID NO: 2570027 - RNA, 19 nt, Artificial Sequence
  Description of Artificial Sequence: Synthetic oligonucleotide
  Antisense strand to SEQ ID NO: 2570026
aaauggaacaagauggccg

SEQ ID NO: 2570028 - RNA, 19 nt, Artificial Sequence
  Description of Artificial Sequence: Synthetic oligonucleotide
  Sense strand starting at position 1312 of SEQ ID NO: 1888973
aggaucucccggcauuauu

SEQ ID NO: 2570029 - RNA, 19 nt, Artificial Sequence
  Description of Artificial Sequence: Synthetic oligonucleotide
  Antisense strand to SEQ ID NO: 2570028
aauaaugccgggagauccu

SEQ ID NO: 2570030 - RNA, 19 nt, Artificial Sequence
  Description of Artificial Sequence: Synthetic oligonucleotide
  Sense strand starting at position 1378 of SEQ ID NO: 1888973
acaaacuuguacuuaguga

SEQ ID NO: 2570031 - RNA, 19 nt, Artificial Sequence
  Description of Artificial Sequence: Synthetic oligonucleotide
  Antisense strand to SEQ ID NO: 2570030
ucacuaaguacaaguuugu

SEQ ID NO: 2570032 - RNA, 19 nt, Artificial Sequence
  Description of Artificial Sequence: Synthetic oligonucleotide
  Sense strand starting at position 1389 of SEQ ID NO: 1888973
cuuagugagccuuacucua

SEQ ID NO: 2570033 - RNA, 19 nt, Artificial Sequence
  Description of Artificial Sequence: Synthetic oligonucleotide
  Antisense strand to SEQ ID NO: 2570032
uagaguaaggcucacuaag

SEQ ID NO: 2570034 - RNA, 19 nt, Artificial Sequence
  Description of Artificial Sequence: Synthetic oligonucleotide
  Sense strand starting at position 1424 of SEQ ID NO: 1888973
ugacauguaguguaaguga

SEQ ID NO: 2570035 - RNA, 19 nt, Artificial Sequence
  Description of Artificial Sequence: Synthetic oligonucleotide
  Antisense strand to SEQ ID NO: 2570034
ucacuuacacuacauguca

SEQ ID NO: 2570036 - RNA, 19 nt, Artificial Sequence
  Description of Artificial Sequence: Synthetic oligonucleotide
  Sense strand starting at position 1447 of SEQ ID NO: 1888973
caccuuucugaguaaggca

SEQ ID NO: 2570037 - RNA, 19 nt, Artificial Sequence
  Description of Artificial Sequence: Synthetic oligonucleotide
  Antisense strand to SEQ ID NO: 2570036
ugccuuacucagaaaggug

SEQ ID NO: 2570038 - RNA, 19 nt, Artificial Sequence
  Description of Artificial Sequence: Synthetic oligonucleotide
  Sense strand starting at position 1624 of SEQ ID NO: 1888973
augccugacucagugagaa

SEQ ID NO: 2570039 - RNA, 19 nt, Artificial Sequence
  Description of Artificial Sequence: Synthetic oligonucleotide
  Antisense strand to SEQ ID NO: 2570038
uucucacugagucaggcau

SEQ ID NO: 2570040 - RNA, 19 nt, Artificial Sequence
  Description of Artificial Sequence: Synthetic oligonucleotide
  Sense strand starting at position 1842 of SEQ ID NO: 1888973
ccuguuaucagggaaggca

SEQ ID NO: 2570041 - RNA, 19 nt, Artificial Sequence
  Description of Artificial Sequence: Synthetic oligonucleotide
  Antisense strand to SEQ ID NO: 2570040
ugccuucccugauaacagg

SEQ ID NO: 2570042 - RNA, 19 nt, Artificial Sequence
  Description of Artificial Sequence: Synthetic oligonucleotide
  Sense strand starting at position 2108 of SEQ ID NO: 1888973
aguccuagagaaugcucau

SEQ ID NO: 2570043 - RNA, 19 nt, Artificial Sequence
  Description of Artificial Sequence: Synthetic oligonucleotide
  Antisense strand to SEQ ID NO: 2570042
augagcauucucuaggacu

SEQ ID NO: 2570044 - RNA, 19 nt, Artificial Sequence
  Description of Artificial Sequence: Synthetic oligonucleotide
  Sense strand starting at position 2114 of SEQ ID NO: 1888973
agagaaugcucaucccacu

SEQ ID NO: 2570045 - RNA, 19 nt, Artificial Sequence
  Description of Artificial Sequence: Synthetic oligonucleotide
  Antisense strand to SEQ ID NO: 2570044
agugggaugagcauucucu

SEQ ID NO: 2570046 - RNA, 19 nt, Artificial Sequence
  Description of Artificial Sequence: Synthetic oligonucleotide
  Sense strand starting at position 2311 of SEQ ID NO: 1888973
guuugaucucccuaaaguu

SEQ ID NO: 2570047 - RNA, 19 nt, Artificial Sequence
  Description of Artificial Sequence: Synthetic oligonucleotide
  Antisense strand to SEQ ID NO: 2570046
aacuuuagggagaucaaac

SEQ ID NO: 2570048 - RNA, 19 nt, Artificial Sequence
  Description of Artificial Sequence: Synthetic oligonucleotide
  Sense strand starting at position 2447 of SEQ ID NO: 1888973
guacauuagagaugugaaa

SEQ ID NO: 2570049 - RNA, 19 nt, Artificial Sequence
  Description of Artificial Sequence: Synthetic oligonucleotide
  Antisense strand to SEQ ID NO: 2570048
uuucacaucucuaauguac

SEQ ID NO: 2570050 - RNA, 19 nt, Artificial Sequence
  Description of Artificial Sequence: Synthetic oligonucleotide
  Sense strand starting at position 2578 of SEQ ID NO: 1888973
gaaucagagggagguugua

SEQ ID NO: 2570051 - RNA, 19 nt, Artificial Sequence
  Description of Artificial Sequence: Synthetic oligonucleotide
  Antisense strand to SEQ ID NO: 2570050
uacaaccucccucugauuc

SEQ ID NO: 2570052 - RNA, 19 nt, Artificial Sequence
  Description of Artificial Sequence: Synthetic oligonucleotide
  Sense strand starting at position 2682 of SEQ ID NO: 1888973
accaauaccuacgugauca

SEQ ID NO: 2570053 - RNA, 19 nt, Artificial Sequence
  Description of Artificial Sequence: Synthetic oligonucleotide
  Antisense strand to SEQ ID NO: 2570052
ugaucacguagguauuggu

SEQ ID NO: 2570054 - RNA, 19 nt, Artificial Sequence
  Description of Artificial Sequence: Synthetic oligonucleotide
  Sense strand starting at position 2772 of SEQ ID NO: 1888973
aacguaauuguugauagga

SEQ ID NO: 2570055 - RNA, 19 nt, Artificial Sequence
  Description of Artificial Sequence: Synthetic oligonucleotide
  Antisense strand to SEQ ID NO: 2570054
uccuaucaacaauuacguu

SEQ ID NO: 2570056 - RNA, 19 nt, Artificial Sequence
  Description of Artificial Sequence: Synthetic oligonucleotide
  Sense strand starting at position 2822 of SEQ ID NO: 1888973
gacccuuaguggucuagaa

SEQ ID NO: 2570057 - RNA, 19 nt, Artificial Sequence
  Description of Artificial Sequence: Synthetic oligonucleotide
  Antisense strand to SEQ ID NO: 2570056
uucuagaccacuaaggguc

SEQ ID NO: 2570058 - RNA, 19 nt, Artificial Sequence
  Description of Artificial Sequence: Synthetic oligonucleotide
  Sense strand starting at position 2918 of SEQ ID NO: 1888973
uuaggauguuuaucucaca

SEQ ID NO: 2570059 - RNA, 19 nt, Artificial Sequence
  Description of Artificial Sequence: Synthetic oligonucleotide
  Antisense strand to SEQ ID NO: 2570058
ugugagauaaacauccuaa

SEQ ID NO: 2570060 - RNA, 19 nt, Artificial Sequence
  Description of Artificial Sequence: Synthetic oligonucleotide
  Sense strand starting at position 3132 of SEQ ID NO: 1888973
acaucaauguacuugggaa

SEQ ID NO: 2570061 - RNA, 19 nt, Artificial Sequence
  Description of Artificial Sequence: Synthetic oligonucleotide
  Antisense strand to SEQ ID NO: 2570060
uucccaaguacauugaugu

SEQ ID NO: 2570062 - RNA, 19 nt, Artificial Sequence
  Description of Artificial Sequence: Synthetic oligonucleotide
  Sense strand starting at position 3134 of SEQ ID NO: 1888973
aucaauguacuugggaauu

SEQ ID NO: 2570063 - RNA, 19 nt, Artificial Sequence
  Description of Artificial Sequence: Synthetic oligonucleotide
  Antisense strand to SEQ ID NO: 2570062
aauucccaaguacauugau

SEQ ID NO: 2570064 - RNA, 19 nt, Artificial Sequence
  Description of Artificial Sequence: Synthetic oligonucleotide
  Sense strand starting at position 3155 of SEQ ID NO: 1888973
augugaaucuucucauaug

SEQ ID NO: 2570065 - RNA, 19 nt, Artificial Sequence
  Description of Artificial Sequence: Synthetic oligonucleotide
  Antisense strand to SEQ ID NO: 2570064
cauaugagaagauucacau

SEQ ID NO: 2570066 - RNA, 19 nt, Artificial Sequence
  Description of Artificial Sequence: Synthetic oligonucleotide
  Sense strand starting at position 3265 of SEQ ID NO: 1888973
aggagauauuaugcuuaug

SEQ ID NO: 2570067 - RNA, 19 nt, Artificial Sequence
  Description of Artificial Sequence: Synthetic oligonucleotide
  Antisense strand to SEQ ID NO: 2570066
cauaagcauaauaucuccu

SEQ ID NO: 2570068 - RNA, 19 nt, Artificial Sequence
  Description of Artificial Sequence: Synthetic oligonucleotide
  Sense strand starting at position 3268 of SEQ ID NO: 1888973
agauauuaugcuuauggca

SEQ ID NO: 2570069 - RNA, 19 nt, Artificial Sequence
  Description of Artificial Sequence: Synthetic oligonucleotide
  Antisense strand to SEQ ID NO: 2570068
ugccauaagcauaauaucu

SEQ ID NO: 2570070 - RNA, 19 nt, Artificial Sequence
  Description of Artificial Sequence: Synthetic oligonucleotide
  Sense strand starting at position 3365 of SEQ ID NO: 1888973
guggguaguucuaucacgu

SEQ ID NO: 2570071 - RNA, 19 nt, Artificial Sequence
  Description of Artificial Sequence: Synthetic oligonucleotide
  Antisense strand to SEQ ID NO: 2570070
acgugauagaacuacccac

SEQ ID NO: 2570072 - RNA, 19 nt, Artificial Sequence
  Description of Artificial Sequence: Synthetic oligonucleotide
  Sense strand starting at position 3420 of SEQ ID NO: 1888973
ccaaauggucccgagaucu

SEQ ID NO: 2570073 - RNA, 19 nt, Artificial Sequence
  Description of Artificial Sequence: Synthetic oligonucleotide
  Antisense strand to SEQ ID NO: 2570072
agaucucgggaccauuugg

SEQ ID NO: 2570074 - RNA, 19 nt, Artificial Sequence
  Description of Artificial Sequence: Synthetic oligonucleotide
  Sense strand starting at position 3428 of SEQ ID NO: 1888973
ucccgagaucuugauaauu

SEQ ID NO: 2570075 - RNA, 19 nt, Artificial Sequence
  Description of Artificial Sequence: Synthetic oligonucleotide
  Antisense strand to SEQ ID NO: 2570074
aauuaucaagaucucggga

SEQ ID NO: 2570076 - RNA, 19 nt, Artificial Sequence
  Description of Artificial Sequence: Synthetic oligonucleotide
  Sense strand starting at position 3443 of SEQ ID NO: 1888973
aauucugaugcaugagaga

SEQ ID NO: 2570077 - RNA, 19 nt, Artificial Sequence
  Description of Artificial Sequence: Synthetic oligonucleotide
  Antisense strand to SEQ ID NO: 2570076
ucucucaugcaucagaauu

SEQ ID NO: 2570078 - RNA, 19 nt, Artificial Sequence
  Description of Artificial Sequence: Synthetic oligonucleotide
  Sense strand starting at position 3538 of SEQ ID NO: 1888973
gggacauacugacugugau

SEQ ID NO: 2570079 - RNA, 19 nt, Artificial Sequence
  Description of Artificial Sequence: Synthetic oligonucleotide
  Antisense strand to SEQ ID NO: 2570078
aucacagucaguauguccc

SEQ ID NO: 2570080 - RNA, 19 nt, Artificial Sequence
  Description of Artificial Sequence: Synthetic oligonucleotide
  Sense strand starting at position 3539 of SEQ ID NO: 1888973
ggacauacugacugugaug

SEQ ID NO: 2570081 - RNA, 19 nt, Artificial Sequence
  Description of Artificial Sequence: Synthetic oligonucleotide
  Antisense strand to SEQ ID NO: 2570080
caucacagucaguaugucc

SEQ ID NO: 2570082 - RNA, 19 nt, Artificial Sequence
  Description of Artificial Sequence: Synthetic oligonucleotide
  Sense strand starting at position 3607 of SEQ ID NO: 1888973
aucacugucuaucuagauu

SEQ ID NO: 2570083 - RNA, 19 nt, Artificial Sequence
  Description of Artificial Sequence: Synthetic oligonucleotide
  Antisense strand to SEQ ID NO: 2570082
aaucuagauagacagugau

SEQ ID NO: 2570084 - RNA, 19 nt, Artificial Sequence
  Description of Artificial Sequence: Synthetic oligonucleotide
  Sense strand starting at position 3610 of SEQ ID NO: 1888973
acugucuaucuagauugau

SEQ ID NO: 2570085 - RNA, 19 nt, Artificial Sequence
  Description of Artificial Sequence: Synthetic oligonucleotide
  Antisense strand to SEQ ID NO: 2570084
aucaaucuagauagacagu

SEQ ID NO: 2570086 - RNA, 19 nt, Artificial Sequence
  Description of Artificial Sequence: Synthetic oligonucleotide
  Sense strand starting at position 3613 of SEQ ID NO: 1888973
gucuaucuagauugauuaa

SEQ ID NO: 2570087 - RNA, 19 nt, Artificial Sequence
  Description of Artificial Sequence: Synthetic oligonucleotide
  Antisense strand to SEQ ID NO: 2570086
uuaaucaaucuagauagac

SEQ ID NO: 2570088 - RNA, 19 nt, Artificial Sequence
  Description of Artificial Sequence: Synthetic oligonucleotide
  Sense strand starting at position 3973 of SEQ ID NO: 1888973
auuaguaagguugggagaa

SEQ ID NO: 2570089 - RNA, 19 nt, Artificial Sequence
  Description of Artificial Sequence: Synthetic oligonucleotide
  Antisense strand to SEQ ID NO: 2570088
uucucccaaccuuacuaau

SEQ ID NO: 2570090 - RNA, 19 nt, Artificial Sequence
  Description of Artificial Sequence: Synthetic oligonucleotide
  Sense strand starting at position 267 of SEQ ID NO: 1888974
auguaugccucacugagga

SEQ ID NO: 2570091 - RNA, 19 nt, Artificial Sequence
  Description of Artificial Sequence: Synthetic oligonucleotide
  Antisense strand to SEQ ID NO: 2570090
uccucagugaggcauacau

SEQ ID NO: 2570092 - RNA, 19 nt, Artificial Sequence
  Description of Artificial Sequence: Synthetic oligonucleotide
  Sense strand starting at position 334 of SEQ ID NO: 1888974
agaacaaguuuguuccuga

SEQ ID NO: 2570093 - RNA, 19 nt, Artificial Sequence
  Description of Artificial Sequence: Synthetic oligonucleotide
  Antisense strand to SEQ ID NO: 2570092
ucaggaacaaacuuguucu

SEQ ID NO: 2570094 - RNA, 19 nt, Artificial Sequence
  Description of Artificial Sequence: Synthetic oligonucleotide
  Sense strand starting at position 335 of SEQ ID NO: 1888974
gaacaaguuuguuccugau

SEQ ID NO: 2570095 - RNA, 19 nt, Artificial Sequence
  Description of Artificial Sequence: Synthetic oligonucleotide
  Antisense strand to SEQ ID NO: 2570094
aucaggaacaaacuuguuc

SEQ ID NO: 2570096 - RNA, 19 nt, Artificial Sequence
  Description of Artificial Sequence: Synthetic oligonucleotide
  Sense strand starting at position 368 of SEQ ID NO: 1888974
ugggaaauaucuuuaucuu

SEQ ID NO: 2570097 - RNA, 19 nt, Artificial Sequence
  Description of Artificial Sequence: Synthetic oligonucleotide
  Antisense strand to SEQ ID NO: 2570096
aagauaaagauauuuccca

SEQ ID NO: 2570098 - RNA, 19 nt, Artificial Sequence
  Description of Artificial Sequence: Synthetic oligonucleotide
  Sense strand starting at position 657 of SEQ ID NO: 1888974
cuggguaauuucuauugaa

SEQ ID NO: 2570099 - RNA, 19 nt, Artificial Sequence
  Description of Artificial Sequence: Synthetic oligonucleotide
  Antisense strand to SEQ ID NO: 2570098
uucaauagaaauuacccag

SEQ ID NO: 2570100 - RNA, 19 nt, Artificial Sequence
  Description of Artificial Sequence: Synthetic oligonucleotide
  Sense strand starting at position 1000 of SEQ ID NO: 1888974
ugggaauagcccugaacac

SEQ ID NO: 2570101 - RNA, 19 nt, Artificial Sequence
  Description of Artificial Sequence: Synthetic oligonucleotide
  Antisense strand to SEQ ID NO: 2570100
guguucagggcuauuccca

SEQ ID NO: 2570102 - RNA, 19 nt, Artificial Sequence
  Description of Artificial Sequence: Synthetic oligonucleotide
  Sense strand starting at position 1198 of SEQ ID NO: 1888974
cuauguuuaccuggaugau

SEQ ID NO: 2570103 - RNA, 19 nt, Artificial Sequence
  Description of Artificial Sequence: Synthetic oligonucleotide
  Antisense strand to SEQ ID NO: 2570102
aucauccagguaaacauag

SEQ ID NO: 2570104 - RNA, 19 nt, Artificial Sequence
  Description of Artificial Sequence: Synthetic oligonucleotide
  Sense strand starting at position 1199 of SEQ ID NO: 1888974
uauguuuaccuggaugauu

SEQ ID NO: 2570105 - RNA, 19 nt, Artificial Sequence
  Description of Artificial Sequence: Synthetic oligonucleotide
  Antisense strand to SEQ ID NO: 2570104
aaucauccagguaaacaua

SEQ ID NO: 2570106 - RNA, 19 nt, Artificial Sequence
  Description of Artificial Sequence: Synthetic oligonucleotide
  Sense strand starting at position 1313 of SEQ ID NO: 1888974
gagucuacaucauuaggaa

SEQ ID NO: 2570107 - RNA, 19 nt, Artificial Sequence
  Description of Artificial Sequence: Synthetic oligonucleotide
  Antisense strand to SEQ ID NO: 2570106
uuccuaaugauguagacuc

SEQ ID NO: 2570108 - RNA, 19 nt, Artificial Sequence
  Description of Artificial Sequence: Synthetic oligonucleotide
  Sense strand starting at position 1336 of SEQ ID NO: 1888974
ccaguagaauuaucuugag

SEQ ID NO: 2570109 - RNA, 19 nt, Artificial Sequence
  Description of Artificial Sequence: Synthetic oligonucleotide
  Antisense strand to SEQ ID NO: 2570108
cucaagauaauucuacugg

SEQ ID NO: 2570110 - RNA, 19 nt, Artificial Sequence
  Description of Artificial Sequence: Synthetic oligonucleotide
  Sense strand starting at position 1379 of SEQ ID NO: 1888974
auaggaucuccuggcauca

SEQ ID NO: 2570111 - RNA, 19 nt, Artificial Sequence
  Description of Artificial Sequence: Synthetic oligonucleotide
  Antisense strand to SEQ ID NO: 2570110
ugaugccaggagauccuau

SEQ ID NO: 2570112 - RNA, 19 nt, Artificial Sequence
  Description of Artificial Sequence: Synthetic oligonucleotide
  Sense strand starting at position 1518 of SEQ ID NO: 1888974
ggcaccuuucuggaacaua

SEQ ID NO: 2570113 - RNA, 19 nt, Artificial Sequence
  Description of Artificial Sequence: Synthetic oligonucleotide
  Antisense strand to SEQ ID NO: 2570112
uauguuccagaaaggugcc

SEQ ID NO: 2570114 - RNA, 19 nt, Artificial Sequence
  Description of Artificial Sequence: Synthetic oligonucleotide
  Sense strand starting at position 1759 of SEQ ID NO: 1888974
ucauauagguauucucauu

SEQ ID NO: 2570115 - RNA, 19 nt, Artificial Sequence
  Description of Artificial Sequence: Synthetic oligonucleotide
  Antisense strand to SEQ ID NO: 2570114
aaugagaauaccuauauga

SEQ ID NO: 2570116 - RNA, 19 nt, Artificial Sequence
  Description of Artificial Sequence: Synthetic oligonucleotide
  Sense strand starting at position 1767 of SEQ ID NO: 1888974
guauucucauuauuaggaa

SEQ ID NO: 2570117 - RNA, 19 nt, Artificial Sequence
  Description of Artificial Sequence: Synthetic oligonucleotide
  Antisense strand to SEQ ID NO: 2570116
uuccuaauaaugagaauac

SEQ ID NO: 2570118 - RNA, 19 nt, Artificial Sequence
  Description of Artificial Sequence: Synthetic oligonucleotide
  Sense strand starting at position 1799 of SEQ ID NO: 1888974
ucaucuagaggaugucuga

SEQ ID NO: 2570119 - RNA, 19 nt, Artificial Sequence
  Description of Artificial Sequence: Synthetic oligonucleotide
  Antisense strand to SEQ ID NO: 2570118
ucagacauccucuagauga

SEQ ID NO: 2570120 - RNA, 19 nt, Artificial Sequence
  Description of Artificial Sequence: Synthetic oligonucleotide
  Sense strand starting at position 1833 of SEQ ID NO: 1888974
cuaggaucuccuggcauca

SEQ ID NO: 2570121 - RNA, 19 nt, Artificial Sequence
  Description of Artificial Sequence: Synthetic oligonucleotide
  Antisense strand to SEQ ID NO: 2570120
ugaugccaggagauccuag

SEQ ID NO: 2570122 - RNA, 19 nt, Artificial Sequence
  Description of Artificial Sequence: Synthetic oligonucleotide
  Sense strand starting at position 1908 of SEQ ID NO: 1888974
acacacuuguacuugguaa

SEQ ID NO: 2570123 - RNA, 19 nt, Artificial Sequence
  Description of Artificial Sequence: Synthetic oligonucleotide
  Antisense strand to SEQ ID NO: 2570122
uuaccaaguacaagugugu

SEQ ID NO: 2570124 - RNA, 19 nt, Artificial Sequence
  Description of Artificial Sequence: Synthetic oligonucleotide
  Sense strand starting at position 1952 of SEQ ID NO: 1888974
agugacauguaaucuaagu

SEQ ID NO: 2570125 - RNA, 19 nt, Artificial Sequence
  Description of Artificial Sequence: Synthetic oligonucleotide
  Antisense strand to SEQ ID NO: 2570124
acuuagauuacaugucacu

SEQ ID NO: 2570126 - RNA, 19 nt, Artificial Sequence
  Description of Artificial Sequence: Synthetic oligonucleotide
  Sense strand starting at position 1972 of SEQ ID NO: 1888974
acuggcaccuuucugaaua

SEQ ID NO: 2570127 - RNA, 19 nt, Artificial Sequence
  Description of Artificial Sequence: Synthetic oligonucleotide
  Antisense strand to SEQ ID NO: 2570126
uauucagaaaggugccagu

SEQ ID NO: 2570128 - RNA, 19 nt, Artificial Sequence
  Description of Artificial Sequence: Synthetic oligonucleotide
  Sense strand starting at position 2336 of SEQ ID NO: 1888974
ucuugaggaucccugaguu

SEQ ID NO: 2570129 - RNA, 19 nt, Artificial Sequence
  Description of Artificial Sequence: Synthetic oligonucleotide
  Antisense strand to SEQ ID NO: 2570128
aacucagggauccucaaga

SEQ ID NO: 2570130 - RNA, 19 nt, Artificial Sequence
  Description of Artificial Sequence: Synthetic oligonucleotide
  Sense strand starting at position 2364 of SEQ ID NO: 1888974
uuccaaaucucuccuggga

SEQ ID NO: 2570131 - RNA, 19 nt, Artificial Sequence
  Description of Artificial Sequence: Synthetic oligonucleotide
  Antisense strand to SEQ ID NO: 2570130
ucccaggagagauuuggaa

SEQ ID NO: 2570132 - RNA, 19 nt, Artificial Sequence
  Description of Artificial Sequence: Synthetic oligonucleotide
  Sense strand starting at position 2824 of SEQ ID NO: 1888974
gcauguguucauguuguua

SEQ ID NO: 2570133 - RNA, 19 nt, Artificial Sequence
  Description of Artificial Sequence: Synthetic oligonucleotide
  Antisense strand to SEQ ID NO: 2570132
uaacaacaugaacacaugc

SEQ ID NO: 2570134 - RNA, 19 nt, Artificial Sequence
  Description of Artificial Sequence: Synthetic oligonucleotide
  Sense strand starting at position 2837 of SEQ ID NO: 1888974
uuguuagggacagacgauu

SEQ ID NO: 2570135 - RNA, 19 nt, Artificial Sequence
  Description of Artificial Sequence: Synthetic oligonucleotide
  Antisense strand to SEQ ID NO: 2570134
aaucgucugucccuaacaa

SEQ ID NO: 2570136 - RNA, 19 nt, Artificial Sequence
  Description of Artificial Sequence: Synthetic oligonucleotide
  Sense strand starting at position 2855 of SEQ ID NO: 1888974
uuagaauaucucgacgaug

SEQ ID NO: 2570137 - RNA, 19 nt, Artificial Sequence
  Description of Artificial Sequence: Synthetic oligonucleotide
  Antisense strand to SEQ ID NO: 2570136
caucgucgagauauucuaa

SEQ ID NO: 2570138 - RNA, 19 nt, Artificial Sequence
  Description of Artificial Sequence: Synthetic oligonucleotide
  Sense strand starting at position 2891 of SEQ ID NO: 1888974
caacuaaggucuccuggua

SEQ ID NO: 2570139 - RNA, 19 nt, Artificial Sequence
  Description of Artificial Sequence: Synthetic oligonucleotide
  Antisense strand to SEQ ID NO: 2570138
uaccaggagaccuuaguug

SEQ ID NO: 2570140 - RNA, 19 nt, Artificial Sequence
  Description of Artificial Sequence: Synthetic oligonucleotide
  Sense strand starting at position 2943 of SEQ ID NO: 1888974
acccuaucauggguccaaa

SEQ ID NO: 2570141 - RNA, 19 nt, Artificial Sequence
  Description of Artificial Sequence: Synthetic oligonucleotide
  Antisense strand to SEQ ID NO: 2570140
uuuggacccaugauagggu

SEQ ID NO: 2570142 - RNA, 19 nt, Artificial Sequence
  Description of Artificial Sequence: Synthetic oligonucleotide
  Sense strand starting at position 2980 of SEQ ID NO: 1888974
cuuguugagccuuacacua

SEQ ID NO: 2570143 - RNA, 19 nt, Artificial Sequence
  Description of Artificial Sequence: Synthetic oligonucleotide
  Antisense strand to SEQ ID NO: 2570142
uaguguaaggcucaacaag

SEQ ID NO: 2570144 - RNA, 19 nt, Artificial Sequence
  Description of Artificial Sequence: Synthetic oligonucleotide
  Sense strand starting at position 3010 of SEQ ID NO: 1888974
accagugauguauaaucua

SEQ ID NO: 2570145 - RNA, 19 nt, Artificial Sequence
  Description of Artificial Sequence: Synthetic oligonucleotide
  Antisense strand to SEQ ID NO: 2570144
uagauuauacaucacuggu

SEQ ID NO: 2570146 - RNA, 19 nt, Artificial Sequence
  Description of Artificial Sequence: Synthetic oligonucleotide
  Sense strand starting at position 3013 of SEQ ID NO: 1888974
agugauguauaaucuagga

SEQ ID NO: 2570147 - RNA, 19 nt, Artificial Sequence
  Description of Artificial Sequence: Synthetic oligonucleotide
  Antisense strand to SEQ ID NO: 2570146
uccuagauuauacaucacu

SEQ ID NO: 2570148 - RNA, 19 nt, Artificial Sequence
  Description of Artificial Sequence: Synthetic oligonucleotide
  Sense strand starting at position 3026 of SEQ ID NO: 1888974
cuaggaaacuggcacauuu

SEQ ID NO: 2570149 - RNA, 19 nt, Artificial Sequence
  Description of Artificial Sequence: Synthetic oligonucleotide
  Antisense strand to SEQ ID NO: 2570148
aaaugugccaguuuccuag

SEQ ID NO: 2570150 - RNA, 19 nt, Artificial Sequence
  Description of Artificial Sequence: Synthetic oligonucleotide
  Sense strand starting at position 3153 of SEQ ID NO: 1888974
ugucucacucaaugagaca

SEQ ID NO: 2570151 - RNA, 19 nt, Artificial Sequence
  Description of Artificial Sequence: Synthetic oligonucleotide
  Antisense strand to SEQ ID NO: 2570150
ugucucauugagugagaca

SEQ ID NO: 2570152 - RNA, 19 nt, Artificial Sequence
  Description of Artificial Sequence: Synthetic oligonucleotide
  Sense strand starting at position 3180 of SEQ ID NO: 1888974
gcuccauauuugcccagau

SEQ ID NO: 2570153 - RNA, 19 nt, Artificial Sequence
  Description of Artificial Sequence: Synthetic oligonucleotide
  Antisense strand to SEQ ID NO: 2570152
aucugggcaaauauggagc

SEQ ID NO: 2570154 - RNA, 19 nt, Artificial Sequence
  Description of Artificial Sequence: Synthetic oligonucleotide
  Sense strand starting at position 3433 of SEQ ID NO: 1888974
augaacuuguacuugguaa

SEQ ID NO: 2570155 - RNA, 19 nt, Artificial Sequence
  Description of Artificial Sequence: Synthetic oligonucleotide
  Antisense strand to SEQ ID NO: 2570154
uuaccaaguacaaguucau

SEQ ID NO: 2570156 - RNA, 19 nt, Artificial Sequence
  Description of Artificial Sequence: Synthetic oligonucleotide
  Sense strand starting at position 3435 of SEQ ID NO: 1888974
gaacuuguacuugguaaga

SEQ ID NO: 2570157 - RNA, 19 nt, Artificial Sequence
  Description of Artificial Sequence: Synthetic oligonucleotide
  Antisense strand to SEQ ID NO: 2570156
ucuuaccaaguacaaguuc

SEQ ID NO: 2570158 - RNA, 19 nt, Artificial Sequence
  Description of Artificial Sequence: Synthetic oligonucleotide
  Sense strand starting at position 3446 of SEQ ID NO: 1888974
ugguaagacuuacucuacu

SEQ ID NO: 2570159 - RNA, 19 nt, Artificial Sequence
  Description of Artificial Sequence: Synthetic oligonucleotide
  Antisense strand to SEQ ID NO: 2570158
aguagaguaagucuuacca

SEQ ID NO: 2570160 - RNA, 19 nt, Artificial Sequence
  Description of Artificial Sequence: Synthetic oligonucleotide
  Sense strand starting at position 3691 of SEQ ID NO: 1888974
acgaccuucuuaucugauu

SEQ ID NO: 2570161 - RNA, 19 nt, Artificial Sequence
  Description of Artificial Sequence: Synthetic oligonucleotide
  Antisense strand to SEQ ID NO: 2570160
aaucagauaagaaggucgu

SEQ ID NO: 2570162 - RNA, 19 nt, Artificial Sequence
  Description of Artificial Sequence: Synthetic oligonucleotide
  Sense strand starting at position 3807 of SEQ ID NO: 1888974
guaggugcucacguuguua

SEQ ID NO: 2570163 - RNA, 19 nt, Artificial Sequence
  Description of Artificial Sequence: Synthetic oligonucleotide
  Antisense strand to SEQ ID NO: 2570162
uaacaacgugagcaccuac

SEQ ID NO: 2570164 - RNA, 19 nt, Artificial Sequence
  Description of Artificial Sequence: Synthetic oligonucleotide
  Sense strand starting at position 3867 of SEQ ID NO: 1888974
caagguucuccugggauca

SEQ ID NO: 2570165 - RNA, 19 nt, Artificial Sequence
  Description of Artificial Sequence: Synthetic oligonucleotide
  Antisense strand to SEQ ID NO: 2570164
ugaucccaggagaaccuug

SEQ ID NO: 2570166 - RNA, 19 nt, Artificial Sequence
  Description of Artificial Sequence: Synthetic oligonucleotide
  Sense strand starting at position 3868 of SEQ ID NO: 1888974
aagguucuccugggaucaa

SEQ ID NO: 2570167 - RNA, 19 nt, Artificial Sequence
  Description of Artificial Sequence: Synthetic oligonucleotide
  Antisense strand to SEQ ID NO: 2570166
uugaucccaggagaaccuu

SEQ ID NO: 2570168 - RNA, 19 nt, Artificial Sequence
  Description of Artificial Sequence: Synthetic oligonucleotide
  Sense strand starting at position 3977 of SEQ ID NO: 1888974
agaggugucagucacaugu

SEQ ID NO: 2570169 - RNA, 19 nt, Artificial Sequence
  Description of Artificial Sequence: Synthetic oligonucleotide
  Antisense strand to SEQ ID NO: 2570168
acaugugacugacaccucu

SEQ ID NO: 2570170 - RNA, 19 nt, Artificial Sequence
  Description of Artificial Sequence: Synthetic oligonucleotide
  Sense strand starting at position 86 of SEQ ID NO: 1888975
cccacauauccuugaggua

SEQ ID NO: 2570171 - RNA, 19 nt, Artificial Sequence
  Description of Artificial Sequence: Synthetic oligonucleotide
  Antisense strand to SEQ ID NO: 2570170
uaccucaaggauauguggg

SEQ ID NO: 2570172 - RNA, 19 nt, Artificial Sequence
  Description of Artificial Sequence: Synthetic oligonucleotide
  Sense strand starting at position 99 of SEQ ID NO: 1888975
gagguagaccaauguuauc

SEQ ID NO: 2570173 - RNA, 19 nt, Artificial Sequence
  Description of Artificial Sequence: Synthetic oligonucleotide
  Antisense strand to SEQ ID NO: 2570172
gauaacauuggucuaccuc

SEQ ID NO: 2570174 - RNA, 19 nt, Artificial Sequence
  Description of Artificial Sequence: Synthetic oligonucleotide
  Sense strand starting at position 104 of SEQ ID NO: 1888975
agaccaauguuaucacugu

SEQ ID NO: 2570175 - RNA, 19 nt, Artificial Sequence
  Description of Artificial Sequence: Synthetic oligonucleotide
  Antisense strand to SEQ ID NO: 2570174
acagugauaacauuggucu

SEQ ID NO: 2570176 - RNA, 19 nt, Artificial Sequence
  Description of Artificial Sequence: Synthetic oligonucleotide
  Sense strand starting at position 152 of SEQ ID NO: 1888975
aggcaacuagcucaagauu

SEQ ID NO: 2570177 - RNA, 19 nt, Artificial Sequence
  Description of Artificial Sequence: Synthetic oligonucleotide
  Antisense strand to SEQ ID NO: 2570176
aaucuugagcuaguugccu

SEQ ID NO: 2570178 - RNA, 19 nt, Artificial Sequence
  Description of Artificial Sequence: Synthetic oligonucleotide
  Sense strand starting at position 387 of SEQ ID NO: 1888975
ugccaaauacaugauguua

SEQ ID NO: 2570179 - RNA, 19 nt, Artificial Sequence
  Description of Artificial Sequence: Synthetic oligonucleotide
  Antisense strand to SEQ ID NO: 2570178
uaacaucauguauuuggca

SEQ ID NO: 2570180 - RNA, 19 nt, Artificial Sequence
  Description of Artificial Sequence: Synthetic oligonucleotide
  Sense strand starting at position 505 of SEQ ID NO: 1888975
uguuaacuuuguccuagaa

SEQ ID NO: 2570181 - RNA, 19 nt, Artificial Sequence
  Description of Artificial Sequence: Synthetic oligonucleotide
  Antisense strand to SEQ ID NO: 2570180
uucuaggacaaaguuaaca

SEQ ID NO: 2570182 - RNA, 19 nt, Artificial Sequence
  Description of Artificial Sequence: Synthetic oligonucleotide
  Sense strand starting at position 815 of SEQ ID NO: 1888975
gguuguggugaaugagaga

SEQ ID NO: 2570183 - RNA, 19 nt, Artificial Sequence
  Description of Artificial Sequence: Synthetic oligonucleotide
  Antisense strand to SEQ ID NO: 2570182
ucucucauucaccacaacc

SEQ ID NO: 2570184 - RNA, 19 nt, Artificial Sequence
  Description of Artificial Sequence: Synthetic oligonucleotide
  Sense strand starting at position 824 of SEQ ID NO: 1888975
gaaugagagaucgggccau

SEQ ID NO: 2570185 - RNA, 19 nt, Artificial Sequence
  Description of Artificial Sequence: Synthetic oligonucleotide
  Antisense strand to SEQ ID NO: 2570184
auggcccgaucucucauuc

SEQ ID NO: 2570186 - RNA, 19 nt, Artificial Sequence
  Description of Artificial Sequence: Synthetic oligonucleotide
  Sense strand starting at position 828 of SEQ ID NO: 1888975
gagagaucgggccauugca

SEQ ID NO: 2570187 - RNA, 19 nt, Artificial Sequence
  Description of Artificial Sequence: Synthetic oligonucleotide
  Antisense strand to SEQ ID NO: 2570186
ugcaauggcccgaucucuc

SEQ ID NO: 2570188 - RNA, 19 nt, Artificial Sequence
  Description of Artificial Sequence: Synthetic oligonucleotide
  Sense strand starting at position 959 of SEQ ID NO: 1888975
gcuggcugugucuuaguaa

SEQ ID NO: 2570189 - RNA, 19 nt, Artificial Sequence
  Description of Artificial Sequence: Synthetic oligonucleotide
  Antisense strand to SEQ ID NO: 2570188
uuacuaagacacagccagc

SEQ ID NO: 2570190 - RNA, 19 nt, Artificial Sequence
  Description of Artificial Sequence: Synthetic oligonucleotide
  Sense strand starting at position 1292 of SEQ ID NO: 1888975
gucccauugguuuacaacu

SEQ ID NO: 2570191 - RNA, 19 nt, Artificial Sequence
  Description of Artificial Sequence: Synthetic oligonucleotide
  Antisense strand to SEQ ID NO: 2570190
aguuguaaaccaaugggac

SEQ ID NO: 2570192 - RNA, 19 nt, Artificial Sequence
  Description of Artificial Sequence: Synthetic oligonucleotide
  Sense strand starting at position 1366 of SEQ ID NO: 1888975
auccaaauauugucagggu

SEQ ID NO: 2570193 - RNA, 19 nt, Artificial Sequence
  Description of Artificial Sequence: Synthetic oligonucleotide
  Antisense strand to SEQ ID NO: 2570192
acccugacaauauuuggau

SEQ ID NO: 2570194 - RNA, 19 nt, Artificial Sequence
  Description of Artificial Sequence: Synthetic oligonucleotide
  Sense strand starting at position 1370 of SEQ ID NO: 1888975
aaauauugucaggguaaua

SEQ ID NO: 2570195 - RNA, 19 nt, Artificial Sequence
  Description of Artificial Sequence: Synthetic oligonucleotide
  Antisense strand to SEQ ID NO: 2570194
uauuacccugacaauauuu

SEQ ID NO: 2570196 - RNA, 19 nt, Artificial Sequence
  Description of Artificial Sequence: Synthetic oligonucleotide
  Sense strand starting at position 1739 of SEQ ID NO: 1888975
caggaaugucgccaacaaa

SEQ ID NO: 2570197 - RNA, 19 nt, Artificial Sequence
  Description of Artificial Sequence: Synthetic oligonucleotide
  Antisense strand to SEQ ID NO: 2570196
uuuguuggcgacauuccug

SEQ ID NO: 2570198 - RNA, 19 nt, Artificial Sequence
  Description of Artificial Sequence: Synthetic oligonucleotide
  Sense strand starting at position 1940 of SEQ ID NO: 1888975
ggacaagugcaauacuuua

SEQ ID NO: 2570199 - RNA, 19 nt, Artificial Sequence
  Description of Artificial Sequence: Synthetic oligonucleotide
  Antisense strand to SEQ ID NO: 2570198
uaaaguauugcacuugucc

SEQ ID NO: 2570200 - RNA, 19 nt, Artificial Sequence
  Description of Artificial Sequence: Synthetic oligonucleotide
  Sense strand starting at position 1945 of SEQ ID NO: 1888975
agugcaauacuuuauauag

SEQ ID NO: 2570201 - RNA, 19 nt, Artificial Sequence
  Description of Artificial Sequence: Synthetic oligonucleotide
  Antisense strand to SEQ ID NO: 2570200
cuauauaaaguauugcacu

SEQ ID NO: 2570202 - RNA, 19 nt, Artificial Sequence
  Description of Artificial Sequence: Synthetic oligonucleotide
  Sense strand starting at position 2005 of SEQ ID NO: 1888975
gcaugagugcuggagauac

SEQ ID NO: 2570203 - RNA, 19 nt, Artificial Sequence
  Description of Artificial Sequence: Synthetic oligonucleotide
  Antisense strand to SEQ ID NO: 2570202
guaucuccagcacucaugc

SEQ ID NO: 2570204 - RNA, 19 nt, Artificial Sequence
  Description of Artificial Sequence: Synthetic oligonucleotide
  Sense strand starting at position 2015 of SEQ ID NO: 1888975
uggagauacgcaugaaggu

SEQ ID NO: 2570205 - RNA, 19 nt, Artificial Sequence
  Description of Artificial Sequence: Synthetic oligonucleotide
  Antisense strand to SEQ ID NO: 2570204
accuucaugcguaucucca

SEQ ID NO: 2570206 - RNA, 19 nt, Artificial Sequence
  Description of Artificial Sequence: Synthetic oligonucleotide
  Sense strand starting at position 2101 of SEQ ID NO: 1888975
auacauauauacgcugaaa

SEQ ID NO: 2570207 - RNA, 19 nt, Artificial Sequence
  Description of Artificial Sequence: Synthetic oligonucleotide
  Antisense strand to SEQ ID NO: 2570206
uuucagcguauauauguau

SEQ ID NO: 2570208 - RNA, 19 nt, Artificial Sequence
  Description of Artificial Sequence: Synthetic oligonucleotide
  Sense strand starting at position 2103 of SEQ ID NO: 1888975
acauauauacgcugaaaug

SEQ ID NO: 2570209 - RNA, 19 nt, Artificial Sequence
  Description of Artificial Sequence: Synthetic oligonucleotide
  Antisense strand to SEQ ID NO: 2570208
cauuucagcguauauaugu

SEQ ID NO: 2570210 - RNA, 19 nt, Artificial Sequence
  Description of Artificial Sequence: Synthetic oligonucleotide
  Sense strand starting at position 2184 of SEQ ID NO: 1888975
uuuguuauccaagaguacu

SEQ ID NO: 2570211 - RNA, 19 nt, Artificial Sequence
  Description of Artificial Sequence: Synthetic oligonucleotide
  Antisense strand to SEQ ID NO: 2570210
aguacucuuggauaacaaa

SEQ ID NO: 2570212 - RNA, 19 nt, Artificial Sequence
  Description of Artificial Sequence: Synthetic oligonucleotide
  Sense strand starting at position 2200 of SEQ ID NO: 1888975
acuggaagugcccauacua

SEQ ID NO: 2570213 - RNA, 19 nt, Artificial Sequence
  Description of Artificial Sequence: Synthetic oligonucleotide
  Antisense strand to SEQ ID NO: 2570212
uaguaugggcacuuccagu

SEQ ID NO: 2570214 - RNA, 19 nt, Artificial Sequence
  Description of Artificial Sequence: Synthetic oligonucleotide
  Sense strand starting at position 2567 of SEQ ID NO: 1888975
guagccauugacuaaauca

SEQ ID NO: 2570215 - RNA, 19 nt, Artificial Sequence
  Description of Artificial Sequence: Synthetic oligonucleotide
  Antisense strand to SEQ ID NO: 2570214
ugauuuagucaauggcuac

SEQ ID NO: 2570216 - RNA, 19 nt, Artificial Sequence
  Description of Artificial Sequence: Synthetic oligonucleotide
  Sense strand starting at position 2578 of SEQ ID NO: 1888975
cuaaaucaccaugguaaug

SEQ ID NO: 2570217 - RNA, 19 nt, Artificial Sequence
  Description of Artificial Sequence: Synthetic oligonucleotide
  Antisense strand to SEQ ID NO: 2570216
cauuaccauggugauuuag

SEQ ID NO: 2570218 - RNA, 19 nt, Artificial Sequence
  Description of Artificial Sequence: Synthetic oligonucleotide
  Sense strand starting at position 2596 of SEQ ID NO: 1888975
guaagaagugcuuacauug

SEQ ID NO: 2570219 - RNA, 19 nt, Artificial Sequence
  Description of Artificial Sequence: Synthetic oligonucleotide
  Antisense strand to SEQ ID NO: 2570218
caauguaagcacuucuuac

SEQ ID NO: 2570220 - RNA, 19 nt, Artificial Sequence
  Description of Artificial Sequence: Synthetic oligonucleotide
  Sense strand starting at position 2606 of SEQ ID NO: 1888975
cuuacauugcaguagaucu

SEQ ID NO: 2570221 - RNA, 19 nt, Artificial Sequence
  Description of Artificial Sequence: Synthetic oligonucleotide
  Antisense strand to SEQ ID NO: 2570220
agaucuacugcaauguaag

SEQ ID NO: 2570222 - RNA, 19 nt, Artificial Sequence
  Description of Artificial Sequence: Synthetic oligonucleotide
  Sense strand starting at position 2731 of SEQ ID NO: 1888975
gcagacucaccugguuaaa

SEQ ID NO: 2570223 - RNA, 19 nt, Artificial Sequence
  Description of Artificial Sequence: Synthetic oligonucleotide
  Antisense strand to SEQ ID NO: 2570222
uuuaaccaggugagucugc

SEQ ID NO: 2570224 - RNA, 19 nt, Artificial Sequence
  Description of Artificial Sequence: Synthetic oligonucleotide
  Sense strand starting at position 2829 of SEQ ID NO: 1888975
gcuuacagagucuaagcua

SEQ ID NO: 2570225 - RNA, 19 nt, Artificial Sequence
  Description of Artificial Sequence: Synthetic oligonucleotide
  Antisense strand to SEQ ID NO: 2570224
uagcuuagacucuguaagc

SEQ ID NO: 2570226 - RNA, 19 nt, Artificial Sequence
  Description of Artificial Sequence: Synthetic oligonucleotide
  Sense strand starting at position 2947 of SEQ ID NO: 1888975
ucuuauguauaagcagauu

SEQ ID NO: 2570227 - RNA, 19 nt, Artificial Sequence
  Description of Artificial Sequence: Synthetic oligonucleotide
  Antisense strand to SEQ ID NO: 2570226
aaucugcuuauacauaaga

SEQ ID NO: 2570228 - RNA, 19 nt, Artificial Sequence
  Description of Artificial Sequence: Synthetic oligonucleotide
  Sense strand starting at position 3010 of SEQ ID NO: 1888975
caguaauuugcaggcacau

SEQ ID NO: 2570229 - RNA, 19 nt, Artificial Sequence
  Description of Artificial Sequence: Synthetic oligonucleotide
  Antisense strand to SEQ ID NO: 2570228
augugccugcaaauuacug

SEQ ID NO: 2570230 - RNA, 19 nt, Artificial Sequence
  Description of Artificial Sequence: Synthetic oligonucleotide
  Sense strand starting at position 3133 of SEQ ID NO: 1888975
acggaaagugacuguuaga

SEQ ID NO: 2570231 - RNA, 19 nt, Artificial Sequence
  Description of Artificial Sequence: Synthetic oligonucleotide
  Antisense strand to SEQ ID NO: 2570230
ucuaacagucacuuuccgu

SEQ ID NO: 2570232 - RNA, 19 nt, Artificial Sequence
  Description of Artificial Sequence: Synthetic oligonucleotide
  Sense strand starting at position 3253 of SEQ ID NO: 1888975
auggcugagagaugucaca

SEQ ID NO: 2570233 - RNA, 19 nt, Artificial Sequence
  Description of Artificial Sequence: Synthetic oligonucleotide
  Antisense strand to SEQ ID NO: 2570232
ugugacaucucucagccau

SEQ ID NO: 2570234 - RNA, 19 nt, Artificial Sequence
  Description of Artificial Sequence: Synthetic oligonucleotide
  Sense strand starting at position 3541 of SEQ ID NO: 1888975
ucuguaauacguuaaacga

SEQ ID NO: 2570235 - RNA, 19 nt, Artificial Sequence
  Description of Artificial Sequence: Synthetic oligonucleotide
  Antisense strand to SEQ ID NO: 2570234
ucguuuaacguauuacaga

SEQ ID NO: 2570236 - RNA, 19 nt, Artificial Sequence
  Description of Artificial Sequence: Synthetic oligonucleotide
  Sense strand starting at position 3549 of SEQ ID NO: 1888975
acguuaaacgagugaggga

SEQ ID NO: 2570237 - RNA, 19 nt, Artificial Sequence
  Description of Artificial Sequence: Synthetic oligonucleotide
  Antisense strand to SEQ ID NO: 2570236
ucccucacucguuuaacgu

SEQ ID NO: 2570238 - RNA, 19 nt, Artificial Sequence
  Description of Artificial Sequence: Synthetic oligonucleotide
  Sense strand starting at position 3578 of SEQ ID NO: 1888975
uugaacuuucgucacgaua

SEQ ID NO: 2570239 - RNA, 19 nt, Artificial Sequence
  Description of Artificial Sequence: Synthetic oligonucleotide
  Antisense strand to SEQ ID NO: 2570238
uaucgugacgaaaguucaa

SEQ ID NO: 2570240 - RNA, 19 nt, Artificial Sequence
  Description of Artificial Sequence: Synthetic oligonucleotide
  Sense strand starting at position 3603 of SEQ ID NO: 1888975
gccacuaaaugagucuuua

SEQ ID NO: 2570241 - RNA, 19 nt, Artificial Sequence
  Description of Artificial Sequence: Synthetic oligonucleotide
  Antisense strand to SEQ ID NO: 2570240
uaaagacucauuuaguggc

SEQ ID NO: 2570242 - RNA, 19 nt, Artificial Sequence
  Description of Artificial Sequence: Synthetic oligonucleotide
  Sense strand starting at position 3607 of SEQ ID NO: 1888975
cuaaaugagucuuuagaag

SEQ ID NO: 2570243 - RNA, 19 nt, Artificial Sequence
  Description of Artificial Sequence: Synthetic oligonucleotide
  Antisense strand to SEQ ID NO: 2570242
cuucuaaagacucauuuag

SEQ ID NO: 2570244 - RNA, 19 nt, Artificial Sequence
  Description of Artificial Sequence: Synthetic oligonucleotide
  Sense strand starting at position 3732 of SEQ ID NO: 1888975
cccuuaaauuggguuucua

SEQ ID NO: 2570245 - RNA, 19 nt, Artificial Sequence
  Description of Artificial Sequence: Synthetic oligonucleotide
  Antisense strand to SEQ ID NO: 2570244
uagaaacccaauuuaaggg

SEQ ID NO: 2570246 - RNA, 19 nt, Artificial Sequence
  Description of Artificial Sequence: Synthetic oligonucleotide
  Sense strand starting at position 3743 of SEQ ID NO: 1888975
gguuucuacaccugugaag

SEQ ID NO: 2570247 - RNA, 19 nt, Artificial Sequence
  Description of Artificial Sequence: Synthetic oligonucleotide
  Antisense strand to SEQ ID NO: 2570246
cuucacagguguagaaacc

SEQ ID NO: 2570248 - RNA, 19 nt, Artificial Sequence
  Description of Artificial Sequence: Synthetic oligonucleotide
  Sense strand starting at position 3745 of SEQ ID NO: 1888975
uuucuacaccugugaagau

SEQ ID NO: 2570249 - RNA, 19 nt, Artificial Sequence
  Description of Artificial Sequence: Synthetic oligonucleotide
  Antisense strand to SEQ ID NO: 2570248
aucuucacagguguagaaa

SEQ ID NO: 2570250 - RNA, 19 nt, Artificial Sequence
  Description of Artificial Sequence: Synthetic oligonucleotide
  Sense strand starting at position 2 of SEQ ID NO: 1888976
ugaacucaugugugguaaa

SEQ ID NO: 2570251 - RNA, 19 nt, Artificial Sequence
  Description of Artificial Sequence: Synthetic oligonucleotide
  Antisense strand to SEQ ID NO: 2570250
uuuaccacacaugaguuca

SEQ ID NO: 2570252 - RNA, 19 nt, Artificial Sequence
  Description of Artificial Sequence: Synthetic oligonucleotide
  Sense strand starting at position 68 of SEQ ID NO: 1888976
uuggaauuguuucugauaa

SEQ ID NO: 2570253 - RNA, 19 nt, Artificial Sequence
  Description of Artificial Sequence: Synthetic oligonucleotide
  Antisense strand to SEQ ID NO: 2570252
uuaucagaaacaauuccaa

SEQ ID NO: 2570254 - RNA, 19 nt, Artificial Sequence
  Description of Artificial Sequence: Synthetic oligonucleotide
  Sense strand starting at position 97 of SEQ ID NO: 1888976
cugugagagcaaggagaua

SEQ ID NO: 2570255 - RNA, 19 nt, Artificial Sequence
  Description of Artificial Sequence: Synthetic oligonucleotide
  Antisense strand to SEQ ID NO: 2570254
uaucuccuugcucucacag

SEQ ID NO: 2570256 - RNA, 19 nt, Artificial Sequence
  Description of Artificial Sequence: Synthetic oligonucleotide
  Sense strand starting at position 128 of SEQ ID NO: 1888976
ccacuugcugcugugugau

SEQ ID NO: 2570257 - RNA, 19 nt, Artificial Sequence
  Description of Artificial Sequence: Synthetic oligonucleotide
  Antisense strand to SEQ ID NO: 2570256
aucacacagcagcaagugg

SEQ ID NO: 2570258 - RNA, 19 nt, Artificial Sequence
  Description of Artificial Sequence: Synthetic oligonucleotide
  Sense strand starting at position 230 of SEQ ID NO: 1888976
ugaauaucgguugaguaaa

SEQ ID NO: 2570259 - RNA, 19 nt, Artificial Sequence
  Description of Artificial Sequence: Synthetic oligonucleotide
  Antisense strand to SEQ ID NO: 2570258
uuuacucaaccgauauuca

SEQ ID NO: 2570260 - RNA, 19 nt, Artificial Sequence
  Description of Artificial Sequence: Synthetic oligonucleotide
  Sense strand starting at position 386 of SEQ ID NO: 1888976
agcaucaaguuaucaguaa

SEQ ID NO: 2570261 - RNA, 19 nt, Artificial Sequence
  Description of Artificial Sequence: Synthetic oligonucleotide
  Antisense strand to SEQ ID NO: 2570260
uuacugauaacuugaugcu

SEQ ID NO: 2570262 - RNA, 19 nt, Artificial Sequence
  Description of Artificial Sequence: Synthetic oligonucleotide
  Sense strand starting at position 794 of SEQ ID NO: 1888976
uagggauacagugguauac

SEQ ID NO: 2570263 - RNA, 19 nt, Artificial Sequence
  Description of Artificial Sequence: Synthetic oligonucleotide
  Antisense strand to SEQ ID NO: 2570262
guauaccacuguaucccua

SEQ ID NO: 2570264 - RNA, 19 nt, Artificial Sequence
  Description of Artificial Sequence: Synthetic oligonucleotide
  Sense strand starting at position 892 of SEQ ID NO: 1888976
ugucaaaugccugagauca

SEQ ID NO: 2570265 - RNA, 19 nt, Artificial Sequence
  Description of Artificial Sequence: Synthetic oligonucleotide
  Antisense strand to SEQ ID NO: 2570264
ugaucucaggcauuugaca

SEQ ID NO: 2570266 - RNA, 19 nt, Artificial Sequence
  Description of Artificial Sequence: Synthetic oligonucleotide
  Sense strand starting at position 1144 of SEQ ID NO: 1888976
agaauucuugaugguuuaa

SEQ ID NO: 2570267 - RNA, 19 nt, Artificial Sequence
  Description of Artificial Sequence: Synthetic oligonucleotide
  Antisense strand to SEQ ID NO: 2570266
uuaaaccaucaagaauucu

SEQ ID NO: 2570268 - RNA, 19 nt, Artificial Sequence
  Description of Artificial Sequence: Synthetic oligonucleotide
  Sense strand starting at position 1146 of SEQ ID NO: 1888976
aauucuugaugguuuaaug

SEQ ID NO: 2570269 - RNA, 19 nt, Artificial Sequence
  Description of Artificial Sequence: Synthetic oligonucleotide
  Antisense strand to SEQ ID NO: 2570268
cauuaaaccaucaagaauu

SEQ ID NO: 2570270 - RNA, 19 nt, Artificial Sequence
  Description of Artificial Sequence: Synthetic oligonucleotide
  Sense strand starting at position 1199 of SEQ ID NO: 1888976
uucuaagcauugguauaca

SEQ ID NO: 2570271 - RNA, 19 nt, Artificial Sequence
  Description of Artificial Sequence: Synthetic oligonucleotide
  Antisense strand to SEQ ID NO: 2570270
uguauaccaaugcuuagaa

SEQ ID NO: 2570272 - RNA, 19 nt, Artificial Sequence
  Description of Artificial Sequence: Synthetic oligonucleotide
  Sense strand starting at position 1310 of SEQ ID NO: 1888976
uaagaaaugugaccagguu

SEQ ID NO: 2570273 - RNA, 19 nt, Artificial Sequence
  Description of Artificial Sequence: Synthetic oligonucleotide
  Antisense strand to SEQ ID NO: 2570272
aaccuggucacauuucuua

SEQ ID NO: 2570274 - RNA, 19 nt, Artificial Sequence
  Description of Artificial Sequence: Synthetic oligonucleotide
  Sense strand starting at position 1809 of SEQ ID NO: 1888976
uaaggagaguuucuucuau

SEQ ID NO: 2570275 - RNA, 19 nt, Artificial Sequence
  Description of Artificial Sequence: Synthetic oligonucleotide
  Antisense strand to SEQ ID NO: 2570274
auagaagaaacucuccuua

SEQ ID NO: 2570276 - RNA, 19 nt, Artificial Sequence
  Description of Artificial Sequence: Synthetic oligonucleotide
  Sense strand starting at position 2005 of SEQ ID NO: 1888976
guucguucucaggauacag

SEQ ID NO: 2570277 - RNA, 19 nt, Artificial Sequence
  Description of Artificial Sequence: Synthetic oligonucleotide
  Antisense strand to SEQ ID NO: 2570276
cuguauccugagaacgaac

SEQ ID NO: 2570278 - RNA, 19 nt, Artificial Sequence
  Description of Artificial Sequence: Synthetic oligonucleotide
  Sense strand starting at position 2203 of SEQ ID NO: 1888976
uggcccuaaguuuaugaau

SEQ ID NO: 2570279 - RNA, 19 nt, Artificial Sequence
  Description of Artificial Sequence: Synthetic oligonucleotide
  Antisense strand to SEQ ID NO: 2570278
auucauaaacuuagggcca

SEQ ID NO: 2570280 - RNA, 19 nt, Artificial Sequence
  Description of Artificial Sequence: Synthetic oligonucleotide
  Sense strand starting at position 2212 of SEQ ID NO: 1888976
guuuaugaauaucuagcau

SEQ ID NO: 2570281 - RNA, 19 nt, Artificial Sequence
  Description of Artificial Sequence: Synthetic oligonucleotide
  Antisense strand to SEQ ID NO: 2570280
augcuagauauucauaaac

SEQ ID NO: 2570282 - RNA, 19 nt, Artificial Sequence
  Description of Artificial Sequence: Synthetic oligonucleotide
  Sense strand starting at position 2296 of SEQ ID NO: 1888976
ggcaguguuccugauuaag

SEQ ID NO: 2570283 - RNA, 19 nt, Artificial Sequence
  Description of Artificial Sequence: Synthetic oligonucleotide
  Antisense strand to SEQ ID NO: 2570282
cuuaaucaggaacacugcc

SEQ ID NO: 2570284 - RNA, 19 nt, Artificial Sequence
  Description of Artificial Sequence: Synthetic oligonucleotide
  Sense strand starting at position 2299 of SEQ ID NO: 1888976
aguguuccugauuaagggu

SEQ ID NO: 2570285 - RNA, 19 nt, Artificial Sequence
  Description of Artificial Sequence: Synthetic oligonucleotide
  Antisense strand to SEQ ID NO: 2570284
acccuuaaucaggaacacu

SEQ ID NO: 2570286 - RNA, 19 nt, Artificial Sequence
  Description of Artificial Sequence: Synthetic oligonucleotide
  Sense strand starting at position 2308 of SEQ ID NO: 1888976
gauuaagggucacugacuu

SEQ ID NO: 2570287 - RNA, 19 nt, Artificial Sequence
  Description of Artificial Sequence: Synthetic oligonucleotide
  Antisense strand to SEQ ID NO: 2570286
aagucagugacccuuaauc

SEQ ID NO: 2570288 - RNA, 19 nt, Artificial Sequence
  Description of Artificial Sequence: Synthetic oligonucleotide
  Sense strand starting at position 2387 of SEQ ID NO: 1888976
gcaugaagaccuuggugau

SEQ ID NO: 2570289 - RNA, 19 nt, Artificial Sequence
  Description of Artificial Sequence: Synthetic oligonucleotide
  Antisense strand to SEQ ID NO: 2570288
aucaccaaggucuucaugc

SEQ ID NO: 2570290 - RNA, 19 nt, Artificial Sequence
  Description of Artificial Sequence: Synthetic oligonucleotide
  Sense strand starting at position 2388 of SEQ ID NO: 1888976
caugaagaccuuggugaua

SEQ ID NO: 2570291 - RNA, 19 nt, Artificial Sequence
  Description of Artificial Sequence: Synthetic oligonucleotide
  Antisense strand to SEQ ID NO: 2570290
uaucaccaaggucuucaug

SEQ ID NO: 2570292 - RNA, 19 nt, Artificial Sequence
  Description of Artificial Sequence: Synthetic oligonucleotide
  Sense strand starting at position 2401 of SEQ ID NO: 1888976
gugauaaccauuuguuugu

SEQ ID NO: 2570293 - RNA, 19 nt, Artificial Sequence
  Description of Artificial Sequence: Synthetic oligonucleotide
  Antisense strand to SEQ ID NO: 2570292
acaaacaaaugguuaucac

SEQ ID NO: 2570294 - RNA, 19 nt, Artificial Sequence
  Description of Artificial Sequence: Synthetic oligonucleotide
  Sense strand starting at position 2446 of SEQ ID NO: 1888976
ggacaaugccugcauuagu

SEQ ID NO: 2570295 - RNA, 19 nt, Artificial Sequence
  Description of Artificial Sequence: Synthetic oligonucleotide
  Antisense strand to SEQ ID NO: 2570294
acuaaugcaggcauugucc

SEQ ID NO: 2570296 - RNA, 19 nt, Artificial Sequence
  Description of Artificial Sequence: Synthetic oligonucleotide
  Sense strand starting at position 2517 of SEQ ID NO: 1888976
uuggacuugaacuguaaag

SEQ ID NO: 2570297 - RNA, 19 nt, Artificial Sequence
  Description of Artificial Sequence: Synthetic oligonucleotide
  Antisense strand to SEQ ID NO: 2570296
cuuuacaguucaaguccaa

SEQ ID NO: 2570298 - RNA, 19 nt, Artificial Sequence
  Description of Artificial Sequence: Synthetic oligonucleotide
  Sense strand starting at position 2527 of SEQ ID NO: 1888976
acuguaaagaguugcuaag

SEQ ID NO: 2570299 - RNA, 19 nt, Artificial Sequence
  Description of Artificial Sequence: Synthetic oligonucleotide
  Antisense strand to SEQ ID NO: 2570298
cuuagcaacucuuuacagu

SEQ ID NO: 2570300 - RNA, 19 nt, Artificial Sequence
  Description of Artificial Sequence: Synthetic oligonucleotide
  Sense strand starting at position 2533 of SEQ ID NO: 1888976
aagaguugcuaaguuugga

SEQ ID NO: 2570301 - RNA, 19 nt, Artificial Sequence
  Description of Artificial Sequence: Synthetic oligonucleotide
  Antisense strand to SEQ ID NO: 2570300
uccaaacuuagcaacucuu

SEQ ID NO: 2570302 - RNA, 19 nt, Artificial Sequence
  Description of Artificial Sequence: Synthetic oligonucleotide
  Sense strand starting at position 2543 of SEQ ID NO: 1888976
aaguuuggaaggugaugau

SEQ ID NO: 2570303 - RNA, 19 nt, Artificial Sequence
  Description of Artificial Sequence: Synthetic oligonucleotide
  Antisense strand to SEQ ID NO: 2570302
aucaucaccuuccaaacuu

SEQ ID NO: 2570304 - RNA, 19 nt, Artificial Sequence
  Description of Artificial Sequence: Synthetic oligonucleotide
  Sense strand starting at position 2595 of SEQ ID NO: 1888976
cagggcuuugcugugugua

SEQ ID NO: 2570305 - RNA, 19 nt, Artificial Sequence
  Description of Artificial Sequence: Synthetic oligonucleotide
  Antisense strand to SEQ ID NO: 2570304
uacacacagcaaagcccug

SEQ ID NO: 2570306 - RNA, 19 nt, Artificial Sequence
  Description of Artificial Sequence: Synthetic oligonucleotide
  Sense strand starting at position 2824 of SEQ ID NO: 1888976
gaacacagugccugacuua

SEQ ID NO: 2570307 - RNA, 19 nt, Artificial Sequence
  Description of Artificial Sequence: Synthetic oligonucleotide
  Antisense strand to SEQ ID NO: 2570306
uaagucaggcacuguguuc

SEQ ID NO: 2570308 - RNA, 19 nt, Artificial Sequence
  Description of Artificial Sequence: Synthetic oligonucleotide
  Sense strand starting at position 2900 of SEQ ID NO: 1888976
ggcuucuaguaauuucuuu

SEQ ID NO: 2570309 - RNA, 19 nt, Artificial Sequence
  Description of Artificial Sequence: Synthetic oligonucleotide
  Antisense strand to SEQ ID NO: 2570308
aaagaaauuacuagaagcc

SEQ ID NO: 2570310 - RNA, 19 nt, Artificial Sequence
  Description of Artificial Sequence: Synthetic oligonucleotide
  Sense strand starting at position 3070 of SEQ ID NO: 1888976
gcaacagaguagguugauu

SEQ ID NO: 2570311 - RNA, 19 nt, Artificial Sequence
  Description of Artificial Sequence: Synthetic oligonucleotide
  Antisense strand to SEQ ID NO: 2570310
aaucaaccuacucuguugc

SEQ ID NO: 2570312 - RNA, 19 nt, Artificial Sequence
  Description of Artificial Sequence: Synthetic oligonucleotide
  Sense strand starting at position 3218 of SEQ ID NO: 1888976
agaggugaguaagccuuaa

SEQ ID NO: 2570313 - RNA, 19 nt, Artificial Sequence
  Description of Artificial Sequence: Synthetic oligonucleotide
  Antisense strand to SEQ ID NO: 2570312
uuaaggcuuacucaccucu

SEQ ID NO: 2570314 - RNA, 19 nt, Artificial Sequence
  Description of Artificial Sequence: Synthetic oligonucleotide
  Sense strand starting at position 3222 of SEQ ID NO: 1888976
gugaguaagccuuaagggu

SEQ ID NO: 2570315 - RNA, 19 nt, Artificial Sequence
  Description of Artificial Sequence: Synthetic oligonucleotide
  Antisense strand to SEQ ID NO: 2570314
acccuuaaggcuuacucac

SEQ ID NO: 2570316 - RNA, 19 nt, Artificial Sequence
  Description of Artificial Sequence: Synthetic oligonucleotide
  Sense strand starting at position 3406 of SEQ ID NO: 1888976
agcagaugguugguauaga

SEQ ID NO: 2570317 - RNA, 19 nt, Artificial Sequence
  Description of Artificial Sequence: Synthetic oligonucleotide
  Antisense strand to SEQ ID NO: 2570316
ucuauaccaaccaucugcu

SEQ ID NO: 2570318 - RNA, 19 nt, Artificial Sequence
  Description of Artificial Sequence: Synthetic oligonucleotide
  Sense strand starting at position 3540 of SEQ ID NO: 1888976
aauugcucccaaugaggua

SEQ ID NO: 2570319 - RNA, 19 nt, Artificial Sequence
  Description of Artificial Sequence: Synthetic oligonucleotide
  Antisense strand to SEQ ID NO: 2570318
uaccucauugggagcaauu

SEQ ID NO: 2570320 - RNA, 19 nt, Artificial Sequence
  Description of Artificial Sequence: Synthetic oligonucleotide
  Sense strand starting at position 3685 of SEQ ID NO: 1888976
uuaaacugugaaugucaau

SEQ ID NO: 2570321 - RNA, 19 nt, Artificial Sequence
  Description of Artificial Sequence: Synthetic oligonucleotide
  Antisense strand to SEQ ID NO: 2570320
auugacauucacaguuuaa

SEQ ID NO: 2570322 - RNA, 19 nt, Artificial Sequence
  Description of Artificial Sequence: Synthetic oligonucleotide
  Sense strand starting at position 3698 of SEQ ID NO: 1888976
gucaaugaagccuagugaa

SEQ ID NO: 2570323 - RNA, 19 nt, Artificial Sequence
  Description of Artificial Sequence: Synthetic oligonucleotide
  Antisense strand to SEQ ID NO: 2570322
uucacuaggcuucauugac

SEQ ID NO: 2570324 - RNA, 19 nt, Artificial Sequence
  Description of Artificial Sequence: Synthetic oligonucleotide
  Sense strand starting at position 3705 of SEQ ID NO: 1888976
aagccuagugaagauguau

SEQ ID NO: 2570325 - RNA, 19 nt, Artificial Sequence
  Description of Artificial Sequence: Synthetic oligonucleotide
  Antisense strand to SEQ ID NO: 2570324
auacaucuucacuaggcuu

SEQ ID NO: 2570326 - RNA, 19 nt, Artificial Sequence
  Description of Artificial Sequence: Synthetic oligonucleotide
  Sense strand starting at position 3846 of SEQ ID NO: 1888976
caaguaucuguaggcauuu

SEQ ID NO: 2570327 - RNA, 19 nt, Artificial Sequence
  Description of Artificial Sequence: Synthetic oligonucleotide
  Antisense strand to SEQ ID NO: 2570326
aaaugccuacagauacuug

SEQ ID NO: 2570328 - RNA, 19 nt, Artificial Sequence
  Description of Artificial Sequence: Synthetic oligonucleotide
  Sense strand starting at position 3855 of SEQ ID NO: 1888976
guaggcauuuccuuacagu

SEQ ID NO: 2570329 - RNA, 19 nt, Artificial Sequence
  Description of Artificial Sequence: Synthetic oligonucleotide
  Antisense strand to SEQ ID NO: 2570328
acuguaaggaaaugccuac

SEQ ID NO: 2570330 - RNA, 19 nt, Artificial Sequence
  Description of Artificial Sequence: Synthetic oligonucleotide
  Sense strand starting at position 57 of SEQ ID NO: 1888977
cagaguaauugccucaaug

SEQ ID NO: 2570331 - RNA, 19 nt, Artificial Sequence
  Description of Artificial Sequence: Synthetic oligonucleotide
  Antisense strand to SEQ ID NO: 2570330
cauugaggcaauuacucug

SEQ ID NO: 2570332 - RNA, 19 nt, Artificial Sequence
  Description of Artificial Sequence: Synthetic oligonucleotide
  Sense strand starting at position 71 of SEQ ID NO: 1888977
caaugaacuguugguauca

SEQ ID NO: 2570333 - RNA, 19 nt, Artificial Sequence
  Description of Artificial Sequence: Synthetic oligonucleotide
  Antisense strand to SEQ ID NO: 2570332
ugauaccaacaguucauug

SEQ ID NO: 2570334 - RNA, 19 nt, Artificial Sequence
  Description of Artificial Sequence: Synthetic oligonucleotide
  Sense strand starting at position 72 of SEQ ID NO: 1888977
aaugaacuguugguaucau

SEQ ID NO: 2570335 - RNA, 19 nt, Artificial Sequence
  Description of Artificial Sequence: Synthetic oligonucleotide
  Antisense strand to SEQ ID NO: 2570334
augauaccaacaguucauu

SEQ ID NO: 2570336 - RNA, 19 nt, Artificial Sequence
  Description of Artificial Sequence: Synthetic oligonucleotide
  Sense strand starting at position 156 of SEQ ID NO: 1888977
ugcgcaagacgagaucuua

SEQ ID NO: 2570337 - RNA, 19 nt, Artificial Sequence
  Description of Artificial Sequence: Synthetic oligonucleotide
  Antisense strand to SEQ ID NO: 2570336
uaagaucucgucuugcgca

SEQ ID NO: 2570338 - RNA, 19 nt, Artificial Sequence
  Description of Artificial Sequence: Synthetic oligonucleotide
  Sense strand starting at position 164 of SEQ ID NO: 1888977
acgagaucuuauuauuuga

SEQ ID NO: 2570339 - RNA, 19 nt, Artificial Sequence
  Description of Artificial Sequence: Synthetic oligonucleotide
  Antisense strand to SEQ ID NO: 2570338
ucaaauaauaagaucucgu

SEQ ID NO: 2570340 - RNA, 19 nt, Artificial Sequence
  Description of Artificial Sequence: Synthetic oligonucleotide
  Sense strand starting at position 171 of SEQ ID NO: 1888977
cuuauuauuugagaaguug

SEQ ID NO: 2570341 - RNA, 19 nt, Artificial Sequence
  Description of Artificial Sequence: Synthetic oligonucleotide
  Antisense strand to SEQ ID NO: 2570340
caacuucucaaauaauaag

SEQ ID NO: 2570342 - RNA, 19 nt, Artificial Sequence
  Description of Artificial Sequence: Synthetic oligonucleotide
  Sense strand starting at position 380 of SEQ ID NO: 1888977
caucaauagcuguguagag

SEQ ID NO: 2570343 - RNA, 19 nt, Artificial Sequence
  Description of Artificial Sequence: Synthetic oligonucleotide
  Antisense strand to SEQ ID NO: 2570342
cucuacacagcuauugaug

SEQ ID NO: 2570344 - RNA, 19 nt, Artificial Sequence
  Description of Artificial Sequence: Synthetic oligonucleotide
  Sense strand starting at position 525 of SEQ ID NO: 1888977
gcugcaucaguugaagaug

SEQ ID NO: 2570345 - RNA, 19 nt, Artificial Sequence
  Description of Artificial Sequence: Synthetic oligonucleotide
  Antisense strand to SEQ ID NO: 2570344
caucuucaacugaugcagc

SEQ ID NO: 2570346 - RNA, 19 nt, Artificial Sequence
  Description of Artificial Sequence: Synthetic oligonucleotide
  Sense strand starting at position 575 of SEQ ID NO: 1888977
cccaucuuucucggaaaga

SEQ ID NO: 2570347 - RNA, 19 nt, Artificial Sequence
  Description of Artificial Sequence: Synthetic oligonucleotide
  Antisense strand to SEQ ID NO: 2570346
ucuuuccgagaaagauggg

SEQ ID NO: 2570348 - RNA, 19 nt, Artificial Sequence
  Description of Artificial Sequence: Synthetic oligonucleotide
  Sense strand starting at position 715 of SEQ ID NO: 1888977
gaacaucucuggucuggua

SEQ ID NO: 2570349 - RNA, 19 nt, Artificial Sequence
  Description of Artificial Sequence: Synthetic oligonucleotide
  Antisense strand to SEQ ID NO: 2570348
uaccagaccagagauguuc

SEQ ID NO: 2570350 - RNA, 19 nt, Artificial Sequence
  Description of Artificial Sequence: Synthetic oligonucleotide
  Sense strand starting at position 717 of SEQ ID NO: 1888977
acaucucuggucugguaua

SEQ ID NO: 2570351 - RNA, 19 nt, Artificial Sequence
  Description of Artificial Sequence: Synthetic oligonucleotide
  Antisense strand to SEQ ID NO: 2570350
uauaccagaccagagaugu

SEQ ID NO: 2570352 - RNA, 19 nt, Artificial Sequence
  Description of Artificial Sequence: Synthetic oligonucleotide
  Sense strand starting at position 1840 of SEQ ID NO: 1888977
uacaacuuugucugaugga

SEQ ID NO: 2570353 - RNA, 19 nt, Artificial Sequence
  Description of Artificial Sequence: Synthetic oligonucleotide
  Antisense strand to SEQ ID NO: 2570352
uccaucagacaaaguugua

SEQ ID NO: 2570354 - RNA, 19 nt, Artificial Sequence
  Description of Artificial Sequence: Synthetic oligonucleotide
  Sense strand starting at position 1867 of SEQ ID NO: 1888977
ugcuaagacuaagugugaa

SEQ ID NO: 2570355 - RNA, 19 nt, Artificial Sequence
  Description of Artificial Sequence: Synthetic oligonucleotide
  Antisense strand to SEQ ID NO: 2570354
uucacacuuagucuuagca

SEQ ID NO: 2570356 - RNA, 19 nt, Artificial Sequence
  Description of Artificial Sequence: Synthetic oligonucleotide
  Sense strand starting at position 1870 of SEQ ID NO: 1888977
uaagacuaagugugaauau

SEQ ID NO: 2570357 - RNA, 19 nt, Artificial Sequence
  Description of Artificial Sequence: Synthetic oligonucleotide
  Antisense strand to SEQ ID NO: 2570356
auauucacacuuagucuua

SEQ ID NO: 2570358 - RNA, 19 nt, Artificial Sequence
  Description of Artificial Sequence: Synthetic oligonucleotide
  Sense strand starting at position 1881 of SEQ ID NO: 1888977
gugaauaugccacacacca

SEQ ID NO: 2570359 - RNA, 19 nt, Artificial Sequence
  Description of Artificial Sequence: Synthetic oligonucleotide
  Antisense strand to SEQ ID NO: 2570358
ugguguguggcauauucac

SEQ ID NO: 2570360 - RNA, 19 nt, Artificial Sequence
  Description of Artificial Sequence: Synthetic oligonucleotide
  Sense strand starting at position 1988 of SEQ ID NO: 1888977
ugagcagaauccucuaaua

SEQ ID NO: 2570361 - RNA, 19 nt, Artificial Sequence
  Description of Artificial Sequence: Synthetic oligonucleotide
  Antisense strand to SEQ ID NO: 2570360
uauuagaggauucugcuca

SEQ ID NO: 2570362 - RNA, 19 nt, Artificial Sequence
  Description of Artificial Sequence: Synthetic oligonucleotide
  Sense strand starting at position 2120 of SEQ ID NO: 1888977
caggcuuugguacaaucau

SEQ ID NO: 2570363 - RNA, 19 nt, Artificial Sequence
  Description of Artificial Sequence: Synthetic oligonucleotide
  Antisense strand to SEQ ID NO: 2570362
augauuguaccaaagccug

SEQ ID NO: 2570364 - RNA, 19 nt, Artificial Sequence
  Description of Artificial Sequence: Synthetic oligonucleotide
  Sense strand starting at position 2255 of SEQ ID NO: 1888977
gcuacugaccauuguuaag

SEQ ID NO: 2570365 - RNA, 19 nt, Artificial Sequence
  Description of Artificial Sequence: Synthetic oligonucleotide
  Antisense strand to SEQ ID NO: 2570364
cuuaacaauggucaguagc

SEQ ID NO: 2570366 - RNA, 19 nt, Artificial Sequence
  Description of Artificial Sequence: Synthetic oligonucleotide
  Sense strand starting at position 2269 of SEQ ID NO: 1888977
uuaagaagaucagagggaa

SEQ ID NO: 2570367 - RNA, 19 nt, Artificial Sequence
  Description of Artificial Sequence: Synthetic oligonucleotide
  Antisense strand to SEQ ID NO: 2570366
uucccucugaucuucuuaa

SEQ ID NO: 2570368 - RNA, 19 nt, Artificial Sequence
  Description of Artificial Sequence: Synthetic oligonucleotide
  Sense strand starting at position 2606 of SEQ ID NO: 1888977
uucguuuccacagaggacu

SEQ ID NO: 2570369 - RNA, 19 nt, Artificial Sequence
  Description of Artificial Sequence: Synthetic oligonucleotide
  Antisense strand to SEQ ID NO: 2570368
aguccucuguggaaacgaa

SEQ ID NO: 2570370 - RNA, 19 nt, Artificial Sequence
  Description of Artificial Sequence: Synthetic oligonucleotide
  Sense strand starting at position 2669 of SEQ ID NO: 1888977
caccaugguggucaucaaa

SEQ ID NO: 2570371 - RNA, 19 nt, Artificial Sequence
  Description of Artificial Sequence: Synthetic oligonucleotide
  Antisense strand to SEQ ID NO: 2570370
uuugaugaccaccauggug

SEQ ID NO: 2570372 - RNA, 19 nt, Artificial Sequence
  Description of Artificial Sequence: Synthetic oligonucleotide
  Sense strand starting at position 2734 of SEQ ID NO: 1888977
cagaguugcagucaggaaa

SEQ ID NO: 2570373 - RNA, 19 nt, Artificial Sequence
  Description of Artificial Sequence: Synthetic oligonucleotide
  Antisense strand to SEQ ID NO: 2570372
uuuccugacugcaacucug

SEQ ID NO: 2570374 - RNA, 19 nt, Artificial Sequence
  Description of Artificial Sequence: Synthetic oligonucleotide
  Sense strand starting at position 2737 of SEQ ID NO: 1888977
aguugcagucaggaaauga

SEQ ID NO: 2570375 - RNA, 19 nt, Artificial Sequence
  Description of Artificial Sequence: Synthetic oligonucleotide
  Antisense strand to SEQ ID NO: 2570374
ucauuuccugacugcaacu

SEQ ID NO: 2570376 - RNA, 19 nt, Artificial Sequence
  Description of Artificial Sequence: Synthetic oligonucleotide
  Sense strand starting at position 2860 of SEQ ID NO: 1888977
gacaguagacuguauaguu

SEQ ID NO: 2570377 - RNA, 19 nt, Artificial Sequence
  Description of Artificial Sequence: Synthetic oligonucleotide
  Antisense strand to SEQ ID NO: 2570376
aacuauacagucuacuguc

SEQ ID NO: 2570378 - RNA, 19 nt, Artificial Sequence
  Description of Artificial Sequence: Synthetic oligonucleotide
  Sense strand starting at position 2868 of SEQ ID NO: 1888977
acuguauaguuaucuccaa

SEQ ID NO: 2570379 - RNA, 19 nt, Artificial Sequence
  Description of Artificial Sequence: Synthetic oligonucleotide
  Antisense strand to SEQ ID NO: 2570378
uuggagauaacuauacagu

SEQ ID NO: 2570380 - RNA, 19 nt, Artificial Sequence
  Description of Artificial Sequence: Synthetic oligonucleotide
  Sense strand starting at position 2996 of SEQ ID NO: 1888977
gcaaccaauugauuaguaa

SEQ ID NO: 2570381 - RNA, 19 nt, Artificial Sequence
  Description of Artificial Sequence: Synthetic oligonucleotide
  Antisense strand to SEQ ID NO: 2570380
uuacuaaucaauugguugc

SEQ ID NO: 2570382 - RNA, 19 nt, Artificial Sequence
  Description of Artificial Sequence: Synthetic oligonucleotide
  Sense strand starting at position 3137 of SEQ ID NO: 1888977
agaggucaacuguaauagu

SEQ ID NO: 2570383 - RNA, 19 nt, Artificial Sequence
  Description of Artificial Sequence: Synthetic oligonucleotide
  Antisense strand to SEQ ID NO: 2570382
acuauuacaguugaccucu

SEQ ID NO: 2570384 - RNA, 19 nt, Artificial Sequence
  Description of Artificial Sequence: Synthetic oligonucleotide
  Sense strand starting at position 3146 of SEQ ID NO: 1888977
cuguaauagucaccauccu

SEQ ID NO: 2570385 - RNA, 19 nt, Artificial Sequence
  Description of Artificial Sequence: Synthetic oligonucleotide
  Antisense strand to SEQ ID NO: 2570384
aggauggugacuauuacag

SEQ ID NO: 2570386 - RNA, 19 nt, Artificial Sequence
  Description of Artificial Sequence: Synthetic oligonucleotide
  Sense strand starting at position 3181 of SEQ ID NO: 1888977
ggaguucagugaucuaaug

SEQ ID NO: 2570387 - RNA, 19 nt, Artificial Sequence
  Description of Artificial Sequence: Synthetic oligonucleotide
  Antisense strand to SEQ ID NO: 2570386
cauuagaucacugaacucc

SEQ ID NO: 2570388 - RNA, 19 nt, Artificial Sequence
  Description of Artificial Sequence: Synthetic oligonucleotide
  Sense strand starting at position 3346 of SEQ ID NO: 1888977
uagggaugggcacgaucau

SEQ ID NO: 2570389 - RNA, 19 nt, Artificial Sequence
  Description of Artificial Sequence: Synthetic oligonucleotide
  Antisense strand to SEQ ID NO: 2570388
augaucgugcccaucccua

SEQ ID NO: 2570390 - RNA, 19 nt, Artificial Sequence
  Description of Artificial Sequence: Synthetic oligonucleotide
  Sense strand starting at position 3353 of SEQ ID NO: 1888977
gggcacgaucaugaucauu

SEQ ID NO: 2570391 - RNA, 19 nt, Artificial Sequence
  Description of Artificial Sequence: Synthetic oligonucleotide
  Antisense strand to SEQ ID NO: 2570390
aaugaucaugaucgugccc

SEQ ID NO: 2570392 - RNA, 19 nt, Artificial Sequence
  Description of Artificial Sequence: Synthetic oligonucleotide
  Sense strand starting at position 3496 of SEQ ID NO: 1888977
uugaaacaauguguguauu

SEQ ID NO: 2570393 - RNA, 19 nt, Artificial Sequence
  Description of Artificial Sequence: Synthetic oligonucleotide
  Antisense strand to SEQ ID NO: 2570392
aauacacacauuguuucaa

SEQ ID NO: 2570394 - RNA, 19 nt, Artificial Sequence
  Description of Artificial Sequence: Synthetic oligonucleotide
  Sense strand starting at position 3497 of SEQ ID NO: 1888977
ugaaacaauguguguauua

SEQ ID NO: 2570395 - RNA, 19 nt, Artificial Sequence
  Description of Artificial Sequence: Synthetic oligonucleotide
  Antisense strand to SEQ ID NO: 2570394
uaauacacacauuguuuca

SEQ ID NO: 2570396 - RNA, 19 nt, Artificial Sequence
  Description of Artificial Sequence: Synthetic oligonucleotide
  Sense strand starting at position 3498 of SEQ ID NO: 1888977
gaaacaauguguguauuag

SEQ ID NO: 2570397 - RNA, 19 nt, Artificial Sequence
  Description of Artificial Sequence: Synthetic oligonucleotide
  Antisense strand to SEQ ID NO: 2570396
cuaauacacacauuguuuc

SEQ ID NO: 2570398 - RNA, 19 nt, Artificial Sequence
  Description of Artificial Sequence: Synthetic oligonucleotide
  Sense strand starting at position 3535 of SEQ ID NO: 1888977
agauauuuguuagaucaac

SEQ ID NO: 2570399 - RNA, 19 nt, Artificial Sequence
  Description of Artificial Sequence: Synthetic oligonucleotide
  Antisense strand to SEQ ID NO: 2570398
guugaucuaacaaauaucu

SEQ ID NO: 2570400 - RNA, 19 nt, Artificial Sequence
  Description of Artificial Sequence: Synthetic oligonucleotide
  Sense strand starting at position 3613 of SEQ ID NO: 1888977
ugcugaguaggguauacua

SEQ ID NO: 2570401 - RNA, 19 nt, Artificial Sequence
  Description of Artificial Sequence: Synthetic oligonucleotide
  Antisense strand to SEQ ID NO: 2570400
uaguauacccuacucagca

SEQ ID NO: 2570402 - RNA, 19 nt, Artificial Sequence
  Description of Artificial Sequence: Synthetic oligonucleotide
  Sense strand starting at position 3695 of SEQ ID NO: 1888977
agugauacacuguaaugua

SEQ ID NO: 2570403 - RNA, 19 nt, Artificial Sequence
  Description of Artificial Sequence: Synthetic oligonucleotide
  Antisense strand to SEQ ID NO: 2570402
uacauuacaguguaucacu

SEQ ID NO: 2570404 - RNA, 19 nt, Artificial Sequence
  Description of Artificial Sequence: Synthetic oligonucleotide
  Sense strand starting at position 3744 of SEQ ID NO: 1888977
aaagaucucugucugaggu

SEQ ID NO: 2570405 - RNA, 19 nt, Artificial Sequence
  Description of Artificial Sequence: Synthetic oligonucleotide
  Antisense strand to SEQ ID NO: 2570404
accucagacagagaucuuu

SEQ ID NO: 2570406 - RNA, 19 nt, Artificial Sequence
  Description of Artificial Sequence: Synthetic oligonucleotide
  Sense strand starting at position 3783 of SEQ ID NO: 1888977
guagguaacuuccuucuaa

SEQ ID NO: 2570407 - RNA, 19 nt, Artificial Sequence
  Description of Artificial Sequence: Synthetic oligonucleotide
  Antisense strand to SEQ ID NO: 2570406
uuagaaggaaguuaccuac

SEQ ID NO: 2570408 - RNA, 19 nt, Artificial Sequence
  Description of Artificial Sequence: Synthetic oligonucleotide
  Sense strand starting at position 3929 of SEQ ID NO: 1888977
gggucaucucgguaagauu

SEQ ID NO: 2570409 - RNA, 19 nt, Artificial Sequence
  Description of Artificial Sequence: Synthetic oligonucleotide
  Antisense strand to SEQ ID NO: 2570408
aaucuuaccgagaugaccc

SEQ ID NO: 2570410 - RNA, 19 nt, Artificial Sequence
  Description of Artificial Sequence: Synthetic oligonucleotide
  Sense strand starting at position 907 of SEQ ID NO: 1888978
uacaacuuugucugaugga

SEQ ID NO: 2570411 - RNA, 19 nt, Artificial Sequence
  Description of Artificial Sequence: Synthetic oligonucleotide
  Antisense strand to SEQ ID NO: 2570410
uccaucagacaaaguugua

SEQ ID NO: 2570412 - RNA, 19 nt, Artificial Sequence
  Description of Artificial Sequence: Synthetic oligonucleotide
  Sense strand starting at position 934 of SEQ ID NO: 1888978
ugcuaagacuaagugugaa

SEQ ID NO: 2570413 - RNA, 19 nt, Artificial Sequence
  Description of Artificial Sequence: Synthetic oligonucleotide
  Antisense strand to SEQ ID NO: 2570412
uucacacuuagucuuagca

SEQ ID NO: 2570414 - RNA, 19 nt, Artificial Sequence
  Description of Artificial Sequence: Synthetic oligonucleotide
  Sense strand starting at position 937 of SEQ ID NO: 1888978
uaagacuaagugugaauau

SEQ ID NO: 2570415 - RNA, 19 nt, Artificial Sequence
  Description of Artificial Sequence: Synthetic oligonucleotide
  Antisense strand to SEQ ID NO: 2570414
auauucacacuuagucuua

SEQ ID NO: 2570416 - RNA, 19 nt, Artificial Sequence
  Description of Artificial Sequence: Synthetic oligonucleotide
  Sense strand starting at position 948 of SEQ ID NO: 1888978
gugaauaugccacacacca

SEQ ID NO: 2570417 - RNA, 19 nt, Artificial Sequence
  Description of Artificial Sequence: Synthetic oligonucleotide
  Antisense strand to SEQ ID NO: 2570416
ugguguguggcauauucac

SEQ ID NO: 2570418 - RNA, 19 nt, Artificial Sequence
  Description of Artificial Sequence: Synthetic oligonucleotide
  Sense strand starting at position 1055 of SEQ ID NO: 1888978
ugagcagaauccucuaaua

SEQ ID NO: 2570419 - RNA, 19 nt, Artificial Sequence
  Description of Artificial Sequence: Synthetic oligonucleotide
  Antisense strand to SEQ ID NO: 2570418
uauuagaggauucugcuca

SEQ ID NO: 2570420 - RNA, 19 nt, Artificial Sequence
  Description of Artificial Sequence: Synthetic oligonucleotide
  Sense strand starting at position 1187 of SEQ ID NO: 1888978
caggcuuugguacaaucau

SEQ ID NO: 2570421 - RNA, 19 nt, Artificial Sequence
  Description of Artificial Sequence: Synthetic oligonucleotide
  Antisense strand to SEQ ID NO: 2570420
augauuguaccaaagccug

SEQ ID NO: 2570422 - RNA, 19 nt, Artificial Sequence
  Description of Artificial Sequence: Synthetic oligonucleotide
  Sense strand starting at position 1322 of SEQ ID NO: 1888978
gcuacugaccauuguuaag

SEQ ID NO: 2570423 - RNA, 19 nt, Artificial Sequence
  Description of Artificial Sequence: Synthetic oligonucleotide
  Antisense strand to SEQ ID NO: 2570422
cuuaacaauggucaguagc

SEQ ID NO: 2570424 - RNA, 19 nt, Artificial Sequence
  Description of Artificial Sequence: Synthetic oligonucleotide
  Sense strand starting at position 1336 of SEQ ID NO: 1888978
uuaagaagaucagagggaa

SEQ ID NO: 2570425 - RNA, 19 nt, Artificial Sequence
  Description of Artificial Sequence: Synthetic oligonucleotide
  Antisense strand to SEQ ID NO: 2570424
uucccucugaucuucuuaa

SEQ ID NO: 2570426 - RNA, 19 nt, Artificial Sequence
  Description of Artificial Sequence: Synthetic oligonucleotide
  Sense strand starting at position 1673 of SEQ ID NO: 1888978
uucguuuccacagaggacu

SEQ ID NO: 2570427 - RNA, 19 nt, Artificial Sequence
  Description of Artificial Sequence: Synthetic oligonucleotide
  Antisense strand to SEQ ID NO: 2570426
aguccucuguggaaacgaa

SEQ ID NO: 2570428 - RNA, 19 nt, Artificial Sequence
  Description of Artificial Sequence: Synthetic oligonucleotide
  Sense strand starting at position 1736 of SEQ ID NO: 1888978
caccaugguggucaucaaa

SEQ ID NO: 2570429 - RNA, 19 nt, Artificial Sequence
  Description of Artificial Sequence: Synthetic oligonucleotide
  Antisense strand to SEQ ID NO: 2570428
uuugaugaccaccauggug

SEQ ID NO: 2570430 - RNA, 19 nt, Artificial Sequence
  Description of Artificial Sequence: Synthetic oligonucleotide
  Sense strand starting at position 1801 of SEQ ID NO: 1888978
cagaguugcagucaggaaa

SEQ ID NO: 2570431 - RNA, 19 nt, Artificial Sequence
  Description of Artificial Sequence: Synthetic oligonucleotide
  Antisense strand to SEQ ID NO: 2570430
uuuccugacugcaacucug

SEQ ID NO: 2570432 - RNA, 19 nt, Artificial Sequence
  Description of Artificial Sequence: Synthetic oligonucleotide
  Sense strand starting at position 1804 of SEQ ID NO: 1888978
aguugcagucaggaaauga

SEQ ID NO: 2570433 - RNA, 19 nt, Artificial Sequence
  Description of Artificial Sequence: Synthetic oligonucleotide
  Antisense strand to SEQ ID NO: 2570432
ucauuuccugacugcaacu

SEQ ID NO: 2570434 - RNA, 19 nt, Artificial Sequence
  Description of Artificial Sequence: Synthetic oligonucleotide
  Sense strand starting at position 1927 of SEQ ID NO: 1888978
gacaguagacuguauaguu

SEQ ID NO: 2570435 - RNA, 19 nt, Artificial Sequence
  Description of Artificial Sequence: Synthetic oligonucleotide
  Antisense strand to SEQ ID NO: 2570434
aacuauacagucuacuguc

SEQ ID NO: 2570436 - RNA, 19 nt, Artificial Sequence
  Description of Artificial Sequence: Synthetic oligonucleotide
  Sense strand starting at position 1935 of SEQ ID NO: 1888978
acuguauaguuaucuccaa

SEQ ID NO: 2570437 - RNA, 19 nt, Artificial Sequence
  Description of Artificial Sequence: Synthetic oligonucleotide
  Antisense strand to SEQ ID NO: 2570436
uuggagauaacuauacagu

SEQ ID NO: 2570438 - RNA, 19 nt, Artificial Sequence
  Description of Artificial Sequence: Synthetic oligonucleotide
  Sense strand starting at position 2063 of SEQ ID NO: 1888978
gcaaccaauugauuaguaa

SEQ ID NO: 2570439 - RNA, 19 nt, Artificial Sequence
  Description of Artificial Sequence: Synthetic oligonucleotide
  Antisense strand to SEQ ID NO: 2570438
uuacuaaucaauugguugc

SEQ ID NO: 2570440 - RNA, 19 nt, Artificial Sequence
  Description of Artificial Sequence: Synthetic oligonucleotide
  Sense strand starting at position 2113 of SEQ ID NO: 1888978
agauucuguucaguggagu

SEQ ID NO: 2570441 - RNA, 19 nt, Artificial Sequence
  Description of Artificial Sequence: Synthetic oligonucleotide
  Antisense strand to SEQ ID NO: 2570440
acuccacugaacagaaucu

SEQ ID NO: 2570442 - RNA, 19 nt, Artificial Sequence
  Description of Artificial Sequence: Synthetic oligonucleotide
  Sense strand starting at position 2204 of SEQ ID NO: 1888978
agaggucaacuguaauagu

SEQ ID NO: 2570443 - RNA, 19 nt, Artificial Sequence
  Description of Artificial Sequence: Synthetic oligonucleotide
  Antisense strand to SEQ ID NO: 2570442
acuauuacaguugaccucu

SEQ ID NO: 2570444 - RNA, 19 nt, Artificial Sequence
  Description of Artificial Sequence: Synthetic oligonucleotide
  Sense strand starting at position 2213 of SEQ ID NO: 1888978
cuguaauagucaccauccu

SEQ ID NO: 2570445 - RNA, 19 nt, Artificial Sequence
  Description of Artificial Sequence: Synthetic oligonucleotide
  Antisense strand to SEQ ID NO: 2570444
aggauggugacuauuacag

SEQ ID NO: 2570446 - RNA, 19 nt, Artificial Sequence
  Description of Artificial Sequence: Synthetic oligonucleotide
  Sense strand starting at position 2248 of SEQ ID NO: 1888978
ggaguucagugaucuaaug

SEQ ID NO: 2570447 - RNA, 19 nt, Artificial Sequence
  Description of Artificial Sequence: Synthetic oligonucleotide
  Antisense strand to SEQ ID NO: 2570446
cauuagaucacugaacucc

SEQ ID NO: 2570448 - RNA, 19 nt, Artificial Sequence
  Description of Artificial Sequence: Synthetic oligonucleotide
  Sense strand starting at position 2265 of SEQ ID NO: 1888978
uggagaaugcuuuggccau

SEQ ID NO: 2570449 - RNA, 19 nt, Artificial Sequence
  Description of Artificial Sequence: Synthetic oligonucleotide
  Antisense strand to SEQ ID NO: 2570448
auggccaaagcauucucca

SEQ ID NO: 2570450 - RNA, 19 nt, Artificial Sequence
  Description of Artificial Sequence: Synthetic oligonucleotide
  Sense strand starting at position 2413 of SEQ ID NO: 1888978
uagggaugggcacgaucau

SEQ ID NO: 2570451 - RNA, 19 nt, Artificial Sequence
  Description of Artificial Sequence: Synthetic oligonucleotide
  Antisense strand to SEQ ID NO: 2570450
augaucgugcccaucccua

SEQ ID NO: 2570452 - RNA, 19 nt, Artificial Sequence
  Description of Artificial Sequence: Synthetic oligonucleotide
  Sense strand starting at position 2420 of SEQ ID NO: 1888978
gggcacgaucaugaucauu

SEQ ID NO: 2570453 - RNA, 19 nt, Artificial Sequence
  Description of Artificial Sequence: Synthetic oligonucleotide
  Antisense strand to SEQ ID NO: 2570452
aaugaucaugaucgugccc

SEQ ID NO: 2570454 - RNA, 19 nt, Artificial Sequence
  Description of Artificial Sequence: Synthetic oligonucleotide
  Sense strand starting at position 2422 of SEQ ID NO: 1888978
gcacgaucaugaucauucu

SEQ ID NO: 2570455 - RNA, 19 nt, Artificial Sequence
  Description of Artificial Sequence: Synthetic oligonucleotide
  Antisense strand to SEQ ID NO: 2570454
agaaugaucaugaucgugc

SEQ ID NO: 2570456 - RNA, 19 nt, Artificial Sequence
  Description of Artificial Sequence: Synthetic oligonucleotide
  Sense strand starting at position 2563 of SEQ ID NO: 1888978
uugaaacaauguguguauu

SEQ ID NO: 2570457 - RNA, 19 nt, Artificial Sequence
  Description of Artificial Sequence: Synthetic oligonucleotide
  Antisense strand to SEQ ID NO: 2570456
aauacacacauuguuucaa

SEQ ID NO: 2570458 - RNA, 19 nt, Artificial Sequence
  Description of Artificial Sequence: Synthetic oligonucleotide
  Sense strand starting at position 2564 of SEQ ID NO: 1888978
ugaaacaauguguguauua

SEQ ID NO: 2570459 - RNA, 19 nt, Artificial Sequence
  Description of Artificial Sequence: Synthetic oligonucleotide
  Antisense strand to SEQ ID NO: 2570458
uaauacacacauuguuuca

SEQ ID NO: 2570460 - RNA, 19 nt, Artificial Sequence
  Description of Artificial Sequence: Synthetic oligonucleotide
  Sense strand starting at position 2565 of SEQ ID NO: 1888978
gaaacaauguguguauuag

SEQ ID NO: 2570461 - RNA, 19 nt, Artificial Sequence
  Description of Artificial Sequence: Synthetic oligonucleotide
  Antisense strand to SEQ ID NO: 2570460
cuaauacacacauuguuuc

SEQ ID NO: 2570462 - RNA, 19 nt, Artificial Sequence
  Description of Artificial Sequence: Synthetic oligonucleotide
  Sense strand starting at position 2602 of SEQ ID NO: 1888978
agauauuuguuagaucaac

SEQ ID NO: 2570463 - RNA, 19 nt, Artificial Sequence
  Description of Artificial Sequence: Synthetic oligonucleotide
  Antisense strand to SEQ ID NO: 2570462
guugaucuaacaaauaucu

SEQ ID NO: 2570464 - RNA, 19 nt, Artificial Sequence
  Description of Artificial Sequence: Synthetic oligonucleotide
  Sense strand starting at position 2680 of SEQ ID NO: 1888978
ugcugaguaggguauacua

SEQ ID NO: 2570465 - RNA, 19 nt, Artificial Sequence
  Description of Artificial Sequence: Synthetic oligonucleotide
  Antisense strand to SEQ ID NO: 2570464
uaguauacccuacucagca

SEQ ID NO: 2570466 - RNA, 19 nt, Artificial Sequence
  Description of Artificial Sequence: Synthetic oligonucleotide
  Sense strand starting at position 2762 of SEQ ID NO: 1888978
agugauacacuguaaugua

SEQ ID NO: 2570467 - RNA, 19 nt, Artificial Sequence
  Description of Artificial Sequence: Synthetic oligonucleotide
  Antisense strand to SEQ ID NO: 2570466
uacauuacaguguaucacu

SEQ ID NO: 2570468 - RNA, 19 nt, Artificial Sequence
  Description of Artificial Sequence: Synthetic oligonucleotide
  Sense strand starting at position 2811 of SEQ ID NO: 1888978
aaagaucucugucugaggu

SEQ ID NO: 2570469 - RNA, 19 nt, Artificial Sequence
  Description of Artificial Sequence: Synthetic oligonucleotide
  Antisense strand to SEQ ID NO: 2570468
accucagacagagaucuuu

SEQ ID NO: 2570470 - RNA, 19 nt, Artificial Sequence
  Description of Artificial Sequence: Synthetic oligonucleotide
  Sense strand starting at position 2850 of SEQ ID NO: 1888978
guagguaacuuccuucuaa

SEQ ID NO: 2570471 - RNA, 19 nt, Artificial Sequence
  Description of Artificial Sequence: Synthetic oligonucleotide
  Antisense strand to SEQ ID NO: 2570470
uuagaaggaaguuaccuac

SEQ ID NO: 2570472 - RNA, 19 nt, Artificial Sequence
  Description of Artificial Sequence: Synthetic oligonucleotide
  Sense strand starting at position 2996 of SEQ ID NO: 1888978
gggucaucucgguaagauu

SEQ ID NO: 2570473 - RNA, 19 nt, Artificial Sequence
  Description of Artificial Sequence: Synthetic oligonucleotide
  Antisense strand to SEQ ID NO: 2570472
aaucuuaccgagaugaccc

SEQ ID NO: 2570474 - RNA, 19 nt, Artificial Sequence
  Description of Artificial Sequence: Synthetic oligonucleotide
  Sense strand starting at position 3053 of SEQ ID NO: 1888978
cgacuaagagcauggacuu

SEQ ID NO: 2570475 - RNA, 19 nt, Artificial Sequence
  Description of Artificial Sequence: Synthetic oligonucleotide
  Antisense strand to SEQ ID NO: 2570474
aaguccaugcucuuagucg

SEQ ID NO: 2570476 - RNA, 19 nt, Artificial Sequence
  Description of Artificial Sequence: Synthetic oligonucleotide
  Sense strand starting at position 3127 of SEQ ID NO: 1888978
ugugacuguugagugagaa

SEQ ID NO: 2570477 - RNA, 19 nt, Artificial Sequence
  Description of Artificial Sequence: Synthetic oligonucleotide
  Antisense strand to SEQ ID NO: 2570476
uucucacucaacagucaca

SEQ ID NO: 2570478 - RNA, 19 nt, Artificial Sequence
  Description of Artificial Sequence: Synthetic oligonucleotide
  Sense strand starting at position 3128 of SEQ ID NO: 1888978
gugacuguugagugagaag

SEQ ID NO: 2570479 - RNA, 19 nt, Artificial Sequence
  Description of Artificial Sequence: Synthetic oligonucleotide
  Antisense strand to SEQ ID NO: 2570478
cuucucacucaacagucac

SEQ ID NO: 2570480 - RNA, 19 nt, Artificial Sequence
  Description of Artificial Sequence: Synthetic oligonucleotide
  Sense strand starting at position 3227 of SEQ ID NO: 1888978
caggucaauguauggugaa

SEQ ID NO: 2570481 - RNA, 19 nt, Artificial Sequence
  Description of Artificial Sequence: Synthetic oligonucleotide
  Antisense strand to SEQ ID NO: 2570480
uucaccauacauugaccug

SEQ ID NO: 2570482 - RNA, 19 nt, Artificial Sequence
  Description of Artificial Sequence: Synthetic oligonucleotide
  Sense strand starting at position 3503 of SEQ ID NO: 1888978
auuccaggugauugacaau

SEQ ID NO: 2570483 - RNA, 19 nt, Artificial Sequence
  Description of Artificial Sequence: Synthetic oligonucleotide
  Antisense strand to SEQ ID NO: 2570482
auugucaaucaccuggaau

SEQ ID NO: 2570484 - RNA, 19 nt, Artificial Sequence
  Description of Artificial Sequence: Synthetic oligonucleotide
  Sense strand starting at position 3716 of SEQ ID NO: 1888978
gcucucagcaucgagaacu

SEQ ID NO: 2570485 - RNA, 19 nt, Artificial Sequence
  Description of Artificial Sequence: Synthetic oligonucleotide
  Antisense strand to SEQ ID NO: 2570484
aguucucgaugcugagagc

SEQ ID NO: 2570486 - RNA, 19 nt, Artificial Sequence
  Description of Artificial Sequence: Synthetic oligonucleotide
  Sense strand starting at position 3884 of SEQ ID NO: 1888978
ggucuaucacaauguuuag

SEQ ID NO: 2570487 - RNA, 19 nt, Artificial Sequence
  Description of Artificial Sequence: Synthetic oligonucleotide
  Antisense strand to SEQ ID NO: 2570486
cuaaacauugugauagacc

SEQ ID NO: 2570488 - RNA, 19 nt, Artificial Sequence
  Description of Artificial Sequence: Synthetic oligonucleotide
  Sense strand starting at position 3946 of SEQ ID NO: 1888978
ggcuaagucacugaguggu

SEQ ID NO: 2570489 - RNA, 19 nt, Artificial Sequence
  Description of Artificial Sequence: Synthetic oligonucleotide
  Antisense strand to SEQ ID NO: 2570488
accacucagugacuuagcc

SEQ ID NO: 2570490 - RNA, 19 nt, Artificial Sequence
  Description of Artificial Sequence: Synthetic oligonucleotide
  Sense strand starting at position 1346 of SEQ ID NO: 1888979
aaggcugucguagauagau

SEQ ID NO: 2570491 - RNA, 19 nt, Artificial Sequence
  Description of Artificial Sequence: Synthetic oligonucleotide
  Antisense strand to SEQ ID NO: 2570490
aucuaucuacgacagccuu

SEQ ID NO: 2570492 - RNA, 19 nt, Artificial Sequence
  Description of Artificial Sequence: Synthetic oligonucleotide
  Sense strand starting at position 1348 of SEQ ID NO: 1888979
ggcugucguagauagauau

SEQ ID NO: 2570493 - RNA, 19 nt, Artificial Sequence
  Description of Artificial Sequence: Synthetic oligonucleotide
  Antisense strand to SEQ ID NO: 2570492
auaucuaucuacgacagcc

SEQ ID NO: 2570494 - RNA, 19 nt, Artificial Sequence
  Description of Artificial Sequence: Synthetic oligonucleotide
  Sense strand starting at position 1355 of SEQ ID NO: 1888979
guagauagauauucucaca

SEQ ID NO: 2570495 - RNA, 19 nt, Artificial Sequence
  Description of Artificial Sequence: Synthetic oligonucleotide
  Antisense strand to SEQ ID NO: 2570494
ugugagaauaucuaucuac

SEQ ID NO: 2570496 - RNA, 19 nt, Artificial Sequence
  Description of Artificial Sequence: Synthetic oligonucleotide
  Sense strand starting at position 1507 of SEQ ID NO: 1888979
aggguuuggcucugaauca

SEQ ID NO: 2570497 - RNA, 19 nt, Artificial Sequence
  Description of Artificial Sequence: Synthetic oligonucleotide
  Antisense strand to SEQ ID NO: 2570496
ugauucagagccaaacccu

SEQ ID NO: 2570498 - RNA, 19 nt, Artificial Sequence
  Description of Artificial Sequence: Synthetic oligonucleotide
  Sense strand starting at position 1530 of SEQ ID NO: 1888979
agggcugugguuuacgaua

SEQ ID NO: 2570499 - RNA, 19 nt, Artificial Sequence
  Description of Artificial Sequence: Synthetic oligonucleotide
  Antisense strand to SEQ ID NO: 2570498
uaucguaaaccacagcccu

SEQ ID NO: 2570500 - RNA, 19 nt, Artificial Sequence
  Description of Artificial Sequence: Synthetic oligonucleotide
  Sense strand starting at position 1535 of SEQ ID NO: 1888979
ugugguuuacgauaggauu

SEQ ID NO: 2570501 - RNA, 19 nt, Artificial Sequence
  Description of Artificial Sequence: Synthetic oligonucleotide
  Antisense strand to SEQ ID NO: 2570500
aauccuaucguaaaccaca

SEQ ID NO: 2570502 - RNA, 19 nt, Artificial Sequence
  Description of Artificial Sequence: Synthetic oligonucleotide
  Sense strand starting at position 1591 of SEQ ID NO: 1888979
guaauuaaaucaguacgga

SEQ ID NO: 2570503 - RNA, 19 nt, Artificial Sequence
  Description of Artificial Sequence: Synthetic oligonucleotide
  Antisense strand to SEQ ID NO: 2570502
uccguacugauuuaauuac

SEQ ID NO: 2570504 - RNA, 19 nt, Artificial Sequence
  Description of Artificial Sequence: Synthetic oligonucleotide
  Sense strand starting at position 2032 of SEQ ID NO: 1888979
cagauuugaccucgcgcuu

SEQ ID NO: 2570505 - RNA, 19 nt, Artificial Sequence
  Description of Artificial Sequence: Synthetic oligonucleotide
  Antisense strand to SEQ ID NO: 2570504
aagcgcgaggucaaaucug

SEQ ID NO: 2570506 - RNA, 19 nt, Artificial Sequence
  Description of Artificial Sequence: Synthetic oligonucleotide
  Sense strand starting at position 2215 of SEQ ID NO: 1888979
ggaacucugggucgugaaa

SEQ ID NO: 2570507 - RNA, 19 nt, Artificial Sequence
  Description of Artificial Sequence: Synthetic oligonucleotide
  Antisense strand to SEQ ID NO: 2570506
uuucacgacccagaguucc

SEQ ID NO: 2570508 - RNA, 19 nt, Artificial Sequence
  Description of Artificial Sequence: Synthetic oligonucleotide
  Sense strand starting at position 2457 of SEQ ID NO: 1888979
guccaaucauuugauuaug

SEQ ID NO: 2570509 - RNA, 19 nt, Artificial Sequence
  Description of Artificial Sequence: Synthetic oligonucleotide
  Antisense strand to SEQ ID NO: 2570508
cauaaucaaaugauuggac

SEQ ID NO: 2570510 - RNA, 19 nt, Artificial Sequence
  Description of Artificial Sequence: Synthetic oligonucleotide
  Sense strand starting at position 2462 of SEQ ID NO: 1888979
aucauuugauuauggaaca

SEQ ID NO: 2570511 - RNA, 19 nt, Artificial Sequence
  Description of Artificial Sequence: Synthetic oligonucleotide
  Antisense strand to SEQ ID NO: 2570510
uguuccauaaucaaaugau

SEQ ID NO: 2570512 - RNA, 19 nt, Artificial Sequence
  Description of Artificial Sequence: Synthetic oligonucleotide
  Sense strand starting at position 2463 of SEQ ID NO: 1888979
ucauuugauuauggaacau

SEQ ID NO: 2570513 - RNA, 19 nt, Artificial Sequence
  Description of Artificial Sequence: Synthetic oligonucleotide
  Antisense strand to SEQ ID NO: 2570512
auguuccauaaucaaauga

SEQ ID NO: 2570514 - RNA, 19 nt, Artificial Sequence
  Description of Artificial Sequence: Synthetic oligonucleotide
  Sense strand starting at position 2492 of SEQ ID NO: 1888979
agacaagacgauugugauu

SEQ ID NO: 2570515 - RNA, 19 nt, Artificial Sequence
  Description of Artificial Sequence: Synthetic oligonucleotide
  Antisense strand to SEQ ID NO: 2570514
aaucacaaucgucuugucu

SEQ ID NO: 2570516 - RNA, 19 nt, Artificial Sequence
  Description of Artificial Sequence: Synthetic oligonucleotide
  Sense strand starting at position 2499 of SEQ ID NO: 1888979
acgauugugauuggcugaa

SEQ ID NO: 2570517 - RNA, 19 nt, Artificial Sequence
  Description of Artificial Sequence: Synthetic oligonucleotide
  Antisense strand to SEQ ID NO: 2570516
uucagccaaucacaaucgu

SEQ ID NO: 2570518 - RNA, 19 nt, Artificial Sequence
  Description of Artificial Sequence: Synthetic oligonucleotide
  Sense strand starting at position 2554 of SEQ ID NO: 1888979
auggauaucaguugccaga

SEQ ID NO: 2570519 - RNA, 19 nt, Artificial Sequence
  Description of Artificial Sequence: Synthetic oligonucleotide
  Antisense strand to SEQ ID NO: 2570518
ucuggcaacugauauccau

SEQ ID NO: 2570520 - RNA, 19 nt, Artificial Sequence
  Description of Artificial Sequence: Synthetic oligonucleotide
  Sense strand starting at position 2556 of SEQ ID NO: 1888979
ggauaucaguugccagaga

SEQ ID NO: 2570521 - RNA, 19 nt, Artificial Sequence
  Description of Artificial Sequence: Synthetic oligonucleotide
  Antisense strand to SEQ ID NO: 2570520
ucucuggcaacugauaucc

SEQ ID NO: 2570522 - RNA, 19 nt, Artificial Sequence
  Description of Artificial Sequence: Synthetic oligonucleotide
  Sense strand starting at position 2567 of SEQ ID NO: 1888979
gccagagaaaccuggcuuu

SEQ ID NO: 2570523 - RNA, 19 nt, Artificial Sequence
  Description of Artificial Sequence: Synthetic oligonucleotide
  Antisense strand to SEQ ID NO: 2570522
aaagccagguuucucuggc

SEQ ID NO: 2570524 - RNA, 19 nt, Artificial Sequence
  Description of Artificial Sequence: Synthetic oligonucleotide
  Sense strand starting at position 2570 of SEQ ID NO: 1888979
agagaaaccuggcuuuacu

SEQ ID NO: 2570525 - RNA, 19 nt, Artificial Sequence
  Description of Artificial Sequence: Synthetic oligonucleotide
  Antisense strand to SEQ ID NO: 2570524
aguaaagccagguuucucu

SEQ ID NO: 2570526 - RNA, 19 nt, Artificial Sequence
  Description of Artificial Sequence: Synthetic oligonucleotide
  Sense strand starting at position 2703 of SEQ ID NO: 1888979
ucggguauagacgggauua

SEQ ID NO: 2570527 - RNA, 19 nt, Artificial Sequence
  Description of Artificial Sequence: Synthetic oligonucleotide
  Antisense strand to SEQ ID NO: 2570526
uaaucccgucuauacccga

SEQ ID NO: 2570528 - RNA, 19 nt, Artificial Sequence
  Description of Artificial Sequence: Synthetic oligonucleotide
  Sense strand starting at position 2853 of SEQ ID NO: 1888979
cucagagacguguacugua

SEQ ID NO: 2570529 - RNA, 19 nt, Artificial Sequence
  Description of Artificial Sequence: Synthetic oligonucleotide
  Antisense strand to SEQ ID NO: 2570528
uacaguacacgucucugag

SEQ ID NO: 2570530 - RNA, 19 nt, Artificial Sequence
  Description of Artificial Sequence: Synthetic oligonucleotide
  Sense strand starting at position 2858 of SEQ ID NO: 1888979
agacguguacuguauaaua

SEQ ID NO: 2570531 - RNA, 19 nt, Artificial Sequence
  Description of Artificial Sequence: Synthetic oligonucleotide
  Antisense strand to SEQ ID NO: 2570530
uauuauacaguacacgucu

SEQ ID NO: 2570532 - RNA, 19 nt, Artificial Sequence
  Description of Artificial Sequence: Synthetic oligonucleotide
  Sense strand starting at position 2912 of SEQ ID NO: 1888979
ugaagauauuagcuauugu

SEQ ID NO: 2570533 - RNA, 19 nt, Artificial Sequence
  Description of Artificial Sequence: Synthetic oligonucleotide
  Antisense strand to SEQ ID NO: 2570532
acaauagcuaauaucuuca

SEQ ID NO: 2570534 - RNA, 19 nt, Artificial Sequence
  Description of Artificial Sequence: Synthetic oligonucleotide
  Sense strand starting at position 2936 of SEQ ID NO: 1888979
agauaaauaauacgcguaa

SEQ ID NO: 2570535 - RNA, 19 nt, Artificial Sequence
  Description of Artificial Sequence: Synthetic oligonucleotide
  Antisense strand to SEQ ID NO: 2570534
uuacgcguauuauuuaucu

SEQ ID NO: 2570536 - RNA, 19 nt, Artificial Sequence
  Description of Artificial Sequence: Synthetic oligonucleotide
  Sense strand starting at position 2937 of SEQ ID NO: 1888979
gauaaauaauacgcguaau

SEQ ID NO: 2570537 - RNA, 19 nt, Artificial Sequence
  Description of Artificial Sequence: Synthetic oligonucleotide
  Antisense strand to SEQ ID NO: 2570536
auuacgcguauuauuuauc

SEQ ID NO: 2570538 - RNA, 19 nt, Artificial Sequence
  Description of Artificial Sequence: Synthetic oligonucleotide
  Sense strand starting at position 2940 of SEQ ID NO: 1888979
aaauaauacgcguaauaga

SEQ ID NO: 2570539 - RNA, 19 nt, Artificial Sequence
  Description of Artificial Sequence: Synthetic oligonucleotide
  Antisense strand to SEQ ID NO: 2570538
ucuauuacgcguauuauuu

SEQ ID NO: 2570540 - RNA, 19 nt, Artificial Sequence
  Description of Artificial Sequence: Synthetic oligonucleotide
  Sense strand starting at position 2948 of SEQ ID NO: 1888979
cgcguaauagaaugagaaa

SEQ ID NO: 2570541 - RNA, 19 nt, Artificial Sequence
  Description of Artificial Sequence: Synthetic oligonucleotide
  Antisense strand to SEQ ID NO: 2570540
uuucucauucuauuacgcg

SEQ ID NO: 2570542 - RNA, 19 nt, Artificial Sequence
  Description of Artificial Sequence: Synthetic oligonucleotide
  Sense strand starting at position 3076 of SEQ ID NO: 1888979
auuuguuauuugggaauug

SEQ ID NO: 2570543 - RNA, 19 nt, Artificial Sequence
  Description of Artificial Sequence: Synthetic oligonucleotide
  Antisense strand to SEQ ID NO: 2570542
caauucccaaauaacaaau

SEQ ID NO: 2570544 - RNA, 19 nt, Artificial Sequence
  Description of Artificial Sequence: Synthetic oligonucleotide
  Sense strand starting at position 3101 of SEQ ID NO: 1888979
aauagcagagauuguaauu

SEQ ID NO: 2570545 - RNA, 19 nt, Artificial Sequence
  Description of Artificial Sequence: Synthetic oligonucleotide
  Antisense strand to SEQ ID NO: 2570544
aauuacaaucucugcuauu

SEQ ID NO: 2570546 - RNA, 19 nt, Artificial Sequence
  Description of Artificial Sequence: Synthetic oligonucleotide
  Sense strand starting at position 3292 of SEQ ID NO: 1888979
gggacacggauucgauauu

SEQ ID NO: 2570547 - RNA, 19 nt, Artificial Sequence
  Description of Artificial Sequence: Synthetic oligonucleotide
  Antisense strand to SEQ ID NO: 2570546
aauaucgaauccguguccc

SEQ ID NO: 2570548 - RNA, 19 nt, Artificial Sequence
  Description of Artificial Sequence: Synthetic oligonucleotide
  Sense strand starting at position 3418 of SEQ ID NO: 1888979
auuaaauaaugucugggau

SEQ ID NO: 2570549 - RNA, 19 nt, Artificial Sequence
  Description of Artificial Sequence: Synthetic oligonucleotide
  Antisense strand to SEQ ID NO: 2570548
aucccagacauuauuuaau

SEQ ID NO: 2570550 - RNA, 19 nt, Artificial Sequence
  Description of Artificial Sequence: Synthetic oligonucleotide
  Sense strand starting at position 3419 of SEQ ID NO: 1888979
uuaaauaaugucugggauu

SEQ ID NO: 2570551 - RNA, 19 nt, Artificial Sequence
  Description of Artificial Sequence: Synthetic oligonucleotide
  Antisense strand to SEQ ID NO: 2570550
aaucccagacauuauuuaa

SEQ ID NO: 2570552 - RNA, 19 nt, Artificial Sequence
  Description of Artificial Sequence: Synthetic oligonucleotide
  Sense strand starting at position 3714 of SEQ ID NO: 1888979
ucaguugguaauuguugaa

SEQ ID NO: 2570553 - RNA, 19 nt, Artificial Sequence
  Description of Artificial Sequence: Synthetic oligonucleotide
  Antisense strand to SEQ ID NO: 2570552
uucaacaauuaccaacuga

SEQ ID NO: 2570554 - RNA, 19 nt, Artificial Sequence
  Description of Artificial Sequence: Synthetic oligonucleotide
  Sense strand starting at position 3718 of SEQ ID NO: 1888979
uugguaauuguugaaagcu

SEQ ID NO: 2570555 - RNA, 19 nt, Artificial Sequence
  Description of Artificial Sequence: Synthetic oligonucleotide
  Antisense strand to SEQ ID NO: 2570554
agcuuucaacaauuaccaa

SEQ ID NO: 2570556 - RNA, 19 nt, Artificial Sequence
  Description of Artificial Sequence: Synthetic oligonucleotide
  Sense strand starting at position 3724 of SEQ ID NO: 1888979
auuguugaaagcuggauga

SEQ ID NO: 2570557 - RNA, 19 nt, Artificial Sequence
  Description of Artificial Sequence: Synthetic oligonucleotide
  Antisense strand to SEQ ID NO: 2570556
ucauccagcuuucaacaau

SEQ ID NO: 2570558 - RNA, 19 nt, Artificial Sequence
  Description of Artificial Sequence: Synthetic oligonucleotide
  Sense strand starting at position 3726 of SEQ ID NO: 1888979
uguugaaagcuggaugaug

SEQ ID NO: 2570559 - RNA, 19 nt, Artificial Sequence
  Description of Artificial Sequence: Synthetic oligonucleotide
  Antisense strand to SEQ ID NO: 2570558
caucauccagcuuucaaca

SEQ ID NO: 2570560 - RNA, 19 nt, Artificial Sequence
  Description of Artificial Sequence: Synthetic oligonucleotide
  Sense strand starting at position 3737 of SEQ ID NO: 1888979
ggaugauggauucguguag

SEQ ID NO: 2570561 - RNA, 19 nt, Artificial Sequence
  Description of Artificial Sequence: Synthetic oligonucleotide
  Antisense strand to SEQ ID NO: 2570560
cuacacgaauccaucaucc

SEQ ID NO: 2570562 - RNA, 19 nt, Artificial Sequence
  Description of Artificial Sequence: Synthetic oligonucleotide
  Sense strand starting at position 3741 of SEQ ID NO: 1888979
gauggauucguguagguuu

SEQ ID NO: 2570563 - RNA, 19 nt, Artificial Sequence
  Description of Artificial Sequence: Synthetic oligonucleotide
  Antisense strand to SEQ ID NO: 2570562
aaaccuacacgaauccauc

SEQ ID NO: 2570564 - RNA, 19 nt, Artificial Sequence
  Description of Artificial Sequence: Synthetic oligonucleotide
  Sense strand starting at position 3931 of SEQ ID NO: 1888979
gugugaugaaauugcauug

SEQ ID NO: 2570565 - RNA, 19 nt, Artificial Sequence
  Description of Artificial Sequence: Synthetic oligonucleotide
  Antisense strand to SEQ ID NO: 2570564
caaugcaauuucaucacac

SEQ ID NO: 2570566 - RNA, 19 nt, Artificial Sequence
  Description of Artificial Sequence: Synthetic oligonucleotide
  Sense strand starting at position 3936 of SEQ ID NO: 1888979
augaaauugcauuggcuga

SEQ ID NO: 2570567 - RNA, 19 nt, Artificial Sequence
  Description of Artificial Sequence: Synthetic oligonucleotide
  Antisense strand to SEQ ID NO: 2570566
ucagccaaugcaauuucau

SEQ ID NO: 2570568 - RNA, 19 nt, Artificial Sequence
  Description of Artificial Sequence: Synthetic oligonucleotide
  Sense strand starting at position 3937 of SEQ ID NO: 1888979
ugaaauugcauuggcugau

SEQ ID NO: 2570569 - RNA, 19 nt, Artificial Sequence
  Description of Artificial Sequence: Synthetic oligonucleotide
  Antisense strand to SEQ ID NO: 2570568
aucagccaaugcaauuuca

SEQ ID NO: 2570570 - RNA, 19 nt, Artificial Sequence
  Description of Artificial Sequence: Synthetic oligonucleotide
  Sense strand starting at position 138 of SEQ ID NO: 1888980
uggagugcuagaugaaaug

SEQ ID NO: 2570571 - RNA, 19 nt, Artificial Sequence
  Description of Artificial Sequence: Synthetic oligonucleotide
  Antisense strand to SEQ ID NO: 2570570
cauuucaucuagcacucca

SEQ ID NO: 2570572 - RNA, 19 nt, Artificial Sequence
  Description of Artificial Sequence: Synthetic oligonucleotide
  Sense strand starting at position 148 of SEQ ID NO: 1888980
gaugaaaugcauuguuaaa

SEQ ID NO: 2570573 - RNA, 19 nt, Artificial Sequence
  Description of Artificial Sequence: Synthetic oligonucleotide
  Antisense strand to SEQ ID NO: 2570572
uuuaacaaugcauuucauc

SEQ ID NO: 2570574 - RNA, 19 nt, Artificial Sequence
  Description of Artificial Sequence: Synthetic oligonucleotide
  Sense strand starting at position 210 of SEQ ID NO: 1888980
acguuaagacuguaaguaa

SEQ ID NO: 2570575 - RNA, 19 nt, Artificial Sequence
  Description of Artificial Sequence: Synthetic oligonucleotide
  Antisense strand to SEQ ID NO: 2570574
uuacuuacagucuuaacgu

SEQ ID NO: 2570576 - RNA, 19 nt, Artificial Sequence
  Description of Artificial Sequence: Synthetic oligonucleotide
  Sense strand starting at position 218 of SEQ ID NO: 1888980
acuguaaguaacgaaugau

SEQ ID NO: 2570577 - RNA, 19 nt, Artificial Sequence
  Description of Artificial Sequence: Synthetic oligonucleotide
  Antisense strand to SEQ ID NO: 2570576
aucauucguuacuuacagu

SEQ ID NO: 2570578 - RNA, 19 nt, Artificial Sequence
  Description of Artificial Sequence: Synthetic oligonucleotide
  Sense strand starting at position 221 of SEQ ID NO: 1888980
guaaguaacgaaugauuaa

SEQ ID NO: 2570579 - RNA, 19 nt, Artificial Sequence
  Description of Artificial Sequence: Synthetic oligonucleotide
  Antisense strand to SEQ ID NO: 2570578
uuaaucauucguuacuuac

SEQ ID NO: 2570580 - RNA, 19 nt, Artificial Sequence
  Description of Artificial Sequence: Synthetic oligonucleotide
  Sense strand starting at position 224 of SEQ ID NO: 1888980
aguaacgaaugauuaaguu

SEQ ID NO: 2570581 - RNA, 19 nt, Artificial Sequence
  Description of Artificial Sequence: Synthetic oligonucleotide
  Antisense strand to SEQ ID NO: 2570580
aacuuaaucauucguuacu

SEQ ID NO: 2570582 - RNA, 19 nt, Artificial Sequence
  Description of Artificial Sequence: Synthetic oligonucleotide
  Sense strand starting at position 340 of SEQ ID NO: 1888980
ggccuuuagcaccauaaac

SEQ ID NO: 2570583 - RNA, 19 nt, Artificial Sequence
  Description of Artificial Sequence: Synthetic oligonucleotide
  Antisense strand to SEQ ID NO: 2570582
guuuauggugcuaaaggcc

SEQ ID NO: 2570584 - RNA, 19 nt, Artificial Sequence
  Description of Artificial Sequence: Synthetic oligonucleotide
  Sense strand starting at position 388 of SEQ ID NO: 1888980
ugucauaaaccggauuauu

SEQ ID NO: 2570585 - RNA, 19 nt, Artificial Sequence
  Description of Artificial Sequence: Synthetic oligonucleotide
  Antisense strand to SEQ ID NO: 2570584
aauaauccgguuuaugaca

SEQ ID NO: 2570586 - RNA, 19 nt, Artificial Sequence
  Description of Artificial Sequence: Synthetic oligonucleotide
  Sense strand starting at position 449 of SEQ ID NO: 1888980
uccuguaaaguguaacaca

SEQ ID NO: 2570587 - RNA, 19 nt, Artificial Sequence
  Description of Artificial Sequence: Synthetic oligonucleotide
  Antisense strand to SEQ ID NO: 2570586
uguguuacacuuuacagga

SEQ ID NO: 2570588 - RNA, 19 nt, Artificial Sequence
  Description of Artificial Sequence: Synthetic oligonucleotide
  Sense strand starting at position 466 of SEQ ID NO: 1888980
cagcucuugggaugacaaa

SEQ ID NO: 2570589 - RNA, 19 nt, Artificial Sequence
  Description of Artificial Sequence: Synthetic oligonucleotide
  Antisense strand to SEQ ID NO: 2570588
uuugucaucccaagagcug

SEQ ID NO: 2570590 - RNA, 19 nt, Artificial Sequence
  Description of Artificial Sequence: Synthetic oligonucleotide
  Sense strand starting at position 719 of SEQ ID NO: 1888980
gucagacuaaucgagcuua

SEQ ID NO: 2570591 - RNA, 19 nt, Artificial Sequence
  Description of Artificial Sequence: Synthetic oligonucleotide
  Antisense strand to SEQ ID NO: 2570590
uaagcucgauuagucugac

SEQ ID NO: 2570592 - RNA, 19 nt, Artificial Sequence
  Description of Artificial Sequence: Synthetic oligonucleotide
  Sense strand starting at position 724 of SEQ ID NO: 1888980
acuaaucgagcuuagacuu

SEQ ID NO: 2570593 - RNA, 19 nt, Artificial Sequence
  Description of Artificial Sequence: Synthetic oligonucleotide
  Antisense strand to SEQ ID NO: 2570592
aagucuaagcucgauuagu

SEQ ID NO: 2570594 - RNA, 19 nt, Artificial Sequence
  Description of Artificial Sequence: Synthetic oligonucleotide
  Sense strand starting at position 736 of SEQ ID NO: 1888980
uagacuugaggauguaugu

SEQ ID NO: 2570595 - RNA, 19 nt, Artificial Sequence
  Description of Artificial Sequence: Synthetic oligonucleotide
  Antisense strand to SEQ ID NO: 2570594
acauacauccucaagucua

SEQ ID NO: 2570596 - RNA, 19 nt, Artificial Sequence
  Description of Artificial Sequence: Synthetic oligonucleotide
  Sense strand starting at position 763 of SEQ ID NO: 1888980
gucagcaccucauuuguga

SEQ ID NO: 2570597 - RNA, 19 nt, Artificial Sequence
  Description of Artificial Sequence: Synthetic oligonucleotide
  Antisense strand to SEQ ID NO: 2570596
ucacaaaugaggugcugac

SEQ ID NO: 2570598 - RNA, 19 nt, Artificial Sequence
  Description of Artificial Sequence: Synthetic oligonucleotide
  Sense strand starting at position 790 of SEQ ID NO: 1888980
uuggguucagagugaaauu

SEQ ID NO: 2570599 - RNA, 19 nt, Artificial Sequence
  Description of Artificial Sequence: Synthetic oligonucleotide
  Antisense strand to SEQ ID NO: 2570598
aauuucacucugaacccaa

SEQ ID NO: 2570600 - RNA, 19 nt, Artificial Sequence
  Description of Artificial Sequence: Synthetic oligonucleotide
  Sense strand starting at position 1274 of SEQ ID NO: 1888980
gggaucccuguaggauuau

SEQ ID NO: 2570601 - RNA, 19 nt, Artificial Sequence
  Description of Artificial Sequence: Synthetic oligonucleotide
  Antisense strand to SEQ ID NO: 2570600
auaauccuacagggauccc

SEQ ID NO: 2570602 - RNA, 19 nt, Artificial Sequence
  Description of Artificial Sequence: Synthetic oligonucleotide
  Sense strand starting at position 1520 of SEQ ID NO: 1888980
uggugaucugccgucucuu

SEQ ID NO: 2570603 - RNA, 19 nt, Artificial Sequence
  Description of Artificial Sequence: Synthetic oligonucleotide
  Antisense strand to SEQ ID NO: 2570602
aagagacggcagaucacca

SEQ ID NO: 2570604 - RNA, 19 nt, Artificial Sequence
  Description of Artificial Sequence: Synthetic oligonucleotide
  Sense strand starting at position 1521 of SEQ ID NO: 1888980
ggugaucugccgucucuuu

SEQ ID NO: 2570605 - RNA, 19 nt, Artificial Sequence
  Description of Artificial Sequence: Synthetic oligonucleotide
  Antisense strand to SEQ ID NO: 2570604
aaagagacggcagaucacc

SEQ ID NO: 2570606 - RNA, 19 nt, Artificial Sequence
  Description of Artificial Sequence: Synthetic oligonucleotide
  Sense strand starting at position 1582 of SEQ ID NO: 1888980
gaaugaaauucccucaggu

SEQ ID NO: 2570607 - RNA, 19 nt, Artificial Sequence
  Description of Artificial Sequence: Synthetic oligonucleotide
  Antisense strand to SEQ ID NO: 2570606
accugagggaauuucauuc

SEQ ID NO: 2570608 - RNA, 19 nt, Artificial Sequence
  Description of Artificial Sequence: Synthetic oligonucleotide
  Sense strand starting at position 1618 of SEQ ID NO: 1888980
gcacauuuggccugaagcu

SEQ ID NO: 2570609 - RNA, 19 nt, Artificial Sequence
  Description of Artificial Sequence: Synthetic oligonucleotide
  Antisense strand to SEQ ID NO: 2570608
agcuucaggccaaaugugc

SEQ ID NO: 2570610 - RNA, 19 nt, Artificial Sequence
  Description of Artificial Sequence: Synthetic oligonucleotide
  Sense strand starting at position 2077 of SEQ ID NO: 1888980
guagcugugauugacaaac

SEQ ID NO: 2570611 - RNA, 19 nt, Artificial Sequence
  Description of Artificial Sequence: Synthetic oligonucleotide
  Antisense strand to SEQ ID NO: 2570610
guuugucaaucacagcuac

SEQ ID NO: 2570612 - RNA, 19 nt, Artificial Sequence
  Description of Artificial Sequence: Synthetic oligonucleotide
  Sense strand starting at position 2295 of SEQ ID NO: 1888980
ccagaaacgugacucaaag

SEQ ID NO: 2570613 - RNA, 19 nt, Artificial Sequence
  Description of Artificial Sequence: Synthetic oligonucleotide
  Antisense strand to SEQ ID NO: 2570612
cuuugagucacguuucugg

SEQ ID NO: 2570614 - RNA, 19 nt, Artificial Sequence
  Description of Artificial Sequence: Synthetic oligonucleotide
  Sense strand starting at position 2362 of SEQ ID NO: 1888980
aaauauuagccgugaagag

SEQ ID NO: 2570615 - RNA, 19 nt, Artificial Sequence
  Description of Artificial Sequence: Synthetic oligonucleotide
  Antisense strand to SEQ ID NO: 2570614
cucuucacggcuaauauuu

SEQ ID NO: 2570616 - RNA, 19 nt, Artificial Sequence
  Description of Artificial Sequence: Synthetic oligonucleotide
  Sense strand starting at position 2372 of SEQ ID NO: 1888980
cgugaagagcuuuagauga

SEQ ID NO: 2570617 - RNA, 19 nt, Artificial Sequence
  Description of Artificial Sequence: Synthetic oligonucleotide
  Antisense strand to SEQ ID NO: 2570616
ucaucuaaagcucuucacg

SEQ ID NO: 2570618 - RNA, 19 nt, Artificial Sequence
  Description of Artificial Sequence: Synthetic oligonucleotide
  Sense strand starting at position 2560 of SEQ ID NO: 1888980
cagucauauguaugacaag

SEQ ID NO: 2570619 - RNA, 19 nt, Artificial Sequence
  Description of Artificial Sequence: Synthetic oligonucleotide
  Antisense strand to SEQ ID NO: 2570618
cuugucauacauaugacug

SEQ ID NO: 2570620 - RNA, 19 nt, Artificial Sequence
  Description of Artificial Sequence: Synthetic oligonucleotide
  Sense strand starting at position 2584 of SEQ ID NO: 1888980
acuugacaucuggguuauc

SEQ ID NO: 2570621 - RNA, 19 nt, Artificial Sequence
  Description of Artificial Sequence: Synthetic oligonucleotide
  Antisense strand to SEQ ID NO: 2570620
gauaacccagaugucaagu

SEQ ID NO: 2570622 - RNA, 19 nt, Artificial Sequence
  Description of Artificial Sequence: Synthetic oligonucleotide
  Sense strand starting at position 2585 of SEQ ID NO: 1888980
cuugacaucuggguuauca

SEQ ID NO: 2570623 - RNA, 19 nt, Artificial Sequence
  Description of Artificial Sequence: Synthetic oligonucleotide
  Antisense strand to SEQ ID NO: 2570622
ugauaacccagaugucaag

SEQ ID NO: 2570624 - RNA, 19 nt, Artificial Sequence
  Description of Artificial Sequence: Synthetic oligonucleotide
  Sense strand starting at position 2589 of SEQ ID NO: 1888980
acaucuggguuaucaauaa

SEQ ID NO: 2570625 - RNA, 19 nt, Artificial Sequence
  Description of Artificial Sequence: Synthetic oligonucleotide
  Antisense strand to SEQ ID NO: 2570624
uuauugauaacccagaugu

SEQ ID NO: 2570626 - RNA, 19 nt, Artificial Sequence
  Description of Artificial Sequence: Synthetic oligonucleotide
  Sense strand starting at position 2672 of SEQ ID NO: 1888980
uggaaaggaugcucauaug

SEQ ID NO: 2570627 - RNA, 19 nt, Artificial Sequence
  Description of Artificial Sequence: Synthetic oligonucleotide
  Antisense strand to SEQ ID NO: 2570626
cauaugagcauccuuucca

SEQ ID NO: 2570628 - RNA, 19 nt, Artificial Sequence
  Description of Artificial Sequence: Synthetic oligonucleotide
  Sense strand starting at position 2808 of SEQ ID NO: 1888980
gggaauaccaugugacauu

SEQ ID NO: 2570629 - RNA, 19 nt, Artificial Sequence
  Description of Artificial Sequence: Synthetic oligonucleotide
  Antisense strand to SEQ ID NO: 2570628
aaugucacaugguauuccc

SEQ ID NO: 2570630 - RNA, 19 nt, Artificial Sequence
  Description of Artificial Sequence: Synthetic oligonucleotide
  Sense strand starting at position 3124 of SEQ ID NO: 1888980
uuucuagggacuggugauu

SEQ ID NO: 2570631 - RNA, 19 nt, Artificial Sequence
  Description of Artificial Sequence: Synthetic oligonucleotide
  Antisense strand to SEQ ID NO: 2570630
aaucaccagucccuagaaa

SEQ ID NO: 2570632 - RNA, 19 nt, Artificial Sequence
  Description of Artificial Sequence: Synthetic oligonucleotide
  Sense strand starting at position 3273 of SEQ ID NO: 1888980
gggugaaauucuucccacu

SEQ ID NO: 2570633 - RNA, 19 nt, Artificial Sequence
  Description of Artificial Sequence: Synthetic oligonucleotide
  Antisense strand to SEQ ID NO: 2570632
agugggaagaauuucaccc

SEQ ID NO: 2570634 - RNA, 19 nt, Artificial Sequence
  Description of Artificial Sequence: Synthetic oligonucleotide
  Sense strand starting at position 3275 of SEQ ID NO: 1888980
gugaaauucuucccacuag

SEQ ID NO: 2570635 - RNA, 19 nt, Artificial Sequence
  Description of Artificial Sequence: Synthetic oligonucleotide
  Antisense strand to SEQ ID NO: 2570634
cuagugggaagaauuucac

SEQ ID NO: 2570636 - RNA, 19 nt, Artificial Sequence
  Description of Artificial Sequence: Synthetic oligonucleotide
  Sense strand starting at position 3304 of SEQ ID NO: 1888980
ucguguuagggagucgcaa

SEQ ID NO: 2570637 - RNA, 19 nt, Artificial Sequence
  Description of Artificial Sequence: Synthetic oligonucleotide
  Antisense strand to SEQ ID NO: 2570636
uugcgacucccuaacacga

SEQ ID NO: 2570638 - RNA, 19 nt, Artificial Sequence
  Description of Artificial Sequence: Synthetic oligonucleotide
  Sense strand starting at position 3323 of SEQ ID NO: 1888980
cugauagguccugaaggcu

SEQ ID NO: 2570639 - RNA, 19 nt, Artificial Sequence
  Description of Artificial Sequence: Synthetic oligonucleotide
  Antisense strand to SEQ ID NO: 2570638
agccuucaggaccuaucag

SEQ ID NO: 2570640 - RNA, 19 nt, Artificial Sequence
  Description of Artificial Sequence: Synthetic oligonucleotide
  Sense strand starting at position 3340 of SEQ ID NO: 1888980
cugucuuguguggagaaug

SEQ ID NO: 2570641 - RNA, 19 nt, Artificial Sequence
  Description of Artificial Sequence: Synthetic oligonucleotide
  Antisense strand to SEQ ID NO: 2570640
cauucuccacacaagacag

SEQ ID NO: 2570642 - RNA, 19 nt, Artificial Sequence
  Description of Artificial Sequence: Synthetic oligonucleotide
  Sense strand starting at position 3522 of SEQ ID NO: 1888980
caaauaauacgugaaguuu

SEQ ID NO: 2570643 - RNA, 19 nt, Artificial Sequence
  Description of Artificial Sequence: Synthetic oligonucleotide
  Antisense strand to SEQ ID NO: 2570642
aaacuucacguauuauuug

SEQ ID NO: 2570644 - RNA, 19 nt, Artificial Sequence
  Description of Artificial Sequence: Synthetic oligonucleotide
  Sense strand starting at position 3569 of SEQ ID NO: 1888980
cccauaguuccauagucau

SEQ ID NO: 2570645 - RNA, 19 nt, Artificial Sequence
  Description of Artificial Sequence: Synthetic oligonucleotide
  Antisense strand to SEQ ID NO: 2570644
augacuauggaacuauggg

SEQ ID NO: 2570646 - RNA, 19 nt, Artificial Sequence
  Description of Artificial Sequence: Synthetic oligonucleotide
  Sense strand starting at position 3743 of SEQ ID NO: 1888980
cugagagaauuagugugau

SEQ ID NO: 2570647 - RNA, 19 nt, Artificial Sequence
  Description of Artificial Sequence: Synthetic oligonucleotide
  Antisense strand to SEQ ID NO: 2570646
aucacacuaauucucucag

SEQ ID NO: 2570648 - RNA, 19 nt, Artificial Sequence
  Description of Artificial Sequence: Synthetic oligonucleotide
  Sense strand starting at position 3934 of SEQ ID NO: 1888980
aguuaagugacuuaguuua

SEQ ID NO: 2570649 - RNA, 19 nt, Artificial Sequence
  Description of Artificial Sequence: Synthetic oligonucleotide
  Antisense strand to SEQ ID NO: 2570648
uaaacuaagucacuuaacu

SEQ ID NO: 2570650 - RNA, 19 nt, Artificial Sequence
  Description of Artificial Sequence: Synthetic oligonucleotide
  Sense strand starting at position 77 of SEQ ID NO: 1888981
aguccagaugugugagaga

SEQ ID NO: 2570651 - RNA, 19 nt, Artificial Sequence
  Description of Artificial Sequence: Synthetic oligonucleotide
  Antisense strand to SEQ ID NO: 2570650
ucucucacacaucuggacu

SEQ ID NO: 2570652 - RNA, 19 nt, Artificial Sequence
  Description of Artificial Sequence: Synthetic oligonucleotide
  Sense strand starting at position 133 of SEQ ID NO: 1888981
agagucaggguguaaauau

SEQ ID NO: 2570653 - RNA, 19 nt, Artificial Sequence
  Description of Artificial Sequence: Synthetic oligonucleotide
  Antisense strand to SEQ ID NO: 2570652
auauuuacacccugacucu

SEQ ID NO: 2570654 - RNA, 19 nt, Artificial Sequence
  Description of Artificial Sequence: Synthetic oligonucleotide
  Sense strand starting at position 162 of SEQ ID NO: 1888981
uugccucugggagaauauu

SEQ ID NO: 2570655 - RNA, 19 nt, Artificial Sequence
  Description of Artificial Sequence: Synthetic oligonucleotide
  Antisense strand to SEQ ID NO: 2570654
aauauucucccagaggcaa

SEQ ID NO: 2570656 - RNA, 19 nt, Artificial Sequence
  Description of Artificial Sequence: Synthetic oligonucleotide
  Sense strand starting at position 172 of SEQ ID NO: 1888981
gagaauauuuagugacaga

SEQ ID NO: 2570657 - RNA, 19 nt, Artificial Sequence
  Description of Artificial Sequence: Synthetic oligonucleotide
  Antisense strand to SEQ ID NO: 2570656
ucugucacuaaauauucuc

SEQ ID NO: 2570658 - RNA, 19 nt, Artificial Sequence
  Description of Artificial Sequence: Synthetic oligonucleotide
  Sense strand starting at position 175 of SEQ ID NO: 1888981
aauauuuagugacagagau

SEQ ID NO: 2570659 - RNA, 19 nt, Artificial Sequence
  Description of Artificial Sequence: Synthetic oligonucleotide
  Antisense strand to SEQ ID NO: 2570658
aucucugucacuaaauauu

SEQ ID NO: 2570660 - RNA, 19 nt, Artificial Sequence
  Description of Artificial Sequence: Synthetic oligonucleotide
  Sense strand starting at position 185 of SEQ ID NO: 1888981
gacagagauucugugauau

SEQ ID NO: 2570661 - RNA, 19 nt, Artificial Sequence
  Description of Artificial Sequence: Synthetic oligonucleotide
  Antisense strand to SEQ ID NO: 2570660
auaucacagaaucucuguc

SEQ ID NO: 2570662 - RNA, 19 nt, Artificial Sequence
  Description of Artificial Sequence: Synthetic oligonucleotide
  Sense strand starting at position 491 of SEQ ID NO: 1888981
ggaguuugggcacagucua

SEQ ID NO: 2570663 - RNA, 19 nt, Artificial Sequence
  Description of Artificial Sequence: Synthetic oligonucleotide
  Antisense strand to SEQ ID NO: 2570662
uagacugugcccaaacucc

SEQ ID NO: 2570664 - RNA, 19 nt, Artificial Sequence
  Description of Artificial Sequence: Synthetic oligonucleotide
  Sense strand starting at position 596 of SEQ ID NO: 1888981
gcuugcaagcuugcucaua

SEQ ID NO: 2570665 - RNA, 19 nt, Artificial Sequence
  Description of Artificial Sequence: Synthetic oligonucleotide
  Antisense strand to SEQ ID NO: 2570664
uaugagcaagcuugcaagc

SEQ ID NO: 2570666 - RNA, 19 nt, Artificial Sequence
  Description of Artificial Sequence: Synthetic oligonucleotide
  Sense strand starting at position 900 of SEQ ID NO: 1888981
ggaagucagucacuaggua

SEQ ID NO: 2570667 - RNA, 19 nt, Artificial Sequence
  Description of Artificial Sequence: Synthetic oligonucleotide
  Antisense strand to SEQ ID NO: 2570666
uaccuagugacugacuucc

SEQ ID NO: 2570668 - RNA, 19 nt, Artificial Sequence
  Description of Artificial Sequence: Synthetic oligonucleotide
  Sense strand starting at position 1005 of SEQ ID NO: 1888981
aguacaauaugucugaaau

SEQ ID NO: 2570669 - RNA, 19 nt, Artificial Sequence
  Description of Artificial Sequence: Synthetic oligonucleotide
  Antisense strand to SEQ ID NO: 2570668
auuucagacauauuguacu

SEQ ID NO: 2570670 - RNA, 19 nt, Artificial Sequence
  Description of Artificial Sequence: Synthetic oligonucleotide
  Sense strand starting at position 1006 of SEQ ID NO: 1888981
guacaauaugucugaaaua

SEQ ID NO: 2570671 - RNA, 19 nt, Artificial Sequence
  Description of Artificial Sequence: Synthetic oligonucleotide
  Antisense strand to SEQ ID NO: 2570670
uauuucagacauauuguac

SEQ ID NO: 2570672 - RNA, 19 nt, Artificial Sequence
  Description of Artificial Sequence: Synthetic oligonucleotide
  Sense strand starting at position 1226 of SEQ ID NO: 1888981
uuacuagauuuagagagau

SEQ ID NO: 2570673 - RNA, 19 nt, Artificial Sequence
  Description of Artificial Sequence: Synthetic oligonucleotide
  Antisense strand to SEQ ID NO: 2570672
aucucucuaaaucuaguaa

SEQ ID NO: 2570674 - RNA, 19 nt, Artificial Sequence
  Description of Artificial Sequence: Synthetic oligonucleotide
  Sense strand starting at position 1278 of SEQ ID NO: 1888981
caacuauaccuuuguggag

SEQ ID NO: 2570675 - RNA, 19 nt, Artificial Sequence
  Description of Artificial Sequence: Synthetic oligonucleotide
  Antisense strand to SEQ ID NO: 2570674
cuccacaaagguauaguug

SEQ ID NO: 2570676 - RNA, 19 nt, Artificial Sequence
  Description of Artificial Sequence: Synthetic oligonucleotide
  Sense strand starting at position 1357 of SEQ ID NO: 1888981
uaaagaaggcauuguggaa

SEQ ID NO: 2570677 - RNA, 19 nt, Artificial Sequence
  Description of Artificial Sequence: Synthetic oligonucleotide
  Antisense strand to SEQ ID NO: 2570676
uuccacaaugccuucuuua

SEQ ID NO: 2570678 - RNA, 19 nt, Artificial Sequence
  Description of Artificial Sequence: Synthetic oligonucleotide
  Sense strand starting at position 1372 of SEQ ID NO: 1888981
ggaacaguaagacguacau

SEQ ID NO: 2570679 - RNA, 19 nt, Artificial Sequence
  Description of Artificial Sequence: Synthetic oligonucleotide
  Antisense strand to SEQ ID NO: 2570678
auguacgucuuacuguucc

SEQ ID NO: 2570680 - RNA, 19 nt, Artificial Sequence
  Description of Artificial Sequence: Synthetic oligonucleotide
  Sense strand starting at position 1454 of SEQ ID NO: 1888981
gcugacagauacuuacagu

SEQ ID NO: 2570681 - RNA, 19 nt, Artificial Sequence
  Description of Artificial Sequence: Synthetic oligonucleotide
  Antisense strand to SEQ ID NO: 2570680
acuguaaguaucugucagc

SEQ ID NO: 2570682 - RNA, 19 nt, Artificial Sequence
  Description of Artificial Sequence: Synthetic oligonucleotide
  Sense strand starting at position 1526 of SEQ ID NO: 1888981
aagcuuccuggaggauuaa

SEQ ID NO: 2570683 - RNA, 19 nt, Artificial Sequence
  Description of Artificial Sequence: Synthetic oligonucleotide
  Antisense strand to SEQ ID NO: 2570682
uuaauccuccaggaagcuu

SEQ ID NO: 2570684 - RNA, 19 nt, Artificial Sequence
  Description of Artificial Sequence: Synthetic oligonucleotide
  Sense strand starting at position 1574 of SEQ ID NO: 1888981
ggcagugaucagcacaaag

SEQ ID NO: 2570685 - RNA, 19 nt, Artificial Sequence
  Description of Artificial Sequence: Synthetic oligonucleotide
  Antisense strand to SEQ ID NO: 2570684
cuuugugcugaucacugcc

SEQ ID NO: 2570686 - RNA, 19 nt, Artificial Sequence
  Description of Artificial Sequence: Synthetic oligonucleotide
  Sense strand starting at position 1576 of SEQ ID NO: 1888981
cagugaucagcacaaagua

SEQ ID NO: 2570687 - RNA, 19 nt, Artificial Sequence
  Description of Artificial Sequence: Synthetic oligonucleotide
  Antisense strand to SEQ ID NO: 2570686
uacuuugugcugaucacug

SEQ ID NO: 2570688 - RNA, 19 nt, Artificial Sequence
  Description of Artificial Sequence: Synthetic oligonucleotide
  Sense strand starting at position 1611 of SEQ ID NO: 1888981
aggaaaguuuccuccaggu

SEQ ID NO: 2570689 - RNA, 19 nt, Artificial Sequence
  Description of Artificial Sequence: Synthetic oligonucleotide
  Antisense strand to SEQ ID NO: 2570688
accuggaggaaacuuuccu

SEQ ID NO: 2570690 - RNA, 19 nt, Artificial Sequence
  Description of Artificial Sequence: Synthetic oligonucleotide
  Sense strand starting at position 1613 of SEQ ID NO: 1888981
gaaaguuuccuccaggucu

SEQ ID NO: 2570691 - RNA, 19 nt, Artificial Sequence
  Description of Artificial Sequence: Synthetic oligonucleotide
  Antisense strand to SEQ ID NO: 2570690
agaccuggaggaaacuuuc

SEQ ID NO: 2570692 - RNA, 19 nt, Artificial Sequence
  Description of Artificial Sequence: Synthetic oligonucleotide
  Sense strand starting at position 2010 of SEQ ID NO: 1888981
uguuccaucaagggaagau

SEQ ID NO: 2570693 - RNA, 19 nt, Artificial Sequence
  Description of Artificial Sequence: Synthetic oligonucleotide
  Antisense strand to SEQ ID NO: 2570692
aucuucccuugauggaaca

SEQ ID NO: 2570694 - RNA, 19 nt, Artificial Sequence
  Description of Artificial Sequence: Synthetic oligonucleotide
  Sense strand starting at position 2104 of SEQ ID NO: 1888981
ccaugagauagagguccau

SEQ ID NO: 2570695 - RNA, 19 nt, Artificial Sequence
  Description of Artificial Sequence: Synthetic oligonucleotide
  Antisense strand to SEQ ID NO: 2570694
auggaccucuaucucaugg

SEQ ID NO: 2570696 - RNA, 19 nt, Artificial Sequence
  Description of Artificial Sequence: Synthetic oligonucleotide
  Sense strand starting at position 2110 of SEQ ID NO: 1888981
gauagagguccauguaaac

SEQ ID NO: 2570697 - RNA, 19 nt, Artificial Sequence
  Description of Artificial Sequence: Synthetic oligonucleotide
  Antisense strand to SEQ ID NO: 2570696
guuuacauggaccucuauc

SEQ ID NO: 2570698 - RNA, 19 nt, Artificial Sequence
  Description of Artificial Sequence: Synthetic oligonucleotide
  Sense strand starting at position 2242 of SEQ ID NO: 1888981
gaucuuuaagcagaggcuu

SEQ ID NO: 2570699 - RNA, 19 nt, Artificial Sequence
  Description of Artificial Sequence: Synthetic oligonucleotide
  Antisense strand to SEQ ID NO: 2570698
aagccucugcuuaaagauc

SEQ ID NO: 2570700 - RNA, 19 nt, Artificial Sequence
  Description of Artificial Sequence: Synthetic oligonucleotide
  Sense strand starting at position 2399 of SEQ ID NO: 1888981
gcacguguugcuguauuaa

SEQ ID NO: 2570701 - RNA, 19 nt, Artificial Sequence
  Description of Artificial Sequence: Synthetic oligonucleotide
  Antisense strand to SEQ ID NO: 2570700
uuaauacagcaacacgugc

SEQ ID NO: 2570702 - RNA, 19 nt, Artificial Sequence
  Description of Artificial Sequence: Synthetic oligonucleotide
  Sense strand starting at position 2420 of SEQ ID NO: 1888981
aguuacuuacuguaacagu

SEQ ID NO: 2570703 - RNA, 19 nt, Artificial Sequence
  Description of Artificial Sequence: Synthetic oligonucleotide
  Antisense strand to SEQ ID NO: 2570702
acuguuacaguaaguaacu

SEQ ID NO: 2570704 - RNA, 19 nt, Artificial Sequence
  Description of Artificial Sequence: Synthetic oligonucleotide
  Sense strand starting at position 2529 of SEQ ID NO: 1888981
gcagucuuucucuaaagau

SEQ ID NO: 2570705 - RNA, 19 nt, Artificial Sequence
  Description of Artificial Sequence: Synthetic oligonucleotide
  Antisense strand to SEQ ID NO: 2570704
aucuuuagagaaagacugc

SEQ ID NO: 2570706 - RNA, 19 nt, Artificial Sequence
  Description of Artificial Sequence: Synthetic oligonucleotide
  Sense strand starting at position 2908 of SEQ ID NO: 1888981
accguuuaacaguacauaa

SEQ ID NO: 2570707 - RNA, 19 nt, Artificial Sequence
  Description of Artificial Sequence: Synthetic oligonucleotide
  Antisense strand to SEQ ID NO: 2570706
uuauguacuguuaaacggu

SEQ ID NO: 2570708 - RNA, 19 nt, Artificial Sequence
  Description of Artificial Sequence: Synthetic oligonucleotide
  Sense strand starting at position 2910 of SEQ ID NO: 1888981
cguuuaacaguacauaaau

SEQ ID NO: 2570709 - RNA, 19 nt, Artificial Sequence
  Description of Artificial Sequence: Synthetic oligonucleotide
  Antisense strand to SEQ ID NO: 2570708
auuuauguacuguuaaacg

SEQ ID NO: 2570710 - RNA, 19 nt, Artificial Sequence
  Description of Artificial Sequence: Synthetic oligonucleotide
  Sense strand starting at position 3040 of SEQ ID NO: 1888981
aucugauaucucgagguug

SEQ ID NO: 2570711 - RNA, 19 nt, Artificial Sequence
  Description of Artificial Sequence: Synthetic oligonucleotide
  Antisense strand to SEQ ID NO: 2570710
caaccucgagauaucagau

SEQ ID NO: 2570712 - RNA, 19 nt, Artificial Sequence
  Description of Artificial Sequence: Synthetic oligonucleotide
  Sense strand starting at position 3449 of SEQ ID NO: 1888981
augagaucgggaugguaug

SEQ ID NO: 2570713 - RNA, 19 nt, Artificial Sequence
  Description of Artificial Sequence: Synthetic oligonucleotide
  Antisense strand to SEQ ID NO: 2570712
cauaccaucccgaucucau

SEQ ID NO: 2570714 - RNA, 19 nt, Artificial Sequence
  Description of Artificial Sequence: Synthetic oligonucleotide
  Sense strand starting at position 3461 of SEQ ID NO: 1888981
ugguaugaauauucugacu

SEQ ID NO: 2570715 - RNA, 19 nt, Artificial Sequence
  Description of Artificial Sequence: Synthetic oligonucleotide
  Antisense strand to SEQ ID NO: 2570714
agucagaauauucauacca

SEQ ID NO: 2570716 - RNA, 19 nt, Artificial Sequence
  Description of Artificial Sequence: Synthetic oligonucleotide
  Sense strand starting at position 3466 of SEQ ID NO: 1888981
ugaauauucugacuuguug

SEQ ID NO: 2570717 - RNA, 19 nt, Artificial Sequence
  Description of Artificial Sequence: Synthetic oligonucleotide
  Antisense strand to SEQ ID NO: 2570716
caacaagucagaauauuca

SEQ ID NO: 2570718 - RNA, 19 nt, Artificial Sequence
  Description of Artificial Sequence: Synthetic oligonucleotide
  Sense strand starting at position 3512 of SEQ ID NO: 1888981
gcacuauguggacauauaa

SEQ ID NO: 2570719 - RNA, 19 nt, Artificial Sequence
  Description of Artificial Sequence: Synthetic oligonucleotide
  Antisense strand to SEQ ID NO: 2570718
uuauauguccacauagugc

SEQ ID NO: 2570720 - RNA, 19 nt, Artificial Sequence
  Description of Artificial Sequence: Synthetic oligonucleotide
  Sense strand starting at position 3597 of SEQ ID NO: 1888981
accgaaugcucccuuauuu

SEQ ID NO: 2570721 - RNA, 19 nt, Artificial Sequence
  Description of Artificial Sequence: Synthetic oligonucleotide
  Antisense strand to SEQ ID NO: 2570720
aaauaagggagcauucggu

SEQ ID NO: 2570722 - RNA, 19 nt, Artificial Sequence
  Description of Artificial Sequence: Synthetic oligonucleotide
  Sense strand starting at position 3616 of SEQ ID NO: 1888981
ucucucugccuggaacaaa

SEQ ID NO: 2570723 - RNA, 19 nt, Artificial Sequence
  Description of Artificial Sequence: Synthetic oligonucleotide
  Antisense strand to SEQ ID NO: 2570722
uuuguuccaggcagagaga

SEQ ID NO: 2570724 - RNA, 19 nt, Artificial Sequence
  Description of Artificial Sequence: Synthetic oligonucleotide
  Sense strand starting at position 3785 of SEQ ID NO: 1888981
cccaguggccuuuaaauua

SEQ ID NO: 2570725 - RNA, 19 nt, Artificial Sequence
  Description of Artificial Sequence: Synthetic oligonucleotide
  Antisense strand to SEQ ID NO: 2570724
uaauuuaaaggccacuggg

SEQ ID NO: 2570726 - RNA, 19 nt, Artificial Sequence
  Description of Artificial Sequence: Synthetic oligonucleotide
  Sense strand starting at position 3829 of SEQ ID NO: 1888981
ccagaaugcuuaucagagg

SEQ ID NO: 2570727 - RNA, 19 nt, Artificial Sequence
  Description of Artificial Sequence: Synthetic oligonucleotide
  Antisense strand to SEQ ID NO: 2570726
ccucugauaagcauucugg

SEQ ID NO: 2570728 - RNA, 19 nt, Artificial Sequence
  Description of Artificial Sequence: Synthetic oligonucleotide
  Sense strand starting at position 3975 of SEQ ID NO: 1888981
agggaaagucuuggguauc

SEQ ID NO: 2570729 - RNA, 19 nt, Artificial Sequence
  Description of Artificial Sequence: Synthetic oligonucleotide
  Antisense strand to SEQ ID NO: 2570728
gauacccaagacuuucccu

SEQ ID NO: 2570730 - RNA, 19 nt, Artificial Sequence
  Description of Artificial Sequence: Synthetic oligonucleotide
  Sense strand starting at position 8 of SEQ ID NO: 1888982
ugggaauccuucccucauc

SEQ ID NO: 2570731 - RNA, 19 nt, Artificial Sequence
  Description of Artificial Sequence: Synthetic oligonucleotide
  Antisense strand to SEQ ID NO: 2570730
gaugagggaaggauuccca

SEQ ID NO: 2570732 - RNA, 19 nt, Artificial Sequence
  Description of Artificial Sequence: Synthetic oligonucleotide
  Sense strand starting at position 9 of SEQ ID NO: 1888982
gggaauccuucccucauca

SEQ ID NO: 2570733 - RNA, 19 nt, Artificial Sequence
  Description of Artificial Sequence: Synthetic oligonucleotide
  Antisense strand to SEQ ID NO: 2570732
ugaugagggaaggauuccc

SEQ ID NO: 2570734 - RNA, 19 nt, Artificial Sequence
  Description of Artificial Sequence: Synthetic oligonucleotide
  Sense strand starting at position 20 of SEQ ID NO: 1888982
ccucaucaacauggugaau

SEQ ID NO: 2570735 - RNA, 19 nt, Artificial Sequence
  Description of Artificial Sequence: Synthetic oligonucleotide
  Antisense strand to SEQ ID NO: 2570734
auucaccauguugaugagg

SEQ ID NO: 2570736 - RNA, 19 nt, Artificial Sequence
  Description of Artificial Sequence: Synthetic oligonucleotide
  Sense strand starting at position 76 of SEQ ID NO: 1888982
uuaucugugccuuaagaua

SEQ ID NO: 2570737 - RNA, 19 nt, Artificial Sequence
  Description of Artificial Sequence: Synthetic oligonucleotide
  Antisense strand to SEQ ID NO: 2570736
uaucuuaaggcacagauaa

SEQ ID NO: 2570738 - RNA, 19 nt, Artificial Sequence
  Description of Artificial Sequence: Synthetic oligonucleotide
  Sense strand starting at position 359 of SEQ ID NO: 1888982
cugugaaaugcuuauuacg

SEQ ID NO: 2570739 - RNA, 19 nt, Artificial Sequence
  Description of Artificial Sequence: Synthetic oligonucleotide
  Antisense strand to SEQ ID NO: 2570738
cguaauaagcauuucacag

SEQ ID NO: 2570740 - RNA, 19 nt, Artificial Sequence
  Description of Artificial Sequence: Synthetic oligonucleotide
  Sense strand starting at position 466 of SEQ ID NO: 1888982
agagguuaccaaggucaca

SEQ ID NO: 2570741 - RNA, 19 nt, Artificial Sequence
  Description of Artificial Sequence: Synthetic oligonucleotide
  Antisense strand to SEQ ID NO: 2570740
ugugaccuugguaaccucu

SEQ ID NO: 2570742 - RNA, 19 nt, Artificial Sequence
  Description of Artificial Sequence: Synthetic oligonucleotide
  Sense strand starting at position 476 of SEQ ID NO: 1888982
aaggucacauagguauuaa

SEQ ID NO: 2570743 - RNA, 19 nt, Artificial Sequence
  Description of Artificial Sequence: Synthetic oligonucleotide
  Antisense strand to SEQ ID NO: 2570742
uuaauaccuaugugaccuu

SEQ ID NO: 2570744 - RNA, 19 nt, Artificial Sequence
  Description of Artificial Sequence: Synthetic oligonucleotide
  Sense strand starting at position 632 of SEQ ID NO: 1888982
ccucaauaccuguaauguu

SEQ ID NO: 2570745 - RNA, 19 nt, Artificial Sequence
  Description of Artificial Sequence: Synthetic oligonucleotide
  Antisense strand to SEQ ID NO: 2570744
aacauuacagguauugagg

SEQ ID NO: 2570746 - RNA, 19 nt, Artificial Sequence
  Description of Artificial Sequence: Synthetic oligonucleotide
  Sense strand starting at position 684 of SEQ ID NO: 1888982
uaaggcacucaguauagua

SEQ ID NO: 2570747 - RNA, 19 nt, Artificial Sequence
  Description of Artificial Sequence: Synthetic oligonucleotide
  Antisense strand to SEQ ID NO: 2570746
uacuauacugagugccuua

SEQ ID NO: 2570748 - RNA, 19 nt, Artificial Sequence
  Description of Artificial Sequence: Synthetic oligonucleotide
  Sense strand starting at position 694 of SEQ ID NO: 1888982
aguauaguaccugacacau

SEQ ID NO: 2570749 - RNA, 19 nt, Artificial Sequence
  Description of Artificial Sequence: Synthetic oligonucleotide
  Antisense strand to SEQ ID NO: 2570748
augugucagguacuauacu

SEQ ID NO: 2570750 - RNA, 19 nt, Artificial Sequence
  Description of Artificial Sequence: Synthetic oligonucleotide
  Sense strand starting at position 725 of SEQ ID NO: 1888982
ugauaugaguacuuacaca

SEQ ID NO: 2570751 - RNA, 19 nt, Artificial Sequence
  Description of Artificial Sequence: Synthetic oligonucleotide
  Antisense strand to SEQ ID NO: 2570750
uguguaaguacucauauca

SEQ ID NO: 2570752 - RNA, 19 nt, Artificial Sequence
  Description of Artificial Sequence: Synthetic oligonucleotide
  Sense strand starting at position 925 of SEQ ID NO: 1888982
caguuaucuugucucagag

SEQ ID NO: 2570753 - RNA, 19 nt, Artificial Sequence
  Description of Artificial Sequence: Synthetic oligonucleotide
  Antisense strand to SEQ ID NO: 2570752
cucugagacaagauaacug

SEQ ID NO: 2570754 - RNA, 19 nt, Artificial Sequence
  Description of Artificial Sequence: Synthetic oligonucleotide
  Sense strand starting at position 931 of SEQ ID NO: 1888982
ucuugucucagaggaaggu

SEQ ID NO: 2570755 - RNA, 19 nt, Artificial Sequence
  Description of Artificial Sequence: Synthetic oligonucleotide
  Antisense strand to SEQ ID NO: 2570754
accuuccucugagacaaga

SEQ ID NO: 2570756 - RNA, 19 nt, Artificial Sequence
  Description of Artificial Sequence: Synthetic oligonucleotide
  Sense strand starting at position 1100 of SEQ ID NO: 1888982
acugcaaauucuguaauga

SEQ ID NO: 2570757 - RNA, 19 nt, Artificial Sequence
  Description of Artificial Sequence: Synthetic oligonucleotide
  Antisense strand to SEQ ID NO: 2570756
ucauuacagaauuugcagu

SEQ ID NO: 2570758 - RNA, 19 nt, Artificial Sequence
  Description of Artificial Sequence: Synthetic oligonucleotide
  Sense strand starting at position 1101 of SEQ ID NO: 1888982
cugcaaauucuguaaugaa

SEQ ID NO: 2570759 - RNA, 19 nt, Artificial Sequence
  Description of Artificial Sequence: Synthetic oligonucleotide
  Antisense strand to SEQ ID NO: 2570758
uucauuacagaauuugcag

SEQ ID NO: 2570760 - RNA, 19 nt, Artificial Sequence
  Description of Artificial Sequence: Synthetic oligonucleotide
  Sense strand starting at position 1338 of SEQ ID NO: 1888982
ggagcugucguggauagau

SEQ ID NO: 2570761 - RNA, 19 nt, Artificial Sequence
  Description of Artificial Sequence: Synthetic oligonucleotide
  Antisense strand to SEQ ID NO: 2570760
aucuauccacgacagcucc

SEQ ID NO: 2570762 - RNA, 19 nt, Artificial Sequence
  Description of Artificial Sequence: Synthetic oligonucleotide
  Sense strand starting at position 1537 of SEQ ID NO: 1888982
gcgugaguaguugccgcaa

SEQ ID NO: 2570763 - RNA, 19 nt, Artificial Sequence
  Description of Artificial Sequence: Synthetic oligonucleotide
  Antisense strand to SEQ ID NO: 2570762
uugcggcaacuacucacgc

SEQ ID NO: 2570764 - RNA, 19 nt, Artificial Sequence
  Description of Artificial Sequence: Synthetic oligonucleotide
  Sense strand starting at position 1613 of SEQ ID NO: 1888982
ugagaaugcgaccacaacu

SEQ ID NO: 2570765 - RNA, 19 nt, Artificial Sequence
  Description of Artificial Sequence: Synthetic oligonucleotide
  Antisense strand to SEQ ID NO: 2570764
aguuguggucgcauucuca

SEQ ID NO: 2570766 - RNA, 19 nt, Artificial Sequence
  Description of Artificial Sequence: Synthetic oligonucleotide
  Sense strand starting at position 1695 of SEQ ID NO: 1888982
aagaguuccagugagaguu

SEQ ID NO: 2570767 - RNA, 19 nt, Artificial Sequence
  Description of Artificial Sequence: Synthetic oligonucleotide
  Antisense strand to SEQ ID NO: 2570766
aacucucacuggaacucuu

SEQ ID NO: 2570768 - RNA, 19 nt, Artificial Sequence
  Description of Artificial Sequence: Synthetic oligonucleotide
  Sense strand starting at position 2010 of SEQ ID NO: 1888982
ugugucuugguguaaauaa

SEQ ID NO: 2570769 - RNA, 19 nt, Artificial Sequence
  Description of Artificial Sequence: Synthetic oligonucleotide
  Antisense strand to SEQ ID NO: 2570768
uuauuuacaccaagacaca

SEQ ID NO: 2570770 - RNA, 19 nt, Artificial Sequence
  Description of Artificial Sequence: Synthetic oligonucleotide
  Sense strand starting at position 2041 of SEQ ID NO: 1888982
accgauuucgcucauccuu

SEQ ID NO: 2570771 - RNA, 19 nt, Artificial Sequence
  Description of Artificial Sequence: Synthetic oligonucleotide
  Antisense strand to SEQ ID NO: 2570770
aaggaugagcgaaaucggu

SEQ ID NO: 2570772 - RNA, 19 nt, Artificial Sequence
  Description of Artificial Sequence: Synthetic oligonucleotide
  Sense strand starting at position 2083 of SEQ ID NO: 1888982
gggucuaaauccgcacaga

SEQ ID NO: 2570773 - RNA, 19 nt, Artificial Sequence
  Description of Artificial Sequence: Synthetic oligonucleotide
  Antisense strand to SEQ ID NO: 2570772
ucugugcggauuuagaccc

SEQ ID NO: 2570774 - RNA, 19 nt, Artificial Sequence
  Description of Artificial Sequence: Synthetic oligonucleotide
  Sense strand starting at position 2115 of SEQ ID NO: 1888982
uuaggcuucuacuugaaau

SEQ ID NO: 2570775 - RNA, 19 nt, Artificial Sequence
  Description of Artificial Sequence: Synthetic oligonucleotide
  Antisense strand to SEQ ID NO: 2570774
auuucaaguagaagccuaa

SEQ ID NO: 2570776 - RNA, 19 nt, Artificial Sequence
  Description of Artificial Sequence: Synthetic oligonucleotide
  Sense strand starting at position 2218 of SEQ ID NO: 1888982
gugcuuuccgugaaugugu

SEQ ID NO: 2570777 - RNA, 19 nt, Artificial Sequence
  Description of Artificial Sequence: Synthetic oligonucleotide
  Antisense strand to SEQ ID NO: 2570776
acacauucacggaaagcac

SEQ ID NO: 2570778 - RNA, 19 nt, Artificial Sequence
  Description of Artificial Sequence: Synthetic oligonucleotide
  Sense strand starting at position 2295 of SEQ ID NO: 1888982
uguacauuugguuaugugu

SEQ ID NO: 2570779 - RNA, 19 nt, Artificial Sequence
  Description of Artificial Sequence: Synthetic oligonucleotide
  Antisense strand to SEQ ID NO: 2570778
acacauaaccaaauguaca

SEQ ID NO: 2570780 - RNA, 19 nt, Artificial Sequence
  Description of Artificial Sequence: Synthetic oligonucleotide
  Sense strand starting at position 2298 of SEQ ID NO: 1888982
acauuugguuaugugugua

SEQ ID NO: 2570781 - RNA, 19 nt, Artificial Sequence
  Description of Artificial Sequence: Synthetic oligonucleotide
  Antisense strand to SEQ ID NO: 2570780
uacacacauaaccaaaugu

SEQ ID NO: 2570782 - RNA, 19 nt, Artificial Sequence
  Description of Artificial Sequence: Synthetic oligonucleotide
  Sense strand starting at position 2371 of SEQ ID NO: 1888982
cggagucuauuugaauuaa

SEQ ID NO: 2570783 - RNA, 19 nt, Artificial Sequence
  Description of Artificial Sequence: Synthetic oligonucleotide
  Antisense strand to SEQ ID NO: 2570782
uuaauucaaauagacuccg

SEQ ID NO: 2570784 - RNA, 19 nt, Artificial Sequence
  Description of Artificial Sequence: Synthetic oligonucleotide
  Sense strand starting at position 2454 of SEQ ID NO: 1888982
guguuuauuucaguguugu

SEQ ID NO: 2570785 - RNA, 19 nt, Artificial Sequence
  Description of Artificial Sequence: Synthetic oligonucleotide
  Antisense strand to SEQ ID NO: 2570784
acaacacugaaauaaacac

SEQ ID NO: 2570786 - RNA, 19 nt, Artificial Sequence
  Description of Artificial Sequence: Synthetic oligonucleotide
  Sense strand starting at position 2507 of SEQ ID NO: 1888982
ggccacuuaucuuugaauu

SEQ ID NO: 2570787 - RNA, 19 nt, Artificial Sequence
  Description of Artificial Sequence: Synthetic oligonucleotide
  Antisense strand to SEQ ID NO: 2570786
aauucaaagauaaguggcc

SEQ ID NO: 2570788 - RNA, 19 nt, Artificial Sequence
  Description of Artificial Sequence: Synthetic oligonucleotide
  Sense strand starting at position 2548 of SEQ ID NO: 1888982
guauaaguauguuccauac

SEQ ID NO: 2570789 - RNA, 19 nt, Artificial Sequence
  Description of Artificial Sequence: Synthetic oligonucleotide
  Antisense strand to SEQ ID NO: 2570788
guauggaacauacuuauac

SEQ ID NO: 2570790 - RNA, 19 nt, Artificial Sequence
  Description of Artificial Sequence: Synthetic oligonucleotide
  Sense strand starting at position 2575 of SEQ ID NO: 1888982
aguagaaagugacuacuuu

SEQ ID NO: 2570791 - RNA, 19 nt, Artificial Sequence
  Description of Artificial Sequence: Synthetic oligonucleotide
  Antisense strand to SEQ ID NO: 2570790
aaaguagucacuuucuacu

SEQ ID NO: 2570792 - RNA, 19 nt, Artificial Sequence
  Description of Artificial Sequence: Synthetic oligonucleotide
  Sense strand starting at position 3003 of SEQ ID NO: 1888982
uuucgcuugcuguuugaga

SEQ ID NO: 2570793 - RNA, 19 nt, Artificial Sequence
  Description of Artificial Sequence: Synthetic oligonucleotide
  Antisense strand to SEQ ID NO: 2570792
ucucaaacagcaagcgaaa

SEQ ID NO: 2570794 - RNA, 19 nt, Artificial Sequence
  Description of Artificial Sequence: Synthetic oligonucleotide
  Sense strand starting at position 3176 of SEQ ID NO: 1888982
aagcuugucuaagcacaga

SEQ ID NO: 2570795 - RNA, 19 nt, Artificial Sequence
  Description of Artificial Sequence: Synthetic oligonucleotide
  Antisense strand to SEQ ID NO: 2570794
ucugugcuuagacaagcuu

SEQ ID NO: 2570796 - RNA, 19 nt, Artificial Sequence
  Description of Artificial Sequence: Synthetic oligonucleotide
  Sense strand starting at position 3248 of SEQ ID NO: 1888982
aagauaggucacugcuacu

SEQ ID NO: 2570797 - RNA, 19 nt, Artificial Sequence
  Description of Artificial Sequence: Synthetic oligonucleotide
  Antisense strand to SEQ ID NO: 2570796
aguagcagugaccuaucuu

SEQ ID NO: 2570798 - RNA, 19 nt, Artificial Sequence
  Description of Artificial Sequence: Synthetic oligonucleotide
  Sense strand starting at position 3375 of SEQ ID NO: 1888982
gacggaacuccugauuccu

SEQ ID NO: 2570799 - RNA, 19 nt, Artificial Sequence
  Description of Artificial Sequence: Synthetic oligonucleotide
  Antisense strand to SEQ ID NO: 2570798
aggaaucaggaguuccguc

SEQ ID NO: 2570800 - RNA, 19 nt, Artificial Sequence
  Description of Artificial Sequence: Synthetic oligonucleotide
  Sense strand starting at position 3519 of SEQ ID NO: 1888982
gucaacuauggguauguuu

SEQ ID NO: 2570801 - RNA, 19 nt, Artificial Sequence
  Description of Artificial Sequence: Synthetic oligonucleotide
  Antisense strand to SEQ ID NO: 2570800
aaacauacccauaguugac

SEQ ID NO: 2570802 - RNA, 19 nt, Artificial Sequence
  Description of Artificial Sequence: Synthetic oligonucleotide
  Sense strand starting at position 3665 of SEQ ID NO: 1888982
ugugcuugaccacacaauu

SEQ ID NO: 2570803 - RNA, 19 nt, Artificial Sequence
  Description of Artificial Sequence: Synthetic oligonucleotide
  Antisense strand to SEQ ID NO: 2570802
aauuguguggucaagcaca

SEQ ID NO: 2570804 - RNA, 19 nt, Artificial Sequence
  Description of Artificial Sequence: Synthetic oligonucleotide
  Sense strand starting at position 3783 of SEQ ID NO: 1888982
acaaauguugauuguaugu

SEQ ID NO: 2570805 - RNA, 19 nt, Artificial Sequence
  Description of Artificial Sequence: Synthetic oligonucleotide
  Antisense strand to SEQ ID NO: 2570804
acauacaaucaacauuugu

SEQ ID NO: 2570806 - RNA, 19 nt, Artificial Sequence
  Description of Artificial Sequence: Synthetic oligonucleotide
  Sense strand starting at position 3815 of SEQ ID NO: 1888982
auguaaguuccaugaagac

SEQ ID NO: 2570807 - RNA, 19 nt, Artificial Sequence
  Description of Artificial Sequence: Synthetic oligonucleotide
  Antisense strand to SEQ ID NO: 2570806
gucuucauggaacuuacau

SEQ ID NO: 2570808 - RNA, 19 nt, Artificial Sequence
  Description of Artificial Sequence: Synthetic oligonucleotide
  Sense strand starting at position 3982 of SEQ ID NO: 1888982
auugucacauagucauaau

SEQ ID NO: 2570809 - RNA, 19 nt, Artificial Sequence
  Description of Artificial Sequence: Synthetic oligonucleotide
  Antisense strand to SEQ ID NO: 2570808
auuaugacuaugugacaau

SEQ ID NO: 2570810 - RNA, 19 nt, Artificial Sequence
  Description of Artificial Sequence: Synthetic oligonucleotide
  Sense strand starting at position 204 of SEQ ID NO: 1888983
gaaccaauuucuggaggga

SEQ ID NO: 2570811 - RNA, 19 nt, Artificial Sequence
  Description of Artificial Sequence: Synthetic oligonucleotide
  Antisense strand to SEQ ID NO: 2570810
ucccuccagaaauugguuc

SEQ ID NO: 2570812 - RNA, 19 nt, Artificial Sequence
  Description of Artificial Sequence: Synthetic oligonucleotide
  Sense strand starting at position 581 of SEQ ID NO: 1888983
gguguugugguguacauuu

SEQ ID NO: 2570813 - RNA, 19 nt, Artificial Sequence
  Description of Artificial Sequence: Synthetic oligonucleotide
  Antisense strand to SEQ ID NO: 2570812
aaauguacaccacaacacc

SEQ ID NO: 2570814 - RNA, 19 nt, Artificial Sequence
  Description of Artificial Sequence: Synthetic oligonucleotide
  Sense strand starting at position 626 of SEQ ID NO: 1888983
guauauugcaaguaguaag

SEQ ID NO: 2570815 - RNA, 19 nt, Artificial Sequence
  Description of Artificial Sequence: Synthetic oligonucleotide
  Antisense strand to SEQ ID NO: 2570814
cuuacuacuugcaauauac

SEQ ID NO: 2570816 - RNA, 19 nt, Artificial Sequence
  Description of Artificial Sequence: Synthetic oligonucleotide
  Sense strand starting at position 677 of SEQ ID NO: 1888983
gguuauauauugucuacau

SEQ ID NO: 2570817 - RNA, 19 nt, Artificial Sequence
  Description of Artificial Sequence: Synthetic oligonucleotide
  Antisense strand to SEQ ID NO: 2570816
auguagacaauauauaacc

SEQ ID NO: 2570818 - RNA, 19 nt, Artificial Sequence
  Description of Artificial Sequence: Synthetic oligonucleotide
  Sense strand starting at position 678 of SEQ ID NO: 1888983
guuauauauugucuacaug

SEQ ID NO: 2570819 - RNA, 19 nt, Artificial Sequence
  Description of Artificial Sequence: Synthetic oligonucleotide
  Antisense strand to SEQ ID NO: 2570818
cauguagacaauauauaac

SEQ ID NO: 2570820 - RNA, 19 nt, Artificial Sequence
  Description of Artificial Sequence: Synthetic oligonucleotide
  Sense strand starting at position 681 of SEQ ID NO: 1888983
auauauugucuacaugugu

SEQ ID NO: 2570821 - RNA, 19 nt, Artificial Sequence
  Description of Artificial Sequence: Synthetic oligonucleotide
  Antisense strand to SEQ ID NO: 2570820
acacauguagacaauauau

SEQ ID NO: 2570822 - RNA, 19 nt, Artificial Sequence
  Description of Artificial Sequence: Synthetic oligonucleotide
  Sense strand starting at position 695 of SEQ ID NO: 1888983
uguguacuaggucacaaua

SEQ ID NO: 2570823 - RNA, 19 nt, Artificial Sequence
  Description of Artificial Sequence: Synthetic oligonucleotide
  Antisense strand to SEQ ID NO: 2570822
uauugugaccuaguacaca

SEQ ID NO: 2570824 - RNA, 19 nt, Artificial Sequence
  Description of Artificial Sequence: Synthetic oligonucleotide
  Sense strand starting at position 914 of SEQ ID NO: 1888983
acaguaauaagcggaauua

SEQ ID NO: 2570825 - RNA, 19 nt, Artificial Sequence
  Description of Artificial Sequence: Synthetic oligonucleotide
  Antisense strand to SEQ ID NO: 2570824
uaauuccgcuuauuacugu

SEQ ID NO: 2570826 - RNA, 19 nt, Artificial Sequence
  Description of Artificial Sequence: Synthetic oligonucleotide
  Sense strand starting at position 915 of SEQ ID NO: 1888983
caguaauaagcggaauuaa

SEQ ID NO: 2570827 - RNA, 19 nt, Artificial Sequence
  Description of Artificial Sequence: Synthetic oligonucleotide
  Antisense strand to SEQ ID NO: 2570826
uuaauuccgcuuauuacug

SEQ ID NO: 2570828 - RNA, 19 nt, Artificial Sequence
  Description of Artificial Sequence: Synthetic oligonucleotide
  Sense strand starting at position 924 of SEQ ID NO: 1888983
gcggaauuaagguauuggu

SEQ ID NO: 2570829 - RNA, 19 nt, Artificial Sequence
  Description of Artificial Sequence: Synthetic oligonucleotide
  Antisense strand to SEQ ID NO: 2570828
accaauaccuuaauuccgc

SEQ ID NO: 2570830 - RNA, 19 nt, Artificial Sequence
  Description of Artificial Sequence: Synthetic oligonucleotide
  Sense strand starting at position 956 of SEQ ID NO: 1888983
ggccaauaacguuacuuua

SEQ ID NO: 2570831 - RNA, 19 nt, Artificial Sequence
  Description of Artificial Sequence: Synthetic oligonucleotide
  Antisense strand to SEQ ID NO: 2570830
uaaaguaacguuauuggcc

SEQ ID NO: 2570832 - RNA, 19 nt, Artificial Sequence
  Description of Artificial Sequence: Synthetic oligonucleotide
  Sense strand starting at position 1003 of SEQ ID NO: 1888983
uuguuuacuguagauaaga

SEQ ID NO: 2570833 - RNA, 19 nt, Artificial Sequence
  Description of Artificial Sequence: Synthetic oligonucleotide
  Antisense strand to SEQ ID NO: 2570832
ucuuaucuacaguaaacaa

SEQ ID NO: 2570834 - RNA, 19 nt, Artificial Sequence
  Description of Artificial Sequence: Synthetic oligonucleotide
  Sense strand starting at position 1057 of SEQ ID NO: 1888983
ucucuuaugccagauggga

SEQ ID NO: 2570835 - RNA, 19 nt, Artificial Sequence
  Description of Artificial Sequence: Synthetic oligonucleotide
  Antisense strand to SEQ ID NO: 2570834
ucccaucuggcauaagaga

SEQ ID NO: 2570836 - RNA, 19 nt, Artificial Sequence
  Description of Artificial Sequence: Synthetic oligonucleotide
  Sense strand starting at position 1070 of SEQ ID NO: 1888983
augggauggucguuaagaa

SEQ ID NO: 2570837 - RNA, 19 nt, Artificial Sequence
  Description of Artificial Sequence: Synthetic oligonucleotide
  Antisense strand to SEQ ID NO: 2570836
uucuuaacgaccaucccau

SEQ ID NO: 2570838 - RNA, 19 nt, Artificial Sequence
  Description of Artificial Sequence: Synthetic oligonucleotide
  Sense strand starting at position 1071 of SEQ ID NO: 1888983
ugggauggucguuaagaaa

SEQ ID NO: 2570839 - RNA, 19 nt, Artificial Sequence
  Description of Artificial Sequence: Synthetic oligonucleotide
  Antisense strand to SEQ ID NO: 2570838
uuucuuaacgaccauccca

SEQ ID NO: 2570840 - RNA, 19 nt, Artificial Sequence
  Description of Artificial Sequence: Synthetic oligonucleotide
  Sense strand starting at position 1080 of SEQ ID NO: 1888983
cguuaagaaaugcauggua

SEQ ID NO: 2570841 - RNA, 19 nt, Artificial Sequence
  Description of Artificial Sequence: Synthetic oligonucleotide
  Antisense strand to SEQ ID NO: 2570840
uaccaugcauuucuuaacg

SEQ ID NO: 2570842 - RNA, 19 nt, Artificial Sequence
  Description of Artificial Sequence: Synthetic oligonucleotide
  Sense strand starting at position 1082 of SEQ ID NO: 1888983
uuaagaaaugcaugguaua

SEQ ID NO: 2570843 - RNA, 19 nt, Artificial Sequence
  Description of Artificial Sequence: Synthetic oligonucleotide
  Antisense strand to SEQ ID NO: 2570842
uauaccaugcauuucuuaa

SEQ ID NO: 2570844 - RNA, 19 nt, Artificial Sequence
  Description of Artificial Sequence: Synthetic oligonucleotide
  Sense strand starting at position 1196 of SEQ ID NO: 1888983
acuauugaucauggcuaau

SEQ ID NO: 2570845 - RNA, 19 nt, Artificial Sequence
  Description of Artificial Sequence: Synthetic oligonucleotide
  Antisense strand to SEQ ID NO: 2570844
auuagccaugaucaauagu

SEQ ID NO: 2570846 - RNA, 19 nt, Artificial Sequence
  Description of Artificial Sequence: Synthetic oligonucleotide
  Sense strand starting at position 1280 of SEQ ID NO: 1888983
cacggaauuuaugggaaac

SEQ ID NO: 2570847 - RNA, 19 nt, Artificial Sequence
  Description of Artificial Sequence: Synthetic oligonucleotide
  Antisense strand to SEQ ID NO: 2570846
guuucccauaaauuccgug

SEQ ID NO: 2570848 - RNA, 19 nt, Artificial Sequence
  Description of Artificial Sequence: Synthetic oligonucleotide
  Sense strand starting at position 1282 of SEQ ID NO: 1888983
cggaauuuaugggaaacua

SEQ ID NO: 2570849 - RNA, 19 nt, Artificial Sequence
  Description of Artificial Sequence: Synthetic oligonucleotide
  Antisense strand to SEQ ID NO: 2570848
uaguuucccauaaauuccg

SEQ ID NO: 2570850 - RNA, 19 nt, Artificial Sequence
  Description of Artificial Sequence: Synthetic oligonucleotide
  Sense strand starting at position 1301 of SEQ ID NO: 1888983
ggguaacaacucuaucucu

SEQ ID NO: 2570851 - RNA, 19 nt, Artificial Sequence
  Description of Artificial Sequence: Synthetic oligonucleotide
  Antisense strand to SEQ ID NO: 2570850
agagauagaguuguuaccc

SEQ ID NO: 2570852 - RNA, 19 nt, Artificial Sequence
  Description of Artificial Sequence: Synthetic oligonucleotide
  Sense strand starting at position 1740 of SEQ ID NO: 1888983
gaguccucagaucgggaau

SEQ ID NO: 2570853 - RNA, 19 nt, Artificial Sequence
  Description of Artificial Sequence: Synthetic oligonucleotide
  Antisense strand to SEQ ID NO: 2570852
auucccgaucugaggacuc

SEQ ID NO: 2570854 - RNA, 19 nt, Artificial Sequence
  Description of Artificial Sequence: Synthetic oligonucleotide
  Sense strand starting at position 2010 of SEQ ID NO: 1888983
cgaccugguuaacuagaaa

SEQ ID NO: 2570855 - RNA, 19 nt, Artificial Sequence
  Description of Artificial Sequence: Synthetic oligonucleotide
  Antisense strand to SEQ ID NO: 2570854
uuucuaguuaaccaggucg

SEQ ID NO: 2570856 - RNA, 19 nt, Artificial Sequence
  Description of Artificial Sequence: Synthetic oligonucleotide
  Sense strand starting at position 2078 of SEQ ID NO: 1888983
ugcagucucagaugagacu

SEQ ID NO: 2570857 - RNA, 19 nt, Artificial Sequence
  Description of Artificial Sequence: Synthetic oligonucleotide
  Antisense strand to SEQ ID NO: 2570856
agucucaucugagacugca

SEQ ID NO: 2570858 - RNA, 19 nt, Artificial Sequence
  Description of Artificial Sequence: Synthetic oligonucleotide
  Sense strand starting at position 2097 of SEQ ID NO: 1888983
cuucuaugauuggccagaa

SEQ ID NO: 2570859 - RNA, 19 nt, Artificial Sequence
  Description of Artificial Sequence: Synthetic oligonucleotide
  Antisense strand to SEQ ID NO: 2570858
uucuggccaaucauagaag

SEQ ID NO: 2570860 - RNA, 19 nt, Artificial Sequence
  Description of Artificial Sequence: Synthetic oligonucleotide
  Sense strand starting at position 2098 of SEQ ID NO: 1888983
uucuaugauuggccagaaa

SEQ ID NO: 2570861 - RNA, 19 nt, Artificial Sequence
  Description of Artificial Sequence: Synthetic oligonucleotide
  Antisense strand to SEQ ID NO: 2570860
uuucuggccaaucauagaa

SEQ ID NO: 2570862 - RNA, 19 nt, Artificial Sequence
  Description of Artificial Sequence: Synthetic oligonucleotide
  Sense strand starting at position 2294 of SEQ ID NO: 1888983
agaugcuguggcuaucaga

SEQ ID NO: 2570863 - RNA, 19 nt, Artificial Sequence
  Description of Artificial Sequence: Synthetic oligonucleotide
  Antisense strand to SEQ ID NO: 2570862
ucugauagccacagcaucu

SEQ ID NO: 2570864 - RNA, 19 nt, Artificial Sequence
  Description of Artificial Sequence: Synthetic oligonucleotide
  Sense strand starting at position 2386 of SEQ ID NO: 1888983
gaagacccguucccuaaau

SEQ ID NO: 2570865 - RNA, 19 nt, Artificial Sequence
  Description of Artificial Sequence: Synthetic oligonucleotide
  Antisense strand to SEQ ID NO: 2570864
auuuagggaacgggucuuc

SEQ ID NO: 2570866 - RNA, 19 nt, Artificial Sequence
  Description of Artificial Sequence: Synthetic oligonucleotide
  Sense strand starting at position 2432 of SEQ ID NO: 1888983
cccgcuauccuagacucua

SEQ ID NO: 2570867 - RNA, 19 nt, Artificial Sequence
  Description of Artificial Sequence: Synthetic oligonucleotide
  Antisense strand to SEQ ID NO: 2570866
uagagucuaggauagcggg

SEQ ID NO: 2570868 - RNA, 19 nt, Artificial Sequence
  Description of Artificial Sequence: Synthetic oligonucleotide
  Sense strand starting at position 2496 of SEQ ID NO: 1888983
gugaaagauggaugcugau

SEQ ID NO: 2570869 - RNA, 19 nt, Artificial Sequence
  Description of Artificial Sequence: Synthetic oligonucleotide
  Antisense strand to SEQ ID NO: 2570868
aucagcauccaucuuucac

SEQ ID NO: 2570870 - RNA, 19 nt, Artificial Sequence
  Description of Artificial Sequence: Synthetic oligonucleotide
  Sense strand starting at position 2612 of SEQ ID NO: 1888983
ugacuaauuugggaaugua

SEQ ID NO: 2570871 - RNA, 19 nt, Artificial Sequence
  Description of Artificial Sequence: Synthetic oligonucleotide
  Antisense strand to SEQ ID NO: 2570870
uacauucccaaauuaguca

SEQ ID NO: 2570872 - RNA, 19 nt, Artificial Sequence
  Description of Artificial Sequence: Synthetic oligonucleotide
  Sense strand starting at position 2999 of SEQ ID NO: 1888983
guuugacuguaacuaucaa

SEQ ID NO: 2570873 - RNA, 19 nt, Artificial Sequence
  Description of Artificial Sequence: Synthetic oligonucleotide
  Antisense strand to SEQ ID NO: 2570872
uugauaguuacagucaaac

SEQ ID NO: 2570874 - RNA, 19 nt, Artificial Sequence
  Description of Artificial Sequence: Synthetic oligonucleotide
  Sense strand starting at position 3088 of SEQ ID NO: 1888983
aggagucauuacuccuuaa

SEQ ID NO: 2570875 - RNA, 19 nt, Artificial Sequence
  Description of Artificial Sequence: Synthetic oligonucleotide
  Antisense strand to SEQ ID NO: 2570874
uuaaggaguaaugacuccu

SEQ ID NO: 2570876 - RNA, 19 nt, Artificial Sequence
  Description of Artificial Sequence: Synthetic oligonucleotide
  Sense strand starting at position 3091 of SEQ ID NO: 1888983
agucauuacuccuuaagag

SEQ ID NO: 2570877 - RNA, 19 nt, Artificial Sequence
  Description of Artificial Sequence: Synthetic oligonucleotide
  Antisense strand to SEQ ID NO: 2570876
cucuuaaggaguaaugacu

SEQ ID NO: 2570878 - RNA, 19 nt, Artificial Sequence
  Description of Artificial Sequence: Synthetic oligonucleotide
  Sense strand starting at position 3092 of SEQ ID NO: 1888983
gucauuacuccuuaagagc

SEQ ID NO: 2570879 - RNA, 19 nt, Artificial Sequence
  Description of Artificial Sequence: Synthetic oligonucleotide
  Antisense strand to SEQ ID NO: 2570878
gcucuuaaggaguaaugac

SEQ ID NO: 2570880 - RNA, 19 nt, Artificial Sequence
  Description of Artificial Sequence: Synthetic oligonucleotide
  Sense strand starting at position 3537 of SEQ ID NO: 1888983
uuuagauagagguggagua

SEQ ID NO: 2570881 - RNA, 19 nt, Artificial Sequence
  Description of Artificial Sequence: Synthetic oligonucleotide
  Antisense strand to SEQ ID NO: 2570880
uacuccaccucuaucuaaa

SEQ ID NO: 2570882 - RNA, 19 nt, Artificial Sequence
  Description of Artificial Sequence: Synthetic oligonucleotide
  Sense strand starting at position 3615 of SEQ ID NO: 1888983
uguacuauagagcauucga

SEQ ID NO: 2570883 - RNA, 19 nt, Artificial Sequence
  Description of Artificial Sequence: Synthetic oligonucleotide
  Antisense strand to SEQ ID NO: 2570882
ucgaaugcucuauaguaca

SEQ ID NO: 2570884 - RNA, 19 nt, Artificial Sequence
  Description of Artificial Sequence: Synthetic oligonucleotide
  Sense strand starting at position 3630 of SEQ ID NO: 1888983
ucgauaauucaggaugggu

SEQ ID NO: 2570885 - RNA, 19 nt, Artificial Sequence
  Description of Artificial Sequence: Synthetic oligonucleotide
  Antisense strand to SEQ ID NO: 2570884
acccauccugaauuaucga

SEQ ID NO: 2570886 - RNA, 19 nt, Artificial Sequence
  Description of Artificial Sequence: Synthetic oligonucleotide
  Sense strand starting at position 3700 of SEQ ID NO: 1888983
aacucagcacuuugagagu

SEQ ID NO: 2570887 - RNA, 19 nt, Artificial Sequence
  Description of Artificial Sequence: Synthetic oligonucleotide
  Antisense strand to SEQ ID NO: 2570886
acucucaaagugcugaguu

SEQ ID NO: 2570888 - RNA, 19 nt, Artificial Sequence
  Description of Artificial Sequence: Synthetic oligonucleotide
  Sense strand starting at position 3716 of SEQ ID NO: 1888983
aguccuaagcgagggauca

SEQ ID NO: 2570889 - RNA, 19 nt, Artificial Sequence
  Description of Artificial Sequence: Synthetic oligonucleotide
  Antisense strand to SEQ ID NO: 2570888
ugaucccucgcuuaggacu

SEQ ID NO: 2570890 - RNA, 19 nt, Artificial Sequence
  Description of Artificial Sequence: Synthetic oligonucleotide
  Sense strand starting at position 118 of SEQ ID NO: 1888984
agauuauaugcugaccuau

SEQ ID NO: 2570891 - RNA, 19 nt, Artificial Sequence
  Description of Artificial Sequence: Synthetic oligonucleotide
  Antisense strand to SEQ ID NO: 2570890
auaggucagcauauaaucu

SEQ ID NO: 2570892 - RNA, 19 nt, Artificial Sequence
  Description of Artificial Sequence: Synthetic oligonucleotide
  Sense strand starting at position 200 of SEQ ID NO: 1888984
gaggguauugguggguuau

SEQ ID NO: 2570893 - RNA, 19 nt, Artificial Sequence
  Description of Artificial Sequence: Synthetic oligonucleotide
  Antisense strand to SEQ ID NO: 2570892
auaacccaccaauacccuc

SEQ ID NO: 2570894 - RNA, 19 nt, Artificial Sequence
  Description of Artificial Sequence: Synthetic oligonucleotide
  Sense strand starting at position 669 of SEQ ID NO: 1888984
gaaucuguguggucuagag

SEQ ID NO: 2570895 - RNA, 19 nt, Artificial Sequence
  Description of Artificial Sequence: Synthetic oligonucleotide
  Antisense strand to SEQ ID NO: 2570894
cucuagaccacacagauuc

SEQ ID NO: 2570896 - RNA, 19 nt, Artificial Sequence
  Description of Artificial Sequence: Synthetic oligonucleotide
  Sense strand starting at position 912 of SEQ ID NO: 1888984
ugcagaauugguuagcuac

SEQ ID NO: 2570897 - RNA, 19 nt, Artificial Sequence
  Description of Artificial Sequence: Synthetic oligonucleotide
  Antisense strand to SEQ ID NO: 2570896
guagcuaaccaauucugca

SEQ ID NO: 2570898 - RNA, 19 nt, Artificial Sequence
  Description of Artificial Sequence: Synthetic oligonucleotide
  Sense strand starting at position 914 of SEQ ID NO: 1888984
cagaauugguuagcuacaa

SEQ ID NO: 2570899 - RNA, 19 nt, Artificial Sequence
  Description of Artificial Sequence: Synthetic oligonucleotide
  Antisense strand to SEQ ID NO: 2570898
uuguagcuaaccaauucug

SEQ ID NO: 2570900 - RNA, 19 nt, Artificial Sequence
  Description of Artificial Sequence: Synthetic oligonucleotide
  Sense strand starting at position 915 of SEQ ID NO: 1888984
agaauugguuagcuacaau

SEQ ID NO: 2570901 - RNA, 19 nt, Artificial Sequence
  Description of Artificial Sequence: Synthetic oligonucleotide
  Antisense strand to SEQ ID NO: 2570900
auuguagcuaaccaauucu

SEQ ID NO: 2570902 - RNA, 19 nt, Artificial Sequence
  Description of Artificial Sequence: Synthetic oligonucleotide
  Sense strand starting at position 1004 of SEQ ID NO: 1888984
auuguauuccuuuauggaa

SEQ ID NO: 2570903 - RNA, 19 nt, Artificial Sequence
  Description of Artificial Sequence: Synthetic oligonucleotide
  Antisense strand to SEQ ID NO: 2570902
uuccauaaaggaauacaau

SEQ ID NO: 2570904 - RNA, 19 nt, Artificial Sequence
  Description of Artificial Sequence: Synthetic oligonucleotide
  Sense strand starting at position 1377 of SEQ ID NO: 1888984
uaccaaaugugguuuggau

SEQ ID NO: 2570905 - RNA, 19 nt, Artificial Sequence
  Description of Artificial Sequence: Synthetic oligonucleotide
  Antisense strand to SEQ ID NO: 2570904
auccaaaccacauuuggua

SEQ ID NO: 2570906 - RNA, 19 nt, Artificial Sequence
  Description of Artificial Sequence: Synthetic oligonucleotide
  Sense strand starting at position 1392 of SEQ ID NO: 1888984
ggaugcagauguuuauuau

SEQ ID NO: 2570907 - RNA, 19 nt, Artificial Sequence
  Description of Artificial Sequence: Synthetic oligonucleotide
  Antisense strand to SEQ ID NO: 2570906
auaauaaacaucugcaucc

SEQ ID NO: 2570908 - RNA, 19 nt, Artificial Sequence
  Description of Artificial Sequence: Synthetic oligonucleotide
  Sense strand starting at position 1395 of SEQ ID NO: 1888984
ugcagauguuuauuauaga

SEQ ID NO: 2570909 - RNA, 19 nt, Artificial Sequence
  Description of Artificial Sequence: Synthetic oligonucleotide
  Antisense strand to SEQ ID NO: 2570908
ucuauaauaaacaucugca

SEQ ID NO: 2570910 - RNA, 19 nt, Artificial Sequence
  Description of Artificial Sequence: Synthetic oligonucleotide
  Sense strand starting at position 1441 of SEQ ID NO: 1888984
uguugauauuuguuacagu

SEQ ID NO: 2570911 - RNA, 19 nt, Artificial Sequence
  Description of Artificial Sequence: Synthetic oligonucleotide
  Antisense strand to SEQ ID NO: 2570910
acuguaacaaauaucaaca

SEQ ID NO: 2570912 - RNA, 19 nt, Artificial Sequence
  Description of Artificial Sequence: Synthetic oligonucleotide
  Sense strand starting at position 1477 of SEQ ID NO: 1888984
aguccuuuagcacagggau

SEQ ID NO: 2570913 - RNA, 19 nt, Artificial Sequence
  Description of Artificial Sequence: Synthetic oligonucleotide
  Antisense strand to SEQ ID NO: 2570912
aucccugugcuaaaggacu

SEQ ID NO: 2570914 - RNA, 19 nt, Artificial Sequence
  Description of Artificial Sequence: Synthetic oligonucleotide
  Sense strand starting at position 1480 of SEQ ID NO: 1888984
ccuuuagcacagggauauu

SEQ ID NO: 2570915 - RNA, 19 nt, Artificial Sequence
  Description of Artificial Sequence: Synthetic oligonucleotide
  Antisense strand to SEQ ID NO: 2570914
aauaucccugugcuaaagg

SEQ ID NO: 2570916 - RNA, 19 nt, Artificial Sequence
  Description of Artificial Sequence: Synthetic oligonucleotide
  Sense strand starting at position 1624 of SEQ ID NO: 1888984
cagguaauucuuugggagu

SEQ ID NO: 2570917 - RNA, 19 nt, Artificial Sequence
  Description of Artificial Sequence: Synthetic oligonucleotide
  Antisense strand to SEQ ID NO: 2570916
acucccaaagaauuaccug

SEQ ID NO: 2570918 - RNA, 19 nt, Artificial Sequence
  Description of Artificial Sequence: Synthetic oligonucleotide
  Sense strand starting at position 2147 of SEQ ID NO: 1888984
ccaucacaagcuugagagu

SEQ ID NO: 2570919 - RNA, 19 nt, Artificial Sequence
  Description of Artificial Sequence: Synthetic oligonucleotide
  Antisense strand to SEQ ID NO: 2570918
acucucaagcuugugaugg

SEQ ID NO: 2570920 - RNA, 19 nt, Artificial Sequence
  Description of Artificial Sequence: Synthetic oligonucleotide
  Sense strand starting at position 2307 of SEQ ID NO: 1888984
ccugaugugcacuauaauu

SEQ ID NO: 2570921 - RNA, 19 nt, Artificial Sequence
  Description of Artificial Sequence: Synthetic oligonucleotide
  Antisense strand to SEQ ID NO: 2570920
aauuauagugcacaucagg

SEQ ID NO: 2570922 - RNA, 19 nt, Artificial Sequence
  Description of Artificial Sequence: Synthetic oligonucleotide
  Sense strand starting at position 2494 of SEQ ID NO: 1888984
auaauaacagagugaucgu

SEQ ID NO: 2570923 - RNA, 19 nt, Artificial Sequence
  Description of Artificial Sequence: Synthetic oligonucleotide
  Antisense strand to SEQ ID NO: 2570922
acgaucacucuguuauuau

SEQ ID NO: 2570924 - RNA, 19 nt, Artificial Sequence
  Description of Artificial Sequence: Synthetic oligonucleotide
  Sense strand starting at position 2501 of SEQ ID NO: 1888984
cagagugaucguuacuauu

SEQ ID NO: 2570925 - RNA, 19 nt, Artificial Sequence
  Description of Artificial Sequence: Synthetic oligonucleotide
  Antisense strand to SEQ ID NO: 2570924
aauaguaacgaucacucug

SEQ ID NO: 2570926 - RNA, 19 nt, Artificial Sequence
  Description of Artificial Sequence: Synthetic oligonucleotide
  Sense strand starting at position 2686 of SEQ ID NO: 1888984
agauguuaaucuguuggau

SEQ ID NO: 2570927 - RNA, 19 nt, Artificial Sequence
  Description of Artificial Sequence: Synthetic oligonucleotide
  Antisense strand to SEQ ID NO: 2570926
auccaacagauuaacaucu

SEQ ID NO: 2570928 - RNA, 19 nt, Artificial Sequence
  Description of Artificial Sequence: Synthetic oligonucleotide
  Sense strand starting at position 2689 of SEQ ID NO: 1888984
uguuaaucuguuggauaga

SEQ ID NO: 2570929 - RNA, 19 nt, Artificial Sequence
  Description of Artificial Sequence: Synthetic oligonucleotide
  Antisense strand to SEQ ID NO: 2570928
ucuauccaacagauuaaca

SEQ ID NO: 2570930 - RNA, 19 nt, Artificial Sequence
  Description of Artificial Sequence: Synthetic oligonucleotide
  Sense strand starting at position 2700 of SEQ ID NO: 1888984
uggauagagcgcuagagua

SEQ ID NO: 2570931 - RNA, 19 nt, Artificial Sequence
  Description of Artificial Sequence: Synthetic oligonucleotide
  Antisense strand to SEQ ID NO: 2570930
uacucuagcgcucuaucca

SEQ ID NO: 2570932 - RNA, 19 nt, Artificial Sequence
  Description of Artificial Sequence: Synthetic oligonucleotide
  Sense strand starting at position 2827 of SEQ ID NO: 1888984
guguguaguaaugaagauu

SEQ ID NO: 2570933 - RNA, 19 nt, Artificial Sequence
  Description of Artificial Sequence: Synthetic oligonucleotide
  Antisense strand to SEQ ID NO: 2570932
aaucuucauuacuacacac

SEQ ID NO: 2570934 - RNA, 19 nt, Artificial Sequence
  Description of Artificial Sequence: Synthetic oligonucleotide
  Sense strand starting at position 2844 of SEQ ID NO: 1888984
uuaagaauauugcugccau

SEQ ID NO: 2570935 - RNA, 19 nt, Artificial Sequence
  Description of Artificial Sequence: Synthetic oligonucleotide
  Antisense strand to SEQ ID NO: 2570934
auggcagcaauauucuuaa

SEQ ID NO: 2570936 - RNA, 19 nt, Artificial Sequence
  Description of Artificial Sequence: Synthetic oligonucleotide
  Sense strand starting at position 2863 of SEQ ID NO: 1888984
ugcugaguuaaggaaguaa

SEQ ID NO: 2570937 - RNA, 19 nt, Artificial Sequence
  Description of Artificial Sequence: Synthetic oligonucleotide
  Antisense strand to SEQ ID NO: 2570936
uuacuuccuuaacucagca

SEQ ID NO: 2570938 - RNA, 19 nt, Artificial Sequence
  Description of Artificial Sequence: Synthetic oligonucleotide
  Sense strand starting at position 2874 of SEQ ID NO: 1888984
ggaaguaaucaugauugcu

SEQ ID NO: 2570939 - RNA, 19 nt, Artificial Sequence
  Description of Artificial Sequence: Synthetic oligonucleotide
  Antisense strand to SEQ ID NO: 2570938
agcaaucaugauuacuucc

SEQ ID NO: 2570940 - RNA, 19 nt, Artificial Sequence
  Description of Artificial Sequence: Synthetic oligonucleotide
  Sense strand starting at position 3042 of SEQ ID NO: 1888984
gagagauucuuguugcaug

SEQ ID NO: 2570941 - RNA, 19 nt, Artificial Sequence
  Description of Artificial Sequence: Synthetic oligonucleotide
  Antisense strand to SEQ ID NO: 2570940
caugcaacaagaaucucuc

SEQ ID NO: 2570942 - RNA, 19 nt, Artificial Sequence
  Description of Artificial Sequence: Synthetic oligonucleotide
  Sense strand starting at position 3047 of SEQ ID NO: 1888984
auucuuguugcauggauuu

SEQ ID NO: 2570943 - RNA, 19 nt, Artificial Sequence
  Description of Artificial Sequence: Synthetic oligonucleotide
  Antisense strand to SEQ ID NO: 2570942
aaauccaugcaacaagaau

SEQ ID NO: 2570944 - RNA, 19 nt, Artificial Sequence
  Description of Artificial Sequence: Synthetic oligonucleotide
  Sense strand starting at position 3230 of SEQ ID NO: 1888984
ggcuauaaugcuuagugag

SEQ ID NO: 2570945 - RNA, 19 nt, Artificial Sequence
  Description of Artificial Sequence: Synthetic oligonucleotide
  Antisense strand to SEQ ID NO: 2570944
cucacuaagcauuauagcc

SEQ ID NO: 2570946 - RNA, 19 nt, Artificial Sequence
  Description of Artificial Sequence: Synthetic oligonucleotide
  Sense strand starting at position 3232 of SEQ ID NO: 1888984
cuauaaugcuuagugagag

SEQ ID NO: 2570947 - RNA, 19 nt, Artificial Sequence
  Description of Artificial Sequence: Synthetic oligonucleotide
  Antisense strand to SEQ ID NO: 2570946
cucucacuaagcauuauag

SEQ ID NO: 2570948 - RNA, 19 nt, Artificial Sequence
  Description of Artificial Sequence: Synthetic oligonucleotide
  Sense strand starting at position 3238 of SEQ ID NO: 1888984
ugcuuagugagagaugcaa

SEQ ID NO: 2570949 - RNA, 19 nt, Artificial Sequence
  Description of Artificial Sequence: Synthetic oligonucleotide
  Antisense strand to SEQ ID NO: 2570948
uugcaucucucacuaagca

SEQ ID NO: 2570950 - RNA, 19 nt, Artificial Sequence
  Description of Artificial Sequence: Synthetic oligonucleotide
  Sense strand starting at position 3240 of SEQ ID NO: 1888984
cuuagugagagaugcaaag

SEQ ID NO: 2570951 - RNA, 19 nt, Artificial Sequence
  Description of Artificial Sequence: Synthetic oligonucleotide
  Antisense strand to SEQ ID NO: 2570950
cuuugcaucucucacuaag

SEQ ID NO: 2570952 - RNA, 19 nt, Artificial Sequence
  Description of Artificial Sequence: Synthetic oligonucleotide
  Sense strand starting at position 3251 of SEQ ID NO: 1888984
augcaaagaugaguaagau

SEQ ID NO: 2570953 - RNA, 19 nt, Artificial Sequence
  Description of Artificial Sequence: Synthetic oligonucleotide
  Antisense strand to SEQ ID NO: 2570952
aucuuacucaucuuugcau

SEQ ID NO: 2570954 - RNA, 19 nt, Artificial Sequence
  Description of Artificial Sequence: Synthetic oligonucleotide
  Sense strand starting at position 3260 of SEQ ID NO: 1888984
ugaguaagauuugaugauu

SEQ ID NO: 2570955 - RNA, 19 nt, Artificial Sequence
  Description of Artificial Sequence: Synthetic oligonucleotide
  Antisense strand to SEQ ID NO: 2570954
aaucaucaaaucuuacuca

SEQ ID NO: 2570956 - RNA, 19 nt, Artificial Sequence
  Description of Artificial Sequence: Synthetic oligonucleotide
  Sense strand starting at position 3278 of SEQ ID NO: 1888984
uucuacucucaguggaaau

SEQ ID NO: 2570957 - RNA, 19 nt, Artificial Sequence
  Description of Artificial Sequence: Synthetic oligonucleotide
  Antisense strand to SEQ ID NO: 2570956
auuuccacugagaguagaa

SEQ ID NO: 2570958 - RNA, 19 nt, Artificial Sequence
  Description of Artificial Sequence: Synthetic oligonucleotide
  Sense strand starting at position 3326 of SEQ ID NO: 1888984
agcuuauaaugaucuugua

SEQ ID NO: 2570959 - RNA, 19 nt, Artificial Sequence
  Description of Artificial Sequence: Synthetic oligonucleotide
  Antisense strand to SEQ ID NO: 2570958
uacaagaucauuauaagcu

SEQ ID NO: 2570960 - RNA, 19 nt, Artificial Sequence
  Description of Artificial Sequence: Synthetic oligonucleotide
  Sense strand starting at position 3376 of SEQ ID NO: 1888984
gcagcaugagucuaauauu

SEQ ID NO: 2570961 - RNA, 19 nt, Artificial Sequence
  Description of Artificial Sequence: Synthetic oligonucleotide
  Antisense strand to SEQ ID NO: 2570960
aauauuagacucaugcugc

SEQ ID NO: 2570962 - RNA, 19 nt, Artificial Sequence
  Description of Artificial Sequence: Synthetic oligonucleotide
  Sense strand starting at position 3407 of SEQ ID NO: 1888984
uggagucacccugaaaugu

SEQ ID NO: 2570963 - RNA, 19 nt, Artificial Sequence
  Description of Artificial Sequence: Synthetic oligonucleotide
  Antisense strand to SEQ ID NO: 2570962
acauuucagggugacucca

SEQ ID NO: 2570964 - RNA, 19 nt, Artificial Sequence
  Description of Artificial Sequence: Synthetic oligonucleotide
  Sense strand starting at position 3651 of SEQ ID NO: 1888984
uagcauucucgugauuaug

SEQ ID NO: 2570965 - RNA, 19 nt, Artificial Sequence
  Description of Artificial Sequence: Synthetic oligonucleotide
  Antisense strand to SEQ ID NO: 2570964
cauaaucacgagaaugcua

SEQ ID NO: 2570966 - RNA, 19 nt, Artificial Sequence
  Description of Artificial Sequence: Synthetic oligonucleotide
  Sense strand starting at position 3721 of SEQ ID NO: 1888984
gacccauucugacucagga

SEQ ID NO: 2570967 - RNA, 19 nt, Artificial Sequence
  Description of Artificial Sequence: Synthetic oligonucleotide
  Antisense strand to SEQ ID NO: 2570966
uccugagucagaauggguc

SEQ ID NO: 2570968 - RNA, 19 nt, Artificial Sequence
  Description of Artificial Sequence: Synthetic oligonucleotide
  Sense strand starting at position 3861 of SEQ ID NO: 1888984
agaugaugaccucgacuuu

SEQ ID NO: 2570969 - RNA, 19 nt, Artificial Sequence
  Description of Artificial Sequence: Synthetic oligonucleotide
  Antisense strand to SEQ ID NO: 2570968
aaagucgaggucaucaucu

SEQ ID NO: 2570970 - RNA, 19 nt, Artificial Sequence
  Description of Artificial Sequence: Synthetic oligonucleotide
  Sense strand starting at position 686 of SEQ ID NO: 1888985
ugaauuaacucucugcugu

SEQ ID NO: 2570971 - RNA, 19 nt, Artificial Sequence
  Description of Artificial Sequence: Synthetic oligonucleotide
  Antisense strand to SEQ ID NO: 2570970
acagcagagaguuaauuca

SEQ ID NO: 2570972 - RNA, 19 nt, Artificial Sequence
  Description of Artificial Sequence: Synthetic oligonucleotide
  Sense strand starting at position 738 of SEQ ID NO: 1888985
ugguuuauuugugccauag

SEQ ID NO: 2570973 - RNA, 19 nt, Artificial Sequence
  Description of Artificial Sequence: Synthetic oligonucleotide
  Antisense strand to SEQ ID NO: 2570972
cuauggcacaaauaaacca

SEQ ID NO: 2570974 - RNA, 19 nt, Artificial Sequence
  Description of Artificial Sequence: Synthetic oligonucleotide
  Sense strand starting at position 742 of SEQ ID NO: 1888985
uuauuugugccauagcucu

SEQ ID NO: 2570975 - RNA, 19 nt, Artificial Sequence
  Description of Artificial Sequence: Synthetic oligonucleotide
  Antisense strand to SEQ ID NO: 2570974
agagcuauggcacaaauaa

SEQ ID NO: 2570976 - RNA, 19 nt, Artificial Sequence
  Description of Artificial Sequence: Synthetic oligonucleotide
  Sense strand starting at position 908 of SEQ ID NO: 1888985
auggaaagaugagauaguu

SEQ ID NO: 2570977 - RNA, 19 nt, Artificial Sequence
  Description of Artificial Sequence: Synthetic oligonucleotide
  Antisense strand to SEQ ID NO: 2570976
aacuaucucaucuuuccau

SEQ ID NO: 2570978 - RNA, 19 nt, Artificial Sequence
  Description of Artificial Sequence: Synthetic oligonucleotide
  Sense strand starting at position 984 of SEQ ID NO: 1888985
aaugauuaucugugaauag

SEQ ID NO: 2570979 - RNA, 19 nt, Artificial Sequence
  Description of Artificial Sequence: Synthetic oligonucleotide
  Antisense strand to SEQ ID NO: 2570978
cuauucacagauaaucauu

SEQ ID NO: 2570980 - RNA, 19 nt, Artificial Sequence
  Description of Artificial Sequence: Synthetic oligonucleotide
  Sense strand starting at position 1039 of SEQ ID NO: 1888985
agacuuguggcuuaccaau

SEQ ID NO: 2570981 - RNA, 19 nt, Artificial Sequence
  Description of Artificial Sequence: Synthetic oligonucleotide
  Antisense strand to SEQ ID NO: 2570980
auugguaagccacaagucu

SEQ ID NO: 2570982 - RNA, 19 nt, Artificial Sequence
  Description of Artificial Sequence: Synthetic oligonucleotide
  Sense strand starting at position 1048 of SEQ ID NO: 1888985
gcuuaccaauccuugagau

SEQ ID NO: 2570983 - RNA, 19 nt, Artificial Sequence
  Description of Artificial Sequence: Synthetic oligonucleotide
  Antisense strand to SEQ ID NO: 2570982
aucucaaggauugguaagc

SEQ ID NO: 2570984 - RNA, 19 nt, Artificial Sequence
  Description of Artificial Sequence: Synthetic oligonucleotide
  Sense strand starting at position 1134 of SEQ ID NO: 1888985
ugcugauaagcacagcauu

SEQ ID NO: 2570985 - RNA, 19 nt, Artificial Sequence
  Description of Artificial Sequence: Synthetic oligonucleotide
  Antisense strand to SEQ ID NO: 2570984
aaugcugugcuuaucagca

SEQ ID NO: 2570986 - RNA, 19 nt, Artificial Sequence
  Description of Artificial Sequence: Synthetic oligonucleotide
  Sense strand starting at position 1195 of SEQ ID NO: 1888985
augacacccucuuuggauu

SEQ ID NO: 2570987 - RNA, 19 nt, Artificial Sequence
  Description of Artificial Sequence: Synthetic oligonucleotide
  Antisense strand to SEQ ID NO: 2570986
aauccaaagagggugucau

SEQ ID NO: 2570988 - RNA, 19 nt, Artificial Sequence
  Description of Artificial Sequence: Synthetic oligonucleotide
  Sense strand starting at position 1251 of SEQ ID NO: 1888985
uuaucauagugcuugacac

SEQ ID NO: 2570989 - RNA, 19 nt, Artificial Sequence
  Description of Artificial Sequence: Synthetic oligonucleotide
  Antisense strand to SEQ ID NO: 2570988
gugucaagcacuaugauaa

SEQ ID NO: 2570990 - RNA, 19 nt, Artificial Sequence
  Description of Artificial Sequence: Synthetic oligonucleotide
  Sense strand starting at position 1289 of SEQ ID NO: 1888985
ggcagcuaugauuauuaaa

SEQ ID NO: 2570991 - RNA, 19 nt, Artificial Sequence
  Description of Artificial Sequence: Synthetic oligonucleotide
  Antisense strand to SEQ ID NO: 2570990
uuuaauaaucauagcugcc

SEQ ID NO: 2570992 - RNA, 19 nt, Artificial Sequence
  Description of Artificial Sequence: Synthetic oligonucleotide
  Sense strand starting at position 1394 of SEQ ID NO: 1888985
ugcuuucaagggugaggua

SEQ ID NO: 2570993 - RNA, 19 nt, Artificial Sequence
  Description of Artificial Sequence: Synthetic oligonucleotide
  Antisense strand to SEQ ID NO: 2570992
uaccucacccuugaaagca

SEQ ID NO: 2570994 - RNA, 19 nt, Artificial Sequence
  Description of Artificial Sequence: Synthetic oligonucleotide
  Sense strand starting at position 1444 of SEQ ID NO: 1888985
augaaauguuaggcucuua

SEQ ID NO: 2570995 - RNA, 19 nt, Artificial Sequence
  Description of Artificial Sequence: Synthetic oligonucleotide
  Antisense strand to SEQ ID NO: 2570994
uaagagccuaacauuucau

SEQ ID NO: 2570996 - RNA, 19 nt, Artificial Sequence
  Description of Artificial Sequence: Synthetic oligonucleotide
  Sense strand starting at position 1455 of SEQ ID NO: 1888985
ggcucuuauuucuugaagu

SEQ ID NO: 2570997 - RNA, 19 nt, Artificial Sequence
  Description of Artificial Sequence: Synthetic oligonucleotide
  Antisense strand to SEQ ID NO: 2570996
acuucaagaaauaagagcc

SEQ ID NO: 2570998 - RNA, 19 nt, Artificial Sequence
  Description of Artificial Sequence: Synthetic oligonucleotide
  Sense strand starting at position 1468 of SEQ ID NO: 1888985
ugaaguacuuaugcacuua

SEQ ID NO: 2570999 - RNA, 19 nt, Artificial Sequence
  Description of Artificial Sequence: Synthetic oligonucleotide
  Antisense strand to SEQ ID NO: 2570998
uaagugcauaaguacuuca

SEQ ID NO: 2571000 - RNA, 19 nt, Artificial Sequence
  Description of Artificial Sequence: Synthetic oligonucleotide
  Sense strand starting at position 1597 of SEQ ID NO: 1888985
gcuaaagagcaauaaguaa

SEQ ID NO: 2571001 - RNA, 19 nt, Artificial Sequence
  Description of Artificial Sequence: Synthetic oligonucleotide
  Antisense strand to SEQ ID NO: 2571000
uuacuuauugcucuuuagc

SEQ ID NO: 2571002 - RNA, 19 nt, Artificial Sequence
  Description of Artificial Sequence: Synthetic oligonucleotide
  Sense strand starting at position 1611 of SEQ ID NO: 1888985
aguaacuccuuacugagaa

SEQ ID NO: 2571003 - RNA, 19 nt, Artificial Sequence
  Description of Artificial Sequence: Synthetic oligonucleotide
  Antisense strand to SEQ ID NO: 2571002
uucucaguaaggaguuacu

SEQ ID NO: 2571004 - RNA, 19 nt, Artificial Sequence
  Description of Artificial Sequence: Synthetic oligonucleotide
  Sense strand starting at position 1679 of SEQ ID NO: 1888985
auuccauuguucuuuguaa

SEQ ID NO: 2571005 - RNA, 19 nt, Artificial Sequence
  Description of Artificial Sequence: Synthetic oligonucleotide
  Antisense strand to SEQ ID NO: 2571004
uuacaaagaacaauggaau

SEQ ID NO: 2571006 - RNA, 19 nt, Artificial Sequence
  Description of Artificial Sequence: Synthetic oligonucleotide
  Sense strand starting at position 1680 of SEQ ID NO: 1888985
uuccauuguucuuuguaaa

SEQ ID NO: 2571007 - RNA, 19 nt, Artificial Sequence
  Description of Artificial Sequence: Synthetic oligonucleotide
  Antisense strand to SEQ ID NO: 2571006
uuuacaaagaacaauggaa

SEQ ID NO: 2571008 - RNA, 19 nt, Artificial Sequence
  Description of Artificial Sequence: Synthetic oligonucleotide
  Sense strand starting at position 1721 of SEQ ID NO: 1888985
ggcagaagauacuuaguuu

SEQ ID NO: 2571009 - RNA, 19 nt, Artificial Sequence
  Description of Artificial Sequence: Synthetic oligonucleotide
  Antisense strand to SEQ ID NO: 2571008
aaacuaaguaucuucugcc

SEQ ID NO: 2571010 - RNA, 19 nt, Artificial Sequence
  Description of Artificial Sequence: Synthetic oligonucleotide
  Sense strand starting at position 1722 of SEQ ID NO: 1888985
gcagaagauacuuaguuug

SEQ ID NO: 2571011 - RNA, 19 nt, Artificial Sequence
  Description of Artificial Sequence: Synthetic oligonucleotide
  Antisense strand to SEQ ID NO: 2571010
caaacuaaguaucuucugc

SEQ ID NO: 2571012 - RNA, 19 nt, Artificial Sequence
  Description of Artificial Sequence: Synthetic oligonucleotide
  Sense strand starting at position 1725 of SEQ ID NO: 1888985
gaagauacuuaguuugaac

SEQ ID NO: 2571013 - RNA, 19 nt, Artificial Sequence
  Description of Artificial Sequence: Synthetic oligonucleotide
  Antisense strand to SEQ ID NO: 2571012
guucaaacuaaguaucuuc

SEQ ID NO: 2571014 - RNA, 19 nt, Artificial Sequence
  Description of Artificial Sequence: Synthetic oligonucleotide
  Sense strand starting at position 1931 of SEQ ID NO: 1888985
ucuuuaaugguagaguaua

SEQ ID NO: 2571015 - RNA, 19 nt, Artificial Sequence
  Description of Artificial Sequence: Synthetic oligonucleotide
  Antisense strand to SEQ ID NO: 2571014
uauacucuaccauuaaaga

SEQ ID NO: 2571016 - RNA, 19 nt, Artificial Sequence
  Description of Artificial Sequence: Synthetic oligonucleotide
  Sense strand starting at position 1964 of SEQ ID NO: 1888985
gucucucagaccuaguguu

SEQ ID NO: 2571017 - RNA, 19 nt, Artificial Sequence
  Description of Artificial Sequence: Synthetic oligonucleotide
  Antisense strand to SEQ ID NO: 2571016
aacacuaggucugagagac

SEQ ID NO: 2571018 - RNA, 19 nt, Artificial Sequence
  Description of Artificial Sequence: Synthetic oligonucleotide
  Sense strand starting at position 2170 of SEQ ID NO: 1888985
augagaauaucgccuauaa

SEQ ID NO: 2571019 - RNA, 19 nt, Artificial Sequence
  Description of Artificial Sequence: Synthetic oligonucleotide
  Antisense strand to SEQ ID NO: 2571018
uuauaggcgauauucucau

SEQ ID NO: 2571020 - RNA, 19 nt, Artificial Sequence
  Description of Artificial Sequence: Synthetic oligonucleotide
  Sense strand starting at position 2301 of SEQ ID NO: 1888985
gguuguggugcagaagaaa

SEQ ID NO: 2571021 - RNA, 19 nt, Artificial Sequence
  Description of Artificial Sequence: Synthetic oligonucleotide
  Antisense strand to SEQ ID NO: 2571020
uuucuucugcaccacaacc

SEQ ID NO: 2571022 - RNA, 19 nt, Artificial Sequence
  Description of Artificial Sequence: Synthetic oligonucleotide
  Sense strand starting at position 2330 of SEQ ID NO: 1888985
gcuggacuaguuuaagcua

SEQ ID NO: 2571023 - RNA, 19 nt, Artificial Sequence
  Description of Artificial Sequence: Synthetic oligonucleotide
  Antisense strand to SEQ ID NO: 2571022
uagcuuaaacuaguccagc

SEQ ID NO: 2571024 - RNA, 19 nt, Artificial Sequence
  Description of Artificial Sequence: Synthetic oligonucleotide
  Sense strand starting at position 2431 of SEQ ID NO: 1888985
agaacaaauuucgagucuu

SEQ ID NO: 2571025 - RNA, 19 nt, Artificial Sequence
  Description of Artificial Sequence: Synthetic oligonucleotide
  Antisense strand to SEQ ID NO: 2571024
aagacucgaaauuuguucu

SEQ ID NO: 2571026 - RNA, 19 nt, Artificial Sequence
  Description of Artificial Sequence: Synthetic oligonucleotide
  Sense strand starting at position 2591 of SEQ ID NO: 1888985
agucucaaguguccuuaau

SEQ ID NO: 2571027 - RNA, 19 nt, Artificial Sequence
  Description of Artificial Sequence: Synthetic oligonucleotide
  Antisense strand to SEQ ID NO: 2571026
auuaaggacacuugagacu

SEQ ID NO: 2571028 - RNA, 19 nt, Artificial Sequence
  Description of Artificial Sequence: Synthetic oligonucleotide
  Sense strand starting at position 3437 of SEQ ID NO: 1888985
ccuaguguggcagaauaua

SEQ ID NO: 2571029 - RNA, 19 nt, Artificial Sequence
  Description of Artificial Sequence: Synthetic oligonucleotide
  Antisense strand to SEQ ID NO: 2571028
uauauucugccacacuagg

SEQ ID NO: 2571030 - RNA, 19 nt, Artificial Sequence
  Description of Artificial Sequence: Synthetic oligonucleotide
  Sense strand starting at position 3449 of SEQ ID NO: 1888985
gaauauaggaguuggugga

SEQ ID NO: 2571031 - RNA, 19 nt, Artificial Sequence
  Description of Artificial Sequence: Synthetic oligonucleotide
  Antisense strand to SEQ ID NO: 2571030
uccaccaacuccuauauuc

SEQ ID NO: 2571032 - RNA, 19 nt, Artificial Sequence
  Description of Artificial Sequence: Synthetic oligonucleotide
  Sense strand starting at position 3450 of SEQ ID NO: 1888985
aauauaggaguugguggaa

SEQ ID NO: 2571033 - RNA, 19 nt, Artificial Sequence
  Description of Artificial Sequence: Synthetic oligonucleotide
  Antisense strand to SEQ ID NO: 2571032
uuccaccaacuccuauauu

SEQ ID NO: 2571034 - RNA, 19 nt, Artificial Sequence
  Description of Artificial Sequence: Synthetic oligonucleotide
  Sense strand starting at position 3480 of SEQ ID NO: 1888985
gcagccagagucugaucaa

SEQ ID NO: 2571035 - RNA, 19 nt, Artificial Sequence
  Description of Artificial Sequence: Synthetic oligonucleotide
  Antisense strand to SEQ ID NO: 2571034
uugaucagacucuggcugc

SEQ ID NO: 2571036 - RNA, 19 nt, Artificial Sequence
  Description of Artificial Sequence: Synthetic oligonucleotide
  Sense strand starting at position 3483 of SEQ ID NO: 1888985
gccagagucugaucaacua

SEQ ID NO: 2571037 - RNA, 19 nt, Artificial Sequence
  Description of Artificial Sequence: Synthetic oligonucleotide
  Antisense strand to SEQ ID NO: 2571036
uaguugaucagacucuggc

SEQ ID NO: 2571038 - RNA, 19 nt, Artificial Sequence
  Description of Artificial Sequence: Synthetic oligonucleotide
  Sense strand starting at position 3571 of SEQ ID NO: 1888985
ggccaaacauggcuacaau

SEQ ID NO: 2571039 - RNA, 19 nt, Artificial Sequence
  Description of Artificial Sequence: Synthetic oligonucleotide
  Antisense strand to SEQ ID NO: 2571038
auuguagccauguuuggcc

SEQ ID NO: 2571040 - RNA, 19 nt, Artificial Sequence
  Description of Artificial Sequence: Synthetic oligonucleotide
  Sense strand starting at position 3572 of SEQ ID NO: 1888985
gccaaacauggcuacaaua

SEQ ID NO: 2571041 - RNA, 19 nt, Artificial Sequence
  Description of Artificial Sequence: Synthetic oligonucleotide
  Antisense strand to SEQ ID NO: 2571040
uauuguagccauguuuggc

SEQ ID NO: 2571042 - RNA, 19 nt, Artificial Sequence
  Description of Artificial Sequence: Synthetic oligonucleotide
  Sense strand starting at position 3697 of SEQ ID NO: 1888985
gcaggagcuacaugauugu

SEQ ID NO: 2571043 - RNA, 19 nt, Artificial Sequence
  Description of Artificial Sequence: Synthetic oligonucleotide
  Antisense strand to SEQ ID NO: 2571042
acaaucauguagcuccugc

SEQ ID NO: 2571044 - RNA, 19 nt, Artificial Sequence
  Description of Artificial Sequence: Synthetic oligonucleotide
  Sense strand starting at position 3701 of SEQ ID NO: 1888985
gagcuacaugauuguaaga

SEQ ID NO: 2571045 - RNA, 19 nt, Artificial Sequence
  Description of Artificial Sequence: Synthetic oligonucleotide
  Antisense strand to SEQ ID NO: 2571044
ucuuacaaucauguagcuc

SEQ ID NO: 2571046 - RNA, 19 nt, Artificial Sequence
  Description of Artificial Sequence: Synthetic oligonucleotide
  Sense strand starting at position 3770 of SEQ ID NO: 1888985
gguugagccacauggugau

SEQ ID NO: 2571047 - RNA, 19 nt, Artificial Sequence
  Description of Artificial Sequence: Synthetic oligonucleotide
  Antisense strand to SEQ ID NO: 2571046
aucaccauguggcucaacc

SEQ ID NO: 2571048 - RNA, 19 nt, Artificial Sequence
  Description of Artificial Sequence: Synthetic oligonucleotide
  Sense strand starting at position 3818 of SEQ ID NO: 1888985
guacaauagccauaguaua

SEQ ID NO: 2571049 - RNA, 19 nt, Artificial Sequence
  Description of Artificial Sequence: Synthetic oligonucleotide
  Antisense strand to SEQ ID NO: 2571048
uauacuauggcuauuguac

SEQ ID NO: 2571050 - RNA, 19 nt, Artificial Sequence
  Description of Artificial Sequence: Synthetic oligonucleotide
  Sense strand starting at position 30 of SEQ ID NO: 1888986
ggagauggcucuuaacagc

SEQ ID NO: 2571051 - RNA, 19 nt, Artificial Sequence
  Description of Artificial Sequence: Synthetic oligonucleotide
  Antisense strand to SEQ ID NO: 2571050
gcuguuaagagccaucucc

SEQ ID NO: 2571052 - RNA, 19 nt, Artificial Sequence
  Description of Artificial Sequence: Synthetic oligonucleotide
  Sense strand starting at position 37 of SEQ ID NO: 1888986
gcucuuaacagcggugaca

SEQ ID NO: 2571053 - RNA, 19 nt, Artificial Sequence
  Description of Artificial Sequence: Synthetic oligonucleotide
  Antisense strand to SEQ ID NO: 2571052
ugucaccgcuguuaagagc

SEQ ID NO: 2571054 - RNA, 19 nt, Artificial Sequence
  Description of Artificial Sequence: Synthetic oligonucleotide
  Sense strand starting at position 48 of SEQ ID NO: 1888986
cggugacagugaucaccuu

SEQ ID NO: 2571055 - RNA, 19 nt, Artificial Sequence
  Description of Artificial Sequence: Synthetic oligonucleotide
  Antisense strand to SEQ ID NO: 2571054
aaggugaucacugucaccg

SEQ ID NO: 2571056 - RNA, 19 nt, Artificial Sequence
  Description of Artificial Sequence: Synthetic oligonucleotide
  Sense strand starting at position 54 of SEQ ID NO: 1888986
cagugaucaccuuggucag

SEQ ID NO: 2571057 - RNA, 19 nt, Artificial Sequence
  Description of Artificial Sequence: Synthetic oligonucleotide
  Antisense strand to SEQ ID NO: 2571056
cugaccaaggugaucacug

SEQ ID NO: 2571058 - RNA, 19 nt, Artificial Sequence
  Description of Artificial Sequence: Synthetic oligonucleotide
  Sense strand starting at position 167 of SEQ ID NO: 1888986
uggagagguacaugucugu

SEQ ID NO: 2571059 - RNA, 19 nt, Artificial Sequence
  Description of Artificial Sequence: Synthetic oligonucleotide
  Antisense strand to SEQ ID NO: 2571058
acagacauguaccucucca

SEQ ID NO: 2571060 - RNA, 19 nt, Artificial Sequence
  Description of Artificial Sequence: Synthetic oligonucleotide
  Sense strand starting at position 170 of SEQ ID NO: 1888986
agagguacaugucugugua

SEQ ID NO: 2571061 - RNA, 19 nt, Artificial Sequence
  Description of Artificial Sequence: Synthetic oligonucleotide
  Antisense strand to SEQ ID NO: 2571060
uacacagacauguaccucu

SEQ ID NO: 2571062 - RNA, 19 nt, Artificial Sequence
  Description of Artificial Sequence: Synthetic oligonucleotide
  Sense strand starting at position 171 of SEQ ID NO: 1888986
gagguacaugucuguguau

SEQ ID NO: 2571063 - RNA, 19 nt, Artificial Sequence
  Description of Artificial Sequence: Synthetic oligonucleotide
  Antisense strand to SEQ ID NO: 2571062
auacacagacauguaccuc

SEQ ID NO: 2571064 - RNA, 19 nt, Artificial Sequence
  Description of Artificial Sequence: Synthetic oligonucleotide
  Sense strand starting at position 173 of SEQ ID NO: 1888986
gguacaugucuguguaucu

SEQ ID NO: 2571065 - RNA, 19 nt, Artificial Sequence
  Description of Artificial Sequence: Synthetic oligonucleotide
  Antisense strand to SEQ ID NO: 2571064
agauacacagacauguacc

SEQ ID NO: 2571066 - RNA, 19 nt, Artificial Sequence
  Description of Artificial Sequence: Synthetic oligonucleotide
  Sense strand starting at position 298 of SEQ ID NO: 1888986
auguaugacugccaagauc

SEQ ID NO: 2571067 - RNA, 19 nt, Artificial Sequence
  Description of Artificial Sequence: Synthetic oligonucleotide
  Antisense strand to SEQ ID NO: 2571066
gaucuuggcagucauacau

SEQ ID NO: 2571068 - RNA, 19 nt, Artificial Sequence
  Description of Artificial Sequence: Synthetic oligonucleotide
  Sense strand starting at position 401 of SEQ ID NO: 1888986
ggugaaauucuauggccac

SEQ ID NO: 2571069 - RNA, 19 nt, Artificial Sequence
  Description of Artificial Sequence: Synthetic oligonucleotide
  Antisense strand to SEQ ID NO: 2571068
guggccauagaauuucacc

SEQ ID NO: 2571070 - RNA, 19 nt, Artificial Sequence
  Description of Artificial Sequence: Synthetic oligonucleotide
  Sense strand starting at position 479 of SEQ ID NO: 1888986
cagacugagcuuuagcaga

SEQ ID NO: 2571071 - RNA, 19 nt, Artificial Sequence
  Description of Artificial Sequence: Synthetic oligonucleotide
  Antisense strand to SEQ ID NO: 2571070
ucugcuaaagcucagucug

SEQ ID NO: 2571072 - RNA, 19 nt, Artificial Sequence
  Description of Artificial Sequence: Synthetic oligonucleotide
  Sense strand starting at position 481 of SEQ ID NO: 1888986
gacugagcuuuagcagagu

SEQ ID NO: 2571073 - RNA, 19 nt, Artificial Sequence
  Description of Artificial Sequence: Synthetic oligonucleotide
  Antisense strand to SEQ ID NO: 2571072
acucugcuaaagcucaguc

SEQ ID NO: 2571074 - RNA, 19 nt, Artificial Sequence
  Description of Artificial Sequence: Synthetic oligonucleotide
  Sense strand starting at position 484 of SEQ ID NO: 1888986
ugagcuuuagcagagugaa

SEQ ID NO: 2571075 - RNA, 19 nt, Artificial Sequence
  Description of Artificial Sequence: Synthetic oligonucleotide
  Antisense strand to SEQ ID NO: 2571074
uucacucugcuaaagcuca

SEQ ID NO: 2571076 - RNA, 19 nt, Artificial Sequence
  Description of Artificial Sequence: Synthetic oligonucleotide
  Sense strand starting at position 629 of SEQ ID NO: 1888986
uugaauuggucacaucuga

SEQ ID NO: 2571077 - RNA, 19 nt, Artificial Sequence
  Description of Artificial Sequence: Synthetic oligonucleotide
  Antisense strand to SEQ ID NO: 2571076
ucagaugugaccaauucaa

SEQ ID NO: 2571078 - RNA, 19 nt, Artificial Sequence
  Description of Artificial Sequence: Synthetic oligonucleotide
  Sense strand starting at position 645 of SEQ ID NO: 1888986
ugacuuucuuccuuguguu

SEQ ID NO: 2571079 - RNA, 19 nt, Artificial Sequence
  Description of Artificial Sequence: Synthetic oligonucleotide
  Antisense strand to SEQ ID NO: 2571078
aacacaaggaagaaaguca

SEQ ID NO: 2571080 - RNA, 19 nt, Artificial Sequence
  Description of Artificial Sequence: Synthetic oligonucleotide
  Sense strand starting at position 683 of SEQ ID NO: 1888986
uuuguacaugcguguacau

SEQ ID NO: 2571081 - RNA, 19 nt, Artificial Sequence
  Description of Artificial Sequence: Synthetic oligonucleotide
  Antisense strand to SEQ ID NO: 2571080
auguacacgcauguacaaa

SEQ ID NO: 2571082 - RNA, 19 nt, Artificial Sequence
  Description of Artificial Sequence: Synthetic oligonucleotide
  Sense strand starting at position 698 of SEQ ID NO: 1888986
acauguaaaugugcacuua

SEQ ID NO: 2571083 - RNA, 19 nt, Artificial Sequence
  Description of Artificial Sequence: Synthetic oligonucleotide
  Antisense strand to SEQ ID NO: 2571082
uaagugcacauuuacaugu

SEQ ID NO: 2571084 - RNA, 19 nt, Artificial Sequence
  Description of Artificial Sequence: Synthetic oligonucleotide
  Sense strand starting at position 739 of SEQ ID NO: 1888986
uuguacucauucuaaaguu

SEQ ID NO: 2571085 - RNA, 19 nt, Artificial Sequence
  Description of Artificial Sequence: Synthetic oligonucleotide
  Antisense strand to SEQ ID NO: 2571084
aacuuuagaaugaguacaa

SEQ ID NO: 2571086 - RNA, 19 nt, Artificial Sequence
  Description of Artificial Sequence: Synthetic oligonucleotide
  Sense strand starting at position 799 of SEQ ID NO: 1888986
ccgugaccuuggguauaca

SEQ ID NO: 2571087 - RNA, 19 nt, Artificial Sequence
  Description of Artificial Sequence: Synthetic oligonucleotide
  Antisense strand to SEQ ID NO: 2571086
uguauacccaaggucacgg

SEQ ID NO: 2571088 - RNA, 19 nt, Artificial Sequence
  Description of Artificial Sequence: Synthetic oligonucleotide
  Sense strand starting at position 895 of SEQ ID NO: 1888986
gagcucugucccugccaga

SEQ ID NO: 2571089 - RNA, 19 nt, Artificial Sequence
  Description of Artificial Sequence: Synthetic oligonucleotide
  Antisense strand to SEQ ID NO: 2571088
ucuggcagggacagagcuc

SEQ ID NO: 2571090 - RNA, 19 nt, Artificial Sequence
  Description of Artificial Sequence: Synthetic oligonucleotide
  Sense strand starting at position 900 of SEQ ID NO: 1888986
cugucccugccagauuauu

SEQ ID NO: 2571091 - RNA, 19 nt, Artificial Sequence
  Description of Artificial Sequence: Synthetic oligonucleotide
  Antisense strand to SEQ ID NO: 2571090
aauaaucuggcagggacag

SEQ ID NO: 2571092 - RNA, 19 nt, Artificial Sequence
  Description of Artificial Sequence: Synthetic oligonucleotide
  Sense strand starting at position 906 of SEQ ID NO: 1888986
cugccagauuauuaggcau

SEQ ID NO: 2571093 - RNA, 19 nt, Artificial Sequence
  Description of Artificial Sequence: Synthetic oligonucleotide
  Antisense strand to SEQ ID NO: 2571092
augccuaauaaucuggcag

SEQ ID NO: 2571094 - RNA, 19 nt, Artificial Sequence
  Description of Artificial Sequence: Synthetic oligonucleotide
  Sense strand starting at position 913 of SEQ ID NO: 1888986
auuauuaggcauggccaga

SEQ ID NO: 2571095 - RNA, 19 nt, Artificial Sequence
  Description of Artificial Sequence: Synthetic oligonucleotide
  Antisense strand to SEQ ID NO: 2571094
ucuggccaugccuaauaau

SEQ ID NO: 2571096 - RNA, 19 nt, Artificial Sequence
  Description of Artificial Sequence: Synthetic oligonucleotide
  Sense strand starting at position 1020 of SEQ ID NO: 1888986
guggacugcuccucauguu

SEQ ID NO: 2571097 - RNA, 19 nt, Artificial Sequence
  Description of Artificial Sequence: Synthetic oligonucleotide
  Antisense strand to SEQ ID NO: 2571096
aacaugaggagcaguccac

SEQ ID NO: 2571098 - RNA, 19 nt, Artificial Sequence
  Description of Artificial Sequence: Synthetic oligonucleotide
  Sense strand starting at position 1021 of SEQ ID NO: 1888986
uggacugcuccucauguuu

SEQ ID NO: 2571099 - RNA, 19 nt, Artificial Sequence
  Description of Artificial Sequence: Synthetic oligonucleotide
  Antisense strand to SEQ ID NO: 2571098
aaacaugaggagcagucca

SEQ ID NO: 2571100 - RNA, 19 nt, Artificial Sequence
  Description of Artificial Sequence: Synthetic oligonucleotide
  Sense strand starting at position 1068 of SEQ ID NO: 1888986
ggugcagccucaccuaauu

SEQ ID NO: 2571101 - RNA, 19 nt, Artificial Sequence
  Description of Artificial Sequence: Synthetic oligonucleotide
  Antisense strand to SEQ ID NO: 2571100
aauuaggugaggcugcacc

SEQ ID NO: 2571102 - RNA, 19 nt, Artificial Sequence
  Description of Artificial Sequence: Synthetic oligonucleotide
  Sense strand starting at position 1080 of SEQ ID NO: 1888986
ccuaauugcuacuaagaag

SEQ ID NO: 2571103 - RNA, 19 nt, Artificial Sequence
  Description of Artificial Sequence: Synthetic oligonucleotide
  Antisense strand to SEQ ID NO: 2571102
cuucuuaguagcaauuagg

SEQ ID NO: 2571104 - RNA, 19 nt, Artificial Sequence
  Description of Artificial Sequence: Synthetic oligonucleotide
  Sense strand starting at position 1323 of SEQ ID NO: 1888986
ccaaguaccugauaagcuu

SEQ ID NO: 2571105 - RNA, 19 nt, Artificial Sequence
  Description of Artificial Sequence: Synthetic oligonucleotide
  Antisense strand to SEQ ID NO: 2571104
aagcuuaucagguacuugg

SEQ ID NO: 2571106 - RNA, 19 nt, Artificial Sequence
  Description of Artificial Sequence: Synthetic oligonucleotide
  Sense strand starting at position 1408 of SEQ ID NO: 1888986
uuugguuuauccuuugaac

SEQ ID NO: 2571107 - RNA, 19 nt, Artificial Sequence
  Description of Artificial Sequence: Synthetic oligonucleotide
  Antisense strand to SEQ ID NO: 2571106
guucaaaggauaaaccaaa

SEQ ID NO: 2571108 - RNA, 19 nt, Artificial Sequence
  Description of Artificial Sequence: Synthetic oligonucleotide
  Sense strand starting at position 1410 of SEQ ID NO: 1888986
ugguuuauccuuugaaccu

SEQ ID NO: 2571109 - RNA, 19 nt, Artificial Sequence
  Description of Artificial Sequence: Synthetic oligonucleotide
  Antisense strand to SEQ ID NO: 2571108
agguucaaaggauaaacca

SEQ ID NO: 2571110 - RNA, 19 nt, Artificial Sequence
  Description of Artificial Sequence: Synthetic oligonucleotide
  Sense strand starting at position 1411 of SEQ ID NO: 1888986
gguuuauccuuugaaccug

SEQ ID NO: 2571111 - RNA, 19 nt, Artificial Sequence
  Description of Artificial Sequence: Synthetic oligonucleotide
  Antisense strand to SEQ ID NO: 2571110
cagguucaaaggauaaacc

SEQ ID NO: 2571112 - RNA, 19 nt, Artificial Sequence
  Description of Artificial Sequence: Synthetic oligonucleotide
  Sense strand starting at position 1544 of SEQ ID NO: 1888986
cucaccuuaucauugagga

SEQ ID NO: 2571113 - RNA, 19 nt, Artificial Sequence
  Description of Artificial Sequence: Synthetic oligonucleotide
  Antisense strand to SEQ ID NO: 2571112
uccucaaugauaaggugag

SEQ ID NO: 2571114 - RNA, 19 nt, Artificial Sequence
  Description of Artificial Sequence: Synthetic oligonucleotide
  Sense strand starting at position 1545 of SEQ ID NO: 1888986
ucaccuuaucauugaggac

SEQ ID NO: 2571115 - RNA, 19 nt, Artificial Sequence
  Description of Artificial Sequence: Synthetic oligonucleotide
  Antisense strand to SEQ ID NO: 2571114
guccucaaugauaagguga

SEQ ID NO: 2571116 - RNA, 19 nt, Artificial Sequence
  Description of Artificial Sequence: Synthetic oligonucleotide
  Sense strand starting at position 1548 of SEQ ID NO: 1888986
ccuuaucauugaggacagu

SEQ ID NO: 2571117 - RNA, 19 nt, Artificial Sequence
  Description of Artificial Sequence: Synthetic oligonucleotide
  Antisense strand to SEQ ID NO: 2571116
acuguccucaaugauaagg

SEQ ID NO: 2571118 - RNA, 19 nt, Artificial Sequence
  Description of Artificial Sequence: Synthetic oligonucleotide
  Sense strand starting at position 1571 of SEQ ID NO: 1888986
gagacagggugcucuugau

SEQ ID NO: 2571119 - RNA, 19 nt, Artificial Sequence
  Description of Artificial Sequence: Synthetic oligonucleotide
  Antisense strand to SEQ ID NO: 2571118
aucaagagcacccugucuc

SEQ ID NO: 2571120 - RNA, 19 nt, Artificial Sequence
  Description of Artificial Sequence: Synthetic oligonucleotide
  Sense strand starting at position 1612 of SEQ ID NO: 1888986
uacugaggccuugagugua

SEQ ID NO: 2571121 - RNA, 19 nt, Artificial Sequence
  Description of Artificial Sequence: Synthetic oligonucleotide
  Antisense strand to SEQ ID NO: 2571120
uacacucaaggccucagua

SEQ ID NO: 2571122 - RNA, 19 nt, Artificial Sequence
  Description of Artificial Sequence: Synthetic oligonucleotide
  Sense strand starting at position 1620 of SEQ ID NO: 1888986
ccuugaguguauucucaag

SEQ ID NO: 2571123 - RNA, 19 nt, Artificial Sequence
  Description of Artificial Sequence: Synthetic oligonucleotide
  Antisense strand to SEQ ID NO: 2571122
cuugagaauacacucaagg

SEQ ID NO: 2571124 - RNA, 19 nt, Artificial Sequence
  Description of Artificial Sequence: Synthetic oligonucleotide
  Sense strand starting at position 1677 of SEQ ID NO: 1888986
auuuaaacguuccauuaug

SEQ ID NO: 2571125 - RNA, 19 nt, Artificial Sequence
  Description of Artificial Sequence: Synthetic oligonucleotide
  Antisense strand to SEQ ID NO: 2571124
cauaauggaacguuuaaau

SEQ ID NO: 2571126 - RNA, 19 nt, Artificial Sequence
  Description of Artificial Sequence: Synthetic oligonucleotide
  Sense strand starting at position 1735 of SEQ ID NO: 1888986
cccuuaucccuucggucua

SEQ ID NO: 2571127 - RNA, 19 nt, Artificial Sequence
  Description of Artificial Sequence: Synthetic oligonucleotide
  Antisense strand to SEQ ID NO: 2571126
uagaccgaagggauaaggg

SEQ ID NO: 2571128 - RNA, 19 nt, Artificial Sequence
  Description of Artificial Sequence: Synthetic oligonucleotide
  Sense strand starting at position 2188 of SEQ ID NO: 1888986
gugacuugaacucgccagu

SEQ ID NO: 2571129 - RNA, 19 nt, Artificial Sequence
  Description of Artificial Sequence: Synthetic oligonucleotide
  Antisense strand to SEQ ID NO: 2571128
acuggcgaguucaagucac

SEQ ID NO: 2571130 - RNA, 19 nt, Artificial Sequence
  Description of Artificial Sequence: Synthetic oligonucleotide
  Sense strand starting at position 38 of SEQ ID NO: 1888987
gcucuuaacagcggugaca

SEQ ID NO: 2571131 - RNA, 19 nt, Artificial Sequence
  Description of Artificial Sequence: Synthetic oligonucleotide
  Antisense strand to SEQ ID NO: 2571130
ugucaccgcuguuaagagc

SEQ ID NO: 2571132 - RNA, 19 nt, Artificial Sequence
  Description of Artificial Sequence: Synthetic oligonucleotide
  Sense strand starting at position 49 of SEQ ID NO: 1888987
cggugacagugaucaccuu

SEQ ID NO: 2571133 - RNA, 19 nt, Artificial Sequence
  Description of Artificial Sequence: Synthetic oligonucleotide
  Antisense strand to SEQ ID NO: 2571132
aaggugaucacugucaccg

SEQ ID NO: 2571134 - RNA, 19 nt, Artificial Sequence
  Description of Artificial Sequence: Synthetic oligonucleotide
  Sense strand starting at position 55 of SEQ ID NO: 1888987
cagugaucaccuuggucag

SEQ ID NO: 2571135 - RNA, 19 nt, Artificial Sequence
  Description of Artificial Sequence: Synthetic oligonucleotide
  Antisense strand to SEQ ID NO: 2571134
cugaccaaggugaucacug

SEQ ID NO: 2571136 - RNA, 19 nt, Artificial Sequence
  Description of Artificial Sequence: Synthetic oligonucleotide
  Sense strand starting at position 168 of SEQ ID NO: 1888987
uggagagguacaugucugu

SEQ ID NO: 2571137 - RNA, 19 nt, Artificial Sequence
  Description of Artificial Sequence: Synthetic oligonucleotide
  Antisense strand to SEQ ID NO: 2571136
acagacauguaccucucca

SEQ ID NO: 2571138 - RNA, 19 nt, Artificial Sequence
  Description of Artificial Sequence: Synthetic oligonucleotide
  Sense strand starting at position 171 of SEQ ID NO: 1888987
agagguacaugucugugua

SEQ ID NO: 2571139 - RNA, 19 nt, Artificial Sequence
  Description of Artificial Sequence: Synthetic oligonucleotide
  Antisense strand to SEQ ID NO: 2571138
uacacagacauguaccucu

SEQ ID NO: 2571140 - RNA, 19 nt, Artificial Sequence
  Description of Artificial Sequence: Synthetic oligonucleotide
  Sense strand starting at position 172 of SEQ ID NO: 1888987
gagguacaugucuguguau

SEQ ID NO: 2571141 - RNA, 19 nt, Artificial Sequence
  Description of Artificial Sequence: Synthetic oligonucleotide
  Antisense strand to SEQ ID NO: 2571140
auacacagacauguaccuc

SEQ ID NO: 2571142 - RNA, 19 nt, Artificial Sequence
  Description of Artificial Sequence: Synthetic oligonucleotide
  Sense strand starting at position 174 of SEQ ID NO: 1888987
gguacaugucuguguaucu

SEQ ID NO: 2571143 - RNA, 19 nt, Artificial Sequence
  Description of Artificial Sequence: Synthetic oligonucleotide
  Antisense strand to SEQ ID NO: 2571142
agauacacagacauguacc

SEQ ID NO: 2571144 - RNA, 19 nt, Artificial Sequence
  Description of Artificial Sequence: Synthetic oligonucleotide
  Sense strand starting at position 480 of SEQ ID NO: 1888987
cagacugagcuuuagcaga

SEQ ID NO: 2571145 - RNA, 19 nt, Artificial Sequence
  Description of Artificial Sequence: Synthetic oligonucleotide
  Antisense strand to SEQ ID NO: 2571144
ucugcuaaagcucagucug

SEQ ID NO: 2571146 - RNA, 19 nt, Artificial Sequence
  Description of Artificial Sequence: Synthetic oligonucleotide
  Sense strand starting at position 482 of SEQ ID NO: 1888987
gacugagcuuuagcagagu

SEQ ID NO: 2571147 - RNA, 19 nt, Artificial Sequence
  Description of Artificial Sequence: Synthetic oligonucleotide
  Antisense strand to SEQ ID NO: 2571146
acucugcuaaagcucaguc

SEQ ID NO: 2571148 - RNA, 19 nt, Artificial Sequence
  Description of Artificial Sequence: Synthetic oligonucleotide
  Sense strand starting at position 485 of SEQ ID NO: 1888987
ugagcuuuagcagagugaa

SEQ ID NO: 2571149 - RNA, 19 nt, Artificial Sequence
  Description of Artificial Sequence: Synthetic oligonucleotide
  Antisense strand to SEQ ID NO: 2571148
uucacucugcuaaagcuca

SEQ ID NO: 2571150 - RNA, 19 nt, Artificial Sequence
  Description of Artificial Sequence: Synthetic oligonucleotide
  Sense strand starting at position 646 of SEQ ID NO: 1888987
ugacuuucuuccuuguguu

SEQ ID NO: 2571151 - RNA, 19 nt, Artificial Sequence
  Description of Artificial Sequence: Synthetic oligonucleotide
  Antisense strand to SEQ ID NO: 2571150
aacacaaggaagaaaguca

SEQ ID NO: 2571152 - RNA, 19 nt, Artificial Sequence
  Description of Artificial Sequence: Synthetic oligonucleotide
  Sense strand starting at position 699 of SEQ ID NO: 1888987
acauguaaaugugcacuua

SEQ ID NO: 2571153 - RNA, 19 nt, Artificial Sequence
  Description of Artificial Sequence: Synthetic oligonucleotide
  Antisense strand to SEQ ID NO: 2571152
uaagugcacauuuacaugu

SEQ ID NO: 2571154 - RNA, 19 nt, Artificial Sequence
  Description of Artificial Sequence: Synthetic oligonucleotide
  Sense strand starting at position 800 of SEQ ID NO: 1888987
ccgugaccuuggguauaca

SEQ ID NO: 2571155 - RNA, 19 nt, Artificial Sequence
  Description of Artificial Sequence: Synthetic oligonucleotide
  Antisense strand to SEQ ID NO: 2571154
uguauacccaaggucacgg

SEQ ID NO: 2571156 - RNA, 19 nt, Artificial Sequence
  Description of Artificial Sequence: Synthetic oligonucleotide
  Sense strand starting at position 896 of SEQ ID NO: 1888987
gagcucugucccugccaga

SEQ ID NO: 2571157 - RNA, 19 nt, Artificial Sequence
  Description of Artificial Sequence: Synthetic oligonucleotide
  Antisense strand to SEQ ID NO: 2571156
ucuggcagggacagagcuc

SEQ ID NO: 2571158 - RNA, 19 nt, Artificial Sequence
  Description of Artificial Sequence: Synthetic oligonucleotide
  Sense strand starting at position 901 of SEQ ID NO: 1888987
cugucccugccagauuauu

SEQ ID NO: 2571159 - RNA, 19 nt, Artificial Sequence
  Description of Artificial Sequence: Synthetic oligonucleotide
  Antisense strand to SEQ ID NO: 2571158
aauaaucuggcagggacag

SEQ ID NO: 2571160 - RNA, 19 nt, Artificial Sequence
  Description of Artificial Sequence: Synthetic oligonucleotide
  Sense strand starting at position 914 of SEQ ID NO: 1888987
auuauuaggcauggccaga

SEQ ID NO: 2571161 - RNA, 19 nt, Artificial Sequence
  Description of Artificial Sequence: Synthetic oligonucleotide
  Antisense strand to SEQ ID NO: 2571160
ucuggccaugccuaauaau

SEQ ID NO: 2571162 - RNA, 19 nt, Artificial Sequence
  Description of Artificial Sequence: Synthetic oligonucleotide
  Sense strand starting at position 1021 of SEQ ID NO: 1888987
guggacugcuccucauguu

SEQ ID NO: 2571163 - RNA, 19 nt, Artificial Sequence
  Description of Artificial Sequence: Synthetic oligonucleotide
  Antisense strand to SEQ ID NO: 2571162
aacaugaggagcaguccac

SEQ ID NO: 2571164 - RNA, 19 nt, Artificial Sequence
  Description of Artificial Sequence: Synthetic oligonucleotide
  Sense strand starting at position 1022 of SEQ ID NO: 1888987
uggacugcuccucauguuu

SEQ ID NO: 2571165 - RNA, 19 nt, Artificial Sequence
  Description of Artificial Sequence: Synthetic oligonucleotide
  Antisense strand to SEQ ID NO: 2571164
aaacaugaggagcagucca

SEQ ID NO: 2571166 - RNA, 19 nt, Artificial Sequence
  Description of Artificial Sequence: Synthetic oligonucleotide
  Sense strand starting at position 1069 of SEQ ID NO: 1888987
ggugcagccucaccuaauu

SEQ ID NO: 2571167 - RNA, 19 nt, Artificial Sequence
  Description of Artificial Sequence: Synthetic oligonucleotide
  Antisense strand to SEQ ID NO: 2571166
aauuaggugaggcugcacc

SEQ ID NO: 2571168 - RNA, 19 nt, Artificial Sequence
  Description of Artificial Sequence: Synthetic oligonucleotide
  Sense strand starting at position 1545 of SEQ ID NO: 1888987
cucaccuuaucauugagga

SEQ ID NO: 2571169 - RNA, 19 nt, Artificial Sequence
  Description of Artificial Sequence: Synthetic oligonucleotide
  Antisense strand to SEQ ID NO: 2571168
uccucaaugauaaggugag

SEQ ID NO: 2571170 - RNA, 19 nt, Artificial Sequence
  Description of Artificial Sequence: Synthetic oligonucleotide
  Sense strand starting at position 1546 of SEQ ID NO: 1888987
ucaccuuaucauugaggac

SEQ ID NO: 2571171 - RNA, 19 nt, Artificial Sequence
  Description of Artificial Sequence: Synthetic oligonucleotide
  Antisense strand to SEQ ID NO: 2571170
guccucaaugauaagguga

SEQ ID NO: 2571172 - RNA, 19 nt, Artificial Sequence
  Description of Artificial Sequence: Synthetic oligonucleotide
  Sense strand starting at position 2189 of SEQ ID NO: 1888987
gugacuugaacucgccagu

SEQ ID NO: 2571173 - RNA, 19 nt, Artificial Sequence
  Description of Artificial Sequence: Synthetic oligonucleotide
  Antisense strand to SEQ ID NO: 2571172
acuggcgaguucaagucac

SEQ ID NO: 2571174 - RNA, 19 nt, Artificial Sequence
  Description of Artificial Sequence: Synthetic oligonucleotide
  Sense strand starting at position 2824 of SEQ ID NO: 1888987
gaggcaaugcuguacgaga

SEQ ID NO: 2571175 - RNA, 19 nt, Artificial Sequence
  Description of Artificial Sequence: Synthetic oligonucleotide
  Antisense strand to SEQ ID NO: 2571174
ucucguacagcauugccuc

SEQ ID NO: 2571176 - RNA, 19 nt, Artificial Sequence
  Description of Artificial Sequence: Synthetic oligonucleotide
  Sense strand starting at position 2970 of SEQ ID NO: 1888987
gaacuuugaugucauaaag

SEQ ID NO: 2571177 - RNA, 19 nt, Artificial Sequence
  Description of Artificial Sequence: Synthetic oligonucleotide
  Antisense strand to SEQ ID NO: 2571176
cuuuaugacaucaaaguuc

SEQ ID NO: 2571178 - RNA, 19 nt, Artificial Sequence
  Description of Artificial Sequence: Synthetic oligonucleotide
  Sense strand starting at position 3138 of SEQ ID NO: 1888987
caaaguggccugugacgaa

SEQ ID NO: 2571179 - RNA, 19 nt, Artificial Sequence
  Description of Artificial Sequence: Synthetic oligonucleotide
  Antisense strand to SEQ ID NO: 2571178
uucgucacaggccacuuug

SEQ ID NO: 2571180 - RNA, 19 nt, Artificial Sequence
  Description of Artificial Sequence: Synthetic oligonucleotide
  Sense strand starting at position 3212 of SEQ ID NO: 1888987
gggccaucgaugugaugaa

SEQ ID NO: 2571181 - RNA, 19 nt, Artificial Sequence
  Description of Artificial Sequence: Synthetic oligonucleotide
  Antisense strand to SEQ ID NO: 2571180
uucaucacaucgauggccc

SEQ ID NO: 2571182 - RNA, 19 nt, Artificial Sequence
  Description of Artificial Sequence: Synthetic oligonucleotide
  Sense strand starting at position 3224 of SEQ ID NO: 1888987
ugaugaauggcauguuccu

SEQ ID NO: 2571183 - RNA, 19 nt, Artificial Sequence
  Description of Artificial Sequence: Synthetic oligonucleotide
  Antisense strand to SEQ ID NO: 2571182
aggaacaugccauucauca

SEQ ID NO: 2571184 - RNA, 19 nt, Artificial Sequence
  Description of Artificial Sequence: Synthetic oligonucleotide
  Sense strand starting at position 3231 of SEQ ID NO: 1888987
uggcauguuccugaacuac

SEQ ID NO: 2571185 - RNA, 19 nt, Artificial Sequence
  Description of Artificial Sequence: Synthetic oligonucleotide
  Antisense strand to SEQ ID NO: 2571184
guaguucaggaacaugcca

SEQ ID NO: 2571186 - RNA, 19 nt, Artificial Sequence
  Description of Artificial Sequence: Synthetic oligonucleotide
  Sense strand starting at position 3327 of SEQ ID NO: 1888987
uagugcugacgucaaggau

SEQ ID NO: 2571187 - RNA, 19 nt, Artificial Sequence
  Description of Artificial Sequence: Synthetic oligonucleotide
  Antisense strand to SEQ ID NO: 2571186
auccuugacgucagcacua

SEQ ID NO: 2571188 - RNA, 19 nt, Artificial Sequence
  Description of Artificial Sequence: Synthetic oligonucleotide
  Sense strand starting at position 3336 of SEQ ID NO: 1888987
cgucaaggauuucgaggaa

SEQ ID NO: 2571189 - RNA, 19 nt, Artificial Sequence
  Description of Artificial Sequence: Synthetic oligonucleotide
  Antisense strand to SEQ ID NO: 2571188
uuccucgaaauccuugacg

SEQ ID NO: 2571190 - RNA, 19 nt, Artificial Sequence
  Description of Artificial Sequence: Synthetic oligonucleotide
  Sense strand starting at position 3371 of SEQ ID NO: 1888987
ccaccuugcgaugaagaca

SEQ ID NO: 2571191 - RNA, 19 nt, Artificial Sequence
  Description of Artificial Sequence: Synthetic oligonucleotide
  Antisense strand to SEQ ID NO: 2571190
ugucuucaucgcaaggugg

SEQ ID NO: 2571192 - RNA, 19 nt, Artificial Sequence
  Description of Artificial Sequence: Synthetic oligonucleotide
  Sense strand starting at position 3383 of SEQ ID NO: 1888987
gaagacaucccaggagcua

SEQ ID NO: 2571193 - RNA, 19 nt, Artificial Sequence
  Description of Artificial Sequence: Synthetic oligonucleotide
  Antisense strand to SEQ ID NO: 2571192
uagcuccugggaugucuuc

SEQ ID NO: 2571194 - RNA, 19 nt, Artificial Sequence
  Description of Artificial Sequence: Synthetic oligonucleotide
  Sense strand starting at position 3483 of SEQ ID NO: 1888987
guguauuuauuguauugag

SEQ ID NO: 2571195 - RNA, 19 nt, Artificial Sequence
  Description of Artificial Sequence: Synthetic oligonucleotide
  Antisense strand to SEQ ID NO: 2571194
cucaauacaauaaauacac

SEQ ID NO: 2571196 - RNA, 19 nt, Artificial Sequence
  Description of Artificial Sequence: Synthetic oligonucleotide
  Sense strand starting at position 3604 of SEQ ID NO: 1888987
caccaagggcguugugaau

SEQ ID NO: 2571197 - RNA, 19 nt, Artificial Sequence
  Description of Artificial Sequence: Synthetic oligonucleotide
  Antisense strand to SEQ ID NO: 2571196
auucacaacgcccuuggug

SEQ ID NO: 2571198 - RNA, 19 nt, Artificial Sequence
  Description of Artificial Sequence: Synthetic oligonucleotide
  Sense strand starting at position 3610 of SEQ ID NO: 1888987
gggcguugugaauaaucuu

SEQ ID NO: 2571199 - RNA, 19 nt, Artificial Sequence
  Description of Artificial Sequence: Synthetic oligonucleotide
  Antisense strand to SEQ ID NO: 2571198
aagauuauucacaacgccc

SEQ ID NO: 2571200 - RNA, 19 nt, Artificial Sequence
  Description of Artificial Sequence: Synthetic oligonucleotide
  Sense strand starting at position 3613 of SEQ ID NO: 1888987
cguugugaauaaucuuacu

SEQ ID NO: 2571201 - RNA, 19 nt, Artificial Sequence
  Description of Artificial Sequence: Synthetic oligonucleotide
  Antisense strand to SEQ ID NO: 2571200
aguaagauuauucacaacg

SEQ ID NO: 2571202 - RNA, 19 nt, Artificial Sequence
  Description of Artificial Sequence: Synthetic oligonucleotide
  Sense strand starting at position 3637 of SEQ ID NO: 1888987
gugccauuuguagguuaaa

SEQ ID NO: 2571203 - RNA, 19 nt, Artificial Sequence
  Description of Artificial Sequence: Synthetic oligonucleotide
  Antisense strand to SEQ ID NO: 2571202
uuuaaccuacaaauggcac

SEQ ID NO: 2571204 - RNA, 19 nt, Artificial Sequence
  Description of Artificial Sequence: Synthetic oligonucleotide
  Sense strand starting at position 3667 of SEQ ID NO: 1888987
cucccugugguuugauuua

SEQ ID NO: 2571205 - RNA, 19 nt, Artificial Sequence
  Description of Artificial Sequence: Synthetic oligonucleotide
  Antisense strand to SEQ ID NO: 2571204
uaaaucaaaccacagggag

SEQ ID NO: 2571206 - RNA, 19 nt, Artificial Sequence
  Description of Artificial Sequence: Synthetic oligonucleotide
  Sense strand starting at position 3738 of SEQ ID NO: 1888987
guagaaucaucagaaagga

SEQ ID NO: 2571207 - RNA, 19 nt, Artificial Sequence
  Description of Artificial Sequence: Synthetic oligonucleotide
  Antisense strand to SEQ ID NO: 2571206
uccuuucugaugauucuac

SEQ ID NO: 2571208 - RNA, 19 nt, Artificial Sequence
  Description of Artificial Sequence: Synthetic oligonucleotide
  Sense strand starting at position 3754 of SEQ ID NO: 1888987
ggagaaggauaucagauga

SEQ ID NO: 2571209 - RNA, 19 nt, Artificial Sequence
  Description of Artificial Sequence: Synthetic oligonucleotide
  Antisense strand to SEQ ID NO: 2571208
ucaucugauauccuucucc

SEQ ID NO: 2571210 - RNA, 19 nt, Artificial Sequence
  Description of Artificial Sequence: Synthetic oligonucleotide
  Sense strand starting at position 131 of SEQ ID NO: 1888988
uugaaucaaugaugagauu

SEQ ID NO: 2571211 - RNA, 19 nt, Artificial Sequence
  Description of Artificial Sequence: Synthetic oligonucleotide
  Antisense strand to SEQ ID NO: 2571210
aaucucaucauugauucaa

SEQ ID NO: 2571212 - RNA, 19 nt, Artificial Sequence
  Description of Artificial Sequence: Synthetic oligonucleotide
  Sense strand starting at position 140 of SEQ ID NO: 1888988
ugaugagauuguggaaauu

SEQ ID NO: 2571213 - RNA, 19 nt, Artificial Sequence
  Description of Artificial Sequence: Synthetic oligonucleotide
  Antisense strand to SEQ ID NO: 2571212
aauuuccacaaucucauca

SEQ ID NO: 2571214 - RNA, 19 nt, Artificial Sequence
  Description of Artificial Sequence: Synthetic oligonucleotide
  Sense strand starting at position 312 of SEQ ID NO: 1888988
ucacaaguguuuccacaug

SEQ ID NO: 2571215 - RNA, 19 nt, Artificial Sequence
  Description of Artificial Sequence: Synthetic oligonucleotide
  Antisense strand to SEQ ID NO: 2571214
cauguggaaacacuuguga

SEQ ID NO: 2571216 - RNA, 19 nt, Artificial Sequence
  Description of Artificial Sequence: Synthetic oligonucleotide
  Sense strand starting at position 317 of SEQ ID NO: 1888988
aguguuuccacauguuggu

SEQ ID NO: 2571217 - RNA, 19 nt, Artificial Sequence
  Description of Artificial Sequence: Synthetic oligonucleotide
  Antisense strand to SEQ ID NO: 2571216
accaacauguggaaacacu

SEQ ID NO: 2571218 - RNA, 19 nt, Artificial Sequence
  Description of Artificial Sequence: Synthetic oligonucleotide
  Sense strand starting at position 413 of SEQ ID NO: 1888988
ugucuuaguuaaccaagaa

SEQ ID NO: 2571219 - RNA, 19 nt, Artificial Sequence
  Description of Artificial Sequence: Synthetic oligonucleotide
  Antisense strand to SEQ ID NO: 2571218
uucuugguuaacuaagaca

SEQ ID NO: 2571220 - RNA, 19 nt, Artificial Sequence
  Description of Artificial Sequence: Synthetic oligonucleotide
  Sense strand starting at position 544 of SEQ ID NO: 1888988
agugaaugaauacguuaau

SEQ ID NO: 2571221 - RNA, 19 nt, Artificial Sequence
  Description of Artificial Sequence: Synthetic oligonucleotide
  Antisense strand to SEQ ID NO: 2571220
auuaacguauucauucacu

SEQ ID NO: 2571222 - RNA, 19 nt, Artificial Sequence
  Description of Artificial Sequence: Synthetic oligonucleotide
  Sense strand starting at position 545 of SEQ ID NO: 1888988
gugaaugaauacguuaauu

SEQ ID NO: 2571223 - RNA, 19 nt, Artificial Sequence
  Description of Artificial Sequence: Synthetic oligonucleotide
  Antisense strand to SEQ ID NO: 2571222
aauuaacguauucauucac

SEQ ID NO: 2571224 - RNA, 19 nt, Artificial Sequence
  Description of Artificial Sequence: Synthetic oligonucleotide
  Sense strand starting at position 555 of SEQ ID NO: 1888988
acguuaauuuagccucuua

SEQ ID NO: 2571225 - RNA, 19 nt, Artificial Sequence
  Description of Artificial Sequence: Synthetic oligonucleotide
  Antisense strand to SEQ ID NO: 2571224
uaagaggcuaaauuaacgu

SEQ ID NO: 2571226 - RNA, 19 nt, Artificial Sequence
  Description of Artificial Sequence: Synthetic oligonucleotide
  Sense strand starting at position 657 of SEQ ID NO: 1888988
agaguagugauagauguuu

SEQ ID NO: 2571227 - RNA, 19 nt, Artificial Sequence
  Description of Artificial Sequence: Synthetic oligonucleotide
  Antisense strand to SEQ ID NO: 2571226
aaacaucuaucacuacucu

SEQ ID NO: 2571228 - RNA, 19 nt, Artificial Sequence
  Description of Artificial Sequence: Synthetic oligonucleotide
  Sense strand starting at position 728 of SEQ ID NO: 1888988
uuguuugcgcaugcuagau

SEQ ID NO: 2571229 - RNA, 19 nt, Artificial Sequence
  Description of Artificial Sequence: Synthetic oligonucleotide
  Antisense strand to SEQ ID NO: 2571228
aucuagcaugcgcaaacaa

SEQ ID NO: 2571230 - RNA, 19 nt, Artificial Sequence
  Description of Artificial Sequence: Synthetic oligonucleotide
  Sense strand starting at position 732 of SEQ ID NO: 1888988
uugcgcaugcuagauauca

SEQ ID NO: 2571231 - RNA, 19 nt, Artificial Sequence
  Description of Artificial Sequence: Synthetic oligonucleotide
  Antisense strand to SEQ ID NO: 2571230
ugauaucuagcaugcgcaa

SEQ ID NO: 2571232 - RNA, 19 nt, Artificial Sequence
  Description of Artificial Sequence: Synthetic oligonucleotide
  Sense strand starting at position 734 of SEQ ID NO: 1888988
gcgcaugcuagauaucagu

SEQ ID NO: 2571233 - RNA, 19 nt, Artificial Sequence
  Description of Artificial Sequence: Synthetic oligonucleotide
  Antisense strand to SEQ ID NO: 2571232
acugauaucuagcaugcgc

SEQ ID NO: 2571234 - RNA, 19 nt, Artificial Sequence
  Description of Artificial Sequence: Synthetic oligonucleotide
  Sense strand starting at position 796 of SEQ ID NO: 1888988
cucaaauacucugaagaga

SEQ ID NO: 2571235 - RNA, 19 nt, Artificial Sequence
  Description of Artificial Sequence: Synthetic oligonucleotide
  Antisense strand to SEQ ID NO: 2571234
ucucuucagaguauuugag

SEQ ID NO: 2571236 - RNA, 19 nt, Artificial Sequence
  Description of Artificial Sequence: Synthetic oligonucleotide
  Sense strand starting at position 811 of SEQ ID NO: 1888988
gagagauauuguugagaaa

SEQ ID NO: 2571237 - RNA, 19 nt, Artificial Sequence
  Description of Artificial Sequence: Synthetic oligonucleotide
  Antisense strand to SEQ ID NO: 2571236
uuucucaacaauaucucuc

SEQ ID NO: 2571238 - RNA, 19 nt, Artificial Sequence
  Description of Artificial Sequence: Synthetic oligonucleotide
  Sense strand starting at position 814 of SEQ ID NO: 1888988
agauauuguugagaaacug

SEQ ID NO: 2571239 - RNA, 19 nt, Artificial Sequence
  Description of Artificial Sequence: Synthetic oligonucleotide
  Antisense strand to SEQ ID NO: 2571238
caguuucucaacaauaucu

SEQ ID NO: 2571240 - RNA, 19 nt, Artificial Sequence
  Description of Artificial Sequence: Synthetic oligonucleotide
  Sense strand starting at position 825 of SEQ ID NO: 1888988
agaaacugcugaguugagu

SEQ ID NO: 2571241 - RNA, 19 nt, Artificial Sequence
  Description of Artificial Sequence: Synthetic oligonucleotide
  Antisense strand to SEQ ID NO: 2571240
acucaacucagcaguuucu

SEQ ID NO: 2571242 - RNA, 19 nt, Artificial Sequence
  Description of Artificial Sequence: Synthetic oligonucleotide
  Sense strand starting at position 907 of SEQ ID NO: 1888988
uuguguaaagugcauauau

SEQ ID NO: 2571243 - RNA, 19 nt, Artificial Sequence
  Description of Artificial Sequence: Synthetic oligonucleotide
  Antisense strand to SEQ ID NO: 2571242
auauaugcacuuuacacaa

SEQ ID NO: 2571244 - RNA, 19 nt, Artificial Sequence
  Description of Artificial Sequence: Synthetic oligonucleotide
  Sense strand starting at position 909 of SEQ ID NO: 1888988
guguaaagugcauauaucu

SEQ ID NO: 2571245 - RNA, 19 nt, Artificial Sequence
  Description of Artificial Sequence: Synthetic oligonucleotide
  Antisense strand to SEQ ID NO: 2571244
agauauaugcacuuuacac

SEQ ID NO: 2571246 - RNA, 19 nt, Artificial Sequence
  Description of Artificial Sequence: Synthetic oligonucleotide
  Sense strand starting at position 968 of SEQ ID NO: 1888988
uguauugauucuguggcuu

SEQ ID NO: 2571247 - RNA, 19 nt, Artificial Sequence
  Description of Artificial Sequence: Synthetic oligonucleotide
  Antisense strand to SEQ ID NO: 2571246
aagccacagaaucaauaca

SEQ ID NO: 2571248 - RNA, 19 nt, Artificial Sequence
  Description of Artificial Sequence: Synthetic oligonucleotide
  Sense strand starting at position 1099 of SEQ ID NO: 1888988
aaaccuuaguauuauggga

SEQ ID NO: 2571249 - RNA, 19 nt, Artificial Sequence
  Description of Artificial Sequence: Synthetic oligonucleotide
  Antisense strand to SEQ ID NO: 2571248
ucccauaauacuaagguuu

SEQ ID NO: 2571250 - RNA, 19 nt, Artificial Sequence
  Description of Artificial Sequence: Synthetic oligonucleotide
  Sense strand starting at position 1103 of SEQ ID NO: 1888988
cuuaguauuaugggaucag

SEQ ID NO: 2571251 - RNA, 19 nt, Artificial Sequence
  Description of Artificial Sequence: Synthetic oligonucleotide
  Antisense strand to SEQ ID NO: 2571250
cugaucccauaauacuaag

SEQ ID NO: 2571252 - RNA, 19 nt, Artificial Sequence
  Description of Artificial Sequence: Synthetic oligonucleotide
  Sense strand starting at position 1104 of SEQ ID NO: 1888988
uuaguauuaugggaucaga

SEQ ID NO: 2571253 - RNA, 19 nt, Artificial Sequence
  Description of Artificial Sequence: Synthetic oligonucleotide
  Antisense strand to SEQ ID NO: 2571252
ucugaucccauaauacuaa

SEQ ID NO: 2571254 - RNA, 19 nt, Artificial Sequence
  Description of Artificial Sequence: Synthetic oligonucleotide
  Sense strand starting at position 1159 of SEQ ID NO: 1888988
uaccauuauguuggagauu

SEQ ID NO: 2571255 - RNA, 19 nt, Artificial Sequence
  Description of Artificial Sequence: Synthetic oligonucleotide
  Antisense strand to SEQ ID NO: 2571254
aaucuccaacauaauggua

SEQ ID NO: 2571256 - RNA, 19 nt, Artificial Sequence
  Description of Artificial Sequence: Synthetic oligonucleotide
  Sense strand starting at position 1160 of SEQ ID NO: 1888988
accauuauguuggagauua

SEQ ID NO: 2571257 - RNA, 19 nt, Artificial Sequence
  Description of Artificial Sequence: Synthetic oligonucleotide
  Antisense strand to SEQ ID NO: 2571256
uaaucuccaacauaauggu

SEQ ID NO: 2571258 - RNA, 19 nt, Artificial Sequence
  Description of Artificial Sequence: Synthetic oligonucleotide
  Sense strand starting at position 1220 of SEQ ID NO: 1888988
ucuacuugacccugugauc

SEQ ID NO: 2571259 - RNA, 19 nt, Artificial Sequence
  Description of Artificial Sequence: Synthetic oligonucleotide
  Antisense strand to SEQ ID NO: 2571258
gaucacagggucaaguaga

SEQ ID NO: 2571260 - RNA, 19 nt, Artificial Sequence
  Description of Artificial Sequence: Synthetic oligonucleotide
  Sense strand starting at position 1260 of SEQ ID NO: 1888988
ccaggacauuuguaaacuu

SEQ ID NO: 2571261 - RNA, 19 nt, Artificial Sequence
  Description of Artificial Sequence: Synthetic oligonucleotide
  Antisense strand to SEQ ID NO: 2571260
aaguuuacaaauguccugg

SEQ ID NO: 2571262 - RNA, 19 nt, Artificial Sequence
  Description of Artificial Sequence: Synthetic oligonucleotide
  Sense strand starting at position 1401 of SEQ ID NO: 1888988
uuuagauguucggcuuaaa

SEQ ID NO: 2571263 - RNA, 19 nt, Artificial Sequence
  Description of Artificial Sequence: Synthetic oligonucleotide
  Antisense strand to SEQ ID NO: 2571262
uuuaagccgaacaucuaaa

SEQ ID NO: 2571264 - RNA, 19 nt, Artificial Sequence
  Description of Artificial Sequence: Synthetic oligonucleotide
  Sense strand starting at position 1404 of SEQ ID NO: 1888988
agauguucggcuuaaauau

SEQ ID NO: 2571265 - RNA, 19 nt, Artificial Sequence
  Description of Artificial Sequence: Synthetic oligonucleotide
  Antisense strand to SEQ ID NO: 2571264
auauuuaagccgaacaucu

SEQ ID NO: 2571266 - RNA, 19 nt, Artificial Sequence
  Description of Artificial Sequence: Synthetic oligonucleotide
  Sense strand starting at position 1582 of SEQ ID NO: 1888988
uuuaaaucuugguacagag

SEQ ID NO: 2571267 - RNA, 19 nt, Artificial Sequence
  Description of Artificial Sequence: Synthetic oligonucleotide
  Antisense strand to SEQ ID NO: 2571266
cucuguaccaagauuuaaa

SEQ ID NO: 2571268 - RNA, 19 nt, Artificial Sequence
  Description of Artificial Sequence: Synthetic oligonucleotide
  Sense strand starting at position 2000 of SEQ ID NO: 1888988
gccggucuuaucgcaccaa

SEQ ID NO: 2571269 - RNA, 19 nt, Artificial Sequence
  Description of Artificial Sequence: Synthetic oligonucleotide
  Antisense strand to SEQ ID NO: 2571268
uuggugcgauaagaccggc

SEQ ID NO: 2571270 - RNA, 19 nt, Artificial Sequence
  Description of Artificial Sequence: Synthetic oligonucleotide
  Sense strand starting at position 2004 of SEQ ID NO: 1888988
gucuuaucgcaccaagugu

SEQ ID NO: 2571271 - RNA, 19 nt, Artificial Sequence
  Description of Artificial Sequence: Synthetic oligonucleotide
  Antisense strand to SEQ ID NO: 2571270
acacuuggugcgauaagac

SEQ ID NO: 2571272 - RNA, 19 nt, Artificial Sequence
  Description of Artificial Sequence: Synthetic oligonucleotide
  Sense strand starting at position 2012 of SEQ ID NO: 1888988
gcaccaagugucuggugua

SEQ ID NO: 2571273 - RNA, 19 nt, Artificial Sequence
  Description of Artificial Sequence: Synthetic oligonucleotide
  Antisense strand to SEQ ID NO: 2571272
uacaccagacacuuggugc

SEQ ID NO: 2571274 - RNA, 19 nt, Artificial Sequence
  Description of Artificial Sequence: Synthetic oligonucleotide
  Sense strand starting at position 2051 of SEQ ID NO: 1888988
gcggagaggccuuagcgaa

SEQ ID NO: 2571275 - RNA, 19 nt, Artificial Sequence
  Description of Artificial Sequence: Synthetic oligonucleotide
  Antisense strand to SEQ ID NO: 2571274
uucgcuaaggccucuccgc

SEQ ID NO: 2571276 - RNA, 19 nt, Artificial Sequence
  Description of Artificial Sequence: Synthetic oligonucleotide
  Sense strand starting at position 2166 of SEQ ID NO: 1888988
ggccuauauuuaugcagaa

SEQ ID NO: 2571277 - RNA, 19 nt, Artificial Sequence
  Description of Artificial Sequence: Synthetic oligonucleotide
  Antisense strand to SEQ ID NO: 2571276
uucugcauaaauauaggcc

SEQ ID NO: 2571278 - RNA, 19 nt, Artificial Sequence
  Description of Artificial Sequence: Synthetic oligonucleotide
  Sense strand starting at position 2194 of SEQ ID NO: 1888988
ggaggccucugucugcaau

SEQ ID NO: 2571279 - RNA, 19 nt, Artificial Sequence
  Description of Artificial Sequence: Synthetic oligonucleotide
  Antisense strand to SEQ ID NO: 2571278
auugcagacagaggccucc

SEQ ID NO: 2571280 - RNA, 19 nt, Artificial Sequence
  Description of Artificial Sequence: Synthetic oligonucleotide
  Sense strand starting at position 2239 of SEQ ID NO: 1888988
cuugguggcuucucacaau

SEQ ID NO: 2571281 - RNA, 19 nt, Artificial Sequence
  Description of Artificial Sequence: Synthetic oligonucleotide
  Antisense strand to SEQ ID NO: 2571280
auugugagaagccaccaag

SEQ ID NO: 2571282 - RNA, 19 nt, Artificial Sequence
  Description of Artificial Sequence: Synthetic oligonucleotide
  Sense strand starting at position 2242 of SEQ ID NO: 1888988
gguggcuucucacaauuuc

SEQ ID NO: 2571283 - RNA, 19 nt, Artificial Sequence
  Description of Artificial Sequence: Synthetic oligonucleotide
  Antisense strand to SEQ ID NO: 2571282
gaaauugugagaagccacc

SEQ ID NO: 2571284 - RNA, 19 nt, Artificial Sequence
  Description of Artificial Sequence: Synthetic oligonucleotide
  Sense strand starting at position 2308 of SEQ ID NO: 1888988
uuuaaaucugaacggguga

SEQ ID NO: 2571285 - RNA, 19 nt, Artificial Sequence
  Description of Artificial Sequence: Synthetic oligonucleotide
  Antisense strand to SEQ ID NO: 2571284
ucacccguucagauuuaaa

SEQ ID NO: 2571286 - RNA, 19 nt, Artificial Sequence
  Description of Artificial Sequence: Synthetic oligonucleotide
  Sense strand starting at position 2378 of SEQ ID NO: 1888988
gucugauguguuuguucug

SEQ ID NO: 2571287 - RNA, 19 nt, Artificial Sequence
  Description of Artificial Sequence: Synthetic oligonucleotide
  Antisense strand to SEQ ID NO: 2571286
cagaacaaacacaucagac

SEQ ID NO: 2571288 - RNA, 19 nt, Artificial Sequence
  Description of Artificial Sequence: Synthetic oligonucleotide
  Sense strand starting at position 2379 of SEQ ID NO: 1888988
ucugauguguuuguucuga

SEQ ID NO: 2571289 - RNA, 19 nt, Artificial Sequence
  Description of Artificial Sequence: Synthetic oligonucleotide
  Antisense strand to SEQ ID NO: 2571288
ucagaacaaacacaucaga

SEQ ID NO: 2571290 - RNA, 19 nt, Artificial Sequence
  Description of Artificial Sequence: Synthetic oligonucleotide
  Sense strand starting at position 66 of SEQ ID NO: 1888989
ugugaauuaguguggauau

SEQ ID NO: 2571291 - RNA, 19 nt, Artificial Sequence
  Description of Artificial Sequence: Synthetic oligonucleotide
  Antisense strand to SEQ ID NO: 2571290
auauccacacuaauucaca

SEQ ID NO: 2571292 - RNA, 19 nt, Artificial Sequence
  Description of Artificial Sequence: Synthetic oligonucleotide
  Sense strand starting at position 219 of SEQ ID NO: 1888989
gaucaaguuuaacuaguga

SEQ ID NO: 2571293 - RNA, 19 nt, Artificial Sequence
  Description of Artificial Sequence: Synthetic oligonucleotide
  Antisense strand to SEQ ID NO: 2571292
ucacuaguuaaacuugauc

SEQ ID NO: 2571294 - RNA, 19 nt, Artificial Sequence
  Description of Artificial Sequence: Synthetic oligonucleotide
  Sense strand starting at position 242 of SEQ ID NO: 1888989
guauacaauuuggaguaaa

SEQ ID NO: 2571295 - RNA, 19 nt, Artificial Sequence
  Description of Artificial Sequence: Synthetic oligonucleotide
  Antisense strand to SEQ ID NO: 2571294
uuuacuccaaauuguauac

SEQ ID NO: 2571296 - RNA, 19 nt, Artificial Sequence
  Description of Artificial Sequence: Synthetic oligonucleotide
  Sense strand starting at position 288 of SEQ ID NO: 1888989
aaugaaaugcucuggcaag

SEQ ID NO: 2571297 - RNA, 19 nt, Artificial Sequence
  Description of Artificial Sequence: Synthetic oligonucleotide
  Antisense strand to SEQ ID NO: 2571296
cuugccagagcauuucauu

SEQ ID NO: 2571298 - RNA, 19 nt, Artificial Sequence
  Description of Artificial Sequence: Synthetic oligonucleotide
  Sense strand starting at position 327 of SEQ ID NO: 1888989
ggucgaaugcauuauacua

SEQ ID NO: 2571299 - RNA, 19 nt, Artificial Sequence
  Description of Artificial Sequence: Synthetic oligonucleotide
  Antisense strand to SEQ ID NO: 2571298
uaguauaaugcauucgacc

SEQ ID NO: 2571300 - RNA, 19 nt, Artificial Sequence
  Description of Artificial Sequence: Synthetic oligonucleotide
  Sense strand starting at position 398 of SEQ ID NO: 1888989
ucaggaaauguuugagauc

SEQ ID NO: 2571301 - RNA, 19 nt, Artificial Sequence
  Description of Artificial Sequence: Synthetic oligonucleotide
  Antisense strand to SEQ ID NO: 2571300
gaucucaaacauuuccuga

SEQ ID NO: 2571302 - RNA, 19 nt, Artificial Sequence
  Description of Artificial Sequence: Synthetic oligonucleotide
  Sense strand starting at position 558 of SEQ ID NO: 1888989
guguauaauccugacuuuc

SEQ ID NO: 2571303 - RNA, 19 nt, Artificial Sequence
  Description of Artificial Sequence: Synthetic oligonucleotide
  Antisense strand to SEQ ID NO: 2571302
gaaagucaggauuauacac

SEQ ID NO: 2571304 - RNA, 19 nt, Artificial Sequence
  Description of Artificial Sequence: Synthetic oligonucleotide
  Sense strand starting at position 594 of SEQ ID NO: 1888989
guugaagcuggucauuacu

SEQ ID NO: 2571305 - RNA, 19 nt, Artificial Sequence
  Description of Artificial Sequence: Synthetic oligonucleotide
  Antisense strand to SEQ ID NO: 2571304
aguaaugaccagcuucaac

SEQ ID NO: 2571306 - RNA, 19 nt, Artificial Sequence
  Description of Artificial Sequence: Synthetic oligonucleotide
  Sense strand starting at position 824 of SEQ ID NO: 1888989
uugaauccaggcuggaauu

SEQ ID NO: 2571307 - RNA, 19 nt, Artificial Sequence
  Description of Artificial Sequence: Synthetic oligonucleotide
  Antisense strand to SEQ ID NO: 2571306
aauuccagccuggauucaa

SEQ ID NO: 2571308 - RNA, 19 nt, Artificial Sequence
  Description of Artificial Sequence: Synthetic oligonucleotide
  Sense strand starting at position 853 of SEQ ID NO: 1888989
auguguuaugaauaagcag

SEQ ID NO: 2571309 - RNA, 19 nt, Artificial Sequence
  Description of Artificial Sequence: Synthetic oligonucleotide
  Antisense strand to SEQ ID NO: 2571308
cugcuuauucauaacacau

SEQ ID NO: 2571310 - RNA, 19 nt, Artificial Sequence
  Description of Artificial Sequence: Synthetic oligonucleotide
  Sense strand starting at position 926 of SEQ ID NO: 1888989
gcaacauuagaaugcaaac

SEQ ID NO: 2571311 - RNA, 19 nt, Artificial Sequence
  Description of Artificial Sequence: Synthetic oligonucleotide
  Antisense strand to SEQ ID NO: 2571310
guuugcauucuaauguugc

SEQ ID NO: 2571312 - RNA, 19 nt, Artificial Sequence
  Description of Artificial Sequence: Synthetic oligonucleotide
  Sense strand starting at position 1153 of SEQ ID NO: 1888989
uucuuugauguccacucau

SEQ ID NO: 2571313 - RNA, 19 nt, Artificial Sequence
  Description of Artificial Sequence: Synthetic oligonucleotide
  Antisense strand to SEQ ID NO: 2571312
augaguggacaucaaagaa

SEQ ID NO: 2571314 - RNA, 19 nt, Artificial Sequence
  Description of Artificial Sequence: Synthetic oligonucleotide
  Sense strand starting at position 1209 of SEQ ID NO: 1888989
uguacauaagaguguauca

SEQ ID NO: 2571315 - RNA, 19 nt, Artificial Sequence
  Description of Artificial Sequence: Synthetic oligonucleotide
  Antisense strand to SEQ ID NO: 2571314
ugauacacucuuauguaca

SEQ ID NO: 2571316 - RNA, 19 nt, Artificial Sequence
  Description of Artificial Sequence: Synthetic oligonucleotide
  Sense strand starting at position 1214 of SEQ ID NO: 1888989
auaagaguguaucauuuga

SEQ ID NO: 2571317 - RNA, 19 nt, Artificial Sequence
  Description of Artificial Sequence: Synthetic oligonucleotide
  Antisense strand to SEQ ID NO: 2571316
ucaaaugauacacucuuau

SEQ ID NO: 2571318 - RNA, 19 nt, Artificial Sequence
  Description of Artificial Sequence: Synthetic oligonucleotide
  Sense strand starting at position 1267 of SEQ ID NO: 1888989
ucacgauuacccugggacu

SEQ ID NO: 2571319 - RNA, 19 nt, Artificial Sequence
  Description of Artificial Sequence: Synthetic oligonucleotide
  Antisense strand to SEQ ID NO: 2571318
agucccaggguaaucguga

SEQ ID NO: 2571320 - RNA, 19 nt, Artificial Sequence
  Description of Artificial Sequence: Synthetic oligonucleotide
  Sense strand starting at position 1268 of SEQ ID NO: 1888989
cacgauuacccugggacuu

SEQ ID NO: 2571321 - RNA, 19 nt, Artificial Sequence
  Description of Artificial Sequence: Synthetic oligonucleotide
  Antisense strand to SEQ ID NO: 2571320
aagucccaggguaaucgug

SEQ ID NO: 2571322 - RNA, 19 nt, Artificial Sequence
  Description of Artificial Sequence: Synthetic oligonucleotide
  Sense strand starting at position 1269 of SEQ ID NO: 1888989
acgauuacccugggacuua

SEQ ID NO: 2571323 - RNA, 19 nt, Artificial Sequence
  Description of Artificial Sequence: Synthetic oligonucleotide
  Antisense strand to SEQ ID NO: 2571322
uaagucccaggguaaucgu

SEQ ID NO: 2571324 - RNA, 19 nt, Artificial Sequence
  Description of Artificial Sequence: Synthetic oligonucleotide
  Sense strand starting at position 1346 of SEQ ID NO: 1888989
uugcaaagucauuaauguu

SEQ ID NO: 2571325 - RNA, 19 nt, Artificial Sequence
  Description of Artificial Sequence: Synthetic oligonucleotide
  Antisense strand to SEQ ID NO: 2571324
aacauuaaugacuuugcaa

SEQ ID NO: 2571326 - RNA, 19 nt, Artificial Sequence
  Description of Artificial Sequence: Synthetic oligonucleotide
  Sense strand starting at position 1358 of SEQ ID NO: 1888989
uaauguuauggcuauggua

SEQ ID NO: 2571327 - RNA, 19 nt, Artificial Sequence
  Description of Artificial Sequence: Synthetic oligonucleotide
  Antisense strand to SEQ ID NO: 2571326
uaccauagccauaacauua

SEQ ID NO: 2571328 - RNA, 19 nt, Artificial Sequence
  Description of Artificial Sequence: Synthetic oligonucleotide
  Sense strand starting at position 1400 of SEQ ID NO: 1888989
agaggacuucucugugagu

SEQ ID NO: 2571329 - RNA, 19 nt, Artificial Sequence
  Description of Artificial Sequence: Synthetic oligonucleotide
  Antisense strand to SEQ ID NO: 2571328
acucacagagaaguccucu

SEQ ID NO: 2571330 - RNA, 19 nt, Artificial Sequence
  Description of Artificial Sequence: Synthetic oligonucleotide
  Sense strand starting at position 1401 of SEQ ID NO: 1888989
gaggacuucucugugaguu

SEQ ID NO: 2571331 - RNA, 19 nt, Artificial Sequence
  Description of Artificial Sequence: Synthetic oligonucleotide
  Antisense strand to SEQ ID NO: 2571330
aacucacagagaaguccuc

SEQ ID NO: 2571332 - RNA, 19 nt, Artificial Sequence
  Description of Artificial Sequence: Synthetic oligonucleotide
  Sense strand starting at position 2088 of SEQ ID NO: 1888989
agucccagucagugagaaa

SEQ ID NO: 2571333 - RNA, 19 nt, Artificial Sequence
  Description of Artificial Sequence: Synthetic oligonucleotide
  Antisense strand to SEQ ID NO: 2571332
uuucucacugacugggacu

SEQ ID NO: 2571334 - RNA, 19 nt, Artificial Sequence
  Description of Artificial Sequence: Synthetic oligonucleotide
  Sense strand starting at position 2089 of SEQ ID NO: 1888989
gucccagucagugagaaag

SEQ ID NO: 2571335 - RNA, 19 nt, Artificial Sequence
  Description of Artificial Sequence: Synthetic oligonucleotide
  Antisense strand to SEQ ID NO: 2571334
cuuucucacugacugggac

SEQ ID NO: 2571336 - RNA, 19 nt, Artificial Sequence
  Description of Artificial Sequence: Synthetic oligonucleotide
  Sense strand starting at position 2183 of SEQ ID NO: 1888989
aaggcacaugcgcaauaau

SEQ ID NO: 2571337 - RNA, 19 nt, Artificial Sequence
  Description of Artificial Sequence: Synthetic oligonucleotide
  Antisense strand to SEQ ID NO: 2571336
auuauugcgcaugugccuu

SEQ ID NO: 2571338 - RNA, 19 nt, Artificial Sequence
  Description of Artificial Sequence: Synthetic oligonucleotide
  Sense strand starting at position 2284 of SEQ ID NO: 1888989
ccacaagguuucuugagua

SEQ ID NO: 2571339 - RNA, 19 nt, Artificial Sequence
  Description of Artificial Sequence: Synthetic oligonucleotide
  Antisense strand to SEQ ID NO: 2571338
uacucaagaaaccuugugg

SEQ ID NO: 2571340 - RNA, 19 nt, Artificial Sequence
  Description of Artificial Sequence: Synthetic oligonucleotide
  Sense strand starting at position 2288 of SEQ ID NO: 1888989
aagguuucuugaguauuga

SEQ ID NO: 2571341 - RNA, 19 nt, Artificial Sequence
  Description of Artificial Sequence: Synthetic oligonucleotide
  Antisense strand to SEQ ID NO: 2571340
ucaauacucaagaaaccuu

SEQ ID NO: 2571342 - RNA, 19 nt, Artificial Sequence
  Description of Artificial Sequence: Synthetic oligonucleotide
  Sense strand starting at position 2289 of SEQ ID NO: 1888989
agguuucuugaguauugaa

SEQ ID NO: 2571343 - RNA, 19 nt, Artificial Sequence
  Description of Artificial Sequence: Synthetic oligonucleotide
  Antisense strand to SEQ ID NO: 2571342
uucaauacucaagaaaccu

SEQ ID NO: 2571344 - RNA, 19 nt, Artificial Sequence
  Description of Artificial Sequence: Synthetic oligonucleotide
  Sense strand starting at position 2373 of SEQ ID NO: 1888989
gaggcucgaggucaaauua

SEQ ID NO: 2571345 - RNA, 19 nt, Artificial Sequence
  Description of Artificial Sequence: Synthetic oligonucleotide
  Antisense strand to SEQ ID NO: 2571344
uaauuugaccucgagccuc

SEQ ID NO: 2571346 - RNA, 19 nt, Artificial Sequence
  Description of Artificial Sequence: Synthetic oligonucleotide
  Sense strand starting at position 2692 of SEQ ID NO: 1888989
aauacauaguuguugauga

SEQ ID NO: 2571347 - RNA, 19 nt, Artificial Sequence
  Description of Artificial Sequence: Synthetic oligonucleotide
  Antisense strand to SEQ ID NO: 2571346
ucaucaacaacuauguauu

SEQ ID NO: 2571348 - RNA, 19 nt, Artificial Sequence
  Description of Artificial Sequence: Synthetic oligonucleotide
  Sense strand starting at position 2697 of SEQ ID NO: 1888989
auaguuguugaugaaaugu

SEQ ID NO: 2571349 - RNA, 19 nt, Artificial Sequence
  Description of Artificial Sequence: Synthetic oligonucleotide
  Antisense strand to SEQ ID NO: 2571348
acauuucaucaacaacuau

SEQ ID NO: 2571350 - RNA, 19 nt, Artificial Sequence
  Description of Artificial Sequence: Synthetic oligonucleotide
  Sense strand starting at position 2728 of SEQ ID NO: 1888989
uaauguaaugagcaacgaa

SEQ ID NO: 2571351 - RNA, 19 nt, Artificial Sequence
  Description of Artificial Sequence: Synthetic oligonucleotide
  Antisense strand to SEQ ID NO: 2571350
uucguugcucauuacauua

SEQ ID NO: 2571352 - RNA, 19 nt, Artificial Sequence
  Description of Artificial Sequence: Synthetic oligonucleotide
  Sense strand starting at position 2931 of SEQ ID NO: 1888989
ucggaucugaauugaagua

SEQ ID NO: 2571353 - RNA, 19 nt, Artificial Sequence
  Description of Artificial Sequence: Synthetic oligonucleotide
  Antisense strand to SEQ ID NO: 2571352
uacuucaauucagauccga

SEQ ID NO: 2571354 - RNA, 19 nt, Artificial Sequence
  Description of Artificial Sequence: Synthetic oligonucleotide
  Sense strand starting at position 2943 of SEQ ID NO: 1888989
ugaaguacaucacugguuu

SEQ ID NO: 2571355 - RNA, 19 nt, Artificial Sequence
  Description of Artificial Sequence: Synthetic oligonucleotide
  Antisense strand to SEQ ID NO: 2571354
aaaccagugauguacuuca

SEQ ID NO: 2571356 - RNA, 19 nt, Artificial Sequence
  Description of Artificial Sequence: Synthetic oligonucleotide
  Sense strand starting at position 3135 of SEQ ID NO: 1888989
cacuguccuggugaaucua

SEQ ID NO: 2571357 - RNA, 19 nt, Artificial Sequence
  Description of Artificial Sequence: Synthetic oligonucleotide
  Antisense strand to SEQ ID NO: 2571356
uagauucaccaggacagug

SEQ ID NO: 2571358 - RNA, 19 nt, Artificial Sequence
  Description of Artificial Sequence: Synthetic oligonucleotide
  Sense strand starting at position 3152 of SEQ ID NO: 1888989
uaguuagugcaaugagaca

SEQ ID NO: 2571359 - RNA, 19 nt, Artificial Sequence
  Description of Artificial Sequence: Synthetic oligonucleotide
  Antisense strand to SEQ ID NO: 2571358
ugucucauugcacuaacua

SEQ ID NO: 2571360 - RNA, 19 nt, Artificial Sequence
  Description of Artificial Sequence: Synthetic oligonucleotide
  Sense strand starting at position 3289 of SEQ ID NO: 1888989
aagugaguugcagaauuaa

SEQ ID NO: 2571361 - RNA, 19 nt, Artificial Sequence
  Description of Artificial Sequence: Synthetic oligonucleotide
  Antisense strand to SEQ ID NO: 2571360
uuaauucugcaacucacuu

SEQ ID NO: 2571362 - RNA, 19 nt, Artificial Sequence
  Description of Artificial Sequence: Synthetic oligonucleotide
  Sense strand starting at position 3413 of SEQ ID NO: 1888989
agggaugaaucugaauaag

SEQ ID NO: 2571363 - RNA, 19 nt, Artificial Sequence
  Description of Artificial Sequence: Synthetic oligonucleotide
  Antisense strand to SEQ ID NO: 2571362
cuuauucagauucaucccu

SEQ ID NO: 2571364 - RNA, 19 nt, Artificial Sequence
  Description of Artificial Sequence: Synthetic oligonucleotide
  Sense strand starting at position 3534 of SEQ ID NO: 1888989
gagucaauaugcuuaagau

SEQ ID NO: 2571365 - RNA, 19 nt, Artificial Sequence
  Description of Artificial Sequence: Synthetic oligonucleotide
  Antisense strand to SEQ ID NO: 2571364
aucuuaagcauauugacuc

SEQ ID NO: 2571366 - RNA, 19 nt, Artificial Sequence
  Description of Artificial Sequence: Synthetic oligonucleotide
  Sense strand starting at position 3535 of SEQ ID NO: 1888989
agucaauaugcuuaagaua

SEQ ID NO: 2571367 - RNA, 19 nt, Artificial Sequence
  Description of Artificial Sequence: Synthetic oligonucleotide
  Antisense strand to SEQ ID NO: 2571366
uaucuuaagcauauugacu

SEQ ID NO: 2571368 - RNA, 19 nt, Artificial Sequence
  Description of Artificial Sequence: Synthetic oligonucleotide
  Sense strand starting at position 3980 of SEQ ID NO: 1888989
ugaccaccgaagugauuau

SEQ ID NO: 2571369 - RNA, 19 nt, Artificial Sequence
  Description of Artificial Sequence: Synthetic oligonucleotide
  Antisense strand to SEQ ID NO: 2571368
auaaucacuucggugguca

SEQ ID NO: 2571370 - RNA, 19 nt, Artificial Sequence
  Description of Artificial Sequence: Synthetic oligonucleotide
  Sense strand starting at position 1036 of SEQ ID NO: 1888990
cauaauugggcucauguuu

SEQ ID NO: 2571371 - RNA, 19 nt, Artificial Sequence
  Description of Artificial Sequence: Synthetic oligonucleotide
  Antisense strand to SEQ ID NO: 2571370
aaacaugagcccaauuaug

SEQ ID NO: 2571372 - RNA, 19 nt, Artificial Sequence
  Description of Artificial Sequence: Synthetic oligonucleotide
  Sense strand starting at position 1133 of SEQ ID NO: 1888990
acaugacucuuagugagug

SEQ ID NO: 2571373 - RNA, 19 nt, Artificial Sequence
  Description of Artificial Sequence: Synthetic oligonucleotide
  Antisense strand to SEQ ID NO: 2571372
cacucacuaagagucaugu

SEQ ID NO: 2571374 - RNA, 19 nt, Artificial Sequence
  Description of Artificial Sequence: Synthetic oligonucleotide
  Sense strand starting at position 1135 of SEQ ID NO: 1888990
augacucuuagugagugua

SEQ ID NO: 2571375 - RNA, 19 nt, Artificial Sequence
  Description of Artificial Sequence: Synthetic oligonucleotide
  Antisense strand to SEQ ID NO: 2571374
uacacucacuaagagucau

SEQ ID NO: 2571376 - RNA, 19 nt, Artificial Sequence
  Description of Artificial Sequence: Synthetic oligonucleotide
  Sense strand starting at position 1138 of SEQ ID NO: 1888990
acucuuagugaguguacaa

SEQ ID NO: 2571377 - RNA, 19 nt, Artificial Sequence
  Description of Artificial Sequence: Synthetic oligonucleotide
  Antisense strand to SEQ ID NO: 2571376
uuguacacucacuaagagu

SEQ ID NO: 2571378 - RNA, 19 nt, Artificial Sequence
  Description of Artificial Sequence: Synthetic oligonucleotide
  Sense strand starting at position 1145 of SEQ ID NO: 1888990
gugaguguacaauacuaua

SEQ ID NO: 2571379 - RNA, 19 nt, Artificial Sequence
  Description of Artificial Sequence: Synthetic oligonucleotide
  Antisense strand to SEQ ID NO: 2571378
uauaguauuguacacucac

SEQ ID NO: 2571380 - RNA, 19 nt, Artificial Sequence
  Description of Artificial Sequence: Synthetic oligonucleotide
  Sense strand starting at position 1266 of SEQ ID NO: 1888990
uuauuugugugcuucucua

SEQ ID NO: 2571381 - RNA, 19 nt, Artificial Sequence
  Description of Artificial Sequence: Synthetic oligonucleotide
  Antisense strand to SEQ ID NO: 2571380
uagagaagcacacaaauaa

SEQ ID NO: 2571382 - RNA, 19 nt, Artificial Sequence
  Description of Artificial Sequence: Synthetic oligonucleotide
  Sense strand starting at position 1835 of SEQ ID NO: 1888990
aauauuuagcucuguagug

SEQ ID NO: 2571383 - RNA, 19 nt, Artificial Sequence
  Description of Artificial Sequence: Synthetic oligonucleotide
  Antisense strand to SEQ ID NO: 2571382
cacuacagagcuaaauauu

SEQ ID NO: 2571384 - RNA, 19 nt, Artificial Sequence
  Description of Artificial Sequence: Synthetic oligonucleotide
  Sense strand starting at position 1844 of SEQ ID NO: 1888990
cucuguaguguggaauuaa

SEQ ID NO: 2571385 - RNA, 19 nt, Artificial Sequence
  Description of Artificial Sequence: Synthetic oligonucleotide
  Antisense strand to SEQ ID NO: 2571384
uuaauuccacacuacagag

SEQ ID NO: 2571386 - RNA, 19 nt, Artificial Sequence
  Description of Artificial Sequence: Synthetic oligonucleotide
  Sense strand starting at position 1876 of SEQ ID NO: 1888990
gcuaauugucuugauagca

SEQ ID NO: 2571387 - RNA, 19 nt, Artificial Sequence
  Description of Artificial Sequence: Synthetic oligonucleotide
  Antisense strand to SEQ ID NO: 2571386
ugcuaucaagacaauuagc

SEQ ID NO: 2571388 - RNA, 19 nt, Artificial Sequence
  Description of Artificial Sequence: Synthetic oligonucleotide
  Sense strand starting at position 1884 of SEQ ID NO: 1888990
ucuugauagcauuacaaug

SEQ ID NO: 2571389 - RNA, 19 nt, Artificial Sequence
  Description of Artificial Sequence: Synthetic oligonucleotide
  Antisense strand to SEQ ID NO: 2571388
cauuguaaugcuaucaaga

SEQ ID NO: 2571390 - RNA, 19 nt, Artificial Sequence
  Description of Artificial Sequence: Synthetic oligonucleotide
  Sense strand starting at position 2013 of SEQ ID NO: 1888990
cagaguggugccugaaaga

SEQ ID NO: 2571391 - RNA, 19 nt, Artificial Sequence
  Description of Artificial Sequence: Synthetic oligonucleotide
  Antisense strand to SEQ ID NO: 2571390
ucuuucaggcaccacucug

SEQ ID NO: 2571392 - RNA, 19 nt, Artificial Sequence
  Description of Artificial Sequence: Synthetic oligonucleotide
  Sense strand starting at position 2041 of SEQ ID NO: 1888990
ugccauuaagacugcaaga

SEQ ID NO: 2571393 - RNA, 19 nt, Artificial Sequence
  Description of Artificial Sequence: Synthetic oligonucleotide
  Antisense strand to SEQ ID NO: 2571392
ucuugcagucuuaauggca

SEQ ID NO: 2571394 - RNA, 19 nt, Artificial Sequence
  Description of Artificial Sequence: Synthetic oligonucleotide
  Sense strand starting at position 2054 of SEQ ID NO: 1888990
gcaagacaugcugagauuc

SEQ ID NO: 2571395 - RNA, 19 nt, Artificial Sequence
  Description of Artificial Sequence: Synthetic oligonucleotide
  Antisense strand to SEQ ID NO: 2571394
gaaucucagcaugucuugc

SEQ ID NO: 2571396 - RNA, 19 nt, Artificial Sequence
  Description of Artificial Sequence: Synthetic oligonucleotide
  Sense strand starting at position 2123 of SEQ ID NO: 1888990
agcagaauuagugggaaug

SEQ ID NO: 2571397 - RNA, 19 nt, Artificial Sequence
  Description of Artificial Sequence: Synthetic oligonucleotide
  Antisense strand to SEQ ID NO: 2571396
cauucccacuaauucugcu

SEQ ID NO: 2571398 - RNA, 19 nt, Artificial Sequence
  Description of Artificial Sequence: Synthetic oligonucleotide
  Sense strand starting at position 2168 of SEQ ID NO: 1888990
ggcaguuagacagaagucu

SEQ ID NO: 2571399 - RNA, 19 nt, Artificial Sequence
  Description of Artificial Sequence: Synthetic oligonucleotide
  Antisense strand to SEQ ID NO: 2571398
agacuucugucuaacugcc

SEQ ID NO: 2571400 - RNA, 19 nt, Artificial Sequence
  Description of Artificial Sequence: Synthetic oligonucleotide
  Sense strand starting at position 2524 of SEQ ID NO: 1888990
uggcucaguggccaagaau

SEQ ID NO: 2571401 - RNA, 19 nt, Artificial Sequence
  Description of Artificial Sequence: Synthetic oligonucleotide
  Antisense strand to SEQ ID NO: 2571400
auucuuggccacugagcca

SEQ ID NO: 2571402 - RNA, 19 nt, Artificial Sequence
  Description of Artificial Sequence: Synthetic oligonucleotide
  Sense strand starting at position 2527 of SEQ ID NO: 1888990
cucaguggccaagaauaca

SEQ ID NO: 2571403 - RNA, 19 nt, Artificial Sequence
  Description of Artificial Sequence: Synthetic oligonucleotide
  Antisense strand to SEQ ID NO: 2571402
uguauucuuggccacugag

SEQ ID NO: 2571404 - RNA, 19 nt, Artificial Sequence
  Description of Artificial Sequence: Synthetic oligonucleotide
  Sense strand starting at position 2703 of SEQ ID NO: 1888990
uccagaauuucugacaagu

SEQ ID NO: 2571405 - RNA, 19 nt, Artificial Sequence
  Description of Artificial Sequence: Synthetic oligonucleotide
  Antisense strand to SEQ ID NO: 2571404
acuugucagaaauucugga

SEQ ID NO: 2571406 - RNA, 19 nt, Artificial Sequence
  Description of Artificial Sequence: Synthetic oligonucleotide
  Sense strand starting at position 2705 of SEQ ID NO: 1888990
cagaauuucugacaaguga

SEQ ID NO: 2571407 - RNA, 19 nt, Artificial Sequence
  Description of Artificial Sequence: Synthetic oligonucleotide
  Antisense strand to SEQ ID NO: 2571406
ucacuugucagaaauucug

SEQ ID NO: 2571408 - RNA, 19 nt, Artificial Sequence
  Description of Artificial Sequence: Synthetic oligonucleotide
  Sense strand starting at position 2738 of SEQ ID NO: 1888990
gcacuucuuggagaaguac

SEQ ID NO: 2571409 - RNA, 19 nt, Artificial Sequence
  Description of Artificial Sequence: Synthetic oligonucleotide
  Antisense strand to SEQ ID NO: 2571408
guacuucuccaagaagugc

SEQ ID NO: 2571410 - RNA, 19 nt, Artificial Sequence
  Description of Artificial Sequence: Synthetic oligonucleotide
  Sense strand starting at position 2874 of SEQ ID NO: 1888990
ggcucuuccaggugaugag

SEQ ID NO: 2571411 - RNA, 19 nt, Artificial Sequence
  Description of Artificial Sequence: Synthetic oligonucleotide
  Antisense strand to SEQ ID NO: 2571410
cucaucaccuggaagagcc

SEQ ID NO: 2571412 - RNA, 19 nt, Artificial Sequence
  Description of Artificial Sequence: Synthetic oligonucleotide
  Sense strand starting at position 2951 of SEQ ID NO: 1888990
uaggaagcaucacuggaau

SEQ ID NO: 2571413 - RNA, 19 nt, Artificial Sequence
  Description of Artificial Sequence: Synthetic oligonucleotide
  Antisense strand to SEQ ID NO: 2571412
auuccagugaugcuuccua

SEQ ID NO: 2571414 - RNA, 19 nt, Artificial Sequence
  Description of Artificial Sequence: Synthetic oligonucleotide
  Sense strand starting at position 2991 of SEQ ID NO: 1888990
uccuguauaggucauaaua

SEQ ID NO: 2571415 - RNA, 19 nt, Artificial Sequence
  Description of Artificial Sequence: Synthetic oligonucleotide
  Antisense strand to SEQ ID NO: 2571414
uauuaugaccuauacagga

SEQ ID NO: 2571416 - RNA, 19 nt, Artificial Sequence
  Description of Artificial Sequence: Synthetic oligonucleotide
  Sense strand starting at position 2999 of SEQ ID NO: 1888990
aggucauaauacucuuaag

SEQ ID NO: 2571417 - RNA, 19 nt, Artificial Sequence
  Description of Artificial Sequence: Synthetic oligonucleotide
  Antisense strand to SEQ ID NO: 2571416
cuuaagaguauuaugaccu

SEQ ID NO: 2571418 - RNA, 19 nt, Artificial Sequence
  Description of Artificial Sequence: Synthetic oligonucleotide
  Sense strand starting at position 3015 of SEQ ID NO: 1888990
aagugauguuauucugacu

SEQ ID NO: 2571419 - RNA, 19 nt, Artificial Sequence
  Description of Artificial Sequence: Synthetic oligonucleotide
  Antisense strand to SEQ ID NO: 2571418
agucagaauaacaucacuu

SEQ ID NO: 2571420 - RNA, 19 nt, Artificial Sequence
  Description of Artificial Sequence: Synthetic oligonucleotide
  Sense strand starting at position 3020 of SEQ ID NO: 1888990
auguuauucugacuuaaag

SEQ ID NO: 2571421 - RNA, 19 nt, Artificial Sequence
  Description of Artificial Sequence: Synthetic oligonucleotide
  Antisense strand to SEQ ID NO: 2571420
cuuuaagucagaauaacau

SEQ ID NO: 2571422 - RNA, 19 nt, Artificial Sequence
  Description of Artificial Sequence: Synthetic oligonucleotide
  Sense strand starting at position 3111 of SEQ ID NO: 1888990
ccucuuugcuuauugagga

SEQ ID NO: 2571423 - RNA, 19 nt, Artificial Sequence
  Description of Artificial Sequence: Synthetic oligonucleotide
  Antisense strand to SEQ ID NO: 2571422
uccucaauaagcaaagagg

SEQ ID NO: 2571424 - RNA, 19 nt, Artificial Sequence
  Description of Artificial Sequence: Synthetic oligonucleotide
  Sense strand starting at position 3116 of SEQ ID NO: 1888990
uugcuuauugaggaguaau

SEQ ID NO: 2571425 - RNA, 19 nt, Artificial Sequence
  Description of Artificial Sequence: Synthetic oligonucleotide
  Antisense strand to SEQ ID NO: 2571424
auuacuccucaauaagcaa

SEQ ID NO: 2571426 - RNA, 19 nt, Artificial Sequence
  Description of Artificial Sequence: Synthetic oligonucleotide
  Sense strand starting at position 3182 of SEQ ID NO: 1888990
gugcaaugacaugauaucu

SEQ ID NO: 2571427 - RNA, 19 nt, Artificial Sequence
  Description of Artificial Sequence: Synthetic oligonucleotide
  Antisense strand to SEQ ID NO: 2571426
agauaucaugucauugcac

SEQ ID NO: 2571428 - RNA, 19 nt, Artificial Sequence
  Description of Artificial Sequence: Synthetic oligonucleotide
  Sense strand starting at position 3257 of SEQ ID NO: 1888990
ggcuacugauucucaaagu

SEQ ID NO: 2571429 - RNA, 19 nt, Artificial Sequence
  Description of Artificial Sequence: Synthetic oligonucleotide
  Antisense strand to SEQ ID NO: 2571428
acuuugagaaucaguagcc

SEQ ID NO: 2571430 - RNA, 19 nt, Artificial Sequence
  Description of Artificial Sequence: Synthetic oligonucleotide
  Sense strand starting at position 3514 of SEQ ID NO: 1888990
gaggacuccugccuagauc

SEQ ID NO: 2571431 - RNA, 19 nt, Artificial Sequence
  Description of Artificial Sequence: Synthetic oligonucleotide
  Antisense strand to SEQ ID NO: 2571430
gaucuaggcaggaguccuc

SEQ ID NO: 2571432 - RNA, 19 nt, Artificial Sequence
  Description of Artificial Sequence: Synthetic oligonucleotide
  Sense strand starting at position 3663 of SEQ ID NO: 1888990
gaaugugaauaccuguaaa

SEQ ID NO: 2571433 - RNA, 19 nt, Artificial Sequence
  Description of Artificial Sequence: Synthetic oligonucleotide
  Antisense strand to SEQ ID NO: 2571432
uuuacagguauucacauuc

SEQ ID NO: 2571434 - RNA, 19 nt, Artificial Sequence
  Description of Artificial Sequence: Synthetic oligonucleotide
  Sense strand starting at position 3697 of SEQ ID NO: 1888990
ggaucuaccucuuuggguu

SEQ ID NO: 2571435 - RNA, 19 nt, Artificial Sequence
  Description of Artificial Sequence: Synthetic oligonucleotide
  Antisense strand to SEQ ID NO: 2571434
aacccaaagagguagaucc

SEQ ID NO: 2571436 - RNA, 19 nt, Artificial Sequence
  Description of Artificial Sequence: Synthetic oligonucleotide
  Sense strand starting at position 3705 of SEQ ID NO: 1888990
cucuuuggguucucacaaa

SEQ ID NO: 2571437 - RNA, 19 nt, Artificial Sequence
  Description of Artificial Sequence: Synthetic oligonucleotide
  Antisense strand to SEQ ID NO: 2571436
uuugugagaacccaaagag

SEQ ID NO: 2571438 - RNA, 19 nt, Artificial Sequence
  Description of Artificial Sequence: Synthetic oligonucleotide
  Sense strand starting at position 3835 of SEQ ID NO: 1888990
uugguaaguucuuuggaug

SEQ ID NO: 2571439 - RNA, 19 nt, Artificial Sequence
  Description of Artificial Sequence: Synthetic oligonucleotide
  Antisense strand to SEQ ID NO: 2571438
cauccaaagaacuuaccaa

SEQ ID NO: 2571440 - RNA, 19 nt, Artificial Sequence
  Description of Artificial Sequence: Synthetic oligonucleotide
  Sense strand starting at position 3878 of SEQ ID NO: 1888990
aaaugugaaugucccuaga

SEQ ID NO: 2571441 - RNA, 19 nt, Artificial Sequence
  Description of Artificial Sequence: Synthetic oligonucleotide
  Antisense strand to SEQ ID NO: 2571440
ucuagggacauucacauuu

SEQ ID NO: 2571442 - RNA, 19 nt, Artificial Sequence
  Description of Artificial Sequence: Synthetic oligonucleotide
  Sense strand starting at position 3880 of SEQ ID NO: 1888990
augugaaugucccuagaua

SEQ ID NO: 2571443 - RNA, 19 nt, Artificial Sequence
  Description of Artificial Sequence: Synthetic oligonucleotide
  Antisense strand to SEQ ID NO: 2571442
uaucuagggacauucacau

SEQ ID NO: 2571444 - RNA, 19 nt, Artificial Sequence
  Description of Artificial Sequence: Synthetic oligonucleotide
  Sense strand starting at position 3881 of SEQ ID NO: 1888990
ugugaaugucccuagauaa

SEQ ID NO: 2571445 - RNA, 19 nt, Artificial Sequence
  Description of Artificial Sequence: Synthetic oligonucleotide
  Antisense strand to SEQ ID NO: 2571444
uuaucuagggacauucaca

SEQ ID NO: 2571446 - RNA, 19 nt, Artificial Sequence
  Description of Artificial Sequence: Synthetic oligonucleotide
  Sense strand starting at position 3913 of SEQ ID NO: 1888990
gcaccugaucguuaacauu

SEQ ID NO: 2571447 - RNA, 19 nt, Artificial Sequence
  Description of Artificial Sequence: Synthetic oligonucleotide
  Antisense strand to SEQ ID NO: 2571446
aauguuaacgaucaggugc

SEQ ID NO: 2571448 - RNA, 19 nt, Artificial Sequence
  Description of Artificial Sequence: Synthetic oligonucleotide
  Sense strand starting at position 3937 of SEQ ID NO: 1888990
ucugauugccaugagcauu

SEQ ID NO: 2571449 - RNA, 19 nt, Artificial Sequence
  Description of Artificial Sequence: Synthetic oligonucleotide
  Antisense strand to SEQ ID NO: 2571448
aaugcucauggcaaucaga

SEQ ID NO: 2571450 - RNA, 19 nt, Artificial Sequence
  Description of Artificial Sequence: Synthetic oligonucleotide
  Sense strand starting at position 18 of SEQ ID NO: 1888991
aauauuaaugagugacugu

SEQ ID NO: 2571451 - RNA, 19 nt, Artificial Sequence
  Description of Artificial Sequence: Synthetic oligonucleotide
  Antisense strand to SEQ ID NO: 2571450
acagucacucauuaauauu

SEQ ID NO: 2571452 - RNA, 19 nt, Artificial Sequence
  Description of Artificial Sequence: Synthetic oligonucleotide
  Sense strand starting at position 60 of SEQ ID NO: 1888991
uuggcuauggugaguggua

SEQ ID NO: 2571453 - RNA, 19 nt, Artificial Sequence
  Description of Artificial Sequence: Synthetic oligonucleotide
  Antisense strand to SEQ ID NO: 2571452
uaccacucaccauagccaa

SEQ ID NO: 2571454 - RNA, 19 nt, Artificial Sequence
  Description of Artificial Sequence: Synthetic oligonucleotide
  Sense strand starting at position 135 of SEQ ID NO: 1888991
gggccugauguugaggaua

SEQ ID NO: 2571455 - RNA, 19 nt, Artificial Sequence
  Description of Artificial Sequence: Synthetic oligonucleotide
  Antisense strand to SEQ ID NO: 2571454
uauccucaacaucaggccc

SEQ ID NO: 2571456 - RNA, 19 nt, Artificial Sequence
  Description of Artificial Sequence: Synthetic oligonucleotide
  Sense strand starting at position 352 of SEQ ID NO: 1888991
gguuaagagaguuguccaa

SEQ ID NO: 2571457 - RNA, 19 nt, Artificial Sequence
  Description of Artificial Sequence: Synthetic oligonucleotide
  Antisense strand to SEQ ID NO: 2571456
uuggacaacucucuuaacc

SEQ ID NO: 2571458 - RNA, 19 nt, Artificial Sequence
  Description of Artificial Sequence: Synthetic oligonucleotide
  Sense strand starting at position 356 of SEQ ID NO: 1888991
aagagaguuguccaagguc

SEQ ID NO: 2571459 - RNA, 19 nt, Artificial Sequence
  Description of Artificial Sequence: Synthetic oligonucleotide
  Antisense strand to SEQ ID NO: 2571458
gaccuuggacaacucucuu

SEQ ID NO: 2571460 - RNA, 19 nt, Artificial Sequence
  Description of Artificial Sequence: Synthetic oligonucleotide
  Sense strand starting at position 430 of SEQ ID NO: 1888991
accucugaaucagugaauu

SEQ ID NO: 2571461 - RNA, 19 nt, Artificial Sequence
  Description of Artificial Sequence: Synthetic oligonucleotide
  Antisense strand to SEQ ID NO: 2571460
aauucacugauucagaggu

SEQ ID NO: 2571462 - RNA, 19 nt, Artificial Sequence
  Description of Artificial Sequence: Synthetic oligonucleotide
  Sense strand starting at position 462 of SEQ ID NO: 1888991
cuggguugcaggcauuaau

SEQ ID NO: 2571463 - RNA, 19 nt, Artificial Sequence
  Description of Artificial Sequence: Synthetic oligonucleotide
  Antisense strand to SEQ ID NO: 2571462
auuaaugccugcaacccag

SEQ ID NO: 2571464 - RNA, 19 nt, Artificial Sequence
  Description of Artificial Sequence: Synthetic oligonucleotide
  Sense strand starting at position 542 of SEQ ID NO: 1888991
ccuucuauuugauagagac

SEQ ID NO: 2571465 - RNA, 19 nt, Artificial Sequence
  Description of Artificial Sequence: Synthetic oligonucleotide
  Antisense strand to SEQ ID NO: 2571464
gucucuaucaaauagaagg

SEQ ID NO: 2571466 - RNA, 19 nt, Artificial Sequence
  Description of Artificial Sequence: Synthetic oligonucleotide
  Sense strand starting at position 624 of SEQ ID NO: 1888991
gcauucuagcucuggagga

SEQ ID NO: 2571467 - RNA, 19 nt, Artificial Sequence
  Description of Artificial Sequence: Synthetic oligonucleotide
  Antisense strand to SEQ ID NO: 2571466
uccuccagagcuagaaugc

SEQ ID NO: 2571468 - RNA, 19 nt, Artificial Sequence
  Description of Artificial Sequence: Synthetic oligonucleotide
  Sense strand starting at position 769 of SEQ ID NO: 1888991
gagagagcugguggagaua

SEQ ID NO: 2571469 - RNA, 19 nt, Artificial Sequence
  Description of Artificial Sequence: Synthetic oligonucleotide
  Antisense strand to SEQ ID NO: 2571468
uaucuccaccagcucucuc

SEQ ID NO: 2571470 - RNA, 19 nt, Artificial Sequence
  Description of Artificial Sequence: Synthetic oligonucleotide
  Sense strand starting at position 798 of SEQ ID NO: 1888991
agaauaggagccuagucuu

SEQ ID NO: 2571471 - RNA, 19 nt, Artificial Sequence
  Description of Artificial Sequence: Synthetic oligonucleotide
  Antisense strand to SEQ ID NO: 2571470
aagacuaggcuccuauucu

SEQ ID NO: 2571472 - RNA, 19 nt, Artificial Sequence
  Description of Artificial Sequence: Synthetic oligonucleotide
  Sense strand starting at position 938 of SEQ ID NO: 1888991
cuccucuagcauuagcaga

SEQ ID NO: 2571473 - RNA, 19 nt, Artificial Sequence
  Description of Artificial Sequence: Synthetic oligonucleotide
  Antisense strand to SEQ ID NO: 2571472
ucugcuaaugcuagaggag

SEQ ID NO: 2571474 - RNA, 19 nt, Artificial Sequence
  Description of Artificial Sequence: Synthetic oligonucleotide
  Sense strand starting at position 1085 of SEQ ID NO: 1888991
gccuguuaucuaugggaaa

SEQ ID NO: 2571475 - RNA, 19 nt, Artificial Sequence
  Description of Artificial Sequence: Synthetic oligonucleotide
  Antisense strand to SEQ ID NO: 2571474
uuucccauagauaacaggc

SEQ ID NO: 2571476 - RNA, 19 nt, Artificial Sequence
  Description of Artificial Sequence: Synthetic oligonucleotide
  Sense strand starting at position 1087 of SEQ ID NO: 1888991
cuguuaucuaugggaaaug

SEQ ID NO: 2571477 - RNA, 19 nt, Artificial Sequence
  Description of Artificial Sequence: Synthetic oligonucleotide
  Antisense strand to SEQ ID NO: 2571476
cauuucccauagauaacag

SEQ ID NO: 2571478 - RNA, 19 nt, Artificial Sequence
  Description of Artificial Sequence: Synthetic oligonucleotide
  Sense strand starting at position 1339 of SEQ ID NO: 1888991
gagcaauacugaccaguga

SEQ ID NO: 2571479 - RNA, 19 nt, Artificial Sequence
  Description of Artificial Sequence: Synthetic oligonucleotide
  Antisense strand to SEQ ID NO: 2571478
ucacuggucaguauugcuc

SEQ ID NO: 2571480 - RNA, 19 nt, Artificial Sequence
  Description of Artificial Sequence: Synthetic oligonucleotide
  Sense strand starting at position 1343 of SEQ ID NO: 1888991
aauacugaccagugacaug

SEQ ID NO: 2571481 - RNA, 19 nt, Artificial Sequence
  Description of Artificial Sequence: Synthetic oligonucleotide
  Antisense strand to SEQ ID NO: 2571480
caugucacuggucaguauu

SEQ ID NO: 2571482 - RNA, 19 nt, Artificial Sequence
  Description of Artificial Sequence: Synthetic oligonucleotide
  Sense strand starting at position 1430 of SEQ ID NO: 1888991
ggcacuaucagucaggcaa

SEQ ID NO: 2571483 - RNA, 19 nt, Artificial Sequence
  Description of Artificial Sequence: Synthetic oligonucleotide
  Antisense strand to SEQ ID NO: 2571482
uugccugacugauagugcc

SEQ ID NO: 2571484 - RNA, 19 nt, Artificial Sequence
  Description of Artificial Sequence: Synthetic oligonucleotide
  Sense strand starting at position 1596 of SEQ ID NO: 1888991
ucugauuaagauggucuua

SEQ ID NO: 2571485 - RNA, 19 nt, Artificial Sequence
  Description of Artificial Sequence: Synthetic oligonucleotide
  Antisense strand to SEQ ID NO: 2571484
uaagaccaucuuaaucaga

SEQ ID NO: 2571486 - RNA, 19 nt, Artificial Sequence
  Description of Artificial Sequence: Synthetic oligonucleotide
  Sense strand starting at position 1598 of SEQ ID NO: 1888991
ugauuaagauggucuuaac

SEQ ID NO: 2571487 - RNA, 19 nt, Artificial Sequence
  Description of Artificial Sequence: Synthetic oligonucleotide
  Antisense strand to SEQ ID NO: 2571486
guuaagaccaucuuaauca

SEQ ID NO: 2571488 - RNA, 19 nt, Artificial Sequence
  Description of Artificial Sequence: Synthetic oligonucleotide
  Sense strand starting at position 2122 of SEQ ID NO: 1888991
gccucugcuccuguaugua

SEQ ID NO: 2571489 - RNA, 19 nt, Artificial Sequence
  Description of Artificial Sequence: Synthetic oligonucleotide
  Antisense strand to SEQ ID NO: 2571488
uacauacaggagcagaggc

SEQ ID NO: 2571490 - RNA, 19 nt, Artificial Sequence
  Description of Artificial Sequence: Synthetic oligonucleotide
  Sense strand starting at position 2305 of SEQ ID NO: 1888991
acuaauagaguaugcaaau

SEQ ID NO: 2571491 - RNA, 19 nt, Artificial Sequence
  Description of Artificial Sequence: Synthetic oligonucleotide
  Antisense strand to SEQ ID NO: 2571490
auuugcauacucuauuagu

SEQ ID NO: 2571492 - RNA, 19 nt, Artificial Sequence
  Description of Artificial Sequence: Synthetic oligonucleotide
  Sense strand starting at position 2306 of SEQ ID NO: 1888991
cuaauagaguaugcaaaua

SEQ ID NO: 2571493 - RNA, 19 nt, Artificial Sequence
  Description of Artificial Sequence: Synthetic oligonucleotide
  Antisense strand to SEQ ID NO: 2571492
uauuugcauacucuauuag

SEQ ID NO: 2571494 - RNA, 19 nt, Artificial Sequence
  Description of Artificial Sequence: Synthetic oligonucleotide
  Sense strand starting at position 2394 of SEQ ID NO: 1888991
gcggcuuucccagcuuuga

SEQ ID NO: 2571495 - RNA, 19 nt, Artificial Sequence
  Description of Artificial Sequence: Synthetic oligonucleotide
  Antisense strand to SEQ ID NO: 2571494
ucaaagcugggaaagccgc

SEQ ID NO: 2571496 - RNA, 19 nt, Artificial Sequence
  Description of Artificial Sequence: Synthetic oligonucleotide
  Sense strand starting at position 2707 of SEQ ID NO: 1888991
gcacuauccgaucaucuuu

SEQ ID NO: 2571497 - RNA, 19 nt, Artificial Sequence
  Description of Artificial Sequence: Synthetic oligonucleotide
  Antisense strand to SEQ ID NO: 2571496
aaagaugaucggauagugc

SEQ ID NO: 2571498 - RNA, 19 nt, Artificial Sequence
  Description of Artificial Sequence: Synthetic oligonucleotide
  Sense strand starting at position 2836 of SEQ ID NO: 1888991
gcuguuagccaccaucaga

SEQ ID NO: 2571499 - RNA, 19 nt, Artificial Sequence
  Description of Artificial Sequence: Synthetic oligonucleotide
  Antisense strand to SEQ ID NO: 2571498
ucugaugguggcuaacagc

SEQ ID NO: 2571500 - RNA, 19 nt, Artificial Sequence
  Description of Artificial Sequence: Synthetic oligonucleotide
  Sense strand starting at position 2863 of SEQ ID NO: 1888991
ggagaaugacacuggcauc

SEQ ID NO: 2571501 - RNA, 19 nt, Artificial Sequence
  Description of Artificial Sequence: Synthetic oligonucleotide
  Antisense strand to SEQ ID NO: 2571500
gaugccagugucauucucc

SEQ ID NO: 2571502 - RNA, 19 nt, Artificial Sequence
  Description of Artificial Sequence: Synthetic oligonucleotide
  Sense strand starting at position 2876 of SEQ ID NO: 1888991
ggcaucaugaacugauaga

SEQ ID NO: 2571503 - RNA, 19 nt, Artificial Sequence
  Description of Artificial Sequence: Synthetic oligonucleotide
  Antisense strand to SEQ ID NO: 2571502
ucuaucaguucaugaugcc

SEQ ID NO: 2571504 - RNA, 19 nt, Artificial Sequence
  Description of Artificial Sequence: Synthetic oligonucleotide
  Sense strand starting at position 2921 of SEQ ID NO: 1888991
agcuauuaggauggagauu

SEQ ID NO: 2571505 - RNA, 19 nt, Artificial Sequence
  Description of Artificial Sequence: Synthetic oligonucleotide
  Antisense strand to SEQ ID NO: 2571504
aaucuccauccuaauagcu

SEQ ID NO: 2571506 - RNA, 19 nt, Artificial Sequence
  Description of Artificial Sequence: Synthetic oligonucleotide
  Sense strand starting at position 2971 of SEQ ID NO: 1888991
gagcaauggccucaaagua

SEQ ID NO: 2571507 - RNA, 19 nt, Artificial Sequence
  Description of Artificial Sequence: Synthetic oligonucleotide
  Antisense strand to SEQ ID NO: 2571506
uacuuugaggccauugcuc

SEQ ID NO: 2571508 - RNA, 19 nt, Artificial Sequence
  Description of Artificial Sequence: Synthetic oligonucleotide
  Sense strand starting at position 2996 of SEQ ID NO: 1888991
guccauaggccagagucau

SEQ ID NO: 2571509 - RNA, 19 nt, Artificial Sequence
  Description of Artificial Sequence: Synthetic oligonucleotide
  Antisense strand to SEQ ID NO: 2571508
augacucuggccuauggac

SEQ ID NO: 2571510 - RNA, 19 nt, Artificial Sequence
  Description of Artificial Sequence: Synthetic oligonucleotide
  Sense strand starting at position 3104 of SEQ ID NO: 1888991
acagcuugccucgaagaug

SEQ ID NO: 2571511 - RNA, 19 nt, Artificial Sequence
  Description of Artificial Sequence: Synthetic oligonucleotide
  Antisense strand to SEQ ID NO: 2571510
caucuucgaggcaagcugu

SEQ ID NO: 2571512 - RNA, 19 nt, Artificial Sequence
  Description of Artificial Sequence: Synthetic oligonucleotide
  Sense strand starting at position 3179 of SEQ ID NO: 1888991
aacgauuggcuaugaagaa

SEQ ID NO: 2571513 - RNA, 19 nt, Artificial Sequence
  Description of Artificial Sequence: Synthetic oligonucleotide
  Antisense strand to SEQ ID NO: 2571512
uucuucauagccaaucguu

SEQ ID NO: 2571514 - RNA, 19 nt, Artificial Sequence
  Description of Artificial Sequence: Synthetic oligonucleotide
  Sense strand starting at position 3344 of SEQ ID NO: 1888991
gggucagauucccuccagu

SEQ ID NO: 2571515 - RNA, 19 nt, Artificial Sequence
  Description of Artificial Sequence: Synthetic oligonucleotide
  Antisense strand to SEQ ID NO: 2571514
acuggagggaaucugaccc

SEQ ID NO: 2571516 - RNA, 19 nt, Artificial Sequence
  Description of Artificial Sequence: Synthetic oligonucleotide
  Sense strand starting at position 3347 of SEQ ID NO: 1888991
ucagauucccuccaguugu

SEQ ID NO: 2571517 - RNA, 19 nt, Artificial Sequence
  Description of Artificial Sequence: Synthetic oligonucleotide
  Antisense strand to SEQ ID NO: 2571516
acaacuggagggaaucuga

SEQ ID NO: 2571518 - RNA, 19 nt, Artificial Sequence
  Description of Artificial Sequence: Synthetic oligonucleotide
  Sense strand starting at position 3358 of SEQ ID NO: 1888991
ccaguuguuguguauaaau

SEQ ID NO: 2571519 - RNA, 19 nt, Artificial Sequence
  Description of Artificial Sequence: Synthetic oligonucleotide
  Antisense strand to SEQ ID NO: 2571518
auuuauacacaacaacugg

SEQ ID NO: 2571520 - RNA, 19 nt, Artificial Sequence
  Description of Artificial Sequence: Synthetic oligonucleotide
  Sense strand starting at position 3360 of SEQ ID NO: 1888991
aguuguuguguauaaauca

SEQ ID NO: 2571521 - RNA, 19 nt, Artificial Sequence
  Description of Artificial Sequence: Synthetic oligonucleotide
  Antisense strand to SEQ ID NO: 2571520
ugauuuauacacaacaacu

SEQ ID NO: 2571522 - RNA, 19 nt, Artificial Sequence
  Description of Artificial Sequence: Synthetic oligonucleotide
  Sense strand starting at position 3459 of SEQ ID NO: 1888991
uaggcucuggagcaauauu

SEQ ID NO: 2571523 - RNA, 19 nt, Artificial Sequence
  Description of Artificial Sequence: Synthetic oligonucleotide
  Antisense strand to SEQ ID NO: 2571522
aauauugcuccagagccua

SEQ ID NO: 2571524 - RNA, 19 nt, Artificial Sequence
  Description of Artificial Sequence: Synthetic oligonucleotide
  Sense strand starting at position 3594 of SEQ ID NO: 1888991
ccuccuuaggacuguugaa

SEQ ID NO: 2571525 - RNA, 19 nt, Artificial Sequence
  Description of Artificial Sequence: Synthetic oligonucleotide
  Antisense strand to SEQ ID NO: 2571524
uucaacaguccuaaggagg

SEQ ID NO: 2571526 - RNA, 19 nt, Artificial Sequence
  Description of Artificial Sequence: Synthetic oligonucleotide
  Sense strand starting at position 3680 of SEQ ID NO: 1888991
cucccuuugggagguaaau

SEQ ID NO: 2571527 - RNA, 19 nt, Artificial Sequence
  Description of Artificial Sequence: Synthetic oligonucleotide
  Antisense strand to SEQ ID NO: 2571526
auuuaccucccaaagggag

SEQ ID NO: 2571528 - RNA, 19 nt, Artificial Sequence
  Description of Artificial Sequence: Synthetic oligonucleotide
  Sense strand starting at position 3869 of SEQ ID NO: 1888991
uguguaaagacuugcaaga

SEQ ID NO: 2571529 - RNA, 19 nt, Artificial Sequence
  Description of Artificial Sequence: Synthetic oligonucleotide
  Antisense strand to SEQ ID NO: 2571528
ucuugcaagucuuuacaca

SEQ ID NO: 2571530 - RNA, 19 nt, Artificial Sequence
  Description of Artificial Sequence: Synthetic oligonucleotide
  Sense strand starting at position 101 of SEQ ID NO: 1888992
gucaauuuacacggugcua

SEQ ID NO: 2571531 - RNA, 19 nt, Artificial Sequence
  Description of Artificial Sequence: Synthetic oligonucleotide
  Antisense strand to SEQ ID NO: 2571530
uagcaccguguaaauugac

SEQ ID NO: 2571532 - RNA, 19 nt, Artificial Sequence
  Description of Artificial Sequence: Synthetic oligonucleotide
  Sense strand starting at position 103 of SEQ ID NO: 1888992
caauuuacacggugcuaua

SEQ ID NO: 2571533 - RNA, 19 nt, Artificial Sequence
  Description of Artificial Sequence: Synthetic oligonucleotide
  Antisense strand to SEQ ID NO: 2571532
uauagcaccguguaaauug

SEQ ID NO: 2571534 - RNA, 19 nt, Artificial Sequence
  Description of Artificial Sequence: Synthetic oligonucleotide
  Sense strand starting at position 442 of SEQ ID NO: 1888992
ugagauuugugcucucuca

SEQ ID NO: 2571535 - RNA, 19 nt, Artificial Sequence
  Description of Artificial Sequence: Synthetic oligonucleotide
  Antisense strand to SEQ ID NO: 2571534
ugagagagcacaaaucuca

SEQ ID NO: 2571536 - RNA, 19 nt, Artificial Sequence
  Description of Artificial Sequence: Synthetic oligonucleotide
  Sense strand starting at position 702 of SEQ ID NO: 1888992
aaaggaugauaugauagau

SEQ ID NO: 2571537 - RNA, 19 nt, Artificial Sequence
  Description of Artificial Sequence: Synthetic oligonucleotide
  Antisense strand to SEQ ID NO: 2571536
aucuaucauaucauccuuu

SEQ ID NO: 2571538 - RNA, 19 nt, Artificial Sequence
  Description of Artificial Sequence: Synthetic oligonucleotide
  Sense strand starting at position 719 of SEQ ID NO: 1888992
auuguaauauugucacuga

SEQ ID NO: 2571539 - RNA, 19 nt, Artificial Sequence
  Description of Artificial Sequence: Synthetic oligonucleotide
  Antisense strand to SEQ ID NO: 2571538
ucagugacaauauuacaau

SEQ ID NO: 2571540 - RNA, 19 nt, Artificial Sequence
  Description of Artificial Sequence: Synthetic oligonucleotide
  Sense strand starting at position 756 of SEQ ID NO: 1888992
ugaaguauuccugguacac

SEQ ID NO: 2571541 - RNA, 19 nt, Artificial Sequence
  Description of Artificial Sequence: Synthetic oligonucleotide
  Antisense strand to SEQ ID NO: 2571540
guguaccaggaauacuuca

SEQ ID NO: 2571542 - RNA, 19 nt, Artificial Sequence
  Description of Artificial Sequence: Synthetic oligonucleotide
  Sense strand starting at position 805 of SEQ ID NO: 1888992
guagauaaggacugcuaua

SEQ ID NO: 2571543 - RNA, 19 nt, Artificial Sequence
  Description of Artificial Sequence: Synthetic oligonucleotide
  Antisense strand to SEQ ID NO: 2571542
uauagcaguccuuaucuac

SEQ ID NO: 2571544 - RNA, 19 nt, Artificial Sequence
  Description of Artificial Sequence: Synthetic oligonucleotide
  Sense strand starting at position 833 of SEQ ID NO: 1888992
agaaauuucugguaauacg

SEQ ID NO: 2571545 - RNA, 19 nt, Artificial Sequence
  Description of Artificial Sequence: Synthetic oligonucleotide
  Antisense strand to SEQ ID NO: 2571544
cguauuaccagaaauuucu

SEQ ID NO: 2571546 - RNA, 19 nt, Artificial Sequence
  Description of Artificial Sequence: Synthetic oligonucleotide
  Sense strand starting at position 849 of SEQ ID NO: 1888992
acgagcucugagcaugaga

SEQ ID NO: 2571547 - RNA, 19 nt, Artificial Sequence
  Description of Artificial Sequence: Synthetic oligonucleotide
  Antisense strand to SEQ ID NO: 2571546
ucucaugcucagagcucgu

SEQ ID NO: 2571548 - RNA, 19 nt, Artificial Sequence
  Description of Artificial Sequence: Synthetic oligonucleotide
  Sense strand starting at position 889 of SEQ ID NO: 1888992
gcaugcugcauuugagaca

SEQ ID NO: 2571549 - RNA, 19 nt, Artificial Sequence
  Description of Artificial Sequence: Synthetic oligonucleotide
  Antisense strand to SEQ ID NO: 2571548
ugucucaaaugcagcaugc

SEQ ID NO: 2571550 - RNA, 19 nt, Artificial Sequence
  Description of Artificial Sequence: Synthetic oligonucleotide
  Sense strand starting at position 953 of SEQ ID NO: 1888992
gcgagauuaccugauggau

SEQ ID NO: 2571551 - RNA, 19 nt, Artificial Sequence
  Description of Artificial Sequence: Synthetic oligonucleotide
  Antisense strand to SEQ ID NO: 2571550
auccaucagguaaucucgc

SEQ ID NO: 2571552 - RNA, 19 nt, Artificial Sequence
  Description of Artificial Sequence: Synthetic oligonucleotide
  Sense strand starting at position 1100 of SEQ ID NO: 1888992
ugagguacucagcaaagca

SEQ ID NO: 2571553 - RNA, 19 nt, Artificial Sequence
  Description of Artificial Sequence: Synthetic oligonucleotide
  Antisense strand to SEQ ID NO: 2571552
ugcuuugcugaguaccuca

SEQ ID NO: 2571554 - RNA, 19 nt, Artificial Sequence
  Description of Artificial Sequence: Synthetic oligonucleotide
  Sense strand starting at position 1330 of SEQ ID NO: 1888992
aguauuagccaggaaagca

SEQ ID NO: 2571555 - RNA, 19 nt, Artificial Sequence
  Description of Artificial Sequence: Synthetic oligonucleotide
  Antisense strand to SEQ ID NO: 2571554
ugcuuuccuggcuaauacu

SEQ ID NO: 2571556 - RNA, 19 nt, Artificial Sequence
  Description of Artificial Sequence: Synthetic oligonucleotide
  Sense strand starting at position 1543 of SEQ ID NO: 1888992
cugagcuuugcaggaggaa

SEQ ID NO: 2571557 - RNA, 19 nt, Artificial Sequence
  Description of Artificial Sequence: Synthetic oligonucleotide
  Antisense strand to SEQ ID NO: 2571556
uuccuccugcaaagcucag

SEQ ID NO: 2571558 - RNA, 19 nt, Artificial Sequence
  Description of Artificial Sequence: Synthetic oligonucleotide
  Sense strand starting at position 1708 of SEQ ID NO: 1888992
ggcaaaggagcuugagaaa

SEQ ID NO: 2571559 - RNA, 19 nt, Artificial Sequence
  Description of Artificial Sequence: Synthetic oligonucleotide
  Antisense strand to SEQ ID NO: 2571558
uuucucaagcuccuuugcc

SEQ ID NO: 2571560 - RNA, 19 nt, Artificial Sequence
  Description of Artificial Sequence: Synthetic oligonucleotide
  Sense strand starting at position 1810 of SEQ ID NO: 1888992
ggcacuauuaaggacguua

SEQ ID NO: 2571561 - RNA, 19 nt, Artificial Sequence
  Description of Artificial Sequence: Synthetic oligonucleotide
  Antisense strand to SEQ ID NO: 2571560
uaacguccuuaauagugcc

SEQ ID NO: 2571562 - RNA, 19 nt, Artificial Sequence
  Description of Artificial Sequence: Synthetic oligonucleotide
  Sense strand starting at position 1861 of SEQ ID NO: 1888992
ccauuuacuuaggagaauu

SEQ ID NO: 2571563 - RNA, 19 nt, Artificial Sequence
  Description of Artificial Sequence: Synthetic oligonucleotide
  Antisense strand to SEQ ID NO: 2571562
aauucuccuaaguaaaugg

SEQ ID NO: 2571564 - RNA, 19 nt, Artificial Sequence
  Description of Artificial Sequence: Synthetic oligonucleotide
  Sense strand starting at position 1905 of SEQ ID NO: 1888992
aaaguuucuggugagugau

SEQ ID NO: 2571565 - RNA, 19 nt, Artificial Sequence
  Description of Artificial Sequence: Synthetic oligonucleotide
  Antisense strand to SEQ ID NO: 2571564
aucacucaccagaaacuuu

SEQ ID NO: 2571566 - RNA, 19 nt, Artificial Sequence
  Description of Artificial Sequence: Synthetic oligonucleotide
  Sense strand starting at position 1936 of SEQ ID NO: 1888992
agacauaaaugugcauaua

SEQ ID NO: 2571567 - RNA, 19 nt, Artificial Sequence
  Description of Artificial Sequence: Synthetic oligonucleotide
  Antisense strand to SEQ ID NO: 2571566
uauaugcacauuuaugucu

SEQ ID NO: 2571568 - RNA, 19 nt, Artificial Sequence
  Description of Artificial Sequence: Synthetic oligonucleotide
  Sense strand starting at position 1968 of SEQ ID NO: 1888992
augugaaccuauguaagau

SEQ ID NO: 2571569 - RNA, 19 nt, Artificial Sequence
  Description of Artificial Sequence: Synthetic oligonucleotide
  Antisense strand to SEQ ID NO: 2571568
aucuuacauagguucacau

SEQ ID NO: 2571570 - RNA, 19 nt, Artificial Sequence
  Description of Artificial Sequence: Synthetic oligonucleotide
  Sense strand starting at position 2007 of SEQ ID NO: 1888992
uacuuuggccagugaaaca

SEQ ID NO: 2571571 - RNA, 19 nt, Artificial Sequence
  Description of Artificial Sequence: Synthetic oligonucleotide
  Antisense strand to SEQ ID NO: 2571570
uguuucacuggccaaagua

SEQ ID NO: 2571572 - RNA, 19 nt, Artificial Sequence
  Description of Artificial Sequence: Synthetic oligonucleotide
  Sense strand starting at position 2086 of SEQ ID NO: 1888992
gcaagagugaggugauauu

SEQ ID NO: 2571573 - RNA, 19 nt, Artificial Sequence
  Description of Artificial Sequence: Synthetic oligonucleotide
  Antisense strand to SEQ ID NO: 2571572
aauaucaccucacucuugc

SEQ ID NO: 2571574 - RNA, 19 nt, Artificial Sequence
  Description of Artificial Sequence: Synthetic oligonucleotide
  Sense strand starting at position 2107 of SEQ ID NO: 1888992
gauggaaugcuagaaugcu

SEQ ID NO: 2571575 - RNA, 19 nt, Artificial Sequence
  Description of Artificial Sequence: Synthetic oligonucleotide
  Antisense strand to SEQ ID NO: 2571574
agcauucuagcauuccauc

SEQ ID NO: 2571576 - RNA, 19 nt, Artificial Sequence
  Description of Artificial Sequence: Synthetic oligonucleotide
  Sense strand starting at position 2395 of SEQ ID NO: 1888992
gcuagugugcuggcuggaa

SEQ ID NO: 2571577 - RNA, 19 nt, Artificial Sequence
  Description of Artificial Sequence: Synthetic oligonucleotide
  Antisense strand to SEQ ID NO: 2571576
uuccagccagcacacuagc

SEQ ID NO: 2571578 - RNA, 19 nt, Artificial Sequence
  Description of Artificial Sequence: Synthetic oligonucleotide
  Sense strand starting at position 2470 of SEQ ID NO: 1888992
acuguauauguggauuauu

SEQ ID NO: 2571579 - RNA, 19 nt, Artificial Sequence
  Description of Artificial Sequence: Synthetic oligonucleotide
  Antisense strand to SEQ ID NO: 2571578
aauaauccacauauacagu

SEQ ID NO: 2571580 - RNA, 19 nt, Artificial Sequence
  Description of Artificial Sequence: Synthetic oligonucleotide
  Sense strand starting at position 2497 of SEQ ID NO: 1888992
ugagcaucaccucaguaua

SEQ ID NO: 2571581 - RNA, 19 nt, Artificial Sequence
  Description of Artificial Sequence: Synthetic oligonucleotide
  Antisense strand to SEQ ID NO: 2571580
uauacugaggugaugcuca

SEQ ID NO: 2571582 - RNA, 19 nt, Artificial Sequence
  Description of Artificial Sequence: Synthetic oligonucleotide
  Sense strand starting at position 2499 of SEQ ID NO: 1888992
agcaucaccucaguauaua

SEQ ID NO: 2571583 - RNA, 19 nt, Artificial Sequence
  Description of Artificial Sequence: Synthetic oligonucleotide
  Antisense strand to SEQ ID NO: 2571582
uauauacugaggugaugcu

SEQ ID NO: 2571584 - RNA, 19 nt, Artificial Sequence
  Description of Artificial Sequence: Synthetic oligonucleotide
  Sense strand starting at position 2500 of SEQ ID NO: 1888992
gcaucaccucaguauauau

SEQ ID NO: 2571585 - RNA, 19 nt, Artificial Sequence
  Description of Artificial Sequence: Synthetic oligonucleotide
  Antisense strand to SEQ ID NO: 2571584
auauauacugaggugaugc

SEQ ID NO: 2571586 - RNA, 19 nt, Artificial Sequence
  Description of Artificial Sequence: Synthetic oligonucleotide
  Sense strand starting at position 2708 of SEQ ID NO: 1888992
uacggauuccauuaaguau

SEQ ID NO: 2571587 - RNA, 19 nt, Artificial Sequence
  Description of Artificial Sequence: Synthetic oligonucleotide
  Antisense strand to SEQ ID NO: 2571586
auacuuaauggaauccgua

SEQ ID NO: 2571588 - RNA, 19 nt, Artificial Sequence
  Description of Artificial Sequence: Synthetic oligonucleotide
  Sense strand starting at position 2774 of SEQ ID NO: 1888992
uuggauauaucucugagua

SEQ ID NO: 2571589 - RNA, 19 nt, Artificial Sequence
  Description of Artificial Sequence: Synthetic oligonucleotide
  Antisense strand to SEQ ID NO: 2571588
uacucagagauauauccaa

SEQ ID NO: 2571590 - RNA, 19 nt, Artificial Sequence
  Description of Artificial Sequence: Synthetic oligonucleotide
  Sense strand starting at position 2778 of SEQ ID NO: 1888992
auauaucucugaguaucuu

SEQ ID NO: 2571591 - RNA, 19 nt, Artificial Sequence
  Description of Artificial Sequence: Synthetic oligonucleotide
  Antisense strand to SEQ ID NO: 2571590
aagauacucagagauauau

SEQ ID NO: 2571592 - RNA, 19 nt, Artificial Sequence
  Description of Artificial Sequence: Synthetic oligonucleotide
  Sense strand starting at position 2784 of SEQ ID NO: 1888992
cucugaguaucuuuaaaug

SEQ ID NO: 2571593 - RNA, 19 nt, Artificial Sequence
  Description of Artificial Sequence: Synthetic oligonucleotide
  Antisense strand to SEQ ID NO: 2571592
cauuuaaagauacucagag

SEQ ID NO: 2571594 - RNA, 19 nt, Artificial Sequence
  Description of Artificial Sequence: Synthetic oligonucleotide
  Sense strand starting at position 2895 of SEQ ID NO: 1888992
ugccuauuccuacauguag

SEQ ID NO: 2571595 - RNA, 19 nt, Artificial Sequence
  Description of Artificial Sequence: Synthetic oligonucleotide
  Antisense strand to SEQ ID NO: 2571594
cuacauguaggaauaggca

SEQ ID NO: 2571596 - RNA, 19 nt, Artificial Sequence
  Description of Artificial Sequence: Synthetic oligonucleotide
  Sense strand starting at position 2913 of SEQ ID NO: 1888992
ggccgaagacuauacuaca

SEQ ID NO: 2571597 - RNA, 19 nt, Artificial Sequence
  Description of Artificial Sequence: Synthetic oligonucleotide
  Antisense strand to SEQ ID NO: 2571596
uguaguauagucuucggcc

SEQ ID NO: 2571598 - RNA, 19 nt, Artificial Sequence
  Description of Artificial Sequence: Synthetic oligonucleotide
  Sense strand starting at position 2934 of SEQ ID NO: 1888992
ucauuugcauuccuaugua

SEQ ID NO: 2571599 - RNA, 19 nt, Artificial Sequence
  Description of Artificial Sequence: Synthetic oligonucleotide
  Antisense strand to SEQ ID NO: 2571598
uacauaggaaugcaaauga

SEQ ID NO: 2571600 - RNA, 19 nt, Artificial Sequence
  Description of Artificial Sequence: Synthetic oligonucleotide
  Sense strand starting at position 3000 of SEQ ID NO: 1888992
ccuuguucugcgcuuauua

SEQ ID NO: 2571601 - RNA, 19 nt, Artificial Sequence
  Description of Artificial Sequence: Synthetic oligonucleotide
  Antisense strand to SEQ ID NO: 2571600
uaauaagcgcagaacaagg

SEQ ID NO: 2571602 - RNA, 19 nt, Artificial Sequence
  Description of Artificial Sequence: Synthetic oligonucleotide
  Sense strand starting at position 3140 of SEQ ID NO: 1888992
acagcuguuccugggaaau

SEQ ID NO: 2571603 - RNA, 19 nt, Artificial Sequence
  Description of Artificial Sequence: Synthetic oligonucleotide
  Antisense strand to SEQ ID NO: 2571602
auuucccaggaacagcugu

SEQ ID NO: 2571604 - RNA, 19 nt, Artificial Sequence
  Description of Artificial Sequence: Synthetic oligonucleotide
  Sense strand starting at position 3926 of SEQ ID NO: 1888992
aucacugguucucuuauua

SEQ ID NO: 2571605 - RNA, 19 nt, Artificial Sequence
  Description of Artificial Sequence: Synthetic oligonucleotide
  Antisense strand to SEQ ID NO: 2571604
uaauaagagaaccagugau

SEQ ID NO: 2571606 - RNA, 19 nt, Artificial Sequence
  Description of Artificial Sequence: Synthetic oligonucleotide
  Sense strand starting at position 3930 of SEQ ID NO: 1888992
cugguucucuuauuaagac

SEQ ID NO: 2571607 - RNA, 19 nt, Artificial Sequence
  Description of Artificial Sequence: Synthetic oligonucleotide
  Antisense strand to SEQ ID NO: 2571606
gucuuaauaagagaaccag

SEQ ID NO: 2571608 - RNA, 19 nt, Artificial Sequence
  Description of Artificial Sequence: Synthetic oligonucleotide
  Sense strand starting at position 3977 of SEQ ID NO: 1888992
aaaugacuuggacggugua

SEQ ID NO: 2571609 - RNA, 19 nt, Artificial Sequence
  Description of Artificial Sequence: Synthetic oligonucleotide
  Antisense strand to SEQ ID NO: 2571608
uacaccguccaagucauuu

SEQ ID NO: 2571610 - RNA, 19 nt, Artificial Sequence
  Description of Artificial Sequence: Synthetic oligonucleotide
  Sense strand starting at position 17 of SEQ ID NO: 1888993
gcgcucugucugguugaga

SEQ ID NO: 2571611 - RNA, 19 nt, Artificial Sequence
  Description of Artificial Sequence: Synthetic oligonucleotide
  Antisense strand to SEQ ID NO: 2571610
ucucaaccagacagagcgc

SEQ ID NO: 2571612 - RNA, 19 nt, Artificial Sequence
  Description of Artificial Sequence: Synthetic oligonucleotide
  Sense strand starting at position 28 of SEQ ID NO: 1888993
gguugagagcaaugggcua

SEQ ID NO: 2571613 - RNA, 19 nt, Artificial Sequence
  Description of Artificial Sequence: Synthetic oligonucleotide
  Antisense strand to SEQ ID NO: 2571612
uagcccauugcucucaacc

SEQ ID NO: 2571614 - RNA, 19 nt, Artificial Sequence
  Description of Artificial Sequence: Synthetic oligonucleotide
  Sense strand starting at position 97 of SEQ ID NO: 1888993
aucauuuccucggacaucu

SEQ ID NO: 2571615 - RNA, 19 nt, Artificial Sequence
  Description of Artificial Sequence: Synthetic oligonucleotide
  Antisense strand to SEQ ID NO: 2571614
agauguccgaggaaaugau

SEQ ID NO: 2571616 - RNA, 19 nt, Artificial Sequence
  Description of Artificial Sequence: Synthetic oligonucleotide
  Sense strand starting at position 107 of SEQ ID NO: 1888993
cggacaucuguauggagau

SEQ ID NO: 2571617 - RNA, 19 nt, Artificial Sequence
  Description of Artificial Sequence: Synthetic oligonucleotide
  Antisense strand to SEQ ID NO: 2571616
aucuccauacagauguccg

SEQ ID NO: 2571618 - RNA, 19 nt, Artificial Sequence
  Description of Artificial Sequence: Synthetic oligonucleotide
  Sense strand starting at position 199 of SEQ ID NO: 1888993
uacugaugguuauuccuga

SEQ ID NO: 2571619 - RNA, 19 nt, Artificial Sequence
  Description of Artificial Sequence: Synthetic oligonucleotide
  Antisense strand to SEQ ID NO: 2571618
ucaggaauaaccaucagua

SEQ ID NO: 2571620 - RNA, 19 nt, Artificial Sequence
  Description of Artificial Sequence: Synthetic oligonucleotide
  Sense strand starting at position 200 of SEQ ID NO: 1888993
acugaugguuauuccugaa

SEQ ID NO: 2571621 - RNA, 19 nt, Artificial Sequence
  Description of Artificial Sequence: Synthetic oligonucleotide
  Antisense strand to SEQ ID NO: 2571620
uucaggaauaaccaucagu

SEQ ID NO: 2571622 - RNA, 19 nt, Artificial Sequence
  Description of Artificial Sequence: Synthetic oligonucleotide
  Sense strand starting at position 269 of SEQ ID NO: 1888993
ccucuuugggcugagucaa

SEQ ID NO: 2571623 - RNA, 19 nt, Artificial Sequence
  Description of Artificial Sequence: Synthetic oligonucleotide
  Antisense strand to SEQ ID NO: 2571622
uugacucagcccaaagagg

SEQ ID NO: 2571624 - RNA, 19 nt, Artificial Sequence
  Description of Artificial Sequence: Synthetic oligonucleotide
  Sense strand starting at position 418 of SEQ ID NO: 1888993
cccggagucucuccauauc

SEQ ID NO: 2571625 - RNA, 19 nt, Artificial Sequence
  Description of Artificial Sequence: Synthetic oligonucleotide
  Antisense strand to SEQ ID NO: 2571624
gauauggagagacuccggg

SEQ ID NO: 2571626 - RNA, 19 nt, Artificial Sequence
  Description of Artificial Sequence: Synthetic oligonucleotide
  Sense strand starting at position 691 of SEQ ID NO: 1888993
gucuuuaagacaugcccga

SEQ ID NO: 2571627 - RNA, 19 nt, Artificial Sequence
  Description of Artificial Sequence: Synthetic oligonucleotide
  Antisense strand to SEQ ID NO: 2571626
ucgggcaugucuuaaagac

SEQ ID NO: 2571628 - RNA, 19 nt, Artificial Sequence
  Description of Artificial Sequence: Synthetic oligonucleotide
  Sense strand starting at position 695 of SEQ ID NO: 1888993
uuaagacaugcccgacaga

SEQ ID NO: 2571629 - RNA, 19 nt, Artificial Sequence
  Description of Artificial Sequence: Synthetic oligonucleotide
  Antisense strand to SEQ ID NO: 2571628
ucugucgggcaugucuuaa

SEQ ID NO: 2571630 - RNA, 19 nt, Artificial Sequence
  Description of Artificial Sequence: Synthetic oligonucleotide
  Sense strand starting at position 772 of SEQ ID NO: 1888993
uaacgugggaaagguauaa

SEQ ID NO: 2571631 - RNA, 19 nt, Artificial Sequence
  Description of Artificial Sequence: Synthetic oligonucleotide
  Antisense strand to SEQ ID NO: 2571630
uuauaccuuucccacguua

SEQ ID NO: 2571632 - RNA, 19 nt, Artificial Sequence
  Description of Artificial Sequence: Synthetic oligonucleotide
  Sense strand starting at position 794 of SEQ ID NO: 1888993
gguauaagucaugaaaguu

SEQ ID NO: 2571633 - RNA, 19 nt, Artificial Sequence
  Description of Artificial Sequence: Synthetic oligonucleotide
  Antisense strand to SEQ ID NO: 2571632
aacuuucaugacuuauacc

SEQ ID NO: 2571634 - RNA, 19 nt, Artificial Sequence
  Description of Artificial Sequence: Synthetic oligonucleotide
  Sense strand starting at position 800 of SEQ ID NO: 1888993
agucaugaaaguuguucuu

SEQ ID NO: 2571635 - RNA, 19 nt, Artificial Sequence
  Description of Artificial Sequence: Synthetic oligonucleotide
  Antisense strand to SEQ ID NO: 2571634
aagaacaacuuucaugacu

SEQ ID NO: 2571636 - RNA, 19 nt, Artificial Sequence
  Description of Artificial Sequence: Synthetic oligonucleotide
  Sense strand starting at position 803 of SEQ ID NO: 1888993
caugaaaguuguucuugga

SEQ ID NO: 2571637 - RNA, 19 nt, Artificial Sequence
  Description of Artificial Sequence: Synthetic oligonucleotide
  Antisense strand to SEQ ID NO: 2571636
uccaagaacaacuuucaug

SEQ ID NO: 2571638 - RNA, 19 nt, Artificial Sequence
  Description of Artificial Sequence: Synthetic oligonucleotide
  Sense strand starting at position 837 of SEQ ID NO: 1888993
guuagagcccuccagaaug

SEQ ID NO: 2571639 - RNA, 19 nt, Artificial Sequence
  Description of Artificial Sequence: Synthetic oligonucleotide
  Antisense strand to SEQ ID NO: 2571638
cauucuggagggcucuaac

SEQ ID NO: 2571640 - RNA, 19 nt, Artificial Sequence
  Description of Artificial Sequence: Synthetic oligonucleotide
  Sense strand starting at position 849 of SEQ ID NO: 1888993
cagaaugagccaggugcua

SEQ ID NO: 2571641 - RNA, 19 nt, Artificial Sequence
  Description of Artificial Sequence: Synthetic oligonucleotide
  Antisense strand to SEQ ID NO: 2571640
uagcaccuggcucauucug

SEQ ID NO: 2571642 - RNA, 19 nt, Artificial Sequence
  Description of Artificial Sequence: Synthetic oligonucleotide
  Sense strand starting at position 1447 of SEQ ID NO: 1888993
cugccagugccucugugau

SEQ ID NO: 2571643 - RNA, 19 nt, Artificial Sequence
  Description of Artificial Sequence: Synthetic oligonucleotide
  Antisense strand to SEQ ID NO: 2571642
aucacagaggcacuggcag

SEQ ID NO: 2571644 - RNA, 19 nt, Artificial Sequence
  Description of Artificial Sequence: Synthetic oligonucleotide
  Sense strand starting at position 1471 of SEQ ID NO: 1888993
gcaugaguugaccacuaug

SEQ ID NO: 2571645 - RNA, 19 nt, Artificial Sequence
  Description of Artificial Sequence: Synthetic oligonucleotide
  Antisense strand to SEQ ID NO: 2571644
cauaguggucaacucaugc

SEQ ID NO: 2571646 - RNA, 19 nt, Artificial Sequence
  Description of Artificial Sequence: Synthetic oligonucleotide
  Sense strand starting at position 1474 of SEQ ID NO: 1888993
ugaguugaccacuauguac

SEQ ID NO: 2571647 - RNA, 19 nt, Artificial Sequence
  Description of Artificial Sequence: Synthetic oligonucleotide
  Antisense strand to SEQ ID NO: 2571646
guacauaguggucaacuca

SEQ ID NO: 2571648 - RNA, 19 nt, Artificial Sequence
  Description of Artificial Sequence: Synthetic oligonucleotide
  Sense strand starting at position 1578 of SEQ ID NO: 1888993
gggcuucaugcuuagagga

SEQ ID NO: 2571649 - RNA, 19 nt, Artificial Sequence
  Description of Artificial Sequence: Synthetic oligonucleotide
  Antisense strand to SEQ ID NO: 2571648
uccucuaagcaugaagccc

SEQ ID NO: 2571650 - RNA, 19 nt, Artificial Sequence
  Description of Artificial Sequence: Synthetic oligonucleotide
  Sense strand starting at position 1599 of SEQ ID NO: 1888993
ccagauaagcccuauugca

SEQ ID NO: 2571651 - RNA, 19 nt, Artificial Sequence
  Description of Artificial Sequence: Synthetic oligonucleotide
  Antisense strand to SEQ ID NO: 2571650
ugcaauagggcuuaucugg

SEQ ID NO: 2571652 - RNA, 19 nt, Artificial Sequence
  Description of Artificial Sequence: Synthetic oligonucleotide
  Sense strand starting at position 2104 of SEQ ID NO: 1888993
uacuuugcaggaugugaga

SEQ ID NO: 2571653 - RNA, 19 nt, Artificial Sequence
  Description of Artificial Sequence: Synthetic oligonucleotide
  Antisense strand to SEQ ID NO: 2571652
ucucacauccugcaaagua

SEQ ID NO: 2571654 - RNA, 19 nt, Artificial Sequence
  Description of Artificial Sequence: Synthetic oligonucleotide
  Sense strand starting at position 2278 of SEQ ID NO: 1888993
ccaagagaguucuuugaga

SEQ ID NO: 2571655 - RNA, 19 nt, Artificial Sequence
  Description of Artificial Sequence: Synthetic oligonucleotide
  Antisense strand to SEQ ID NO: 2571654
ucucaaagaacucucuugg

SEQ ID NO: 2571656 - RNA, 19 nt, Artificial Sequence
  Description of Artificial Sequence: Synthetic oligonucleotide
  Sense strand starting at position 2287 of SEQ ID NO: 1888993
uucuuugagaaaugagagu

SEQ ID NO: 2571657 - RNA, 19 nt, Artificial Sequence
  Description of Artificial Sequence: Synthetic oligonucleotide
  Antisense strand to SEQ ID NO: 2571656
acucucauuucucaaagaa

SEQ ID NO: 2571658 - RNA, 19 nt, Artificial Sequence
  Description of Artificial Sequence: Synthetic oligonucleotide
  Sense strand starting at position 2489 of SEQ ID NO: 1888993
gugauucgucccucugucu

SEQ ID NO: 2571659 - RNA, 19 nt, Artificial Sequence
  Description of Artificial Sequence: Synthetic oligonucleotide
  Antisense strand to SEQ ID NO: 2571658
agacagagggacgaaucac

SEQ ID NO: 2571660 - RNA, 19 nt, Artificial Sequence
  Description of Artificial Sequence: Synthetic oligonucleotide
  Sense strand starting at position 2503 of SEQ ID NO: 1888993
ugucuucgugcaguccuua

SEQ ID NO: 2571661 - RNA, 19 nt, Artificial Sequence
  Description of Artificial Sequence: Synthetic oligonucleotide
  Antisense strand to SEQ ID NO: 2571660
uaaggacugcacgaagaca

SEQ ID NO: 2571662 - RNA, 19 nt, Artificial Sequence
  Description of Artificial Sequence: Synthetic oligonucleotide
  Sense strand starting at position 2504 of SEQ ID NO: 1888993
gucuucgugcaguccuuaa

SEQ ID NO: 2571663 - RNA, 19 nt, Artificial Sequence
  Description of Artificial Sequence: Synthetic oligonucleotide
  Antisense strand to SEQ ID NO: 2571662
uuaaggacugcacgaagac

SEQ ID NO: 2571664 - RNA, 19 nt, Artificial Sequence
  Description of Artificial Sequence: Synthetic oligonucleotide
  Sense strand starting at position 2508 of SEQ ID NO: 1888993
ucgugcaguccuuaaacua

SEQ ID NO: 2571665 - RNA, 19 nt, Artificial Sequence
  Description of Artificial Sequence: Synthetic oligonucleotide
  Antisense strand to SEQ ID NO: 2571664
uaguuuaaggacugcacga

SEQ ID NO: 2571666 - RNA, 19 nt, Artificial Sequence
  Description of Artificial Sequence: Synthetic oligonucleotide
  Sense strand starting at position 2538 of SEQ ID NO: 1888993
gcaugaauccaacacgaau

SEQ ID NO: 2571667 - RNA, 19 nt, Artificial Sequence
  Description of Artificial Sequence: Synthetic oligonucleotide
  Antisense strand to SEQ ID NO: 2571666
auucguguuggauucaugc

SEQ ID NO: 2571668 - RNA, 19 nt, Artificial Sequence
  Description of Artificial Sequence: Synthetic oligonucleotide
  Sense strand starting at position 2820 of SEQ ID NO: 1888993
guaagcugcaucugaauug

SEQ ID NO: 2571669 - RNA, 19 nt, Artificial Sequence
  Description of Artificial Sequence: Synthetic oligonucleotide
  Antisense strand to SEQ ID NO: 2571668
caauucagaugcagcuuac

SEQ ID NO: 2571670 - RNA, 19 nt, Artificial Sequence
  Description of Artificial Sequence: Synthetic oligonucleotide
  Sense strand starting at position 2876 of SEQ ID NO: 1888993
ugugaaagaucuucccaga

SEQ ID NO: 2571671 - RNA, 19 nt, Artificial Sequence
  Description of Artificial Sequence: Synthetic oligonucleotide
  Antisense strand to SEQ ID NO: 2571670
ucugggaagaucuuucaca

SEQ ID NO: 2571672 - RNA, 19 nt, Artificial Sequence
  Description of Artificial Sequence: Synthetic oligonucleotide
  Sense strand starting at position 2902 of SEQ ID NO: 1888993
ccaggauggacuugccaaa

SEQ ID NO: 2571673 - RNA, 19 nt, Artificial Sequence
  Description of Artificial Sequence: Synthetic oligonucleotide
  Antisense strand to SEQ ID NO: 2571672
uuuggcaaguccauccugg

SEQ ID NO: 2571674 - RNA, 19 nt, Artificial Sequence
  Description of Artificial Sequence: Synthetic oligonucleotide
  Sense strand starting at position 2928 of SEQ ID NO: 1888993
cccaguaacuggcucuaau

SEQ ID NO: 2571675 - RNA, 19 nt, Artificial Sequence
  Description of Artificial Sequence: Synthetic oligonucleotide
  Antisense strand to SEQ ID NO: 2571674
auuagagccaguuacuggg

SEQ ID NO: 2571676 - RNA, 19 nt, Artificial Sequence
  Description of Artificial Sequence: Synthetic oligonucleotide
  Sense strand starting at position 2999 of SEQ ID NO: 1888993
ccaacuguggcuggguuaa

SEQ ID NO: 2571677 - RNA, 19 nt, Artificial Sequence
  Description of Artificial Sequence: Synthetic oligonucleotide
  Antisense strand to SEQ ID NO: 2571676
uuaacccagccacaguugg

SEQ ID NO: 2571678 - RNA, 19 nt, Artificial Sequence
  Description of Artificial Sequence: Synthetic oligonucleotide
  Sense strand starting at position 3009 of SEQ ID NO: 1888993
cuggguuaagugggaaguu

SEQ ID NO: 2571679 - RNA, 19 nt, Artificial Sequence
  Description of Artificial Sequence: Synthetic oligonucleotide
  Antisense strand to SEQ ID NO: 2571678
aacuucccacuuaacccag

SEQ ID NO: 2571680 - RNA, 19 nt, Artificial Sequence
  Description of Artificial Sequence: Synthetic oligonucleotide
  Sense strand starting at position 3018 of SEQ ID NO: 1888993
gugggaaguuuauuaaaca

SEQ ID NO: 2571681 - RNA, 19 nt, Artificial Sequence
  Description of Artificial Sequence: Synthetic oligonucleotide
  Antisense strand to SEQ ID NO: 2571680
uguuuaauaaacuucccac

SEQ ID NO: 2571682 - RNA, 19 nt, Artificial Sequence
  Description of Artificial Sequence: Synthetic oligonucleotide
  Sense strand starting at position 3213 of SEQ ID NO: 1888993
ggcuucuacuugucaccaa

SEQ ID NO: 2571683 - RNA, 19 nt, Artificial Sequence
  Description of Artificial Sequence: Synthetic oligonucleotide
  Antisense strand to SEQ ID NO: 2571682
uuggugacaaguagaagcc

SEQ ID NO: 2571684 - RNA, 19 nt, Artificial Sequence
  Description of Artificial Sequence: Synthetic oligonucleotide
  Sense strand starting at position 3621 of SEQ ID NO: 1888993
ugagaauucugccuuccaa

SEQ ID NO: 2571685 - RNA, 19 nt, Artificial Sequence
  Description of Artificial Sequence: Synthetic oligonucleotide
  Antisense strand to SEQ ID NO: 2571684
uuggaaggcagaauucuca

SEQ ID NO: 2571686 - RNA, 19 nt, Artificial Sequence
  Description of Artificial Sequence: Synthetic oligonucleotide
  Sense strand starting at position 3950 of SEQ ID NO: 1888993
uucugucuuuggguagaaa

SEQ ID NO: 2571687 - RNA, 19 nt, Artificial Sequence
  Description of Artificial Sequence: Synthetic oligonucleotide
  Antisense strand to SEQ ID NO: 2571686
uuucuacccaaagacagaa

SEQ ID NO: 2571688 - RNA, 19 nt, Artificial Sequence
  Description of Artificial Sequence: Synthetic oligonucleotide
  Sense strand starting at position 3951 of SEQ ID NO: 1888993
ucugucuuuggguagaaau

SEQ ID NO: 2571689 - RNA, 19 nt, Artificial Sequence
  Description of Artificial Sequence: Synthetic oligonucleotide
  Antisense strand to SEQ ID NO: 2571688
auuucuacccaaagacaga

SEQ ID NO: 2571690 - RNA, 19 nt, Artificial Sequence
  Description of Artificial Sequence: Synthetic oligonucleotide
  Sense strand starting at position 172 of SEQ ID NO: 1888994
caaagagggugauuaugua

SEQ ID NO: 2571691 - RNA, 19 nt, Artificial Sequence
  Description of Artificial Sequence: Synthetic oligonucleotide
  Antisense strand to SEQ ID NO: 2571690
uacauaaucacccucuuug

SEQ ID NO: 2571692 - RNA, 19 nt, Artificial Sequence
  Description of Artificial Sequence: Synthetic oligonucleotide
  Sense strand starting at position 375 of SEQ ID NO: 1888994
augugaaaugcccacucaa

SEQ ID NO: 2571693 - RNA, 19 nt, Artificial Sequence
  Description of Artificial Sequence: Synthetic oligonucleotide
  Antisense strand to SEQ ID NO: 2571692
uugagugggcauuucacau

SEQ ID NO: 2571694 - RNA, 19 nt, Artificial Sequence
  Description of Artificial Sequence: Synthetic oligonucleotide
  Sense strand starting at position 982 of SEQ ID NO: 1888994
guugacugaguuuacuaau

SEQ ID NO: 2571695 - RNA, 19 nt, Artificial Sequence
  Description of Artificial Sequence: Synthetic oligonucleotide
  Antisense strand to SEQ ID NO: 2571694
auuaguaaacucagucaac

SEQ ID NO: 2571696 - RNA, 19 nt, Artificial Sequence
  Description of Artificial Sequence: Synthetic oligonucleotide
  Sense strand starting at position 1283 of SEQ ID NO: 1888994
gcucuuaaagccgaaauga

SEQ ID NO: 2571697 - RNA, 19 nt, Artificial Sequence
  Description of Artificial Sequence: Synthetic oligonucleotide
  Antisense strand to SEQ ID NO: 2571696
ucauuucggcuuuaagagc

SEQ ID NO: 2571698 - RNA, 19 nt, Artificial Sequence
  Description of Artificial Sequence: Synthetic oligonucleotide
  Sense strand starting at position 1448 of SEQ ID NO: 1888994
aaucauuagcaguagaggu

SEQ ID NO: 2571699 - RNA, 19 nt, Artificial Sequence
  Description of Artificial Sequence: Synthetic oligonucleotide
  Antisense strand to SEQ ID NO: 2571698
accucuacugcuaaugauu

SEQ ID NO: 2571700 - RNA, 19 nt, Artificial Sequence
  Description of Artificial Sequence: Synthetic oligonucleotide
  Sense strand starting at position 1495 of SEQ ID NO: 1888994
ggaguugugggucaagaga

SEQ ID NO: 2571701 - RNA, 19 nt, Artificial Sequence
  Description of Artificial Sequence: Synthetic oligonucleotide
  Antisense strand to SEQ ID NO: 2571700
ucucuugacccacaacucc

SEQ ID NO: 2571702 - RNA, 19 nt, Artificial Sequence
  Description of Artificial Sequence: Synthetic oligonucleotide
  Sense strand starting at position 1503 of SEQ ID NO: 1888994
gggucaagagaaugguacu

SEQ ID NO: 2571703 - RNA, 19 nt, Artificial Sequence
  Description of Artificial Sequence: Synthetic oligonucleotide
  Antisense strand to SEQ ID NO: 2571702
aguaccauucucuugaccc

SEQ ID NO: 2571704 - RNA, 19 nt, Artificial Sequence
  Description of Artificial Sequence: Synthetic oligonucleotide
  Sense strand starting at position 1504 of SEQ ID NO: 1888994
ggucaagagaaugguacuu

SEQ ID NO: 2571705 - RNA, 19 nt, Artificial Sequence
  Description of Artificial Sequence: Synthetic oligonucleotide
  Antisense strand to SEQ ID NO: 2571704
aaguaccauucucuugacc

SEQ ID NO: 2571706 - RNA, 19 nt, Artificial Sequence
  Description of Artificial Sequence: Synthetic oligonucleotide
  Sense strand starting at position 1559 of SEQ ID NO: 1888994
cccugauucccugagaggu

SEQ ID NO: 2571707 - RNA, 19 nt, Artificial Sequence
  Description of Artificial Sequence: Synthetic oligonucleotide
  Antisense strand to SEQ ID NO: 2571706
accucucagggaaucaggg

SEQ ID NO: 2571708 - RNA, 19 nt, Artificial Sequence
  Description of Artificial Sequence: Synthetic oligonucleotide
  Sense strand starting at position 2252 of SEQ ID NO: 1888994
uugcuucugauuggagaga

SEQ ID NO: 2571709 - RNA, 19 nt, Artificial Sequence
  Description of Artificial Sequence: Synthetic oligonucleotide
  Antisense strand to SEQ ID NO: 2571708
ucucuccaaucagaagcaa

SEQ ID NO: 2571710 - RNA, 19 nt, Artificial Sequence
  Description of Artificial Sequence: Synthetic oligonucleotide
  Sense strand starting at position 2328 of SEQ ID NO: 1888994
ggacguuugccagauaaau

SEQ ID NO: 2571711 - RNA, 19 nt, Artificial Sequence
  Description of Artificial Sequence: Synthetic oligonucleotide
  Antisense strand to SEQ ID NO: 2571710
auuuaucuggcaaacgucc

SEQ ID NO: 2571712 - RNA, 19 nt, Artificial Sequence
  Description of Artificial Sequence: Synthetic oligonucleotide
  Sense strand starting at position 2532 of SEQ ID NO: 1888994
ggaaacauacgaggucuga

SEQ ID NO: 2571713 - RNA, 19 nt, Artificial Sequence
  Description of Artificial Sequence: Synthetic oligonucleotide
  Antisense strand to SEQ ID NO: 2571712
ucagaccucguauguuucc

SEQ ID NO: 2571714 - RNA, 19 nt, Artificial Sequence
  Description of Artificial Sequence: Synthetic oligonucleotide
  Sense strand starting at position 2541 of SEQ ID NO: 1888994
cgaggucugaucugaaaua

SEQ ID NO: 2571715 - RNA, 19 nt, Artificial Sequence
  Description of Artificial Sequence: Synthetic oligonucleotide
  Antisense strand to SEQ ID NO: 2571714
uauuucagaucagaccucg

SEQ ID NO: 2571716 - RNA, 19 nt, Artificial Sequence
  Description of Artificial Sequence: Synthetic oligonucleotide
  Sense strand starting at position 2592 of SEQ ID NO: 1888994
gauggugcuugacuaggaa

SEQ ID NO: 2571717 - RNA, 19 nt, Artificial Sequence
  Description of Artificial Sequence: Synthetic oligonucleotide
  Antisense strand to SEQ ID NO: 2571716
uuccuagucaagcaccauc

SEQ ID NO: 2571718 - RNA, 19 nt, Artificial Sequence
  Description of Artificial Sequence: Synthetic oligonucleotide
  Sense strand starting at position 2611 of SEQ ID NO: 1888994
gcuaaagaaucagugagag

SEQ ID NO: 2571719 - RNA, 19 nt, Artificial Sequence
  Description of Artificial Sequence: Synthetic oligonucleotide
  Antisense strand to SEQ ID NO: 2571718
cucucacugauucuuuagc

SEQ ID NO: 2571720 - RNA, 19 nt, Artificial Sequence
  Description of Artificial Sequence: Synthetic oligonucleotide
  Sense strand starting at position 2619 of SEQ ID NO: 1888994
aucagugagagugguauga

SEQ ID NO: 2571721 - RNA, 19 nt, Artificial Sequence
  Description of Artificial Sequence: Synthetic oligonucleotide
  Antisense strand to SEQ ID NO: 2571720
ucauaccacucucacugau

SEQ ID NO: 2571722 - RNA, 19 nt, Artificial Sequence
  Description of Artificial Sequence: Synthetic oligonucleotide
  Sense strand starting at position 2630 of SEQ ID NO: 1888994
ugguaugacggucauccau

SEQ ID NO: 2571723 - RNA, 19 nt, Artificial Sequence
  Description of Artificial Sequence: Synthetic oligonucleotide
  Antisense strand to SEQ ID NO: 2571722
auggaugaccgucauacca

SEQ ID NO: 2571724 - RNA, 19 nt, Artificial Sequence
  Description of Artificial Sequence: Synthetic oligonucleotide
  Sense strand starting at position 2704 of SEQ ID NO: 1888994
agaaauuccuuucugagua

SEQ ID NO: 2571725 - RNA, 19 nt, Artificial Sequence
  Description of Artificial Sequence: Synthetic oligonucleotide
  Antisense strand to SEQ ID NO: 2571724
uacucagaaaggaauuucu

SEQ ID NO: 2571726 - RNA, 19 nt, Artificial Sequence
  Description of Artificial Sequence: Synthetic oligonucleotide
  Sense strand starting at position 2819 of SEQ ID NO: 1888994
gccuccagagaaugaaaua

SEQ ID NO: 2571727 - RNA, 19 nt, Artificial Sequence
  Description of Artificial Sequence: Synthetic oligonucleotide
  Antisense strand to SEQ ID NO: 2571726
uauuucauucucuggaggc

SEQ ID NO: 2571728 - RNA, 19 nt, Artificial Sequence
  Description of Artificial Sequence: Synthetic oligonucleotide
  Sense strand starting at position 2954 of SEQ ID NO: 1888994
gauuacuugucucuugaga

SEQ ID NO: 2571729 - RNA, 19 nt, Artificial Sequence
  Description of Artificial Sequence: Synthetic oligonucleotide
  Antisense strand to SEQ ID NO: 2571728
ucucaagagacaaguaauc

SEQ ID NO: 2571730 - RNA, 19 nt, Artificial Sequence
  Description of Artificial Sequence: Synthetic oligonucleotide
  Sense strand starting at position 2999 of SEQ ID NO: 1888994
ggaaauuguauuugcuugu

SEQ ID NO: 2571731 - RNA, 19 nt, Artificial Sequence
  Description of Artificial Sequence: Synthetic oligonucleotide
  Antisense strand to SEQ ID NO: 2571730
acaagcaaauacaauuucc

SEQ ID NO: 2571732 - RNA, 19 nt, Artificial Sequence
  Description of Artificial Sequence: Synthetic oligonucleotide
  Sense strand starting at position 3000 of SEQ ID NO: 1888994
gaaauuguauuugcuuguu

SEQ ID NO: 2571733 - RNA, 19 nt, Artificial Sequence
  Description of Artificial Sequence: Synthetic oligonucleotide
  Antisense strand to SEQ ID NO: 2571732
aacaagcaaauacaauuuc

SEQ ID NO: 2571734 - RNA, 19 nt, Artificial Sequence
  Description of Artificial Sequence: Synthetic oligonucleotide
  Sense strand starting at position 3005 of SEQ ID NO: 1888994
uguauuugcuuguuaaaug

SEQ ID NO: 2571735 - RNA, 19 nt, Artificial Sequence
  Description of Artificial Sequence: Synthetic oligonucleotide
  Antisense strand to SEQ ID NO: 2571734
cauuuaacaagcaaauaca

SEQ ID NO: 2571736 - RNA, 19 nt, Artificial Sequence
  Description of Artificial Sequence: Synthetic oligonucleotide
  Sense strand starting at position 3055 of SEQ ID NO: 1888994
caggaucuguucuugguaa

SEQ ID NO: 2571737 - RNA, 19 nt, Artificial Sequence
  Description of Artificial Sequence: Synthetic oligonucleotide
  Antisense strand to SEQ ID NO: 2571736
uuaccaagaacagauccug

SEQ ID NO: 2571738 - RNA, 19 nt, Artificial Sequence
  Description of Artificial Sequence: Synthetic oligonucleotide
  Sense strand starting at position 3171 of SEQ ID NO: 1888994
acaguauuucguggagugu

SEQ ID NO: 2571739 - RNA, 19 nt, Artificial Sequence
  Description of Artificial Sequence: Synthetic oligonucleotide
  Antisense strand to SEQ ID NO: 2571738
acacuccacgaaauacugu

SEQ ID NO: 2571740 - RNA, 19 nt, Artificial Sequence
  Description of Artificial Sequence: Synthetic oligonucleotide
  Sense strand starting at position 3172 of SEQ ID NO: 1888994
caguauuucguggagugua

SEQ ID NO: 2571741 - RNA, 19 nt, Artificial Sequence
  Description of Artificial Sequence: Synthetic oligonucleotide
  Antisense strand to SEQ ID NO: 2571740
uacacuccacgaaauacug

SEQ ID NO: 2571742 - RNA, 19 nt, Artificial Sequence
  Description of Artificial Sequence: Synthetic oligonucleotide
  Sense strand starting at position 3182 of SEQ ID NO: 1888994
uggaguguaccuuauacaa

SEQ ID NO: 2571743 - RNA, 19 nt, Artificial Sequence
  Description of Artificial Sequence: Synthetic oligonucleotide
  Antisense strand to SEQ ID NO: 2571742
uuguauaagguacacucca

SEQ ID NO: 2571744 - RNA, 19 nt, Artificial Sequence
  Description of Artificial Sequence: Synthetic oligonucleotide
  Sense strand starting at position 3207 of SEQ ID NO: 1888994
gugcaauaacaucauugaa

SEQ ID NO: 2571745 - RNA, 19 nt, Artificial Sequence
  Description of Artificial Sequence: Synthetic oligonucleotide
  Antisense strand to SEQ ID NO: 2571744
uucaaugauguuauugcac

SEQ ID NO: 2571746 - RNA, 19 nt, Artificial Sequence
  Description of Artificial Sequence: Synthetic oligonucleotide
  Sense strand starting at position 3252 of SEQ ID NO: 1888994
gcgaauuaaugaguugaug

SEQ ID NO: 2571747 - RNA, 19 nt, Artificial Sequence
  Description of Artificial Sequence: Synthetic oligonucleotide
  Antisense strand to SEQ ID NO: 2571746
caucaacucauuaauucgc

SEQ ID NO: 2571748 - RNA, 19 nt, Artificial Sequence
  Description of Artificial Sequence: Synthetic oligonucleotide
  Sense strand starting at position 3272 of SEQ ID NO: 1888994
guaagacuagaguagcaau

SEQ ID NO: 2571749 - RNA, 19 nt, Artificial Sequence
  Description of Artificial Sequence: Synthetic oligonucleotide
  Antisense strand to SEQ ID NO: 2571748
auugcuacucuagucuuac

SEQ ID NO: 2571750 - RNA, 19 nt, Artificial Sequence
  Description of Artificial Sequence: Synthetic oligonucleotide
  Sense strand starting at position 3280 of SEQ ID NO: 1888994
agaguagcaaucgauacuu

SEQ ID NO: 2571751 - RNA, 19 nt, Artificial Sequence
  Description of Artificial Sequence: Synthetic oligonucleotide
  Antisense strand to SEQ ID NO: 2571750
aaguaucgauugcuacucu

SEQ ID NO: 2571752 - RNA, 19 nt, Artificial Sequence
  Description of Artificial Sequence: Synthetic oligonucleotide
  Sense strand starting at position 3307 of SEQ ID NO: 1888994
guuaauauugaugaagcau

SEQ ID NO: 2571753 - RNA, 19 nt, Artificial Sequence
  Description of Artificial Sequence: Synthetic oligonucleotide
  Antisense strand to SEQ ID NO: 2571752
augcuucaucaauauuaac

SEQ ID NO: 2571754 - RNA, 19 nt, Artificial Sequence
  Description of Artificial Sequence: Synthetic oligonucleotide
  Sense strand starting at position 3315 of SEQ ID NO: 1888994
ugaugaagcaucggagaau

SEQ ID NO: 2571755 - RNA, 19 nt, Artificial Sequence
  Description of Artificial Sequence: Synthetic oligonucleotide
  Antisense strand to SEQ ID NO: 2571754
auucuccgaugcuucauca

SEQ ID NO: 2571756 - RNA, 19 nt, Artificial Sequence
  Description of Artificial Sequence: Synthetic oligonucleotide
  Sense strand starting at position 3401 of SEQ ID NO: 1888994
gcgacauuaccagauaggu

SEQ ID NO: 2571757 - RNA, 19 nt, Artificial Sequence
  Description of Artificial Sequence: Synthetic oligonucleotide
  Antisense strand to SEQ ID NO: 2571756
accuaucugguaaugucgc

SEQ ID NO: 2571758 - RNA, 19 nt, Artificial Sequence
  Description of Artificial Sequence: Synthetic oligonucleotide
  Sense strand starting at position 3409 of SEQ ID NO: 1888994
accagauagguacagcauu

SEQ ID NO: 2571759 - RNA, 19 nt, Artificial Sequence
  Description of Artificial Sequence: Synthetic oligonucleotide
  Antisense strand to SEQ ID NO: 2571758
aaugcuguaccuaucuggu

SEQ ID NO: 2571760 - RNA, 19 nt, Artificial Sequence
  Description of Artificial Sequence: Synthetic oligonucleotide
  Sense strand starting at position 3474 of SEQ ID NO: 1888994
gguagaaauccuggaaggu

SEQ ID NO: 2571761 - RNA, 19 nt, Artificial Sequence
  Description of Artificial Sequence: Synthetic oligonucleotide
  Antisense strand to SEQ ID NO: 2571760
accuuccaggauuucuacc

SEQ ID NO: 2571762 - RNA, 19 nt, Artificial Sequence
  Description of Artificial Sequence: Synthetic oligonucleotide
  Sense strand starting at position 3490 of SEQ ID NO: 1888994
gguauaaaugaggguuaag

SEQ ID NO: 2571763 - RNA, 19 nt, Artificial Sequence
  Description of Artificial Sequence: Synthetic oligonucleotide
  Antisense strand to SEQ ID NO: 2571762
cuuaacccucauuuauacc

SEQ ID NO: 2571764 - RNA, 19 nt, Artificial Sequence
  Description of Artificial Sequence: Synthetic oligonucleotide
  Sense strand starting at position 3500 of SEQ ID NO: 1888994
aggguuaagccucacuuau

SEQ ID NO: 2571765 - RNA, 19 nt, Artificial Sequence
  Description of Artificial Sequence: Synthetic oligonucleotide
  Antisense strand to SEQ ID NO: 2571764
auaagugaggcuuaacccu

SEQ ID NO: 2571766 - RNA, 19 nt, Artificial Sequence
  Description of Artificial Sequence: Synthetic oligonucleotide
  Sense strand starting at position 3730 of SEQ ID NO: 1888994
cuguacauguuaucaauag

SEQ ID NO: 2571767 - RNA, 19 nt, Artificial Sequence
  Description of Artificial Sequence: Synthetic oligonucleotide
  Antisense strand to SEQ ID NO: 2571766
cuauugauaacauguacag

SEQ ID NO: 2571768 - RNA, 19 nt, Artificial Sequence
  Description of Artificial Sequence: Synthetic oligonucleotide
  Sense strand starting at position 3796 of SEQ ID NO: 1888994
agaauaggcugaccuuuau

SEQ ID NO: 2571769 - RNA, 19 nt, Artificial Sequence
  Description of Artificial Sequence: Synthetic oligonucleotide
  Antisense strand to SEQ ID NO: 2571768
auaaaggucagccuauucu

SEQ ID NO: 2571770 - RNA, 19 nt, Artificial Sequence
  Description of Artificial Sequence: Synthetic oligonucleotide
  Sense strand starting at position 38 of SEQ ID NO: 1888995
cagucaguucucuagucac

SEQ ID NO: 2571771 - RNA, 19 nt, Artificial Sequence
  Description of Artificial Sequence: Synthetic oligonucleotide
  Antisense strand to SEQ ID NO: 2571770
gugacuagagaacugacug

SEQ ID NO: 2571772 - RNA, 19 nt, Artificial Sequence
  Description of Artificial Sequence: Synthetic oligonucleotide
  Sense strand starting at position 274 of SEQ ID NO: 1888995
cuccauggauaauugcaua

SEQ ID NO: 2571773 - RNA, 19 nt, Artificial Sequence
  Description of Artificial Sequence: Synthetic oligonucleotide
  Antisense strand to SEQ ID NO: 2571772
uaugcaauuauccauggag

SEQ ID NO: 2571774 - RNA, 19 nt, Artificial Sequence
  Description of Artificial Sequence: Synthetic oligonucleotide
  Sense strand starting at position 403 of SEQ ID NO: 1888995
cuacaucuccacugagaug

SEQ ID NO: 2571775 - RNA, 19 nt, Artificial Sequence
  Description of Artificial Sequence: Synthetic oligonucleotide
  Antisense strand to SEQ ID NO: 2571774
caucucaguggagauguag

SEQ ID NO: 2571776 - RNA, 19 nt, Artificial Sequence
  Description of Artificial Sequence: Synthetic oligonucleotide
  Sense strand starting at position 484 of SEQ ID NO: 1888995
ucauguauccuugauguua

SEQ ID NO: 2571777 - RNA, 19 nt, Artificial Sequence
  Description of Artificial Sequence: Synthetic oligonucleotide
  Antisense strand to SEQ ID NO: 2571776
uaacaucaaggauacauga

SEQ ID NO: 2571778 - RNA, 19 nt, Artificial Sequence
  Description of Artificial Sequence: Synthetic oligonucleotide
  Sense strand starting at position 545 of SEQ ID NO: 1888995
cagaaugaucguugauccu

SEQ ID NO: 2571779 - RNA, 19 nt, Artificial Sequence
  Description of Artificial Sequence: Synthetic oligonucleotide
  Antisense strand to SEQ ID NO: 2571778
aggaucaacgaucauucug

SEQ ID NO: 2571780 - RNA, 19 nt, Artificial Sequence
  Description of Artificial Sequence: Synthetic oligonucleotide
  Sense strand starting at position 716 of SEQ ID NO: 1888995
ccuuacaggucuuucugau

SEQ ID NO: 2571781 - RNA, 19 nt, Artificial Sequence
  Description of Artificial Sequence: Synthetic oligonucleotide
  Antisense strand to SEQ ID NO: 2571780
aucagaaagaccuguaagg

SEQ ID NO: 2571782 - RNA, 19 nt, Artificial Sequence
  Description of Artificial Sequence: Synthetic oligonucleotide
  Sense strand starting at position 722 of SEQ ID NO: 1888995
aggucuuucugauccuuaa

SEQ ID NO: 2571783 - RNA, 19 nt, Artificial Sequence
  Description of Artificial Sequence: Synthetic oligonucleotide
  Antisense strand to SEQ ID NO: 2571782
uuaaggaucagaaagaccu

SEQ ID NO: 2571784 - RNA, 19 nt, Artificial Sequence
  Description of Artificial Sequence: Synthetic oligonucleotide
  Sense strand starting at position 899 of SEQ ID NO: 1888995
ccaaguaaggaaugcuuua

SEQ ID NO: 2571785 - RNA, 19 nt, Artificial Sequence
  Description of Artificial Sequence: Synthetic oligonucleotide
  Antisense strand to SEQ ID NO: 2571784
uaaagcauuccuuacuugg

SEQ ID NO: 2571786 - RNA, 19 nt, Artificial Sequence
  Description of Artificial Sequence: Synthetic oligonucleotide
  Sense strand starting at position 1050 of SEQ ID NO: 1888995
aguacagugcuuuaugauc

SEQ ID NO: 2571787 - RNA, 19 nt, Artificial Sequence
  Description of Artificial Sequence: Synthetic oligonucleotide
  Antisense strand to SEQ ID NO: 2571786
gaucauaaagcacuguacu

SEQ ID NO: 2571788 - RNA, 19 nt, Artificial Sequence
  Description of Artificial Sequence: Synthetic oligonucleotide
  Sense strand starting at position 1055 of SEQ ID NO: 1888995
agugcuuuaugaucacuaa

SEQ ID NO: 2571789 - RNA, 19 nt, Artificial Sequence
  Description of Artificial Sequence: Synthetic oligonucleotide
  Antisense strand to SEQ ID NO: 2571788
uuagugaucauaaagcacu

SEQ ID NO: 2571790 - RNA, 19 nt, Artificial Sequence
  Description of Artificial Sequence: Synthetic oligonucleotide
  Sense strand starting at position 1056 of SEQ ID NO: 1888995
gugcuuuaugaucacuaag

SEQ ID NO: 2571791 - RNA, 19 nt, Artificial Sequence
  Description of Artificial Sequence: Synthetic oligonucleotide
  Antisense strand to SEQ ID NO: 2571790
cuuagugaucauaaagcac

SEQ ID NO: 2571792 - RNA, 19 nt, Artificial Sequence
  Description of Artificial Sequence: Synthetic oligonucleotide
  Sense strand starting at position 1421 of SEQ ID NO: 1888995
ugucuuauuuguguauccu

SEQ ID NO: 2571793 - RNA, 19 nt, Artificial Sequence
  Description of Artificial Sequence: Synthetic oligonucleotide
  Antisense strand to SEQ ID NO: 2571792
aggauacacaaauaagaca

SEQ ID NO: 2571794 - RNA, 19 nt, Artificial Sequence
  Description of Artificial Sequence: Synthetic oligonucleotide
  Sense strand starting at position 1422 of SEQ ID NO: 1888995
gucuuauuuguguauccuc

SEQ ID NO: 2571795 - RNA, 19 nt, Artificial Sequence
  Description of Artificial Sequence: Synthetic oligonucleotide
  Antisense strand to SEQ ID NO: 2571794
gaggauacacaaauaagac

SEQ ID NO: 2571796 - RNA, 19 nt, Artificial Sequence
  Description of Artificial Sequence: Synthetic oligonucleotide
  Sense strand starting at position 1514 of SEQ ID NO: 1888995
uucuguaagcauuaaagug

SEQ ID NO: 2571797 - RNA, 19 nt, Artificial Sequence
  Description of Artificial Sequence: Synthetic oligonucleotide
  Antisense strand to SEQ ID NO: 2571796
cacuuuaaugcuuacagaa

SEQ ID NO: 2571798 - RNA, 19 nt, Artificial Sequence
  Description of Artificial Sequence: Synthetic oligonucleotide
  Sense strand starting at position 1549 of SEQ ID NO: 1888995
accaauguguacuuccuau

SEQ ID NO: 2571799 - RNA, 19 nt, Artificial Sequence
  Description of Artificial Sequence: Synthetic oligonucleotide
  Antisense strand to SEQ ID NO: 2571798
auaggaaguacacauuggu

SEQ ID NO: 2571800 - RNA, 19 nt, Artificial Sequence
  Description of Artificial Sequence: Synthetic oligonucleotide
  Sense strand starting at position 2076 of SEQ ID NO: 1888995
ggcugaagaugucugacca

SEQ ID NO: 2571801 - RNA, 19 nt, Artificial Sequence
  Description of Artificial Sequence: Synthetic oligonucleotide
  Antisense strand to SEQ ID NO: 2571800
uggucagacaucuucagcc

SEQ ID NO: 2571802 - RNA, 19 nt, Artificial Sequence
  Description of Artificial Sequence: Synthetic oligonucleotide
  Sense strand starting at position 2077 of SEQ ID NO: 1888995
gcugaagaugucugaccaa

SEQ ID NO: 2571803 - RNA, 19 nt, Artificial Sequence
  Description of Artificial Sequence: Synthetic oligonucleotide
  Antisense strand to SEQ ID NO: 2571802
uuggucagacaucuucagc

SEQ ID NO: 2571804 - RNA, 19 nt, Artificial Sequence
  Description of Artificial Sequence: Synthetic oligonucleotide
  Sense strand starting at position 2099 of SEQ ID NO: 1888995
gacgcuugggccgaaacaa

SEQ ID NO: 2571805 - RNA, 19 nt, Artificial Sequence
  Description of Artificial Sequence: Synthetic oligonucleotide
  Antisense strand to SEQ ID NO: 2571804
uuguuucggcccaagcguc

SEQ ID NO: 2571806 - RNA, 19 nt, Artificial Sequence
  Description of Artificial Sequence: Synthetic oligonucleotide
  Sense strand starting at position 2516 of SEQ ID NO: 1888995
gcgucuugcagagcucagu

SEQ ID NO: 2571807 - RNA, 19 nt, Artificial Sequence
  Description of Artificial Sequence: Synthetic oligonucleotide
  Antisense strand to SEQ ID NO: 2571806
acugagcucugcaagacgc

SEQ ID NO: 2571808 - RNA, 19 nt, Artificial Sequence
  Description of Artificial Sequence: Synthetic oligonucleotide
  Sense strand starting at position 2526 of SEQ ID NO: 1888995
gagcucagucauggagaaa

SEQ ID NO: 2571809 - RNA, 19 nt, Artificial Sequence
  Description of Artificial Sequence: Synthetic oligonucleotide
  Antisense strand to SEQ ID NO: 2571808
uuucuccaugacugagcuc

SEQ ID NO: 2571810 - RNA, 19 nt, Artificial Sequence
  Description of Artificial Sequence: Synthetic oligonucleotide
  Sense strand starting at position 2573 of SEQ ID NO: 1888995
ucggguacugcuuaaauaa

SEQ ID NO: 2571811 - RNA, 19 nt, Artificial Sequence
  Description of Artificial Sequence: Synthetic oligonucleotide
  Antisense strand to SEQ ID NO: 2571810
uuauuuaagcaguacccga

SEQ ID NO: 2571812 - RNA, 19 nt, Artificial Sequence
  Description of Artificial Sequence: Synthetic oligonucleotide
  Sense strand starting at position 2641 of SEQ ID NO: 1888995
uaaggcuguguguacagau

SEQ ID NO: 2571813 - RNA, 19 nt, Artificial Sequence
  Description of Artificial Sequence: Synthetic oligonucleotide
  Antisense strand to SEQ ID NO: 2571812
aucuguacacacagccuua

SEQ ID NO: 2571814 - RNA, 19 nt, Artificial Sequence
  Description of Artificial Sequence: Synthetic oligonucleotide
  Sense strand starting at position 2688 of SEQ ID NO: 1888995
agaauaugauuccuuguaa

SEQ ID NO: 2571815 - RNA, 19 nt, Artificial Sequence
  Description of Artificial Sequence: Synthetic oligonucleotide
  Antisense strand to SEQ ID NO: 2571814
uuacaaggaaucauauucu

SEQ ID NO: 2571816 - RNA, 19 nt, Artificial Sequence
  Description of Artificial Sequence: Synthetic oligonucleotide
  Sense strand starting at position 2796 of SEQ ID NO: 1888995
caggucaucguguuuguuu

SEQ ID NO: 2571817 - RNA, 19 nt, Artificial Sequence
  Description of Artificial Sequence: Synthetic oligonucleotide
  Antisense strand to SEQ ID NO: 2571816
aaacaaacacgaugaccug

SEQ ID NO: 2571818 - RNA, 19 nt, Artificial Sequence
  Description of Artificial Sequence: Synthetic oligonucleotide
  Sense strand starting at position 2834 of SEQ ID NO: 1888995
uccauaauggugcagcaua

SEQ ID NO: 2571819 - RNA, 19 nt, Artificial Sequence
  Description of Artificial Sequence: Synthetic oligonucleotide
  Antisense strand to SEQ ID NO: 2571818
uaugcugcaccauuaugga

SEQ ID NO: 2571820 - RNA, 19 nt, Artificial Sequence
  Description of Artificial Sequence: Synthetic oligonucleotide
  Sense strand starting at position 2844 of SEQ ID NO: 1888995
ugcagcauaguguaguaaa

SEQ ID NO: 2571821 - RNA, 19 nt, Artificial Sequence
  Description of Artificial Sequence: Synthetic oligonucleotide
  Antisense strand to SEQ ID NO: 2571820
uuuacuacacuaugcugca

SEQ ID NO: 2571822 - RNA, 19 nt, Artificial Sequence
  Description of Artificial Sequence: Synthetic oligonucleotide
  Sense strand starting at position 2923 of SEQ ID NO: 1888995
gcuccaugaccuugaggaa

SEQ ID NO: 2571823 - RNA, 19 nt, Artificial Sequence
  Description of Artificial Sequence: Synthetic oligonucleotide
  Antisense strand to SEQ ID NO: 2571822
uuccucaaggucauggagc

SEQ ID NO: 2571824 - RNA, 19 nt, Artificial Sequence
  Description of Artificial Sequence: Synthetic oligonucleotide
  Sense strand starting at position 3084 of SEQ ID NO: 1888995
uuaauaauguuugccuaag

SEQ ID NO: 2571825 - RNA, 19 nt, Artificial Sequence
  Description of Artificial Sequence: Synthetic oligonucleotide
  Antisense strand to SEQ ID NO: 2571824
cuuaggcaaacauuauuaa

SEQ ID NO: 2571826 - RNA, 19 nt, Artificial Sequence
  Description of Artificial Sequence: Synthetic oligonucleotide
  Sense strand starting at position 3195 of SEQ ID NO: 1888995
uccuccaguccaugagaga

SEQ ID NO: 2571827 - RNA, 19 nt, Artificial Sequence
  Description of Artificial Sequence: Synthetic oligonucleotide
  Antisense strand to SEQ ID NO: 2571826
ucucucauggacuggagga

SEQ ID NO: 2571828 - RNA, 19 nt, Artificial Sequence
  Description of Artificial Sequence: Synthetic oligonucleotide
  Sense strand starting at position 3204 of SEQ ID NO: 1888995
ccaugagagagcuguccua

SEQ ID NO: 2571829 - RNA, 19 nt, Artificial Sequence
  Description of Artificial Sequence: Synthetic oligonucleotide
  Antisense strand to SEQ ID NO: 2571828
uaggacagcucucucaugg

SEQ ID NO: 2571830 - RNA, 19 nt, Artificial Sequence
  Description of Artificial Sequence: Synthetic oligonucleotide
  Sense strand starting at position 3250 of SEQ ID NO: 1888995
ggucuuccagcucagaguu

SEQ ID NO: 2571831 - RNA, 19 nt, Artificial Sequence
  Description of Artificial Sequence: Synthetic oligonucleotide
  Antisense strand to SEQ ID NO: 2571830
aacucugagcuggaagacc

SEQ ID NO: 2571832 - RNA, 19 nt, Artificial Sequence
  Description of Artificial Sequence: Synthetic oligonucleotide
  Sense strand starting at position 3310 of SEQ ID NO: 1888995
ugcucauaccagggaauca

SEQ ID NO: 2571833 - RNA, 19 nt, Artificial Sequence
  Description of Artificial Sequence: Synthetic oligonucleotide
  Antisense strand to SEQ ID NO: 2571832
ugauucccugguaugagca

SEQ ID NO: 2571834 - RNA, 19 nt, Artificial Sequence
  Description of Artificial Sequence: Synthetic oligonucleotide
  Sense strand starting at position 3319 of SEQ ID NO: 1888995
cagggaaucagguguuucu

SEQ ID NO: 2571835 - RNA, 19 nt, Artificial Sequence
  Description of Artificial Sequence: Synthetic oligonucleotide
  Antisense strand to SEQ ID NO: 2571834
agaaacaccugauucccug

SEQ ID NO: 2571836 - RNA, 19 nt, Artificial Sequence
  Description of Artificial Sequence: Synthetic oligonucleotide
  Sense strand starting at position 3432 of SEQ ID NO: 1888995
ucggauugggagugaucaa

SEQ ID NO: 2571837 - RNA, 19 nt, Artificial Sequence
  Description of Artificial Sequence: Synthetic oligonucleotide
  Antisense strand to SEQ ID NO: 2571836
uugaucacucccaauccga

SEQ ID NO: 2571838 - RNA, 19 nt, Artificial Sequence
  Description of Artificial Sequence: Synthetic oligonucleotide
  Sense strand starting at position 3516 of SEQ ID NO: 1888995
cuguacuaauucuccaagu

SEQ ID NO: 2571839 - RNA, 19 nt, Artificial Sequence
  Description of Artificial Sequence: Synthetic oligonucleotide
  Antisense strand to SEQ ID NO: 2571838
acuuggagaauuaguacag

SEQ ID NO: 2571840 - RNA, 19 nt, Artificial Sequence
  Description of Artificial Sequence: Synthetic oligonucleotide
  Sense strand starting at position 3517 of SEQ ID NO: 1888995
uguacuaauucuccaaguu

SEQ ID NO: 2571841 - RNA, 19 nt, Artificial Sequence
  Description of Artificial Sequence: Synthetic oligonucleotide
  Antisense strand to SEQ ID NO: 2571840
aacuuggagaauuaguaca

SEQ ID NO: 2571842 - RNA, 19 nt, Artificial Sequence
  Description of Artificial Sequence: Synthetic oligonucleotide
  Sense strand starting at position 3518 of SEQ ID NO: 1888995
guacuaauucuccaaguuc

SEQ ID NO: 2571843 - RNA, 19 nt, Artificial Sequence
  Description of Artificial Sequence: Synthetic oligonucleotide
  Antisense strand to SEQ ID NO: 2571842
gaacuuggagaauuaguac

SEQ ID NO: 2571844 - RNA, 19 nt, Artificial Sequence
  Description of Artificial Sequence: Synthetic oligonucleotide
  Sense strand starting at position 3569 of SEQ ID NO: 1888995
uuggguguugacgaugaca

SEQ ID NO: 2571845 - RNA, 19 nt, Artificial Sequence
  Description of Artificial Sequence: Synthetic oligonucleotide
  Antisense strand to SEQ ID NO: 2571844
ugucaucgucaacacccaa

SEQ ID NO: 2571846 - RNA, 19 nt, Artificial Sequence
  Description of Artificial Sequence: Synthetic oligonucleotide
  Sense strand starting at position 3605 of SEQ ID NO: 1888995
ucagguuaucuauggccaa

SEQ ID NO: 2571847 - RNA, 19 nt, Artificial Sequence
  Description of Artificial Sequence: Synthetic oligonucleotide
  Antisense strand to SEQ ID NO: 2571846
uuggccauagauaaccuga

SEQ ID NO: 2571848 - RNA, 19 nt, Artificial Sequence
  Description of Artificial Sequence: Synthetic oligonucleotide
  Sense strand starting at position 3608 of SEQ ID NO: 1888995
gguuaucuauggccaagag

SEQ ID NO: 2571849 - RNA, 19 nt, Artificial Sequence
  Description of Artificial Sequence: Synthetic oligonucleotide
  Antisense strand to SEQ ID NO: 2571848
cucuuggccauagauaacc

SEQ ID NO: 2571850 - RNA, 19 nt, Artificial Sequence
  Description of Artificial Sequence: Synthetic oligonucleotide
  Sense strand starting at position 125 of SEQ ID NO: 1888996
agaaauucucagcagaugu

SEQ ID NO: 2571851 - RNA, 19 nt, Artificial Sequence
  Description of Artificial Sequence: Synthetic oligonucleotide
  Antisense strand to SEQ ID NO: 2571850
acaucugcugagaauuucu

SEQ ID NO: 2571852 - RNA, 19 nt, Artificial Sequence
  Description of Artificial Sequence: Synthetic oligonucleotide
  Sense strand starting at position 138 of SEQ ID NO: 1888996
agauguguuccugacagau

SEQ ID NO: 2571853 - RNA, 19 nt, Artificial Sequence
  Description of Artificial Sequence: Synthetic oligonucleotide
  Antisense strand to SEQ ID NO: 2571852
aucugucaggaacacaucu

SEQ ID NO: 2571854 - RNA, 19 nt, Artificial Sequence
  Description of Artificial Sequence: Synthetic oligonucleotide
  Sense strand starting at position 146 of SEQ ID NO: 1888996
uccugacagaugggcuaau

SEQ ID NO: 2571855 - RNA, 19 nt, Artificial Sequence
  Description of Artificial Sequence: Synthetic oligonucleotide
  Antisense strand to SEQ ID NO: 2571854
auuagcccaucugucagga

SEQ ID NO: 2571856 - RNA, 19 nt, Artificial Sequence
  Description of Artificial Sequence: Synthetic oligonucleotide
  Sense strand starting at position 147 of SEQ ID NO: 1888996
ccugacagaugggcuaauu

SEQ ID NO: 2571857 - RNA, 19 nt, Artificial Sequence
  Description of Artificial Sequence: Synthetic oligonucleotide
  Antisense strand to SEQ ID NO: 2571856
aauuagcccaucugucagg

SEQ ID NO: 2571858 - RNA, 19 nt, Artificial Sequence
  Description of Artificial Sequence: Synthetic oligonucleotide
  Sense strand starting at position 171 of SEQ ID NO: 1888996
guuaguuacccucaauaua

SEQ ID NO: 2571859 - RNA, 19 nt, Artificial Sequence
  Description of Artificial Sequence: Synthetic oligonucleotide
  Antisense strand to SEQ ID NO: 2571858
uauauugaggguaacuaac

SEQ ID NO: 2571860 - RNA, 19 nt, Artificial Sequence
  Description of Artificial Sequence: Synthetic oligonucleotide
  Sense strand starting at position 189 of SEQ ID NO: 1888996
auaauaguggcuuaguaac

SEQ ID NO: 2571861 - RNA, 19 nt, Artificial Sequence
  Description of Artificial Sequence: Synthetic oligonucleotide
  Antisense strand to SEQ ID NO: 2571860
guuacuaagccacuauuau

SEQ ID NO: 2571862 - RNA, 19 nt, Artificial Sequence
  Description of Artificial Sequence: Synthetic oligonucleotide
  Sense strand starting at position 324 of SEQ ID NO: 1888996
agaauaaucuuguuugcag

SEQ ID NO: 2571863 - RNA, 19 nt, Artificial Sequence
  Description of Artificial Sequence: Synthetic oligonucleotide
  Antisense strand to SEQ ID NO: 2571862
cugcaaacaagauuauucu

SEQ ID NO: 2571864 - RNA, 19 nt, Artificial Sequence
  Description of Artificial Sequence: Synthetic oligonucleotide
  Sense strand starting at position 325 of SEQ ID NO: 1888996
gaauaaucuuguuugcagg

SEQ ID NO: 2571865 - RNA, 19 nt, Artificial Sequence
  Description of Artificial Sequence: Synthetic oligonucleotide
  Antisense strand to SEQ ID NO: 2571864
ccugcaaacaagauuauuc

SEQ ID NO: 2571866 - RNA, 19 nt, Artificial Sequence
  Description of Artificial Sequence: Synthetic oligonucleotide
  Sense strand starting at position 480 of SEQ ID NO: 1888996
ucaacauuacgcuagguga

SEQ ID NO: 2571867 - RNA, 19 nt, Artificial Sequence
  Description of Artificial Sequence: Synthetic oligonucleotide
  Antisense strand to SEQ ID NO: 2571866
ucaccuagcguaauguuga

SEQ ID NO: 2571868 - RNA, 19 nt, Artificial Sequence
  Description of Artificial Sequence: Synthetic oligonucleotide
  Sense strand starting at position 482 of SEQ ID NO: 1888996
aacauuacgcuaggugaaa

SEQ ID NO: 2571869 - RNA, 19 nt, Artificial Sequence
  Description of Artificial Sequence: Synthetic oligonucleotide
  Antisense strand to SEQ ID NO: 2571868
uuucaccuagcguaauguu

SEQ ID NO: 2571870 - RNA, 19 nt, Artificial Sequence
  Description of Artificial Sequence: Synthetic oligonucleotide
  Sense strand starting at position 717 of SEQ ID NO: 1888996
caauguauacucgaaauug

SEQ ID NO: 2571871 - RNA, 19 nt, Artificial Sequence
  Description of Artificial Sequence: Synthetic oligonucleotide
  Antisense strand to SEQ ID NO: 2571870
caauuucgaguauacauug

SEQ ID NO: 2571872 - RNA, 19 nt, Artificial Sequence
  Description of Artificial Sequence: Synthetic oligonucleotide
  Sense strand starting at position 741 of SEQ ID NO: 1888996
gagagacuuuaaguguucu

SEQ ID NO: 2571873 - RNA, 19 nt, Artificial Sequence
  Description of Artificial Sequence: Synthetic oligonucleotide
  Antisense strand to SEQ ID NO: 2571872
agaacacuuaaagucucuc

SEQ ID NO: 2571874 - RNA, 19 nt, Artificial Sequence
  Description of Artificial Sequence: Synthetic oligonucleotide
  Sense strand starting at position 930 of SEQ ID NO: 1888996
aucagcacucauugaggaa

SEQ ID NO: 2571875 - RNA, 19 nt, Artificial Sequence
  Description of Artificial Sequence: Synthetic oligonucleotide
  Antisense strand to SEQ ID NO: 2571874
uuccucaaugagugcugau

SEQ ID NO: 2571876 - RNA, 19 nt, Artificial Sequence
  Description of Artificial Sequence: Synthetic oligonucleotide
  Sense strand starting at position 942 of SEQ ID NO: 1888996
ugaggaaggccaggaguuu

SEQ ID NO: 2571877 - RNA, 19 nt, Artificial Sequence
  Description of Artificial Sequence: Synthetic oligonucleotide
  Antisense strand to SEQ ID NO: 2571876
aaacuccuggccuuccuca

SEQ ID NO: 2571878 - RNA, 19 nt, Artificial Sequence
  Description of Artificial Sequence: Synthetic oligonucleotide
  Sense strand starting at position 1020 of SEQ ID NO: 1888996
gcuuaaguugagcaacaaa

SEQ ID NO: 2571879 - RNA, 19 nt, Artificial Sequence
  Description of Artificial Sequence: Synthetic oligonucleotide
  Antisense strand to SEQ ID NO: 2571878
uuuguugcucaacuuaagc

SEQ ID NO: 2571880 - RNA, 19 nt, Artificial Sequence
  Description of Artificial Sequence: Synthetic oligonucleotide
  Sense strand starting at position 1023 of SEQ ID NO: 1888996
uaaguugagcaacaaagua

SEQ ID NO: 2571881 - RNA, 19 nt, Artificial Sequence
  Description of Artificial Sequence: Synthetic oligonucleotide
  Antisense strand to SEQ ID NO: 2571880
uacuuuguugcucaacuua

SEQ ID NO: 2571882 - RNA, 19 nt, Artificial Sequence
  Description of Artificial Sequence: Synthetic oligonucleotide
  Sense strand starting at position 1099 of SEQ ID NO: 1888996
uggaauccaucucuguaau

SEQ ID NO: 2571883 - RNA, 19 nt, Artificial Sequence
  Description of Artificial Sequence: Synthetic oligonucleotide
  Antisense strand to SEQ ID NO: 2571882
auuacagagauggauucca

SEQ ID NO: 2571884 - RNA, 19 nt, Artificial Sequence
  Description of Artificial Sequence: Synthetic oligonucleotide
  Sense strand starting at position 1100 of SEQ ID NO: 1888996
ggaauccaucucuguaaug

SEQ ID NO: 2571885 - RNA, 19 nt, Artificial Sequence
  Description of Artificial Sequence: Synthetic oligonucleotide
  Antisense strand to SEQ ID NO: 2571884
cauuacagagauggauucc

SEQ ID NO: 2571886 - RNA, 19 nt, Artificial Sequence
  Description of Artificial Sequence: Synthetic oligonucleotide
  Sense strand starting at position 1201 of SEQ ID NO: 1888996
ccuuucugugcauauaaga

SEQ ID NO: 2571887 - RNA, 19 nt, Artificial Sequence
  Description of Artificial Sequence: Synthetic oligonucleotide
  Antisense strand to SEQ ID NO: 2571886
ucuuauaugcacagaaagg

SEQ ID NO: 2571888 - RNA, 19 nt, Artificial Sequence
  Description of Artificial Sequence: Synthetic oligonucleotide
  Sense strand starting at position 1344 of SEQ ID NO: 1888996
accagacgucuacagaguu

SEQ ID NO: 2571889 - RNA, 19 nt, Artificial Sequence
  Description of Artificial Sequence: Synthetic oligonucleotide
  Antisense strand to SEQ ID NO: 2571888
aacucuguagacgucuggu

SEQ ID NO: 2571890 - RNA, 19 nt, Artificial Sequence
  Description of Artificial Sequence: Synthetic oligonucleotide
  Sense strand starting at position 1918 of SEQ ID NO: 1888996
cugagagaguaacuuucuu

SEQ ID NO: 2571891 - RNA, 19 nt, Artificial Sequence
  Description of Artificial Sequence: Synthetic oligonucleotide
  Antisense strand to SEQ ID NO: 2571890
aagaaaguuacucucucag

SEQ ID NO: 2571892 - RNA, 19 nt, Artificial Sequence
  Description of Artificial Sequence: Synthetic oligonucleotide
  Sense strand starting at position 1922 of SEQ ID NO: 1888996
gagaguaacuuucuuggag

SEQ ID NO: 2571893 - RNA, 19 nt, Artificial Sequence
  Description of Artificial Sequence: Synthetic oligonucleotide
  Antisense strand to SEQ ID NO: 2571892
cuccaagaaaguuacucuc

SEQ ID NO: 2571894 - RNA, 19 nt, Artificial Sequence
  Description of Artificial Sequence: Synthetic oligonucleotide
  Sense strand starting at position 2233 of SEQ ID NO: 1888996
guaauccuacaguaaucuu

SEQ ID NO: 2571895 - RNA, 19 nt, Artificial Sequence
  Description of Artificial Sequence: Synthetic oligonucleotide
  Antisense strand to SEQ ID NO: 2571894
aagauuacuguaggauuac

SEQ ID NO: 2571896 - RNA, 19 nt, Artificial Sequence
  Description of Artificial Sequence: Synthetic oligonucleotide
  Sense strand starting at position 2256 of SEQ ID NO: 1888996
gaagguuagcgauacaguc

SEQ ID NO: 2571897 - RNA, 19 nt, Artificial Sequence
  Description of Artificial Sequence: Synthetic oligonucleotide
  Antisense strand to SEQ ID NO: 2571896
gacuguaucgcuaaccuuc

SEQ ID NO: 2571898 - RNA, 19 nt, Artificial Sequence
  Description of Artificial Sequence: Synthetic oligonucleotide
  Sense strand starting at position 2321 of SEQ ID NO: 1888996
caauauauggacuguaugu

SEQ ID NO: 2571899 - RNA, 19 nt, Artificial Sequence
  Description of Artificial Sequence: Synthetic oligonucleotide
  Antisense strand to SEQ ID NO: 2571898
acauacaguccauauauug

SEQ ID NO: 2571900 - RNA, 19 nt, Artificial Sequence
  Description of Artificial Sequence: Synthetic oligonucleotide
  Sense strand starting at position 2323 of SEQ ID NO: 1888996
auauauggacuguauguau

SEQ ID NO: 2571901 - RNA, 19 nt, Artificial Sequence
  Description of Artificial Sequence: Synthetic oligonucleotide
  Antisense strand to SEQ ID NO: 2571900
auacauacaguccauauau

SEQ ID NO: 2571902 - RNA, 19 nt, Artificial Sequence
  Description of Artificial Sequence: Synthetic oligonucleotide
  Sense strand starting at position 2547 of SEQ ID NO: 1888996
cuaaguguacucuaagaug

SEQ ID NO: 2571903 - RNA, 19 nt, Artificial Sequence
  Description of Artificial Sequence: Synthetic oligonucleotide
  Antisense strand to SEQ ID NO: 2571902
caucuuagaguacacuuag

SEQ ID NO: 2571904 - RNA, 19 nt, Artificial Sequence
  Description of Artificial Sequence: Synthetic oligonucleotide
  Sense strand starting at position 2621 of SEQ ID NO: 1888996
uuaagugaagcaugacuuu

SEQ ID NO: 2571905 - RNA, 19 nt, Artificial Sequence
  Description of Artificial Sequence: Synthetic oligonucleotide
  Antisense strand to SEQ ID NO: 2571904
aaagucaugcuucacuuaa

SEQ ID NO: 2571906 - RNA, 19 nt, Artificial Sequence
  Description of Artificial Sequence: Synthetic oligonucleotide
  Sense strand starting at position 2780 of SEQ ID NO: 1888996
uaccaaugaggcugacaga

SEQ ID NO: 2571907 - RNA, 19 nt, Artificial Sequence
  Description of Artificial Sequence: Synthetic oligonucleotide
  Antisense strand to SEQ ID NO: 2571906
ucugucagccucauuggua

SEQ ID NO: 2571908 - RNA, 19 nt, Artificial Sequence
  Description of Artificial Sequence: Synthetic oligonucleotide
  Sense strand starting at position 2808 of SEQ ID NO: 1888996
guuuguguggcgccuuaga

SEQ ID NO: 2571909 - RNA, 19 nt, Artificial Sequence
  Description of Artificial Sequence: Synthetic oligonucleotide
  Antisense strand to SEQ ID NO: 2571908
ucuaaggcgccacacaaac

SEQ ID NO: 2571910 - RNA, 19 nt, Artificial Sequence
  Description of Artificial Sequence: Synthetic oligonucleotide
  Sense strand starting at position 2893 of SEQ ID NO: 1888996
agagaucuucgagggucau

SEQ ID NO: 2571911 - RNA, 19 nt, Artificial Sequence
  Description of Artificial Sequence: Synthetic oligonucleotide
  Antisense strand to SEQ ID NO: 2571910
augacccucgaagaucucu

SEQ ID NO: 2571912 - RNA, 19 nt, Artificial Sequence
  Description of Artificial Sequence: Synthetic oligonucleotide
  Sense strand starting at position 2894 of SEQ ID NO: 1888996
gagaucuucgagggucauu

SEQ ID NO: 2571913 - RNA, 19 nt, Artificial Sequence
  Description of Artificial Sequence: Synthetic oligonucleotide
  Antisense strand to SEQ ID NO: 2571912
aaugacccucgaagaucuc

SEQ ID NO: 2571914 - RNA, 19 nt, Artificial Sequence
  Description of Artificial Sequence: Synthetic oligonucleotide
  Sense strand starting at position 2984 of SEQ ID NO: 1888996
ugaagucuccuagagcaua

SEQ ID NO: 2571915 - RNA, 19 nt, Artificial Sequence
  Description of Artificial Sequence: Synthetic oligonucleotide
  Antisense strand to SEQ ID NO: 2571914
uaugcucuaggagacuuca

SEQ ID NO: 2571916 - RNA, 19 nt, Artificial Sequence
  Description of Artificial Sequence: Synthetic oligonucleotide
  Sense strand starting at position 3438 of SEQ ID NO: 1888996
agggcucuacuccacaaua

SEQ ID NO: 2571917 - RNA, 19 nt, Artificial Sequence
  Description of Artificial Sequence: Synthetic oligonucleotide
  Antisense strand to SEQ ID NO: 2571916
uauuguggaguagagcccu

SEQ ID NO: 2571918 - RNA, 19 nt, Artificial Sequence
  Description of Artificial Sequence: Synthetic oligonucleotide
  Sense strand starting at position 3486 of SEQ ID NO: 1888996
auguauccucccugaauag

SEQ ID NO: 2571919 - RNA, 19 nt, Artificial Sequence
  Description of Artificial Sequence: Synthetic oligonucleotide
  Antisense strand to SEQ ID NO: 2571918
cuauucagggaggauacau

SEQ ID NO: 2571920 - RNA, 19 nt, Artificial Sequence
  Description of Artificial Sequence: Synthetic oligonucleotide
  Sense strand starting at position 3487 of SEQ ID NO: 1888996
uguauccucccugaauagu

SEQ ID NO: 2571921 - RNA, 19 nt, Artificial Sequence
  Description of Artificial Sequence: Synthetic oligonucleotide
  Antisense strand to SEQ ID NO: 2571920
acuauucagggaggauaca

SEQ ID NO: 2571922 - RNA, 19 nt, Artificial Sequence
  Description of Artificial Sequence: Synthetic oligonucleotide
  Sense strand starting at position 3496 of SEQ ID NO: 1888996
ccugaauaguaaucgauaa

SEQ ID NO: 2571923 - RNA, 19 nt, Artificial Sequence
  Description of Artificial Sequence: Synthetic oligonucleotide
  Antisense strand to SEQ ID NO: 2571922
uuaucgauuacuauucagg

SEQ ID NO: 2571924 - RNA, 19 nt, Artificial Sequence
  Description of Artificial Sequence: Synthetic oligonucleotide
  Sense strand starting at position 3579 of SEQ ID NO: 1888996
ggucaucaccuacaucgaa

SEQ ID NO: 2571925 - RNA, 19 nt, Artificial Sequence
  Description of Artificial Sequence: Synthetic oligonucleotide
  Antisense strand to SEQ ID NO: 2571924
uucgauguaggugaugacc

SEQ ID NO: 2571926 - RNA, 19 nt, Artificial Sequence
  Description of Artificial Sequence: Synthetic oligonucleotide
  Sense strand starting at position 3645 of SEQ ID NO: 1888996
uccagacuccuacgauuaa

SEQ ID NO: 2571927 - RNA, 19 nt, Artificial Sequence
  Description of Artificial Sequence: Synthetic oligonucleotide
  Antisense strand to SEQ ID NO: 2571926
uuaaucguaggagucugga

SEQ ID NO: 2571928 - RNA, 19 nt, Artificial Sequence
  Description of Artificial Sequence: Synthetic oligonucleotide
  Sense strand starting at position 3703 of SEQ ID NO: 1888996
cagugcuuugcagaaagaa

SEQ ID NO: 2571929 - RNA, 19 nt, Artificial Sequence
  Description of Artificial Sequence: Synthetic oligonucleotide
  Antisense strand to SEQ ID NO: 2571928
uucuuucugcaaagcacug

SEQ ID NO: 2571930 - RNA, 19 nt, Artificial Sequence
  Description of Artificial Sequence: Synthetic oligonucleotide
  Sense strand starting at position 69 of SEQ ID NO: 1888998
agacuuauauagguggcau

SEQ ID NO: 2571931 - RNA, 19 nt, Artificial Sequence
  Description of Artificial Sequence: Synthetic oligonucleotide
  Antisense strand to SEQ ID NO: 2571930
augccaccuauauaagucu

SEQ ID NO: 2571932 - RNA, 19 nt, Artificial Sequence
  Description of Artificial Sequence: Synthetic oligonucleotide
  Sense strand starting at position 721 of SEQ ID NO: 1888998
aaccgaaaugggugugagu

SEQ ID NO: 2571933 - RNA, 19 nt, Artificial Sequence
  Description of Artificial Sequence: Synthetic oligonucleotide
  Antisense strand to SEQ ID NO: 2571932
acucacacccauuucgguu

SEQ ID NO: 2571934 - RNA, 19 nt, Artificial Sequence
  Description of Artificial Sequence: Synthetic oligonucleotide
  Sense strand starting at position 723 of SEQ ID NO: 1888998
ccgaaaugggugugaguga

SEQ ID NO: 2571935 - RNA, 19 nt, Artificial Sequence
  Description of Artificial Sequence: Synthetic oligonucleotide
  Antisense strand to SEQ ID NO: 2571934
ucacucacacccauuucgg

SEQ ID NO: 2571936 - RNA, 19 nt, Artificial Sequence
  Description of Artificial Sequence: Synthetic oligonucleotide
  Sense strand starting at position 1174 of SEQ ID NO: 1888998
cuagucucccuaugaguaa

SEQ ID NO: 2571937 - RNA, 19 nt, Artificial Sequence
  Description of Artificial Sequence: Synthetic oligonucleotide
  Antisense strand to SEQ ID NO: 2571936
uuacucauagggagacuag

SEQ ID NO: 2571938 - RNA, 19 nt, Artificial Sequence
  Description of Artificial Sequence: Synthetic oligonucleotide
  Sense strand starting at position 1214 of SEQ ID NO: 1888998
ggagaacaucucugggcua

SEQ ID NO: 2571939 - RNA, 19 nt, Artificial Sequence
  Description of Artificial Sequence: Synthetic oligonucleotide
  Antisense strand to SEQ ID NO: 2571938
uagcccagagauguucucc

SEQ ID NO: 2571940 - RNA, 19 nt, Artificial Sequence
  Description of Artificial Sequence: Synthetic oligonucleotide
  Sense strand starting at position 1216 of SEQ ID NO: 1888998
agaacaucucugggcuagu

SEQ ID NO: 2571941 - RNA, 19 nt, Artificial Sequence
  Description of Artificial Sequence: Synthetic oligonucleotide
  Antisense strand to SEQ ID NO: 2571940
acuagcccagagauguucu

SEQ ID NO: 2571942 - RNA, 19 nt, Artificial Sequence
  Description of Artificial Sequence: Synthetic oligonucleotide
  Sense strand starting at position 1217 of SEQ ID NO: 1888998
gaacaucucugggcuagua

SEQ ID NO: 2571943 - RNA, 19 nt, Artificial Sequence
  Description of Artificial Sequence: Synthetic oligonucleotide
  Antisense strand to SEQ ID NO: 2571942
uacuagcccagagauguuc

SEQ ID NO: 2571944 - RNA, 19 nt, Artificial Sequence
  Description of Artificial Sequence: Synthetic oligonucleotide
  Sense strand starting at position 1747 of SEQ ID NO: 1888998
uggagagccucgccauuua

SEQ ID NO: 2571945 - RNA, 19 nt, Artificial Sequence
  Description of Artificial Sequence: Synthetic oligonucleotide
  Antisense strand to SEQ ID NO: 2571944
uaaauggcgaggcucucca

SEQ ID NO: 2571946 - RNA, 19 nt, Artificial Sequence
  Description of Artificial Sequence: Synthetic oligonucleotide
  Sense strand starting at position 1928 of SEQ ID NO: 1888998
gccuaaacuugauccucga

SEQ ID NO: 2571947 - RNA, 19 nt, Artificial Sequence
  Description of Artificial Sequence: Synthetic oligonucleotide
  Antisense strand to SEQ ID NO: 2571946
ucgaggaucaaguuuaggc

SEQ ID NO: 2571948 - RNA, 19 nt, Artificial Sequence
  Description of Artificial Sequence: Synthetic oligonucleotide
  Sense strand starting at position 1932 of SEQ ID NO: 1888998
aaacuugauccucgagaug

SEQ ID NO: 2571949 - RNA, 19 nt, Artificial Sequence
  Description of Artificial Sequence: Synthetic oligonucleotide
  Antisense strand to SEQ ID NO: 2571948
caucucgaggaucaaguuu

SEQ ID NO: 2571950 - RNA, 19 nt, Artificial Sequence
  Description of Artificial Sequence: Synthetic oligonucleotide
  Sense strand starting at position 2019 of SEQ ID NO: 1888998
gucucugauggucacauga

SEQ ID NO: 2571951 - RNA, 19 nt, Artificial Sequence
  Description of Artificial Sequence: Synthetic oligonucleotide
  Antisense strand to SEQ ID NO: 2571950
ucaugugaccaucagagac

SEQ ID NO: 2571952 - RNA, 19 nt, Artificial Sequence
  Description of Artificial Sequence: Synthetic oligonucleotide
  Sense strand starting at position 2047 of SEQ ID NO: 1888998
acuuuaaagcuggaaugua

SEQ ID NO: 2571953 - RNA, 19 nt, Artificial Sequence
  Description of Artificial Sequence: Synthetic oligonucleotide
  Antisense strand to SEQ ID NO: 2571952
uacauuccagcuuuaaagu

SEQ ID NO: 2571954 - RNA, 19 nt, Artificial Sequence
  Description of Artificial Sequence: Synthetic oligonucleotide
  Sense strand starting at position 2068 of SEQ ID NO: 1888998
gguugaggcccauauucca

SEQ ID NO: 2571955 - RNA, 19 nt, Artificial Sequence
  Description of Artificial Sequence: Synthetic oligonucleotide
  Antisense strand to SEQ ID NO: 2571954
uggaauaugggccucaacc

SEQ ID NO: 2571956 - RNA, 19 nt, Artificial Sequence
  Description of Artificial Sequence: Synthetic oligonucleotide
  Sense strand starting at position 2188 of SEQ ID NO: 1888998
ggaauuuggugcucagcuu

SEQ ID NO: 2571957 - RNA, 19 nt, Artificial Sequence
  Description of Artificial Sequence: Synthetic oligonucleotide
  Antisense strand to SEQ ID NO: 2571956
aagcugagcaccaaauucc

SEQ ID NO: 2571958 - RNA, 19 nt, Artificial Sequence
  Description of Artificial Sequence: Synthetic oligonucleotide
  Sense strand starting at position 2248 of SEQ ID NO: 1888998
uugaaauauaugugagcug

SEQ ID NO: 2571959 - RNA, 19 nt, Artificial Sequence
  Description of Artificial Sequence: Synthetic oligonucleotide
  Antisense strand to SEQ ID NO: 2571958
cagcucacauauauuucaa

SEQ ID NO: 2571960 - RNA, 19 nt, Artificial Sequence
  Description of Artificial Sequence: Synthetic oligonucleotide
  Sense strand starting at position 2251 of SEQ ID NO: 1888998
aaauauaugugagcuggga

SEQ ID NO: 2571961 - RNA, 19 nt, Artificial Sequence
  Description of Artificial Sequence: Synthetic oligonucleotide
  Antisense strand to SEQ ID NO: 2571960
ucccagcucacauauauuu

SEQ ID NO: 2571962 - RNA, 19 nt, Artificial Sequence
  Description of Artificial Sequence: Synthetic oligonucleotide
  Sense strand starting at position 2253 of SEQ ID NO: 1888998
auauaugugagcugggaca

SEQ ID NO: 2571963 - RNA, 19 nt, Artificial Sequence
  Description of Artificial Sequence: Synthetic oligonucleotide
  Antisense strand to SEQ ID NO: 2571962
ugucccagcucacauauau

SEQ ID NO: 2571964 - RNA, 19 nt, Artificial Sequence
  Description of Artificial Sequence: Synthetic oligonucleotide
  Sense strand starting at position 2373 of SEQ ID NO: 1888998
gucccugaauacuagauuu

SEQ ID NO: 2571965 - RNA, 19 nt, Artificial Sequence
  Description of Artificial Sequence: Synthetic oligonucleotide
  Antisense strand to SEQ ID NO: 2571964
aaaucuaguauucagggac

SEQ ID NO: 2571966 - RNA, 19 nt, Artificial Sequence
  Description of Artificial Sequence: Synthetic oligonucleotide
  Sense strand starting at position 2445 of SEQ ID NO: 1888998
uggucuggccuauauucua

SEQ ID NO: 2571967 - RNA, 19 nt, Artificial Sequence
  Description of Artificial Sequence: Synthetic oligonucleotide
  Antisense strand to SEQ ID NO: 2571966
uagaauauaggccagacca

SEQ ID NO: 2571968 - RNA, 19 nt, Artificial Sequence
  Description of Artificial Sequence: Synthetic oligonucleotide
  Sense strand starting at position 2529 of SEQ ID NO: 1888998
ccaccaguuauuugugguu

SEQ ID NO: 2571969 - RNA, 19 nt, Artificial Sequence
  Description of Artificial Sequence: Synthetic oligonucleotide
  Antisense strand to SEQ ID NO: 2571968
aaccacaaauaacuggugg

SEQ ID NO: 2571970 - RNA, 19 nt, Artificial Sequence
  Description of Artificial Sequence: Synthetic oligonucleotide
  Sense strand starting at position 2580 of SEQ ID NO: 1888998
aacaguggauaguaaauuu

SEQ ID NO: 2571971 - RNA, 19 nt, Artificial Sequence
  Description of Artificial Sequence: Synthetic oligonucleotide
  Antisense strand to SEQ ID NO: 2571970
aaauuuacuauccacuguu

SEQ ID NO: 2571972 - RNA, 19 nt, Artificial Sequence
  Description of Artificial Sequence: Synthetic oligonucleotide
  Sense strand starting at position 2631 of SEQ ID NO: 1888998
agugguuugguagaauaau

SEQ ID NO: 2571973 - RNA, 19 nt, Artificial Sequence
  Description of Artificial Sequence: Synthetic oligonucleotide
  Antisense strand to SEQ ID NO: 2571972
auuauucuaccaaaccacu

SEQ ID NO: 2571974 - RNA, 19 nt, Artificial Sequence
  Description of Artificial Sequence: Synthetic oligonucleotide
  Sense strand starting at position 2640 of SEQ ID NO: 1888998
guagaauaaugagaggaca

SEQ ID NO: 2571975 - RNA, 19 nt, Artificial Sequence
  Description of Artificial Sequence: Synthetic oligonucleotide
  Antisense strand to SEQ ID NO: 2571974
uguccucucauuauucuac

SEQ ID NO: 2571976 - RNA, 19 nt, Artificial Sequence
  Description of Artificial Sequence: Synthetic oligonucleotide
  Sense strand starting at position 2893 of SEQ ID NO: 1888998
aagagauucugacuuugua

SEQ ID NO: 2571977 - RNA, 19 nt, Artificial Sequence
  Description of Artificial Sequence: Synthetic oligonucleotide
  Antisense strand to SEQ ID NO: 2571976
uacaaagucagaaucucuu

SEQ ID NO: 2571978 - RNA, 19 nt, Artificial Sequence
  Description of Artificial Sequence: Synthetic oligonucleotide
  Sense strand starting at position 3046 of SEQ ID NO: 1888998
agccuuguggcacagauga

SEQ ID NO: 2571979 - RNA, 19 nt, Artificial Sequence
  Description of Artificial Sequence: Synthetic oligonucleotide
  Antisense strand to SEQ ID NO: 2571978
ucaucugugccacaaggcu

SEQ ID NO: 2571980 - RNA, 19 nt, Artificial Sequence
  Description of Artificial Sequence: Synthetic oligonucleotide
  Sense strand starting at position 3101 of SEQ ID NO: 1888998
aguuaacuacacugguaga

SEQ ID NO: 2571981 - RNA, 19 nt, Artificial Sequence
  Description of Artificial Sequence: Synthetic oligonucleotide
  Antisense strand to SEQ ID NO: 2571980
ucuaccaguguaguuaacu

SEQ ID NO: 2571982 - RNA, 19 nt, Artificial Sequence
  Description of Artificial Sequence: Synthetic oligonucleotide
  Sense strand starting at position 3132 of SEQ ID NO: 1888998
guggaagugaggugauaau

SEQ ID NO: 2571983 - RNA, 19 nt, Artificial Sequence
  Description of Artificial Sequence: Synthetic oligonucleotide
  Antisense strand to SEQ ID NO: 2571982
auuaucaccucacuuccac

SEQ ID NO: 2571984 - RNA, 19 nt, Artificial Sequence
  Description of Artificial Sequence: Synthetic oligonucleotide
  Sense strand starting at position 3313 of SEQ ID NO: 1888998
ugggaugccuacucauuga

SEQ ID NO: 2571985 - RNA, 19 nt, Artificial Sequence
  Description of Artificial Sequence: Synthetic oligonucleotide
  Antisense strand to SEQ ID NO: 2571984
ucaaugaguaggcauccca

SEQ ID NO: 2571986 - RNA, 19 nt, Artificial Sequence
  Description of Artificial Sequence: Synthetic oligonucleotide
  Sense strand starting at position 3536 of SEQ ID NO: 1888998
caaagucucuagucugaug

SEQ ID NO: 2571987 - RNA, 19 nt, Artificial Sequence
  Description of Artificial Sequence: Synthetic oligonucleotide
  Antisense strand to SEQ ID NO: 2571986
caucagacuagagacuuug

SEQ ID NO: 2571988 - RNA, 19 nt, Artificial Sequence
  Description of Artificial Sequence: Synthetic oligonucleotide
  Sense strand starting at position 3630 of SEQ ID NO: 1888998
aguaauaauuugggugaga

SEQ ID NO: 2571989 - RNA, 19 nt, Artificial Sequence
  Description of Artificial Sequence: Synthetic oligonucleotide
  Antisense strand to SEQ ID NO: 2571988
ucucacccaaauuauuacu

SEQ ID NO: 2571990 - RNA, 19 nt, Artificial Sequence
  Description of Artificial Sequence: Synthetic oligonucleotide
  Sense strand starting at position 3635 of SEQ ID NO: 1888998
uaauuugggugagauuaag

SEQ ID NO: 2571991 - RNA, 19 nt, Artificial Sequence
  Description of Artificial Sequence: Synthetic oligonucleotide
  Antisense strand to SEQ ID NO: 2571990
cuuaaucucacccaaauua

SEQ ID NO: 2571992 - RNA, 19 nt, Artificial Sequence
  Description of Artificial Sequence: Synthetic oligonucleotide
  Sense strand starting at position 3641 of SEQ ID NO: 1888998
gggugagauuaagccucuu

SEQ ID NO: 2571993 - RNA, 19 nt, Artificial Sequence
  Description of Artificial Sequence: Synthetic oligonucleotide
  Antisense strand to SEQ ID NO: 2571992
aagaggcuuaaucucaccc

SEQ ID NO: 2571994 - RNA, 19 nt, Artificial Sequence
  Description of Artificial Sequence: Synthetic oligonucleotide
  Sense strand starting at position 3665 of SEQ ID NO: 1888998
agugguuacacgcacauua

SEQ ID NO: 2571995 - RNA, 19 nt, Artificial Sequence
  Description of Artificial Sequence: Synthetic oligonucleotide
  Antisense strand to SEQ ID NO: 2571994
uaaugugcguguaaccacu

SEQ ID NO: 2571996 - RNA, 19 nt, Artificial Sequence
  Description of Artificial Sequence: Synthetic oligonucleotide
  Sense strand starting at position 3681 of SEQ ID NO: 1888998
uuagacuuugacugugacu

SEQ ID NO: 2571997 - RNA, 19 nt, Artificial Sequence
  Description of Artificial Sequence: Synthetic oligonucleotide
  Antisense strand to SEQ ID NO: 2571996
agucacagucaaagucuaa

SEQ ID NO: 2571998 - RNA, 19 nt, Artificial Sequence
  Description of Artificial Sequence: Synthetic oligonucleotide
  Sense strand starting at position 3683 of SEQ ID NO: 1888998
agacuuugacugugacugu

SEQ ID NO: 2571999 - RNA, 19 nt, Artificial Sequence
  Description of Artificial Sequence: Synthetic oligonucleotide
  Antisense strand to SEQ ID NO: 2571998
acagucacagucaaagucu

SEQ ID NO: 2572000 - RNA, 19 nt, Artificial Sequence
  Description of Artificial Sequence: Synthetic oligonucleotide
  Sense strand starting at position 3690 of SEQ ID NO: 1888998
gacugugacuguuuauacu

SEQ ID NO: 2572001 - RNA, 19 nt, Artificial Sequence
  Description of Artificial Sequence: Synthetic oligonucleotide
  Antisense strand to SEQ ID NO: 2572000
aguauaaacagucacaguc

SEQ ID NO: 2572002 - RNA, 19 nt, Artificial Sequence
  Description of Artificial Sequence: Synthetic oligonucleotide
  Sense strand starting at position 3709 of SEQ ID NO: 1888998
ggcagaaugucaguaucua

SEQ ID NO: 2572003 - RNA, 19 nt, Artificial Sequence
  Description of Artificial Sequence: Synthetic oligonucleotide
  Antisense strand to SEQ ID NO: 2572002
uagauacugacauucugcc

SEQ ID NO: 2572004 - RNA, 19 nt, Artificial Sequence
  Description of Artificial Sequence: Synthetic oligonucleotide
  Sense strand starting at position 3710 of SEQ ID NO: 1888998
gcagaaugucaguaucuag

SEQ ID NO: 2572005 - RNA, 19 nt, Artificial Sequence
  Description of Artificial Sequence: Synthetic oligonucleotide
  Antisense strand to SEQ ID NO: 2572004
cuagauacugacauucugc

SEQ ID NO: 2572006 - RNA, 19 nt, Artificial Sequence
  Description of Artificial Sequence: Synthetic oligonucleotide
  Sense strand starting at position 3939 of SEQ ID NO: 1888998
guguucuuagcacauauga

SEQ ID NO: 2572007 - RNA, 19 nt, Artificial Sequence
  Description of Artificial Sequence: Synthetic oligonucleotide
  Antisense strand to SEQ ID NO: 2572006
ucauaugugcuaagaacac

SEQ ID NO: 2572008 - RNA, 19 nt, Artificial Sequence
  Description of Artificial Sequence: Synthetic oligonucleotide
  Sense strand starting at position 3965 of SEQ ID NO: 1888998
augaguuugcuguuguguu

SEQ ID NO: 2572009 - RNA, 19 nt, Artificial Sequence
  Description of Artificial Sequence: Synthetic oligonucleotide
  Antisense strand to SEQ ID NO: 2572008
aacacaacagcaaacucau

SEQ ID NO: 2572010 - RNA, 19 nt, Artificial Sequence
  Description of Artificial Sequence: Synthetic oligonucleotide
  Sense strand starting at position 170 of SEQ ID NO: 1888999
uugucauaucugcauccua

SEQ ID NO: 2572011 - RNA, 19 nt, Artificial Sequence
  Description of Artificial Sequence: Synthetic oligonucleotide
  Antisense strand to SEQ ID NO: 2572010
uaggaugcagauaugacaa

SEQ ID NO: 2572012 - RNA, 19 nt, Artificial Sequence
  Description of Artificial Sequence: Synthetic oligonucleotide
  Sense strand starting at position 422 of SEQ ID NO: 1888999
cuuaguggaccaggugaau

SEQ ID NO: 2572013 - RNA, 19 nt, Artificial Sequence
  Description of Artificial Sequence: Synthetic oligonucleotide
  Antisense strand to SEQ ID NO: 2572012
auucaccugguccacuaag

SEQ ID NO: 2572014 - RNA, 19 nt, Artificial Sequence
  Description of Artificial Sequence: Synthetic oligonucleotide
  Sense strand starting at position 452 of SEQ ID NO: 1888999
cggguaggcaugggacaau

SEQ ID NO: 2572015 - RNA, 19 nt, Artificial Sequence
  Description of Artificial Sequence: Synthetic oligonucleotide
  Antisense strand to SEQ ID NO: 2572014
auugucccaugccuacccg

SEQ ID NO: 2572016 - RNA, 19 nt, Artificial Sequence
  Description of Artificial Sequence: Synthetic oligonucleotide
  Sense strand starting at position 462 of SEQ ID NO: 1888999
ugggacaaugaucgaaagu

SEQ ID NO: 2572017 - RNA, 19 nt, Artificial Sequence
  Description of Artificial Sequence: Synthetic oligonucleotide
  Antisense strand to SEQ ID NO: 2572016
acuuucgaucauuguccca

SEQ ID NO: 2572018 - RNA, 19 nt, Artificial Sequence
  Description of Artificial Sequence: Synthetic oligonucleotide
  Sense strand starting at position 489 of SEQ ID NO: 1888999
ggccucugucuguuuaguu

SEQ ID NO: 2572019 - RNA, 19 nt, Artificial Sequence
  Description of Artificial Sequence: Synthetic oligonucleotide
  Antisense strand to SEQ ID NO: 2572018
aacuaaacagacagaggcc

SEQ ID NO: 2572020 - RNA, 19 nt, Artificial Sequence
  Description of Artificial Sequence: Synthetic oligonucleotide
  Sense strand starting at position 570 of SEQ ID NO: 1888999
auauguauagggugaaacu

SEQ ID NO: 2572021 - RNA, 19 nt, Artificial Sequence
  Description of Artificial Sequence: Synthetic oligonucleotide
  Antisense strand to SEQ ID NO: 2572020
aguuucacccuauacauau

SEQ ID NO: 2572022 - RNA, 19 nt, Artificial Sequence
  Description of Artificial Sequence: Synthetic oligonucleotide
  Sense strand starting at position 583 of SEQ ID NO: 1888999
gaaacugggucaccuugau

SEQ ID NO: 2572023 - RNA, 19 nt, Artificial Sequence
  Description of Artificial Sequence: Synthetic oligonucleotide
  Antisense strand to SEQ ID NO: 2572022
aucaaggugacccaguuuc

SEQ ID NO: 2572024 - RNA, 19 nt, Artificial Sequence
  Description of Artificial Sequence: Synthetic oligonucleotide
  Sense strand starting at position 616 of SEQ ID NO: 1888999
gucacaggacugugacuuu

SEQ ID NO: 2572025 - RNA, 19 nt, Artificial Sequence
  Description of Artificial Sequence: Synthetic oligonucleotide
  Antisense strand to SEQ ID NO: 2572024
aaagucacaguccugugac

SEQ ID NO: 2572026 - RNA, 19 nt, Artificial Sequence
  Description of Artificial Sequence: Synthetic oligonucleotide
  Sense strand starting at position 718 of SEQ ID NO: 1888999
ggaucagaguaucuuacca

SEQ ID NO: 2572027 - RNA, 19 nt, Artificial Sequence
  Description of Artificial Sequence: Synthetic oligonucleotide
  Antisense strand to SEQ ID NO: 2572026
ugguaagauacucugaucc

SEQ ID NO: 2572028 - RNA, 19 nt, Artificial Sequence
  Description of Artificial Sequence: Synthetic oligonucleotide
  Sense strand starting at position 757 of SEQ ID NO: 1888999
cagagcucugggcagagaa

SEQ ID NO: 2572029 - RNA, 19 nt, Artificial Sequence
  Description of Artificial Sequence: Synthetic oligonucleotide
  Antisense strand to SEQ ID NO: 2572028
uucucugcccagagcucug

SEQ ID NO: 2572030 - RNA, 19 nt, Artificial Sequence
  Description of Artificial Sequence: Synthetic oligonucleotide
  Sense strand starting at position 799 of SEQ ID NO: 1888999
acuccauucucugucuaga

SEQ ID NO: 2572031 - RNA, 19 nt, Artificial Sequence
  Description of Artificial Sequence: Synthetic oligonucleotide
  Antisense strand to SEQ ID NO: 2572030
ucuagacagagaauggagu

SEQ ID NO: 2572032 - RNA, 19 nt, Artificial Sequence
  Description of Artificial Sequence: Synthetic oligonucleotide
  Sense strand starting at position 802 of SEQ ID NO: 1888999
ccauucucugucuagauca

SEQ ID NO: 2572033 - RNA, 19 nt, Artificial Sequence
  Description of Artificial Sequence: Synthetic oligonucleotide
  Antisense strand to SEQ ID NO: 2572032
ugaucuagacagagaaugg

SEQ ID NO: 2572034 - RNA, 19 nt, Artificial Sequence
  Description of Artificial Sequence: Synthetic oligonucleotide
  Sense strand starting at position 804 of SEQ ID NO: 1888999
auucucugucuagaucagu

SEQ ID NO: 2572035 - RNA, 19 nt, Artificial Sequence
  Description of Artificial Sequence: Synthetic oligonucleotide
  Antisense strand to SEQ ID NO: 2572034
acugaucuagacagagaau

SEQ ID NO: 2572036 - RNA, 19 nt, Artificial Sequence
  Description of Artificial Sequence: Synthetic oligonucleotide
  Sense strand starting at position 832 of SEQ ID NO: 1888999
uucccagugcuuuaacaug

SEQ ID NO: 2572037 - RNA, 19 nt, Artificial Sequence
  Description of Artificial Sequence: Synthetic oligonucleotide
  Antisense strand to SEQ ID NO: 2572036
cauguuaaagcacugggaa

SEQ ID NO: 2572038 - RNA, 19 nt, Artificial Sequence
  Description of Artificial Sequence: Synthetic oligonucleotide
  Sense strand starting at position 865 of SEQ ID NO: 1888999
caguguguagucuuuguuu

SEQ ID NO: 2572039 - RNA, 19 nt, Artificial Sequence
  Description of Artificial Sequence: Synthetic oligonucleotide
  Antisense strand to SEQ ID NO: 2572038
aaacaaagacuacacacug

SEQ ID NO: 2572040 - RNA, 19 nt, Artificial Sequence
  Description of Artificial Sequence: Synthetic oligonucleotide
  Sense strand starting at position 894 of SEQ ID NO: 1888999
cuuggaauggcagauugua

SEQ ID NO: 2572041 - RNA, 19 nt, Artificial Sequence
  Description of Artificial Sequence: Synthetic oligonucleotide
  Antisense strand to SEQ ID NO: 2572040
uacaaucugccauuccaag

SEQ ID NO: 2572042 - RNA, 19 nt, Artificial Sequence
  Description of Artificial Sequence: Synthetic oligonucleotide
  Sense strand starting at position 965 of SEQ ID NO: 1888999
ugacucaugcuagauguca

SEQ ID NO: 2572043 - RNA, 19 nt, Artificial Sequence
  Description of Artificial Sequence: Synthetic oligonucleotide
  Antisense strand to SEQ ID NO: 2572042
ugacaucuagcaugaguca

SEQ ID NO: 2572044 - RNA, 19 nt, Artificial Sequence
  Description of Artificial Sequence: Synthetic oligonucleotide
  Sense strand starting at position 1127 of SEQ ID NO: 1888999
gucugaauuguacauggca

SEQ ID NO: 2572045 - RNA, 19 nt, Artificial Sequence
  Description of Artificial Sequence: Synthetic oligonucleotide
  Antisense strand to SEQ ID NO: 2572044
ugccauguacaauucagac

SEQ ID NO: 2572046 - RNA, 19 nt, Artificial Sequence
  Description of Artificial Sequence: Synthetic oligonucleotide
  Sense strand starting at position 1130 of SEQ ID NO: 1888999
ugaauuguacauggcaaag

SEQ ID NO: 2572047 - RNA, 19 nt, Artificial Sequence
  Description of Artificial Sequence: Synthetic oligonucleotide
  Antisense strand to SEQ ID NO: 2572046
cuuugccauguacaauuca

SEQ ID NO: 2572048 - RNA, 19 nt, Artificial Sequence
  Description of Artificial Sequence: Synthetic oligonucleotide
  Sense strand starting at position 1136 of SEQ ID NO: 1888999
guacauggcaaagguaaau

SEQ ID NO: 2572049 - RNA, 19 nt, Artificial Sequence
  Description of Artificial Sequence: Synthetic oligonucleotide
  Antisense strand to SEQ ID NO: 2572048
auuuaccuuugccauguac

SEQ ID NO: 2572050 - RNA, 19 nt, Artificial Sequence
  Description of Artificial Sequence: Synthetic oligonucleotide
  Sense strand starting at position 1179 of SEQ ID NO: 1888999
gcagguuuagauggacuau

SEQ ID NO: 2572051 - RNA, 19 nt, Artificial Sequence
  Description of Artificial Sequence: Synthetic oligonucleotide
  Antisense strand to SEQ ID NO: 2572050
auaguccaucuaaaccugc

SEQ ID NO: 2572052 - RNA, 19 nt, Artificial Sequence
  Description of Artificial Sequence: Synthetic oligonucleotide
  Sense strand starting at position 1540 of SEQ ID NO: 1888999
gcugacugaacucacgauu

SEQ ID NO: 2572053 - RNA, 19 nt, Artificial Sequence
  Description of Artificial Sequence: Synthetic oligonucleotide
  Antisense strand to SEQ ID NO: 2572052
aaucgugaguucagucagc

SEQ ID NO: 2572054 - RNA, 19 nt, Artificial Sequence
  Description of Artificial Sequence: Synthetic oligonucleotide
  Sense strand starting at position 1741 of SEQ ID NO: 1888999
caguaaauauugucaagug

SEQ ID NO: 2572055 - RNA, 19 nt, Artificial Sequence
  Description of Artificial Sequence: Synthetic oligonucleotide
  Antisense strand to SEQ ID NO: 2572054
cacuugacaauauuuacug

SEQ ID NO: 2572056 - RNA, 19 nt, Artificial Sequence
  Description of Artificial Sequence: Synthetic oligonucleotide
  Sense strand starting at position 1750 of SEQ ID NO: 1888999
uugucaagugaaugaugaa

SEQ ID NO: 2572057 - RNA, 19 nt, Artificial Sequence
  Description of Artificial Sequence: Synthetic oligonucleotide
  Antisense strand to SEQ ID NO: 2572056
uucaucauucacuugacaa

SEQ ID NO: 2572058 - RNA, 19 nt, Artificial Sequence
  Description of Artificial Sequence: Synthetic oligonucleotide
  Sense strand starting at position 2256 of SEQ ID NO: 1888999
ucucucuuauugguacaua

SEQ ID NO: 2572059 - RNA, 19 nt, Artificial Sequence
  Description of Artificial Sequence: Synthetic oligonucleotide
  Antisense strand to SEQ ID NO: 2572058
uauguaccaauaagagaga

SEQ ID NO: 2572060 - RNA, 19 nt, Artificial Sequence
  Description of Artificial Sequence: Synthetic oligonucleotide
  Sense strand starting at position 2281 of SEQ ID NO: 1888999
caguguacccuguaaucag

SEQ ID NO: 2572061 - RNA, 19 nt, Artificial Sequence
  Description of Artificial Sequence: Synthetic oligonucleotide
  Antisense strand to SEQ ID NO: 2572060
cugauuacaggguacacug

SEQ ID NO: 2572062 - RNA, 19 nt, Artificial Sequence
  Description of Artificial Sequence: Synthetic oligonucleotide
  Sense strand starting at position 2343 of SEQ ID NO: 1888999
aaauaaggagaucguacau

SEQ ID NO: 2572063 - RNA, 19 nt, Artificial Sequence
  Description of Artificial Sequence: Synthetic oligonucleotide
  Antisense strand to SEQ ID NO: 2572062
auguacgaucuccuuauuu

SEQ ID NO: 2572064 - RNA, 19 nt, Artificial Sequence
  Description of Artificial Sequence: Synthetic oligonucleotide
  Sense strand starting at position 2509 of SEQ ID NO: 1888999
ggcugcuuuagucauuugu

SEQ ID NO: 2572065 - RNA, 19 nt, Artificial Sequence
  Description of Artificial Sequence: Synthetic oligonucleotide
  Antisense strand to SEQ ID NO: 2572064
acaaaugacuaaagcagcc

SEQ ID NO: 2572066 - RNA, 19 nt, Artificial Sequence
  Description of Artificial Sequence: Synthetic oligonucleotide
  Sense strand starting at position 2511 of SEQ ID NO: 1888999
cugcuuuagucauuuguau

SEQ ID NO: 2572067 - RNA, 19 nt, Artificial Sequence
  Description of Artificial Sequence: Synthetic oligonucleotide
  Antisense strand to SEQ ID NO: 2572066
auacaaaugacuaaagcag

SEQ ID NO: 2572068 - RNA, 19 nt, Artificial Sequence
  Description of Artificial Sequence: Synthetic oligonucleotide
  Sense strand starting at position 2579 of SEQ ID NO: 1888999
aguugaaguccagauucuu

SEQ ID NO: 2572069 - RNA, 19 nt, Artificial Sequence
  Description of Artificial Sequence: Synthetic oligonucleotide
  Antisense strand to SEQ ID NO: 2572068
aagaaucuggacuucaacu

SEQ ID NO: 2572070 - RNA, 19 nt, Artificial Sequence
  Description of Artificial Sequence: Synthetic oligonucleotide
  Sense strand starting at position 2601 of SEQ ID NO: 1888999
ugugauuuauaagaacaca

SEQ ID NO: 2572071 - RNA, 19 nt, Artificial Sequence
  Description of Artificial Sequence: Synthetic oligonucleotide
  Antisense strand to SEQ ID NO: 2572070
uguguucuuauaaaucaca

SEQ ID NO: 2572072 - RNA, 19 nt, Artificial Sequence
  Description of Artificial Sequence: Synthetic oligonucleotide
  Sense strand starting at position 2706 of SEQ ID NO: 1888999
ucccauguucccuggaaug

SEQ ID NO: 2572073 - RNA, 19 nt, Artificial Sequence
  Description of Artificial Sequence: Synthetic oligonucleotide
  Antisense strand to SEQ ID NO: 2572072
cauuccagggaacauggga

SEQ ID NO: 2572074 - RNA, 19 nt, Artificial Sequence
  Description of Artificial Sequence: Synthetic oligonucleotide
  Sense strand starting at position 2708 of SEQ ID NO: 1888999
ccauguucccuggaauguc

SEQ ID NO: 2572075 - RNA, 19 nt, Artificial Sequence
  Description of Artificial Sequence: Synthetic oligonucleotide
  Antisense strand to SEQ ID NO: 2572074
gacauuccagggaacaugg

SEQ ID NO: 2572076 - RNA, 19 nt, Artificial Sequence
  Description of Artificial Sequence: Synthetic oligonucleotide
  Sense strand starting at position 2778 of SEQ ID NO: 1888999
gcucauuucuuucuggacu

SEQ ID NO: 2572077 - RNA, 19 nt, Artificial Sequence
  Description of Artificial Sequence: Synthetic oligonucleotide
  Antisense strand to SEQ ID NO: 2572076
aguccagaaagaaaugagc

SEQ ID NO: 2572078 - RNA, 19 nt, Artificial Sequence
  Description of Artificial Sequence: Synthetic oligonucleotide
  Sense strand starting at position 2789 of SEQ ID NO: 1888999
ucuggacuccaguaguaag

SEQ ID NO: 2572079 - RNA, 19 nt, Artificial Sequence
  Description of Artificial Sequence: Synthetic oligonucleotide
  Antisense strand to SEQ ID NO: 2572078
cuuacuacuggaguccaga

SEQ ID NO: 2572080 - RNA, 19 nt, Artificial Sequence
  Description of Artificial Sequence: Synthetic oligonucleotide
  Sense strand starting at position 3176 of SEQ ID NO: 1888999
cagccaguucugugaauuu

SEQ ID NO: 2572081 - RNA, 19 nt, Artificial Sequence
  Description of Artificial Sequence: Synthetic oligonucleotide
  Antisense strand to SEQ ID NO: 2572080
aaauucacagaacuggcug

SEQ ID NO: 2572082 - RNA, 19 nt, Artificial Sequence
  Description of Artificial Sequence: Synthetic oligonucleotide
  Sense strand starting at position 3353 of SEQ ID NO: 1888999
uugagaaugcgauauaacu

SEQ ID NO: 2572083 - RNA, 19 nt, Artificial Sequence
  Description of Artificial Sequence: Synthetic oligonucleotide
  Antisense strand to SEQ ID NO: 2572082
aguuauaucgcauucucaa

SEQ ID NO: 2572084 - RNA, 19 nt, Artificial Sequence
  Description of Artificial Sequence: Synthetic oligonucleotide
  Sense strand starting at position 3538 of SEQ ID NO: 1888999
aauguuugaccguaugaac

SEQ ID NO: 2572085 - RNA, 19 nt, Artificial Sequence
  Description of Artificial Sequence: Synthetic oligonucleotide
  Antisense strand to SEQ ID NO: 2572084
guucauacggucaaacauu

SEQ ID NO: 2572086 - RNA, 19 nt, Artificial Sequence
  Description of Artificial Sequence: Synthetic oligonucleotide
  Sense strand starting at position 3626 of SEQ ID NO: 1888999
ugucguaugguaaguguau

SEQ ID NO: 2572087 - RNA, 19 nt, Artificial Sequence
  Description of Artificial Sequence: Synthetic oligonucleotide
  Antisense strand to SEQ ID NO: 2572086
auacacuuaccauacgaca

SEQ ID NO: 2572088 - RNA, 19 nt, Artificial Sequence
  Description of Artificial Sequence: Synthetic oligonucleotide
  Sense strand starting at position 3746 of SEQ ID NO: 1888999
gccagcacuggauauugua

SEQ ID NO: 2572089 - RNA, 19 nt, Artificial Sequence
  Description of Artificial Sequence: Synthetic oligonucleotide
  Antisense strand to SEQ ID NO: 2572088
uacaauauccagugcuggc

SEQ ID NO: 2572090 - RNA, 19 nt, Artificial Sequence
  Description of Artificial Sequence: Synthetic oligonucleotide
  Sense strand starting at position 149 of SEQ ID NO: 1889000
uucucuucugagcaagaac

SEQ ID NO: 2572091 - RNA, 19 nt, Artificial Sequence
  Description of Artificial Sequence: Synthetic oligonucleotide
  Antisense strand to SEQ ID NO: 2572090
guucuugcucagaagagaa

SEQ ID NO: 2572092 - RNA, 19 nt, Artificial Sequence
  Description of Artificial Sequence: Synthetic oligonucleotide
  Sense strand starting at position 344 of SEQ ID NO: 1889000
uggaaaugacacuguugca

SEQ ID NO: 2572093 - RNA, 19 nt, Artificial Sequence
  Description of Artificial Sequence: Synthetic oligonucleotide
  Antisense strand to SEQ ID NO: 2572092
ugcaacagugucauuucca

SEQ ID NO: 2572094 - RNA, 19 nt, Artificial Sequence
  Description of Artificial Sequence: Synthetic oligonucleotide
  Sense strand starting at position 383 of SEQ ID NO: 1889000
aagaaaggguuucuaaugu

SEQ ID NO: 2572095 - RNA, 19 nt, Artificial Sequence
  Description of Artificial Sequence: Synthetic oligonucleotide
  Antisense strand to SEQ ID NO: 2572094
acauuagaaacccuuucuu

SEQ ID NO: 2572096 - RNA, 19 nt, Artificial Sequence
  Description of Artificial Sequence: Synthetic oligonucleotide
  Sense strand starting at position 965 of SEQ ID NO: 1889000
aagcaauaucaggaucugu

SEQ ID NO: 2572097 - RNA, 19 nt, Artificial Sequence
  Description of Artificial Sequence: Synthetic oligonucleotide
  Antisense strand to SEQ ID NO: 2572096
acagauccugauauugcuu

SEQ ID NO: 2572098 - RNA, 19 nt, Artificial Sequence
  Description of Artificial Sequence: Synthetic oligonucleotide
  Sense strand starting at position 975 of SEQ ID NO: 1889000
aggaucuguauuuguguua

SEQ ID NO: 2572099 - RNA, 19 nt, Artificial Sequence
  Description of Artificial Sequence: Synthetic oligonucleotide
  Antisense strand to SEQ ID NO: 2572098
uaacacaaauacagauccu

SEQ ID NO: 2572100 - RNA, 19 nt, Artificial Sequence
  Description of Artificial Sequence: Synthetic oligonucleotide
  Sense strand starting at position 1117 of SEQ ID NO: 1889000
caagaagcaguguauuaca

SEQ ID NO: 2572101 - RNA, 19 nt, Artificial Sequence
  Description of Artificial Sequence: Synthetic oligonucleotide
  Antisense strand to SEQ ID NO: 2572100
uguaauacacugcuucuug

SEQ ID NO: 2572102 - RNA, 19 nt, Artificial Sequence
  Description of Artificial Sequence: Synthetic oligonucleotide
  Sense strand starting at position 1125 of SEQ ID NO: 1889000
aguguauuacaguaacaag

SEQ ID NO: 2572103 - RNA, 19 nt, Artificial Sequence
  Description of Artificial Sequence: Synthetic oligonucleotide
  Antisense strand to SEQ ID NO: 2572102
cuuguuacuguaauacacu

SEQ ID NO: 2572104 - RNA, 19 nt, Artificial Sequence
  Description of Artificial Sequence: Synthetic oligonucleotide
  Sense strand starting at position 1169 of SEQ ID NO: 1889000
gggugaagcagauaucuuc

SEQ ID NO: 2572105 - RNA, 19 nt, Artificial Sequence
  Description of Artificial Sequence: Synthetic oligonucleotide
  Antisense strand to SEQ ID NO: 2572104
gaagauaucugcuucaccc

SEQ ID NO: 2572106 - RNA, 19 nt, Artificial Sequence
  Description of Artificial Sequence: Synthetic oligonucleotide
  Sense strand starting at position 1206 of SEQ ID NO: 1889000
aaacaauugcaagggugaa

SEQ ID NO: 2572107 - RNA, 19 nt, Artificial Sequence
  Description of Artificial Sequence: Synthetic oligonucleotide
  Antisense strand to SEQ ID NO: 2572106
uucacccuugcaauuguuu

SEQ ID NO: 2572108 - RNA, 19 nt, Artificial Sequence
  Description of Artificial Sequence: Synthetic oligonucleotide
  Sense strand starting at position 1273 of SEQ ID NO: 1889000
agaggagcuuccucugauu

SEQ ID NO: 2572109 - RNA, 19 nt, Artificial Sequence
  Description of Artificial Sequence: Synthetic oligonucleotide
  Antisense strand to SEQ ID NO: 2572108
aaucagaggaagcuccucu

SEQ ID NO: 2572110 - RNA, 19 nt, Artificial Sequence
  Description of Artificial Sequence: Synthetic oligonucleotide
  Sense strand starting at position 1418 of SEQ ID NO: 1889000
gccuucuucucauuucgaa

SEQ ID NO: 2572111 - RNA, 19 nt, Artificial Sequence
  Description of Artificial Sequence: Synthetic oligonucleotide
  Antisense strand to SEQ ID NO: 2572110
uucgaaaugagaagaaggc

SEQ ID NO: 2572112 - RNA, 19 nt, Artificial Sequence
  Description of Artificial Sequence: Synthetic oligonucleotide
  Sense strand starting at position 1451 of SEQ ID NO: 1889000
ccuguuuguggaggaggau

SEQ ID NO: 2572113 - RNA, 19 nt, Artificial Sequence
  Description of Artificial Sequence: Synthetic oligonucleotide
  Antisense strand to SEQ ID NO: 2572112
auccuccuccacaaacagg

SEQ ID NO: 2572114 - RNA, 19 nt, Artificial Sequence
  Description of Artificial Sequence: Synthetic oligonucleotide
  Sense strand starting at position 1452 of SEQ ID NO: 1889000
cuguuuguggaggaggauu

SEQ ID NO: 2572115 - RNA, 19 nt, Artificial Sequence
  Description of Artificial Sequence: Synthetic oligonucleotide
  Antisense strand to SEQ ID NO: 2572114
aauccuccuccacaaacag

SEQ ID NO: 2572116 - RNA, 19 nt, Artificial Sequence
  Description of Artificial Sequence: Synthetic oligonucleotide
  Sense strand starting at position 1733 of SEQ ID NO: 1889000
cuugaauagucccuccaga

SEQ ID NO: 2572117 - RNA, 19 nt, Artificial Sequence
  Description of Artificial Sequence: Synthetic oligonucleotide
  Antisense strand to SEQ ID NO: 2572116
ucuggagggacuauucaag

SEQ ID NO: 2572118 - RNA, 19 nt, Artificial Sequence
  Description of Artificial Sequence: Synthetic oligonucleotide
  Sense strand starting at position 1989 of SEQ ID NO: 1889000
cugcguaugacgucacuau

SEQ ID NO: 2572119 - RNA, 19 nt, Artificial Sequence
  Description of Artificial Sequence: Synthetic oligonucleotide
  Antisense strand to SEQ ID NO: 2572118
auagugacgucauacgcag

SEQ ID NO: 2572120 - RNA, 19 nt, Artificial Sequence
  Description of Artificial Sequence: Synthetic oligonucleotide
  Sense strand starting at position 2347 of SEQ ID NO: 1889000
ccacgacuuugguuggaaa

SEQ ID NO: 2572121 - RNA, 19 nt, Artificial Sequence
  Description of Artificial Sequence: Synthetic oligonucleotide
  Antisense strand to SEQ ID NO: 2572120
uuuccaaccaaagucgugg

SEQ ID NO: 2572122 - RNA, 19 nt, Artificial Sequence
  Description of Artificial Sequence: Synthetic oligonucleotide
  Sense strand starting at position 2349 of SEQ ID NO: 1889000
acgacuuugguuggaaaga

SEQ ID NO: 2572123 - RNA, 19 nt, Artificial Sequence
  Description of Artificial Sequence: Synthetic oligonucleotide
  Antisense strand to SEQ ID NO: 2572122
ucuuuccaaccaaagucgu

SEQ ID NO: 2572124 - RNA, 19 nt, Artificial Sequence
  Description of Artificial Sequence: Synthetic oligonucleotide
  Sense strand starting at position 2498 of SEQ ID NO: 1889000
cuaauuauaucagcuggga

SEQ ID NO: 2572125 - RNA, 19 nt, Artificial Sequence
  Description of Artificial Sequence: Synthetic oligonucleotide
  Antisense strand to SEQ ID NO: 2572124
ucccagcugauauaauuag

SEQ ID NO: 2572126 - RNA, 19 nt, Artificial Sequence
  Description of Artificial Sequence: Synthetic oligonucleotide
  Sense strand starting at position 2501 of SEQ ID NO: 1889000
auuauaucagcugggaauc

SEQ ID NO: 2572127 - RNA, 19 nt, Artificial Sequence
  Description of Artificial Sequence: Synthetic oligonucleotide
  Antisense strand to SEQ ID NO: 2572126
gauucccagcugauauaau

SEQ ID NO: 2572128 - RNA, 19 nt, Artificial Sequence
  Description of Artificial Sequence: Synthetic oligonucleotide
  Sense strand starting at position 2502 of SEQ ID NO: 1889000
uuauaucagcugggaaucu

SEQ ID NO: 2572129 - RNA, 19 nt, Artificial Sequence
  Description of Artificial Sequence: Synthetic oligonucleotide
  Antisense strand to SEQ ID NO: 2572128
agauucccagcugauauaa

SEQ ID NO: 2572130 - RNA, 19 nt, Artificial Sequence
  Description of Artificial Sequence: Synthetic oligonucleotide
  Sense strand starting at position 2569 of SEQ ID NO: 1889000
ucggaugugaccuaaauau

SEQ ID NO: 2572131 - RNA, 19 nt, Artificial Sequence
  Description of Artificial Sequence: Synthetic oligonucleotide
  Antisense strand to SEQ ID NO: 2572130
auauuuaggucacauccga

SEQ ID NO: 2572132 - RNA, 19 nt, Artificial Sequence
  Description of Artificial Sequence: Synthetic oligonucleotide
  Sense strand starting at position 2829 of SEQ ID NO: 1889000
uuaugauaugcucaguuua

SEQ ID NO: 2572133 - RNA, 19 nt, Artificial Sequence
  Description of Artificial Sequence: Synthetic oligonucleotide
  Antisense strand to SEQ ID NO: 2572132
uaaacugagcauaucauaa

SEQ ID NO: 2572134 - RNA, 19 nt, Artificial Sequence
  Description of Artificial Sequence: Synthetic oligonucleotide
  Sense strand starting at position 3137 of SEQ ID NO: 1889000
uguaauuucuuaucugugu

SEQ ID NO: 2572135 - RNA, 19 nt, Artificial Sequence
  Description of Artificial Sequence: Synthetic oligonucleotide
  Antisense strand to SEQ ID NO: 2572134
acacagauaagaaauuaca

SEQ ID NO: 2572136 - RNA, 19 nt, Artificial Sequence
  Description of Artificial Sequence: Synthetic oligonucleotide
  Sense strand starting at position 3138 of SEQ ID NO: 1889000
guaauuucuuaucugugua

SEQ ID NO: 2572137 - RNA, 19 nt, Artificial Sequence
  Description of Artificial Sequence: Synthetic oligonucleotide
  Antisense strand to SEQ ID NO: 2572136
uacacagauaagaaauuac

SEQ ID NO: 2572138 - RNA, 19 nt, Artificial Sequence
  Description of Artificial Sequence: Synthetic oligonucleotide
  Sense strand starting at position 3141 of SEQ ID NO: 1889000
auuucuuaucuguguacac

SEQ ID NO: 2572139 - RNA, 19 nt, Artificial Sequence
  Description of Artificial Sequence: Synthetic oligonucleotide
  Antisense strand to SEQ ID NO: 2572138
guguacacagauaagaaau

SEQ ID NO: 2572140 - RNA, 19 nt, Artificial Sequence
  Description of Artificial Sequence: Synthetic oligonucleotide
  Sense strand starting at position 3148 of SEQ ID NO: 1889000
aucuguguacacuagauga

SEQ ID NO: 2572141 - RNA, 19 nt, Artificial Sequence
  Description of Artificial Sequence: Synthetic oligonucleotide
  Antisense strand to SEQ ID NO: 2572140
ucaucuaguguacacagau

SEQ ID NO: 2572142 - RNA, 19 nt, Artificial Sequence
  Description of Artificial Sequence: Synthetic oligonucleotide
  Sense strand starting at position 3150 of SEQ ID NO: 1889000
cuguguacacuagaugaca

SEQ ID NO: 2572143 - RNA, 19 nt, Artificial Sequence
  Description of Artificial Sequence: Synthetic oligonucleotide
  Antisense strand to SEQ ID NO: 2572142
ugucaucuaguguacacag

SEQ ID NO: 2572144 - RNA, 19 nt, Artificial Sequence
  Description of Artificial Sequence: Synthetic oligonucleotide
  Sense strand starting at position 3258 of SEQ ID NO: 1889000
uaaacuugggcuuguagaa

SEQ ID NO: 2572145 - RNA, 19 nt, Artificial Sequence
  Description of Artificial Sequence: Synthetic oligonucleotide
  Antisense strand to SEQ ID NO: 2572144
uucuacaagcccaaguuua

SEQ ID NO: 2572146 - RNA, 19 nt, Artificial Sequence
  Description of Artificial Sequence: Synthetic oligonucleotide
  Sense strand starting at position 3332 of SEQ ID NO: 1889000
auaacugacuucccugagu

SEQ ID NO: 2572147 - RNA, 19 nt, Artificial Sequence
  Description of Artificial Sequence: Synthetic oligonucleotide
  Antisense strand to SEQ ID NO: 2572146
acucagggaagucaguuau

SEQ ID NO: 2572148 - RNA, 19 nt, Artificial Sequence
  Description of Artificial Sequence: Synthetic oligonucleotide
  Sense strand starting at position 3334 of SEQ ID NO: 1889000
aacugacuucccugaguag

SEQ ID NO: 2572149 - RNA, 19 nt, Artificial Sequence
  Description of Artificial Sequence: Synthetic oligonucleotide
  Antisense strand to SEQ ID NO: 2572148
cuacucagggaagucaguu

SEQ ID NO: 2572150 - RNA, 19 nt, Artificial Sequence
  Description of Artificial Sequence: Synthetic oligonucleotide
  Sense strand starting at position 3343 of SEQ ID NO: 1889000
cccugaguagcugaucaaa

SEQ ID NO: 2572151 - RNA, 19 nt, Artificial Sequence
  Description of Artificial Sequence: Synthetic oligonucleotide
  Antisense strand to SEQ ID NO: 2572150
uuugaucagcuacucaggg

SEQ ID NO: 2572152 - RNA, 19 nt, Artificial Sequence
  Description of Artificial Sequence: Synthetic oligonucleotide
  Sense strand starting at position 3346 of SEQ ID NO: 1889000
ugaguagcugaucaaauuc

SEQ ID NO: 2572153 - RNA, 19 nt, Artificial Sequence
  Description of Artificial Sequence: Synthetic oligonucleotide
  Antisense strand to SEQ ID NO: 2572152
gaauuugaucagcuacuca

SEQ ID NO: 2572154 - RNA, 19 nt, Artificial Sequence
  Description of Artificial Sequence: Synthetic oligonucleotide
  Sense strand starting at position 3538 of SEQ ID NO: 1889000
cauugcagugguucgugua

SEQ ID NO: 2572155 - RNA, 19 nt, Artificial Sequence
  Description of Artificial Sequence: Synthetic oligonucleotide
  Antisense strand to SEQ ID NO: 2572154
uacacgaaccacugcaaug

SEQ ID NO: 2572156 - RNA, 19 nt, Artificial Sequence
  Description of Artificial Sequence: Synthetic oligonucleotide
  Sense strand starting at position 3563 of SEQ ID NO: 1889000
gugauaguccuccauggaa

SEQ ID NO: 2572157 - RNA, 19 nt, Artificial Sequence
  Description of Artificial Sequence: Synthetic oligonucleotide
  Antisense strand to SEQ ID NO: 2572156
uuccauggaggacuaucac

SEQ ID NO: 2572158 - RNA, 19 nt, Artificial Sequence
  Description of Artificial Sequence: Synthetic oligonucleotide
  Sense strand starting at position 3565 of SEQ ID NO: 1889000
gauaguccuccauggaaua

SEQ ID NO: 2572159 - RNA, 19 nt, Artificial Sequence
  Description of Artificial Sequence: Synthetic oligonucleotide
  Antisense strand to SEQ ID NO: 2572158
uauuccauggaggacuauc

SEQ ID NO: 2572160 - RNA, 19 nt, Artificial Sequence
  Description of Artificial Sequence: Synthetic oligonucleotide
  Sense strand starting at position 3578 of SEQ ID NO: 1889000
ggaauagagucuuucuuac

SEQ ID NO: 2572161 - RNA, 19 nt, Artificial Sequence
  Description of Artificial Sequence: Synthetic oligonucleotide
  Antisense strand to SEQ ID NO: 2572160
guaagaaagacucuauucc

SEQ ID NO: 2572162 - RNA, 19 nt, Artificial Sequence
  Description of Artificial Sequence: Synthetic oligonucleotide
  Sense strand starting at position 3639 of SEQ ID NO: 1889000
uuggcugugacucagauaa

SEQ ID NO: 2572163 - RNA, 19 nt, Artificial Sequence
  Description of Artificial Sequence: Synthetic oligonucleotide
  Antisense strand to SEQ ID NO: 2572162
uuaucugagucacagccaa

SEQ ID NO: 2572164 - RNA, 19 nt, Artificial Sequence
  Description of Artificial Sequence: Synthetic oligonucleotide
  Sense strand starting at position 3736 of SEQ ID NO: 1889000
uuggcugacugaucaggaa

SEQ ID NO: 2572165 - RNA, 19 nt, Artificial Sequence
  Description of Artificial Sequence: Synthetic oligonucleotide
  Antisense strand to SEQ ID NO: 2572164
uuccugaucagucagccaa

SEQ ID NO: 2572166 - RNA, 19 nt, Artificial Sequence
  Description of Artificial Sequence: Synthetic oligonucleotide
  Sense strand starting at position 3748 of SEQ ID NO: 1889000
ucaggaauccauugguaag

SEQ ID NO: 2572167 - RNA, 19 nt, Artificial Sequence
  Description of Artificial Sequence: Synthetic oligonucleotide
  Antisense strand to SEQ ID NO: 2572166
cuuaccaauggauuccuga

SEQ ID NO: 2572168 - RNA, 19 nt, Artificial Sequence
  Description of Artificial Sequence: Synthetic oligonucleotide
  Sense strand starting at position 3833 of SEQ ID NO: 1889000
uuaugauucugaguauacu

SEQ ID NO: 2572169 - RNA, 19 nt, Artificial Sequence
  Description of Artificial Sequence: Synthetic oligonucleotide
  Antisense strand to SEQ ID NO: 2572168
aguauacucagaaucauaa

SEQ ID NO: 2572170 - RNA, 19 nt, Artificial Sequence
  Description of Artificial Sequence: Synthetic oligonucleotide
  Sense strand starting at position 163 of SEQ ID NO: 1889001
ugcaaagucuuacugauaa

SEQ ID NO: 2572171 - RNA, 19 nt, Artificial Sequence
  Description of Artificial Sequence: Synthetic oligonucleotide
  Antisense strand to SEQ ID NO: 2572170
uuaucaguaagacuuugca

SEQ ID NO: 2572172 - RNA, 19 nt, Artificial Sequence
  Description of Artificial Sequence: Synthetic oligonucleotide
  Sense strand starting at position 196 of SEQ ID NO: 1889001
ggaugugucagagaacuuc

SEQ ID NO: 2572173 - RNA, 19 nt, Artificial Sequence
  Description of Artificial Sequence: Synthetic oligonucleotide
  Antisense strand to SEQ ID NO: 2572172
gaaguucucugacacaucc

SEQ ID NO: 2572174 - RNA, 19 nt, Artificial Sequence
  Description of Artificial Sequence: Synthetic oligonucleotide
  Sense strand starting at position 292 of SEQ ID NO: 1889001
uucuuaaaggaguauguuu

SEQ ID NO: 2572175 - RNA, 19 nt, Artificial Sequence
  Description of Artificial Sequence: Synthetic oligonucleotide
  Antisense strand to SEQ ID NO: 2572174
aaacauacuccuuuaagaa

SEQ ID NO: 2572176 - RNA, 19 nt, Artificial Sequence
  Description of Artificial Sequence: Synthetic oligonucleotide
  Sense strand starting at position 330 of SEQ ID NO: 1889001
guaaacuguuacuucuuaa

SEQ ID NO: 2572177 - RNA, 19 nt, Artificial Sequence
  Description of Artificial Sequence: Synthetic oligonucleotide
  Antisense strand to SEQ ID NO: 2572176
uuaagaaguaacaguuuac

SEQ ID NO: 2572178 - RNA, 19 nt, Artificial Sequence
  Description of Artificial Sequence: Synthetic oligonucleotide
  Sense strand starting at position 412 of SEQ ID NO: 1889001
cugauaaggugacuuuauu

SEQ ID NO: 2572179 - RNA, 19 nt, Artificial Sequence
  Description of Artificial Sequence: Synthetic oligonucleotide
  Antisense strand to SEQ ID NO: 2572178
aauaaagucaccuuaucag

SEQ ID NO: 2572180 - RNA, 19 nt, Artificial Sequence
  Description of Artificial Sequence: Synthetic oligonucleotide
  Sense strand starting at position 437 of SEQ ID NO: 1889001
ugugguuuguugauguuga

SEQ ID NO: 2572181 - RNA, 19 nt, Artificial Sequence
  Description of Artificial Sequence: Synthetic oligonucleotide
  Antisense strand to SEQ ID NO: 2572180
ucaacaucaacaaaccaca

SEQ ID NO: 2572182 - RNA, 19 nt, Artificial Sequence
  Description of Artificial Sequence: Synthetic oligonucleotide
  Sense strand starting at position 657 of SEQ ID NO: 1889001
uccuacccaugguugaaau

SEQ ID NO: 2572183 - RNA, 19 nt, Artificial Sequence
  Description of Artificial Sequence: Synthetic oligonucleotide
  Antisense strand to SEQ ID NO: 2572182
auuucaaccauggguagga

SEQ ID NO: 2572184 - RNA, 19 nt, Artificial Sequence
  Description of Artificial Sequence: Synthetic oligonucleotide
  Sense strand starting at position 658 of SEQ ID NO: 1889001
ccuacccaugguugaaauu

SEQ ID NO: 2572185 - RNA, 19 nt, Artificial Sequence
  Description of Artificial Sequence: Synthetic oligonucleotide
  Antisense strand to SEQ ID NO: 2572184
aauuucaaccauggguagg

SEQ ID NO: 2572186 - RNA, 19 nt, Artificial Sequence
  Description of Artificial Sequence: Synthetic oligonucleotide
  Sense strand starting at position 749 of SEQ ID NO: 1889001
cuguguaauccucaaaguu

SEQ ID NO: 2572187 - RNA, 19 nt, Artificial Sequence
  Description of Artificial Sequence: Synthetic oligonucleotide
  Antisense strand to SEQ ID NO: 2572186
aacuuugaggauuacacag

SEQ ID NO: 2572188 - RNA, 19 nt, Artificial Sequence
  Description of Artificial Sequence: Synthetic oligonucleotide
  Sense strand starting at position 816 of SEQ ID NO: 1889001
augguuaauuaucucugau

SEQ ID NO: 2572189 - RNA, 19 nt, Artificial Sequence
  Description of Artificial Sequence: Synthetic oligonucleotide
  Antisense strand to SEQ ID NO: 2572188
aucagagauaauuaaccau

SEQ ID NO: 2572190 - RNA, 19 nt, Artificial Sequence
  Description of Artificial Sequence: Synthetic oligonucleotide
  Sense strand starting at position 829 of SEQ ID NO: 1889001
ucugaugcuccugaaaggu

SEQ ID NO: 2572191 - RNA, 19 nt, Artificial Sequence
  Description of Artificial Sequence: Synthetic oligonucleotide
  Antisense strand to SEQ ID NO: 2572190
accuuucaggagcaucaga

SEQ ID NO: 2572192 - RNA, 19 nt, Artificial Sequence
  Description of Artificial Sequence: Synthetic oligonucleotide
  Sense strand starting at position 886 of SEQ ID NO: 1889001
uuaagaggaucugugcaga

SEQ ID NO: 2572193 - RNA, 19 nt, Artificial Sequence
  Description of Artificial Sequence: Synthetic oligonucleotide
  Antisense strand to SEQ ID NO: 2572192
ucugcacagauccucuuaa

SEQ ID NO: 2572194 - RNA, 19 nt, Artificial Sequence
  Description of Artificial Sequence: Synthetic oligonucleotide
  Sense strand starting at position 891 of SEQ ID NO: 1889001
aggaucugugcagauuauu

SEQ ID NO: 2572195 - RNA, 19 nt, Artificial Sequence
  Description of Artificial Sequence: Synthetic oligonucleotide
  Antisense strand to SEQ ID NO: 2572194
aauaaucugcacagauccu

SEQ ID NO: 2572196 - RNA, 19 nt, Artificial Sequence
  Description of Artificial Sequence: Synthetic oligonucleotide
  Sense strand starting at position 899 of SEQ ID NO: 1889001
ugcagauuauuaucccaga

SEQ ID NO: 2572197 - RNA, 19 nt, Artificial Sequence
  Description of Artificial Sequence: Synthetic oligonucleotide
  Antisense strand to SEQ ID NO: 2572196
ucugggauaauaaucugca

SEQ ID NO: 2572198 - RNA, 19 nt, Artificial Sequence
  Description of Artificial Sequence: Synthetic oligonucleotide
  Sense strand starting at position 900 of SEQ ID NO: 1889001
gcagauuauuaucccagag

SEQ ID NO: 2572199 - RNA, 19 nt, Artificial Sequence
  Description of Artificial Sequence: Synthetic oligonucleotide
  Antisense strand to SEQ ID NO: 2572198
cucugggauaauaaucugc

SEQ ID NO: 2572200 - RNA, 19 nt, Artificial Sequence
  Description of Artificial Sequence: Synthetic oligonucleotide
  Sense strand starting at position 1010 of SEQ ID NO: 1889001
guaagcaugcguccaucuu

SEQ ID NO: 2572201 - RNA, 19 nt, Artificial Sequence
  Description of Artificial Sequence: Synthetic oligonucleotide
  Antisense strand to SEQ ID NO: 2572200
aagauggacgcaugcuuac

SEQ ID NO: 2572202 - RNA, 19 nt, Artificial Sequence
  Description of Artificial Sequence: Synthetic oligonucleotide
  Sense strand starting at position 1053 of SEQ ID NO: 1889001
gaaguagagccauguauau

SEQ ID NO: 2572203 - RNA, 19 nt, Artificial Sequence
  Description of Artificial Sequence: Synthetic oligonucleotide
  Antisense strand to SEQ ID NO: 2572202
auauacauggcucuacuuc

SEQ ID NO: 2572204 - RNA, 19 nt, Artificial Sequence
  Description of Artificial Sequence: Synthetic oligonucleotide
  Sense strand starting at position 1186 of SEQ ID NO: 1889001
gucagucguagcuaaauuu

SEQ ID NO: 2572205 - RNA, 19 nt, Artificial Sequence
  Description of Artificial Sequence: Synthetic oligonucleotide
  Antisense strand to SEQ ID NO: 2572204
aaauuuagcuacgacugac

SEQ ID NO: 2572206 - RNA, 19 nt, Artificial Sequence
  Description of Artificial Sequence: Synthetic oligonucleotide
  Sense strand starting at position 1223 of SEQ ID NO: 1889001
ugaagaaauuuagaaaguc

SEQ ID NO: 2572207 - RNA, 19 nt, Artificial Sequence
  Description of Artificial Sequence: Synthetic oligonucleotide
  Antisense strand to SEQ ID NO: 2572206
gacuuucuaaauuucuuca

SEQ ID NO: 2572208 - RNA, 19 nt, Artificial Sequence
  Description of Artificial Sequence: Synthetic oligonucleotide
  Sense strand starting at position 1273 of SEQ ID NO: 1889001
ucacuaguacgauaguauu

SEQ ID NO: 2572209 - RNA, 19 nt, Artificial Sequence
  Description of Artificial Sequence: Synthetic oligonucleotide
  Antisense strand to SEQ ID NO: 2572208
aauacuaucguacuaguga

SEQ ID NO: 2572210 - RNA, 19 nt, Artificial Sequence
  Description of Artificial Sequence: Synthetic oligonucleotide
  Sense strand starting at position 1330 of SEQ ID NO: 1889001
ucaugaaaucaugguuguc

SEQ ID NO: 2572211 - RNA, 19 nt, Artificial Sequence
  Description of Artificial Sequence: Synthetic oligonucleotide
  Antisense strand to SEQ ID NO: 2572210
gacaaccaugauuucauga

SEQ ID NO: 2572212 - RNA, 19 nt, Artificial Sequence
  Description of Artificial Sequence: Synthetic oligonucleotide
  Sense strand starting at position 1332 of SEQ ID NO: 1889001
augaaaucaugguugucuu

SEQ ID NO: 2572213 - RNA, 19 nt, Artificial Sequence
  Description of Artificial Sequence: Synthetic oligonucleotide
  Antisense strand to SEQ ID NO: 2572212
aagacaaccaugauuucau

SEQ ID NO: 2572214 - RNA, 19 nt, Artificial Sequence
  Description of Artificial Sequence: Synthetic oligonucleotide
  Sense strand starting at position 1403 of SEQ ID NO: 1889001
gugcuuaaucacgaaauau

SEQ ID NO: 2572215 - RNA, 19 nt, Artificial Sequence
  Description of Artificial Sequence: Synthetic oligonucleotide
  Antisense strand to SEQ ID NO: 2572214
auauuucgugauuaagcac

SEQ ID NO: 2572216 - RNA, 19 nt, Artificial Sequence
  Description of Artificial Sequence: Synthetic oligonucleotide
  Sense strand starting at position 1499 of SEQ ID NO: 1889001
ucgagaugucagugauaag

SEQ ID NO: 2572217 - RNA, 19 nt, Artificial Sequence
  Description of Artificial Sequence: Synthetic oligonucleotide
  Antisense strand to SEQ ID NO: 2572216
cuuaucacugacaucucga

SEQ ID NO: 2572218 - RNA, 19 nt, Artificial Sequence
  Description of Artificial Sequence: Synthetic oligonucleotide
  Sense strand starting at position 1500 of SEQ ID NO: 1889001
cgagaugucagugauaaga

SEQ ID NO: 2572219 - RNA, 19 nt, Artificial Sequence
  Description of Artificial Sequence: Synthetic oligonucleotide
  Antisense strand to SEQ ID NO: 2572218
ucuuaucacugacaucucg

SEQ ID NO: 2572220 - RNA, 19 nt, Artificial Sequence
  Description of Artificial Sequence: Synthetic oligonucleotide
  Sense strand starting at position 1853 of SEQ ID NO: 1889001
uuugaacuugcugagcuau

SEQ ID NO: 2572221 - RNA, 19 nt, Artificial Sequence
  Description of Artificial Sequence: Synthetic oligonucleotide
  Antisense strand to SEQ ID NO: 2572220
auagcucagcaaguucaaa

SEQ ID NO: 2572222 - RNA, 19 nt, Artificial Sequence
  Description of Artificial Sequence: Synthetic oligonucleotide
  Sense strand starting at position 1859 of SEQ ID NO: 1889001
cuugcugagcuauaagaag

SEQ ID NO: 2572223 - RNA, 19 nt, Artificial Sequence
  Description of Artificial Sequence: Synthetic oligonucleotide
  Antisense strand to SEQ ID NO: 2572222
cuucuuauagcucagcaag

SEQ ID NO: 2572224 - RNA, 19 nt, Artificial Sequence
  Description of Artificial Sequence: Synthetic oligonucleotide
  Sense strand starting at position 2532 of SEQ ID NO: 1889001
gugucauugcaagcugucu

SEQ ID NO: 2572225 - RNA, 19 nt, Artificial Sequence
  Description of Artificial Sequence: Synthetic oligonucleotide
  Antisense strand to SEQ ID NO: 2572224
agacagcuugcaaugacac

SEQ ID NO: 2572226 - RNA, 19 nt, Artificial Sequence
  Description of Artificial Sequence: Synthetic oligonucleotide
  Sense strand starting at position 2694 of SEQ ID NO: 1889001
gggugcagcucauuugaau

SEQ ID NO: 2572227 - RNA, 19 nt, Artificial Sequence
  Description of Artificial Sequence: Synthetic oligonucleotide
  Antisense strand to SEQ ID NO: 2572226
auucaaaugagcugcaccc

SEQ ID NO: 2572228 - RNA, 19 nt, Artificial Sequence
  Description of Artificial Sequence: Synthetic oligonucleotide
  Sense strand starting at position 2736 of SEQ ID NO: 1889001
auagcaucaugaucagaug

SEQ ID NO: 2572229 - RNA, 19 nt, Artificial Sequence
  Description of Artificial Sequence: Synthetic oligonucleotide
  Antisense strand to SEQ ID NO: 2572228
caucugaucaugaugcuau

SEQ ID NO: 2572230 - RNA, 19 nt, Artificial Sequence
  Description of Artificial Sequence: Synthetic oligonucleotide
  Sense strand starting at position 2784 of SEQ ID NO: 1889001
guugaagaccuuuaugcuc

SEQ ID NO: 2572231 - RNA, 19 nt, Artificial Sequence
  Description of Artificial Sequence: Synthetic oligonucleotide
  Antisense strand to SEQ ID NO: 2572230
gagcauaaaggucuucaac

SEQ ID NO: 2572232 - RNA, 19 nt, Artificial Sequence
  Description of Artificial Sequence: Synthetic oligonucleotide
  Sense strand starting at position 2789 of SEQ ID NO: 1889001
agaccuuuaugcuccugau

SEQ ID NO: 2572233 - RNA, 19 nt, Artificial Sequence
  Description of Artificial Sequence: Synthetic oligonucleotide
  Antisense strand to SEQ ID NO: 2572232
aucaggagcauaaaggucu

SEQ ID NO: 2572234 - RNA, 19 nt, Artificial Sequence
  Description of Artificial Sequence: Synthetic oligonucleotide
  Sense strand starting at position 2837 of SEQ ID NO: 1889001
ucaugugcucaugggaaca

SEQ ID NO: 2572235 - RNA, 19 nt, Artificial Sequence
  Description of Artificial Sequence: Synthetic oligonucleotide
  Antisense strand to SEQ ID NO: 2572234
uguucccaugagcacauga

SEQ ID NO: 2572236 - RNA, 19 nt, Artificial Sequence
  Description of Artificial Sequence: Synthetic oligonucleotide
  Sense strand starting at position 3609 of SEQ ID NO: 1889001
ugcugagauguugaaugca

SEQ ID NO: 2572237 - RNA, 19 nt, Artificial Sequence
  Description of Artificial Sequence: Synthetic oligonucleotide
  Antisense strand to SEQ ID NO: 2572236
ugcauucaacaucucagca

SEQ ID NO: 2572238 - RNA, 19 nt, Artificial Sequence
  Description of Artificial Sequence: Synthetic oligonucleotide
  Sense strand starting at position 3825 of SEQ ID NO: 1889001
ugcagucugcuaguuuauu

SEQ ID NO: 2572239 - RNA, 19 nt, Artificial Sequence
  Description of Artificial Sequence: Synthetic oligonucleotide
  Antisense strand to SEQ ID NO: 2572238
aauaaacuagcagacugca

SEQ ID NO: 2572240 - RNA, 19 nt, Artificial Sequence
  Description of Artificial Sequence: Synthetic oligonucleotide
  Sense strand starting at position 3861 of SEQ ID NO: 1889001
augauaguuccagguuacu

SEQ ID NO: 2572241 - RNA, 19 nt, Artificial Sequence
  Description of Artificial Sequence: Synthetic oligonucleotide
  Antisense strand to SEQ ID NO: 2572240
aguaaccuggaacuaucau

SEQ ID NO: 2572242 - RNA, 19 nt, Artificial Sequence
  Description of Artificial Sequence: Synthetic oligonucleotide
  Sense strand starting at position 3885 of SEQ ID NO: 1889001
aggugugaucucugaagau

SEQ ID NO: 2572243 - RNA, 19 nt, Artificial Sequence
  Description of Artificial Sequence: Synthetic oligonucleotide
  Antisense strand to SEQ ID NO: 2572242
aucuucagagaucacaccu

SEQ ID NO: 2572244 - RNA, 19 nt, Artificial Sequence
  Description of Artificial Sequence: Synthetic oligonucleotide
  Sense strand starting at position 3889 of SEQ ID NO: 1889001
gugaucucugaagaugugu

SEQ ID NO: 2572245 - RNA, 19 nt, Artificial Sequence
  Description of Artificial Sequence: Synthetic oligonucleotide
  Antisense strand to SEQ ID NO: 2572244
acacaucuucagagaucac

SEQ ID NO: 2572246 - RNA, 19 nt, Artificial Sequence
  Description of Artificial Sequence: Synthetic oligonucleotide
  Sense strand starting at position 3906 of SEQ ID NO: 1889001
guguguuguagguuaguua

SEQ ID NO: 2572247 - RNA, 19 nt, Artificial Sequence
  Description of Artificial Sequence: Synthetic oligonucleotide
  Antisense strand to SEQ ID NO: 2572246
uaacuaaccuacaacacac

SEQ ID NO: 2572248 - RNA, 19 nt, Artificial Sequence
  Description of Artificial Sequence: Synthetic oligonucleotide
  Sense strand starting at position 3953 of SEQ ID NO: 1889001
gacgguguggauuaaacaa

SEQ ID NO: 2572249 - RNA, 19 nt, Artificial Sequence
  Description of Artificial Sequence: Synthetic oligonucleotide
  Antisense strand to SEQ ID NO: 2572248
uuguuuaauccacaccguc

SEQ ID NO: 2572250 - RNA, 19 nt, Artificial Sequence
  Description of Artificial Sequence: Synthetic oligonucleotide
  Sense strand starting at position 96 of SEQ ID NO: 1889002
cuugcuauuccugaggcua

SEQ ID NO: 2572251 - RNA, 19 nt, Artificial Sequence
  Description of Artificial Sequence: Synthetic oligonucleotide
  Antisense strand to SEQ ID NO: 2572250
uagccucaggaauagcaag

SEQ ID NO: 2572252 - RNA, 19 nt, Artificial Sequence
  Description of Artificial Sequence: Synthetic oligonucleotide
  Sense strand starting at position 385 of SEQ ID NO: 1889002
gcaacugaagcauaauuau

SEQ ID NO: 2572253 - RNA, 19 nt, Artificial Sequence
  Description of Artificial Sequence: Synthetic oligonucleotide
  Antisense strand to SEQ ID NO: 2572252
auaauuaugcuucaguugc

SEQ ID NO: 2572254 - RNA, 19 nt, Artificial Sequence
  Description of Artificial Sequence: Synthetic oligonucleotide
  Sense strand starting at position 510 of SEQ ID NO: 1889002
ugauacaccugucuagaau

SEQ ID NO: 2572255 - RNA, 19 nt, Artificial Sequence
  Description of Artificial Sequence: Synthetic oligonucleotide
  Antisense strand to SEQ ID NO: 2572254
auucuagacagguguauca

SEQ ID NO: 2572256 - RNA, 19 nt, Artificial Sequence
  Description of Artificial Sequence: Synthetic oligonucleotide
  Sense strand starting at position 624 of SEQ ID NO: 1889002
uaagaauuguaaguaggca

SEQ ID NO: 2572257 - RNA, 19 nt, Artificial Sequence
  Description of Artificial Sequence: Synthetic oligonucleotide
  Antisense strand to SEQ ID NO: 2572256
ugccuacuuacaauucuua

SEQ ID NO: 2572258 - RNA, 19 nt, Artificial Sequence
  Description of Artificial Sequence: Synthetic oligonucleotide
  Sense strand starting at position 651 of SEQ ID NO: 1889002
ugacuaaagcuccaguauc

SEQ ID NO: 2572259 - RNA, 19 nt, Artificial Sequence
  Description of Artificial Sequence: Synthetic oligonucleotide
  Antisense strand to SEQ ID NO: 2572258
gauacuggagcuuuaguca

SEQ ID NO: 2572260 - RNA, 19 nt, Artificial Sequence
  Description of Artificial Sequence: Synthetic oligonucleotide
  Sense strand starting at position 699 of SEQ ID NO: 1889002
gagcccuugcaaugagaau

SEQ ID NO: 2572261 - RNA, 19 nt, Artificial Sequence
  Description of Artificial Sequence: Synthetic oligonucleotide
  Antisense strand to SEQ ID NO: 2572260
auucucauugcaagggcuc

SEQ ID NO: 2572262 - RNA, 19 nt, Artificial Sequence
  Description of Artificial Sequence: Synthetic oligonucleotide
  Sense strand starting at position 705 of SEQ ID NO: 1889002
uugcaaugagaauguauuc

SEQ ID NO: 2572263 - RNA, 19 nt, Artificial Sequence
  Description of Artificial Sequence: Synthetic oligonucleotide
  Antisense strand to SEQ ID NO: 2572262
gaauacauucucauugcaa

SEQ ID NO: 2572264 - RNA, 19 nt, Artificial Sequence
  Description of Artificial Sequence: Synthetic oligonucleotide
  Sense strand starting at position 710 of SEQ ID NO: 1889002
augagaauguauuccucuu

SEQ ID NO: 2572265 - RNA, 19 nt, Artificial Sequence
  Description of Artificial Sequence: Synthetic oligonucleotide
  Antisense strand to SEQ ID NO: 2572264
aagaggaauacauucucau

SEQ ID NO: 2572266 - RNA, 19 nt, Artificial Sequence
  Description of Artificial Sequence: Synthetic oligonucleotide
  Sense strand starting at position 723 of SEQ ID NO: 1889002
ccucuuuaaggcugauacu

SEQ ID NO: 2572267 - RNA, 19 nt, Artificial Sequence
  Description of Artificial Sequence: Synthetic oligonucleotide
  Antisense strand to SEQ ID NO: 2572266
aguaucagccuuaaagagg

SEQ ID NO: 2572268 - RNA, 19 nt, Artificial Sequence
  Description of Artificial Sequence: Synthetic oligonucleotide
  Sense strand starting at position 733 of SEQ ID NO: 1889002
gcugauacugguggaacua

SEQ ID NO: 2572269 - RNA, 19 nt, Artificial Sequence
  Description of Artificial Sequence: Synthetic oligonucleotide
  Antisense strand to SEQ ID NO: 2572268
uaguuccaccaguaucagc

SEQ ID NO: 2572270 - RNA, 19 nt, Artificial Sequence
  Description of Artificial Sequence: Synthetic oligonucleotide
  Sense strand starting at position 744 of SEQ ID NO: 1889002
uggaacuaauaccagauaa

SEQ ID NO: 2572271 - RNA, 19 nt, Artificial Sequence
  Description of Artificial Sequence: Synthetic oligonucleotide
  Antisense strand to SEQ ID NO: 2572270
uuaucugguauuaguucca

SEQ ID NO: 2572272 - RNA, 19 nt, Artificial Sequence
  Description of Artificial Sequence: Synthetic oligonucleotide
  Sense strand starting at position 754 of SEQ ID NO: 1889002
accagauaauccuagaaga

SEQ ID NO: 2572273 - RNA, 19 nt, Artificial Sequence
  Description of Artificial Sequence: Synthetic oligonucleotide
  Antisense strand to SEQ ID NO: 2572272
ucuucuaggauuaucuggu

SEQ ID NO: 2572274 - RNA, 19 nt, Artificial Sequence
  Description of Artificial Sequence: Synthetic oligonucleotide
  Sense strand starting at position 935 of SEQ ID NO: 1889002
caggguucagauggagagu

SEQ ID NO: 2572275 - RNA, 19 nt, Artificial Sequence
  Description of Artificial Sequence: Synthetic oligonucleotide
  Antisense strand to SEQ ID NO: 2572274
acucuccaucugaacccug

SEQ ID NO: 2572276 - RNA, 19 nt, Artificial Sequence
  Description of Artificial Sequence: Synthetic oligonucleotide
  Sense strand starting at position 1084 of SEQ ID NO: 1889002
acauaagccuaaguugaga

SEQ ID NO: 2572277 - RNA, 19 nt, Artificial Sequence
  Description of Artificial Sequence: Synthetic oligonucleotide
  Antisense strand to SEQ ID NO: 2572276
ucucaacuuaggcuuaugu

SEQ ID NO: 2572278 - RNA, 19 nt, Artificial Sequence
  Description of Artificial Sequence: Synthetic oligonucleotide
  Sense strand starting at position 1092 of SEQ ID NO: 1889002
cuaaguugagacugugaag

SEQ ID NO: 2572279 - RNA, 19 nt, Artificial Sequence
  Description of Artificial Sequence: Synthetic oligonucleotide
  Antisense strand to SEQ ID NO: 2572278
cuucacagucucaacuuag

SEQ ID NO: 2572280 - RNA, 19 nt, Artificial Sequence
  Description of Artificial Sequence: Synthetic oligonucleotide
  Sense strand starting at position 1259 of SEQ ID NO: 1889002
guuagugucacucagggaa

SEQ ID NO: 2572281 - RNA, 19 nt, Artificial Sequence
  Description of Artificial Sequence: Synthetic oligonucleotide
  Antisense strand to SEQ ID NO: 2572280
uucccugagugacacuaac

SEQ ID NO: 2572282 - RNA, 19 nt, Artificial Sequence
  Description of Artificial Sequence: Synthetic oligonucleotide
  Sense strand starting at position 1516 of SEQ ID NO: 1889002
cucacuucucuggaguaag

SEQ ID NO: 2572283 - RNA, 19 nt, Artificial Sequence
  Description of Artificial Sequence: Synthetic oligonucleotide
  Antisense strand to SEQ ID NO: 2572282
cuuacuccagagaagugag

SEQ ID NO: 2572284 - RNA, 19 nt, Artificial Sequence
  Description of Artificial Sequence: Synthetic oligonucleotide
  Sense strand starting at position 2015 of SEQ ID NO: 1889002
uggugagucacagauaccu

SEQ ID NO: 2572285 - RNA, 19 nt, Artificial Sequence
  Description of Artificial Sequence: Synthetic oligonucleotide
  Antisense strand to SEQ ID NO: 2572284
agguaucugugacucacca

SEQ ID NO: 2572286 - RNA, 19 nt, Artificial Sequence
  Description of Artificial Sequence: Synthetic oligonucleotide
  Sense strand starting at position 2040 of SEQ ID NO: 1889002
acaagcauguucccugaaa

SEQ ID NO: 2572287 - RNA, 19 nt, Artificial Sequence
  Description of Artificial Sequence: Synthetic oligonucleotide
  Antisense strand to SEQ ID NO: 2572286
uuucagggaacaugcuugu

SEQ ID NO: 2572288 - RNA, 19 nt, Artificial Sequence
  Description of Artificial Sequence: Synthetic oligonucleotide
  Sense strand starting at position 2591 of SEQ ID NO: 1889002
ugacuaacuggaugcaaga

SEQ ID NO: 2572289 - RNA, 19 nt, Artificial Sequence
  Description of Artificial Sequence: Synthetic oligonucleotide
  Antisense strand to SEQ ID NO: 2572288
ucuugcauccaguuaguca

SEQ ID NO: 2572290 - RNA, 19 nt, Artificial Sequence
  Description of Artificial Sequence: Synthetic oligonucleotide
  Sense strand starting at position 2749 of SEQ ID NO: 1889002
acagcuuucuauuuauguu

SEQ ID NO: 2572291 - RNA, 19 nt, Artificial Sequence
  Description of Artificial Sequence: Synthetic oligonucleotide
  Antisense strand to SEQ ID NO: 2572290
aacauaaauagaaagcugu

SEQ ID NO: 2572292 - RNA, 19 nt, Artificial Sequence
  Description of Artificial Sequence: Synthetic oligonucleotide
  Sense strand starting at position 2755 of SEQ ID NO: 1889002
uucuauuuauguuuccagu

SEQ ID NO: 2572293 - RNA, 19 nt, Artificial Sequence
  Description of Artificial Sequence: Synthetic oligonucleotide
  Antisense strand to SEQ ID NO: 2572292
acuggaaacauaaauagaa

SEQ ID NO: 2572294 - RNA, 19 nt, Artificial Sequence
  Description of Artificial Sequence: Synthetic oligonucleotide
  Sense strand starting at position 2757 of SEQ ID NO: 1889002
cuauuuauguuuccagugu

SEQ ID NO: 2572295 - RNA, 19 nt, Artificial Sequence
  Description of Artificial Sequence: Synthetic oligonucleotide
  Antisense strand to SEQ ID NO: 2572294
acacuggaaacauaaauag

SEQ ID NO: 2572296 - RNA, 19 nt, Artificial Sequence
  Description of Artificial Sequence: Synthetic oligonucleotide
  Sense strand starting at position 2772 of SEQ ID NO: 1889002
guguccuauugugcauuua

SEQ ID NO: 2572297 - RNA, 19 nt, Artificial Sequence
  Description of Artificial Sequence: Synthetic oligonucleotide
  Antisense strand to SEQ ID NO: 2572296
uaaaugcacaauaggacac

SEQ ID NO: 2572298 - RNA, 19 nt, Artificial Sequence
  Description of Artificial Sequence: Synthetic oligonucleotide
  Sense strand starting at position 2773 of SEQ ID NO: 1889002
uguccuauugugcauuuau

SEQ ID NO: 2572299 - RNA, 19 nt, Artificial Sequence
  Description of Artificial Sequence: Synthetic oligonucleotide
  Antisense strand to SEQ ID NO: 2572298
auaaaugcacaauaggaca

SEQ ID NO: 2572300 - RNA, 19 nt, Artificial Sequence
  Description of Artificial Sequence: Synthetic oligonucleotide
  Sense strand starting at position 3446 of SEQ ID NO: 1889002
augugaauuugucaacaga

SEQ ID NO: 2572301 - RNA, 19 nt, Artificial Sequence
  Description of Artificial Sequence: Synthetic oligonucleotide
  Antisense strand to SEQ ID NO: 2572300
ucuguugacaaauucacau

SEQ ID NO: 2572302 - RNA, 19 nt, Artificial Sequence
  Description of Artificial Sequence: Synthetic oligonucleotide
  Sense strand starting at position 3481 of SEQ ID NO: 1889002
acaguuggcccucaauguu

SEQ ID NO: 2572303 - RNA, 19 nt, Artificial Sequence
  Description of Artificial Sequence: Synthetic oligonucleotide
  Antisense strand to SEQ ID NO: 2572302
aacauugagggccaacugu

SEQ ID NO: 2572304 - RNA, 19 nt, Artificial Sequence
  Description of Artificial Sequence: Synthetic oligonucleotide
  Sense strand starting at position 3489 of SEQ ID NO: 1889002
cccucaauguuugucagaa

SEQ ID NO: 2572305 - RNA, 19 nt, Artificial Sequence
  Description of Artificial Sequence: Synthetic oligonucleotide
  Antisense strand to SEQ ID NO: 2572304
uucugacaaacauugaggg

SEQ ID NO: 2572306 - RNA, 19 nt, Artificial Sequence
  Description of Artificial Sequence: Synthetic oligonucleotide
  Sense strand starting at position 3490 of SEQ ID NO: 1889002
ccucaauguuugucagaac

SEQ ID NO: 2572307 - RNA, 19 nt, Artificial Sequence
  Description of Artificial Sequence: Synthetic oligonucleotide
  Antisense strand to SEQ ID NO: 2572306
guucugacaaacauugagg

SEQ ID NO: 2572308 - RNA, 19 nt, Artificial Sequence
  Description of Artificial Sequence: Synthetic oligonucleotide
  Sense strand starting at position 3532 of SEQ ID NO: 1889002
uucugcuugcauuauggau

SEQ ID NO: 2572309 - RNA, 19 nt, Artificial Sequence
  Description of Artificial Sequence: Synthetic oligonucleotide
  Antisense strand to SEQ ID NO: 2572308
auccauaaugcaagcagaa

SEQ ID NO: 2572310 - RNA, 19 nt, Artificial Sequence
  Description of Artificial Sequence: Synthetic oligonucleotide
  Sense strand starting at position 3538 of SEQ ID NO: 1889002
uugcauuauggauaccuga

SEQ ID NO: 2572311 - RNA, 19 nt, Artificial Sequence
  Description of Artificial Sequence: Synthetic oligonucleotide
  Antisense strand to SEQ ID NO: 2572310
ucagguauccauaaugcaa

SEQ ID NO: 2572312 - RNA, 19 nt, Artificial Sequence
  Description of Artificial Sequence: Synthetic oligonucleotide
  Sense strand starting at position 3545 of SEQ ID NO: 1889002
auggauaccugagcuuuau

SEQ ID NO: 2572313 - RNA, 19 nt, Artificial Sequence
  Description of Artificial Sequence: Synthetic oligonucleotide
  Antisense strand to SEQ ID NO: 2572312
auaaagcucagguauccau

SEQ ID NO: 2572314 - RNA, 19 nt, Artificial Sequence
  Description of Artificial Sequence: Synthetic oligonucleotide
  Sense strand starting at position 3576 of SEQ ID NO: 1889002
uggauauaguaugccucau

SEQ ID NO: 2572315 - RNA, 19 nt, Artificial Sequence
  Description of Artificial Sequence: Synthetic oligonucleotide
  Antisense strand to SEQ ID NO: 2572314
augaggcauacuauaucca

SEQ ID NO: 2572316 - RNA, 19 nt, Artificial Sequence
  Description of Artificial Sequence: Synthetic oligonucleotide
  Sense strand starting at position 3580 of SEQ ID NO: 1889002
uauaguaugccucauggca

SEQ ID NO: 2572317 - RNA, 19 nt, Artificial Sequence
  Description of Artificial Sequence: Synthetic oligonucleotide
  Antisense strand to SEQ ID NO: 2572316
ugccaugaggcauacuaua

SEQ ID NO: 2572318 - RNA, 19 nt, Artificial Sequence
  Description of Artificial Sequence: Synthetic oligonucleotide
  Sense strand starting at position 3631 of SEQ ID NO: 1889002
uguaucuggguuugagaag

SEQ ID NO: 2572319 - RNA, 19 nt, Artificial Sequence
  Description of Artificial Sequence: Synthetic oligonucleotide
  Antisense strand to SEQ ID NO: 2572318
cuucucaaacccagauaca

SEQ ID NO: 2572320 - RNA, 19 nt, Artificial Sequence
  Description of Artificial Sequence: Synthetic oligonucleotide
  Sense strand starting at position 3640 of SEQ ID NO: 1889002
guuugagaagaaugcauau

SEQ ID NO: 2572321 - RNA, 19 nt, Artificial Sequence
  Description of Artificial Sequence: Synthetic oligonucleotide
  Antisense strand to SEQ ID NO: 2572320
auaugcauucuucucaaac

SEQ ID NO: 2572322 - RNA, 19 nt, Artificial Sequence
  Description of Artificial Sequence: Synthetic oligonucleotide
  Sense strand starting at position 3776 of SEQ ID NO: 1889002
acaccuagccuuggucaaa

SEQ ID NO: 2572323 - RNA, 19 nt, Artificial Sequence
  Description of Artificial Sequence: Synthetic oligonucleotide
  Antisense strand to SEQ ID NO: 2572322
uuugaccaaggcuaggugu

SEQ ID NO: 2572324 - RNA, 19 nt, Artificial Sequence
  Description of Artificial Sequence: Synthetic oligonucleotide
  Sense strand starting at position 3788 of SEQ ID NO: 1889002
ggucaaagguggcuauaug

SEQ ID NO: 2572325 - RNA, 19 nt, Artificial Sequence
  Description of Artificial Sequence: Synthetic oligonucleotide
  Antisense strand to SEQ ID NO: 2572324
cauauagccaccuuugacc

SEQ ID NO: 2572326 - RNA, 19 nt, Artificial Sequence
  Description of Artificial Sequence: Synthetic oligonucleotide
  Sense strand starting at position 3789 of SEQ ID NO: 1889002
gucaaagguggcuauaugu

SEQ ID NO: 2572327 - RNA, 19 nt, Artificial Sequence
  Description of Artificial Sequence: Synthetic oligonucleotide
  Antisense strand to SEQ ID NO: 2572326
acauauagccaccuuugac

SEQ ID NO: 2572328 - RNA, 19 nt, Artificial Sequence
  Description of Artificial Sequence: Synthetic oligonucleotide
  Sense strand starting at position 3921 of SEQ ID NO: 1889002
ggcccacuccauuagcaau

SEQ ID NO: 2572329 - RNA, 19 nt, Artificial Sequence
  Description of Artificial Sequence: Synthetic oligonucleotide
  Antisense strand to SEQ ID NO: 2572328
auugcuaauggagugggcc

SEQ ID NO: 2572330 - RNA, 19 nt, Artificial Sequence
  Description of Artificial Sequence: Synthetic oligonucleotide
  Sense strand starting at position 67 of SEQ ID NO: 1889003
ggcacacuuguugacucaa

SEQ ID NO: 2572331 - RNA, 19 nt, Artificial Sequence
  Description of Artificial Sequence: Synthetic oligonucleotide
  Antisense strand to SEQ ID NO: 2572330
uugagucaacaagugugcc

SEQ ID NO: 2572332 - RNA, 19 nt, Artificial Sequence
  Description of Artificial Sequence: Synthetic oligonucleotide
  Sense strand starting at position 98 of SEQ ID NO: 1889003
auaaauguccauuguacaa

SEQ ID NO: 2572333 - RNA, 19 nt, Artificial Sequence
  Description of Artificial Sequence: Synthetic oligonucleotide
  Antisense strand to SEQ ID NO: 2572332
uuguacaauggacauuuau

SEQ ID NO: 2572334 - RNA, 19 nt, Artificial Sequence
  Description of Artificial Sequence: Synthetic oligonucleotide
  Sense strand starting at position 237 of SEQ ID NO: 1889003
uguauuauauccuugaaag

SEQ ID NO: 2572335 - RNA, 19 nt, Artificial Sequence
  Description of Artificial Sequence: Synthetic oligonucleotide
  Antisense strand to SEQ ID NO: 2572334
cuuucaaggauauaauaca

SEQ ID NO: 2572336 - RNA, 19 nt, Artificial Sequence
  Description of Artificial Sequence: Synthetic oligonucleotide
  Sense strand starting at position 238 of SEQ ID NO: 1889003
guauuauauccuugaaaga

SEQ ID NO: 2572337 - RNA, 19 nt, Artificial Sequence
  Description of Artificial Sequence: Synthetic oligonucleotide
  Antisense strand to SEQ ID NO: 2572336
ucuuucaaggauauaauac

SEQ ID NO: 2572338 - RNA, 19 nt, Artificial Sequence
  Description of Artificial Sequence: Synthetic oligonucleotide
  Sense strand starting at position 326 of SEQ ID NO: 1889003
cuugguuaccuaggaguaa

SEQ ID NO: 2572339 - RNA, 19 nt, Artificial Sequence
  Description of Artificial Sequence: Synthetic oligonucleotide
  Antisense strand to SEQ ID NO: 2572338
uuacuccuagguaaccaag

SEQ ID NO: 2572340 - RNA, 19 nt, Artificial Sequence
  Description of Artificial Sequence: Synthetic oligonucleotide
  Sense strand starting at position 330 of SEQ ID NO: 1889003
guuaccuaggaguaaagua

SEQ ID NO: 2572341 - RNA, 19 nt, Artificial Sequence
  Description of Artificial Sequence: Synthetic oligonucleotide
  Antisense strand to SEQ ID NO: 2572340
uacuuuacuccuagguaac

SEQ ID NO: 2572342 - RNA, 19 nt, Artificial Sequence
  Description of Artificial Sequence: Synthetic oligonucleotide
  Sense strand starting at position 340 of SEQ ID NO: 1889003
aguaaaguauagucucaag

SEQ ID NO: 2572343 - RNA, 19 nt, Artificial Sequence
  Description of Artificial Sequence: Synthetic oligonucleotide
  Antisense strand to SEQ ID NO: 2572342
cuugagacuauacuuuacu

SEQ ID NO: 2572344 - RNA, 19 nt, Artificial Sequence
  Description of Artificial Sequence: Synthetic oligonucleotide
  Sense strand starting at position 462 of SEQ ID NO: 1889003
uucccaacauguuugauga

SEQ ID NO: 2572345 - RNA, 19 nt, Artificial Sequence
  Description of Artificial Sequence: Synthetic oligonucleotide
  Antisense strand to SEQ ID NO: 2572344
ucaucaaacauguugggaa

SEQ ID NO: 2572346 - RNA, 19 nt, Artificial Sequence
  Description of Artificial Sequence: Synthetic oligonucleotide
  Sense strand starting at position 463 of SEQ ID NO: 1889003
ucccaacauguuugaugaa

SEQ ID NO: 2572347 - RNA, 19 nt, Artificial Sequence
  Description of Artificial Sequence: Synthetic oligonucleotide
  Antisense strand to SEQ ID NO: 2572346
uucaucaaacauguuggga

SEQ ID NO: 2572348 - RNA, 19 nt, Artificial Sequence
  Description of Artificial Sequence: Synthetic oligonucleotide
  Sense strand starting at position 535 of SEQ ID NO: 1889003
aggccaacgagguaacauu

SEQ ID NO: 2572349 - RNA, 19 nt, Artificial Sequence
  Description of Artificial Sequence: Synthetic oligonucleotide
  Antisense strand to SEQ ID NO: 2572348
aauguuaccucguuggccu

SEQ ID NO: 2572350 - RNA, 19 nt, Artificial Sequence
  Description of Artificial Sequence: Synthetic oligonucleotide
  Sense strand starting at position 1070 of SEQ ID NO: 1889003
acuggacggcaguaugaau

SEQ ID NO: 2572351 - RNA, 19 nt, Artificial Sequence
  Description of Artificial Sequence: Synthetic oligonucleotide
  Antisense strand to SEQ ID NO: 2572350
auucauacugccguccagu

SEQ ID NO: 2572352 - RNA, 19 nt, Artificial Sequence
  Description of Artificial Sequence: Synthetic oligonucleotide
  Sense strand starting at position 1163 of SEQ ID NO: 1889003
uuuggaacuuuaucagcua

SEQ ID NO: 2572353 - RNA, 19 nt, Artificial Sequence
  Description of Artificial Sequence: Synthetic oligonucleotide
  Antisense strand to SEQ ID NO: 2572352
uagcugauaaaguuccaaa

SEQ ID NO: 2572354 - RNA, 19 nt, Artificial Sequence
  Description of Artificial Sequence: Synthetic oligonucleotide
  Sense strand starting at position 1166 of SEQ ID NO: 1889003
ggaacuuuaucagcuagaa

SEQ ID NO: 2572355 - RNA, 19 nt, Artificial Sequence
  Description of Artificial Sequence: Synthetic oligonucleotide
  Antisense strand to SEQ ID NO: 2572354
uucuagcugauaaaguucc

SEQ ID NO: 2572356 - RNA, 19 nt, Artificial Sequence
  Description of Artificial Sequence: Synthetic oligonucleotide
  Sense strand starting at position 1186 of SEQ ID NO: 1889003
agagauuacucaucgagcu

SEQ ID NO: 2572357 - RNA, 19 nt, Artificial Sequence
  Description of Artificial Sequence: Synthetic oligonucleotide
  Antisense strand to SEQ ID NO: 2572356
agcucgaugaguaaucucu

SEQ ID NO: 2572358 - RNA, 19 nt, Artificial Sequence
  Description of Artificial Sequence: Synthetic oligonucleotide
  Sense strand starting at position 1188 of SEQ ID NO: 1889003
agauuacucaucgagcuga

SEQ ID NO: 2572359 - RNA, 19 nt, Artificial Sequence
  Description of Artificial Sequence: Synthetic oligonucleotide
  Antisense strand to SEQ ID NO: 2572358
ucagcucgaugaguaaucu

SEQ ID NO: 2572360 - RNA, 19 nt, Artificial Sequence
  Description of Artificial Sequence: Synthetic oligonucleotide
  Sense strand starting at position 1276 of SEQ ID NO: 1889003
ccugguuagcacuaagaau

SEQ ID NO: 2572361 - RNA, 19 nt, Artificial Sequence
  Description of Artificial Sequence: Synthetic oligonucleotide
  Antisense strand to SEQ ID NO: 2572360
auucuuagugcuaaccagg

SEQ ID NO: 2572362 - RNA, 19 nt, Artificial Sequence
  Description of Artificial Sequence: Synthetic oligonucleotide
  Sense strand starting at position 1300 of SEQ ID NO: 1889003
caguguggaauggguuaaa

SEQ ID NO: 2572363 - RNA, 19 nt, Artificial Sequence
  Description of Artificial Sequence: Synthetic oligonucleotide
  Antisense strand to SEQ ID NO: 2572362
uuuaacccauuccacacug

SEQ ID NO: 2572364 - RNA, 19 nt, Artificial Sequence
  Description of Artificial Sequence: Synthetic oligonucleotide
  Sense strand starting at position 1303 of SEQ ID NO: 1889003
uguggaauggguuaaaugu

SEQ ID NO: 2572365 - RNA, 19 nt, Artificial Sequence
  Description of Artificial Sequence: Synthetic oligonucleotide
  Antisense strand to SEQ ID NO: 2572364
acauuuaacccauuccaca

SEQ ID NO: 2572366 - RNA, 19 nt, Artificial Sequence
  Description of Artificial Sequence: Synthetic oligonucleotide
  Sense strand starting at position 1364 of SEQ ID NO: 1889003
uauauaagugcugaagucu

SEQ ID NO: 2572367 - RNA, 19 nt, Artificial Sequence
  Description of Artificial Sequence: Synthetic oligonucleotide
  Antisense strand to SEQ ID NO: 2572366
agacuucagcacuuauaua

SEQ ID NO: 2572368 - RNA, 19 nt, Artificial Sequence
  Description of Artificial Sequence: Synthetic oligonucleotide
  Sense strand starting at position 1376 of SEQ ID NO: 1889003
gaagucugggcagagagua

SEQ ID NO: 2572369 - RNA, 19 nt, Artificial Sequence
  Description of Artificial Sequence: Synthetic oligonucleotide
  Antisense strand to SEQ ID NO: 2572368
uacucucugcccagacuuc

SEQ ID NO: 2572370 - RNA, 19 nt, Artificial Sequence
  Description of Artificial Sequence: Synthetic oligonucleotide
  Sense strand starting at position 1397 of SEQ ID NO: 1889003
ccaucugagugaccaugaa

SEQ ID NO: 2572371 - RNA, 19 nt, Artificial Sequence
  Description of Artificial Sequence: Synthetic oligonucleotide
  Antisense strand to SEQ ID NO: 2572370
uucauggucacucagaugg

SEQ ID NO: 2572372 - RNA, 19 nt, Artificial Sequence
  Description of Artificial Sequence: Synthetic oligonucleotide
  Sense strand starting at position 1478 of SEQ ID NO: 1889003
aauacauucucguugggaa

SEQ ID NO: 2572373 - RNA, 19 nt, Artificial Sequence
  Description of Artificial Sequence: Synthetic oligonucleotide
  Antisense strand to SEQ ID NO: 2572372
uucccaacgagaauguauu

SEQ ID NO: 2572374 - RNA, 19 nt, Artificial Sequence
  Description of Artificial Sequence: Synthetic oligonucleotide
  Sense strand starting at position 1510 of SEQ ID NO: 1889003
gugugaaaugcugcugcau

SEQ ID NO: 2572375 - RNA, 19 nt, Artificial Sequence
  Description of Artificial Sequence: Synthetic oligonucleotide
  Antisense strand to SEQ ID NO: 2572374
augcagcagcauuucacac

SEQ ID NO: 2572376 - RNA, 19 nt, Artificial Sequence
  Description of Artificial Sequence: Synthetic oligonucleotide
  Sense strand starting at position 1551 of SEQ ID NO: 1889003
uuuaaucuugugggauuag

SEQ ID NO: 2572377 - RNA, 19 nt, Artificial Sequence
  Description of Artificial Sequence: Synthetic oligonucleotide
  Antisense strand to SEQ ID NO: 2572376
cuaaucccacaagauuaaa

SEQ ID NO: 2572378 - RNA, 19 nt, Artificial Sequence
  Description of Artificial Sequence: Synthetic oligonucleotide
  Sense strand starting at position 1600 of SEQ ID NO: 1889003
gcgcauucuaacuuugugu

SEQ ID NO: 2572379 - RNA, 19 nt, Artificial Sequence
  Description of Artificial Sequence: Synthetic oligonucleotide
  Antisense strand to SEQ ID NO: 2572378
acacaaaguuagaaugcgc

SEQ ID NO: 2572380 - RNA, 19 nt, Artificial Sequence
  Description of Artificial Sequence: Synthetic oligonucleotide
  Sense strand starting at position 1903 of SEQ ID NO: 1889003
ugccaaacugcauaaguga

SEQ ID NO: 2572381 - RNA, 19 nt, Artificial Sequence
  Description of Artificial Sequence: Synthetic oligonucleotide
  Antisense strand to SEQ ID NO: 2572380
ucacuuaugcaguuuggca

SEQ ID NO: 2572382 - RNA, 19 nt, Artificial Sequence
  Description of Artificial Sequence: Synthetic oligonucleotide
  Sense strand starting at position 2108 of SEQ ID NO: 1889003
gccuauugcugauuuacag

SEQ ID NO: 2572383 - RNA, 19 nt, Artificial Sequence
  Description of Artificial Sequence: Synthetic oligonucleotide
  Antisense strand to SEQ ID NO: 2572382
cuguaaaucagcaauaggc

SEQ ID NO: 2572384 - RNA, 19 nt, Artificial Sequence
  Description of Artificial Sequence: Synthetic oligonucleotide
  Sense strand starting at position 2298 of SEQ ID NO: 1889003
ccuacccagucuuuagaua

SEQ ID NO: 2572385 - RNA, 19 nt, Artificial Sequence
  Description of Artificial Sequence: Synthetic oligonucleotide
  Antisense strand to SEQ ID NO: 2572384
uaucuaaagacuggguagg

SEQ ID NO: 2572386 - RNA, 19 nt, Artificial Sequence
  Description of Artificial Sequence: Synthetic oligonucleotide
  Sense strand starting at position 2299 of SEQ ID NO: 1889003
cuacccagucuuuagauau

SEQ ID NO: 2572387 - RNA, 19 nt, Artificial Sequence
  Description of Artificial Sequence: Synthetic oligonucleotide
  Antisense strand to SEQ ID NO: 2572386
auaucuaaagacuggguag

SEQ ID NO: 2572388 - RNA, 19 nt, Artificial Sequence
  Description of Artificial Sequence: Synthetic oligonucleotide
  Sense strand starting at position 2335 of SEQ ID NO: 1889003
uuggcaaauucccuaugaa

SEQ ID NO: 2572389 - RNA, 19 nt, Artificial Sequence
  Description of Artificial Sequence: Synthetic oligonucleotide
  Antisense strand to SEQ ID NO: 2572388
uucauagggaauuugccaa

SEQ ID NO: 2572390 - RNA, 19 nt, Artificial Sequence
  Description of Artificial Sequence: Synthetic oligonucleotide
  Sense strand starting at position 2336 of SEQ ID NO: 1889003
uggcaaauucccuaugaau

SEQ ID NO: 2572391 - RNA, 19 nt, Artificial Sequence
  Description of Artificial Sequence: Synthetic oligonucleotide
  Antisense strand to SEQ ID NO: 2572390
auucauagggaauuugcca

SEQ ID NO: 2572392 - RNA, 19 nt, Artificial Sequence
  Description of Artificial Sequence: Synthetic oligonucleotide
  Sense strand starting at position 2503 of SEQ ID NO: 1889003
cugggcaucuaaguauaaa

SEQ ID NO: 2572393 - RNA, 19 nt, Artificial Sequence
  Description of Artificial Sequence: Synthetic oligonucleotide
  Antisense strand to SEQ ID NO: 2572392
uuuauacuuagaugcccag

SEQ ID NO: 2572394 - RNA, 19 nt, Artificial Sequence
  Description of Artificial Sequence: Synthetic oligonucleotide
  Sense strand starting at position 2506 of SEQ ID NO: 1889003
ggcaucuaaguauaaaucu

SEQ ID NO: 2572395 - RNA, 19 nt, Artificial Sequence
  Description of Artificial Sequence: Synthetic oligonucleotide
  Antisense strand to SEQ ID NO: 2572394
agauuuauacuuagaugcc

SEQ ID NO: 2572396 - RNA, 19 nt, Artificial Sequence
  Description of Artificial Sequence: Synthetic oligonucleotide
  Sense strand starting at position 2553 of SEQ ID NO: 1889003
aagaguguuagugauugca

SEQ ID NO: 2572397 - RNA, 19 nt, Artificial Sequence
  Description of Artificial Sequence: Synthetic oligonucleotide
  Antisense strand to SEQ ID NO: 2572396
ugcaaucacuaacacucuu

SEQ ID NO: 2572398 - RNA, 19 nt, Artificial Sequence
  Description of Artificial Sequence: Synthetic oligonucleotide
  Sense strand starting at position 2958 of SEQ ID NO: 1889003
aguacuuuaagccaggagu

SEQ ID NO: 2572399 - RNA, 19 nt, Artificial Sequence
  Description of Artificial Sequence: Synthetic oligonucleotide
  Antisense strand to SEQ ID NO: 2572398
acuccuggcuuaaaguacu

SEQ ID NO: 2572400 - RNA, 19 nt, Artificial Sequence
  Description of Artificial Sequence: Synthetic oligonucleotide
  Sense strand starting at position 3478 of SEQ ID NO: 1889003
guauaacuaucugugauaa

SEQ ID NO: 2572401 - RNA, 19 nt, Artificial Sequence
  Description of Artificial Sequence: Synthetic oligonucleotide
  Antisense strand to SEQ ID NO: 2572400
uuaucacagauaguuauac

SEQ ID NO: 2572402 - RNA, 19 nt, Artificial Sequence
  Description of Artificial Sequence: Synthetic oligonucleotide
  Sense strand starting at position 3488 of SEQ ID NO: 1889003
cugugauaacaacaugugu

SEQ ID NO: 2572403 - RNA, 19 nt, Artificial Sequence
  Description of Artificial Sequence: Synthetic oligonucleotide
  Antisense strand to SEQ ID NO: 2572402
acacauguuguuaucacag

SEQ ID NO: 2572404 - RNA, 19 nt, Artificial Sequence
  Description of Artificial Sequence: Synthetic oligonucleotide
  Sense strand starting at position 3518 of SEQ ID NO: 1889003
aucuguaugcuauaugaga

SEQ ID NO: 2572405 - RNA, 19 nt, Artificial Sequence
  Description of Artificial Sequence: Synthetic oligonucleotide
  Antisense strand to SEQ ID NO: 2572404
ucucauauagcauacagau

SEQ ID NO: 2572406 - RNA, 19 nt, Artificial Sequence
  Description of Artificial Sequence: Synthetic oligonucleotide
  Sense strand starting at position 3582 of SEQ ID NO: 1889003
uauguuucuguauaaguga

SEQ ID NO: 2572407 - RNA, 19 nt, Artificial Sequence
  Description of Artificial Sequence: Synthetic oligonucleotide
  Antisense strand to SEQ ID NO: 2572406
ucacuuauacagaaacaua

SEQ ID NO: 2572408 - RNA, 19 nt, Artificial Sequence
  Description of Artificial Sequence: Synthetic oligonucleotide
  Sense strand starting at position 3944 of SEQ ID NO: 1889003
ugcuaugacugacugauau

SEQ ID NO: 2572409 - RNA, 19 nt, Artificial Sequence
  Description of Artificial Sequence: Synthetic oligonucleotide
  Antisense strand to SEQ ID NO: 2572408
auaucagucagucauagca

SEQ ID NO: 2572410 - RNA, 19 nt, Artificial Sequence
  Description of Artificial Sequence: Synthetic oligonucleotide
  Sense strand starting at position 149 of SEQ ID NO: 1889004
ggcaucugucaggacgaga

SEQ ID NO: 2572411 - RNA, 19 nt, Artificial Sequence
  Description of Artificial Sequence: Synthetic oligonucleotide
  Antisense strand to SEQ ID NO: 2572410
ucucguccugacagaugcc

SEQ ID NO: 2572412 - RNA, 19 nt, Artificial Sequence
  Description of Artificial Sequence: Synthetic oligonucleotide
  Sense strand starting at position 232 of SEQ ID NO: 1889004
gcuuguaagaggcagagaa

SEQ ID NO: 2572413 - RNA, 19 nt, Artificial Sequence
  Description of Artificial Sequence: Synthetic oligonucleotide
  Antisense strand to SEQ ID NO: 2572412
uucucugccucuuacaagc

SEQ ID NO: 2572414 - RNA, 19 nt, Artificial Sequence
  Description of Artificial Sequence: Synthetic oligonucleotide
  Sense strand starting at position 252 of SEQ ID NO: 1889004
cugggaugccaccaucuua

SEQ ID NO: 2572415 - RNA, 19 nt, Artificial Sequence
  Description of Artificial Sequence: Synthetic oligonucleotide
  Antisense strand to SEQ ID NO: 2572414
uaagaugguggcaucccag

SEQ ID NO: 2572416 - RNA, 19 nt, Artificial Sequence
  Description of Artificial Sequence: Synthetic oligonucleotide
  Sense strand starting at position 701 of SEQ ID NO: 1889004
agaauacgcgguuaucaaa

SEQ ID NO: 2572417 - RNA, 19 nt, Artificial Sequence
  Description of Artificial Sequence: Synthetic oligonucleotide
  Antisense strand to SEQ ID NO: 2572416
uuugauaaccgcguauucu

SEQ ID NO: 2572418 - RNA, 19 nt, Artificial Sequence
  Description of Artificial Sequence: Synthetic oligonucleotide
  Sense strand starting at position 722 of SEQ ID NO: 1889004
uuuguuuggccauaucuau

SEQ ID NO: 2572419 - RNA, 19 nt, Artificial Sequence
  Description of Artificial Sequence: Synthetic oligonucleotide
  Antisense strand to SEQ ID NO: 2572418
auagauauggccaaacaaa

SEQ ID NO: 2572420 - RNA, 19 nt, Artificial Sequence
  Description of Artificial Sequence: Synthetic oligonucleotide
  Sense strand starting at position 736 of SEQ ID NO: 1889004
ucuauuuaucaucgcugca

SEQ ID NO: 2572421 - RNA, 19 nt, Artificial Sequence
  Description of Artificial Sequence: Synthetic oligonucleotide
  Antisense strand to SEQ ID NO: 2572420
ugcagcgaugauaaauaga

SEQ ID NO: 2572422 - RNA, 19 nt, Artificial Sequence
  Description of Artificial Sequence: Synthetic oligonucleotide
  Sense strand starting at position 761 of SEQ ID NO: 1889004
ggcucugcggaauaucauu

SEQ ID NO: 2572423 - RNA, 19 nt, Artificial Sequence
  Description of Artificial Sequence: Synthetic oligonucleotide
  Antisense strand to SEQ ID NO: 2572422
aaugauauuccgcagagcc

SEQ ID NO: 2572424 - RNA, 19 nt, Artificial Sequence
  Description of Artificial Sequence: Synthetic oligonucleotide
  Sense strand starting at position 770 of SEQ ID NO: 1889004
gaauaucauucuguugaug

SEQ ID NO: 2572425 - RNA, 19 nt, Artificial Sequence
  Description of Artificial Sequence: Synthetic oligonucleotide
  Antisense strand to SEQ ID NO: 2572424
caucaacagaaugauauuc

SEQ ID NO: 2572426 - RNA, 19 nt, Artificial Sequence
  Description of Artificial Sequence: Synthetic oligonucleotide
  Sense strand starting at position 1427 of SEQ ID NO: 1889004
gcuuauccugaacaauagu

SEQ ID NO: 2572427 - RNA, 19 nt, Artificial Sequence
  Description of Artificial Sequence: Synthetic oligonucleotide
  Antisense strand to SEQ ID NO: 2572426
acuauuguucaggauaagc

SEQ ID NO: 2572428 - RNA, 19 nt, Artificial Sequence
  Description of Artificial Sequence: Synthetic oligonucleotide
  Sense strand starting at position 2881 of SEQ ID NO: 1889004
uugugauaccgguggagga

SEQ ID NO: 2572429 - RNA, 19 nt, Artificial Sequence
  Description of Artificial Sequence: Synthetic oligonucleotide
  Antisense strand to SEQ ID NO: 2572428
uccuccaccgguaucacaa

SEQ ID NO: 2572430 - RNA, 19 nt, Artificial Sequence
  Description of Artificial Sequence: Synthetic oligonucleotide
  Sense strand starting at position 2882 of SEQ ID NO: 1889004
ugugauaccgguggaggau

SEQ ID NO: 2572431 - RNA, 19 nt, Artificial Sequence
  Description of Artificial Sequence: Synthetic oligonucleotide
  Antisense strand to SEQ ID NO: 2572430
auccuccaccgguaucaca

SEQ ID NO: 2572432 - RNA, 19 nt, Artificial Sequence
  Description of Artificial Sequence: Synthetic oligonucleotide
  Sense strand starting at position 2894 of SEQ ID NO: 1889004
ggaggaugcuucucacaag

SEQ ID NO: 2572433 - RNA, 19 nt, Artificial Sequence
  Description of Artificial Sequence: Synthetic oligonucleotide
  Antisense strand to SEQ ID NO: 2572432
cuugugagaagcauccucc

SEQ ID NO: 2572434 - RNA, 19 nt, Artificial Sequence
  Description of Artificial Sequence: Synthetic oligonucleotide
  Sense strand starting at position 2938 of SEQ ID NO: 1889004
aguccaccuacguaaugua

SEQ ID NO: 2572435 - RNA, 19 nt, Artificial Sequence
  Description of Artificial Sequence: Synthetic oligonucleotide
  Antisense strand to SEQ ID NO: 2572434
uacauuacguagguggacu

SEQ ID NO: 2572436 - RNA, 19 nt, Artificial Sequence
  Description of Artificial Sequence: Synthetic oligonucleotide
  Sense strand starting at position 3008 of SEQ ID NO: 1889004
uaguguuugccagauacug

SEQ ID NO: 2572437 - RNA, 19 nt, Artificial Sequence
  Description of Artificial Sequence: Synthetic oligonucleotide
  Antisense strand to SEQ ID NO: 2572436
caguaucuggcaaacacua

SEQ ID NO: 2572438 - RNA, 19 nt, Artificial Sequence
  Description of Artificial Sequence: Synthetic oligonucleotide
  Sense strand starting at position 3016 of SEQ ID NO: 1889004
gccagauacugggcaaaga

SEQ ID NO: 2572439 - RNA, 19 nt, Artificial Sequence
  Description of Artificial Sequence: Synthetic oligonucleotide
  Antisense strand to SEQ ID NO: 2572438
ucuuugcccaguaucuggc

SEQ ID NO: 2572440 - RNA, 19 nt, Artificial Sequence
  Description of Artificial Sequence: Synthetic oligonucleotide
  Sense strand starting at position 3026 of SEQ ID NO: 1889004
gggcaaagaacuggaguua

SEQ ID NO: 2572441 - RNA, 19 nt, Artificial Sequence
  Description of Artificial Sequence: Synthetic oligonucleotide
  Antisense strand to SEQ ID NO: 2572440
uaacuccaguucuuugccc

SEQ ID NO: 2572442 - RNA, 19 nt, Artificial Sequence
  Description of Artificial Sequence: Synthetic oligonucleotide
  Sense strand starting at position 3060 of SEQ ID NO: 1889004
uaugauugcugaccaguaa

SEQ ID NO: 2572443 - RNA, 19 nt, Artificial Sequence
  Description of Artificial Sequence: Synthetic oligonucleotide
  Antisense strand to SEQ ID NO: 2572442
uuacuggucagcaaucaua

SEQ ID NO: 2572444 - RNA, 19 nt, Artificial Sequence
  Description of Artificial Sequence: Synthetic oligonucleotide
  Sense strand starting at position 3061 of SEQ ID NO: 1889004
augauugcugaccaguaaa

SEQ ID NO: 2572445 - RNA, 19 nt, Artificial Sequence
  Description of Artificial Sequence: Synthetic oligonucleotide
  Antisense strand to SEQ ID NO: 2572444
uuuacuggucagcaaucau

SEQ ID NO: 2572446 - RNA, 19 nt, Artificial Sequence
  Description of Artificial Sequence: Synthetic oligonucleotide
  Sense strand starting at position 3064 of SEQ ID NO: 1889004
auugcugaccaguaaauaa

SEQ ID NO: 2572447 - RNA, 19 nt, Artificial Sequence
  Description of Artificial Sequence: Synthetic oligonucleotide
  Antisense strand to SEQ ID NO: 2572446
uuauuuacuggucagcaau

SEQ ID NO: 2572448 - RNA, 19 nt, Artificial Sequence
  Description of Artificial Sequence: Synthetic oligonucleotide
  Sense strand starting at position 3083 of SEQ ID NO: 1889004
guaguaggugucaguugua

SEQ ID NO: 2572449 - RNA, 19 nt, Artificial Sequence
  Description of Artificial Sequence: Synthetic oligonucleotide
  Antisense strand to SEQ ID NO: 2572448
uacaacugacaccuacuac

SEQ ID NO: 2572450 - RNA, 19 nt, Artificial Sequence
  Description of Artificial Sequence: Synthetic oligonucleotide
  Sense strand starting at position 3134 of SEQ ID NO: 1889004
cccuuagaauucuugagac

SEQ ID NO: 2572451 - RNA, 19 nt, Artificial Sequence
  Description of Artificial Sequence: Synthetic oligonucleotide
  Antisense strand to SEQ ID NO: 2572450
gucucaagaauucuaaggg

SEQ ID NO: 2572452 - RNA, 19 nt, Artificial Sequence
  Description of Artificial Sequence: Synthetic oligonucleotide
  Sense strand starting at position 3163 of SEQ ID NO: 1889004
gcaaccaaauugguuuaau

SEQ ID NO: 2572453 - RNA, 19 nt, Artificial Sequence
  Description of Artificial Sequence: Synthetic oligonucleotide
  Antisense strand to SEQ ID NO: 2572452
auuaaaccaauuugguugc

SEQ ID NO: 2572454 - RNA, 19 nt, Artificial Sequence
  Description of Artificial Sequence: Synthetic oligonucleotide
  Sense strand starting at position 3175 of SEQ ID NO: 1889004
guuuaaugauucuccaaag

SEQ ID NO: 2572455 - RNA, 19 nt, Artificial Sequence
  Description of Artificial Sequence: Synthetic oligonucleotide
  Antisense strand to SEQ ID NO: 2572454
cuuuggagaaucauuaaac

SEQ ID NO: 2572456 - RNA, 19 nt, Artificial Sequence
  Description of Artificial Sequence: Synthetic oligonucleotide
  Sense strand starting at position 3261 of SEQ ID NO: 1889004
auuauuuaaucagagcaga

SEQ ID NO: 2572457 - RNA, 19 nt, Artificial Sequence
  Description of Artificial Sequence: Synthetic oligonucleotide
  Antisense strand to SEQ ID NO: 2572456
ucugcucugauuaaauaau

SEQ ID NO: 2572458 - RNA, 19 nt, Artificial Sequence
  Description of Artificial Sequence: Synthetic oligonucleotide
  Sense strand starting at position 3329 of SEQ ID NO: 1889004
ccaauacuguguguauuaa

SEQ ID NO: 2572459 - RNA, 19 nt, Artificial Sequence
  Description of Artificial Sequence: Synthetic oligonucleotide
  Antisense strand to SEQ ID NO: 2572458
uuaauacacacaguauugg

SEQ ID NO: 2572460 - RNA, 19 nt, Artificial Sequence
  Description of Artificial Sequence: Synthetic oligonucleotide
  Sense strand starting at position 3337 of SEQ ID NO: 1889004
guguguauuaaacaugacu

SEQ ID NO: 2572461 - RNA, 19 nt, Artificial Sequence
  Description of Artificial Sequence: Synthetic oligonucleotide
  Antisense strand to SEQ ID NO: 2572460
agucauguuuaauacacac

SEQ ID NO: 2572462 - RNA, 19 nt, Artificial Sequence
  Description of Artificial Sequence: Synthetic oligonucleotide
  Sense strand starting at position 3409 of SEQ ID NO: 1889004
cugaacuuguguuugaaag

SEQ ID NO: 2572463 - RNA, 19 nt, Artificial Sequence
  Description of Artificial Sequence: Synthetic oligonucleotide
  Antisense strand to SEQ ID NO: 2572462
cuuucaaacacaaguucag

SEQ ID NO: 2572464 - RNA, 19 nt, Artificial Sequence
  Description of Artificial Sequence: Synthetic oligonucleotide
  Sense strand starting at position 3420 of SEQ ID NO: 1889004
uuugaaaggcuguauucua

SEQ ID NO: 2572465 - RNA, 19 nt, Artificial Sequence
  Description of Artificial Sequence: Synthetic oligonucleotide
  Antisense strand to SEQ ID NO: 2572464
uagaauacagccuuucaaa

SEQ ID NO: 2572466 - RNA, 19 nt, Artificial Sequence
  Description of Artificial Sequence: Synthetic oligonucleotide
  Sense strand starting at position 3440 of SEQ ID NO: 1889004
cuauguuguguugcaagca

SEQ ID NO: 2572467 - RNA, 19 nt, Artificial Sequence
  Description of Artificial Sequence: Synthetic oligonucleotide
  Antisense strand to SEQ ID NO: 2572466
ugcuugcaacacaacauag

SEQ ID NO: 2572468 - RNA, 19 nt, Artificial Sequence
  Description of Artificial Sequence: Synthetic oligonucleotide
  Sense strand starting at position 3516 of SEQ ID NO: 1889004
gacuccuuccuccguagaa

SEQ ID NO: 2572469 - RNA, 19 nt, Artificial Sequence
  Description of Artificial Sequence: Synthetic oligonucleotide
  Antisense strand to SEQ ID NO: 2572468
uucuacggaggaaggaguc

SEQ ID NO: 2572470 - RNA, 19 nt, Artificial Sequence
  Description of Artificial Sequence: Synthetic oligonucleotide
  Sense strand starting at position 3517 of SEQ ID NO: 1889004
acuccuuccuccguagaaa

SEQ ID NO: 2572471 - RNA, 19 nt, Artificial Sequence
  Description of Artificial Sequence: Synthetic oligonucleotide
  Antisense strand to SEQ ID NO: 2572470
uuucuacggaggaaggagu

SEQ ID NO: 2572472 - RNA, 19 nt, Artificial Sequence
  Description of Artificial Sequence: Synthetic oligonucleotide
  Sense strand starting at position 3518 of SEQ ID NO: 1889004
cuccuuccuccguagaaag

SEQ ID NO: 2572473 - RNA, 19 nt, Artificial Sequence
  Description of Artificial Sequence: Synthetic oligonucleotide
  Antisense strand to SEQ ID NO: 2572472
cuuucuacggaggaaggag

SEQ ID NO: 2572474 - RNA, 19 nt, Artificial Sequence
  Description of Artificial Sequence: Synthetic oligonucleotide
  Sense strand starting at position 3520 of SEQ ID NO: 1889004
ccuuccuccguagaaagau

SEQ ID NO: 2572475 - RNA, 19 nt, Artificial Sequence
  Description of Artificial Sequence: Synthetic oligonucleotide
  Antisense strand to SEQ ID NO: 2572474
aucuuucuacggaggaagg

SEQ ID NO: 2572476 - RNA, 19 nt, Artificial Sequence
  Description of Artificial Sequence: Synthetic oligonucleotide
  Sense strand starting at position 3662 of SEQ ID NO: 1889004
uuaugugggucccuaaaca

SEQ ID NO: 2572477 - RNA, 19 nt, Artificial Sequence
  Description of Artificial Sequence: Synthetic oligonucleotide
  Antisense strand to SEQ ID NO: 2572476
uguuuagggacccacauaa

SEQ ID NO: 2572478 - RNA, 19 nt, Artificial Sequence
  Description of Artificial Sequence: Synthetic oligonucleotide
  Sense strand starting at position 3698 of SEQ ID NO: 1889004
gucuacuaugccuaaggga

SEQ ID NO: 2572479 - RNA, 19 nt, Artificial Sequence
  Description of Artificial Sequence: Synthetic oligonucleotide
  Antisense strand to SEQ ID NO: 2572478
ucccuuaggcauaguagac

SEQ ID NO: 2572480 - RNA, 19 nt, Artificial Sequence
  Description of Artificial Sequence: Synthetic oligonucleotide
  Sense strand starting at position 3730 of SEQ ID NO: 1889004
guaguaccauuccuugaua

SEQ ID NO: 2572481 - RNA, 19 nt, Artificial Sequence
  Description of Artificial Sequence: Synthetic oligonucleotide
  Antisense strand to SEQ ID NO: 2572480
uaucaaggaaugguacuac

SEQ ID NO: 2572482 - RNA, 19 nt, Artificial Sequence
  Description of Artificial Sequence: Synthetic oligonucleotide
  Sense strand starting at position 3732 of SEQ ID NO: 1889004
aguaccauuccuugauacu

SEQ ID NO: 2572483 - RNA, 19 nt, Artificial Sequence
  Description of Artificial Sequence: Synthetic oligonucleotide
  Antisense strand to SEQ ID NO: 2572482
aguaucaaggaaugguacu

SEQ ID NO: 2572484 - RNA, 19 nt, Artificial Sequence
  Description of Artificial Sequence: Synthetic oligonucleotide
  Sense strand starting at position 3733 of SEQ ID NO: 1889004
guaccauuccuugauacug

SEQ ID NO: 2572485 - RNA, 19 nt, Artificial Sequence
  Description of Artificial Sequence: Synthetic oligonucleotide
  Antisense strand to SEQ ID NO: 2572484
caguaucaaggaaugguac

SEQ ID NO: 2572486 - RNA, 19 nt, Artificial Sequence
  Description of Artificial Sequence: Synthetic oligonucleotide
  Sense strand starting at position 3858 of SEQ ID NO: 1889004
cagaaagugucaguuucua

SEQ ID NO: 2572487 - RNA, 19 nt, Artificial Sequence
  Description of Artificial Sequence: Synthetic oligonucleotide
  Antisense strand to SEQ ID NO: 2572486
uagaaacugacacuuucug

SEQ ID NO: 2572488 - RNA, 19 nt, Artificial Sequence
  Description of Artificial Sequence: Synthetic oligonucleotide
  Sense strand starting at position 3924 of SEQ ID NO: 1889004
uaaugauaccuguggaaau

SEQ ID NO: 2572489 - RNA, 19 nt, Artificial Sequence
  Description of Artificial Sequence: Synthetic oligonucleotide
  Antisense strand to SEQ ID NO: 2572488
auuuccacagguaucauua

SEQ ID NO: 2572490 - RNA, 19 nt, Artificial Sequence
  Description of Artificial Sequence: Synthetic oligonucleotide
  Sense strand starting at position 991 of SEQ ID NO: 1889005
gaaccugcgggcuaauaau

SEQ ID NO: 2572491 - RNA, 19 nt, Artificial Sequence
  Description of Artificial Sequence: Synthetic oligonucleotide
  Antisense strand to SEQ ID NO: 2572490
auuauuagcccgcagguuc

SEQ ID NO: 2572492 - RNA, 19 nt, Artificial Sequence
  Description of Artificial Sequence: Synthetic oligonucleotide
  Sense strand starting at position 1379 of SEQ ID NO: 1889005
uuugauuggaaacgguuua

SEQ ID NO: 2572493 - RNA, 19 nt, Artificial Sequence
  Description of Artificial Sequence: Synthetic oligonucleotide
  Antisense strand to SEQ ID NO: 2572492
uaaaccguuuccaaucaaa

SEQ ID NO: 2572494 - RNA, 19 nt, Artificial Sequence
  Description of Artificial Sequence: Synthetic oligonucleotide
  Sense strand starting at position 1390 of SEQ ID NO: 1889005
acgguuuaggccuaaagac

SEQ ID NO: 2572495 - RNA, 19 nt, Artificial Sequence
  Description of Artificial Sequence: Synthetic oligonucleotide
  Antisense strand to SEQ ID NO: 2572494
gucuuuaggccuaaaccgu

SEQ ID NO: 2572496 - RNA, 19 nt, Artificial Sequence
  Description of Artificial Sequence: Synthetic oligonucleotide
  Sense strand starting at position 1455 of SEQ ID NO: 1889005
cucuuacaugcugaaguuu

SEQ ID NO: 2572497 - RNA, 19 nt, Artificial Sequence
  Description of Artificial Sequence: Synthetic oligonucleotide
  Antisense strand to SEQ ID NO: 2572496
aaacuucagcauguaagag

SEQ ID NO: 2572498 - RNA, 19 nt, Artificial Sequence
  Description of Artificial Sequence: Synthetic oligonucleotide
  Sense strand starting at position 1490 of SEQ ID NO: 1889005
cuauguagucuuugaaauu

SEQ ID NO: 2572499 - RNA, 19 nt, Artificial Sequence
  Description of Artificial Sequence: Synthetic oligonucleotide
  Antisense strand to SEQ ID NO: 2572498
aauuucaaagacuacauag

SEQ ID NO: 2572500 - RNA, 19 nt, Artificial Sequence
  Description of Artificial Sequence: Synthetic oligonucleotide
  Sense strand starting at position 1532 of SEQ ID NO: 1889005
guuagauucuaaguuucua

SEQ ID NO: 2572501 - RNA, 19 nt, Artificial Sequence
  Description of Artificial Sequence: Synthetic oligonucleotide
  Antisense strand to SEQ ID NO: 2572500
uagaaacuuagaaucuaac

SEQ ID NO: 2572502 - RNA, 19 nt, Artificial Sequence
  Description of Artificial Sequence: Synthetic oligonucleotide
  Sense strand starting at position 1566 of SEQ ID NO: 1889005
guuacuuccgacuaucuuu

SEQ ID NO: 2572503 - RNA, 19 nt, Artificial Sequence
  Description of Artificial Sequence: Synthetic oligonucleotide
  Antisense strand to SEQ ID NO: 2572502
aaagauagucggaaguaac

SEQ ID NO: 2572504 - RNA, 19 nt, Artificial Sequence
  Description of Artificial Sequence: Synthetic oligonucleotide
  Sense strand starting at position 1608 of SEQ ID NO: 1889005
aaacuuugugucggaucca

SEQ ID NO: 2572505 - RNA, 19 nt, Artificial Sequence
  Description of Artificial Sequence: Synthetic oligonucleotide
  Antisense strand to SEQ ID NO: 2572504
uggauccgacacaaaguuu

SEQ ID NO: 2572506 - RNA, 19 nt, Artificial Sequence
  Description of Artificial Sequence: Synthetic oligonucleotide
  Sense strand starting at position 1640 of SEQ ID NO: 1889005
ccaggagucuaggcuguau

SEQ ID NO: 2572507 - RNA, 19 nt, Artificial Sequence
  Description of Artificial Sequence: Synthetic oligonucleotide
  Antisense strand to SEQ ID NO: 2572506
auacagccuagacuccugg

SEQ ID NO: 2572508 - RNA, 19 nt, Artificial Sequence
  Description of Artificial Sequence: Synthetic oligonucleotide
  Sense strand starting at position 1642 of SEQ ID NO: 1889005
aggagucuaggcuguauuu

SEQ ID NO: 2572509 - RNA, 19 nt, Artificial Sequence
  Description of Artificial Sequence: Synthetic oligonucleotide
  Antisense strand to SEQ ID NO: 2572508
aaauacagccuagacuccu

SEQ ID NO: 2572510 - RNA, 19 nt, Artificial Sequence
  Description of Artificial Sequence: Synthetic oligonucleotide
  Sense strand starting at position 1685 of SEQ ID NO: 1889005
ucaagcauguacccagaaa

SEQ ID NO: 2572511 - RNA, 19 nt, Artificial Sequence
  Description of Artificial Sequence: Synthetic oligonucleotide
  Antisense strand to SEQ ID NO: 2572510
uuucuggguacaugcuuga

SEQ ID NO: 2572512 - RNA, 19 nt, Artificial Sequence
  Description of Artificial Sequence: Synthetic oligonucleotide
  Sense strand starting at position 1696 of SEQ ID NO: 1889005
cccagaaaccugcgagacu

SEQ ID NO: 2572513 - RNA, 19 nt, Artificial Sequence
  Description of Artificial Sequence: Synthetic oligonucleotide
  Antisense strand to SEQ ID NO: 2572512
agucucgcagguuucuggg

SEQ ID NO: 2572514 - RNA, 19 nt, Artificial Sequence
  Description of Artificial Sequence: Synthetic oligonucleotide
  Sense strand starting at position 1801 of SEQ ID NO: 1889005
gccuaaauuguuggacauu

SEQ ID NO: 2572515 - RNA, 19 nt, Artificial Sequence
  Description of Artificial Sequence: Synthetic oligonucleotide
  Antisense strand to SEQ ID NO: 2572514
aauguccaacaauuuaggc

SEQ ID NO: 2572516 - RNA, 19 nt, Artificial Sequence
  Description of Artificial Sequence: Synthetic oligonucleotide
  Sense strand starting at position 1855 of SEQ ID NO: 1889005
cugucccucccugaguauu

SEQ ID NO: 2572517 - RNA, 19 nt, Artificial Sequence
  Description of Artificial Sequence: Synthetic oligonucleotide
  Antisense strand to SEQ ID NO: 2572516
aauacucagggagggacag

SEQ ID NO: 2572518 - RNA, 19 nt, Artificial Sequence
  Description of Artificial Sequence: Synthetic oligonucleotide
  Sense strand starting at position 2027 of SEQ ID NO: 1889005
uuuggucugugaguuauga

SEQ ID NO: 2572519 - RNA, 19 nt, Artificial Sequence
  Description of Artificial Sequence: Synthetic oligonucleotide
  Antisense strand to SEQ ID NO: 2572518
ucauaacucacagaccaaa

SEQ ID NO: 2572520 - RNA, 19 nt, Artificial Sequence
  Description of Artificial Sequence: Synthetic oligonucleotide
  Sense strand starting at position 2029 of SEQ ID NO: 1889005
uggucugugaguuaugagu

SEQ ID NO: 2572521 - RNA, 19 nt, Artificial Sequence
  Description of Artificial Sequence: Synthetic oligonucleotide
  Antisense strand to SEQ ID NO: 2572520
acucauaacucacagacca

SEQ ID NO: 2572522 - RNA, 19 nt, Artificial Sequence
  Description of Artificial Sequence: Synthetic oligonucleotide
  Sense strand starting at position 2169 of SEQ ID NO: 1889005
gcuuguaacugagucugga

SEQ ID NO: 2572523 - RNA, 19 nt, Artificial Sequence
  Description of Artificial Sequence: Synthetic oligonucleotide
  Antisense strand to SEQ ID NO: 2572522
uccagacucaguuacaagc

SEQ ID NO: 2572524 - RNA, 19 nt, Artificial Sequence
  Description of Artificial Sequence: Synthetic oligonucleotide
  Sense strand starting at position 2172 of SEQ ID NO: 1889005
uguaacugagucuggaaau

SEQ ID NO: 2572525 - RNA, 19 nt, Artificial Sequence
  Description of Artificial Sequence: Synthetic oligonucleotide
  Antisense strand to SEQ ID NO: 2572524
auuuccagacucaguuaca

SEQ ID NO: 2572526 - RNA, 19 nt, Artificial Sequence
  Description of Artificial Sequence: Synthetic oligonucleotide
  Sense strand starting at position 2185 of SEQ ID NO: 1889005
ggaaauuccucuucugauc

SEQ ID NO: 2572527 - RNA, 19 nt, Artificial Sequence
  Description of Artificial Sequence: Synthetic oligonucleotide
  Antisense strand to SEQ ID NO: 2572526
gaucagaagaggaauuucc

SEQ ID NO: 2572528 - RNA, 19 nt, Artificial Sequence
  Description of Artificial Sequence: Synthetic oligonucleotide
  Sense strand starting at position 2307 of SEQ ID NO: 1889005
ucugaauguguuggucaug

SEQ ID NO: 2572529 - RNA, 19 nt, Artificial Sequence
  Description of Artificial Sequence: Synthetic oligonucleotide
  Antisense strand to SEQ ID NO: 2572528
caugaccaacacauucaga

SEQ ID NO: 2572530 - RNA, 19 nt, Artificial Sequence
  Description of Artificial Sequence: Synthetic oligonucleotide
  Sense strand starting at position 2310 of SEQ ID NO: 1889005
gaauguguuggucaugcuu

SEQ ID NO: 2572531 - RNA, 19 nt, Artificial Sequence
  Description of Artificial Sequence: Synthetic oligonucleotide
  Antisense strand to SEQ ID NO: 2572530
aagcaugaccaacacauuc

SEQ ID NO: 2572532 - RNA, 19 nt, Artificial Sequence
  Description of Artificial Sequence: Synthetic oligonucleotide
  Sense strand starting at position 2316 of SEQ ID NO: 1889005
guuggucaugcuuaggaga

SEQ ID NO: 2572533 - RNA, 19 nt, Artificial Sequence
  Description of Artificial Sequence: Synthetic oligonucleotide
  Antisense strand to SEQ ID NO: 2572532
ucuccuaagcaugaccaac

SEQ ID NO: 2572534 - RNA, 19 nt, Artificial Sequence
  Description of Artificial Sequence: Synthetic oligonucleotide
  Sense strand starting at position 2329 of SEQ ID NO: 1889005
aggagagaguucuuuguuu

SEQ ID NO: 2572535 - RNA, 19 nt, Artificial Sequence
  Description of Artificial Sequence: Synthetic oligonucleotide
  Antisense strand to SEQ ID NO: 2572534
aaacaaagaacucucuccu

SEQ ID NO: 2572536 - RNA, 19 nt, Artificial Sequence
  Description of Artificial Sequence: Synthetic oligonucleotide
  Sense strand starting at position 2334 of SEQ ID NO: 1889005
agaguucuuuguuucucca

SEQ ID NO: 2572537 - RNA, 19 nt, Artificial Sequence
  Description of Artificial Sequence: Synthetic oligonucleotide
  Antisense strand to SEQ ID NO: 2572536
uggagaaacaaagaacucu

SEQ ID NO: 2572538 - RNA, 19 nt, Artificial Sequence
  Description of Artificial Sequence: Synthetic oligonucleotide
  Sense strand starting at position 2454 of SEQ ID NO: 1889005
cuuucuuaggaaggguauu

SEQ ID NO: 2572539 - RNA, 19 nt, Artificial Sequence
  Description of Artificial Sequence: Synthetic oligonucleotide
  Antisense strand to SEQ ID NO: 2572538
aauacccuuccuaagaaag

SEQ ID NO: 2572540 - RNA, 19 nt, Artificial Sequence
  Description of Artificial Sequence: Synthetic oligonucleotide
  Sense strand starting at position 2472 of SEQ ID NO: 1889005
ucauuacagcauugauuag

SEQ ID NO: 2572541 - RNA, 19 nt, Artificial Sequence
  Description of Artificial Sequence: Synthetic oligonucleotide
  Antisense strand to SEQ ID NO: 2572540
cuaaucaaugcuguaauga

SEQ ID NO: 2572542 - RNA, 19 nt, Artificial Sequence
  Description of Artificial Sequence: Synthetic oligonucleotide
  Sense strand starting at position 2627 of SEQ ID NO: 1889005
auaggauauuaugcagcua

SEQ ID NO: 2572543 - RNA, 19 nt, Artificial Sequence
  Description of Artificial Sequence: Synthetic oligonucleotide
  Antisense strand to SEQ ID NO: 2572542
uagcugcauaauauccuau

SEQ ID NO: 2572544 - RNA, 19 nt, Artificial Sequence
  Description of Artificial Sequence: Synthetic oligonucleotide
  Sense strand starting at position 2661 of SEQ ID NO: 1889005
gcagauuuguaaguguuua

SEQ ID NO: 2572545 - RNA, 19 nt, Artificial Sequence
  Description of Artificial Sequence: Synthetic oligonucleotide
  Antisense strand to SEQ ID NO: 2572544
uaaacacuuacaaaucugc

SEQ ID NO: 2572546 - RNA, 19 nt, Artificial Sequence
  Description of Artificial Sequence: Synthetic oligonucleotide
  Sense strand starting at position 2696 of SEQ ID NO: 1889005
agauauauuguagggcuga

SEQ ID NO: 2572547 - RNA, 19 nt, Artificial Sequence
  Description of Artificial Sequence: Synthetic oligonucleotide
  Antisense strand to SEQ ID NO: 2572546
ucagcccuacaauauaucu

SEQ ID NO: 2572548 - RNA, 19 nt, Artificial Sequence
  Description of Artificial Sequence: Synthetic oligonucleotide
  Sense strand starting at position 2768 of SEQ ID NO: 1889005
guguguaauaguuacauag

SEQ ID NO: 2572549 - RNA, 19 nt, Artificial Sequence
  Description of Artificial Sequence: Synthetic oligonucleotide
  Antisense strand to SEQ ID NO: 2572548
cuauguaacuauuacacac

SEQ ID NO: 2572550 - RNA, 19 nt, Artificial Sequence
  Description of Artificial Sequence: Synthetic oligonucleotide
  Sense strand starting at position 2806 of SEQ ID NO: 1889005
aguaauuaugggugaggac

SEQ ID NO: 2572551 - RNA, 19 nt, Artificial Sequence
  Description of Artificial Sequence: Synthetic oligonucleotide
  Antisense strand to SEQ ID NO: 2572550
guccucacccauaauuacu

SEQ ID NO: 2572552 - RNA, 19 nt, Artificial Sequence
  Description of Artificial Sequence: Synthetic oligonucleotide
  Sense strand starting at position 2928 of SEQ ID NO: 1889005
gaaaguuguugaucuuggu

SEQ ID NO: 2572553 - RNA, 19 nt, Artificial Sequence
  Description of Artificial Sequence: Synthetic oligonucleotide
  Antisense strand to SEQ ID NO: 2572552
accaagaucaacaacuuuc

SEQ ID NO: 2572554 - RNA, 19 nt, Artificial Sequence
  Description of Artificial Sequence: Synthetic oligonucleotide
  Sense strand starting at position 3097 of SEQ ID NO: 1889005
uguuguuugcuaguguacu

SEQ ID NO: 2572555 - RNA, 19 nt, Artificial Sequence
  Description of Artificial Sequence: Synthetic oligonucleotide
  Antisense strand to SEQ ID NO: 2572554
aguacacuagcaaacaaca

SEQ ID NO: 2572556 - RNA, 19 nt, Artificial Sequence
  Description of Artificial Sequence: Synthetic oligonucleotide
  Sense strand starting at position 3108 of SEQ ID NO: 1889005
aguguacucucauuaagca

SEQ ID NO: 2572557 - RNA, 19 nt, Artificial Sequence
  Description of Artificial Sequence: Synthetic oligonucleotide
  Antisense strand to SEQ ID NO: 2572556
ugcuuaaugagaguacacu

SEQ ID NO: 2572558 - RNA, 19 nt, Artificial Sequence
  Description of Artificial Sequence: Synthetic oligonucleotide
  Sense strand starting at position 3109 of SEQ ID NO: 1889005
guguacucucauuaagcaa

SEQ ID NO: 2572559 - RNA, 19 nt, Artificial Sequence
  Description of Artificial Sequence: Synthetic oligonucleotide
  Antisense strand to SEQ ID NO: 2572558
uugcuuaaugagaguacac

SEQ ID NO: 2572560 - RNA, 19 nt, Artificial Sequence
  Description of Artificial Sequence: Synthetic oligonucleotide
  Sense strand starting at position 3120 of SEQ ID NO: 1889005
uuaagcaaugaggguauaa

SEQ ID NO: 2572561 - RNA, 19 nt, Artificial Sequence
  Description of Artificial Sequence: Synthetic oligonucleotide
  Antisense strand to SEQ ID NO: 2572560
uuauacccucauugcuuaa

SEQ ID NO: 2572562 - RNA, 19 nt, Artificial Sequence
  Description of Artificial Sequence: Synthetic oligonucleotide
  Sense strand starting at position 3172 of SEQ ID NO: 1889005
gagcuaaggcucugaaaug

SEQ ID NO: 2572563 - RNA, 19 nt, Artificial Sequence
  Description of Artificial Sequence: Synthetic oligonucleotide
  Antisense strand to SEQ ID NO: 2572562
cauuucagagccuuagcuc

SEQ ID NO: 2572564 - RNA, 19 nt, Artificial Sequence
  Description of Artificial Sequence: Synthetic oligonucleotide
  Sense strand starting at position 3322 of SEQ ID NO: 1889005
ugagguauuacagguaaag

SEQ ID NO: 2572565 - RNA, 19 nt, Artificial Sequence
  Description of Artificial Sequence: Synthetic oligonucleotide
  Antisense strand to SEQ ID NO: 2572564
cuuuaccuguaauaccuca

SEQ ID NO: 2572566 - RNA, 19 nt, Artificial Sequence
  Description of Artificial Sequence: Synthetic oligonucleotide
  Sense strand starting at position 3324 of SEQ ID NO: 1889005
agguauuacagguaaagug

SEQ ID NO: 2572567 - RNA, 19 nt, Artificial Sequence
  Description of Artificial Sequence: Synthetic oligonucleotide
  Antisense strand to SEQ ID NO: 2572566
cacuuuaccuguaauaccu

SEQ ID NO: 2572568 - RNA, 19 nt, Artificial Sequence
  Description of Artificial Sequence: Synthetic oligonucleotide
  Sense strand starting at position 3465 of SEQ ID NO: 1889005
gcucaaauaucugcaagug

SEQ ID NO: 2572569 - RNA, 19 nt, Artificial Sequence
  Description of Artificial Sequence: Synthetic oligonucleotide
  Antisense strand to SEQ ID NO: 2572568
cacuugcagauauuugagc

SEQ ID NO: 2572570 - RNA, 19 nt, Artificial Sequence
  Description of Artificial Sequence: Synthetic oligonucleotide
  Sense strand starting at position 233 of SEQ ID NO: 1889006
uuugaauggcuauguaacu

SEQ ID NO: 2572571 - RNA, 19 nt, Artificial Sequence
  Description of Artificial Sequence: Synthetic oligonucleotide
  Antisense strand to SEQ ID NO: 2572570
aguuacauagccauucaaa

SEQ ID NO: 2572572 - RNA, 19 nt, Artificial Sequence
  Description of Artificial Sequence: Synthetic oligonucleotide
  Sense strand starting at position 234 of SEQ ID NO: 1889006
uugaauggcuauguaacua

SEQ ID NO: 2572573 - RNA, 19 nt, Artificial Sequence
  Description of Artificial Sequence: Synthetic oligonucleotide
  Antisense strand to SEQ ID NO: 2572572
uaguuacauagccauucaa

SEQ ID NO: 2572574 - RNA, 19 nt, Artificial Sequence
  Description of Artificial Sequence: Synthetic oligonucleotide
  Sense strand starting at position 582 of SEQ ID NO: 1889006
ggaucuuuagacugagugu

SEQ ID NO: 2572575 - RNA, 19 nt, Artificial Sequence
  Description of Artificial Sequence: Synthetic oligonucleotide
  Antisense strand to SEQ ID NO: 2572574
acacucagucuaaagaucc

SEQ ID NO: 2572576 - RNA, 19 nt, Artificial Sequence
  Description of Artificial Sequence: Synthetic oligonucleotide
  Sense strand starting at position 585 of SEQ ID NO: 1889006
ucuuuagacugaguguaau

SEQ ID NO: 2572577 - RNA, 19 nt, Artificial Sequence
  Description of Artificial Sequence: Synthetic oligonucleotide
  Antisense strand to SEQ ID NO: 2572576
auuacacucagucuaaaga

SEQ ID NO: 2572578 - RNA, 19 nt, Artificial Sequence
  Description of Artificial Sequence: Synthetic oligonucleotide
  Sense strand starting at position 588 of SEQ ID NO: 1889006
uuagacugaguguaauauu

SEQ ID NO: 2572579 - RNA, 19 nt, Artificial Sequence
  Description of Artificial Sequence: Synthetic oligonucleotide
  Antisense strand to SEQ ID NO: 2572578
aauauuacacucagucuaa

SEQ ID NO: 2572580 - RNA, 19 nt, Artificial Sequence
  Description of Artificial Sequence: Synthetic oligonucleotide
  Sense strand starting at position 596 of SEQ ID NO: 1889006
aguguaauauuuguccacu

SEQ ID NO: 2572581 - RNA, 19 nt, Artificial Sequence
  Description of Artificial Sequence: Synthetic oligonucleotide
  Antisense strand to SEQ ID NO: 2572580
aguggacaaauauuacacu

SEQ ID NO: 2572582 - RNA, 19 nt, Artificial Sequence
  Description of Artificial Sequence: Synthetic oligonucleotide
  Sense strand starting at position 597 of SEQ ID NO: 1889006
guguaauauuuguccacug

SEQ ID NO: 2572583 - RNA, 19 nt, Artificial Sequence
  Description of Artificial Sequence: Synthetic oligonucleotide
  Antisense strand to SEQ ID NO: 2572582
caguggacaaauauuacac

SEQ ID NO: 2572584 - RNA, 19 nt, Artificial Sequence
  Description of Artificial Sequence: Synthetic oligonucleotide
  Sense strand starting at position 598 of SEQ ID NO: 1889006
uguaauauuuguccacugu

SEQ ID NO: 2572585 - RNA, 19 nt, Artificial Sequence
  Description of Artificial Sequence: Synthetic oligonucleotide
  Antisense strand to SEQ ID NO: 2572584
acaguggacaaauauuaca

SEQ ID NO: 2572586 - RNA, 19 nt, Artificial Sequence
  Description of Artificial Sequence: Synthetic oligonucleotide
  Sense strand starting at position 602 of SEQ ID NO: 1889006
auauuuguccacuguaguu

SEQ ID NO: 2572587 - RNA, 19 nt, Artificial Sequence
  Description of Artificial Sequence: Synthetic oligonucleotide
  Antisense strand to SEQ ID NO: 2572586
aacuacaguggacaaauau

SEQ ID NO: 2572588 - RNA, 19 nt, Artificial Sequence
  Description of Artificial Sequence: Synthetic oligonucleotide
  Sense strand starting at position 655 of SEQ ID NO: 1889006
ggaggaguauguuucacug

SEQ ID NO: 2572589 - RNA, 19 nt, Artificial Sequence
  Description of Artificial Sequence: Synthetic oligonucleotide
  Antisense strand to SEQ ID NO: 2572588
cagugaaacauacuccucc

SEQ ID NO: 2572590 - RNA, 19 nt, Artificial Sequence
  Description of Artificial Sequence: Synthetic oligonucleotide
  Sense strand starting at position 759 of SEQ ID NO: 1889006
agaacuccuugcuuugaca

SEQ ID NO: 2572591 - RNA, 19 nt, Artificial Sequence
  Description of Artificial Sequence: Synthetic oligonucleotide
  Antisense strand to SEQ ID NO: 2572590
ugucaaagcaaggaguucu

SEQ ID NO: 2572592 - RNA, 19 nt, Artificial Sequence
  Description of Artificial Sequence: Synthetic oligonucleotide
  Sense strand starting at position 1068 of SEQ ID NO: 1889006
gggacuucgcuggagagau

SEQ ID NO: 2572593 - RNA, 19 nt, Artificial Sequence
  Description of Artificial Sequence: Synthetic oligonucleotide
  Antisense strand to SEQ ID NO: 2572592
aucucuccagcgaaguccc

SEQ ID NO: 2572594 - RNA, 19 nt, Artificial Sequence
  Description of Artificial Sequence: Synthetic oligonucleotide
  Sense strand starting at position 1094 of SEQ ID NO: 1889006
gccugaggucaaggagaaa

SEQ ID NO: 2572595 - RNA, 19 nt, Artificial Sequence
  Description of Artificial Sequence: Synthetic oligonucleotide
  Antisense strand to SEQ ID NO: 2572594
uuucuccuugaccucaggc

SEQ ID NO: 2572596 - RNA, 19 nt, Artificial Sequence
  Description of Artificial Sequence: Synthetic oligonucleotide
  Sense strand starting at position 1126 of SEQ ID NO: 1889006
uccuuugaagacuguaagu

SEQ ID NO: 2572597 - RNA, 19 nt, Artificial Sequence
  Description of Artificial Sequence: Synthetic oligonucleotide
  Antisense strand to SEQ ID NO: 2572596
acuuacagucuucaaagga

SEQ ID NO: 2572598 - RNA, 19 nt, Artificial Sequence
  Description of Artificial Sequence: Synthetic oligonucleotide
  Sense strand starting at position 1131 of SEQ ID NO: 1889006
ugaagacuguaagugacau

SEQ ID NO: 2572599 - RNA, 19 nt, Artificial Sequence
  Description of Artificial Sequence: Synthetic oligonucleotide
  Antisense strand to SEQ ID NO: 2572598
augucacuuacagucuuca

SEQ ID NO: 2572600 - RNA, 19 nt, Artificial Sequence
  Description of Artificial Sequence: Synthetic oligonucleotide
  Sense strand starting at position 1257 of SEQ ID NO: 1889006
ccauuuagggcuuguaagu

SEQ ID NO: 2572601 - RNA, 19 nt, Artificial Sequence
  Description of Artificial Sequence: Synthetic oligonucleotide
  Antisense strand to SEQ ID NO: 2572600
acuuacaagcccuaaaugg

SEQ ID NO: 2572602 - RNA, 19 nt, Artificial Sequence
  Description of Artificial Sequence: Synthetic oligonucleotide
  Sense strand starting at position 1328 of SEQ ID NO: 1889006
cuggguacaugcuugaauu

SEQ ID NO: 2572603 - RNA, 19 nt, Artificial Sequence
  Description of Artificial Sequence: Synthetic oligonucleotide
  Antisense strand to SEQ ID NO: 2572602
aauucaagcauguacccag

SEQ ID NO: 2572604 - RNA, 19 nt, Artificial Sequence
  Description of Artificial Sequence: Synthetic oligonucleotide
  Sense strand starting at position 1329 of SEQ ID NO: 1889006
uggguacaugcuugaauug

SEQ ID NO: 2572605 - RNA, 19 nt, Artificial Sequence
  Description of Artificial Sequence: Synthetic oligonucleotide
  Antisense strand to SEQ ID NO: 2572604
caauucaagcauguaccca

SEQ ID NO: 2572606 - RNA, 19 nt, Artificial Sequence
  Description of Artificial Sequence: Synthetic oligonucleotide
  Sense strand starting at position 1330 of SEQ ID NO: 1889006
ggguacaugcuugaauuga

SEQ ID NO: 2572607 - RNA, 19 nt, Artificial Sequence
  Description of Artificial Sequence: Synthetic oligonucleotide
  Antisense strand to SEQ ID NO: 2572606
ucaauucaagcauguaccc

SEQ ID NO: 2572608 - RNA, 19 nt, Artificial Sequence
  Description of Artificial Sequence: Synthetic oligonucleotide
  Sense strand starting at position 1401 of SEQ ID NO: 1889006
guggauccgacacaaaguu

SEQ ID NO: 2572609 - RNA, 19 nt, Artificial Sequence
  Description of Artificial Sequence: Synthetic oligonucleotide
  Antisense strand to SEQ ID NO: 2572608
aacuuugugucggauccac

SEQ ID NO: 2572610 - RNA, 19 nt, Artificial Sequence
  Description of Artificial Sequence: Synthetic oligonucleotide
  Sense strand starting at position 1441 of SEQ ID NO: 1889006
gggaaagauagucggaagu

SEQ ID NO: 2572611 - RNA, 19 nt, Artificial Sequence
  Description of Artificial Sequence: Synthetic oligonucleotide
  Antisense strand to SEQ ID NO: 2572610
acuuccgacuaucuuuccc

SEQ ID NO: 2572612 - RNA, 19 nt, Artificial Sequence
  Description of Artificial Sequence: Synthetic oligonucleotide
  Sense strand starting at position 1588 of SEQ ID NO: 1889006
uguuauacauaaucaacga

SEQ ID NO: 2572613 - RNA, 19 nt, Artificial Sequence
  Description of Artificial Sequence: Synthetic oligonucleotide
  Antisense strand to SEQ ID NO: 2572612
ucguugauuauguauaaca

SEQ ID NO: 2572614 - RNA, 19 nt, Artificial Sequence
  Description of Artificial Sequence: Synthetic oligonucleotide
  Sense strand starting at position 1616 of SEQ ID NO: 1889006
auuagucuuuaggccuaaa

SEQ ID NO: 2572615 - RNA, 19 nt, Artificial Sequence
  Description of Artificial Sequence: Synthetic oligonucleotide
  Antisense strand to SEQ ID NO: 2572614
uuuaggccuaaagacuaau

SEQ ID NO: 2572616 - RNA, 19 nt, Artificial Sequence
  Description of Artificial Sequence: Synthetic oligonucleotide
  Sense strand starting at position 1655 of SEQ ID NO: 1889006
cuugaauauugguuaccuu

SEQ ID NO: 2572617 - RNA, 19 nt, Artificial Sequence
  Description of Artificial Sequence: Synthetic oligonucleotide
  Antisense strand to SEQ ID NO: 2572616
aagguaaccaauauucaag

SEQ ID NO: 2572618 - RNA, 19 nt, Artificial Sequence
  Description of Artificial Sequence: Synthetic oligonucleotide
  Sense strand starting at position 1656 of SEQ ID NO: 1889006
uugaauauugguuaccuuu

SEQ ID NO: 2572619 - RNA, 19 nt, Artificial Sequence
  Description of Artificial Sequence: Synthetic oligonucleotide
  Antisense strand to SEQ ID NO: 2572618
aaagguaaccaauauucaa

SEQ ID NO: 2572620 - RNA, 19 nt, Artificial Sequence
  Description of Artificial Sequence: Synthetic oligonucleotide
  Sense strand starting at position 2672 of SEQ ID NO: 1889006
ggguaaugugcguccuucu

SEQ ID NO: 2572621 - RNA, 19 nt, Artificial Sequence
  Description of Artificial Sequence: Synthetic oligonucleotide
  Antisense strand to SEQ ID NO: 2572620
agaaggacgcacauuaccc

SEQ ID NO: 2572622 - RNA, 19 nt, Artificial Sequence
  Description of Artificial Sequence: Synthetic oligonucleotide
  Sense strand starting at position 3211 of SEQ ID NO: 1889006
ucugguaggaguuggugaa

SEQ ID NO: 2572623 - RNA, 19 nt, Artificial Sequence
  Description of Artificial Sequence: Synthetic oligonucleotide
  Antisense strand to SEQ ID NO: 2572622
uucaccaacuccuaccaga

SEQ ID NO: 2572624 - RNA, 19 nt, Artificial Sequence
  Description of Artificial Sequence: Synthetic oligonucleotide
  Sense strand starting at position 3425 of SEQ ID NO: 1889006
gcaguuugccuccaugaga

SEQ ID NO: 2572625 - RNA, 19 nt, Artificial Sequence
  Description of Artificial Sequence: Synthetic oligonucleotide
  Antisense strand to SEQ ID NO: 2572624
ucucauggaggcaaacugc

SEQ ID NO: 2572626 - RNA, 19 nt, Artificial Sequence
  Description of Artificial Sequence: Synthetic oligonucleotide
  Sense strand starting at position 3428 of SEQ ID NO: 1889006
guuugccuccaugagagau

SEQ ID NO: 2572627 - RNA, 19 nt, Artificial Sequence
  Description of Artificial Sequence: Synthetic oligonucleotide
  Antisense strand to SEQ ID NO: 2572626
aucucucauggaggcaaac

SEQ ID NO: 2572628 - RNA, 19 nt, Artificial Sequence
  Description of Artificial Sequence: Synthetic oligonucleotide
  Sense strand starting at position 3489 of SEQ ID NO: 1889006
cugguuaaucaacagucuu

SEQ ID NO: 2572629 - RNA, 19 nt, Artificial Sequence
  Description of Artificial Sequence: Synthetic oligonucleotide
  Antisense strand to SEQ ID NO: 2572628
aagacuguugauuaaccag

SEQ ID NO: 2572630 - RNA, 19 nt, Artificial Sequence
  Description of Artificial Sequence: Synthetic oligonucleotide
  Sense strand starting at position 3551 of SEQ ID NO: 1889006
gugguaauccgacaucgac

SEQ ID NO: 2572631 - RNA, 19 nt, Artificial Sequence
  Description of Artificial Sequence: Synthetic oligonucleotide
  Antisense strand to SEQ ID NO: 2572630
gucgaugucggauuaccac

SEQ ID NO: 2572632 - RNA, 19 nt, Artificial Sequence
  Description of Artificial Sequence: Synthetic oligonucleotide
  Sense strand starting at position 3643 of SEQ ID NO: 1889006
uuacuccugccauggaaga

SEQ ID NO: 2572633 - RNA, 19 nt, Artificial Sequence
  Description of Artificial Sequence: Synthetic oligonucleotide
  Antisense strand to SEQ ID NO: 2572632
ucuuccauggcaggaguaa

SEQ ID NO: 2572634 - RNA, 19 nt, Artificial Sequence
  Description of Artificial Sequence: Synthetic oligonucleotide
  Sense strand starting at position 3674 of SEQ ID NO: 1889006
uucuauagagcguaguaaa

SEQ ID NO: 2572635 - RNA, 19 nt, Artificial Sequence
  Description of Artificial Sequence: Synthetic oligonucleotide
  Antisense strand to SEQ ID NO: 2572634
uuuacuacgcucuauagaa

SEQ ID NO: 2572636 - RNA, 19 nt, Artificial Sequence
  Description of Artificial Sequence: Synthetic oligonucleotide
  Sense strand starting at position 3694 of SEQ ID NO: 1889006
aguaacaagcgucaacaaa

SEQ ID NO: 2572637 - RNA, 19 nt, Artificial Sequence
  Description of Artificial Sequence: Synthetic oligonucleotide
  Antisense strand to SEQ ID NO: 2572636
uuuguugacgcuuguuacu

SEQ ID NO: 2572638 - RNA, 19 nt, Artificial Sequence
  Description of Artificial Sequence: Synthetic oligonucleotide
  Sense strand starting at position 3749 of SEQ ID NO: 1889006
aaagaaaugucagucugug

SEQ ID NO: 2572639 - RNA, 19 nt, Artificial Sequence
  Description of Artificial Sequence: Synthetic oligonucleotide
  Antisense strand to SEQ ID NO: 2572638
cacagacugacauuucuuu

SEQ ID NO: 2572640 - RNA, 19 nt, Artificial Sequence
  Description of Artificial Sequence: Synthetic oligonucleotide
  Sense strand starting at position 3764 of SEQ ID NO: 1889006
uguguauauuucgccugga

SEQ ID NO: 2572641 - RNA, 19 nt, Artificial Sequence
  Description of Artificial Sequence: Synthetic oligonucleotide
  Antisense strand to SEQ ID NO: 2572640
uccaggcgaaauauacaca

SEQ ID NO: 2572642 - RNA, 19 nt, Artificial Sequence
  Description of Artificial Sequence: Synthetic oligonucleotide
  Sense strand starting at position 3765 of SEQ ID NO: 1889006
guguauauuucgccuggaa

SEQ ID NO: 2572643 - RNA, 19 nt, Artificial Sequence
  Description of Artificial Sequence: Synthetic oligonucleotide
  Antisense strand to SEQ ID NO: 2572642
uuccaggcgaaauauacac

SEQ ID NO: 2572644 - RNA, 19 nt, Artificial Sequence
  Description of Artificial Sequence: Synthetic oligonucleotide
  Sense strand starting at position 3767 of SEQ ID NO: 1889006
guauauuucgccuggaaua

SEQ ID NO: 2572645 - RNA, 19 nt, Artificial Sequence
  Description of Artificial Sequence: Synthetic oligonucleotide
  Antisense strand to SEQ ID NO: 2572644
uauuccaggcgaaauauac

SEQ ID NO: 2572646 - RNA, 19 nt, Artificial Sequence
  Description of Artificial Sequence: Synthetic oligonucleotide
  Sense strand starting at position 3850 of SEQ ID NO: 1889006
acaaauaaucucggguaaa

SEQ ID NO: 2572647 - RNA, 19 nt, Artificial Sequence
  Description of Artificial Sequence: Synthetic oligonucleotide
  Antisense strand to SEQ ID NO: 2572646
uuuacccgagauuauuugu

SEQ ID NO: 2572648 - RNA, 19 nt, Artificial Sequence
  Description of Artificial Sequence: Synthetic oligonucleotide
  Sense strand starting at position 3901 of SEQ ID NO: 1889006
uuaucuguugcacagauaa

SEQ ID NO: 2572649 - RNA, 19 nt, Artificial Sequence
  Description of Artificial Sequence: Synthetic oligonucleotide
  Antisense strand to SEQ ID NO: 2572648
uuaucugugcaacagauaa

SEQ ID NO: 2572650 - RNA, 19 nt, Artificial Sequence
  Description of Artificial Sequence: Synthetic oligonucleotide
  Sense strand starting at position 19 of SEQ ID NO: 1889007
gaauguuacgagcauaaga

SEQ ID NO: 2572651 - RNA, 19 nt, Artificial Sequence
  Description of Artificial Sequence: Synthetic oligonucleotide
  Antisense strand to SEQ ID NO: 2572650
ucuuaugcucguaacauuc

SEQ ID NO: 2572652 - RNA, 19 nt, Artificial Sequence
  Description of Artificial Sequence: Synthetic oligonucleotide
  Sense strand starting at position 21 of SEQ ID NO: 1889007
auguuacgagcauaagaua

SEQ ID NO: 2572653 - RNA, 19 nt, Artificial Sequence
  Description of Artificial Sequence: Synthetic oligonucleotide
  Antisense strand to SEQ ID NO: 2572652
uaucuuaugcucguaacau

SEQ ID NO: 2572654 - RNA, 19 nt, Artificial Sequence
  Description of Artificial Sequence: Synthetic oligonucleotide
  Sense strand starting at position 108 of SEQ ID NO: 1889007
guggaucccagacagguau

SEQ ID NO: 2572655 - RNA, 19 nt, Artificial Sequence
  Description of Artificial Sequence: Synthetic oligonucleotide
  Antisense strand to SEQ ID NO: 2572654
auaccugucugggauccac

SEQ ID NO: 2572656 - RNA, 19 nt, Artificial Sequence
  Description of Artificial Sequence: Synthetic oligonucleotide
  Sense strand starting at position 110 of SEQ ID NO: 1889007
ggaucccagacagguauau

SEQ ID NO: 2572657 - RNA, 19 nt, Artificial Sequence
  Description of Artificial Sequence: Synthetic oligonucleotide
  Antisense strand to SEQ ID NO: 2572656
auauaccugucugggaucc

SEQ ID NO: 2572658 - RNA, 19 nt, Artificial Sequence
  Description of Artificial Sequence: Synthetic oligonucleotide
  Sense strand starting at position 151 of SEQ ID NO: 1889007
aaagcuguccuagaccaga

SEQ ID NO: 2572659 - RNA, 19 nt, Artificial Sequence
  Description of Artificial Sequence: Synthetic oligonucleotide
  Antisense strand to SEQ ID NO: 2572658
ucuggucuaggacagcuuu

SEQ ID NO: 2572660 - RNA, 19 nt, Artificial Sequence
  Description of Artificial Sequence: Synthetic oligonucleotide
  Sense strand starting at position 212 of SEQ ID NO: 1889007
ucauccaucguguagacaa

SEQ ID NO: 2572661 - RNA, 19 nt, Artificial Sequence
  Description of Artificial Sequence: Synthetic oligonucleotide
  Antisense strand to SEQ ID NO: 2572660
uugucuacacgauggauga

SEQ ID NO: 2572662 - RNA, 19 nt, Artificial Sequence
  Description of Artificial Sequence: Synthetic oligonucleotide
  Sense strand starting at position 370 of SEQ ID NO: 1889007
aguguuacccuaggucaaa

SEQ ID NO: 2572663 - RNA, 19 nt, Artificial Sequence
  Description of Artificial Sequence: Synthetic oligonucleotide
  Antisense strand to SEQ ID NO: 2572662
uuugaccuaggguaacacu

SEQ ID NO: 2572664 - RNA, 19 nt, Artificial Sequence
  Description of Artificial Sequence: Synthetic oligonucleotide
  Sense strand starting at position 371 of SEQ ID NO: 1889007
guguuacccuaggucaaau

SEQ ID NO: 2572665 - RNA, 19 nt, Artificial Sequence
  Description of Artificial Sequence: Synthetic oligonucleotide
  Antisense strand to SEQ ID NO: 2572664
auuugaccuaggguaacac

SEQ ID NO: 2572666 - RNA, 19 nt, Artificial Sequence
  Description of Artificial Sequence: Synthetic oligonucleotide
  Sense strand starting at position 517 of SEQ ID NO: 1889007
ccuguacugccagacaacu

SEQ ID NO: 2572667 - RNA, 19 nt, Artificial Sequence
  Description of Artificial Sequence: Synthetic oligonucleotide
  Antisense strand to SEQ ID NO: 2572666
aguugucuggcaguacagg

SEQ ID NO: 2572668 - RNA, 19 nt, Artificial Sequence
  Description of Artificial Sequence: Synthetic oligonucleotide
  Sense strand starting at position 684 of SEQ ID NO: 1889007
ggaauaguauuaccucacu

SEQ ID NO: 2572669 - RNA, 19 nt, Artificial Sequence
  Description of Artificial Sequence: Synthetic oligonucleotide
  Antisense strand to SEQ ID NO: 2572668
agugagguaauacuauucc

SEQ ID NO: 2572670 - RNA, 19 nt, Artificial Sequence
  Description of Artificial Sequence: Synthetic oligonucleotide
  Sense strand starting at position 687 of SEQ ID NO: 1889007
auaguauuaccucacugca

SEQ ID NO: 2572671 - RNA, 19 nt, Artificial Sequence
  Description of Artificial Sequence: Synthetic oligonucleotide
  Antisense strand to SEQ ID NO: 2572670
ugcagugagguaauacuau

SEQ ID NO: 2572672 - RNA, 19 nt, Artificial Sequence
  Description of Artificial Sequence: Synthetic oligonucleotide
  Sense strand starting at position 712 of SEQ ID NO: 1889007
uccucaaguuuauuggaca

SEQ ID NO: 2572673 - RNA, 19 nt, Artificial Sequence
  Description of Artificial Sequence: Synthetic oligonucleotide
  Antisense strand to SEQ ID NO: 2572672
uguccaauaaacuugagga

SEQ ID NO: 2572674 - RNA, 19 nt, Artificial Sequence
  Description of Artificial Sequence: Synthetic oligonucleotide
  Sense strand starting at position 835 of SEQ ID NO: 1889007
ugaacuaaguaguuuagua

SEQ ID NO: 2572675 - RNA, 19 nt, Artificial Sequence
  Description of Artificial Sequence: Synthetic oligonucleotide
  Antisense strand to SEQ ID NO: 2572674
uacuaaacuacuuaguuca

SEQ ID NO: 2572676 - RNA, 19 nt, Artificial Sequence
  Description of Artificial Sequence: Synthetic oligonucleotide
  Sense strand starting at position 935 of SEQ ID NO: 1889007
gcaacagcugcuuaacauu

SEQ ID NO: 2572677 - RNA, 19 nt, Artificial Sequence
  Description of Artificial Sequence: Synthetic oligonucleotide
  Antisense strand to SEQ ID NO: 2572676
aauguuaagcagcuguugc

SEQ ID NO: 2572678 - RNA, 19 nt, Artificial Sequence
  Description of Artificial Sequence: Synthetic oligonucleotide
  Sense strand starting at position 978 of SEQ ID NO: 1889007
uccucuugccuuugaaaga

SEQ ID NO: 2572679 - RNA, 19 nt, Artificial Sequence
  Description of Artificial Sequence: Synthetic oligonucleotide
  Antisense strand to SEQ ID NO: 2572678
ucuuucaaaggcaagagga

SEQ ID NO: 2572680 - RNA, 19 nt, Artificial Sequence
  Description of Artificial Sequence: Synthetic oligonucleotide
  Sense strand starting at position 1234 of SEQ ID NO: 1889007
cgucaacaucguuugcuau

SEQ ID NO: 2572681 - RNA, 19 nt, Artificial Sequence
  Description of Artificial Sequence: Synthetic oligonucleotide
  Antisense strand to SEQ ID NO: 2572680
auagcaaacgauguugacg

SEQ ID NO: 2572682 - RNA, 19 nt, Artificial Sequence
  Description of Artificial Sequence: Synthetic oligonucleotide
  Sense strand starting at position 1415 of SEQ ID NO: 1889007
ccaacauuggcugggaaca

SEQ ID NO: 2572683 - RNA, 19 nt, Artificial Sequence
  Description of Artificial Sequence: Synthetic oligonucleotide
  Antisense strand to SEQ ID NO: 2572682
uguucccagccaauguugg

SEQ ID NO: 2572684 - RNA, 19 nt, Artificial Sequence
  Description of Artificial Sequence: Synthetic oligonucleotide
  Sense strand starting at position 1416 of SEQ ID NO: 1889007
caacauuggcugggaacau

SEQ ID NO: 2572685 - RNA, 19 nt, Artificial Sequence
  Description of Artificial Sequence: Synthetic oligonucleotide
  Antisense strand to SEQ ID NO: 2572684
auguucccagccaauguug

SEQ ID NO: 2572686 - RNA, 19 nt, Artificial Sequence
  Description of Artificial Sequence: Synthetic oligonucleotide
  Sense strand starting at position 1615 of SEQ ID NO: 1889007
agccaaacuuucucgagaa

SEQ ID NO: 2572687 - RNA, 19 nt, Artificial Sequence
  Description of Artificial Sequence: Synthetic oligonucleotide
  Antisense strand to SEQ ID NO: 2572686
uucucgagaaaguuuggcu

SEQ ID NO: 2572688 - RNA, 19 nt, Artificial Sequence
  Description of Artificial Sequence: Synthetic oligonucleotide
  Sense strand starting at position 1967 of SEQ ID NO: 1889007
acuuuauacugcccgggaa

SEQ ID NO: 2572689 - RNA, 19 nt, Artificial Sequence
  Description of Artificial Sequence: Synthetic oligonucleotide
  Antisense strand to SEQ ID NO: 2572688
uucccgggcaguauaaagu

SEQ ID NO: 2572690 - RNA, 19 nt, Artificial Sequence
  Description of Artificial Sequence: Synthetic oligonucleotide
  Sense strand starting at position 2239 of SEQ ID NO: 1889007
guuuauugagcguccuagu

SEQ ID NO: 2572691 - RNA, 19 nt, Artificial Sequence
  Description of Artificial Sequence: Synthetic oligonucleotide
  Antisense strand to SEQ ID NO: 2572690
acuaggacgcucaauaaac

SEQ ID NO: 2572692 - RNA, 19 nt, Artificial Sequence
  Description of Artificial Sequence: Synthetic oligonucleotide
  Sense strand starting at position 2316 of SEQ ID NO: 1889007
aaaugugaugaggguagau

SEQ ID NO: 2572693 - RNA, 19 nt, Artificial Sequence
  Description of Artificial Sequence: Synthetic oligonucleotide
  Antisense strand to SEQ ID NO: 2572692
aucuacccucaucacauuu

SEQ ID NO: 2572694 - RNA, 19 nt, Artificial Sequence
  Description of Artificial Sequence: Synthetic oligonucleotide
  Sense strand starting at position 2435 of SEQ ID NO: 1889007
gggaauuucugauaaauac

SEQ ID NO: 2572695 - RNA, 19 nt, Artificial Sequence
  Description of Artificial Sequence: Synthetic oligonucleotide
  Antisense strand to SEQ ID NO: 2572694
guauuuaucagaaauuccc

SEQ ID NO: 2572696 - RNA, 19 nt, Artificial Sequence
  Description of Artificial Sequence: Synthetic oligonucleotide
  Sense strand starting at position 2937 of SEQ ID NO: 1889007
acgcuaauuuauucugcga

SEQ ID NO: 2572697 - RNA, 19 nt, Artificial Sequence
  Description of Artificial Sequence: Synthetic oligonucleotide
  Antisense strand to SEQ ID NO: 2572696
ucgcagaauaaauuagcgu

SEQ ID NO: 2572698 - RNA, 19 nt, Artificial Sequence
  Description of Artificial Sequence: Synthetic oligonucleotide
  Sense strand starting at position 3344 of SEQ ID NO: 1889007
aguauaguaugucccaaau

SEQ ID NO: 2572699 - RNA, 19 nt, Artificial Sequence
  Description of Artificial Sequence: Synthetic oligonucleotide
  Antisense strand to SEQ ID NO: 2572698
auuugggacauacuauacu

SEQ ID NO: 2572700 - RNA, 19 nt, Artificial Sequence
  Description of Artificial Sequence: Synthetic oligonucleotide
  Sense strand starting at position 3521 of SEQ ID NO: 1889007
ugauuaaugccagggagga

SEQ ID NO: 2572701 - RNA, 19 nt, Artificial Sequence
  Description of Artificial Sequence: Synthetic oligonucleotide
  Antisense strand to SEQ ID NO: 2572700
uccucccuggcauuaauca

SEQ ID NO: 2572702 - RNA, 19 nt, Artificial Sequence
  Description of Artificial Sequence: Synthetic oligonucleotide
  Sense strand starting at position 3548 of SEQ ID NO: 1889007
aguugcuuugauggacaau

SEQ ID NO: 2572703 - RNA, 19 nt, Artificial Sequence
  Description of Artificial Sequence: Synthetic oligonucleotide
  Antisense strand to SEQ ID NO: 2572702
auuguccaucaaagcaacu

SEQ ID NO: 2572704 - RNA, 19 nt, Artificial Sequence
  Description of Artificial Sequence: Synthetic oligonucleotide
  Sense strand starting at position 3549 of SEQ ID NO: 1889007
guugcuuugauggacaaua

SEQ ID NO: 2572705 - RNA, 19 nt, Artificial Sequence
  Description of Artificial Sequence: Synthetic oligonucleotide
  Antisense strand to SEQ ID NO: 2572704
uauuguccaucaaagcaac

SEQ ID NO: 2572706 - RNA, 19 nt, Artificial Sequence
  Description of Artificial Sequence: Synthetic oligonucleotide
  Sense strand starting at position 3551 of SEQ ID NO: 1889007
ugcuuugauggacaauauu

SEQ ID NO: 2572707 - RNA, 19 nt, Artificial Sequence
  Description of Artificial Sequence: Synthetic oligonucleotide
  Antisense strand to SEQ ID NO: 2572706
aauauuguccaucaaagca

SEQ ID NO: 2572708 - RNA, 19 nt, Artificial Sequence
  Description of Artificial Sequence: Synthetic oligonucleotide
  Sense strand starting at position 3597 of SEQ ID NO: 1889007
agggaaggucuaugugaag

SEQ ID NO: 2572709 - RNA, 19 nt, Artificial Sequence
  Description of Artificial Sequence: Synthetic oligonucleotide
  Antisense strand to SEQ ID NO: 2572708
cuucacauagaccuucccu

SEQ ID NO: 2572710 - RNA, 19 nt, Artificial Sequence
  Description of Artificial Sequence: Synthetic oligonucleotide
  Sense strand starting at position 3603 of SEQ ID NO: 1889007
ggucuaugugaagagguga

SEQ ID NO: 2572711 - RNA, 19 nt, Artificial Sequence
  Description of Artificial Sequence: Synthetic oligonucleotide
  Antisense strand to SEQ ID NO: 2572710
ucaccucuucacauagacc

SEQ ID NO: 2572712 - RNA, 19 nt, Artificial Sequence
  Description of Artificial Sequence: Synthetic oligonucleotide
  Sense strand starting at position 3720 of SEQ ID NO: 1889007
agaggaagagcuuggcaua

SEQ ID NO: 2572713 - RNA, 19 nt, Artificial Sequence
  Description of Artificial Sequence: Synthetic oligonucleotide
  Antisense strand to SEQ ID NO: 2572712
uaugccaagcucuuccucu

SEQ ID NO: 2572714 - RNA, 19 nt, Artificial Sequence
  Description of Artificial Sequence: Synthetic oligonucleotide
  Sense strand starting at position 3721 of SEQ ID NO: 1889007
gaggaagagcuuggcauau

SEQ ID NO: 2572715 - RNA, 19 nt, Artificial Sequence
  Description of Artificial Sequence: Synthetic oligonucleotide
  Antisense strand to SEQ ID NO: 2572714
auaugccaagcucuuccuc

SEQ ID NO: 2572716 - RNA, 19 nt, Artificial Sequence
  Description of Artificial Sequence: Synthetic oligonucleotide
  Sense strand starting at position 3798 of SEQ ID NO: 1889007
ccaagauuggcaggaccuu

SEQ ID NO: 2572717 - RNA, 19 nt, Artificial Sequence
  Description of Artificial Sequence: Synthetic oligonucleotide
  Antisense strand to SEQ ID NO: 2572716
aagguccugccaaucuugg

SEQ ID NO: 2572718 - RNA, 19 nt, Artificial Sequence
  Description of Artificial Sequence: Synthetic oligonucleotide
  Sense strand starting at position 3814 of SEQ ID NO: 1889007
cuuugagcccauuaaauga

SEQ ID NO: 2572719 - RNA, 19 nt, Artificial Sequence
  Description of Artificial Sequence: Synthetic oligonucleotide
  Antisense strand to SEQ ID NO: 2572718
ucauuuaaugggcucaaag

SEQ ID NO: 2572720 - RNA, 19 nt, Artificial Sequence
  Description of Artificial Sequence: Synthetic oligonucleotide
  Sense strand starting at position 3893 of SEQ ID NO: 1889007
agaggaugguggcuugaau

SEQ ID NO: 2572721 - RNA, 19 nt, Artificial Sequence
  Description of Artificial Sequence: Synthetic oligonucleotide
  Antisense strand to SEQ ID NO: 2572720
auucaagccaccauccucu

SEQ ID NO: 2572722 - RNA, 19 nt, Artificial Sequence
  Description of Artificial Sequence: Synthetic oligonucleotide
  Sense strand starting at position 3957 of SEQ ID NO: 1889007
ugaauaugauagguaucgu

SEQ ID NO: 2572723 - RNA, 19 nt, Artificial Sequence
  Description of Artificial Sequence: Synthetic oligonucleotide
  Antisense strand to SEQ ID NO: 2572722
acgauaccuaucauauuca

SEQ ID NO: 2572724 - RNA, 19 nt, Artificial Sequence
  Description of Artificial Sequence: Synthetic oligonucleotide
  Sense strand starting at position 3958 of SEQ ID NO: 1889007
gaauaugauagguaucgug

SEQ ID NO: 2572725 - RNA, 19 nt, Artificial Sequence
  Description of Artificial Sequence: Synthetic oligonucleotide
  Antisense strand to SEQ ID NO: 2572724
cacgauaccuaucauauuc

SEQ ID NO: 2572726 - RNA, 19 nt, Artificial Sequence
  Description of Artificial Sequence: Synthetic oligonucleotide
  Sense strand starting at position 3967 of SEQ ID NO: 1889007
agguaucguguuuaauggu

SEQ ID NO: 2572727 - RNA, 19 nt, Artificial Sequence
  Description of Artificial Sequence: Synthetic oligonucleotide
  Antisense strand to SEQ ID NO: 2572726
accauuaaacacgauaccu

SEQ ID NO: 2572728 - RNA, 19 nt, Artificial Sequence
  Description of Artificial Sequence: Synthetic oligonucleotide
  Sense strand starting at position 3972 of SEQ ID NO: 1889007
ucguguuuaauggugcuau

SEQ ID NO: 2572729 - RNA, 19 nt, Artificial Sequence
  Description of Artificial Sequence: Synthetic oligonucleotide
  Antisense strand to SEQ ID NO: 2572728
auagcaccauuaaacacga

SEQ ID NO: 2572730 - RNA, 19 nt, Artificial Sequence
  Description of Artificial Sequence: Synthetic oligonucleotide
  Sense strand starting at position 297 of SEQ ID NO: 1889008
ggccuuagcuucuauauuu

SEQ ID NO: 2572731 - RNA, 19 nt, Artificial Sequence
  Description of Artificial Sequence: Synthetic oligonucleotide
  Antisense strand to SEQ ID NO: 2572730
aaauauagaagcuaaggcc

SEQ ID NO: 2572732 - RNA, 19 nt, Artificial Sequence
  Description of Artificial Sequence: Synthetic oligonucleotide
  Sense strand starting at position 505 of SEQ ID NO: 1889008
acacauuaggaaugcuaga

SEQ ID NO: 2572733 - RNA, 19 nt, Artificial Sequence
  Description of Artificial Sequence: Synthetic oligonucleotide
  Antisense strand to SEQ ID NO: 2572732
ucuagcauuccuaaugugu

SEQ ID NO: 2572734 - RNA, 19 nt, Artificial Sequence
  Description of Artificial Sequence: Synthetic oligonucleotide
  Sense strand starting at position 555 of SEQ ID NO: 1889008
guggauaacaauugaaugu

SEQ ID NO: 2572735 - RNA, 19 nt, Artificial Sequence
  Description of Artificial Sequence: Synthetic oligonucleotide
  Antisense strand to SEQ ID NO: 2572734
acauucaauuguuauccac

SEQ ID NO: 2572736 - RNA, 19 nt, Artificial Sequence
  Description of Artificial Sequence: Synthetic oligonucleotide
  Sense strand starting at position 740 of SEQ ID NO: 1889008
gccagaugacuuugcauaa

SEQ ID NO: 2572737 - RNA, 19 nt, Artificial Sequence
  Description of Artificial Sequence: Synthetic oligonucleotide
  Antisense strand to SEQ ID NO: 2572736
uuaugcaaagucaucuggc

SEQ ID NO: 2572738 - RNA, 19 nt, Artificial Sequence
  Description of Artificial Sequence: Synthetic oligonucleotide
  Sense strand starting at position 741 of SEQ ID NO: 1889008
ccagaugacuuugcauaag

SEQ ID NO: 2572739 - RNA, 19 nt, Artificial Sequence
  Description of Artificial Sequence: Synthetic oligonucleotide
  Antisense strand to SEQ ID NO: 2572738
cuuaugcaaagucaucugg

SEQ ID NO: 2572740 - RNA, 19 nt, Artificial Sequence
  Description of Artificial Sequence: Synthetic oligonucleotide
  Sense strand starting at position 828 of SEQ ID NO: 1889008
agagaaugcuuucuaauuc

SEQ ID NO: 2572741 - RNA, 19 nt, Artificial Sequence
  Description of Artificial Sequence: Synthetic oligonucleotide
  Antisense strand to SEQ ID NO: 2572740
gaauuagaaagcauucucu

SEQ ID NO: 2572742 - RNA, 19 nt, Artificial Sequence
  Description of Artificial Sequence: Synthetic oligonucleotide
  Sense strand starting at position 963 of SEQ ID NO: 1889008
augaauaguuuacagaaug

SEQ ID NO: 2572743 - RNA, 19 nt, Artificial Sequence
  Description of Artificial Sequence: Synthetic oligonucleotide
  Antisense strand to SEQ ID NO: 2572742
cauucuguaaacuauucau

SEQ ID NO: 2572744 - RNA, 19 nt, Artificial Sequence
  Description of Artificial Sequence: Synthetic oligonucleotide
  Sense strand starting at position 2031 of SEQ ID NO: 1889008
uuagcaaauuagcauuaga

SEQ ID NO: 2572745 - RNA, 19 nt, Artificial Sequence
  Description of Artificial Sequence: Synthetic oligonucleotide
  Antisense strand to SEQ ID NO: 2572744
ucuaaugcuaauuugcuaa

SEQ ID NO: 2572746 - RNA, 19 nt, Artificial Sequence
  Description of Artificial Sequence: Synthetic oligonucleotide
  Sense strand starting at position 2036 of SEQ ID NO: 1889008
aaauuagcauuagaaaggu

SEQ ID NO: 2572747 - RNA, 19 nt, Artificial Sequence
  Description of Artificial Sequence: Synthetic oligonucleotide
  Antisense strand to SEQ ID NO: 2572746
accuuucuaaugcuaauuu

SEQ ID NO: 2572748 - RNA, 19 nt, Artificial Sequence
  Description of Artificial Sequence: Synthetic oligonucleotide
  Sense strand starting at position 2118 of SEQ ID NO: 1889008
guugaaugcuuucccaaga

SEQ ID NO: 2572749 - RNA, 19 nt, Artificial Sequence
  Description of Artificial Sequence: Synthetic oligonucleotide
  Antisense strand to SEQ ID NO: 2572748
ucuugggaaagcauucaac

SEQ ID NO: 2572750 - RNA, 19 nt, Artificial Sequence
  Description of Artificial Sequence: Synthetic oligonucleotide
  Sense strand starting at position 2119 of SEQ ID NO: 1889008
uugaaugcuuucccaagau

SEQ ID NO: 2572751 - RNA, 19 nt, Artificial Sequence
  Description of Artificial Sequence: Synthetic oligonucleotide
  Antisense strand to SEQ ID NO: 2572750
aucuugggaaagcauucaa

SEQ ID NO: 2572752 - RNA, 19 nt, Artificial Sequence
  Description of Artificial Sequence: Synthetic oligonucleotide
  Sense strand starting at position 2148 of SEQ ID NO: 1889008
caaagauauuagugcugac

SEQ ID NO: 2572753 - RNA, 19 nt, Artificial Sequence
  Description of Artificial Sequence: Synthetic oligonucleotide
  Antisense strand to SEQ ID NO: 2572752
gucagcacuaauaucuuug

SEQ ID NO: 2572754 - RNA, 19 nt, Artificial Sequence
  Description of Artificial Sequence: Synthetic oligonucleotide
  Sense strand starting at position 2250 of SEQ ID NO: 1889008
aguaacagugcuuauuaau

SEQ ID NO: 2572755 - RNA, 19 nt, Artificial Sequence
  Description of Artificial Sequence: Synthetic oligonucleotide
  Antisense strand to SEQ ID NO: 2572754
auuaauaagcacuguuacu

SEQ ID NO: 2572756 - RNA, 19 nt, Artificial Sequence
  Description of Artificial Sequence: Synthetic oligonucleotide
  Sense strand starting at position 2256 of SEQ ID NO: 1889008
agugcuuauuaauagacaa

SEQ ID NO: 2572757 - RNA, 19 nt, Artificial Sequence
  Description of Artificial Sequence: Synthetic oligonucleotide
  Antisense strand to SEQ ID NO: 2572756
uugucuauuaauaagcacu

SEQ ID NO: 2572758 - RNA, 19 nt, Artificial Sequence
  Description of Artificial Sequence: Synthetic oligonucleotide
  Sense strand starting at position 2349 of SEQ ID NO: 1889008
gguuguggaaucuaagauc

SEQ ID NO: 2572759 - RNA, 19 nt, Artificial Sequence
  Description of Artificial Sequence: Synthetic oligonucleotide
  Antisense strand to SEQ ID NO: 2572758
gaucuuagauuccacaacc

SEQ ID NO: 2572760 - RNA, 19 nt, Artificial Sequence
  Description of Artificial Sequence: Synthetic oligonucleotide
  Sense strand starting at position 2352 of SEQ ID NO: 1889008
uguggaaucuaagaucagu

SEQ ID NO: 2572761 - RNA, 19 nt, Artificial Sequence
  Description of Artificial Sequence: Synthetic oligonucleotide
  Antisense strand to SEQ ID NO: 2572760
acugaucuuagauuccaca

SEQ ID NO: 2572762 - RNA, 19 nt, Artificial Sequence
  Description of Artificial Sequence: Synthetic oligonucleotide
  Sense strand starting at position 2386 of SEQ ID NO: 1889008
ucuauaugcuagcaguaaa

SEQ ID NO: 2572763 - RNA, 19 nt, Artificial Sequence
  Description of Artificial Sequence: Synthetic oligonucleotide
  Antisense strand to SEQ ID NO: 2572762
uuuacugcuagcauauaga

SEQ ID NO: 2572764 - RNA, 19 nt, Artificial Sequence
  Description of Artificial Sequence: Synthetic oligonucleotide
  Sense strand starting at position 2479 of SEQ ID NO: 1889008
gcaagaacuguagagcaga

SEQ ID NO: 2572765 - RNA, 19 nt, Artificial Sequence
  Description of Artificial Sequence: Synthetic oligonucleotide
  Antisense strand to SEQ ID NO: 2572764
ucugcucuacaguucuugc

SEQ ID NO: 2572766 - RNA, 19 nt, Artificial Sequence
  Description of Artificial Sequence: Synthetic oligonucleotide
  Sense strand starting at position 2499 of SEQ ID NO: 1889008
acaacaaaguauuguaaag

SEQ ID NO: 2572767 - RNA, 19 nt, Artificial Sequence
  Description of Artificial Sequence: Synthetic oligonucleotide
  Antisense strand to SEQ ID NO: 2572766
cuuuacaauacuuuguugu

SEQ ID NO: 2572768 - RNA, 19 nt, Artificial Sequence
  Description of Artificial Sequence: Synthetic oligonucleotide
  Sense strand starting at position 2597 of SEQ ID NO: 1889008
gcauaugaacaguggaaag

SEQ ID NO: 2572769 - RNA, 19 nt, Artificial Sequence
  Description of Artificial Sequence: Synthetic oligonucleotide
  Antisense strand to SEQ ID NO: 2572768
cuuuccacuguucauaugc

SEQ ID NO: 2572770 - RNA, 19 nt, Artificial Sequence
  Description of Artificial Sequence: Synthetic oligonucleotide
  Sense strand starting at position 2759 of SEQ ID NO: 1889008
acaagccaguuauagaaua

SEQ ID NO: 2572771 - RNA, 19 nt, Artificial Sequence
  Description of Artificial Sequence: Synthetic oligonucleotide
  Antisense strand to SEQ ID NO: 2572770
uauucuauaacuggcuugu

SEQ ID NO: 2572772 - RNA, 19 nt, Artificial Sequence
  Description of Artificial Sequence: Synthetic oligonucleotide
  Sense strand starting at position 2764 of SEQ ID NO: 1889008
ccaguuauagaauauaugu

SEQ ID NO: 2572773 - RNA, 19 nt, Artificial Sequence
  Description of Artificial Sequence: Synthetic oligonucleotide
  Antisense strand to SEQ ID NO: 2572772
acauauauucuauaacugg

SEQ ID NO: 2572774 - RNA, 19 nt, Artificial Sequence
  Description of Artificial Sequence: Synthetic oligonucleotide
  Sense strand starting at position 2859 of SEQ ID NO: 1889008
uuagcugauuuauagacuu

SEQ ID NO: 2572775 - RNA, 19 nt, Artificial Sequence
  Description of Artificial Sequence: Synthetic oligonucleotide
  Antisense strand to SEQ ID NO: 2572774
aagucuauaaaucagcuaa

SEQ ID NO: 2572776 - RNA, 19 nt, Artificial Sequence
  Description of Artificial Sequence: Synthetic oligonucleotide
  Sense strand starting at position 2973 of SEQ ID NO: 1889008
uugacaaaggccuauguaa

SEQ ID NO: 2572777 - RNA, 19 nt, Artificial Sequence
  Description of Artificial Sequence: Synthetic oligonucleotide
  Antisense strand to SEQ ID NO: 2572776
uuacauaggccuuugucaa

SEQ ID NO: 2572778 - RNA, 19 nt, Artificial Sequence
  Description of Artificial Sequence: Synthetic oligonucleotide
  Sense strand starting at position 3126 of SEQ ID NO: 1889008
agauuuagaugucacaucu

SEQ ID NO: 2572779 - RNA, 19 nt, Artificial Sequence
  Description of Artificial Sequence: Synthetic oligonucleotide
  Antisense strand to SEQ ID NO: 2572778
agaugugacaucuaaaucu

SEQ ID NO: 2572780 - RNA, 19 nt, Artificial Sequence
  Description of Artificial Sequence: Synthetic oligonucleotide
  Sense strand starting at position 3253 of SEQ ID NO: 1889008
gucgauaacuaucuuaguc

SEQ ID NO: 2572781 - RNA, 19 nt, Artificial Sequence
  Description of Artificial Sequence: Synthetic oligonucleotide
  Antisense strand to SEQ ID NO: 2572780
gacuaagauaguuaucgac

SEQ ID NO: 2572782 - RNA, 19 nt, Artificial Sequence
  Description of Artificial Sequence: Synthetic oligonucleotide
  Sense strand starting at position 3255 of SEQ ID NO: 1889008
cgauaacuaucuuagucua

SEQ ID NO: 2572783 - RNA, 19 nt, Artificial Sequence
  Description of Artificial Sequence: Synthetic oligonucleotide
  Antisense strand to SEQ ID NO: 2572782
uagacuaagauaguuaucg

SEQ ID NO: 2572784 - RNA, 19 nt, Artificial Sequence
  Description of Artificial Sequence: Synthetic oligonucleotide
  Sense strand starting at position 3385 of SEQ ID NO: 1889008
guguguagugaggguugca

SEQ ID NO: 2572785 - RNA, 19 nt, Artificial Sequence
  Description of Artificial Sequence: Synthetic oligonucleotide
  Antisense strand to SEQ ID NO: 2572784
ugcaacccucacuacacac

SEQ ID NO: 2572786 - RNA, 19 nt, Artificial Sequence
  Description of Artificial Sequence: Synthetic oligonucleotide
  Sense strand starting at position 3397 of SEQ ID NO: 1889008
gguugcacacuuugucuaa

SEQ ID NO: 2572787 - RNA, 19 nt, Artificial Sequence
  Description of Artificial Sequence: Synthetic oligonucleotide
  Antisense strand to SEQ ID NO: 2572786
uuagacaaagugugcaacc

SEQ ID NO: 2572788 - RNA, 19 nt, Artificial Sequence
  Description of Artificial Sequence: Synthetic oligonucleotide
  Sense strand starting at position 3399 of SEQ ID NO: 1889008
uugcacacuuugucuaaga

SEQ ID NO: 2572789 - RNA, 19 nt, Artificial Sequence
  Description of Artificial Sequence: Synthetic oligonucleotide
  Antisense strand to SEQ ID NO: 2572788
ucuuagacaaagugugcaa

SEQ ID NO: 2572790 - RNA, 19 nt, Artificial Sequence
  Description of Artificial Sequence: Synthetic oligonucleotide
  Sense strand starting at position 3400 of SEQ ID NO: 1889008
ugcacacuuugucuaagau

SEQ ID NO: 2572791 - RNA, 19 nt, Artificial Sequence
  Description of Artificial Sequence: Synthetic oligonucleotide
  Antisense strand to SEQ ID NO: 2572790
aucuuagacaaagugugca

SEQ ID NO: 2572792 - RNA, 19 nt, Artificial Sequence
  Description of Artificial Sequence: Synthetic oligonucleotide
  Sense strand starting at position 3401 of SEQ ID NO: 1889008
gcacacuuugucuaagaua

SEQ ID NO: 2572793 - RNA, 19 nt, Artificial Sequence
  Description of Artificial Sequence: Synthetic oligonucleotide
  Antisense strand to SEQ ID NO: 2572792
uaucuuagacaaagugugc

SEQ ID NO: 2572794 - RNA, 19 nt, Artificial Sequence
  Description of Artificial Sequence: Synthetic oligonucleotide
  Sense strand starting at position 3640 of SEQ ID NO: 1889008
cacugauggcccgaaauuc

SEQ ID NO: 2572795 - RNA, 19 nt, Artificial Sequence
  Description of Artificial Sequence: Synthetic oligonucleotide
  Antisense strand to SEQ ID NO: 2572794
gaauuucgggccaucagug

SEQ ID NO: 2572796 - RNA, 19 nt, Artificial Sequence
  Description of Artificial Sequence: Synthetic oligonucleotide
  Sense strand starting at position 3784 of SEQ ID NO: 1889008
gggugauacucaaggugug

SEQ ID NO: 2572797 - RNA, 19 nt, Artificial Sequence
  Description of Artificial Sequence: Synthetic oligonucleotide
  Antisense strand to SEQ ID NO: 2572796
cacaccuugaguaucaccc

SEQ ID NO: 2572798 - RNA, 19 nt, Artificial Sequence
  Description of Artificial Sequence: Synthetic oligonucleotide
  Sense strand starting at position 3785 of SEQ ID NO: 1889008
ggugauacucaagguguga

SEQ ID NO: 2572799 - RNA, 19 nt, Artificial Sequence
  Description of Artificial Sequence: Synthetic oligonucleotide
  Antisense strand to SEQ ID NO: 2572798
ucacaccuugaguaucacc

SEQ ID NO: 2572800 - RNA, 19 nt, Artificial Sequence
  Description of Artificial Sequence: Synthetic oligonucleotide
  Sense strand starting at position 3787 of SEQ ID NO: 1889008
ugauacucaaggugugauu

SEQ ID NO: 2572801 - RNA, 19 nt, Artificial Sequence
  Description of Artificial Sequence: Synthetic oligonucleotide
  Antisense strand to SEQ ID NO: 2572800
aaucacaccuugaguauca

SEQ ID NO: 2572802 - RNA, 19 nt, Artificial Sequence
  Description of Artificial Sequence: Synthetic oligonucleotide
  Sense strand starting at position 3796 of SEQ ID NO: 1889008
aggugugauucauucggag

SEQ ID NO: 2572803 - RNA, 19 nt, Artificial Sequence
  Description of Artificial Sequence: Synthetic oligonucleotide
  Antisense strand to SEQ ID NO: 2572802
cuccgaaugaaucacaccu

SEQ ID NO: 2572804 - RNA, 19 nt, Artificial Sequence
  Description of Artificial Sequence: Synthetic oligonucleotide
  Sense strand starting at position 3799 of SEQ ID NO: 1889008
ugugauucauucggaguca

SEQ ID NO: 2572805 - RNA, 19 nt, Artificial Sequence
  Description of Artificial Sequence: Synthetic oligonucleotide
  Antisense strand to SEQ ID NO: 2572804
ugacuccgaaugaaucaca

SEQ ID NO: 2572806 - RNA, 19 nt, Artificial Sequence
  Description of Artificial Sequence: Synthetic oligonucleotide
  Sense strand starting at position 3800 of SEQ ID NO: 1889008
gugauucauucggagucaa

SEQ ID NO: 2572807 - RNA, 19 nt, Artificial Sequence
  Description of Artificial Sequence: Synthetic oligonucleotide
  Antisense strand to SEQ ID NO: 2572806
uugacuccgaaugaaucac

SEQ ID NO: 2572808 - RNA, 19 nt, Artificial Sequence
  Description of Artificial Sequence: Synthetic oligonucleotide
  Sense strand starting at position 3879 of SEQ ID NO: 1889008
gcgagacagucaugggaua

SEQ ID NO: 2572809 - RNA, 19 nt, Artificial Sequence
  Description of Artificial Sequence: Synthetic oligonucleotide
  Antisense strand to SEQ ID NO: 2572808
uaucccaugacugucucgc

SEQ ID NO: 2572810 - RNA, 19 nt, Artificial Sequence
  Description of Artificial Sequence: Synthetic oligonucleotide
  Sense strand starting at position 297 of SEQ ID NO: 1889009
ggccuuagcuucuauauuu

SEQ ID NO: 2572811 - RNA, 19 nt, Artificial Sequence
  Description of Artificial Sequence: Synthetic oligonucleotide
  Antisense strand to SEQ ID NO: 2572810
aaauauagaagcuaaggcc

SEQ ID NO: 2572812 - RNA, 19 nt, Artificial Sequence
  Description of Artificial Sequence: Synthetic oligonucleotide
  Sense strand starting at position 505 of SEQ ID NO: 1889009
acacauuaggaaugcuaga

SEQ ID NO: 2572813 - RNA, 19 nt, Artificial Sequence
  Description of Artificial Sequence: Synthetic oligonucleotide
  Antisense strand to SEQ ID NO: 2572812
ucuagcauuccuaaugugu

SEQ ID NO: 2572814 - RNA, 19 nt, Artificial Sequence
  Description of Artificial Sequence: Synthetic oligonucleotide
  Sense strand starting at position 555 of SEQ ID NO: 1889009
guggauaacaauugaaugu

SEQ ID NO: 2572815 - RNA, 19 nt, Artificial Sequence
  Description of Artificial Sequence: Synthetic oligonucleotide
  Antisense strand to SEQ ID NO: 2572814
acauucaauuguuauccac

SEQ ID NO: 2572816 - RNA, 19 nt, Artificial Sequence
  Description of Artificial Sequence: Synthetic oligonucleotide
  Sense strand starting at position 740 of SEQ ID NO: 1889009
gccagaugacuuugcauaa

SEQ ID NO: 2572817 - RNA, 19 nt, Artificial Sequence
  Description of Artificial Sequence: Synthetic oligonucleotide
  Antisense strand to SEQ ID NO: 2572816
uuaugcaaagucaucuggc

SEQ ID NO: 2572818 - RNA, 19 nt, Artificial Sequence
  Description of Artificial Sequence: Synthetic oligonucleotide
  Sense strand starting at position 741 of SEQ ID NO: 1889009
ccagaugacuuugcauaag

SEQ ID NO: 2572819 - RNA, 19 nt, Artificial Sequence
  Description of Artificial Sequence: Synthetic oligonucleotide
  Antisense strand to SEQ ID NO: 2572818
cuuaugcaaagucaucugg

SEQ ID NO: 2572820 - RNA, 19 nt, Artificial Sequence
  Description of Artificial Sequence: Synthetic oligonucleotide
  Sense strand starting at position 828 of SEQ ID NO: 1889009
agagaaugcuuucuaauuc

SEQ ID NO: 2572821 - RNA, 19 nt, Artificial Sequence
  Description of Artificial Sequence: Synthetic oligonucleotide
  Antisense strand to SEQ ID NO: 2572820
gaauuagaaagcauucucu

SEQ ID NO: 2572822 - RNA, 19 nt, Artificial Sequence
  Description of Artificial Sequence: Synthetic oligonucleotide
  Sense strand starting at position 963 of SEQ ID NO: 1889009
augaauaguuuacagaaug

SEQ ID NO: 2572823 - RNA, 19 nt, Artificial Sequence
  Description of Artificial Sequence: Synthetic oligonucleotide
  Antisense strand to SEQ ID NO: 2572822
cauucuguaaacuauucau

SEQ ID NO: 2572824 - RNA, 19 nt, Artificial Sequence
  Description of Artificial Sequence: Synthetic oligonucleotide
  Sense strand starting at position 2031 of SEQ ID NO: 1889009
uuagcaaauuagcauuaga

SEQ ID NO: 2572825 - RNA, 19 nt, Artificial Sequence
  Description of Artificial Sequence: Synthetic oligonucleotide
  Antisense strand to SEQ ID NO: 2572824
ucuaaugcuaauuugcuaa

SEQ ID NO: 2572826 - RNA, 19 nt, Artificial Sequence
  Description of Artificial Sequence: Synthetic oligonucleotide
  Sense strand starting at position 2036 of SEQ ID NO: 1889009
aaauuagcauuagaaaggu

SEQ ID NO: 2572827 - RNA, 19 nt, Artificial Sequence
  Description of Artificial Sequence: Synthetic oligonucleotide
  Antisense strand to SEQ ID NO: 2572826
accuuucuaaugcuaauuu

SEQ ID NO: 2572828 - RNA, 19 nt, Artificial Sequence
  Description of Artificial Sequence: Synthetic oligonucleotide
  Sense strand starting at position 2118 of SEQ ID NO: 1889009
guugaaugcuuucccaaga

SEQ ID NO: 2572829 - RNA, 19 nt, Artificial Sequence
  Description of Artificial Sequence: Synthetic oligonucleotide
  Antisense strand to SEQ ID NO: 2572828
ucuugggaaagcauucaac

SEQ ID NO: 2572830 - RNA, 19 nt, Artificial Sequence
  Description of Artificial Sequence: Synthetic oligonucleotide
  Sense strand starting at position 2119 of SEQ ID NO: 1889009
uugaaugcuuucccaagau

SEQ ID NO: 2572831 - RNA, 19 nt, Artificial Sequence
  Description of Artificial Sequence: Synthetic oligonucleotide
  Antisense strand to SEQ ID NO: 2572830
aucuugggaaagcauucaa

SEQ ID NO: 2572832 - RNA, 19 nt, Artificial Sequence
  Description of Artificial Sequence: Synthetic oligonucleotide
  Sense strand starting at position 2148 of SEQ ID NO: 1889009
caaagauauuagugcugac

SEQ ID NO: 2572833 - RNA, 19 nt, Artificial Sequence
  Description of Artificial Sequence: Synthetic oligonucleotide
  Antisense strand to SEQ ID NO: 2572832
gucagcacuaauaucuuug

SEQ ID NO: 2572834 - RNA, 19 nt, Artificial Sequence
  Description of Artificial Sequence: Synthetic oligonucleotide
  Sense strand starting at position 2250 of SEQ ID NO: 1889009
aguaacagugcuuauuaau

SEQ ID NO: 2572835 - RNA, 19 nt, Artificial Sequence
  Description of Artificial Sequence: Synthetic oligonucleotide
  Antisense strand to SEQ ID NO: 2572834
auuaauaagcacuguuacu

SEQ ID NO: 2572836 - RNA, 19 nt, Artificial Sequence
  Description of Artificial Sequence: Synthetic oligonucleotide
  Sense strand starting at position 2256 of SEQ ID NO: 1889009
agugcuuauuaauagacaa

SEQ ID NO: 2572837 - RNA, 19 nt, Artificial Sequence
  Description of Artificial Sequence: Synthetic oligonucleotide
  Antisense strand to SEQ ID NO: 2572836
uugucuauuaauaagcacu

SEQ ID NO: 2572838 - RNA, 19 nt, Artificial Sequence
  Description of Artificial Sequence: Synthetic oligonucleotide
  Sense strand starting at position 2349 of SEQ ID NO: 1889009
gguuguggaaucuaagauc

SEQ ID NO: 2572839 - RNA, 19 nt, Artificial Sequence
  Description of Artificial Sequence: Synthetic oligonucleotide
  Antisense strand to SEQ ID NO: 2572838
gaucuuagauuccacaacc

SEQ ID NO: 2572840 - RNA, 19 nt, Artificial Sequence
  Description of Artificial Sequence: Synthetic oligonucleotide
  Sense strand starting at position 2352 of SEQ ID NO: 1889009
uguggaaucuaagaucagu

SEQ ID NO: 2572841 - RNA, 19 nt, Artificial Sequence
  Description of Artificial Sequence: Synthetic oligonucleotide
  Antisense strand to SEQ ID NO: 2572840
acugaucuuagauuccaca

SEQ ID NO: 2572842 - RNA, 19 nt, Artificial Sequence
  Description of Artificial Sequence: Synthetic oligonucleotide
  Sense strand starting at position 2386 of SEQ ID NO: 1889009
ucuauaugcuagcaguaaa

SEQ ID NO: 2572843 - RNA, 19 nt, Artificial Sequence
  Description of Artificial Sequence: Synthetic oligonucleotide
  Antisense strand to SEQ ID NO: 2572842
uuuacugcuagcauauaga

SEQ ID NO: 2572844 - RNA, 19 nt, Artificial Sequence
  Description of Artificial Sequence: Synthetic oligonucleotide
  Sense strand starting at position 2479 of SEQ ID NO: 1889009
gcaagaacuguagagcaga

SEQ ID NO: 2572845 - RNA, 19 nt, Artificial Sequence
  Description of Artificial Sequence: Synthetic oligonucleotide
  Antisense strand to SEQ ID NO: 2572844
ucugcucuacaguucuugc

SEQ ID NO: 2572846 - RNA, 19 nt, Artificial Sequence
  Description of Artificial Sequence: Synthetic oligonucleotide
  Sense strand starting at position 2499 of SEQ ID NO: 1889009
acaacaaaguauuguaaag

SEQ ID NO: 2572847 - RNA, 19 nt, Artificial Sequence
  Description of Artificial Sequence: Synthetic oligonucleotide
  Antisense strand to SEQ ID NO: 2572846
cuuuacaauacuuuguugu

SEQ ID NO: 2572848 - RNA, 19 nt, Artificial Sequence
  Description of Artificial Sequence: Synthetic oligonucleotide
  Sense strand starting at position 2597 of SEQ ID NO: 1889009
gcauaugaacaguggaaag

SEQ ID NO: 2572849 - RNA, 19 nt, Artificial Sequence
  Description of Artificial Sequence: Synthetic oligonucleotide
  Antisense strand to SEQ ID NO: 2572848
cuuuccacuguucauaugc

SEQ ID NO: 2572850 - RNA, 19 nt, Artificial Sequence
  Description of Artificial Sequence: Synthetic oligonucleotide
  Sense strand starting at position 2759 of SEQ ID NO: 1889009
acaagccaguuauagaaua

SEQ ID NO: 2572851 - RNA, 19 nt, Artificial Sequence
  Description of Artificial Sequence: Synthetic oligonucleotide
  Antisense strand to SEQ ID NO: 2572850
uauucuauaacuggcuugu

SEQ ID NO: 2572852 - RNA, 19 nt, Artificial Sequence
  Description of Artificial Sequence: Synthetic oligonucleotide
  Sense strand starting at position 2764 of SEQ ID NO: 1889009
ccaguuauagaauauaugu

SEQ ID NO: 2572853 - RNA, 19 nt, Artificial Sequence
  Description of Artificial Sequence: Synthetic oligonucleotide
  Antisense strand to SEQ ID NO: 2572852
acauauauucuauaacugg

SEQ ID NO: 2572854 - RNA, 19 nt, Artificial Sequence
  Description of Artificial Sequence: Synthetic oligonucleotide
  Sense strand starting at position 2859 of SEQ ID NO: 1889009
uuagcugauuuauagacuu

SEQ ID NO: 2572855 - RNA, 19 nt, Artificial Sequence
  Description of Artificial Sequence: Synthetic oligonucleotide
  Antisense strand to SEQ ID NO: 2572854
aagucuauaaaucagcuaa

SEQ ID NO: 2572856 - RNA, 19 nt, Artificial Sequence
  Description of Artificial Sequence: Synthetic oligonucleotide
  Sense strand starting at position 2973 of SEQ ID NO: 1889009
uugacaaaggccuauguaa

SEQ ID NO: 2572857 - RNA, 19 nt, Artificial Sequence
  Description of Artificial Sequence: Synthetic oligonucleotide
  Antisense strand to SEQ ID NO: 2572856
uuacauaggccuuugucaa

SEQ ID NO: 2572858 - RNA, 19 nt, Artificial Sequence
  Description of Artificial Sequence: Synthetic oligonucleotide
  Sense strand starting at position 3126 of SEQ ID NO: 1889009
agauuuagaugucacaucu

SEQ ID NO: 2572859 - RNA, 19 nt, Artificial Sequence
  Description of Artificial Sequence: Synthetic oligonucleotide
  Antisense strand to SEQ ID NO: 2572858
agaugugacaucuaaaucu

SEQ ID NO: 2572860 - RNA, 19 nt, Artificial Sequence
  Description of Artificial Sequence: Synthetic oligonucleotide
  Sense strand starting at position 3253 of SEQ ID NO: 1889009
gucgauaacuaucuuaguc

SEQ ID NO: 2572861 - RNA, 19 nt, Artificial Sequence
  Description of Artificial Sequence: Synthetic oligonucleotide
  Antisense strand to SEQ ID NO: 2572860
gacuaagauaguuaucgac

SEQ ID NO: 2572862 - RNA, 19 nt, Artificial Sequence
  Description of Artificial Sequence: Synthetic oligonucleotide
  Sense strand starting at position 3255 of SEQ ID NO: 1889009
cgauaacuaucuuagucua

SEQ ID NO: 2572863 - RNA, 19 nt, Artificial Sequence
  Description of Artificial Sequence: Synthetic oligonucleotide
  Antisense strand to SEQ ID NO: 2572862
uagacuaagauaguuaucg

SEQ ID NO: 2572864 - RNA, 19 nt, Artificial Sequence
  Description of Artificial Sequence: Synthetic oligonucleotide
  Sense strand starting at position 3385 of SEQ ID NO: 1889009
guguguagugaggguugca

SEQ ID NO: 2572865 - RNA, 19 nt, Artificial Sequence
  Description of Artificial Sequence: Synthetic oligonucleotide
  Antisense strand to SEQ ID NO: 2572864
ugcaacccucacuacacac

SEQ ID NO: 2572866 - RNA, 19 nt, Artificial Sequence
  Description of Artificial Sequence: Synthetic oligonucleotide
  Sense strand starting at position 3397 of SEQ ID NO: 1889009
gguugcacacuuugucuaa

SEQ ID NO: 2572867 - RNA, 19 nt, Artificial Sequence
  Description of Artificial Sequence: Synthetic oligonucleotide
  Antisense strand to SEQ ID NO: 2572866
uuagacaaagugugcaacc

SEQ ID NO: 2572868 - RNA, 19 nt, Artificial Sequence
  Description of Artificial Sequence: Synthetic oligonucleotide
  Sense strand starting at position 3399 of SEQ ID NO: 1889009
uugcacacuuugucuaaga

SEQ ID NO: 2572869 - RNA, 19 nt, Artificial Sequence
  Description of Artificial Sequence: Synthetic oligonucleotide
  Antisense strand to SEQ ID NO: 2572868
ucuuagacaaagugugcaa

SEQ ID NO: 2572870 - RNA, 19 nt, Artificial Sequence
  Description of Artificial Sequence: Synthetic oligonucleotide
  Sense strand starting at position 3400 of SEQ ID NO: 1889009
ugcacacuuugucuaagau

SEQ ID NO: 2572871 - RNA, 19 nt, Artificial Sequence
  Description of Artificial Sequence: Synthetic oligonucleotide
  Antisense strand to SEQ ID NO: 2572870
aucuuagacaaagugugca

SEQ ID NO: 2572872 - RNA, 19 nt, Artificial Sequence
  Description of Artificial Sequence: Synthetic oligonucleotide
  Sense strand starting at position 3401 of SEQ ID NO: 1889009
gcacacuuugucuaagaua

SEQ ID NO: 2572873 - RNA, 19 nt, Artificial Sequence
  Description of Artificial Sequence: Synthetic oligonucleotide
  Antisense strand to SEQ ID NO: 2572872
uaucuuagacaaagugugc

SEQ ID NO: 2572874 - RNA, 19 nt, Artificial Sequence
  Description of Artificial Sequence: Synthetic oligonucleotide
  Sense strand starting at position 3640 of SEQ ID NO: 1889009
cacugauggcccgaaauuc

SEQ ID NO: 2572875 - RNA, 19 nt, Artificial Sequence
  Description of Artificial Sequence: Synthetic oligonucleotide
  Antisense strand to SEQ ID NO: 2572874
gaauuucgggccaucagug

SEQ ID NO: 2572876 - RNA, 19 nt, Artificial Sequence
  Description of Artificial Sequence: Synthetic oligonucleotide
  Sense strand starting at position 3784 of SEQ ID NO: 1889009
gggugauacucaaggugug

SEQ ID NO: 2572877 - RNA, 19 nt, Artificial Sequence
  Description of Artificial Sequence: Synthetic oligonucleotide
  Antisense strand to SEQ ID NO: 2572876
cacaccuugaguaucaccc

SEQ ID NO: 2572878 - RNA, 19 nt, Artificial Sequence
  Description of Artificial Sequence: Synthetic oligonucleotide
  Sense strand starting at position 3785 of SEQ ID NO: 1889009
ggugauacucaagguguga

SEQ ID NO: 2572879 - RNA, 19 nt, Artificial Sequence
  Description of Artificial Sequence: Synthetic oligonucleotide
  Antisense strand to SEQ ID NO: 2572878
ucacaccuugaguaucacc

SEQ ID NO: 2572880 - RNA, 19 nt, Artificial Sequence
  Description of Artificial Sequence: Synthetic oligonucleotide
  Sense strand starting at position 3787 of SEQ ID NO: 1889009
ugauacucaaggugugauu

SEQ ID NO: 2572881 - RNA, 19 nt, Artificial Sequence
  Description of Artificial Sequence: Synthetic oligonucleotide
  Antisense strand to SEQ ID NO: 2572880
aaucacaccuugaguauca

SEQ ID NO: 2572882 - RNA, 19 nt, Artificial Sequence
  Description of Artificial Sequence: Synthetic oligonucleotide
  Sense strand starting at position 3796 of SEQ ID NO: 1889009
aggugugauucauucggag

SEQ ID NO: 2572883 - RNA, 19 nt, Artificial Sequence
  Description of Artificial Sequence: Synthetic oligonucleotide
  Antisense strand to SEQ ID NO: 2572882
cuccgaaugaaucacaccu

SEQ ID NO: 2572884 - RNA, 19 nt, Artificial Sequence
  Description of Artificial Sequence: Synthetic oligonucleotide
  Sense strand starting at position 3799 of SEQ ID NO: 1889009
ugugauucauucggaguca

SEQ ID NO: 2572885 - RNA, 19 nt, Artificial Sequence
  Description of Artificial Sequence: Synthetic oligonucleotide
  Antisense strand to SEQ ID NO: 2572884
ugacuccgaaugaaucaca

SEQ ID NO: 2572886 - RNA, 19 nt, Artificial Sequence
  Description of Artificial Sequence: Synthetic oligonucleotide
  Sense strand starting at position 3800 of SEQ ID NO: 1889009
gugauucauucggagucaa

SEQ ID NO: 2572887 - RNA, 19 nt, Artificial Sequence
  Description of Artificial Sequence: Synthetic oligonucleotide
  Antisense strand to SEQ ID NO: 2572886
uugacuccgaaugaaucac

SEQ ID NO: 2572888 - RNA, 19 nt, Artificial Sequence
  Description of Artificial Sequence: Synthetic oligonucleotide
  Sense strand starting at position 3879 of SEQ ID NO: 1889009
gcgagacagucaugggaua

SEQ ID NO: 2572889 - RNA, 19 nt, Artificial Sequence
  Description of Artificial Sequence: Synthetic oligonucleotide
  Antisense strand to SEQ ID NO: 2572888
uaucccaugacugucucgc

SEQ ID NO: 2572890 - RNA, 19 nt, Artificial Sequence
  Description of Artificial Sequence: Synthetic oligonucleotide
  Sense strand starting at position 248 of SEQ ID NO: 1889010
uggaaauugugaguaacag

SEQ ID NO: 2572891 - RNA, 19 nt, Artificial Sequence
  Description of Artificial Sequence: Synthetic oligonucleotide
  Antisense strand to SEQ ID NO: 2572890
cuguuacucacaauuucca

SEQ ID NO: 2572892 - RNA, 19 nt, Artificial Sequence
  Description of Artificial Sequence: Synthetic oligonucleotide
  Sense strand starting at position 249 of SEQ ID NO: 1889010
ggaaauugugaguaacagu

SEQ ID NO: 2572893 - RNA, 19 nt, Artificial Sequence
  Description of Artificial Sequence: Synthetic oligonucleotide
  Antisense strand to SEQ ID NO: 2572892
acuguuacucacaauuucc

SEQ ID NO: 2572894 - RNA, 19 nt, Artificial Sequence
  Description of Artificial Sequence: Synthetic oligonucleotide
  Sense strand starting at position 287 of SEQ ID NO: 1889010
ugggaauuacuuuggcauu

SEQ ID NO: 2572895 - RNA, 19 nt, Artificial Sequence
  Description of Artificial Sequence: Synthetic oligonucleotide
  Antisense strand to SEQ ID NO: 2572894
aaugccaaaguaauuccca

SEQ ID NO: 2572896 - RNA, 19 nt, Artificial Sequence
  Description of Artificial Sequence: Synthetic oligonucleotide
  Sense strand starting at position 315 of SEQ ID NO: 1889010
gaaugaggauugcuguuga

SEQ ID NO: 2572897 - RNA, 19 nt, Artificial Sequence
  Description of Artificial Sequence: Synthetic oligonucleotide
  Antisense strand to SEQ ID NO: 2572896
ucaacagcaauccucauuc

SEQ ID NO: 2572898 - RNA, 19 nt, Artificial Sequence
  Description of Artificial Sequence: Synthetic oligonucleotide
  Sense strand starting at position 1144 of SEQ ID NO: 1889010
uugauaacugcuuauaguu

SEQ ID NO: 2572899 - RNA, 19 nt, Artificial Sequence
  Description of Artificial Sequence: Synthetic oligonucleotide
  Antisense strand to SEQ ID NO: 2572898
aacuauaagcaguuaucaa

SEQ ID NO: 2572900 - RNA, 19 nt, Artificial Sequence
  Description of Artificial Sequence: Synthetic oligonucleotide
  Sense strand starting at position 1288 of SEQ ID NO: 1889010
ccuuaaagguuaguuagaa

SEQ ID NO: 2572901 - RNA, 19 nt, Artificial Sequence
  Description of Artificial Sequence: Synthetic oligonucleotide
  Antisense strand to SEQ ID NO: 2572900
uucuaacuaaccuuuaagg

SEQ ID NO: 2572902 - RNA, 19 nt, Artificial Sequence
  Description of Artificial Sequence: Synthetic oligonucleotide
  Sense strand starting at position 1289 of SEQ ID NO: 1889010
cuuaaagguuaguuagaac

SEQ ID NO: 2572903 - RNA, 19 nt, Artificial Sequence
  Description of Artificial Sequence: Synthetic oligonucleotide
  Antisense strand to SEQ ID NO: 2572902
guucuaacuaaccuuuaag

SEQ ID NO: 2572904 - RNA, 19 nt, Artificial Sequence
  Description of Artificial Sequence: Synthetic oligonucleotide
  Sense strand starting at position 1362 of SEQ ID NO: 1889010
cgaucucaucuguaguaau

SEQ ID NO: 2572905 - RNA, 19 nt, Artificial Sequence
  Description of Artificial Sequence: Synthetic oligonucleotide
  Antisense strand to SEQ ID NO: 2572904
auuacuacagaugagaucg

SEQ ID NO: 2572906 - RNA, 19 nt, Artificial Sequence
  Description of Artificial Sequence: Synthetic oligonucleotide
  Sense strand starting at position 1619 of SEQ ID NO: 1889010
agucauacucaugauguuu

SEQ ID NO: 2572907 - RNA, 19 nt, Artificial Sequence
  Description of Artificial Sequence: Synthetic oligonucleotide
  Antisense strand to SEQ ID NO: 2572906
aaacaucaugaguaugacu

SEQ ID NO: 2572908 - RNA, 19 nt, Artificial Sequence
  Description of Artificial Sequence: Synthetic oligonucleotide
  Sense strand starting at position 1625 of SEQ ID NO: 1889010
acucaugauguuuauguau

SEQ ID NO: 2572909 - RNA, 19 nt, Artificial Sequence
  Description of Artificial Sequence: Synthetic oligonucleotide
  Antisense strand to SEQ ID NO: 2572908
auacauaaacaucaugagu

SEQ ID NO: 2572910 - RNA, 19 nt, Artificial Sequence
  Description of Artificial Sequence: Synthetic oligonucleotide
  Sense strand starting at position 2156 of SEQ ID NO: 1889010
gguaauuaugacuaugggu

SEQ ID NO: 2572911 - RNA, 19 nt, Artificial Sequence
  Description of Artificial Sequence: Synthetic oligonucleotide
  Antisense strand to SEQ ID NO: 2572910
acccauagucauaauuacc

SEQ ID NO: 2572912 - RNA, 19 nt, Artificial Sequence
  Description of Artificial Sequence: Synthetic oligonucleotide
  Sense strand starting at position 2158 of SEQ ID NO: 1889010
uaauuaugacuauggguuu

SEQ ID NO: 2572913 - RNA, 19 nt, Artificial Sequence
  Description of Artificial Sequence: Synthetic oligonucleotide
  Antisense strand to SEQ ID NO: 2572912
aaacccauagucauaauua

SEQ ID NO: 2572914 - RNA, 19 nt, Artificial Sequence
  Description of Artificial Sequence: Synthetic oligonucleotide
  Sense strand starting at position 2321 of SEQ ID NO: 1889010
aggcaauuacuaugaucau

SEQ ID NO: 2572915 - RNA, 19 nt, Artificial Sequence
  Description of Artificial Sequence: Synthetic oligonucleotide
  Antisense strand to SEQ ID NO: 2572914
augaucauaguaauugccu

SEQ ID NO: 2572916 - RNA, 19 nt, Artificial Sequence
  Description of Artificial Sequence: Synthetic oligonucleotide
  Sense strand starting at position 2369 of SEQ ID NO: 1889010
uuaagaggauaugccuaua

SEQ ID NO: 2572917 - RNA, 19 nt, Artificial Sequence
  Description of Artificial Sequence: Synthetic oligonucleotide
  Antisense strand to SEQ ID NO: 2572916
uauaggcauauccucuuaa

SEQ ID NO: 2572918 - RNA, 19 nt, Artificial Sequence
  Description of Artificial Sequence: Synthetic oligonucleotide
  Sense strand starting at position 2374 of SEQ ID NO: 1889010
aggauaugccuauauauuc

SEQ ID NO: 2572919 - RNA, 19 nt, Artificial Sequence
  Description of Artificial Sequence: Synthetic oligonucleotide
  Antisense strand to SEQ ID NO: 2572918
gaauauauaggcauauccu

SEQ ID NO: 2572920 - RNA, 19 nt, Artificial Sequence
  Description of Artificial Sequence: Synthetic oligonucleotide
  Sense strand starting at position 2520 of SEQ ID NO: 1889010
gaguuaauaucauugguug

SEQ ID NO: 2572921 - RNA, 19 nt, Artificial Sequence
  Description of Artificial Sequence: Synthetic oligonucleotide
  Antisense strand to SEQ ID NO: 2572920
caaccaaugauauuaacuc

SEQ ID NO: 2572922 - RNA, 19 nt, Artificial Sequence
  Description of Artificial Sequence: Synthetic oligonucleotide
  Sense strand starting at position 2521 of SEQ ID NO: 1889010
aguuaauaucauugguuga

SEQ ID NO: 2572923 - RNA, 19 nt, Artificial Sequence
  Description of Artificial Sequence: Synthetic oligonucleotide
  Antisense strand to SEQ ID NO: 2572922
ucaaccaaugauauuaacu

SEQ ID NO: 2572924 - RNA, 19 nt, Artificial Sequence
  Description of Artificial Sequence: Synthetic oligonucleotide
  Sense strand starting at position 2574 of SEQ ID NO: 1889010
caucuaauggguuggucaa

SEQ ID NO: 2572925 - RNA, 19 nt, Artificial Sequence
  Description of Artificial Sequence: Synthetic oligonucleotide
  Antisense strand to SEQ ID NO: 2572924
uugaccaacccauuagaug

SEQ ID NO: 2572926 - RNA, 19 nt, Artificial Sequence
  Description of Artificial Sequence: Synthetic oligonucleotide
  Sense strand starting at position 2575 of SEQ ID NO: 1889010
aucuaauggguuggucaaa

SEQ ID NO: 2572927 - RNA, 19 nt, Artificial Sequence
  Description of Artificial Sequence: Synthetic oligonucleotide
  Antisense strand to SEQ ID NO: 2572926
uuugaccaacccauuagau

SEQ ID NO: 2572928 - RNA, 19 nt, Artificial Sequence
  Description of Artificial Sequence: Synthetic oligonucleotide
  Sense strand starting at position 2576 of SEQ ID NO: 1889010
ucuaauggguuggucaaau

SEQ ID NO: 2572929 - RNA, 19 nt, Artificial Sequence
  Description of Artificial Sequence: Synthetic oligonucleotide
  Antisense strand to SEQ ID NO: 2572928
auuugaccaacccauuaga

SEQ ID NO: 2572930 - RNA, 19 nt, Artificial Sequence
  Description of Artificial Sequence: Synthetic oligonucleotide
  Sense strand starting at position 2588 of SEQ ID NO: 1889010
gucaaauuccgauagaggu

SEQ ID NO: 2572931 - RNA, 19 nt, Artificial Sequence
  Description of Artificial Sequence: Synthetic oligonucleotide
  Antisense strand to SEQ ID NO: 2572930
accucuaucggaauuugac

SEQ ID NO: 2572932 - RNA, 19 nt, Artificial Sequence
  Description of Artificial Sequence: Synthetic oligonucleotide
  Sense strand starting at position 2596 of SEQ ID NO: 1889010
ccgauagagguguauuaaa

SEQ ID NO: 2572933 - RNA, 19 nt, Artificial Sequence
  Description of Artificial Sequence: Synthetic oligonucleotide
  Antisense strand to SEQ ID NO: 2572932
uuuaauacaccucuaucgg

SEQ ID NO: 2572934 - RNA, 19 nt, Artificial Sequence
  Description of Artificial Sequence: Synthetic oligonucleotide
  Sense strand starting at position 2656 of SEQ ID NO: 1889010
guugcaaugcuguuuggua

SEQ ID NO: 2572935 - RNA, 19 nt, Artificial Sequence
  Description of Artificial Sequence: Synthetic oligonucleotide
  Antisense strand to SEQ ID NO: 2572934
uaccaaacagcauugcaac

SEQ ID NO: 2572936 - RNA, 19 nt, Artificial Sequence
  Description of Artificial Sequence: Synthetic oligonucleotide
  Sense strand starting at position 2663 of SEQ ID NO: 1889010
ugcuguuugguacauacaa

SEQ ID NO: 2572937 - RNA, 19 nt, Artificial Sequence
  Description of Artificial Sequence: Synthetic oligonucleotide
  Antisense strand to SEQ ID NO: 2572936
uuguauguaccaaacagca

SEQ ID NO: 2572938 - RNA, 19 nt, Artificial Sequence
  Description of Artificial Sequence: Synthetic oligonucleotide
  Sense strand starting at position 2932 of SEQ ID NO: 1889010
ccuuuagugcaacaguuaa

SEQ ID NO: 2572939 - RNA, 19 nt, Artificial Sequence
  Description of Artificial Sequence: Synthetic oligonucleotide
  Antisense strand to SEQ ID NO: 2572938
uuaacuguugcacuaaagg

SEQ ID NO: 2572940 - RNA, 19 nt, Artificial Sequence
  Description of Artificial Sequence: Synthetic oligonucleotide
  Sense strand starting at position 3314 of SEQ ID NO: 1889010
gugaucucagaaugacagu

SEQ ID NO: 2572941 - RNA, 19 nt, Artificial Sequence
  Description of Artificial Sequence: Synthetic oligonucleotide
  Antisense strand to SEQ ID NO: 2572940
acugucauucugagaucac

SEQ ID NO: 2572942 - RNA, 19 nt, Artificial Sequence
  Description of Artificial Sequence: Synthetic oligonucleotide
  Sense strand starting at position 3327 of SEQ ID NO: 1889010
gacaguggcugaguuagaa

SEQ ID NO: 2572943 - RNA, 19 nt, Artificial Sequence
  Description of Artificial Sequence: Synthetic oligonucleotide
  Antisense strand to SEQ ID NO: 2572942
uucuaacucagccacuguc

SEQ ID NO: 2572944 - RNA, 19 nt, Artificial Sequence
  Description of Artificial Sequence: Synthetic oligonucleotide
  Sense strand starting at position 3453 of SEQ ID NO: 1889010
cugagcugauauguaaaga

SEQ ID NO: 2572945 - RNA, 19 nt, Artificial Sequence
  Description of Artificial Sequence: Synthetic oligonucleotide
  Antisense strand to SEQ ID NO: 2572944
ucuuuacauaucagcucag

SEQ ID NO: 2572946 - RNA, 19 nt, Artificial Sequence
  Description of Artificial Sequence: Synthetic oligonucleotide
  Sense strand starting at position 3502 of SEQ ID NO: 1889010
aguacuaagugcucaauaa

SEQ ID NO: 2572947 - RNA, 19 nt, Artificial Sequence
  Description of Artificial Sequence: Synthetic oligonucleotide
  Antisense strand to SEQ ID NO: 2572946
uuauugagcacuuaguacu

SEQ ID NO: 2572948 - RNA, 19 nt, Artificial Sequence
  Description of Artificial Sequence: Synthetic oligonucleotide
  Sense strand starting at position 3545 of SEQ ID NO: 1889010
uggauuguauucucucuga

SEQ ID NO: 2572949 - RNA, 19 nt, Artificial Sequence
  Description of Artificial Sequence: Synthetic oligonucleotide
  Antisense strand to SEQ ID NO: 2572948
ucagagagaauacaaucca

SEQ ID NO: 2572950 - RNA, 19 nt, Artificial Sequence
  Description of Artificial Sequence: Synthetic oligonucleotide
  Sense strand starting at position 3566 of SEQ ID NO: 1889010
cuuugcaugcuugaauaua

SEQ ID NO: 2572951 - RNA, 19 nt, Artificial Sequence
  Description of Artificial Sequence: Synthetic oligonucleotide
  Antisense strand to SEQ ID NO: 2572950
uauauucaagcaugcaaag

SEQ ID NO: 2572952 - RNA, 19 nt, Artificial Sequence
  Description of Artificial Sequence: Synthetic oligonucleotide
  Sense strand starting at position 3603 of SEQ ID NO: 1889010
uguaaugauuaccuagguu

SEQ ID NO: 2572953 - RNA, 19 nt, Artificial Sequence
  Description of Artificial Sequence: Synthetic oligonucleotide
  Antisense strand to SEQ ID NO: 2572952
aaccuagguaaucauuaca

SEQ ID NO: 2572954 - RNA, 19 nt, Artificial Sequence
  Description of Artificial Sequence: Synthetic oligonucleotide
  Sense strand starting at position 3716 of SEQ ID NO: 1889010
auuuaccugucggauauuu

SEQ ID NO: 2572955 - RNA, 19 nt, Artificial Sequence
  Description of Artificial Sequence: Synthetic oligonucleotide
  Antisense strand to SEQ ID NO: 2572954
aaauauccgacagguaaau

SEQ ID NO: 2572956 - RNA, 19 nt, Artificial Sequence
  Description of Artificial Sequence: Synthetic oligonucleotide
  Sense strand starting at position 3760 of SEQ ID NO: 1889010
auaauauucucugugauug

SEQ ID NO: 2572957 - RNA, 19 nt, Artificial Sequence
  Description of Artificial Sequence: Synthetic oligonucleotide
  Antisense strand to SEQ ID NO: 2572956
caaucacagagaauauuau

SEQ ID NO: 2572958 - RNA, 19 nt, Artificial Sequence
  Description of Artificial Sequence: Synthetic oligonucleotide
  Sense strand starting at position 3761 of SEQ ID NO: 1889010
uaauauucucugugauugg

SEQ ID NO: 2572959 - RNA, 19 nt, Artificial Sequence
  Description of Artificial Sequence: Synthetic oligonucleotide
  Antisense strand to SEQ ID NO: 2572958
ccaaucacagagaauauua

SEQ ID NO: 2572960 - RNA, 19 nt, Artificial Sequence
  Description of Artificial Sequence: Synthetic oligonucleotide
  Sense strand starting at position 3765 of SEQ ID NO: 1889010
auucucugugauuggaauu

SEQ ID NO: 2572961 - RNA, 19 nt, Artificial Sequence
  Description of Artificial Sequence: Synthetic oligonucleotide
  Antisense strand to SEQ ID NO: 2572960
aauuccaaucacagagaau

SEQ ID NO: 2572962 - RNA, 19 nt, Artificial Sequence
  Description of Artificial Sequence: Synthetic oligonucleotide
  Sense strand starting at position 3827 of SEQ ID NO: 1889010
aacuaauggugucuggaac

SEQ ID NO: 2572963 - RNA, 19 nt, Artificial Sequence
  Description of Artificial Sequence: Synthetic oligonucleotide
  Antisense strand to SEQ ID NO: 2572962
guuccagacaccauuaguu

SEQ ID NO: 2572964 - RNA, 19 nt, Artificial Sequence
  Description of Artificial Sequence: Synthetic oligonucleotide
  Sense strand starting at position 3828 of SEQ ID NO: 1889010
acuaauggugucuggaacu

SEQ ID NO: 2572965 - RNA, 19 nt, Artificial Sequence
  Description of Artificial Sequence: Synthetic oligonucleotide
  Antisense strand to SEQ ID NO: 2572964
aguuccagacaccauuagu

SEQ ID NO: 2572966 - RNA, 19 nt, Artificial Sequence
  Description of Artificial Sequence: Synthetic oligonucleotide
  Sense strand starting at position 3944 of SEQ ID NO: 1889010
uuccucguccuagaaauuc

SEQ ID NO: 2572967 - RNA, 19 nt, Artificial Sequence
  Description of Artificial Sequence: Synthetic oligonucleotide
  Antisense strand to SEQ ID NO: 2572966
gaauuucuaggacgaggaa

SEQ ID NO: 2572968 - RNA, 19 nt, Artificial Sequence
  Description of Artificial Sequence: Synthetic oligonucleotide
  Sense strand starting at position 3983 of SEQ ID NO: 1889010
ggauccguccuccaagauu

SEQ ID NO: 2572969 - RNA, 19 nt, Artificial Sequence
  Description of Artificial Sequence: Synthetic oligonucleotide
  Antisense strand to SEQ ID NO: 2572968
aaucuuggaggacggaucc

SEQ ID NO: 2572970 - RNA, 19 nt, Artificial Sequence
  Description of Artificial Sequence: Synthetic oligonucleotide
  Sense strand starting at position 297 of SEQ ID NO: 1889011
ggccuuagcuucuauauuu

SEQ ID NO: 2572971 - RNA, 19 nt, Artificial Sequence
  Description of Artificial Sequence: Synthetic oligonucleotide
  Antisense strand to SEQ ID NO: 2572970
aaauauagaagcuaaggcc

SEQ ID NO: 2572972 - RNA, 19 nt, Artificial Sequence
  Description of Artificial Sequence: Synthetic oligonucleotide
  Sense strand starting at position 505 of SEQ ID NO: 1889011
acacauuaggaaugcuaga

SEQ ID NO: 2572973 - RNA, 19 nt, Artificial Sequence
  Description of Artificial Sequence: Synthetic oligonucleotide
  Antisense strand to SEQ ID NO: 2572972
ucuagcauuccuaaugugu

SEQ ID NO: 2572974 - RNA, 19 nt, Artificial Sequence
  Description of Artificial Sequence: Synthetic oligonucleotide
  Sense strand starting at position 555 of SEQ ID NO: 1889011
guggauaacaauugaaugu

SEQ ID NO: 2572975 - RNA, 19 nt, Artificial Sequence
  Description of Artificial Sequence: Synthetic oligonucleotide
  Antisense strand to SEQ ID NO: 2572974
acauucaauuguuauccac

SEQ ID NO: 2572976 - RNA, 19 nt, Artificial Sequence
  Description of Artificial Sequence: Synthetic oligonucleotide
  Sense strand starting at position 740 of SEQ ID NO: 1889011
gccagaugacuuugcauaa

SEQ ID NO: 2572977 - RNA, 19 nt, Artificial Sequence
  Description of Artificial Sequence: Synthetic oligonucleotide
  Antisense strand to SEQ ID NO: 2572976
uuaugcaaagucaucuggc

SEQ ID NO: 2572978 - RNA, 19 nt, Artificial Sequence
  Description of Artificial Sequence: Synthetic oligonucleotide
  Sense strand starting at position 741 of SEQ ID NO: 1889011
ccagaugacuuugcauaag

SEQ ID NO: 2572979 - RNA, 19 nt, Artificial Sequence
  Description of Artificial Sequence: Synthetic oligonucleotide
  Antisense strand to SEQ ID NO: 2572978
cuuaugcaaagucaucugg

SEQ ID NO: 2572980 - RNA, 19 nt, Artificial Sequence
  Description of Artificial Sequence: Synthetic oligonucleotide
  Sense strand starting at position 828 of SEQ ID NO: 1889011
agagaaugcuuucuaauuc

SEQ ID NO: 2572981 - RNA, 19 nt, Artificial Sequence
  Description of Artificial Sequence: Synthetic oligonucleotide
  Antisense strand to SEQ ID NO: 2572980
gaauuagaaagcauucucu

SEQ ID NO: 2572982 - RNA, 19 nt, Artificial Sequence
  Description of Artificial Sequence: Synthetic oligonucleotide
  Sense strand starting at position 963 of SEQ ID NO: 1889011
augaauaguuuacagaaug

SEQ ID NO: 2572983 - RNA, 19 nt, Artificial Sequence
  Description of Artificial Sequence: Synthetic oligonucleotide
  Antisense strand to SEQ ID NO: 2572982
cauucuguaaacuauucau

SEQ ID NO: 2572984 - RNA, 19 nt, Artificial Sequence
  Description of Artificial Sequence: Synthetic oligonucleotide
  Sense strand starting at position 2031 of SEQ ID NO: 1889011
uuagcaaauuagcauuaga

SEQ ID NO: 2572985 - RNA, 19 nt, Artificial Sequence
  Description of Artificial Sequence: Synthetic oligonucleotide
  Antisense strand to SEQ ID NO: 2572984
ucuaaugcuaauuugcuaa

SEQ ID NO: 2572986 - RNA, 19 nt, Artificial Sequence
  Description of Artificial Sequence: Synthetic oligonucleotide
  Sense strand starting at position 2036 of SEQ ID NO: 1889011
aaauuagcauuagaaaggu

SEQ ID NO: 2572987 - RNA, 19 nt, Artificial Sequence
  Description of Artificial Sequence: Synthetic oligonucleotide
  Antisense strand to SEQ ID NO: 2572986
accuuucuaaugcuaauuu

SEQ ID NO: 2572988 - RNA, 19 nt, Artificial Sequence
  Description of Artificial Sequence: Synthetic oligonucleotide
  Sense strand starting at position 2118 of SEQ ID NO: 1889011
guugaaugcuuucccaaga

SEQ ID NO: 2572989 - RNA, 19 nt, Artificial Sequence
  Description of Artificial Sequence: Synthetic oligonucleotide
  Antisense strand to SEQ ID NO: 2572988
ucuugggaaagcauucaac

SEQ ID NO: 2572990 - RNA, 19 nt, Artificial Sequence
  Description of Artificial Sequence: Synthetic oligonucleotide
  Sense strand starting at position 2119 of SEQ ID NO: 1889011
uugaaugcuuucccaagau

SEQ ID NO: 2572991 - RNA, 19 nt, Artificial Sequence
  Description of Artificial Sequence: Synthetic oligonucleotide
  Antisense strand to SEQ ID NO: 2572990
aucuugggaaagcauucaa

SEQ ID NO: 2572992 - RNA, 19 nt, Artificial Sequence
  Description of Artificial Sequence: Synthetic oligonucleotide
  Sense strand starting at position 2148 of SEQ ID NO: 1889011
caaagauauuagugcugac

SEQ ID NO: 2572993 - RNA, 19 nt, Artificial Sequence
  Description of Artificial Sequence: Synthetic oligonucleotide
  Antisense strand to SEQ ID NO: 2572992
gucagcacuaauaucuuug

SEQ ID NO: 2572994 - RNA, 19 nt, Artificial Sequence
  Description of Artificial Sequence: Synthetic oligonucleotide
  Sense strand starting at position 2250 of SEQ ID NO: 1889011
aguaacagugcuuauuaau

SEQ ID NO: 2572995 - RNA, 19 nt, Artificial Sequence
  Description of Artificial Sequence: Synthetic oligonucleotide
  Antisense strand to SEQ ID NO: 2572994
auuaauaagcacuguuacu

SEQ ID NO: 2572996 - RNA, 19 nt, Artificial Sequence
  Description of Artificial Sequence: Synthetic oligonucleotide
  Sense strand starting at position 2256 of SEQ ID NO: 1889011
agugcuuauuaauagacaa

SEQ ID NO: 2572997 - RNA, 19 nt, Artificial Sequence
  Description of Artificial Sequence: Synthetic oligonucleotide
  Antisense strand to SEQ ID NO: 2572996
uugucuauuaauaagcacu

SEQ ID NO: 2572998 - RNA, 19 nt, Artificial Sequence
  Description of Artificial Sequence: Synthetic oligonucleotide
  Sense strand starting at position 2349 of SEQ ID NO: 1889011
gguuguggaaucuaagauc

SEQ ID NO: 2572999 - RNA, 19 nt, Artificial Sequence
  Description of Artificial Sequence: Synthetic oligonucleotide
  Antisense strand to SEQ ID NO: 2572998
gaucuuagauuccacaacc

SEQ ID NO: 2573000 - RNA, 19 nt, Artificial Sequence
  Description of Artificial Sequence: Synthetic oligonucleotide
  Sense strand starting at position 2352 of SEQ ID NO: 1889011
uguggaaucuaagaucagu

SEQ ID NO: 2573001 - RNA, 19 nt, Artificial Sequence
  Description of Artificial Sequence: Synthetic oligonucleotide
  Antisense strand to SEQ ID NO: 2573000
acugaucuuagauuccaca

SEQ ID NO: 2573002 - RNA, 19 nt, Artificial Sequence
  Description of Artificial Sequence: Synthetic oligonucleotide
  Sense strand starting at position 2386 of SEQ ID NO: 1889011
ucuauaugcuagcaguaaa

SEQ ID NO: 2573003 - RNA, 19 nt, Artificial Sequence
  Description of Artificial Sequence: Synthetic oligonucleotide
  Antisense strand to SEQ ID NO: 2573002
uuuacugcuagcauauaga

SEQ ID NO: 2573004 - RNA, 19 nt, Artificial Sequence
  Description of Artificial Sequence: Synthetic oligonucleotide
  Sense strand starting at position 2479 of SEQ ID NO: 1889011
gcaagaacuguagagcaga

SEQ ID NO: 2573005 - RNA, 19 nt, Artificial Sequence
  Description of Artificial Sequence: Synthetic oligonucleotide
  Antisense strand to SEQ ID NO: 2573004
ucugcucuacaguucuugc

SEQ ID NO: 2573006 - RNA, 19 nt, Artificial Sequence
  Description of Artificial Sequence: Synthetic oligonucleotide
  Sense strand starting at position 2499 of SEQ ID NO: 1889011
acaacaaaguauuguaaag

SEQ ID NO: 2573007 - RNA, 19 nt, Artificial Sequence
  Description of Artificial Sequence: Synthetic oligonucleotide
  Antisense strand to SEQ ID NO: 2573006
cuuuacaauacuuuguugu

SEQ ID NO: 2573008 - RNA, 19 nt, Artificial Sequence
  Description of Artificial Sequence: Synthetic oligonucleotide
  Sense strand starting at position 2597 of SEQ ID NO: 1889011
gcauaugaacaguggaaag

SEQ ID NO: 2573009 - RNA, 19 nt, Artificial Sequence
  Description of Artificial Sequence: Synthetic oligonucleotide
  Antisense strand to SEQ ID NO: 2573008
cuuuccacuguucauaugc

SEQ ID NO: 2573010 - RNA, 19 nt, Artificial Sequence
  Description of Artificial Sequence: Synthetic oligonucleotide
  Sense strand starting at position 2759 of SEQ ID NO: 1889011
acaagccaguuauagaaua

SEQ ID NO: 2573011 - RNA, 19 nt, Artificial Sequence
  Description of Artificial Sequence: Synthetic oligonucleotide
  Antisense strand to SEQ ID NO: 2573010
uauucuauaacuggcuugu

SEQ ID NO: 2573012 - RNA, 19 nt, Artificial Sequence
  Description of Artificial Sequence: Synthetic oligonucleotide
  Sense strand starting at position 2764 of SEQ ID NO: 1889011
ccaguuauagaauauaugu

SEQ ID NO: 2573013 - RNA, 19 nt, Artificial Sequence
  Description of Artificial Sequence: Synthetic oligonucleotide
  Antisense strand to SEQ ID NO: 2573012
acauauauucuauaacugg

SEQ ID NO: 2573014 - RNA, 19 nt, Artificial Sequence
  Description of Artificial Sequence: Synthetic oligonucleotide
  Sense strand starting at position 2859 of SEQ ID NO: 1889011
uuagcugauuuauagacuu

SEQ ID NO: 2573015 - RNA, 19 nt, Artificial Sequence
  Description of Artificial Sequence: Synthetic oligonucleotide
  Antisense strand to SEQ ID NO: 2573014
aagucuauaaaucagcuaa

SEQ ID NO: 2573016 - RNA, 19 nt, Artificial Sequence
  Description of Artificial Sequence: Synthetic oligonucleotide
  Sense strand starting at position 2973 of SEQ ID NO: 1889011
uugacaaaggccuauguaa

SEQ ID NO: 2573017 - RNA, 19 nt, Artificial Sequence
  Description of Artificial Sequence: Synthetic oligonucleotide
  Antisense strand to SEQ ID NO: 2573016
uuacauaggccuuugucaa

SEQ ID NO: 2573018 - RNA, 19 nt, Artificial Sequence
  Description of Artificial Sequence: Synthetic oligonucleotide
  Sense strand starting at position 3126 of SEQ ID NO: 1889011
agauuuagaugucacaucu

SEQ ID NO: 2573019 - RNA, 19 nt, Artificial Sequence
  Description of Artificial Sequence: Synthetic oligonucleotide
  Antisense strand to SEQ ID NO: 2573018
agaugugacaucuaaaucu

SEQ ID NO: 2573020 - RNA, 19 nt, Artificial Sequence
  Description of Artificial Sequence: Synthetic oligonucleotide
  Sense strand starting at position 3253 of SEQ ID NO: 1889011
gucgauaacuaucuuaguc

SEQ ID NO: 2573021 - RNA, 19 nt, Artificial Sequence
  Description of Artificial Sequence: Synthetic oligonucleotide
  Antisense strand to SEQ ID NO: 2573020
gacuaagauaguuaucgac

SEQ ID NO: 2573022 - RNA, 19 nt, Artificial Sequence
  Description of Artificial Sequence: Synthetic oligonucleotide
  Sense strand starting at position 3255 of SEQ ID NO: 1889011
cgauaacuaucuuagucua

SEQ ID NO: 2573023 - RNA, 19 nt, Artificial Sequence
  Description of Artificial Sequence: Synthetic oligonucleotide
  Antisense strand to SEQ ID NO: 2573022
uagacuaagauaguuaucg

SEQ ID NO: 2573024 - RNA, 19 nt, Artificial Sequence
  Description of Artificial Sequence: Synthetic oligonucleotide
  Sense strand starting at position 3385 of SEQ ID NO: 1889011
guguguagugaggguugca

SEQ ID NO: 2573025 - RNA, 19 nt, Artificial Sequence
  Description of Artificial Sequence: Synthetic oligonucleotide
  Antisense strand to SEQ ID NO: 2573024
ugcaacccucacuacacac

SEQ ID NO: 2573026 - RNA, 19 nt, Artificial Sequence
  Description of Artificial Sequence: Synthetic oligonucleotide
  Sense strand starting at position 3397 of SEQ ID NO: 1889011
gguugcacacuuugucuaa

SEQ ID NO: 2573027 - RNA, 19 nt, Artificial Sequence
  Description of Artificial Sequence: Synthetic oligonucleotide
  Antisense strand to SEQ ID NO: 2573026
uuagacaaagugugcaacc

SEQ ID NO: 2573028 - RNA, 19 nt, Artificial Sequence
  Description of Artificial Sequence: Synthetic oligonucleotide
  Sense strand starting at position 3399 of SEQ ID NO: 1889011
uugcacacuuugucuaaga

SEQ ID NO: 2573029 - RNA, 19 nt, Artificial Sequence
  Description of Artificial Sequence: Synthetic oligonucleotide
  Antisense strand to SEQ ID NO: 2573028
ucuuagacaaagugugcaa

SEQ ID NO: 2573030 - RNA, 19 nt, Artificial Sequence
  Description of Artificial Sequence: Synthetic oligonucleotide
  Sense strand starting at position 3400 of SEQ ID NO: 1889011
ugcacacuuugucuaagau

SEQ ID NO: 2573031 - RNA, 19 nt, Artificial Sequence
  Description of Artificial Sequence: Synthetic oligonucleotide
  Antisense strand to SEQ ID NO: 2573030
aucuuagacaaagugugca

SEQ ID NO: 2573032 - RNA, 19 nt, Artificial Sequence
  Description of Artificial Sequence: Synthetic oligonucleotide
  Sense strand starting at position 3401 of SEQ ID NO: 1889011
gcacacuuugucuaagaua

SEQ ID NO: 2573033 - RNA, 19 nt, Artificial Sequence
  Description of Artificial Sequence: Synthetic oligonucleotide
  Antisense strand to SEQ ID NO: 2573032
uaucuuagacaaagugugc

SEQ ID NO: 2573034 - RNA, 19 nt, Artificial Sequence
  Description of Artificial Sequence: Synthetic oligonucleotide
  Sense strand starting at position 3640 of SEQ ID NO: 1889011
cacugauggcccgaaauuc

SEQ ID NO: 2573035 - RNA, 19 nt, Artificial Sequence
  Description of Artificial Sequence: Synthetic oligonucleotide
  Antisense strand to SEQ ID NO: 2573034
gaauuucgggccaucagug

SEQ ID NO: 2573036 - RNA, 19 nt, Artificial Sequence
  Description of Artificial Sequence: Synthetic oligonucleotide
  Sense strand starting at position 3784 of SEQ ID NO: 1889011
gggugauacucaaggugug

SEQ ID NO: 2573037 - RNA, 19 nt, Artificial Sequence
  Description of Artificial Sequence: Synthetic oligonucleotide
  Antisense strand to SEQ ID NO: 2573036
cacaccuugaguaucaccc

SEQ ID NO: 2573038 - RNA, 19 nt, Artificial Sequence
  Description of Artificial Sequence: Synthetic oligonucleotide
  Sense strand starting at position 3785 of SEQ ID NO: 1889011
ggugauacucaagguguga

SEQ ID NO: 2573039 - RNA, 19 nt, Artificial Sequence
  Description of Artificial Sequence: Synthetic oligonucleotide
  Antisense strand to SEQ ID NO: 2573038
ucacaccuugaguaucacc

SEQ ID NO: 2573040 - RNA, 19 nt, Artificial Sequence
  Description of Artificial Sequence: Synthetic oligonucleotide
  Sense strand starting at position 3787 of SEQ ID NO: 1889011
ugauacucaaggugugauu

SEQ ID NO: 2573041 - RNA, 19 nt, Artificial Sequence
  Description of Artificial Sequence: Synthetic oligonucleotide
  Antisense strand to SEQ ID NO: 2573040
aaucacaccuugaguauca

SEQ ID NO: 2573042 - RNA, 19 nt, Artificial Sequence
  Description of Artificial Sequence: Synthetic oligonucleotide
  Sense strand starting at position 3796 of SEQ ID NO: 1889011
aggugugauucauucggag

SEQ ID NO: 2573043 - RNA, 19 nt, Artificial Sequence
  Description of Artificial Sequence: Synthetic oligonucleotide
  Antisense strand to SEQ ID NO: 2573042
cuccgaaugaaucacaccu

SEQ ID NO: 2573044 - RNA, 19 nt, Artificial Sequence
  Description of Artificial Sequence: Synthetic oligonucleotide
  Sense strand starting at position 3799 of SEQ ID NO: 1889011
ugugauucauucggaguca

SEQ ID NO: 2573045 - RNA, 19 nt, Artificial Sequence
  Description of Artificial Sequence: Synthetic oligonucleotide
  Antisense strand to SEQ ID NO: 2573044
ugacuccgaaugaaucaca

SEQ ID NO: 2573046 - RNA, 19 nt, Artificial Sequence
  Description of Artificial Sequence: Synthetic oligonucleotide
  Sense strand starting at position 3800 of SEQ ID NO: 1889011
gugauucauucggagucaa

SEQ ID NO: 2573047 - RNA, 19 nt, Artificial Sequence
  Description of Artificial Sequence: Synthetic oligonucleotide
  Antisense strand to SEQ ID NO: 2573046
uugacuccgaaugaaucac

SEQ ID NO: 2573048 - RNA, 19 nt, Artificial Sequence
  Description of Artificial Sequence: Synthetic oligonucleotide
  Sense strand starting at position 3879 of SEQ ID NO: 1889011
gcgagacagucaugggaua

SEQ ID NO: 2573049 - RNA, 19 nt, Artificial Sequence
  Description of Artificial Sequence: Synthetic oligonucleotide
  Antisense strand to SEQ ID NO: 2573048
uaucccaugacugucucgc

SEQ ID NO: 2573050 - RNA, 19 nt, Artificial Sequence
  Description of Artificial Sequence: Synthetic oligonucleotide
  Sense strand starting at position 297 of SEQ ID NO: 1889012
ggccuuagcuucuauauuu

SEQ ID NO: 2573051 - RNA, 19 nt, Artificial Sequence
  Description of Artificial Sequence: Synthetic oligonucleotide
  Antisense strand to SEQ ID NO: 2573050
aaauauagaagcuaaggcc

SEQ ID NO: 2573052 - RNA, 19 nt, Artificial Sequence
  Description of Artificial Sequence: Synthetic oligonucleotide
  Sense strand starting at position 505 of SEQ ID NO: 1889012
acacauuaggaaugcuaga

SEQ ID NO: 2573053 - RNA, 19 nt, Artificial Sequence
  Description of Artificial Sequence: Synthetic oligonucleotide
  Antisense strand to SEQ ID NO: 2573052
ucuagcauuccuaaugugu

SEQ ID NO: 2573054 - RNA, 19 nt, Artificial Sequence
  Description of Artificial Sequence: Synthetic oligonucleotide
  Sense strand starting at position 555 of SEQ ID NO: 1889012
guggauaacaauugaaugu

SEQ ID NO: 2573055 - RNA, 19 nt, Artificial Sequence
  Description of Artificial Sequence: Synthetic oligonucleotide
  Antisense strand to SEQ ID NO: 2573054
acauucaauuguuauccac

SEQ ID NO: 2573056 - RNA, 19 nt, Artificial Sequence
  Description of Artificial Sequence: Synthetic oligonucleotide
  Sense strand starting at position 740 of SEQ ID NO: 1889012
gccagaugacuuugcauaa

SEQ ID NO: 2573057 - RNA, 19 nt, Artificial Sequence
  Description of Artificial Sequence: Synthetic oligonucleotide
  Antisense strand to SEQ ID NO: 2573056
uuaugcaaagucaucuggc

SEQ ID NO: 2573058 - RNA, 19 nt, Artificial Sequence
  Description of Artificial Sequence: Synthetic oligonucleotide
  Sense strand starting at position 741 of SEQ ID NO: 1889012
ccagaugacuuugcauaag

SEQ ID NO: 2573059 - RNA, 19 nt, Artificial Sequence
  Description of Artificial Sequence: Synthetic oligonucleotide
  Antisense strand to SEQ ID NO: 2573058
cuuaugcaaagucaucugg

SEQ ID NO: 2573060 - RNA, 19 nt, Artificial Sequence
  Description of Artificial Sequence: Synthetic oligonucleotide
  Sense strand starting at position 828 of SEQ ID NO: 1889012
agagaaugcuuucuaauuc

SEQ ID NO: 2573061 - RNA, 19 nt, Artificial Sequence
  Description of Artificial Sequence: Synthetic oligonucleotide
  Antisense strand to SEQ ID NO: 2573060
gaauuagaaagcauucucu

SEQ ID NO: 2573062 - RNA, 19 nt, Artificial Sequence
  Description of Artificial Sequence: Synthetic oligonucleotide
  Sense strand starting at position 963 of SEQ ID NO: 1889012
augaauaguuuacagaaug

SEQ ID NO: 2573063 - RNA, 19 nt, Artificial Sequence
  Description of Artificial Sequence: Synthetic oligonucleotide
  Antisense strand to SEQ ID NO: 2573062
cauucuguaaacuauucau

SEQ ID NO: 2573064 - RNA, 19 nt, Artificial Sequence
  Description of Artificial Sequence: Synthetic oligonucleotide
  Sense strand starting at position 2031 of SEQ ID NO: 1889012
uuagcaaauuagcauuaga

SEQ ID NO: 2573065 - RNA, 19 nt, Artificial Sequence
  Description of Artificial Sequence: Synthetic oligonucleotide
  Antisense strand to SEQ ID NO: 2573064
ucuaaugcuaauuugcuaa

SEQ ID NO: 2573066 - RNA, 19 nt, Artificial Sequence
  Description of Artificial Sequence: Synthetic oligonucleotide
  Sense strand starting at position 2036 of SEQ ID NO: 1889012
aaauuagcauuagaaaggu

SEQ ID NO: 2573067 - RNA, 19 nt, Artificial Sequence
  Description of Artificial Sequence: Synthetic oligonucleotide
  Antisense strand to SEQ ID NO: 2573066
accuuucuaaugcuaauuu

SEQ ID NO: 2573068 - RNA, 19 nt, Artificial Sequence
  Description of Artificial Sequence: Synthetic oligonucleotide
  Sense strand starting at position 2118 of SEQ ID NO: 1889012
guugaaugcuuucccaaga

SEQ ID NO: 2573069 - RNA, 19 nt, Artificial Sequence
  Description of Artificial Sequence: Synthetic oligonucleotide
  Antisense strand to SEQ ID NO: 2573068
ucuugggaaagcauucaac

SEQ ID NO: 2573070 - RNA, 19 nt, Artificial Sequence
  Description of Artificial Sequence: Synthetic oligonucleotide
  Sense strand starting at position 2119 of SEQ ID NO: 1889012
uugaaugcuuucccaagau

SEQ ID NO: 2573071 - RNA, 19 nt, Artificial Sequence
  Description of Artificial Sequence: Synthetic oligonucleotide
  Antisense strand to SEQ ID NO: 2573070
aucuugggaaagcauucaa

SEQ ID NO: 2573072 - RNA, 19 nt, Artificial Sequence
  Description of Artificial Sequence: Synthetic oligonucleotide
  Sense strand starting at position 2148 of SEQ ID NO: 1889012
caaagauauuagugcugac

SEQ ID NO: 2573073 - RNA, 19 nt, Artificial Sequence
  Description of Artificial Sequence: Synthetic oligonucleotide
  Antisense strand to SEQ ID NO: 2573072
gucagcacuaauaucuuug

SEQ ID NO: 2573074 - RNA, 19 nt, Artificial Sequence
  Description of Artificial Sequence: Synthetic oligonucleotide
  Sense strand starting at position 2250 of SEQ ID NO: 1889012
aguaacagugcuuauuaau

SEQ ID NO: 2573075 - RNA, 19 nt, Artificial Sequence
  Description of Artificial Sequence: Synthetic oligonucleotide
  Antisense strand to SEQ ID NO: 2573074
auuaauaagcacuguuacu

SEQ ID NO: 2573076 - RNA, 19 nt, Artificial Sequence
  Description of Artificial Sequence: Synthetic oligonucleotide
  Sense strand starting at position 2256 of SEQ ID NO: 1889012
agugcuuauuaauagacaa

SEQ ID NO: 2573077 - RNA, 19 nt, Artificial Sequence
  Description of Artificial Sequence: Synthetic oligonucleotide
  Antisense strand to SEQ ID NO: 2573076
uugucuauuaauaagcacu

SEQ ID NO: 2573078 - RNA, 19 nt, Artificial Sequence
  Description of Artificial Sequence: Synthetic oligonucleotide
  Sense strand starting at position 2349 of SEQ ID NO: 1889012
gguuguggaaucuaagauc

SEQ ID NO: 2573079 - RNA, 19 nt, Artificial Sequence
  Description of Artificial Sequence: Synthetic oligonucleotide
  Antisense strand to SEQ ID NO: 2573078
gaucuuagauuccacaacc

SEQ ID NO: 2573080 - RNA, 19 nt, Artificial Sequence
  Description of Artificial Sequence: Synthetic oligonucleotide
  Sense strand starting at position 2352 of SEQ ID NO: 1889012
uguggaaucuaagaucagu

SEQ ID NO: 2573081 - RNA, 19 nt, Artificial Sequence
  Description of Artificial Sequence: Synthetic oligonucleotide
  Antisense strand to SEQ ID NO: 2573080
acugaucuuagauuccaca

SEQ ID NO: 2573082 - RNA, 19 nt, Artificial Sequence
  Description of Artificial Sequence: Synthetic oligonucleotide
  Sense strand starting at position 2386 of SEQ ID NO: 1889012
ucuauaugcuagcaguaaa

SEQ ID NO: 2573083 - RNA, 19 nt, Artificial Sequence
  Description of Artificial Sequence: Synthetic oligonucleotide
  Antisense strand to SEQ ID NO: 2573082
uuuacugcuagcauauaga

SEQ ID NO: 2573084 - RNA, 19 nt, Artificial Sequence
  Description of Artificial Sequence: Synthetic oligonucleotide
  Sense strand starting at position 2479 of SEQ ID NO: 1889012
gcaagaacuguagagcaga

SEQ ID NO: 2573085 - RNA, 19 nt, Artificial Sequence
  Description of Artificial Sequence: Synthetic oligonucleotide
  Antisense strand to SEQ ID NO: 2573084
ucugcucuacaguucuugc

SEQ ID NO: 2573086 - RNA, 19 nt, Artificial Sequence
  Description of Artificial Sequence: Synthetic oligonucleotide
  Sense strand starting at position 2499 of SEQ ID NO: 1889012
acaacaaaguauuguaaag

SEQ ID NO: 2573087 - RNA, 19 nt, Artificial Sequence
  Description of Artificial Sequence: Synthetic oligonucleotide
  Antisense strand to SEQ ID NO: 2573086
cuuuacaauacuuuguugu

SEQ ID NO: 2573088 - RNA, 19 nt, Artificial Sequence
  Description of Artificial Sequence: Synthetic oligonucleotide
  Sense strand starting at position 2597 of SEQ ID NO: 1889012
gcauaugaacaguggaaag

SEQ ID NO: 2573089 - RNA, 19 nt, Artificial Sequence
  Description of Artificial Sequence: Synthetic oligonucleotide
  Antisense strand to SEQ ID NO: 2573088
cuuuccacuguucauaugc

SEQ ID NO: 2573090 - RNA, 19 nt, Artificial Sequence
  Description of Artificial Sequence: Synthetic oligonucleotide
  Sense strand starting at position 2759 of SEQ ID NO: 1889012
acaagccaguuauagaaua

SEQ ID NO: 2573091 - RNA, 19 nt, Artificial Sequence
  Description of Artificial Sequence: Synthetic oligonucleotide
  Antisense strand to SEQ ID NO: 2573090
uauucuauaacuggcuugu

SEQ ID NO: 2573092 - RNA, 19 nt, Artificial Sequence
  Description of Artificial Sequence: Synthetic oligonucleotide
  Sense strand starting at position 2764 of SEQ ID NO: 1889012
ccaguuauagaauauaugu

SEQ ID NO: 2573093 - RNA, 19 nt, Artificial Sequence
  Description of Artificial Sequence: Synthetic oligonucleotide
  Antisense strand to SEQ ID NO: 2573092
acauauauucuauaacugg

SEQ ID NO: 2573094 - RNA, 19 nt, Artificial Sequence
  Description of Artificial Sequence: Synthetic oligonucleotide
  Sense strand starting at position 2859 of SEQ ID NO: 1889012
uuagcugauuuauagacuu

SEQ ID NO: 2573095 - RNA, 19 nt, Artificial Sequence
  Description of Artificial Sequence: Synthetic oligonucleotide
  Antisense strand to SEQ ID NO: 2573094
aagucuauaaaucagcuaa

SEQ ID NO: 2573096 - RNA, 19 nt, Artificial Sequence
  Description of Artificial Sequence: Synthetic oligonucleotide
  Sense strand starting at position 2973 of SEQ ID NO: 1889012
uugacaaaggccuauguaa

SEQ ID NO: 2573097 - RNA, 19 nt, Artificial Sequence
  Description of Artificial Sequence: Synthetic oligonucleotide
  Antisense strand to SEQ ID NO: 2573096
uuacauaggccuuugucaa

SEQ ID NO: 2573098 - RNA, 19 nt, Artificial Sequence
  Description of Artificial Sequence: Synthetic oligonucleotide
  Sense strand starting at position 3126 of SEQ ID NO: 1889012
agauuuagaugucacaucu

SEQ ID NO: 2573099 - RNA, 19 nt, Artificial Sequence
  Description of Artificial Sequence: Synthetic oligonucleotide
  Antisense strand to SEQ ID NO: 2573098
agaugugacaucuaaaucu

SEQ ID NO: 2573100 - RNA, 19 nt, Artificial Sequence
  Description of Artificial Sequence: Synthetic oligonucleotide
  Sense strand starting at position 3253 of SEQ ID NO: 1889012
gucgauaacuaucuuaguc

SEQ ID NO: 2573101 - RNA, 19 nt, Artificial Sequence
  Description of Artificial Sequence: Synthetic oligonucleotide
  Antisense strand to SEQ ID NO: 2573100
gacuaagauaguuaucgac

SEQ ID NO: 2573102 - RNA, 19 nt, Artificial Sequence
  Description of Artificial Sequence: Synthetic oligonucleotide
  Sense strand starting at position 3255 of SEQ ID NO: 1889012
cgauaacuaucuuagucua

SEQ ID NO: 2573103 - RNA, 19 nt, Artificial Sequence
  Description of Artificial Sequence: Synthetic oligonucleotide
  Antisense strand to SEQ ID NO: 2573102
uagacuaagauaguuaucg

SEQ ID NO: 2573104 - RNA, 19 nt, Artificial Sequence
  Description of Artificial Sequence: Synthetic oligonucleotide
  Sense strand starting at position 3385 of SEQ ID NO: 1889012
guguguagugaggguugca

SEQ ID NO: 2573105 - RNA, 19 nt, Artificial Sequence
  Description of Artificial Sequence: Synthetic oligonucleotide
  Antisense strand to SEQ ID NO: 2573104
ugcaacccucacuacacac

SEQ ID NO: 2573106 - RNA, 19 nt, Artificial Sequence
  Description of Artificial Sequence: Synthetic oligonucleotide
  Sense strand starting at position 3397 of SEQ ID NO: 1889012
gguugcacacuuugucuaa

SEQ ID NO: 2573107 - RNA, 19 nt, Artificial Sequence
  Description of Artificial Sequence: Synthetic oligonucleotide
  Antisense strand to SEQ ID NO: 2573106
uuagacaaagugugcaacc

SEQ ID NO: 2573108 - RNA, 19 nt, Artificial Sequence
  Description of Artificial Sequence: Synthetic oligonucleotide
  Sense strand starting at position 3399 of SEQ ID NO: 1889012
uugcacacuuugucuaaga

SEQ ID NO: 2573109 - RNA, 19 nt, Artificial Sequence
  Description of Artificial Sequence: Synthetic oligonucleotide
  Antisense strand to SEQ ID NO: 2573108
ucuuagacaaagugugcaa

SEQ ID NO: 2573110 - RNA, 19 nt, Artificial Sequence
  Description of Artificial Sequence: Synthetic oligonucleotide
  Sense strand starting at position 3400 of SEQ ID NO: 1889012
ugcacacuuugucuaagau

SEQ ID NO: 2573111 - RNA, 19 nt, Artificial Sequence
  Description of Artificial Sequence: Synthetic oligonucleotide
  Antisense strand to SEQ ID NO: 2573110
aucuuagacaaagugugca

SEQ ID NO: 2573112 - RNA, 19 nt, Artificial Sequence
  Description of Artificial Sequence: Synthetic oligonucleotide
  Sense strand starting at position 3401 of SEQ ID NO: 1889012
gcacacuuugucuaagaua

SEQ ID NO: 2573113 - RNA, 19 nt, Artificial Sequence
  Description of Artificial Sequence: Synthetic oligonucleotide
  Antisense strand to SEQ ID NO: 2573112
uaucuuagacaaagugugc

SEQ ID NO: 2573114 - RNA, 19 nt, Artificial Sequence
  Description of Artificial Sequence: Synthetic oligonucleotide
  Sense strand starting at position 3640 of SEQ ID NO: 1889012
cacugauggcccgaaauuc

SEQ ID NO: 2573115 - RNA, 19 nt, Artificial Sequence
  Description of Artificial Sequence: Synthetic oligonucleotide
  Antisense strand to SEQ ID NO: 2573114
gaauuucgggccaucagug

SEQ ID NO: 2573116 - RNA, 19 nt, Artificial Sequence
  Description of Artificial Sequence: Synthetic oligonucleotide
  Sense strand starting at position 3784 of SEQ ID NO: 1889012
gggugauacucaaggugug

SEQ ID NO: 2573117 - RNA, 19 nt, Artificial Sequence
  Description of Artificial Sequence: Synthetic oligonucleotide
  Antisense strand to SEQ ID NO: 2573116
cacaccuugaguaucaccc

SEQ ID NO: 2573118 - RNA, 19 nt, Artificial Sequence
  Description of Artificial Sequence: Synthetic oligonucleotide
  Sense strand starting at position 3785 of SEQ ID NO: 1889012
ggugauacucaagguguga

SEQ ID NO: 2573119 - RNA, 19 nt, Artificial Sequence
  Description of Artificial Sequence: Synthetic oligonucleotide
  Antisense strand to SEQ ID NO: 2573118
ucacaccuugaguaucacc

SEQ ID NO: 2573120 - RNA, 19 nt, Artificial Sequence
  Description of Artificial Sequence: Synthetic oligonucleotide
  Sense strand starting at position 3787 of SEQ ID NO: 1889012
ugauacucaaggugugauu

SEQ ID NO: 2573121 - RNA, 19 nt, Artificial Sequence
  Description of Artificial Sequence: Synthetic oligonucleotide
  Antisense strand to SEQ ID NO: 2573120
aaucacaccuugaguauca

SEQ ID NO: 2573122 - RNA, 19 nt, Artificial Sequence
  Description of Artificial Sequence: Synthetic oligonucleotide
  Sense strand starting at position 3796 of SEQ ID NO: 1889012
aggugugauucauucggag

SEQ ID NO: 2573123 - RNA, 19 nt, Artificial Sequence
  Description of Artificial Sequence: Synthetic oligonucleotide
  Antisense strand to SEQ ID NO: 2573122
cuccgaaugaaucacaccu

SEQ ID NO: 2573124 - RNA, 19 nt, Artificial Sequence
  Description of Artificial Sequence: Synthetic oligonucleotide
  Sense strand starting at position 3799 of SEQ ID NO: 1889012
ugugauucauucggaguca

SEQ ID NO: 2573125 - RNA, 19 nt, Artificial Sequence
  Description of Artificial Sequence: Synthetic oligonucleotide
  Antisense strand to SEQ ID NO: 2573124
ugacuccgaaugaaucaca

SEQ ID NO: 2573126 - RNA, 19 nt, Artificial Sequence
  Description of Artificial Sequence: Synthetic oligonucleotide
  Sense strand starting at position 3800 of SEQ ID NO: 1889012
gugauucauucggagucaa

SEQ ID NO: 2573127 - RNA, 19 nt, Artificial Sequence
  Description of Artificial Sequence: Synthetic oligonucleotide
  Antisense strand to SEQ ID NO: 2573126
uugacuccgaaugaaucac

SEQ ID NO: 2573128 - RNA, 19 nt, Artificial Sequence
  Description of Artificial Sequence: Synthetic oligonucleotide
  Sense strand starting at position 3879 of SEQ ID NO: 1889012
gcgagacagucaugggaua

SEQ ID NO: 2573129 - RNA, 19 nt, Artificial Sequence
  Description of Artificial Sequence: Synthetic oligonucleotide
  Antisense strand to SEQ ID NO: 2573128
uaucccaugacugucucgc

SEQ ID NO: 2573130 - RNA, 19 nt, Artificial Sequence
  Description of Artificial Sequence: Synthetic oligonucleotide
  Sense strand starting at position 297 of SEQ ID NO: 1889013
ggccuuagcuucuauauuu

SEQ ID NO: 2573131 - RNA, 19 nt, Artificial Sequence
  Description of Artificial Sequence: Synthetic oligonucleotide
  Antisense strand to SEQ ID NO: 2573130
aaauauagaagcuaaggcc

SEQ ID NO: 2573132 - RNA, 19 nt, Artificial Sequence
  Description of Artificial Sequence: Synthetic oligonucleotide
  Sense strand starting at position 505 of SEQ ID NO: 1889013
acacauuaggaaugcuaga

SEQ ID NO: 2573133 - RNA, 19 nt, Artificial Sequence
  Description of Artificial Sequence: Synthetic oligonucleotide
  Antisense strand to SEQ ID NO: 2573132
ucuagcauuccuaaugugu

SEQ ID NO: 2573134 - RNA, 19 nt, Artificial Sequence
  Description of Artificial Sequence: Synthetic oligonucleotide
  Sense strand starting at position 555 of SEQ ID NO: 1889013
guggauaacaauugaaugu

SEQ ID NO: 2573135 - RNA, 19 nt, Artificial Sequence
  Description of Artificial Sequence: Synthetic oligonucleotide
  Antisense strand to SEQ ID NO: 2573134
acauucaauuguuauccac

SEQ ID NO: 2573136 - RNA, 19 nt, Artificial Sequence
  Description of Artificial Sequence: Synthetic oligonucleotide
  Sense strand starting at position 740 of SEQ ID NO: 1889013
gccagaugacuuugcauaa

SEQ ID NO: 2573137 - RNA, 19 nt, Artificial Sequence
  Description of Artificial Sequence: Synthetic oligonucleotide
  Antisense strand to SEQ ID NO: 2573136
uuaugcaaagucaucuggc

SEQ ID NO: 2573138 - RNA, 19 nt, Artificial Sequence
  Description of Artificial Sequence: Synthetic oligonucleotide
  Sense strand starting at position 741 of SEQ ID NO: 1889013
ccagaugacuuugcauaag

SEQ ID NO: 2573139 - RNA, 19 nt, Artificial Sequence
  Description of Artificial Sequence: Synthetic oligonucleotide
  Antisense strand to SEQ ID NO: 2573138
cuuaugcaaagucaucugg

SEQ ID NO: 2573140 - RNA, 19 nt, Artificial Sequence
  Description of Artificial Sequence: Synthetic oligonucleotide
  Sense strand starting at position 828 of SEQ ID NO: 1889013
agagaaugcuuucuaauuc

SEQ ID NO: 2573141 - RNA, 19 nt, Artificial Sequence
  Description of Artificial Sequence: Synthetic oligonucleotide
  Antisense strand to SEQ ID NO: 2573140
gaauuagaaagcauucucu

SEQ ID NO: 2573142 - RNA, 19 nt, Artificial Sequence
  Description of Artificial Sequence: Synthetic oligonucleotide
  Sense strand starting at position 963 of SEQ ID NO: 1889013
augaauaguuuacagaaug

SEQ ID NO: 2573143 - RNA, 19 nt, Artificial Sequence
  Description of Artificial Sequence: Synthetic oligonucleotide
  Antisense strand to SEQ ID NO: 2573142
cauucuguaaacuauucau

SEQ ID NO: 2573144 - RNA, 19 nt, Artificial Sequence
  Description of Artificial Sequence: Synthetic oligonucleotide
  Sense strand starting at position 2031 of SEQ ID NO: 1889013
uuagcaaauuagcauuaga

SEQ ID NO: 2573145 - RNA, 19 nt, Artificial Sequence
  Description of Artificial Sequence: Synthetic oligonucleotide
  Antisense strand to SEQ ID NO: 2573144
ucuaaugcuaauuugcuaa

SEQ ID NO: 2573146 - RNA, 19 nt, Artificial Sequence
  Description of Artificial Sequence: Synthetic oligonucleotide
  Sense strand starting at position 2036 of SEQ ID NO: 1889013
aaauuagcauuagaaaggu

SEQ ID NO: 2573147 - RNA, 19 nt, Artificial Sequence
  Description of Artificial Sequence: Synthetic oligonucleotide
  Antisense strand to SEQ ID NO: 2573146
accuuucuaaugcuaauuu

SEQ ID NO: 2573148 - RNA, 19 nt, Artificial Sequence
  Description of Artificial Sequence: Synthetic oligonucleotide
  Sense strand starting at position 2118 of SEQ ID NO: 1889013
guugaaugcuuucccaaga

SEQ ID NO: 2573149 - RNA, 19 nt, Artificial Sequence
  Description of Artificial Sequence: Synthetic oligonucleotide
  Antisense strand to SEQ ID NO: 2573148
ucuugggaaagcauucaac

SEQ ID NO: 2573150 - RNA, 19 nt, Artificial Sequence
  Description of Artificial Sequence: Synthetic oligonucleotide
  Sense strand starting at position 2119 of SEQ ID NO: 1889013
uugaaugcuuucccaagau

SEQ ID NO: 2573151 - RNA, 19 nt, Artificial Sequence
  Description of Artificial Sequence: Synthetic oligonucleotide
  Antisense strand to SEQ ID NO: 2573150
aucuugggaaagcauucaa

SEQ ID NO: 2573152 - RNA, 19 nt, Artificial Sequence
  Description of Artificial Sequence: Synthetic oligonucleotide
  Sense strand starting at position 2148 of SEQ ID NO: 1889013
caaagauauuagugcugac

SEQ ID NO: 2573153 - RNA, 19 nt, Artificial Sequence
  Description of Artificial Sequence: Synthetic oligonucleotide
  Antisense strand to SEQ ID NO: 2573152
gucagcacuaauaucuuug

SEQ ID NO: 2573154 - RNA, 19 nt, Artificial Sequence
  Description of Artificial Sequence: Synthetic oligonucleotide
  Sense strand starting at position 2250 of SEQ ID NO: 1889013
aguaacagugcuuauuaau

SEQ ID NO: 2573155 - RNA, 19 nt, Artificial Sequence
  Description of Artificial Sequence: Synthetic oligonucleotide
  Antisense strand to SEQ ID NO: 2573154
auuaauaagcacuguuacu

SEQ ID NO: 2573156 - RNA, 19 nt, Artificial Sequence
  Description of Artificial Sequence: Synthetic oligonucleotide
  Sense strand starting at position 2256 of SEQ ID NO: 1889013
agugcuuauuaauagacaa

SEQ ID NO: 2573157 - RNA, 19 nt, Artificial Sequence
  Description of Artificial Sequence: Synthetic oligonucleotide
  Antisense strand to SEQ ID NO: 2573156
uugucuauuaauaagcacu

SEQ ID NO: 2573158 - RNA, 19 nt, Artificial Sequence
  Description of Artificial Sequence: Synthetic oligonucleotide
  Sense strand starting at position 2349 of SEQ ID NO: 1889013
gguuguggaaucuaagauc

SEQ ID NO: 2573159 - RNA, 19 nt, Artificial Sequence
  Description of Artificial Sequence: Synthetic oligonucleotide
  Antisense strand to SEQ ID NO: 2573158
gaucuuagauuccacaacc

SEQ ID NO: 2573160 - RNA, 19 nt, Artificial Sequence
  Description of Artificial Sequence: Synthetic oligonucleotide
  Sense strand starting at position 2352 of SEQ ID NO: 1889013
uguggaaucuaagaucagu

SEQ ID NO: 2573161 - RNA, 19 nt, Artificial Sequence
  Description of Artificial Sequence: Synthetic oligonucleotide
  Antisense strand to SEQ ID NO: 2573160
acugaucuuagauuccaca

SEQ ID NO: 2573162 - RNA, 19 nt, Artificial Sequence
  Description of Artificial Sequence: Synthetic oligonucleotide
  Sense strand starting at position 2386 of SEQ ID NO: 1889013
ucuauaugcuagcaguaaa

SEQ ID NO: 2573163 - RNA, 19 nt, Artificial Sequence
  Description of Artificial Sequence: Synthetic oligonucleotide
  Antisense strand to SEQ ID NO: 2573162
uuuacugcuagcauauaga

SEQ ID NO: 2573164 - RNA, 19 nt, Artificial Sequence
  Description of Artificial Sequence: Synthetic oligonucleotide
  Sense strand starting at position 2479 of SEQ ID NO: 1889013
gcaagaacuguagagcaga

SEQ ID NO: 2573165 - RNA, 19 nt, Artificial Sequence
  Description of Artificial Sequence: Synthetic oligonucleotide
  Antisense strand to SEQ ID NO: 2573164
ucugcucuacaguucuugc

SEQ ID NO: 2573166 - RNA, 19 nt, Artificial Sequence
  Description of Artificial Sequence: Synthetic oligonucleotide
  Sense strand starting at position 2499 of SEQ ID NO: 1889013
acaacaaaguauuguaaag

SEQ ID NO: 2573167 - RNA, 19 nt, Artificial Sequence
  Description of Artificial Sequence: Synthetic oligonucleotide
  Antisense strand to SEQ ID NO: 2573166
cuuuacaauacuuuguugu

SEQ ID NO: 2573168 - RNA, 19 nt, Artificial Sequence
  Description of Artificial Sequence: Synthetic oligonucleotide
  Sense strand starting at position 2597 of SEQ ID NO: 1889013
gcauaugaacaguggaaag

SEQ ID NO: 2573169 - RNA, 19 nt, Artificial Sequence
  Description of Artificial Sequence: Synthetic oligonucleotide
  Antisense strand to SEQ ID NO: 2573168
cuuuccacuguucauaugc

SEQ ID NO: 2573170 - RNA, 19 nt, Artificial Sequence
  Description of Artificial Sequence: Synthetic oligonucleotide
  Sense strand starting at position 2759 of SEQ ID NO: 1889013
acaagccaguuauagaaua

SEQ ID NO: 2573171 - RNA, 19 nt, Artificial Sequence
  Description of Artificial Sequence: Synthetic oligonucleotide
  Antisense strand to SEQ ID NO: 2573170
uauucuauaacuggcuugu

SEQ ID NO: 2573172 - RNA, 19 nt, Artificial Sequence
  Description of Artificial Sequence: Synthetic oligonucleotide
  Sense strand starting at position 2764 of SEQ ID NO: 1889013
ccaguuauagaauauaugu

SEQ ID NO: 2573173 - RNA, 19 nt, Artificial Sequence
  Description of Artificial Sequence: Synthetic oligonucleotide
  Antisense strand to SEQ ID NO: 2573172
acauauauucuauaacugg

SEQ ID NO: 2573174 - RNA, 19 nt, Artificial Sequence
  Description of Artificial Sequence: Synthetic oligonucleotide
  Sense strand starting at position 2859 of SEQ ID NO: 1889013
uuagcugauuuauagacuu

SEQ ID NO: 2573175 - RNA, 19 nt, Artificial Sequence
  Description of Artificial Sequence: Synthetic oligonucleotide
  Antisense strand to SEQ ID NO: 2573174
aagucuauaaaucagcuaa

SEQ ID NO: 2573176 - RNA, 19 nt, Artificial Sequence
  Description of Artificial Sequence: Synthetic oligonucleotide
  Sense strand starting at position 2973 of SEQ ID NO: 1889013
uugacaaaggccuauguaa

SEQ ID NO: 2573177 - RNA, 19 nt, Artificial Sequence
  Description of Artificial Sequence: Synthetic oligonucleotide
  Antisense strand to SEQ ID NO: 2573176
uuacauaggccuuugucaa

SEQ ID NO: 2573178 - RNA, 19 nt, Artificial Sequence
  Description of Artificial Sequence: Synthetic oligonucleotide
  Sense strand starting at position 3126 of SEQ ID NO: 1889013
agauuuagaugucacaucu

SEQ ID NO: 2573179 - RNA, 19 nt, Artificial Sequence
  Description of Artificial Sequence: Synthetic oligonucleotide
  Antisense strand to SEQ ID NO: 2573178
agaugugacaucuaaaucu

SEQ ID NO: 2573180 - RNA, 19 nt, Artificial Sequence
  Description of Artificial Sequence: Synthetic oligonucleotide
  Sense strand starting at position 3253 of SEQ ID NO: 1889013
gucgauaacuaucuuaguc

SEQ ID NO: 2573181 - RNA, 19 nt, Artificial Sequence
  Description of Artificial Sequence: Synthetic oligonucleotide
  Antisense strand to SEQ ID NO: 2573180
gacuaagauaguuaucgac

SEQ ID NO: 2573182 - RNA, 19 nt, Artificial Sequence
  Description of Artificial Sequence: Synthetic oligonucleotide
  Sense strand starting at position 3255 of SEQ ID NO: 1889013
cgauaacuaucuuagucua

SEQ ID NO: 2573183 - RNA, 19 nt, Artificial Sequence
  Description of Artificial Sequence: Synthetic oligonucleotide
  Antisense strand to SEQ ID NO: 2573182
uagacuaagauaguuaucg

SEQ ID NO: 2573184 - RNA, 19 nt, Artificial Sequence
  Description of Artificial Sequence: Synthetic oligonucleotide
  Sense strand starting at position 3385 of SEQ ID NO: 1889013
guguguagugaggguugca

SEQ ID NO: 2573185 - RNA, 19 nt, Artificial Sequence
  Description of Artificial Sequence: Synthetic oligonucleotide
  Antisense strand to SEQ ID NO: 2573184
ugcaacccucacuacacac

SEQ ID NO: 2573186 - RNA, 19 nt, Artificial Sequence
  Description of Artificial Sequence: Synthetic oligonucleotide
  Sense strand starting at position 3397 of SEQ ID NO: 1889013
gguugcacacuuugucuaa

SEQ ID NO: 2573187 - RNA, 19 nt, Artificial Sequence
  Description of Artificial Sequence: Synthetic oligonucleotide
  Antisense strand to SEQ ID NO: 2573186
uuagacaaagugugcaacc

SEQ ID NO: 2573188 - RNA, 19 nt, Artificial Sequence
  Description of Artificial Sequence: Synthetic oligonucleotide
  Sense strand starting at position 3399 of SEQ ID NO: 1889013
uugcacacuuugucuaaga

SEQ ID NO: 2573189 - RNA, 19 nt, Artificial Sequence
  Description of Artificial Sequence: Synthetic oligonucleotide
  Antisense strand to SEQ ID NO: 2573188
ucuuagacaaagugugcaa

SEQ ID NO: 2573190 - RNA, 19 nt, Artificial Sequence
  Description of Artificial Sequence: Synthetic oligonucleotide
  Sense strand starting at position 3400 of SEQ ID NO: 1889013
ugcacacuuugucuaagau

SEQ ID NO: 2573191 - RNA, 19 nt, Artificial Sequence
  Description of Artificial Sequence: Synthetic oligonucleotide
  Antisense strand to SEQ ID NO: 2573190
aucuuagacaaagugugca

SEQ ID NO: 2573192 - RNA, 19 nt, Artificial Sequence
  Description of Artificial Sequence: Synthetic oligonucleotide
  Sense strand starting at position 3401 of SEQ ID NO: 1889013
gcacacuuugucuaagaua

SEQ ID NO: 2573193 - RNA, 19 nt, Artificial Sequence
  Description of Artificial Sequence: Synthetic oligonucleotide
  Antisense strand to SEQ ID NO: 2573192
uaucuuagacaaagugugc

SEQ ID NO: 2573194 - RNA, 19 nt, Artificial Sequence
  Description of Artificial Sequence: Synthetic oligonucleotide
  Sense strand starting at position 3640 of SEQ ID NO: 1889013
cacugauggcccgaaauuc

SEQ ID NO: 2573195 - RNA, 19 nt, Artificial Sequence
  Description of Artificial Sequence: Synthetic oligonucleotide
  Antisense strand to SEQ ID NO: 2573194
gaauuucgggccaucagug

SEQ ID NO: 2573196 - RNA, 19 nt, Artificial Sequence
  Description of Artificial Sequence: Synthetic oligonucleotide
  Sense strand starting at position 3784 of SEQ ID NO: 1889013
gggugauacucaaggugug

SEQ ID NO: 2573197 - RNA, 19 nt, Artificial Sequence
  Description of Artificial Sequence: Synthetic oligonucleotide
  Antisense strand to SEQ ID NO: 2573196
cacaccuugaguaucaccc

SEQ ID NO: 2573198 - RNA, 19 nt, Artificial Sequence
  Description of Artificial Sequence: Synthetic oligonucleotide
  Sense strand starting at position 3785 of SEQ ID NO: 1889013
ggugauacucaagguguga

SEQ ID NO: 2573199 - RNA, 19 nt, Artificial Sequence
  Description of Artificial Sequence: Synthetic oligonucleotide
  Antisense strand to SEQ ID NO: 2573198
ucacaccuugaguaucacc

SEQ ID NO: 2573200 - RNA, 19 nt, Artificial Sequence
  Description of Artificial Sequence: Synthetic oligonucleotide
  Sense strand starting at position 3787 of SEQ ID NO: 1889013
ugauacucaaggugugauu

SEQ ID NO: 2573201 - RNA, 19 nt, Artificial Sequence
  Description of Artificial Sequence: Synthetic oligonucleotide
  Antisense strand to SEQ ID NO: 2573200
aaucacaccuugaguauca

SEQ ID NO: 2573202 - RNA, 19 nt, Artificial Sequence
  Description of Artificial Sequence: Synthetic oligonucleotide
  Sense strand starting at position 3796 of SEQ ID NO: 1889013
aggugugauucauucggag

SEQ ID NO: 2573203 - RNA, 19 nt, Artificial Sequence
  Description of Artificial Sequence: Synthetic oligonucleotide
  Antisense strand to SEQ ID NO: 2573202
cuccgaaugaaucacaccu

SEQ ID NO: 2573204 - RNA, 19 nt, Artificial Sequence
  Description of Artificial Sequence: Synthetic oligonucleotide
  Sense strand starting at position 3799 of SEQ ID NO: 1889013
ugugauucauucggaguca

SEQ ID NO: 2573205 - RNA, 19 nt, Artificial Sequence
  Description of Artificial Sequence: Synthetic oligonucleotide
  Antisense strand to SEQ ID NO: 2573204
ugacuccgaaugaaucaca

SEQ ID NO: 2573206 - RNA, 19 nt, Artificial Sequence
  Description of Artificial Sequence: Synthetic oligonucleotide
  Sense strand starting at position 3800 of SEQ ID NO: 1889013
gugauucauucggagucaa

SEQ ID NO: 2573207 - RNA, 19 nt, Artificial Sequence
  Description of Artificial Sequence: Synthetic oligonucleotide
  Antisense strand to SEQ ID NO: 2573206
uugacuccgaaugaaucac

SEQ ID NO: 2573208 - RNA, 19 nt, Artificial Sequence
  Description of Artificial Sequence: Synthetic oligonucleotide
  Sense strand starting at position 3879 of SEQ ID NO: 1889013
gcgagacagucaugggaua

SEQ ID NO: 2573209 - RNA, 19 nt, Artificial Sequence
  Description of Artificial Sequence: Synthetic oligonucleotide
  Antisense strand to SEQ ID NO: 2573208
uaucccaugacugucucgc

SEQ ID NO: 2573210 - RNA, 19 nt, Artificial Sequence
  Description of Artificial Sequence: Synthetic oligonucleotide
  Sense strand starting at position 59 of SEQ ID NO: 1889014
ugaacuaugucuccaagaa

SEQ ID NO: 2573211 - RNA, 19 nt, Artificial Sequence
  Description of Artificial Sequence: Synthetic oligonucleotide
  Antisense strand to SEQ ID NO: 2573210
uucuuggagacauaguuca

SEQ ID NO: 2573212 - RNA, 19 nt, Artificial Sequence
  Description of Artificial Sequence: Synthetic oligonucleotide
  Sense strand starting at position 114 of SEQ ID NO: 1889014
aaugguguuccugauggag

SEQ ID NO: 2573213 - RNA, 19 nt, Artificial Sequence
  Description of Artificial Sequence: Synthetic oligonucleotide
  Antisense strand to SEQ ID NO: 2573212
cuccaucaggaacaccauu

SEQ ID NO: 2573214 - RNA, 19 nt, Artificial Sequence
  Description of Artificial Sequence: Synthetic oligonucleotide
  Sense strand starting at position 371 of SEQ ID NO: 1889014
agaguaauagcagacuucu

SEQ ID NO: 2573215 - RNA, 19 nt, Artificial Sequence
  Description of Artificial Sequence: Synthetic oligonucleotide
  Antisense strand to SEQ ID NO: 2573214
agaagucugcuauuacucu

SEQ ID NO: 2573216 - RNA, 19 nt, Artificial Sequence
  Description of Artificial Sequence: Synthetic oligonucleotide
  Sense strand starting at position 377 of SEQ ID NO: 1889014
auagcagacuucucagcaa

SEQ ID NO: 2573217 - RNA, 19 nt, Artificial Sequence
  Description of Artificial Sequence: Synthetic oligonucleotide
  Antisense strand to SEQ ID NO: 2573216
uugcugagaagucugcuau

SEQ ID NO: 2573218 - RNA, 19 nt, Artificial Sequence
  Description of Artificial Sequence: Synthetic oligonucleotide
  Sense strand starting at position 992 of SEQ ID NO: 1889014
auaacaaaguaucuaggua

SEQ ID NO: 2573219 - RNA, 19 nt, Artificial Sequence
  Description of Artificial Sequence: Synthetic oligonucleotide
  Antisense strand to SEQ ID NO: 2573218
uaccuagauacuuuguuau

SEQ ID NO: 2573220 - RNA, 19 nt, Artificial Sequence
  Description of Artificial Sequence: Synthetic oligonucleotide
  Sense strand starting at position 1007 of SEQ ID NO: 1889014
gguaacaauuaacaugaua

SEQ ID NO: 2573221 - RNA, 19 nt, Artificial Sequence
  Description of Artificial Sequence: Synthetic oligonucleotide
  Antisense strand to SEQ ID NO: 2573220
uaucauguuaauuguuacc

SEQ ID NO: 2573222 - RNA, 19 nt, Artificial Sequence
  Description of Artificial Sequence: Synthetic oligonucleotide
  Sense strand starting at position 1027 of SEQ ID NO: 1889014
auggaacaguacuuuauau

SEQ ID NO: 2573223 - RNA, 19 nt, Artificial Sequence
  Description of Artificial Sequence: Synthetic oligonucleotide
  Antisense strand to SEQ ID NO: 2573222
auauaaaguacuguuccau

SEQ ID NO: 2573224 - RNA, 19 nt, Artificial Sequence
  Description of Artificial Sequence: Synthetic oligonucleotide
  Sense strand starting at position 1092 of SEQ ID NO: 1889014
aauugcagauugucagaau

SEQ ID NO: 2573225 - RNA, 19 nt, Artificial Sequence
  Description of Artificial Sequence: Synthetic oligonucleotide
  Antisense strand to SEQ ID NO: 2573224
auucugacaaucugcaauu

SEQ ID NO: 2573226 - RNA, 19 nt, Artificial Sequence
  Description of Artificial Sequence: Synthetic oligonucleotide
  Sense strand starting at position 1248 of SEQ ID NO: 1889014
uaguuccuugaguggacaa

SEQ ID NO: 2573227 - RNA, 19 nt, Artificial Sequence
  Description of Artificial Sequence: Synthetic oligonucleotide
  Antisense strand to SEQ ID NO: 2573226
uuguccacucaaggaacua

SEQ ID NO: 2573228 - RNA, 19 nt, Artificial Sequence
  Description of Artificial Sequence: Synthetic oligonucleotide
  Sense strand starting at position 1249 of SEQ ID NO: 1889014
aguuccuugaguggacaaa

SEQ ID NO: 2573229 - RNA, 19 nt, Artificial Sequence
  Description of Artificial Sequence: Synthetic oligonucleotide
  Antisense strand to SEQ ID NO: 2573228
uuuguccacucaaggaacu

SEQ ID NO: 2573230 - RNA, 19 nt, Artificial Sequence
  Description of Artificial Sequence: Synthetic oligonucleotide
  Sense strand starting at position 1250 of SEQ ID NO: 1889014
guuccuugaguggacaaau

SEQ ID NO: 2573231 - RNA, 19 nt, Artificial Sequence
  Description of Artificial Sequence: Synthetic oligonucleotide
  Antisense strand to SEQ ID NO: 2573230
auuuguccacucaaggaac

SEQ ID NO: 2573232 - RNA, 19 nt, Artificial Sequence
  Description of Artificial Sequence: Synthetic oligonucleotide
  Sense strand starting at position 1335 of SEQ ID NO: 1889014
cagggcugcuuccugagua

SEQ ID NO: 2573233 - RNA, 19 nt, Artificial Sequence
  Description of Artificial Sequence: Synthetic oligonucleotide
  Antisense strand to SEQ ID NO: 2573232
uacucaggaagcagcccug

SEQ ID NO: 2573234 - RNA, 19 nt, Artificial Sequence
  Description of Artificial Sequence: Synthetic oligonucleotide
  Sense strand starting at position 1339 of SEQ ID NO: 1889014
gcugcuuccugaguauaaa

SEQ ID NO: 2573235 - RNA, 19 nt, Artificial Sequence
  Description of Artificial Sequence: Synthetic oligonucleotide
  Antisense strand to SEQ ID NO: 2573234
uuuauacucaggaagcagc

SEQ ID NO: 2573236 - RNA, 19 nt, Artificial Sequence
  Description of Artificial Sequence: Synthetic oligonucleotide
  Sense strand starting at position 1340 of SEQ ID NO: 1889014
cugcuuccugaguauaaac

SEQ ID NO: 2573237 - RNA, 19 nt, Artificial Sequence
  Description of Artificial Sequence: Synthetic oligonucleotide
  Antisense strand to SEQ ID NO: 2573236
guuuauacucaggaagcag

SEQ ID NO: 2573238 - RNA, 19 nt, Artificial Sequence
  Description of Artificial Sequence: Synthetic oligonucleotide
  Sense strand starting at position 1342 of SEQ ID NO: 1889014
gcuuccugaguauaaacau

SEQ ID NO: 2573239 - RNA, 19 nt, Artificial Sequence
  Description of Artificial Sequence: Synthetic oligonucleotide
  Antisense strand to SEQ ID NO: 2573238
auguuuauacucaggaagc

SEQ ID NO: 2573240 - RNA, 19 nt, Artificial Sequence
  Description of Artificial Sequence: Synthetic oligonucleotide
  Sense strand starting at position 1375 of SEQ ID NO: 1889014
ugugcuuaaucuucgaaau

SEQ ID NO: 2573241 - RNA, 19 nt, Artificial Sequence
  Description of Artificial Sequence: Synthetic oligonucleotide
  Antisense strand to SEQ ID NO: 2573240
auuucgaagauuaagcaca

SEQ ID NO: 2573242 - RNA, 19 nt, Artificial Sequence
  Description of Artificial Sequence: Synthetic oligonucleotide
  Sense strand starting at position 1376 of SEQ ID NO: 1889014
gugcuuaaucuucgaaauc

SEQ ID NO: 2573243 - RNA, 19 nt, Artificial Sequence
  Description of Artificial Sequence: Synthetic oligonucleotide
  Antisense strand to SEQ ID NO: 2573242
gauuucgaagauuaagcac

SEQ ID NO: 2573244 - RNA, 19 nt, Artificial Sequence
  Description of Artificial Sequence: Synthetic oligonucleotide
  Sense strand starting at position 1435 of SEQ ID NO: 1889014
aaauguaaggugugaaucu

SEQ ID NO: 2573245 - RNA, 19 nt, Artificial Sequence
  Description of Artificial Sequence: Synthetic oligonucleotide
  Antisense strand to SEQ ID NO: 2573244
agauucacaccuuacauuu

SEQ ID NO: 2573246 - RNA, 19 nt, Artificial Sequence
  Description of Artificial Sequence: Synthetic oligonucleotide
  Sense strand starting at position 1522 of SEQ ID NO: 1889014
augucuagaggucaauauc

SEQ ID NO: 2573247 - RNA, 19 nt, Artificial Sequence
  Description of Artificial Sequence: Synthetic oligonucleotide
  Antisense strand to SEQ ID NO: 2573246
gauauugaccucuagacau

SEQ ID NO: 2573248 - RNA, 19 nt, Artificial Sequence
  Description of Artificial Sequence: Synthetic oligonucleotide
  Sense strand starting at position 1567 of SEQ ID NO: 1889014
acauacaaugucuguaaau

SEQ ID NO: 2573249 - RNA, 19 nt, Artificial Sequence
  Description of Artificial Sequence: Synthetic oligonucleotide
  Antisense strand to SEQ ID NO: 2573248
auuuacagacauuguaugu

SEQ ID NO: 2573250 - RNA, 19 nt, Artificial Sequence
  Description of Artificial Sequence: Synthetic oligonucleotide
  Sense strand starting at position 1569 of SEQ ID NO: 1889014
auacaaugucuguaaaugu

SEQ ID NO: 2573251 - RNA, 19 nt, Artificial Sequence
  Description of Artificial Sequence: Synthetic oligonucleotide
  Antisense strand to SEQ ID NO: 2573250
acauuuacagacauuguau

SEQ ID NO: 2573252 - RNA, 19 nt, Artificial Sequence
  Description of Artificial Sequence: Synthetic oligonucleotide
  Sense strand starting at position 1739 of SEQ ID NO: 1889014
ccugauccagcuugcagaa

SEQ ID NO: 2573253 - RNA, 19 nt, Artificial Sequence
  Description of Artificial Sequence: Synthetic oligonucleotide
  Antisense strand to SEQ ID NO: 2573252
uucugcaagcuggaucagg

SEQ ID NO: 2573254 - RNA, 19 nt, Artificial Sequence
  Description of Artificial Sequence: Synthetic oligonucleotide
  Sense strand starting at position 1805 of SEQ ID NO: 1889014
ucagguuauuccuuaggca

SEQ ID NO: 2573255 - RNA, 19 nt, Artificial Sequence
  Description of Artificial Sequence: Synthetic oligonucleotide
  Antisense strand to SEQ ID NO: 2573254
ugccuaaggaauaaccuga

SEQ ID NO: 2573256 - RNA, 19 nt, Artificial Sequence
  Description of Artificial Sequence: Synthetic oligonucleotide
  Sense strand starting at position 1806 of SEQ ID NO: 1889014
cagguuauuccuuaggcac

SEQ ID NO: 2573257 - RNA, 19 nt, Artificial Sequence
  Description of Artificial Sequence: Synthetic oligonucleotide
  Antisense strand to SEQ ID NO: 2573256
gugccuaaggaauaaccug

SEQ ID NO: 2573258 - RNA, 19 nt, Artificial Sequence
  Description of Artificial Sequence: Synthetic oligonucleotide
  Sense strand starting at position 1944 of SEQ ID NO: 1889014
agaccauuggcucaucacu

SEQ ID NO: 2573259 - RNA, 19 nt, Artificial Sequence
  Description of Artificial Sequence: Synthetic oligonucleotide
  Antisense strand to SEQ ID NO: 2573258
agugaugagccaauggucu

SEQ ID NO: 2573260 - RNA, 19 nt, Artificial Sequence
  Description of Artificial Sequence: Synthetic oligonucleotide
  Sense strand starting at position 2190 of SEQ ID NO: 1889014
gguaguguucaaggucaau

SEQ ID NO: 2573261 - RNA, 19 nt, Artificial Sequence
  Description of Artificial Sequence: Synthetic oligonucleotide
  Antisense strand to SEQ ID NO: 2573260
auugaccuugaacacuacc

SEQ ID NO: 2573262 - RNA, 19 nt, Artificial Sequence
  Description of Artificial Sequence: Synthetic oligonucleotide
  Sense strand starting at position 2225 of SEQ ID NO: 1889014
gaaagugagucccugcaga

SEQ ID NO: 2573263 - RNA, 19 nt, Artificial Sequence
  Description of Artificial Sequence: Synthetic oligonucleotide
  Antisense strand to SEQ ID NO: 2573262
ucugcagggacucacuuuc

SEQ ID NO: 2573264 - RNA, 19 nt, Artificial Sequence
  Description of Artificial Sequence: Synthetic oligonucleotide
  Sense strand starting at position 2516 of SEQ ID NO: 1889014
cuaucaguacugcaagacu

SEQ ID NO: 2573265 - RNA, 19 nt, Artificial Sequence
  Description of Artificial Sequence: Synthetic oligonucleotide
  Antisense strand to SEQ ID NO: 2573264
agucuugcaguacugauag

SEQ ID NO: 2573266 - RNA, 19 nt, Artificial Sequence
  Description of Artificial Sequence: Synthetic oligonucleotide
  Sense strand starting at position 2554 of SEQ ID NO: 1889014
ggcacaucaccaggaucau

SEQ ID NO: 2573267 - RNA, 19 nt, Artificial Sequence
  Description of Artificial Sequence: Synthetic oligonucleotide
  Antisense strand to SEQ ID NO: 2573266
augauccuggugaugugcc

SEQ ID NO: 2573268 - RNA, 19 nt, Artificial Sequence
  Description of Artificial Sequence: Synthetic oligonucleotide
  Sense strand starting at position 2656 of SEQ ID NO: 1889014
cuagaaggugagugauucu

SEQ ID NO: 2573269 - RNA, 19 nt, Artificial Sequence
  Description of Artificial Sequence: Synthetic oligonucleotide
  Antisense strand to SEQ ID NO: 2573268
agaaucacucaccuucuag

SEQ ID NO: 2573270 - RNA, 19 nt, Artificial Sequence
  Description of Artificial Sequence: Synthetic oligonucleotide
  Sense strand starting at position 2659 of SEQ ID NO: 1889014
gaaggugagugauucugca

SEQ ID NO: 2573271 - RNA, 19 nt, Artificial Sequence
  Description of Artificial Sequence: Synthetic oligonucleotide
  Antisense strand to SEQ ID NO: 2573270
ugcagaaucacucaccuuc

SEQ ID NO: 2573272 - RNA, 19 nt, Artificial Sequence
  Description of Artificial Sequence: Synthetic oligonucleotide
  Sense strand starting at position 2663 of SEQ ID NO: 1889014
gugagugauucugcaacca

SEQ ID NO: 2573273 - RNA, 19 nt, Artificial Sequence
  Description of Artificial Sequence: Synthetic oligonucleotide
  Antisense strand to SEQ ID NO: 2573272
ugguugcagaaucacucac

SEQ ID NO: 2573274 - RNA, 19 nt, Artificial Sequence
  Description of Artificial Sequence: Synthetic oligonucleotide
  Sense strand starting at position 2696 of SEQ ID NO: 1889014
gccagagaccaaugucugu

SEQ ID NO: 2573275 - RNA, 19 nt, Artificial Sequence
  Description of Artificial Sequence: Synthetic oligonucleotide
  Antisense strand to SEQ ID NO: 2573274
acagacauuggucucuggc

SEQ ID NO: 2573276 - RNA, 19 nt, Artificial Sequence
  Description of Artificial Sequence: Synthetic oligonucleotide
  Sense strand starting at position 2701 of SEQ ID NO: 1889014
agaccaaugucugugccua

SEQ ID NO: 2573277 - RNA, 19 nt, Artificial Sequence
  Description of Artificial Sequence: Synthetic oligonucleotide
  Antisense strand to SEQ ID NO: 2573276
uaggcacagacauuggucu

SEQ ID NO: 2573278 - RNA, 19 nt, Artificial Sequence
  Description of Artificial Sequence: Synthetic oligonucleotide
  Sense strand starting at position 2706 of SEQ ID NO: 1889014
aaugucugugccuagcaau

SEQ ID NO: 2573279 - RNA, 19 nt, Artificial Sequence
  Description of Artificial Sequence: Synthetic oligonucleotide
  Antisense strand to SEQ ID NO: 2573278
auugcuaggcacagacauu

SEQ ID NO: 2573280 - RNA, 19 nt, Artificial Sequence
  Description of Artificial Sequence: Synthetic oligonucleotide
  Sense strand starting at position 3202 of SEQ ID NO: 1889014
ucauuucuguaauacagua

SEQ ID NO: 2573281 - RNA, 19 nt, Artificial Sequence
  Description of Artificial Sequence: Synthetic oligonucleotide
  Antisense strand to SEQ ID NO: 2573280
uacuguauuacagaaauga

SEQ ID NO: 2573282 - RNA, 19 nt, Artificial Sequence
  Description of Artificial Sequence: Synthetic oligonucleotide
  Sense strand starting at position 3564 of SEQ ID NO: 1889014
agccuagccugaccuaaau

SEQ ID NO: 2573283 - RNA, 19 nt, Artificial Sequence
  Description of Artificial Sequence: Synthetic oligonucleotide
  Antisense strand to SEQ ID NO: 2573282
auuuaggucaggcuaggcu

SEQ ID NO: 2573284 - RNA, 19 nt, Artificial Sequence
  Description of Artificial Sequence: Synthetic oligonucleotide
  Sense strand starting at position 3635 of SEQ ID NO: 1889014
cacuguagcguaucaguuu

SEQ ID NO: 2573285 - RNA, 19 nt, Artificial Sequence
  Description of Artificial Sequence: Synthetic oligonucleotide
  Antisense strand to SEQ ID NO: 2573284
aaacugauacgcuacagug

SEQ ID NO: 2573286 - RNA, 19 nt, Artificial Sequence
  Description of Artificial Sequence: Synthetic oligonucleotide
  Sense strand starting at position 3712 of SEQ ID NO: 1889014
ggugucauaccacauauug

SEQ ID NO: 2573287 - RNA, 19 nt, Artificial Sequence
  Description of Artificial Sequence: Synthetic oligonucleotide
  Antisense strand to SEQ ID NO: 2573286
caauaugugguaugacacc

SEQ ID NO: 2573288 - RNA, 19 nt, Artificial Sequence
  Description of Artificial Sequence: Synthetic oligonucleotide
  Sense strand starting at position 3761 of SEQ ID NO: 1889014
caaaguacugaauguguau

SEQ ID NO: 2573289 - RNA, 19 nt, Artificial Sequence
  Description of Artificial Sequence: Synthetic oligonucleotide
  Antisense strand to SEQ ID NO: 2573288
auacacauucaguacuuug

SEQ ID NO: 2573290 - RNA, 19 nt, Artificial Sequence
  Description of Artificial Sequence: Synthetic oligonucleotide
  Sense strand starting at position 161 of SEQ ID NO: 1889015
ccugguguugucuaagaga

SEQ ID NO: 2573291 - RNA, 19 nt, Artificial Sequence
  Description of Artificial Sequence: Synthetic oligonucleotide
  Antisense strand to SEQ ID NO: 2573290
ucucuuagacaacaccagg

SEQ ID NO: 2573292 - RNA, 19 nt, Artificial Sequence
  Description of Artificial Sequence: Synthetic oligonucleotide
  Sense strand starting at position 172 of SEQ ID NO: 1889015
cuaagagauucuguccuuu

SEQ ID NO: 2573293 - RNA, 19 nt, Artificial Sequence
  Description of Artificial Sequence: Synthetic oligonucleotide
  Antisense strand to SEQ ID NO: 2573292
aaaggacagaaucucuuag

SEQ ID NO: 2573294 - RNA, 19 nt, Artificial Sequence
  Description of Artificial Sequence: Synthetic oligonucleotide
  Sense strand starting at position 189 of SEQ ID NO: 1889015
uuaccuaucagacgagguu

SEQ ID NO: 2573295 - RNA, 19 nt, Artificial Sequence
  Description of Artificial Sequence: Synthetic oligonucleotide
  Antisense strand to SEQ ID NO: 2573294
aaccucgucugauagguaa

SEQ ID NO: 2573296 - RNA, 19 nt, Artificial Sequence
  Description of Artificial Sequence: Synthetic oligonucleotide
  Sense strand starting at position 249 of SEQ ID NO: 1889015
guuagaaaugcaggaccua

SEQ ID NO: 2573297 - RNA, 19 nt, Artificial Sequence
  Description of Artificial Sequence: Synthetic oligonucleotide
  Antisense strand to SEQ ID NO: 2573296
uagguccugcauuucuaac

SEQ ID NO: 2573298 - RNA, 19 nt, Artificial Sequence
  Description of Artificial Sequence: Synthetic oligonucleotide
  Sense strand starting at position 334 of SEQ ID NO: 1889015
cucuguuuccaugagacag

SEQ ID NO: 2573299 - RNA, 19 nt, Artificial Sequence
  Description of Artificial Sequence: Synthetic oligonucleotide
  Antisense strand to SEQ ID NO: 2573298
cugucucauggaaacagag

SEQ ID NO: 2573300 - RNA, 19 nt, Artificial Sequence
  Description of Artificial Sequence: Synthetic oligonucleotide
  Sense strand starting at position 377 of SEQ ID NO: 1889015
augauacugucucccugaa

SEQ ID NO: 2573301 - RNA, 19 nt, Artificial Sequence
  Description of Artificial Sequence: Synthetic oligonucleotide
  Antisense strand to SEQ ID NO: 2573300
uucagggagacaguaucau

SEQ ID NO: 2573302 - RNA, 19 nt, Artificial Sequence
  Description of Artificial Sequence: Synthetic oligonucleotide
  Sense strand starting at position 379 of SEQ ID NO: 1889015
gauacugucucccugaaug

SEQ ID NO: 2573303 - RNA, 19 nt, Artificial Sequence
  Description of Artificial Sequence: Synthetic oligonucleotide
  Antisense strand to SEQ ID NO: 2573302
cauucagggagacaguauc

SEQ ID NO: 2573304 - RNA, 19 nt, Artificial Sequence
  Description of Artificial Sequence: Synthetic oligonucleotide
  Sense strand starting at position 438 of SEQ ID NO: 1889015
guuuauaccugucuaugaa

SEQ ID NO: 2573305 - RNA, 19 nt, Artificial Sequence
  Description of Artificial Sequence: Synthetic oligonucleotide
  Antisense strand to SEQ ID NO: 2573304
uucauagacagguauaaac

SEQ ID NO: 2573306 - RNA, 19 nt, Artificial Sequence
  Description of Artificial Sequence: Synthetic oligonucleotide
  Sense strand starting at position 439 of SEQ ID NO: 1889015
uuuauaccugucuaugaag

SEQ ID NO: 2573307 - RNA, 19 nt, Artificial Sequence
  Description of Artificial Sequence: Synthetic oligonucleotide
  Antisense strand to SEQ ID NO: 2573306
cuucauagacagguauaaa

SEQ ID NO: 2573308 - RNA, 19 nt, Artificial Sequence
  Description of Artificial Sequence: Synthetic oligonucleotide
  Sense strand starting at position 606 of SEQ ID NO: 1889015
gucuguacacaauacgaaa

SEQ ID NO: 2573309 - RNA, 19 nt, Artificial Sequence
  Description of Artificial Sequence: Synthetic oligonucleotide
  Antisense strand to SEQ ID NO: 2573308
uuucguauuguguacagac

SEQ ID NO: 2573310 - RNA, 19 nt, Artificial Sequence
  Description of Artificial Sequence: Synthetic oligonucleotide
  Sense strand starting at position 626 of SEQ ID NO: 1889015
ggcacacauggucaucuua

SEQ ID NO: 2573311 - RNA, 19 nt, Artificial Sequence
  Description of Artificial Sequence: Synthetic oligonucleotide
  Antisense strand to SEQ ID NO: 2573310
uaagaugaccaugugugcc

SEQ ID NO: 2573312 - RNA, 19 nt, Artificial Sequence
  Description of Artificial Sequence: Synthetic oligonucleotide
  Sense strand starting at position 639 of SEQ ID NO: 1889015
aucuuaaagcucugaguga

SEQ ID NO: 2573313 - RNA, 19 nt, Artificial Sequence
  Description of Artificial Sequence: Synthetic oligonucleotide
  Antisense strand to SEQ ID NO: 2573312
ucacucagagcuuuaagau

SEQ ID NO: 2573314 - RNA, 19 nt, Artificial Sequence
  Description of Artificial Sequence: Synthetic oligonucleotide
  Sense strand starting at position 1170 of SEQ ID NO: 1889015
caaguacagucaucuguag

SEQ ID NO: 2573315 - RNA, 19 nt, Artificial Sequence
  Description of Artificial Sequence: Synthetic oligonucleotide
  Antisense strand to SEQ ID NO: 2573314
cuacagaugacuguacuug

SEQ ID NO: 2573316 - RNA, 19 nt, Artificial Sequence
  Description of Artificial Sequence: Synthetic oligonucleotide
  Sense strand starting at position 1174 of SEQ ID NO: 1889015
uacagucaucuguagcaga

SEQ ID NO: 2573317 - RNA, 19 nt, Artificial Sequence
  Description of Artificial Sequence: Synthetic oligonucleotide
  Antisense strand to SEQ ID NO: 2573316
ucugcuacagaugacugua

SEQ ID NO: 2573318 - RNA, 19 nt, Artificial Sequence
  Description of Artificial Sequence: Synthetic oligonucleotide
  Sense strand starting at position 1303 of SEQ ID NO: 1889015
gucuuaguugucuccagcu

SEQ ID NO: 2573319 - RNA, 19 nt, Artificial Sequence
  Description of Artificial Sequence: Synthetic oligonucleotide
  Antisense strand to SEQ ID NO: 2573318
agcuggagacaacuaagac

SEQ ID NO: 2573320 - RNA, 19 nt, Artificial Sequence
  Description of Artificial Sequence: Synthetic oligonucleotide
  Sense strand starting at position 1396 of SEQ ID NO: 1889015
agugccacaucaguuagaa

SEQ ID NO: 2573321 - RNA, 19 nt, Artificial Sequence
  Description of Artificial Sequence: Synthetic oligonucleotide
  Antisense strand to SEQ ID NO: 2573320
uucuaacugauguggcacu

SEQ ID NO: 2573322 - RNA, 19 nt, Artificial Sequence
  Description of Artificial Sequence: Synthetic oligonucleotide
  Sense strand starting at position 2001 of SEQ ID NO: 1889015
gugguuguaaguucuuguu

SEQ ID NO: 2573323 - RNA, 19 nt, Artificial Sequence
  Description of Artificial Sequence: Synthetic oligonucleotide
  Antisense strand to SEQ ID NO: 2573322
aacaagaacuuacaaccac

SEQ ID NO: 2573324 - RNA, 19 nt, Artificial Sequence
  Description of Artificial Sequence: Synthetic oligonucleotide
  Sense strand starting at position 2007 of SEQ ID NO: 1889015
guaaguucuuguuuaggag

SEQ ID NO: 2573325 - RNA, 19 nt, Artificial Sequence
  Description of Artificial Sequence: Synthetic oligonucleotide
  Antisense strand to SEQ ID NO: 2573324
cuccuaaacaagaacuuac

SEQ ID NO: 2573326 - RNA, 19 nt, Artificial Sequence
  Description of Artificial Sequence: Synthetic oligonucleotide
  Sense strand starting at position 2099 of SEQ ID NO: 1889015
ccuaaaucugguugucuca

SEQ ID NO: 2573327 - RNA, 19 nt, Artificial Sequence
  Description of Artificial Sequence: Synthetic oligonucleotide
  Antisense strand to SEQ ID NO: 2573326
ugagacaaccagauuuagg

SEQ ID NO: 2573328 - RNA, 19 nt, Artificial Sequence
  Description of Artificial Sequence: Synthetic oligonucleotide
  Sense strand starting at position 2102 of SEQ ID NO: 1889015
aaaucugguugucucaagu

SEQ ID NO: 2573329 - RNA, 19 nt, Artificial Sequence
  Description of Artificial Sequence: Synthetic oligonucleotide
  Antisense strand to SEQ ID NO: 2573328
acuugagacaaccagauuu

SEQ ID NO: 2573330 - RNA, 19 nt, Artificial Sequence
  Description of Artificial Sequence: Synthetic oligonucleotide
  Sense strand starting at position 2171 of SEQ ID NO: 1889015
ccauauuggcccugaacau

SEQ ID NO: 2573331 - RNA, 19 nt, Artificial Sequence
  Description of Artificial Sequence: Synthetic oligonucleotide
  Antisense strand to SEQ ID NO: 2573330
auguucagggccaauaugg

SEQ ID NO: 2573332 - RNA, 19 nt, Artificial Sequence
  Description of Artificial Sequence: Synthetic oligonucleotide
  Sense strand starting at position 2264 of SEQ ID NO: 1889015
gucugcugggcuuaacauu

SEQ ID NO: 2573333 - RNA, 19 nt, Artificial Sequence
  Description of Artificial Sequence: Synthetic oligonucleotide
  Antisense strand to SEQ ID NO: 2573332
aauguuaagcccagcagac

SEQ ID NO: 2573334 - RNA, 19 nt, Artificial Sequence
  Description of Artificial Sequence: Synthetic oligonucleotide
  Sense strand starting at position 2463 of SEQ ID NO: 1889015
uccaauaaacuuuggcaga

SEQ ID NO: 2573335 - RNA, 19 nt, Artificial Sequence
  Description of Artificial Sequence: Synthetic oligonucleotide
  Antisense strand to SEQ ID NO: 2573334
ucugccaaaguuuauugga

SEQ ID NO: 2573336 - RNA, 19 nt, Artificial Sequence
  Description of Artificial Sequence: Synthetic oligonucleotide
  Sense strand starting at position 2535 of SEQ ID NO: 1889015
uuggucaguuuauuuagua

SEQ ID NO: 2573337 - RNA, 19 nt, Artificial Sequence
  Description of Artificial Sequence: Synthetic oligonucleotide
  Antisense strand to SEQ ID NO: 2573336
uacuaaauaaacugaccaa

SEQ ID NO: 2573338 - RNA, 19 nt, Artificial Sequence
  Description of Artificial Sequence: Synthetic oligonucleotide
  Sense strand starting at position 2670 of SEQ ID NO: 1889015
guaaauauuugccagaaua

SEQ ID NO: 2573339 - RNA, 19 nt, Artificial Sequence
  Description of Artificial Sequence: Synthetic oligonucleotide
  Antisense strand to SEQ ID NO: 2573338
uauucuggcaaauauuuac

SEQ ID NO: 2573340 - RNA, 19 nt, Artificial Sequence
  Description of Artificial Sequence: Synthetic oligonucleotide
  Sense strand starting at position 2691 of SEQ ID NO: 1889015
caacauguguggcucaaga

SEQ ID NO: 2573341 - RNA, 19 nt, Artificial Sequence
  Description of Artificial Sequence: Synthetic oligonucleotide
  Antisense strand to SEQ ID NO: 2573340
ucuugagccacacauguug

SEQ ID NO: 2573342 - RNA, 19 nt, Artificial Sequence
  Description of Artificial Sequence: Synthetic oligonucleotide
  Sense strand starting at position 2796 of SEQ ID NO: 1889015
cuguuucugagggagcaaa

SEQ ID NO: 2573343 - RNA, 19 nt, Artificial Sequence
  Description of Artificial Sequence: Synthetic oligonucleotide
  Antisense strand to SEQ ID NO: 2573342
uuugcucccucagaaacag

SEQ ID NO: 2573344 - RNA, 19 nt, Artificial Sequence
  Description of Artificial Sequence: Synthetic oligonucleotide
  Sense strand starting at position 2952 of SEQ ID NO: 1889015
gguaacauugucuaccuca

SEQ ID NO: 2573345 - RNA, 19 nt, Artificial Sequence
  Description of Artificial Sequence: Synthetic oligonucleotide
  Antisense strand to SEQ ID NO: 2573344
ugagguagacaauguuacc

SEQ ID NO: 2573346 - RNA, 19 nt, Artificial Sequence
  Description of Artificial Sequence: Synthetic oligonucleotide
  Sense strand starting at position 2960 of SEQ ID NO: 1889015
ugucuaccucauggaguua

SEQ ID NO: 2573347 - RNA, 19 nt, Artificial Sequence
  Description of Artificial Sequence: Synthetic oligonucleotide
  Antisense strand to SEQ ID NO: 2573346
uaacuccaugagguagaca

SEQ ID NO: 2573348 - RNA, 19 nt, Artificial Sequence
  Description of Artificial Sequence: Synthetic oligonucleotide
  Sense strand starting at position 3075 of SEQ ID NO: 1889015
uuagcaugugauugauacu

SEQ ID NO: 2573349 - RNA, 19 nt, Artificial Sequence
  Description of Artificial Sequence: Synthetic oligonucleotide
  Antisense strand to SEQ ID NO: 2573348
aguaucaaucacaugcuaa

SEQ ID NO: 2573350 - RNA, 19 nt, Artificial Sequence
  Description of Artificial Sequence: Synthetic oligonucleotide
  Sense strand starting at position 3087 of SEQ ID NO: 1889015
ugauacugauguccaaagu

SEQ ID NO: 2573351 - RNA, 19 nt, Artificial Sequence
  Description of Artificial Sequence: Synthetic oligonucleotide
  Antisense strand to SEQ ID NO: 2573350
acuuuggacaucaguauca

SEQ ID NO: 2573352 - RNA, 19 nt, Artificial Sequence
  Description of Artificial Sequence: Synthetic oligonucleotide
  Sense strand starting at position 3088 of SEQ ID NO: 1889015
gauacugauguccaaaguu

SEQ ID NO: 2573353 - RNA, 19 nt, Artificial Sequence
  Description of Artificial Sequence: Synthetic oligonucleotide
  Antisense strand to SEQ ID NO: 2573352
aacuuuggacaucaguauc

SEQ ID NO: 2573354 - RNA, 19 nt, Artificial Sequence
  Description of Artificial Sequence: Synthetic oligonucleotide
  Sense strand starting at position 3139 of SEQ ID NO: 1889015
gugucuucagggugaaauu

SEQ ID NO: 2573355 - RNA, 19 nt, Artificial Sequence
  Description of Artificial Sequence: Synthetic oligonucleotide
  Antisense strand to SEQ ID NO: 2573354
aauuucacccugaagacac

SEQ ID NO: 2573356 - RNA, 19 nt, Artificial Sequence
  Description of Artificial Sequence: Synthetic oligonucleotide
  Sense strand starting at position 3162 of SEQ ID NO: 1889015
gugugcauggguuauauuu

SEQ ID NO: 2573357 - RNA, 19 nt, Artificial Sequence
  Description of Artificial Sequence: Synthetic oligonucleotide
  Antisense strand to SEQ ID NO: 2573356
aaauauaacccaugcacac

SEQ ID NO: 2573358 - RNA, 19 nt, Artificial Sequence
  Description of Artificial Sequence: Synthetic oligonucleotide
  Sense strand starting at position 3219 of SEQ ID NO: 1889015
guaaguuggcuguagaaag

SEQ ID NO: 2573359 - RNA, 19 nt, Artificial Sequence
  Description of Artificial Sequence: Synthetic oligonucleotide
  Antisense strand to SEQ ID NO: 2573358
cuuucuacagccaacuuac

SEQ ID NO: 2573360 - RNA, 19 nt, Artificial Sequence
  Description of Artificial Sequence: Synthetic oligonucleotide
  Sense strand starting at position 3322 of SEQ ID NO: 1889015
acaucaauugugggaaccu

SEQ ID NO: 2573361 - RNA, 19 nt, Artificial Sequence
  Description of Artificial Sequence: Synthetic oligonucleotide
  Antisense strand to SEQ ID NO: 2573360
agguucccacaauugaugu

SEQ ID NO: 2573362 - RNA, 19 nt, Artificial Sequence
  Description of Artificial Sequence: Synthetic oligonucleotide
  Sense strand starting at position 3664 of SEQ ID NO: 1889015
gauugucuucuuggccaga

SEQ ID NO: 2573363 - RNA, 19 nt, Artificial Sequence
  Description of Artificial Sequence: Synthetic oligonucleotide
  Antisense strand to SEQ ID NO: 2573362
ucuggccaagaagacaauc

SEQ ID NO: 2573364 - RNA, 19 nt, Artificial Sequence
  Description of Artificial Sequence: Synthetic oligonucleotide
  Sense strand starting at position 3705 of SEQ ID NO: 1889015
ccaagagucugccucuuaa

SEQ ID NO: 2573365 - RNA, 19 nt, Artificial Sequence
  Description of Artificial Sequence: Synthetic oligonucleotide
  Antisense strand to SEQ ID NO: 2573364
uuaagaggcagacucuugg

SEQ ID NO: 2573366 - RNA, 19 nt, Artificial Sequence
  Description of Artificial Sequence: Synthetic oligonucleotide
  Sense strand starting at position 3744 of SEQ ID NO: 1889015
cccauuacugccgacaauu

SEQ ID NO: 2573367 - RNA, 19 nt, Artificial Sequence
  Description of Artificial Sequence: Synthetic oligonucleotide
  Antisense strand to SEQ ID NO: 2573366
aauugucggcaguaauggg

SEQ ID NO: 2573368 - RNA, 19 nt, Artificial Sequence
  Description of Artificial Sequence: Synthetic oligonucleotide
  Sense strand starting at position 3756 of SEQ ID NO: 1889015
gacaauuagguguggucca

SEQ ID NO: 2573369 - RNA, 19 nt, Artificial Sequence
  Description of Artificial Sequence: Synthetic oligonucleotide
  Antisense strand to SEQ ID NO: 2573368
uggaccacaccuaauuguc

SEQ ID NO: 2573370 - RNA, 19 nt, Artificial Sequence
  Description of Artificial Sequence: Synthetic oligonucleotide
  Sense strand starting at position 4 of SEQ ID NO: 1889016
ggaugaucucacuguucug

SEQ ID NO: 2573371 - RNA, 19 nt, Artificial Sequence
  Description of Artificial Sequence: Synthetic oligonucleotide
  Antisense strand to SEQ ID NO: 2573370
cagaacagugagaucaucc

SEQ ID NO: 2573372 - RNA, 19 nt, Artificial Sequence
  Description of Artificial Sequence: Synthetic oligonucleotide
  Sense strand starting at position 7 of SEQ ID NO: 1889016
ugaucucacuguucugaga

SEQ ID NO: 2573373 - RNA, 19 nt, Artificial Sequence
  Description of Artificial Sequence: Synthetic oligonucleotide
  Antisense strand to SEQ ID NO: 2573372
ucucagaacagugagauca

SEQ ID NO: 2573374 - RNA, 19 nt, Artificial Sequence
  Description of Artificial Sequence: Synthetic oligonucleotide
  Sense strand starting at position 15 of SEQ ID NO: 1889016
cuguucugagaacauguau

SEQ ID NO: 2573375 - RNA, 19 nt, Artificial Sequence
  Description of Artificial Sequence: Synthetic oligonucleotide
  Antisense strand to SEQ ID NO: 2573374
auacauguucucagaacag

SEQ ID NO: 2573376 - RNA, 19 nt, Artificial Sequence
  Description of Artificial Sequence: Synthetic oligonucleotide
  Sense strand starting at position 207 of SEQ ID NO: 1889016
cugguauguugacuuggga

SEQ ID NO: 2573377 - RNA, 19 nt, Artificial Sequence
  Description of Artificial Sequence: Synthetic oligonucleotide
  Antisense strand to SEQ ID NO: 2573376
ucccaagucaacauaccag

SEQ ID NO: 2573378 - RNA, 19 nt, Artificial Sequence
  Description of Artificial Sequence: Synthetic oligonucleotide
  Sense strand starting at position 210 of SEQ ID NO: 1889016
guauguugacuugggaaua

SEQ ID NO: 2573379 - RNA, 19 nt, Artificial Sequence
  Description of Artificial Sequence: Synthetic oligonucleotide
  Antisense strand to SEQ ID NO: 2573378
uauucccaagucaacauac

SEQ ID NO: 2573380 - RNA, 19 nt, Artificial Sequence
  Description of Artificial Sequence: Synthetic oligonucleotide
  Sense strand starting at position 220 of SEQ ID NO: 1889016
uugggaauacgucagguuu

SEQ ID NO: 2573381 - RNA, 19 nt, Artificial Sequence
  Description of Artificial Sequence: Synthetic oligonucleotide
  Antisense strand to SEQ ID NO: 2573380
aaaccugacguauucccaa

SEQ ID NO: 2573382 - RNA, 19 nt, Artificial Sequence
  Description of Artificial Sequence: Synthetic oligonucleotide
  Sense strand starting at position 411 of SEQ ID NO: 1889016
acagguauuacguaacaug

SEQ ID NO: 2573383 - RNA, 19 nt, Artificial Sequence
  Description of Artificial Sequence: Synthetic oligonucleotide
  Antisense strand to SEQ ID NO: 2573382
cauguuacguaauaccugu

SEQ ID NO: 2573384 - RNA, 19 nt, Artificial Sequence
  Description of Artificial Sequence: Synthetic oligonucleotide
  Sense strand starting at position 470 of SEQ ID NO: 1889016
uuucuuccagccugaggaa

SEQ ID NO: 2573385 - RNA, 19 nt, Artificial Sequence
  Description of Artificial Sequence: Synthetic oligonucleotide
  Antisense strand to SEQ ID NO: 2573384
uuccucaggcuggaagaaa

SEQ ID NO: 2573386 - RNA, 19 nt, Artificial Sequence
  Description of Artificial Sequence: Synthetic oligonucleotide
  Sense strand starting at position 607 of SEQ ID NO: 1889016
uuaacuggugucuacuauu

SEQ ID NO: 2573387 - RNA, 19 nt, Artificial Sequence
  Description of Artificial Sequence: Synthetic oligonucleotide
  Antisense strand to SEQ ID NO: 2573386
aauaguagacaccaguuaa

SEQ ID NO: 2573388 - RNA, 19 nt, Artificial Sequence
  Description of Artificial Sequence: Synthetic oligonucleotide
  Sense strand starting at position 688 of SEQ ID NO: 1889016
acaggaagcgaguaucaua

SEQ ID NO: 2573389 - RNA, 19 nt, Artificial Sequence
  Description of Artificial Sequence: Synthetic oligonucleotide
  Antisense strand to SEQ ID NO: 2573388
uaugauacucgcuuccugu

SEQ ID NO: 2573390 - RNA, 19 nt, Artificial Sequence
  Description of Artificial Sequence: Synthetic oligonucleotide
  Sense strand starting at position 724 of SEQ ID NO: 1889016
cguguuugaagugugugau

SEQ ID NO: 2573391 - RNA, 19 nt, Artificial Sequence
  Description of Artificial Sequence: Synthetic oligonucleotide
  Antisense strand to SEQ ID NO: 2573390
aucacacacuucaaacacg

SEQ ID NO: 2573392 - RNA, 19 nt, Artificial Sequence
  Description of Artificial Sequence: Synthetic oligonucleotide
  Sense strand starting at position 923 of SEQ ID NO: 1889016
uuacguuagggucaaacaa

SEQ ID NO: 2573393 - RNA, 19 nt, Artificial Sequence
  Description of Artificial Sequence: Synthetic oligonucleotide
  Antisense strand to SEQ ID NO: 2573392
uuguuugacccuaacguaa

SEQ ID NO: 2573394 - RNA, 19 nt, Artificial Sequence
  Description of Artificial Sequence: Synthetic oligonucleotide
  Sense strand starting at position 1100 of SEQ ID NO: 1889016
uuaagugcagcauaucuaa

SEQ ID NO: 2573395 - RNA, 19 nt, Artificial Sequence
  Description of Artificial Sequence: Synthetic oligonucleotide
  Antisense strand to SEQ ID NO: 2573394
uuagauaugcugcacuuaa

SEQ ID NO: 2573396 - RNA, 19 nt, Artificial Sequence
  Description of Artificial Sequence: Synthetic oligonucleotide
  Sense strand starting at position 1103 of SEQ ID NO: 1889016
agugcagcauaucuaauuu

SEQ ID NO: 2573397 - RNA, 19 nt, Artificial Sequence
  Description of Artificial Sequence: Synthetic oligonucleotide
  Antisense strand to SEQ ID NO: 2573396
aaauuagauaugcugcacu

SEQ ID NO: 2573398 - RNA, 19 nt, Artificial Sequence
  Description of Artificial Sequence: Synthetic oligonucleotide
  Sense strand starting at position 1168 of SEQ ID NO: 1889016
ccaaguucucaguaacuuc

SEQ ID NO: 2573399 - RNA, 19 nt, Artificial Sequence
  Description of Artificial Sequence: Synthetic oligonucleotide
  Antisense strand to SEQ ID NO: 2573398
gaaguuacugagaacuugg

SEQ ID NO: 2573400 - RNA, 19 nt, Artificial Sequence
  Description of Artificial Sequence: Synthetic oligonucleotide
  Sense strand starting at position 1350 of SEQ ID NO: 1889016
ucuagcagaucugcaagaa

SEQ ID NO: 2573401 - RNA, 19 nt, Artificial Sequence
  Description of Artificial Sequence: Synthetic oligonucleotide
  Antisense strand to SEQ ID NO: 2573400
uucuugcagaucugcuaga

SEQ ID NO: 2573402 - RNA, 19 nt, Artificial Sequence
  Description of Artificial Sequence: Synthetic oligonucleotide
  Sense strand starting at position 1381 of SEQ ID NO: 1889016
gcgguaauggccuuggcga

SEQ ID NO: 2573403 - RNA, 19 nt, Artificial Sequence
  Description of Artificial Sequence: Synthetic oligonucleotide
  Antisense strand to SEQ ID NO: 2573402
ucgccaaggccauuaccgc

SEQ ID NO: 2573404 - RNA, 19 nt, Artificial Sequence
  Description of Artificial Sequence: Synthetic oligonucleotide
  Sense strand starting at position 2346 of SEQ ID NO: 1889016
gagcucuggccuuaggaga

SEQ ID NO: 2573405 - RNA, 19 nt, Artificial Sequence
  Description of Artificial Sequence: Synthetic oligonucleotide
  Antisense strand to SEQ ID NO: 2573404
ucuccuaaggccagagcuc

SEQ ID NO: 2573406 - RNA, 19 nt, Artificial Sequence
  Description of Artificial Sequence: Synthetic oligonucleotide
  Sense strand starting at position 2392 of SEQ ID NO: 1889016
caaagugugauccgggaga

SEQ ID NO: 2573407 - RNA, 19 nt, Artificial Sequence
  Description of Artificial Sequence: Synthetic oligonucleotide
  Antisense strand to SEQ ID NO: 2573406
ucucccggaucacacuuug

SEQ ID NO: 2573408 - RNA, 19 nt, Artificial Sequence
  Description of Artificial Sequence: Synthetic oligonucleotide
  Sense strand starting at position 2422 of SEQ ID NO: 1889016
ccaagauccuuucuagagu

SEQ ID NO: 2573409 - RNA, 19 nt, Artificial Sequence
  Description of Artificial Sequence: Synthetic oligonucleotide
  Antisense strand to SEQ ID NO: 2573408
acucuagaaaggaucuugg

SEQ ID NO: 2573410 - RNA, 19 nt, Artificial Sequence
  Description of Artificial Sequence: Synthetic oligonucleotide
  Sense strand starting at position 2434 of SEQ ID NO: 1889016
cuagaguuucggugggaga

SEQ ID NO: 2573411 - RNA, 19 nt, Artificial Sequence
  Description of Artificial Sequence: Synthetic oligonucleotide
  Antisense strand to SEQ ID NO: 2573410
ucucccaccgaaacucuag

SEQ ID NO: 2573412 - RNA, 19 nt, Artificial Sequence
  Description of Artificial Sequence: Synthetic oligonucleotide
  Sense strand starting at position 2435 of SEQ ID NO: 1889016
uagaguuucggugggagaa

SEQ ID NO: 2573413 - RNA, 19 nt, Artificial Sequence
  Description of Artificial Sequence: Synthetic oligonucleotide
  Antisense strand to SEQ ID NO: 2573412
uucucccaccgaaacucua

SEQ ID NO: 2573414 - RNA, 19 nt, Artificial Sequence
  Description of Artificial Sequence: Synthetic oligonucleotide
  Sense strand starting at position 2436 of SEQ ID NO: 1889016
agaguuucggugggagaac

SEQ ID NO: 2573415 - RNA, 19 nt, Artificial Sequence
  Description of Artificial Sequence: Synthetic oligonucleotide
  Antisense strand to SEQ ID NO: 2573414
guucucccaccgaaacucu

SEQ ID NO: 2573416 - RNA, 19 nt, Artificial Sequence
  Description of Artificial Sequence: Synthetic oligonucleotide
  Sense strand starting at position 2514 of SEQ ID NO: 1889016
cgaccugaugucuaaugau

SEQ ID NO: 2573417 - RNA, 19 nt, Artificial Sequence
  Description of Artificial Sequence: Synthetic oligonucleotide
  Antisense strand to SEQ ID NO: 2573416
aucauuagacaucaggucg

SEQ ID NO: 2573418 - RNA, 19 nt, Artificial Sequence
  Description of Artificial Sequence: Synthetic oligonucleotide
  Sense strand starting at position 2529 of SEQ ID NO: 1889016
ugaugacacugcucuuaug

SEQ ID NO: 2573419 - RNA, 19 nt, Artificial Sequence
  Description of Artificial Sequence: Synthetic oligonucleotide
  Antisense strand to SEQ ID NO: 2573418
cauaagagcagugucauca

SEQ ID NO: 2573420 - RNA, 19 nt, Artificial Sequence
  Description of Artificial Sequence: Synthetic oligonucleotide
  Sense strand starting at position 2576 of SEQ ID NO: 1889016
uuuagaauuuccuaaggua

SEQ ID NO: 2573421 - RNA, 19 nt, Artificial Sequence
  Description of Artificial Sequence: Synthetic oligonucleotide
  Antisense strand to SEQ ID NO: 2573420
uaccuuaggaaauucuaaa

SEQ ID NO: 2573422 - RNA, 19 nt, Artificial Sequence
  Description of Artificial Sequence: Synthetic oligonucleotide
  Sense strand starting at position 2887 of SEQ ID NO: 1889016
gaguuugauguguaacuga

SEQ ID NO: 2573423 - RNA, 19 nt, Artificial Sequence
  Description of Artificial Sequence: Synthetic oligonucleotide
  Antisense strand to SEQ ID NO: 2573422
ucaguuacacaucaaacuc

SEQ ID NO: 2573424 - RNA, 19 nt, Artificial Sequence
  Description of Artificial Sequence: Synthetic oligonucleotide
  Sense strand starting at position 2894 of SEQ ID NO: 1889016
auguguaacugauugugaa

SEQ ID NO: 2573425 - RNA, 19 nt, Artificial Sequence
  Description of Artificial Sequence: Synthetic oligonucleotide
  Antisense strand to SEQ ID NO: 2573424
uucacaaucaguuacacau

SEQ ID NO: 2573426 - RNA, 19 nt, Artificial Sequence
  Description of Artificial Sequence: Synthetic oligonucleotide
  Sense strand starting at position 3066 of SEQ ID NO: 1889016
uguuguaaucccuacuuga

SEQ ID NO: 2573427 - RNA, 19 nt, Artificial Sequence
  Description of Artificial Sequence: Synthetic oligonucleotide
  Antisense strand to SEQ ID NO: 2573426
ucaaguagggauuacaaca

SEQ ID NO: 2573428 - RNA, 19 nt, Artificial Sequence
  Description of Artificial Sequence: Synthetic oligonucleotide
  Sense strand starting at position 3158 of SEQ ID NO: 1889016
cauugcucuggugacuaaa

SEQ ID NO: 2573429 - RNA, 19 nt, Artificial Sequence
  Description of Artificial Sequence: Synthetic oligonucleotide
  Antisense strand to SEQ ID NO: 2573428
uuuagucaccagagcaaug

SEQ ID NO: 2573430 - RNA, 19 nt, Artificial Sequence
  Description of Artificial Sequence: Synthetic oligonucleotide
  Sense strand starting at position 3217 of SEQ ID NO: 1889016
aagguaaggucuuuggauu

SEQ ID NO: 2573431 - RNA, 19 nt, Artificial Sequence
  Description of Artificial Sequence: Synthetic oligonucleotide
  Antisense strand to SEQ ID NO: 2573430
aauccaaagaccuuaccuu

SEQ ID NO: 2573432 - RNA, 19 nt, Artificial Sequence
  Description of Artificial Sequence: Synthetic oligonucleotide
  Sense strand starting at position 3218 of SEQ ID NO: 1889016
agguaaggucuuuggauuc

SEQ ID NO: 2573433 - RNA, 19 nt, Artificial Sequence
  Description of Artificial Sequence: Synthetic oligonucleotide
  Antisense strand to SEQ ID NO: 2573432
gaauccaaagaccuuaccu

SEQ ID NO: 2573434 - RNA, 19 nt, Artificial Sequence
  Description of Artificial Sequence: Synthetic oligonucleotide
  Sense strand starting at position 3225 of SEQ ID NO: 1889016
gucuuuggauucuuugaua

SEQ ID NO: 2573435 - RNA, 19 nt, Artificial Sequence
  Description of Artificial Sequence: Synthetic oligonucleotide
  Antisense strand to SEQ ID NO: 2573434
uaucaaagaauccaaagac

SEQ ID NO: 2573436 - RNA, 19 nt, Artificial Sequence
  Description of Artificial Sequence: Synthetic oligonucleotide
  Sense strand starting at position 3507 of SEQ ID NO: 1889016
auuuacuguuaccaggaaa

SEQ ID NO: 2573437 - RNA, 19 nt, Artificial Sequence
  Description of Artificial Sequence: Synthetic oligonucleotide
  Antisense strand to SEQ ID NO: 2573436
uuuccugguaacaguaaau

SEQ ID NO: 2573438 - RNA, 19 nt, Artificial Sequence
  Description of Artificial Sequence: Synthetic oligonucleotide
  Sense strand starting at position 3510 of SEQ ID NO: 1889016
uacuguuaccaggaaaugu

SEQ ID NO: 2573439 - RNA, 19 nt, Artificial Sequence
  Description of Artificial Sequence: Synthetic oligonucleotide
  Antisense strand to SEQ ID NO: 2573438
acauuuccugguaacagua

SEQ ID NO: 2573440 - RNA, 19 nt, Artificial Sequence
  Description of Artificial Sequence: Synthetic oligonucleotide
  Sense strand starting at position 3593 of SEQ ID NO: 1889016
auccaugaggucuagccaa

SEQ ID NO: 2573441 - RNA, 19 nt, Artificial Sequence
  Description of Artificial Sequence: Synthetic oligonucleotide
  Antisense strand to SEQ ID NO: 2573440
uuggcuagaccucauggau

SEQ ID NO: 2573442 - RNA, 19 nt, Artificial Sequence
  Description of Artificial Sequence: Synthetic oligonucleotide
  Sense strand starting at position 3622 of SEQ ID NO: 1889016
aaagacuaguagcuguaau

SEQ ID NO: 2573443 - RNA, 19 nt, Artificial Sequence
  Description of Artificial Sequence: Synthetic oligonucleotide
  Antisense strand to SEQ ID NO: 2573442
auuacagcuacuagucuuu

SEQ ID NO: 2573444 - RNA, 19 nt, Artificial Sequence
  Description of Artificial Sequence: Synthetic oligonucleotide
  Sense strand starting at position 3646 of SEQ ID NO: 1889016
aguugagaaucagugguuu

SEQ ID NO: 2573445 - RNA, 19 nt, Artificial Sequence
  Description of Artificial Sequence: Synthetic oligonucleotide
  Antisense strand to SEQ ID NO: 2573444
aaaccacugauucucaacu

SEQ ID NO: 2573446 - RNA, 19 nt, Artificial Sequence
  Description of Artificial Sequence: Synthetic oligonucleotide
  Sense strand starting at position 3712 of SEQ ID NO: 1889016
gacucaggauccguggaau

SEQ ID NO: 2573447 - RNA, 19 nt, Artificial Sequence
  Description of Artificial Sequence: Synthetic oligonucleotide
  Antisense strand to SEQ ID NO: 2573446
auuccacggauccugaguc

SEQ ID NO: 2573448 - RNA, 19 nt, Artificial Sequence
  Description of Artificial Sequence: Synthetic oligonucleotide
  Sense strand starting at position 3808 of SEQ ID NO: 1889016
gagaaucacuuguugaaug

SEQ ID NO: 2573449 - RNA, 19 nt, Artificial Sequence
  Description of Artificial Sequence: Synthetic oligonucleotide
  Antisense strand to SEQ ID NO: 2573448
cauucaacaagugauucuc

SEQ ID NO: 2573450 - RNA, 19 nt, Artificial Sequence
  Description of Artificial Sequence: Synthetic oligonucleotide
  Sense strand starting at position 123 of SEQ ID NO: 1889017
ccaguaucuucucuguaaa

SEQ ID NO: 2573451 - RNA, 19 nt, Artificial Sequence
  Description of Artificial Sequence: Synthetic oligonucleotide
  Antisense strand to SEQ ID NO: 2573450
uuuacagagaagauacugg

SEQ ID NO: 2573452 - RNA, 19 nt, Artificial Sequence
  Description of Artificial Sequence: Synthetic oligonucleotide
  Sense strand starting at position 232 of SEQ ID NO: 1889017
uggagugcucaccaaccua

SEQ ID NO: 2573453 - RNA, 19 nt, Artificial Sequence
  Description of Artificial Sequence: Synthetic oligonucleotide
  Antisense strand to SEQ ID NO: 2573452
uagguuggugagcacucca

SEQ ID NO: 2573454 - RNA, 19 nt, Artificial Sequence
  Description of Artificial Sequence: Synthetic oligonucleotide
  Sense strand starting at position 266 of SEQ ID NO: 1889017
uucucucuucugggaauau

SEQ ID NO: 2573455 - RNA, 19 nt, Artificial Sequence
  Description of Artificial Sequence: Synthetic oligonucleotide
  Antisense strand to SEQ ID NO: 2573454
auauucccagaagagagaa

SEQ ID NO: 2573456 - RNA, 19 nt, Artificial Sequence
  Description of Artificial Sequence: Synthetic oligonucleotide
  Sense strand starting at position 281 of SEQ ID NO: 1889017
auaugaaauugggauugaa

SEQ ID NO: 2573457 - RNA, 19 nt, Artificial Sequence
  Description of Artificial Sequence: Synthetic oligonucleotide
  Antisense strand to SEQ ID NO: 2573456
uucaaucccaauuucauau

SEQ ID NO: 2573458 - RNA, 19 nt, Artificial Sequence
  Description of Artificial Sequence: Synthetic oligonucleotide
  Sense strand starting at position 316 of SEQ ID NO: 1889017
ugcggugagaacugacaua

SEQ ID NO: 2573459 - RNA, 19 nt, Artificial Sequence
  Description of Artificial Sequence: Synthetic oligonucleotide
  Antisense strand to SEQ ID NO: 2573458
uaugucaguucucaccgca

SEQ ID NO: 2573460 - RNA, 19 nt, Artificial Sequence
  Description of Artificial Sequence: Synthetic oligonucleotide
  Sense strand starting at position 620 of SEQ ID NO: 1889017
aaagauuaguaguugccua

SEQ ID NO: 2573461 - RNA, 19 nt, Artificial Sequence
  Description of Artificial Sequence: Synthetic oligonucleotide
  Antisense strand to SEQ ID NO: 2573460
uaggcaacuacuaaucuuu

SEQ ID NO: 2573462 - RNA, 19 nt, Artificial Sequence
  Description of Artificial Sequence: Synthetic oligonucleotide
  Sense strand starting at position 713 of SEQ ID NO: 1889017
acucauugugaugaugguu

SEQ ID NO: 2573463 - RNA, 19 nt, Artificial Sequence
  Description of Artificial Sequence: Synthetic oligonucleotide
  Antisense strand to SEQ ID NO: 2573462
aaccaucaucacaaugagu

SEQ ID NO: 2573464 - RNA, 19 nt, Artificial Sequence
  Description of Artificial Sequence: Synthetic oligonucleotide
  Sense strand starting at position 718 of SEQ ID NO: 1889017
uugugaugaugguugcaaa

SEQ ID NO: 2573465 - RNA, 19 nt, Artificial Sequence
  Description of Artificial Sequence: Synthetic oligonucleotide
  Antisense strand to SEQ ID NO: 2573464
uuugcaaccaucaucacaa

SEQ ID NO: 2573466 - RNA, 19 nt, Artificial Sequence
  Description of Artificial Sequence: Synthetic oligonucleotide
  Sense strand starting at position 728 of SEQ ID NO: 1889017
gguugcaaacucugggaau

SEQ ID NO: 2573467 - RNA, 19 nt, Artificial Sequence
  Description of Artificial Sequence: Synthetic oligonucleotide
  Antisense strand to SEQ ID NO: 2573466
auucccagaguuugcaacc

SEQ ID NO: 2573468 - RNA, 19 nt, Artificial Sequence
  Description of Artificial Sequence: Synthetic oligonucleotide
  Sense strand starting at position 778 of SEQ ID NO: 1889017
acaggugaaguauauggua

SEQ ID NO: 2573469 - RNA, 19 nt, Artificial Sequence
  Description of Artificial Sequence: Synthetic oligonucleotide
  Antisense strand to SEQ ID NO: 2573468
uaccauauacuucaccugu

SEQ ID NO: 2573470 - RNA, 19 nt, Artificial Sequence
  Description of Artificial Sequence: Synthetic oligonucleotide
  Sense strand starting at position 780 of SEQ ID NO: 1889017
aggugaaguauaugguaua

SEQ ID NO: 2573471 - RNA, 19 nt, Artificial Sequence
  Description of Artificial Sequence: Synthetic oligonucleotide
  Antisense strand to SEQ ID NO: 2573470
uauaccauauacuucaccu

SEQ ID NO: 2573472 - RNA, 19 nt, Artificial Sequence
  Description of Artificial Sequence: Synthetic oligonucleotide
  Sense strand starting at position 874 of SEQ ID NO: 1889017
ucaagagucccagguuaaa

SEQ ID NO: 2573473 - RNA, 19 nt, Artificial Sequence
  Description of Artificial Sequence: Synthetic oligonucleotide
  Antisense strand to SEQ ID NO: 2573472
uuuaaccugggacucuuga

SEQ ID NO: 2573474 - RNA, 19 nt, Artificial Sequence
  Description of Artificial Sequence: Synthetic oligonucleotide
  Sense strand starting at position 1136 of SEQ ID NO: 1889017
uacccagagcugugaaaca

SEQ ID NO: 2573475 - RNA, 19 nt, Artificial Sequence
  Description of Artificial Sequence: Synthetic oligonucleotide
  Antisense strand to SEQ ID NO: 2573474
uguuucacagcucugggua

SEQ ID NO: 2573476 - RNA, 19 nt, Artificial Sequence
  Description of Artificial Sequence: Synthetic oligonucleotide
  Sense strand starting at position 1194 of SEQ ID NO: 1889017
aaugaugcggauuagugaa

SEQ ID NO: 2573477 - RNA, 19 nt, Artificial Sequence
  Description of Artificial Sequence: Synthetic oligonucleotide
  Antisense strand to SEQ ID NO: 2573476
uucacuaauccgcaucauu

SEQ ID NO: 2573478 - RNA, 19 nt, Artificial Sequence
  Description of Artificial Sequence: Synthetic oligonucleotide
  Sense strand starting at position 1450 of SEQ ID NO: 1889017
aaaccaagugagugguuua

SEQ ID NO: 2573479 - RNA, 19 nt, Artificial Sequence
  Description of Artificial Sequence: Synthetic oligonucleotide
  Antisense strand to SEQ ID NO: 2573478
uaaaccacucacuugguuu

SEQ ID NO: 2573480 - RNA, 19 nt, Artificial Sequence
  Description of Artificial Sequence: Synthetic oligonucleotide
  Sense strand starting at position 1869 of SEQ ID NO: 1889017
uauaaaugucaguagugga

SEQ ID NO: 2573481 - RNA, 19 nt, Artificial Sequence
  Description of Artificial Sequence: Synthetic oligonucleotide
  Antisense strand to SEQ ID NO: 2573480
uccacuacugacauuuaua

SEQ ID NO: 2573482 - RNA, 19 nt, Artificial Sequence
  Description of Artificial Sequence: Synthetic oligonucleotide
  Sense strand starting at position 2079 of SEQ ID NO: 1889017
cccugugugguagauauua

SEQ ID NO: 2573483 - RNA, 19 nt, Artificial Sequence
  Description of Artificial Sequence: Synthetic oligonucleotide
  Antisense strand to SEQ ID NO: 2573482
uaauaucuaccacacaggg

SEQ ID NO: 2573484 - RNA, 19 nt, Artificial Sequence
  Description of Artificial Sequence: Synthetic oligonucleotide
  Sense strand starting at position 2081 of SEQ ID NO: 1889017
cugugugguagauauuacu

SEQ ID NO: 2573485 - RNA, 19 nt, Artificial Sequence
  Description of Artificial Sequence: Synthetic oligonucleotide
  Antisense strand to SEQ ID NO: 2573484
aguaauaucuaccacacag

SEQ ID NO: 2573486 - RNA, 19 nt, Artificial Sequence
  Description of Artificial Sequence: Synthetic oligonucleotide
  Sense strand starting at position 2087 of SEQ ID NO: 1889017
gguagauauuacucuuaac

SEQ ID NO: 2573487 - RNA, 19 nt, Artificial Sequence
  Description of Artificial Sequence: Synthetic oligonucleotide
  Antisense strand to SEQ ID NO: 2573486
guuaagaguaauaucuacc

SEQ ID NO: 2573488 - RNA, 19 nt, Artificial Sequence
  Description of Artificial Sequence: Synthetic oligonucleotide
  Sense strand starting at position 2344 of SEQ ID NO: 1889017
ugggaaggguugaaauguu

SEQ ID NO: 2573489 - RNA, 19 nt, Artificial Sequence
  Description of Artificial Sequence: Synthetic oligonucleotide
  Antisense strand to SEQ ID NO: 2573488
aacauuucaacccuuccca

SEQ ID NO: 2573490 - RNA, 19 nt, Artificial Sequence
  Description of Artificial Sequence: Synthetic oligonucleotide
  Sense strand starting at position 2638 of SEQ ID NO: 1889017
guuaaauuuggugguuauu

SEQ ID NO: 2573491 - RNA, 19 nt, Artificial Sequence
  Description of Artificial Sequence: Synthetic oligonucleotide
  Antisense strand to SEQ ID NO: 2573490
aauaaccaccaaauuuaac

SEQ ID NO: 2573492 - RNA, 19 nt, Artificial Sequence
  Description of Artificial Sequence: Synthetic oligonucleotide
  Sense strand starting at position 2719 of SEQ ID NO: 1889017
cuggacagcuaucuaugua

SEQ ID NO: 2573493 - RNA, 19 nt, Artificial Sequence
  Description of Artificial Sequence: Synthetic oligonucleotide
  Antisense strand to SEQ ID NO: 2573492
uacauagauagcuguccag

SEQ ID NO: 2573494 - RNA, 19 nt, Artificial Sequence
  Description of Artificial Sequence: Synthetic oligonucleotide
  Sense strand starting at position 2932 of SEQ ID NO: 1889017
ucacauuaagucuauguca

SEQ ID NO: 2573495 - RNA, 19 nt, Artificial Sequence
  Description of Artificial Sequence: Synthetic oligonucleotide
  Antisense strand to SEQ ID NO: 2573494
ugacauagacuuaauguga

SEQ ID NO: 2573496 - RNA, 19 nt, Artificial Sequence
  Description of Artificial Sequence: Synthetic oligonucleotide
  Sense strand starting at position 2952 of SEQ ID NO: 1889017
gugacuggcaaccaagauu

SEQ ID NO: 2573497 - RNA, 19 nt, Artificial Sequence
  Description of Artificial Sequence: Synthetic oligonucleotide
  Antisense strand to SEQ ID NO: 2573496
aaucuugguugccagucac

SEQ ID NO: 2573498 - RNA, 19 nt, Artificial Sequence
  Description of Artificial Sequence: Synthetic oligonucleotide
  Sense strand starting at position 2996 of SEQ ID NO: 1889017
augagaccuauucgcugau

SEQ ID NO: 2573499 - RNA, 19 nt, Artificial Sequence
  Description of Artificial Sequence: Synthetic oligonucleotide
  Antisense strand to SEQ ID NO: 2573498
aucagcgaauaggucucau

SEQ ID NO: 2573500 - RNA, 19 nt, Artificial Sequence
  Description of Artificial Sequence: Synthetic oligonucleotide
  Sense strand starting at position 3000 of SEQ ID NO: 1889017
gaccuauucgcugaucuau

SEQ ID NO: 2573501 - RNA, 19 nt, Artificial Sequence
  Description of Artificial Sequence: Synthetic oligonucleotide
  Antisense strand to SEQ ID NO: 2573500
auagaucagcgaauagguc

SEQ ID NO: 2573502 - RNA, 19 nt, Artificial Sequence
  Description of Artificial Sequence: Synthetic oligonucleotide
  Sense strand starting at position 3006 of SEQ ID NO: 1889017
uucgcugaucuauaagaua

SEQ ID NO: 2573503 - RNA, 19 nt, Artificial Sequence
  Description of Artificial Sequence: Synthetic oligonucleotide
  Antisense strand to SEQ ID NO: 2573502
uaucuuauagaucagcgaa

SEQ ID NO: 2573504 - RNA, 19 nt, Artificial Sequence
  Description of Artificial Sequence: Synthetic oligonucleotide
  Sense strand starting at position 3287 of SEQ ID NO: 1889017
uuuccaauugcaggacuua

SEQ ID NO: 2573505 - RNA, 19 nt, Artificial Sequence
  Description of Artificial Sequence: Synthetic oligonucleotide
  Antisense strand to SEQ ID NO: 2573504
uaaguccugcaauuggaaa

SEQ ID NO: 2573506 - RNA, 19 nt, Artificial Sequence
  Description of Artificial Sequence: Synthetic oligonucleotide
  Sense strand starting at position 3331 of SEQ ID NO: 1889017
guccuaucuguugggaaag

SEQ ID NO: 2573507 - RNA, 19 nt, Artificial Sequence
  Description of Artificial Sequence: Synthetic oligonucleotide
  Antisense strand to SEQ ID NO: 2573506
cuuucccaacagauaggac

SEQ ID NO: 2573508 - RNA, 19 nt, Artificial Sequence
  Description of Artificial Sequence: Synthetic oligonucleotide
  Sense strand starting at position 3345 of SEQ ID NO: 1889017
gaaagacaguuauuguaau

SEQ ID NO: 2573509 - RNA, 19 nt, Artificial Sequence
  Description of Artificial Sequence: Synthetic oligonucleotide
  Antisense strand to SEQ ID NO: 2573508
auuacaauaacugucuuuc

SEQ ID NO: 2573510 - RNA, 19 nt, Artificial Sequence
  Description of Artificial Sequence: Synthetic oligonucleotide
  Sense strand starting at position 3568 of SEQ ID NO: 1889017
ucuaacauucgugauguaa

SEQ ID NO: 2573511 - RNA, 19 nt, Artificial Sequence
  Description of Artificial Sequence: Synthetic oligonucleotide
  Antisense strand to SEQ ID NO: 2573510
uuacaucacgaauguuaga

SEQ ID NO: 2573512 - RNA, 19 nt, Artificial Sequence
  Description of Artificial Sequence: Synthetic oligonucleotide
  Sense strand starting at position 3607 of SEQ ID NO: 1889017
agguauuaucauuaucccu

SEQ ID NO: 2573513 - RNA, 19 nt, Artificial Sequence
  Description of Artificial Sequence: Synthetic oligonucleotide
  Antisense strand to SEQ ID NO: 2573512
agggauaaugauaauaccu

SEQ ID NO: 2573514 - RNA, 19 nt, Artificial Sequence
  Description of Artificial Sequence: Synthetic oligonucleotide
  Sense strand starting at position 3672 of SEQ ID NO: 1889017
auccauuccuaaguaguuu

SEQ ID NO: 2573515 - RNA, 19 nt, Artificial Sequence
  Description of Artificial Sequence: Synthetic oligonucleotide
  Antisense strand to SEQ ID NO: 2573514
aaacuacuuaggaauggau

SEQ ID NO: 2573516 - RNA, 19 nt, Artificial Sequence
  Description of Artificial Sequence: Synthetic oligonucleotide
  Sense strand starting at position 3678 of SEQ ID NO: 1889017
uccuaaguaguuuauuacu

SEQ ID NO: 2573517 - RNA, 19 nt, Artificial Sequence
  Description of Artificial Sequence: Synthetic oligonucleotide
  Antisense strand to SEQ ID NO: 2573516
aguaauaaacuacuuagga

SEQ ID NO: 2573518 - RNA, 19 nt, Artificial Sequence
  Description of Artificial Sequence: Synthetic oligonucleotide
  Sense strand starting at position 3687 of SEQ ID NO: 1889017
guuuauuacuggccaacau

SEQ ID NO: 2573519 - RNA, 19 nt, Artificial Sequence
  Description of Artificial Sequence: Synthetic oligonucleotide
  Antisense strand to SEQ ID NO: 2573518
auguuggccaguaauaaac

SEQ ID NO: 2573520 - RNA, 19 nt, Artificial Sequence
  Description of Artificial Sequence: Synthetic oligonucleotide
  Sense strand starting at position 3706 of SEQ ID NO: 1889017
ucaauaccucagcagaagu

SEQ ID NO: 2573521 - RNA, 19 nt, Artificial Sequence
  Description of Artificial Sequence: Synthetic oligonucleotide
  Antisense strand to SEQ ID NO: 2573520
acuucugcugagguauuga

SEQ ID NO: 2573522 - RNA, 19 nt, Artificial Sequence
  Description of Artificial Sequence: Synthetic oligonucleotide
  Sense strand starting at position 3723 of SEQ ID NO: 1889017
guuaaaguccucuaaauga

SEQ ID NO: 2573523 - RNA, 19 nt, Artificial Sequence
  Description of Artificial Sequence: Synthetic oligonucleotide
  Antisense strand to SEQ ID NO: 2573522
ucauuuagaggacuuuaac

SEQ ID NO: 2573524 - RNA, 19 nt, Artificial Sequence
  Description of Artificial Sequence: Synthetic oligonucleotide
  Sense strand starting at position 3878 of SEQ ID NO: 1889017
uuaguuccaaagugaugga

SEQ ID NO: 2573525 - RNA, 19 nt, Artificial Sequence
  Description of Artificial Sequence: Synthetic oligonucleotide
  Antisense strand to SEQ ID NO: 2573524
uccaucacuuuggaacuaa

SEQ ID NO: 2573526 - RNA, 19 nt, Artificial Sequence
  Description of Artificial Sequence: Synthetic oligonucleotide
  Sense strand starting at position 3920 of SEQ ID NO: 1889017
gggugaccuuggucauacu

SEQ ID NO: 2573527 - RNA, 19 nt, Artificial Sequence
  Description of Artificial Sequence: Synthetic oligonucleotide
  Antisense strand to SEQ ID NO: 2573526
aguaugaccaaggucaccc

SEQ ID NO: 2573528 - RNA, 19 nt, Artificial Sequence
  Description of Artificial Sequence: Synthetic oligonucleotide
  Sense strand starting at position 3921 of SEQ ID NO: 1889017
ggugaccuuggucauacua

SEQ ID NO: 2573529 - RNA, 19 nt, Artificial Sequence
  Description of Artificial Sequence: Synthetic oligonucleotide
  Antisense strand to SEQ ID NO: 2573528
uaguaugaccaaggucacc

SEQ ID NO: 2573530 - RNA, 19 nt, Artificial Sequence
  Description of Artificial Sequence: Synthetic oligonucleotide
  Sense strand starting at position 35 of SEQ ID NO: 1889018
uuuaguuugggcuggcauu

SEQ ID NO: 2573531 - RNA, 19 nt, Artificial Sequence
  Description of Artificial Sequence: Synthetic oligonucleotide
  Antisense strand to SEQ ID NO: 2573530
aaugccagcccaaacuaaa

SEQ ID NO: 2573532 - RNA, 19 nt, Artificial Sequence
  Description of Artificial Sequence: Synthetic oligonucleotide
  Sense strand starting at position 454 of SEQ ID NO: 1889018
gaauaacuacugugauggu

SEQ ID NO: 2573533 - RNA, 19 nt, Artificial Sequence
  Description of Artificial Sequence: Synthetic oligonucleotide
  Antisense strand to SEQ ID NO: 2573532
accaucacaguaguuauuc

SEQ ID NO: 2573534 - RNA, 19 nt, Artificial Sequence
  Description of Artificial Sequence: Synthetic oligonucleotide
  Sense strand starting at position 458 of SEQ ID NO: 1889018
aacuacugugauggugaau

SEQ ID NO: 2573535 - RNA, 19 nt, Artificial Sequence
  Description of Artificial Sequence: Synthetic oligonucleotide
  Antisense strand to SEQ ID NO: 2573534
auucaccaucacaguaguu

SEQ ID NO: 2573536 - RNA, 19 nt, Artificial Sequence
  Description of Artificial Sequence: Synthetic oligonucleotide
  Sense strand starting at position 633 of SEQ ID NO: 1889018
ccauuuaacugucaggucu

SEQ ID NO: 2573537 - RNA, 19 nt, Artificial Sequence
  Description of Artificial Sequence: Synthetic oligonucleotide
  Antisense strand to SEQ ID NO: 2573536
agaccugacaguuaaaugg

SEQ ID NO: 2573538 - RNA, 19 nt, Artificial Sequence
  Description of Artificial Sequence: Synthetic oligonucleotide
  Sense strand starting at position 723 of SEQ ID NO: 1889018
guaacauugcauuaagagc

SEQ ID NO: 2573539 - RNA, 19 nt, Artificial Sequence
  Description of Artificial Sequence: Synthetic oligonucleotide
  Antisense strand to SEQ ID NO: 2573538
gcucuuaaugcaauguuac

SEQ ID NO: 2573540 - RNA, 19 nt, Artificial Sequence
  Description of Artificial Sequence: Synthetic oligonucleotide
  Sense strand starting at position 731 of SEQ ID NO: 1889018
gcauuaagagcugggccau

SEQ ID NO: 2573541 - RNA, 19 nt, Artificial Sequence
  Description of Artificial Sequence: Synthetic oligonucleotide
  Antisense strand to SEQ ID NO: 2573540
auggcccagcucuuaaugc

SEQ ID NO: 2573542 - RNA, 19 nt, Artificial Sequence
  Description of Artificial Sequence: Synthetic oligonucleotide
  Sense strand starting at position 814 of SEQ ID NO: 1889018
gcuugagcugaggauucga

SEQ ID NO: 2573543 - RNA, 19 nt, Artificial Sequence
  Description of Artificial Sequence: Synthetic oligonucleotide
  Antisense strand to SEQ ID NO: 2573542
ucgaauccucagcucaagc

SEQ ID NO: 2573544 - RNA, 19 nt, Artificial Sequence
  Description of Artificial Sequence: Synthetic oligonucleotide
  Sense strand starting at position 1192 of SEQ ID NO: 1889018
auagguaaaucacuguuua

SEQ ID NO: 2573545 - RNA, 19 nt, Artificial Sequence
  Description of Artificial Sequence: Synthetic oligonucleotide
  Antisense strand to SEQ ID NO: 2573544
uaaacagugauuuaccuau

SEQ ID NO: 2573546 - RNA, 19 nt, Artificial Sequence
  Description of Artificial Sequence: Synthetic oligonucleotide
  Sense strand starting at position 1196 of SEQ ID NO: 1889018
guaaaucacuguuuaccaa

SEQ ID NO: 2573547 - RNA, 19 nt, Artificial Sequence
  Description of Artificial Sequence: Synthetic oligonucleotide
  Antisense strand to SEQ ID NO: 2573546
uugguaaacagugauuuac

SEQ ID NO: 2573548 - RNA, 19 nt, Artificial Sequence
  Description of Artificial Sequence: Synthetic oligonucleotide
  Sense strand starting at position 1203 of SEQ ID NO: 1889018
acuguuuaccaagguaagu

SEQ ID NO: 2573549 - RNA, 19 nt, Artificial Sequence
  Description of Artificial Sequence: Synthetic oligonucleotide
  Antisense strand to SEQ ID NO: 2573548
acuuaccuugguaaacagu

SEQ ID NO: 2573550 - RNA, 19 nt, Artificial Sequence
  Description of Artificial Sequence: Synthetic oligonucleotide
  Sense strand starting at position 1521 of SEQ ID NO: 1889018
ugcaccaguugggaauaaa

SEQ ID NO: 2573551 - RNA, 19 nt, Artificial Sequence
  Description of Artificial Sequence: Synthetic oligonucleotide
  Antisense strand to SEQ ID NO: 2573550
uuuauucccaacuggugca

SEQ ID NO: 2573552 - RNA, 19 nt, Artificial Sequence
  Description of Artificial Sequence: Synthetic oligonucleotide
  Sense strand starting at position 1611 of SEQ ID NO: 1889018
cuaagacucuaugaugaca

SEQ ID NO: 2573553 - RNA, 19 nt, Artificial Sequence
  Description of Artificial Sequence: Synthetic oligonucleotide
  Antisense strand to SEQ ID NO: 2573552
ugucaucauagagucuuag

SEQ ID NO: 2573554 - RNA, 19 nt, Artificial Sequence
  Description of Artificial Sequence: Synthetic oligonucleotide
  Sense strand starting at position 1685 of SEQ ID NO: 1889018
uuacaaaggucagucguaa

SEQ ID NO: 2573555 - RNA, 19 nt, Artificial Sequence
  Description of Artificial Sequence: Synthetic oligonucleotide
  Antisense strand to SEQ ID NO: 2573554
uuacgacugaccuuuguaa

SEQ ID NO: 2573556 - RNA, 19 nt, Artificial Sequence
  Description of Artificial Sequence: Synthetic oligonucleotide
  Sense strand starting at position 1899 of SEQ ID NO: 1889018
aacuguagagaucaugcau

SEQ ID NO: 2573557 - RNA, 19 nt, Artificial Sequence
  Description of Artificial Sequence: Synthetic oligonucleotide
  Antisense strand to SEQ ID NO: 2573556
augcaugaucucuacaguu

SEQ ID NO: 2573558 - RNA, 19 nt, Artificial Sequence
  Description of Artificial Sequence: Synthetic oligonucleotide
  Sense strand starting at position 1933 of SEQ ID NO: 1889018
gccuucugaugcucagauu

SEQ ID NO: 2573559 - RNA, 19 nt, Artificial Sequence
  Description of Artificial Sequence: Synthetic oligonucleotide
  Antisense strand to SEQ ID NO: 2573558
aaucugagcaucagaaggc

SEQ ID NO: 2573560 - RNA, 19 nt, Artificial Sequence
  Description of Artificial Sequence: Synthetic oligonucleotide
  Sense strand starting at position 1942 of SEQ ID NO: 1889018
ugcucagauuuggcuaguu

SEQ ID NO: 2573561 - RNA, 19 nt, Artificial Sequence
  Description of Artificial Sequence: Synthetic oligonucleotide
  Antisense strand to SEQ ID NO: 2573560
aacuagccaaaucugagca

SEQ ID NO: 2573562 - RNA, 19 nt, Artificial Sequence
  Description of Artificial Sequence: Synthetic oligonucleotide
  Sense strand starting at position 2019 of SEQ ID NO: 1889018
auauacugucucugcuauu

SEQ ID NO: 2573563 - RNA, 19 nt, Artificial Sequence
  Description of Artificial Sequence: Synthetic oligonucleotide
  Antisense strand to SEQ ID NO: 2573562
aauagcagagacaguauau

SEQ ID NO: 2573564 - RNA, 19 nt, Artificial Sequence
  Description of Artificial Sequence: Synthetic oligonucleotide
  Sense strand starting at position 2050 of SEQ ID NO: 1889018
auuaucgacucauucugaa

SEQ ID NO: 2573565 - RNA, 19 nt, Artificial Sequence
  Description of Artificial Sequence: Synthetic oligonucleotide
  Antisense strand to SEQ ID NO: 2573564
uucagaaugagucgauaau

SEQ ID NO: 2573566 - RNA, 19 nt, Artificial Sequence
  Description of Artificial Sequence: Synthetic oligonucleotide
  Sense strand starting at position 2054 of SEQ ID NO: 1889018
ucgacucauucugaauaag

SEQ ID NO: 2573567 - RNA, 19 nt, Artificial Sequence
  Description of Artificial Sequence: Synthetic oligonucleotide
  Antisense strand to SEQ ID NO: 2573566
cuuauucagaaugagucga

SEQ ID NO: 2573568 - RNA, 19 nt, Artificial Sequence
  Description of Artificial Sequence: Synthetic oligonucleotide
  Sense strand starting at position 2489 of SEQ ID NO: 1889018
uguuuacugguuuauaugu

SEQ ID NO: 2573569 - RNA, 19 nt, Artificial Sequence
  Description of Artificial Sequence: Synthetic oligonucleotide
  Antisense strand to SEQ ID NO: 2573568
acauauaaaccaguaaaca

SEQ ID NO: 2573570 - RNA, 19 nt, Artificial Sequence
  Description of Artificial Sequence: Synthetic oligonucleotide
  Sense strand starting at position 2497 of SEQ ID NO: 1889018
gguuuauauguauggcgua

SEQ ID NO: 2573571 - RNA, 19 nt, Artificial Sequence
  Description of Artificial Sequence: Synthetic oligonucleotide
  Antisense strand to SEQ ID NO: 2573570
uacgccauacauauaaacc

SEQ ID NO: 2573572 - RNA, 19 nt, Artificial Sequence
  Description of Artificial Sequence: Synthetic oligonucleotide
  Sense strand starting at position 2502 of SEQ ID NO: 1889018
auauguauggcguaauaaa

SEQ ID NO: 2573573 - RNA, 19 nt, Artificial Sequence
  Description of Artificial Sequence: Synthetic oligonucleotide
  Antisense strand to SEQ ID NO: 2573572
uuuauuacgccauacauau

SEQ ID NO: 2573574 - RNA, 19 nt, Artificial Sequence
  Description of Artificial Sequence: Synthetic oligonucleotide
  Sense strand starting at position 2563 of SEQ ID NO: 1889018
uggaauaccugaggaaaua

SEQ ID NO: 2573575 - RNA, 19 nt, Artificial Sequence
  Description of Artificial Sequence: Synthetic oligonucleotide
  Antisense strand to SEQ ID NO: 2573574
uauuuccucagguauucca

SEQ ID NO: 2573576 - RNA, 19 nt, Artificial Sequence
  Description of Artificial Sequence: Synthetic oligonucleotide
  Sense strand starting at position 2582 of SEQ ID NO: 1889018
uggaguauauacuagauau

SEQ ID NO: 2573577 - RNA, 19 nt, Artificial Sequence
  Description of Artificial Sequence: Synthetic oligonucleotide
  Antisense strand to SEQ ID NO: 2573576
auaucuaguauauacucca

SEQ ID NO: 2573578 - RNA, 19 nt, Artificial Sequence
  Description of Artificial Sequence: Synthetic oligonucleotide
  Sense strand starting at position 2609 of SEQ ID NO: 1889018
ugucaaauuaccugagugu

SEQ ID NO: 2573579 - RNA, 19 nt, Artificial Sequence
  Description of Artificial Sequence: Synthetic oligonucleotide
  Antisense strand to SEQ ID NO: 2573578
acacucagguaauuugaca

SEQ ID NO: 2573580 - RNA, 19 nt, Artificial Sequence
  Description of Artificial Sequence: Synthetic oligonucleotide
  Sense strand starting at position 2610 of SEQ ID NO: 1889018
gucaaauuaccugagugug

SEQ ID NO: 2573581 - RNA, 19 nt, Artificial Sequence
  Description of Artificial Sequence: Synthetic oligonucleotide
  Antisense strand to SEQ ID NO: 2573580
cacacucagguaauuugac

SEQ ID NO: 2573582 - RNA, 19 nt, Artificial Sequence
  Description of Artificial Sequence: Synthetic oligonucleotide
  Sense strand starting at position 2612 of SEQ ID NO: 1889018
caaauuaccugagugugau

SEQ ID NO: 2573583 - RNA, 19 nt, Artificial Sequence
  Description of Artificial Sequence: Synthetic oligonucleotide
  Antisense strand to SEQ ID NO: 2573582
aucacacucagguaauuug

SEQ ID NO: 2573584 - RNA, 19 nt, Artificial Sequence
  Description of Artificial Sequence: Synthetic oligonucleotide
  Sense strand starting at position 2615 of SEQ ID NO: 1889018
auuaccugagugugauaau

SEQ ID NO: 2573585 - RNA, 19 nt, Artificial Sequence
  Description of Artificial Sequence: Synthetic oligonucleotide
  Antisense strand to SEQ ID NO: 2573584
auuaucacacucagguaau

SEQ ID NO: 2573586 - RNA, 19 nt, Artificial Sequence
  Description of Artificial Sequence: Synthetic oligonucleotide
  Sense strand starting at position 2624 of SEQ ID NO: 1889018
gugugauaauucucuucua

SEQ ID NO: 2573587 - RNA, 19 nt, Artificial Sequence
  Description of Artificial Sequence: Synthetic oligonucleotide
  Antisense strand to SEQ ID NO: 2573586
uagaagagaauuaucacac

SEQ ID NO: 2573588 - RNA, 19 nt, Artificial Sequence
  Description of Artificial Sequence: Synthetic oligonucleotide
  Sense strand starting at position 2625 of SEQ ID NO: 1889018
ugugauaauucucuucuag

SEQ ID NO: 2573589 - RNA, 19 nt, Artificial Sequence
  Description of Artificial Sequence: Synthetic oligonucleotide
  Antisense strand to SEQ ID NO: 2573588
cuagaagagaauuaucaca

SEQ ID NO: 2573590 - RNA, 19 nt, Artificial Sequence
  Description of Artificial Sequence: Synthetic oligonucleotide
  Sense strand starting at position 2698 of SEQ ID NO: 1889018
guaacaugaugucucuaaa

SEQ ID NO: 2573591 - RNA, 19 nt, Artificial Sequence
  Description of Artificial Sequence: Synthetic oligonucleotide
  Antisense strand to SEQ ID NO: 2573590
uuuagagacaucauguuac

SEQ ID NO: 2573592 - RNA, 19 nt, Artificial Sequence
  Description of Artificial Sequence: Synthetic oligonucleotide
  Sense strand starting at position 3077 of SEQ ID NO: 1889018
guguguacagaugaaggau

SEQ ID NO: 2573593 - RNA, 19 nt, Artificial Sequence
  Description of Artificial Sequence: Synthetic oligonucleotide
  Antisense strand to SEQ ID NO: 2573592
auccuucaucuguacacac

SEQ ID NO: 2573594 - RNA, 19 nt, Artificial Sequence
  Description of Artificial Sequence: Synthetic oligonucleotide
  Sense strand starting at position 3120 of SEQ ID NO: 1889018
cugcaacuuucuguagguu

SEQ ID NO: 2573595 - RNA, 19 nt, Artificial Sequence
  Description of Artificial Sequence: Synthetic oligonucleotide
  Antisense strand to SEQ ID NO: 2573594
aaccuacagaaaguugcag

SEQ ID NO: 2573596 - RNA, 19 nt, Artificial Sequence
  Description of Artificial Sequence: Synthetic oligonucleotide
  Sense strand starting at position 3121 of SEQ ID NO: 1889018
ugcaacuuucuguagguuu

SEQ ID NO: 2573597 - RNA, 19 nt, Artificial Sequence
  Description of Artificial Sequence: Synthetic oligonucleotide
  Antisense strand to SEQ ID NO: 2573596
aaaccuacagaaaguugca

SEQ ID NO: 2573598 - RNA, 19 nt, Artificial Sequence
  Description of Artificial Sequence: Synthetic oligonucleotide
  Sense strand starting at position 3177 of SEQ ID NO: 1889018
cgauccaguuaggauuuau

SEQ ID NO: 2573599 - RNA, 19 nt, Artificial Sequence
  Description of Artificial Sequence: Synthetic oligonucleotide
  Antisense strand to SEQ ID NO: 2573598
auaaauccuaacuggaucg

SEQ ID NO: 2573600 - RNA, 19 nt, Artificial Sequence
  Description of Artificial Sequence: Synthetic oligonucleotide
  Sense strand starting at position 3192 of SEQ ID NO: 1889018
uuauuugacuagugcuaug

SEQ ID NO: 2573601 - RNA, 19 nt, Artificial Sequence
  Description of Artificial Sequence: Synthetic oligonucleotide
  Antisense strand to SEQ ID NO: 2573600
cauagcacuagucaaauaa

SEQ ID NO: 2573602 - RNA, 19 nt, Artificial Sequence
  Description of Artificial Sequence: Synthetic oligonucleotide
  Sense strand starting at position 3197 of SEQ ID NO: 1889018
ugacuagugcuauguaucu

SEQ ID NO: 2573603 - RNA, 19 nt, Artificial Sequence
  Description of Artificial Sequence: Synthetic oligonucleotide
  Antisense strand to SEQ ID NO: 2573602
agauacauagcacuaguca

SEQ ID NO: 2573604 - RNA, 19 nt, Artificial Sequence
  Description of Artificial Sequence: Synthetic oligonucleotide
  Sense strand starting at position 3207 of SEQ ID NO: 1889018
uauguaucuuggucuggca

SEQ ID NO: 2573605 - RNA, 19 nt, Artificial Sequence
  Description of Artificial Sequence: Synthetic oligonucleotide
  Antisense strand to SEQ ID NO: 2573604
ugccagaccaagauacaua

SEQ ID NO: 2573606 - RNA, 19 nt, Artificial Sequence
  Description of Artificial Sequence: Synthetic oligonucleotide
  Sense strand starting at position 3300 of SEQ ID NO: 1889018
gcuaauggcacuggagaau

SEQ ID NO: 2573607 - RNA, 19 nt, Artificial Sequence
  Description of Artificial Sequence: Synthetic oligonucleotide
  Antisense strand to SEQ ID NO: 2573606
auucuccagugccauuagc

SEQ ID NO: 2573608 - RNA, 19 nt, Artificial Sequence
  Description of Artificial Sequence: Synthetic oligonucleotide
  Sense strand starting at position 3501 of SEQ ID NO: 1889018
gaggucauggugggagaau

SEQ ID NO: 2573609 - RNA, 19 nt, Artificial Sequence
  Description of Artificial Sequence: Synthetic oligonucleotide
  Antisense strand to SEQ ID NO: 2573608
auucucccaccaugaccuc

SEQ ID NO: 2573610 - RNA, 19 nt, Artificial Sequence
  Description of Artificial Sequence: Synthetic oligonucleotide
  Sense strand starting at position 63 of SEQ ID NO: 1889019
acguuaugacacuaucaac

SEQ ID NO: 2573611 - RNA, 19 nt, Artificial Sequence
  Description of Artificial Sequence: Synthetic oligonucleotide
  Antisense strand to SEQ ID NO: 2573610
guugauagugucauaacgu

SEQ ID NO: 2573612 - RNA, 19 nt, Artificial Sequence
  Description of Artificial Sequence: Synthetic oligonucleotide
  Sense strand starting at position 97 of SEQ ID NO: 1889019
cauauaaugcaguagaguu

SEQ ID NO: 2573613 - RNA, 19 nt, Artificial Sequence
  Description of Artificial Sequence: Synthetic oligonucleotide
  Antisense strand to SEQ ID NO: 2573612
aacucuacugcauuauaug

SEQ ID NO: 2573614 - RNA, 19 nt, Artificial Sequence
  Description of Artificial Sequence: Synthetic oligonucleotide
  Sense strand starting at position 201 of SEQ ID NO: 1889019
ggcugcaugauguauauau

SEQ ID NO: 2573615 - RNA, 19 nt, Artificial Sequence
  Description of Artificial Sequence: Synthetic oligonucleotide
  Antisense strand to SEQ ID NO: 2573614
auauauacaucaugcagcc

SEQ ID NO: 2573616 - RNA, 19 nt, Artificial Sequence
  Description of Artificial Sequence: Synthetic oligonucleotide
  Sense strand starting at position 243 of SEQ ID NO: 1889019
gccaguuuaaaugguguuu

SEQ ID NO: 2573617 - RNA, 19 nt, Artificial Sequence
  Description of Artificial Sequence: Synthetic oligonucleotide
  Antisense strand to SEQ ID NO: 2573616
aaacaccauuuaaacuggc

SEQ ID NO: 2573618 - RNA, 19 nt, Artificial Sequence
  Description of Artificial Sequence: Synthetic oligonucleotide
  Sense strand starting at position 317 of SEQ ID NO: 1889019
gcaucaggugaauacucau

SEQ ID NO: 2573619 - RNA, 19 nt, Artificial Sequence
  Description of Artificial Sequence: Synthetic oligonucleotide
  Antisense strand to SEQ ID NO: 2573618
augaguauucaccugaugc

SEQ ID NO: 2573620 - RNA, 19 nt, Artificial Sequence
  Description of Artificial Sequence: Synthetic oligonucleotide
  Sense strand starting at position 323 of SEQ ID NO: 1889019
ggugaauacucauaaacuc

SEQ ID NO: 2573621 - RNA, 19 nt, Artificial Sequence
  Description of Artificial Sequence: Synthetic oligonucleotide
  Antisense strand to SEQ ID NO: 2573620
gaguuuaugaguauucacc

SEQ ID NO: 2573622 - RNA, 19 nt, Artificial Sequence
  Description of Artificial Sequence: Synthetic oligonucleotide
  Sense strand starting at position 445 of SEQ ID NO: 1889019
gcacauucguaauuggaaa

SEQ ID NO: 2573623 - RNA, 19 nt, Artificial Sequence
  Description of Artificial Sequence: Synthetic oligonucleotide
  Antisense strand to SEQ ID NO: 2573622
uuuccaauuacgaaugugc

SEQ ID NO: 2573624 - RNA, 19 nt, Artificial Sequence
  Description of Artificial Sequence: Synthetic oligonucleotide
  Sense strand starting at position 525 of SEQ ID NO: 1889019
acauuucccucgcuguuau

SEQ ID NO: 2573625 - RNA, 19 nt, Artificial Sequence
  Description of Artificial Sequence: Synthetic oligonucleotide
  Antisense strand to SEQ ID NO: 2573624
auaacagcgagggaaaugu

SEQ ID NO: 2573626 - RNA, 19 nt, Artificial Sequence
  Description of Artificial Sequence: Synthetic oligonucleotide
  Sense strand starting at position 554 of SEQ ID NO: 1889019
uaaauaugcguuuaugaac

SEQ ID NO: 2573627 - RNA, 19 nt, Artificial Sequence
  Description of Artificial Sequence: Synthetic oligonucleotide
  Antisense strand to SEQ ID NO: 2573626
guucauaaacgcauauuua

SEQ ID NO: 2573628 - RNA, 19 nt, Artificial Sequence
  Description of Artificial Sequence: Synthetic oligonucleotide
  Sense strand starting at position 561 of SEQ ID NO: 1889019
gcguuuaugaaccauuguu

SEQ ID NO: 2573629 - RNA, 19 nt, Artificial Sequence
  Description of Artificial Sequence: Synthetic oligonucleotide
  Antisense strand to SEQ ID NO: 2573628
aacaaugguucauaaacgc

SEQ ID NO: 2573630 - RNA, 19 nt, Artificial Sequence
  Description of Artificial Sequence: Synthetic oligonucleotide
  Sense strand starting at position 602 of SEQ ID NO: 1889019
gcagcuguacuccauaaau

SEQ ID NO: 2573631 - RNA, 19 nt, Artificial Sequence
  Description of Artificial Sequence: Synthetic oligonucleotide
  Antisense strand to SEQ ID NO: 2573630
auuuauggaguacagcugc

SEQ ID NO: 2573632 - RNA, 19 nt, Artificial Sequence
  Description of Artificial Sequence: Synthetic oligonucleotide
  Sense strand starting at position 604 of SEQ ID NO: 1889019
agcuguacuccauaaaugu

SEQ ID NO: 2573633 - RNA, 19 nt, Artificial Sequence
  Description of Artificial Sequence: Synthetic oligonucleotide
  Antisense strand to SEQ ID NO: 2573632
acauuuauggaguacagcu

SEQ ID NO: 2573634 - RNA, 19 nt, Artificial Sequence
  Description of Artificial Sequence: Synthetic oligonucleotide
  Sense strand starting at position 613 of SEQ ID NO: 1889019
ccauaaauguuguacaucu

SEQ ID NO: 2573635 - RNA, 19 nt, Artificial Sequence
  Description of Artificial Sequence: Synthetic oligonucleotide
  Antisense strand to SEQ ID NO: 2573634
agauguacaacauuuaugg

SEQ ID NO: 2573636 - RNA, 19 nt, Artificial Sequence
  Description of Artificial Sequence: Synthetic oligonucleotide
  Sense strand starting at position 886 of SEQ ID NO: 1889019
gcaaucacacuuugugaug

SEQ ID NO: 2573637 - RNA, 19 nt, Artificial Sequence
  Description of Artificial Sequence: Synthetic oligonucleotide
  Antisense strand to SEQ ID NO: 2573636
caucacaaagugugauugc

SEQ ID NO: 2573638 - RNA, 19 nt, Artificial Sequence
  Description of Artificial Sequence: Synthetic oligonucleotide
  Sense strand starting at position 895 of SEQ ID NO: 1889019
cuuugugaugcuugacaaa

SEQ ID NO: 2573639 - RNA, 19 nt, Artificial Sequence
  Description of Artificial Sequence: Synthetic oligonucleotide
  Antisense strand to SEQ ID NO: 2573638
uuugucaagcaucacaaag

SEQ ID NO: 2573640 - RNA, 19 nt, Artificial Sequence
  Description of Artificial Sequence: Synthetic oligonucleotide
  Sense strand starting at position 954 of SEQ ID NO: 1889019
gggagccuguaaguaaaua

SEQ ID NO: 2573641 - RNA, 19 nt, Artificial Sequence
  Description of Artificial Sequence: Synthetic oligonucleotide
  Antisense strand to SEQ ID NO: 2573640
uauuuacuuacaggcuccc

SEQ ID NO: 2573642 - RNA, 19 nt, Artificial Sequence
  Description of Artificial Sequence: Synthetic oligonucleotide
  Sense strand starting at position 972 of SEQ ID NO: 1889019
acuugugcugcccaaacau

SEQ ID NO: 2573643 - RNA, 19 nt, Artificial Sequence
  Description of Artificial Sequence: Synthetic oligonucleotide
  Antisense strand to SEQ ID NO: 2573642
auguuugggcagcacaagu

SEQ ID NO: 2573644 - RNA, 19 nt, Artificial Sequence
  Description of Artificial Sequence: Synthetic oligonucleotide
  Sense strand starting at position 1021 of SEQ ID NO: 1889019
ggcccaggaagcuaucuau

SEQ ID NO: 2573645 - RNA, 19 nt, Artificial Sequence
  Description of Artificial Sequence: Synthetic oligonucleotide
  Antisense strand to SEQ ID NO: 2573644
auagauagcuuccugggcc

SEQ ID NO: 2573646 - RNA, 19 nt, Artificial Sequence
  Description of Artificial Sequence: Synthetic oligonucleotide
  Sense strand starting at position 1024 of SEQ ID NO: 1889019
ccaggaagcuaucuaugua

SEQ ID NO: 2573647 - RNA, 19 nt, Artificial Sequence
  Description of Artificial Sequence: Synthetic oligonucleotide
  Antisense strand to SEQ ID NO: 2573646
uacauagauagcuuccugg

SEQ ID NO: 2573648 - RNA, 19 nt, Artificial Sequence
  Description of Artificial Sequence: Synthetic oligonucleotide
  Sense strand starting at position 1027 of SEQ ID NO: 1889019
ggaagcuaucuauguacaa

SEQ ID NO: 2573649 - RNA, 19 nt, Artificial Sequence
  Description of Artificial Sequence: Synthetic oligonucleotide
  Antisense strand to SEQ ID NO: 2573648
uuguacauagauagcuucc

SEQ ID NO: 2573650 - RNA, 19 nt, Artificial Sequence
  Description of Artificial Sequence: Synthetic oligonucleotide
  Sense strand starting at position 1161 of SEQ ID NO: 1889019
uuucgagacuguuucuaag

SEQ ID NO: 2573651 - RNA, 19 nt, Artificial Sequence
  Description of Artificial Sequence: Synthetic oligonucleotide
  Antisense strand to SEQ ID NO: 2573650
cuuagaaacagucucgaaa

SEQ ID NO: 2573652 - RNA, 19 nt, Artificial Sequence
  Description of Artificial Sequence: Synthetic oligonucleotide
  Sense strand starting at position 1163 of SEQ ID NO: 1889019
ucgagacuguuucuaagug

SEQ ID NO: 2573653 - RNA, 19 nt, Artificial Sequence
  Description of Artificial Sequence: Synthetic oligonucleotide
  Antisense strand to SEQ ID NO: 2573652
cacuuagaaacagucucga

SEQ ID NO: 2573654 - RNA, 19 nt, Artificial Sequence
  Description of Artificial Sequence: Synthetic oligonucleotide
  Sense strand starting at position 1725 of SEQ ID NO: 1889019
ggacauaggcgggaucgua

SEQ ID NO: 2573655 - RNA, 19 nt, Artificial Sequence
  Description of Artificial Sequence: Synthetic oligonucleotide
  Antisense strand to SEQ ID NO: 2573654
uacgaucccgccuaugucc

SEQ ID NO: 2573656 - RNA, 19 nt, Artificial Sequence
  Description of Artificial Sequence: Synthetic oligonucleotide
  Sense strand starting at position 1869 of SEQ ID NO: 1889019
uccagucucgucggugaaa

SEQ ID NO: 2573657 - RNA, 19 nt, Artificial Sequence
  Description of Artificial Sequence: Synthetic oligonucleotide
  Antisense strand to SEQ ID NO: 2573656
uuucaccgacgagacugga

SEQ ID NO: 2573658 - RNA, 19 nt, Artificial Sequence
  Description of Artificial Sequence: Synthetic oligonucleotide
  Sense strand starting at position 2436 of SEQ ID NO: 1889019
gcagcauaguccuugaaac

SEQ ID NO: 2573659 - RNA, 19 nt, Artificial Sequence
  Description of Artificial Sequence: Synthetic oligonucleotide
  Antisense strand to SEQ ID NO: 2573658
guuucaaggacuaugcugc

SEQ ID NO: 2573660 - RNA, 19 nt, Artificial Sequence
  Description of Artificial Sequence: Synthetic oligonucleotide
  Sense strand starting at position 2438 of SEQ ID NO: 1889019
agcauaguccuugaaacug

SEQ ID NO: 2573661 - RNA, 19 nt, Artificial Sequence
  Description of Artificial Sequence: Synthetic oligonucleotide
  Antisense strand to SEQ ID NO: 2573660
caguuucaaggacuaugcu

SEQ ID NO: 2573662 - RNA, 19 nt, Artificial Sequence
  Description of Artificial Sequence: Synthetic oligonucleotide
  Sense strand starting at position 2516 of SEQ ID NO: 1889019
ggauuucguucuuccucua

SEQ ID NO: 2573663 - RNA, 19 nt, Artificial Sequence
  Description of Artificial Sequence: Synthetic oligonucleotide
  Antisense strand to SEQ ID NO: 2573662
uagaggaagaacgaaaucc

SEQ ID NO: 2573664 - RNA, 19 nt, Artificial Sequence
  Description of Artificial Sequence: Synthetic oligonucleotide
  Sense strand starting at position 2577 of SEQ ID NO: 1889019
ggaaaucacuugcuuacug

SEQ ID NO: 2573665 - RNA, 19 nt, Artificial Sequence
  Description of Artificial Sequence: Synthetic oligonucleotide
  Antisense strand to SEQ ID NO: 2573664
caguaagcaagugauuucc

SEQ ID NO: 2573666 - RNA, 19 nt, Artificial Sequence
  Description of Artificial Sequence: Synthetic oligonucleotide
  Sense strand starting at position 2725 of SEQ ID NO: 1889019
gugaaucucucagcacaaa

SEQ ID NO: 2573667 - RNA, 19 nt, Artificial Sequence
  Description of Artificial Sequence: Synthetic oligonucleotide
  Antisense strand to SEQ ID NO: 2573666
uuugugcugagagauucac

SEQ ID NO: 2573668 - RNA, 19 nt, Artificial Sequence
  Description of Artificial Sequence: Synthetic oligonucleotide
  Sense strand starting at position 2782 of SEQ ID NO: 1889019
ucguucucagguuagguau

SEQ ID NO: 2573669 - RNA, 19 nt, Artificial Sequence
  Description of Artificial Sequence: Synthetic oligonucleotide
  Antisense strand to SEQ ID NO: 2573668
auaccuaaccugagaacga

SEQ ID NO: 2573670 - RNA, 19 nt, Artificial Sequence
  Description of Artificial Sequence: Synthetic oligonucleotide
  Sense strand starting at position 2914 of SEQ ID NO: 1889019
uugcaucugugaucaccua

SEQ ID NO: 2573671 - RNA, 19 nt, Artificial Sequence
  Description of Artificial Sequence: Synthetic oligonucleotide
  Antisense strand to SEQ ID NO: 2573670
uaggugaucacagaugcaa

SEQ ID NO: 2573672 - RNA, 19 nt, Artificial Sequence
  Description of Artificial Sequence: Synthetic oligonucleotide
  Sense strand starting at position 2915 of SEQ ID NO: 1889019
ugcaucugugaucaccuaa

SEQ ID NO: 2573673 - RNA, 19 nt, Artificial Sequence
  Description of Artificial Sequence: Synthetic oligonucleotide
  Antisense strand to SEQ ID NO: 2573672
uuaggugaucacagaugca

SEQ ID NO: 2573674 - RNA, 19 nt, Artificial Sequence
  Description of Artificial Sequence: Synthetic oligonucleotide
  Sense strand starting at position 3011 of SEQ ID NO: 1889019
uguggaauauauccauugu

SEQ ID NO: 2573675 - RNA, 19 nt, Artificial Sequence
  Description of Artificial Sequence: Synthetic oligonucleotide
  Antisense strand to SEQ ID NO: 2573674
acaauggauauauuccaca

SEQ ID NO: 2573676 - RNA, 19 nt, Artificial Sequence
  Description of Artificial Sequence: Synthetic oligonucleotide
  Sense strand starting at position 3059 of SEQ ID NO: 1889019
cagcuucugcaguauuaag

SEQ ID NO: 2573677 - RNA, 19 nt, Artificial Sequence
  Description of Artificial Sequence: Synthetic oligonucleotide
  Antisense strand to SEQ ID NO: 2573676
cuuaauacugcagaagcug

SEQ ID NO: 2573678 - RNA, 19 nt, Artificial Sequence
  Description of Artificial Sequence: Synthetic oligonucleotide
  Sense strand starting at position 3112 of SEQ ID NO: 1889019
gcaaguggcacagaaucaa

SEQ ID NO: 2573679 - RNA, 19 nt, Artificial Sequence
  Description of Artificial Sequence: Synthetic oligonucleotide
  Antisense strand to SEQ ID NO: 2573678
uugauucugugccacuugc

SEQ ID NO: 2573680 - RNA, 19 nt, Artificial Sequence
  Description of Artificial Sequence: Synthetic oligonucleotide
  Sense strand starting at position 3213 of SEQ ID NO: 1889019
agacuagguugaugauaug

SEQ ID NO: 2573681 - RNA, 19 nt, Artificial Sequence
  Description of Artificial Sequence: Synthetic oligonucleotide
  Antisense strand to SEQ ID NO: 2573680
cauaucaucaaccuagucu

SEQ ID NO: 2573682 - RNA, 19 nt, Artificial Sequence
  Description of Artificial Sequence: Synthetic oligonucleotide
  Sense strand starting at position 3216 of SEQ ID NO: 1889019
cuagguugaugauaugcaa

SEQ ID NO: 2573683 - RNA, 19 nt, Artificial Sequence
  Description of Artificial Sequence: Synthetic oligonucleotide
  Antisense strand to SEQ ID NO: 2573682
uugcauaucaucaaccuag

SEQ ID NO: 2573684 - RNA, 19 nt, Artificial Sequence
  Description of Artificial Sequence: Synthetic oligonucleotide
  Sense strand starting at position 3219 of SEQ ID NO: 1889019
gguugaugauaugcaaaua

SEQ ID NO: 2573685 - RNA, 19 nt, Artificial Sequence
  Description of Artificial Sequence: Synthetic oligonucleotide
  Antisense strand to SEQ ID NO: 2573684
uauuugcauaucaucaacc

SEQ ID NO: 2573686 - RNA, 19 nt, Artificial Sequence
  Description of Artificial Sequence: Synthetic oligonucleotide
  Sense strand starting at position 3245 of SEQ ID NO: 1889019
gagauuugguccuaucaau

SEQ ID NO: 2573687 - RNA, 19 nt, Artificial Sequence
  Description of Artificial Sequence: Synthetic oligonucleotide
  Antisense strand to SEQ ID NO: 2573686
auugauaggaccaaaucuc

SEQ ID NO: 2573688 - RNA, 19 nt, Artificial Sequence
  Description of Artificial Sequence: Synthetic oligonucleotide
  Sense strand starting at position 3955 of SEQ ID NO: 1889019
ggagaucuuuaacagaaag

SEQ ID NO: 2573689 - RNA, 19 nt, Artificial Sequence
  Description of Artificial Sequence: Synthetic oligonucleotide
  Antisense strand to SEQ ID NO: 2573688
cuuucuguuaaagaucucc

SEQ ID NO: 2573690 - RNA, 19 nt, Artificial Sequence
  Description of Artificial Sequence: Synthetic oligonucleotide
  Sense strand starting at position 24 of SEQ ID NO: 1889020
ggugcuucucaagaugggu

SEQ ID NO: 2573691 - RNA, 19 nt, Artificial Sequence
  Description of Artificial Sequence: Synthetic oligonucleotide
  Antisense strand to SEQ ID NO: 2573690
acccaucuugagaagcacc

SEQ ID NO: 2573692 - RNA, 19 nt, Artificial Sequence
  Description of Artificial Sequence: Synthetic oligonucleotide
  Sense strand starting at position 172 of SEQ ID NO: 1889020
cauugugaccuugguggaa

SEQ ID NO: 2573693 - RNA, 19 nt, Artificial Sequence
  Description of Artificial Sequence: Synthetic oligonucleotide
  Antisense strand to SEQ ID NO: 2573692
uuccaccaaggucacaaug

SEQ ID NO: 2573694 - RNA, 19 nt, Artificial Sequence
  Description of Artificial Sequence: Synthetic oligonucleotide
  Sense strand starting at position 344 of SEQ ID NO: 1889020
ggguugugacaguggauga

SEQ ID NO: 2573695 - RNA, 19 nt, Artificial Sequence
  Description of Artificial Sequence: Synthetic oligonucleotide
  Antisense strand to SEQ ID NO: 2573694
ucauccacugucacaaccc

SEQ ID NO: 2573696 - RNA, 19 nt, Artificial Sequence
  Description of Artificial Sequence: Synthetic oligonucleotide
  Sense strand starting at position 380 of SEQ ID NO: 1889020
gguuaaaguacaugacaag

SEQ ID NO: 2573697 - RNA, 19 nt, Artificial Sequence
  Description of Artificial Sequence: Synthetic oligonucleotide
  Antisense strand to SEQ ID NO: 2573696
cuugucauguacuuuaacc

SEQ ID NO: 2573698 - RNA, 19 nt, Artificial Sequence
  Description of Artificial Sequence: Synthetic oligonucleotide
  Sense strand starting at position 381 of SEQ ID NO: 1889020
guuaaaguacaugacaagu

SEQ ID NO: 2573699 - RNA, 19 nt, Artificial Sequence
  Description of Artificial Sequence: Synthetic oligonucleotide
  Antisense strand to SEQ ID NO: 2573698
acuugucauguacuuuaac

SEQ ID NO: 2573700 - RNA, 19 nt, Artificial Sequence
  Description of Artificial Sequence: Synthetic oligonucleotide
  Sense strand starting at position 408 of SEQ ID NO: 1889020
aagggugcuggaugaagau

SEQ ID NO: 2573701 - RNA, 19 nt, Artificial Sequence
  Description of Artificial Sequence: Synthetic oligonucleotide
  Antisense strand to SEQ ID NO: 2573700
aucuucauccagcacccuu

SEQ ID NO: 2573702 - RNA, 19 nt, Artificial Sequence
  Description of Artificial Sequence: Synthetic oligonucleotide
  Sense strand starting at position 418 of SEQ ID NO: 1889020
gaugaagaucugggcuagu

SEQ ID NO: 2573703 - RNA, 19 nt, Artificial Sequence
  Description of Artificial Sequence: Synthetic oligonucleotide
  Antisense strand to SEQ ID NO: 2573702
acuagcccagaucuucauc

SEQ ID NO: 2573704 - RNA, 19 nt, Artificial Sequence
  Description of Artificial Sequence: Synthetic oligonucleotide
  Sense strand starting at position 505 of SEQ ID NO: 1889020
uccucaaucugauugguac

SEQ ID NO: 2573705 - RNA, 19 nt, Artificial Sequence
  Description of Artificial Sequence: Synthetic oligonucleotide
  Antisense strand to SEQ ID NO: 2573704
guaccaaucagauugagga

SEQ ID NO: 2573706 - RNA, 19 nt, Artificial Sequence
  Description of Artificial Sequence: Synthetic oligonucleotide
  Sense strand starting at position 506 of SEQ ID NO: 1889020
ccucaaucugauugguaca

SEQ ID NO: 2573707 - RNA, 19 nt, Artificial Sequence
  Description of Artificial Sequence: Synthetic oligonucleotide
  Antisense strand to SEQ ID NO: 2573706
uguaccaaucagauugagg

SEQ ID NO: 2573708 - RNA, 19 nt, Artificial Sequence
  Description of Artificial Sequence: Synthetic oligonucleotide
  Sense strand starting at position 673 of SEQ ID NO: 1889020
ucugcugagaugugaccaa

SEQ ID NO: 2573709 - RNA, 19 nt, Artificial Sequence
  Description of Artificial Sequence: Synthetic oligonucleotide
  Antisense strand to SEQ ID NO: 2573708
uuggucacaucucagcaga

SEQ ID NO: 2573710 - RNA, 19 nt, Artificial Sequence
  Description of Artificial Sequence: Synthetic oligonucleotide
  Sense strand starting at position 677 of SEQ ID NO: 1889020
cugagaugugaccaauguu

SEQ ID NO: 2573711 - RNA, 19 nt, Artificial Sequence
  Description of Artificial Sequence: Synthetic oligonucleotide
  Antisense strand to SEQ ID NO: 2573710
aacauuggucacaucucag

SEQ ID NO: 2573712 - RNA, 19 nt, Artificial Sequence
  Description of Artificial Sequence: Synthetic oligonucleotide
  Sense strand starting at position 680 of SEQ ID NO: 1889020
agaugugaccaauguugaa

SEQ ID NO: 2573713 - RNA, 19 nt, Artificial Sequence
  Description of Artificial Sequence: Synthetic oligonucleotide
  Antisense strand to SEQ ID NO: 2573712
uucaacauuggucacaucu

SEQ ID NO: 2573714 - RNA, 19 nt, Artificial Sequence
  Description of Artificial Sequence: Synthetic oligonucleotide
  Sense strand starting at position 724 of SEQ ID NO: 1889020
gauauuugcucccugcuga

SEQ ID NO: 2573715 - RNA, 19 nt, Artificial Sequence
  Description of Artificial Sequence: Synthetic oligonucleotide
  Antisense strand to SEQ ID NO: 2573714
ucagcagggagcaaauauc

SEQ ID NO: 2573716 - RNA, 19 nt, Artificial Sequence
  Description of Artificial Sequence: Synthetic oligonucleotide
  Sense strand starting at position 725 of SEQ ID NO: 1889020
auauuugcucccugcugaa

SEQ ID NO: 2573717 - RNA, 19 nt, Artificial Sequence
  Description of Artificial Sequence: Synthetic oligonucleotide
  Antisense strand to SEQ ID NO: 2573716
uucagcagggagcaaauau

SEQ ID NO: 2573718 - RNA, 19 nt, Artificial Sequence
  Description of Artificial Sequence: Synthetic oligonucleotide
  Sense strand starting at position 794 of SEQ ID NO: 1889020
gccauuuaagcggguugga

SEQ ID NO: 2573719 - RNA, 19 nt, Artificial Sequence
  Description of Artificial Sequence: Synthetic oligonucleotide
  Antisense strand to SEQ ID NO: 2573718
uccaacccgcuuaaauggc

SEQ ID NO: 2573720 - RNA, 19 nt, Artificial Sequence
  Description of Artificial Sequence: Synthetic oligonucleotide
  Sense strand starting at position 862 of SEQ ID NO: 1889020
uggaauaaaguucguaaag

SEQ ID NO: 2573721 - RNA, 19 nt, Artificial Sequence
  Description of Artificial Sequence: Synthetic oligonucleotide
  Antisense strand to SEQ ID NO: 2573720
cuuuacgaacuuuauucca

SEQ ID NO: 2573722 - RNA, 19 nt, Artificial Sequence
  Description of Artificial Sequence: Synthetic oligonucleotide
  Sense strand starting at position 863 of SEQ ID NO: 1889020
ggaauaaaguucguaaagu

SEQ ID NO: 2573723 - RNA, 19 nt, Artificial Sequence
  Description of Artificial Sequence: Synthetic oligonucleotide
  Antisense strand to SEQ ID NO: 2573722
acuuuacgaacuuuauucc

SEQ ID NO: 2573724 - RNA, 19 nt, Artificial Sequence
  Description of Artificial Sequence: Synthetic oligonucleotide
  Sense strand starting at position 2488 of SEQ ID NO: 1889020
cugauuagcgcguucaugu

SEQ ID NO: 2573725 - RNA, 19 nt, Artificial Sequence
  Description of Artificial Sequence: Synthetic oligonucleotide
  Antisense strand to SEQ ID NO: 2573724
acaugaacgcgcuaaucag

SEQ ID NO: 2573726 - RNA, 19 nt, Artificial Sequence
  Description of Artificial Sequence: Synthetic oligonucleotide
  Sense strand starting at position 2489 of SEQ ID NO: 1889020
ugauuagcgcguucauguu

SEQ ID NO: 2573727 - RNA, 19 nt, Artificial Sequence
  Description of Artificial Sequence: Synthetic oligonucleotide
  Antisense strand to SEQ ID NO: 2573726
aacaugaacgcgcuaauca

SEQ ID NO: 2573728 - RNA, 19 nt, Artificial Sequence
  Description of Artificial Sequence: Synthetic oligonucleotide
  Sense strand starting at position 2698 of SEQ ID NO: 1889020
cccagagcauaguuuaaau

SEQ ID NO: 2573729 - RNA, 19 nt, Artificial Sequence
  Description of Artificial Sequence: Synthetic oligonucleotide
  Antisense strand to SEQ ID NO: 2573728
auuuaaacuaugcucuggg

SEQ ID NO: 2573730 - RNA, 19 nt, Artificial Sequence
  Description of Artificial Sequence: Synthetic oligonucleotide
  Sense strand starting at position 2864 of SEQ ID NO: 1889020
gccagcaaucagcaaacuu

SEQ ID NO: 2573731 - RNA, 19 nt, Artificial Sequence
  Description of Artificial Sequence: Synthetic oligonucleotide
  Antisense strand to SEQ ID NO: 2573730
aaguuugcugauugcuggc

SEQ ID NO: 2573732 - RNA, 19 nt, Artificial Sequence
  Description of Artificial Sequence: Synthetic oligonucleotide
  Sense strand starting at position 2933 of SEQ ID NO: 1889020
ugauaagcuggccaauuaa

SEQ ID NO: 2573733 - RNA, 19 nt, Artificial Sequence
  Description of Artificial Sequence: Synthetic oligonucleotide
  Antisense strand to SEQ ID NO: 2573732
uuaauuggccagcuuauca

SEQ ID NO: 2573734 - RNA, 19 nt, Artificial Sequence
  Description of Artificial Sequence: Synthetic oligonucleotide
  Sense strand starting at position 3089 of SEQ ID NO: 1889020
gcgaauuuguuacugaauc

SEQ ID NO: 2573735 - RNA, 19 nt, Artificial Sequence
  Description of Artificial Sequence: Synthetic oligonucleotide
  Antisense strand to SEQ ID NO: 2573734
gauucaguaacaaauucgc

SEQ ID NO: 2573736 - RNA, 19 nt, Artificial Sequence
  Description of Artificial Sequence: Synthetic oligonucleotide
  Sense strand starting at position 3352 of SEQ ID NO: 1889020
agcuuucugcggucaaggu

SEQ ID NO: 2573737 - RNA, 19 nt, Artificial Sequence
  Description of Artificial Sequence: Synthetic oligonucleotide
  Antisense strand to SEQ ID NO: 2573736
accuugaccgcagaaagcu

SEQ ID NO: 2573738 - RNA, 19 nt, Artificial Sequence
  Description of Artificial Sequence: Synthetic oligonucleotide
  Sense strand starting at position 3449 of SEQ ID NO: 1889020
acugaaaugucucucaaag

SEQ ID NO: 2573739 - RNA, 19 nt, Artificial Sequence
  Description of Artificial Sequence: Synthetic oligonucleotide
  Antisense strand to SEQ ID NO: 2573738
cuuugagagacauuucagu

SEQ ID NO: 2573740 - RNA, 19 nt, Artificial Sequence
  Description of Artificial Sequence: Synthetic oligonucleotide
  Sense strand starting at position 3506 of SEQ ID NO: 1889020
cuggacugucugcauauau

SEQ ID NO: 2573741 - RNA, 19 nt, Artificial Sequence
  Description of Artificial Sequence: Synthetic oligonucleotide
  Antisense strand to SEQ ID NO: 2573740
auauaugcagacaguccag

SEQ ID NO: 2573742 - RNA, 19 nt, Artificial Sequence
  Description of Artificial Sequence: Synthetic oligonucleotide
  Sense strand starting at position 3554 of SEQ ID NO: 1889020
uggcaauuuagguguuuau

SEQ ID NO: 2573743 - RNA, 19 nt, Artificial Sequence
  Description of Artificial Sequence: Synthetic oligonucleotide
  Antisense strand to SEQ ID NO: 2573742
auaaacaccuaaauugcca

SEQ ID NO: 2573744 - RNA, 19 nt, Artificial Sequence
  Description of Artificial Sequence: Synthetic oligonucleotide
  Sense strand starting at position 3588 of SEQ ID NO: 1889020
aguccuuagagaugaugca

SEQ ID NO: 2573745 - RNA, 19 nt, Artificial Sequence
  Description of Artificial Sequence: Synthetic oligonucleotide
  Antisense strand to SEQ ID NO: 2573744
ugcaucaucucuaaggacu

SEQ ID NO: 2573746 - RNA, 19 nt, Artificial Sequence
  Description of Artificial Sequence: Synthetic oligonucleotide
  Sense strand starting at position 3610 of SEQ ID NO: 1889020
gggaaaccauccucgaucu

SEQ ID NO: 2573747 - RNA, 19 nt, Artificial Sequence
  Description of Artificial Sequence: Synthetic oligonucleotide
  Antisense strand to SEQ ID NO: 2573746
agaucgaggaugguuuccc

SEQ ID NO: 2573748 - RNA, 19 nt, Artificial Sequence
  Description of Artificial Sequence: Synthetic oligonucleotide
  Sense strand starting at position 3611 of SEQ ID NO: 1889020
ggaaaccauccucgaucuu

SEQ ID NO: 2573749 - RNA, 19 nt, Artificial Sequence
  Description of Artificial Sequence: Synthetic oligonucleotide
  Antisense strand to SEQ ID NO: 2573748
aagaucgaggaugguuucc

SEQ ID NO: 2573750 - RNA, 19 nt, Artificial Sequence
  Description of Artificial Sequence: Synthetic oligonucleotide
  Sense strand starting at position 3817 of SEQ ID NO: 1889020
augauuguaacuugguaga

SEQ ID NO: 2573751 - RNA, 19 nt, Artificial Sequence
  Description of Artificial Sequence: Synthetic oligonucleotide
  Antisense strand to SEQ ID NO: 2573750
ucuaccaaguuacaaucau

SEQ ID NO: 2573752 - RNA, 19 nt, Artificial Sequence
  Description of Artificial Sequence: Synthetic oligonucleotide
  Sense strand starting at position 3819 of SEQ ID NO: 1889020
gauuguaacuugguagaau

SEQ ID NO: 2573753 - RNA, 19 nt, Artificial Sequence
  Description of Artificial Sequence: Synthetic oligonucleotide
  Antisense strand to SEQ ID NO: 2573752
auucuaccaaguuacaauc

SEQ ID NO: 2573754 - RNA, 19 nt, Artificial Sequence
  Description of Artificial Sequence: Synthetic oligonucleotide
  Sense strand starting at position 3842 of SEQ ID NO: 1889020
cguguuucagucccagcau

SEQ ID NO: 2573755 - RNA, 19 nt, Artificial Sequence
  Description of Artificial Sequence: Synthetic oligonucleotide
  Antisense strand to SEQ ID NO: 2573754
augcugggacugaaacacg

SEQ ID NO: 2573756 - RNA, 19 nt, Artificial Sequence
  Description of Artificial Sequence: Synthetic oligonucleotide
  Sense strand starting at position 3854 of SEQ ID NO: 1889020
ccagcauaucuguaaaguu

SEQ ID NO: 2573757 - RNA, 19 nt, Artificial Sequence
  Description of Artificial Sequence: Synthetic oligonucleotide
  Antisense strand to SEQ ID NO: 2573756
aacuuuacagauaugcugg

SEQ ID NO: 2573758 - RNA, 19 nt, Artificial Sequence
  Description of Artificial Sequence: Synthetic oligonucleotide
  Sense strand starting at position 3891 of SEQ ID NO: 1889020
gucaucacucaaggacuau

SEQ ID NO: 2573759 - RNA, 19 nt, Artificial Sequence
  Description of Artificial Sequence: Synthetic oligonucleotide
  Antisense strand to SEQ ID NO: 2573758
auaguccuugagugaugac

SEQ ID NO: 2573760 - RNA, 19 nt, Artificial Sequence
  Description of Artificial Sequence: Synthetic oligonucleotide
  Sense strand starting at position 3909 of SEQ ID NO: 1889020
uuagaauuaugugucuaga

SEQ ID NO: 2573761 - RNA, 19 nt, Artificial Sequence
  Description of Artificial Sequence: Synthetic oligonucleotide
  Antisense strand to SEQ ID NO: 2573760
ucuagacacauaauucuaa

SEQ ID NO: 2573762 - RNA, 19 nt, Artificial Sequence
  Description of Artificial Sequence: Synthetic oligonucleotide
  Sense strand starting at position 3911 of SEQ ID NO: 1889020
agaauuaugugucuagacu

SEQ ID NO: 2573763 - RNA, 19 nt, Artificial Sequence
  Description of Artificial Sequence: Synthetic oligonucleotide
  Antisense strand to SEQ ID NO: 2573762
agucuagacacauaauucu

SEQ ID NO: 2573764 - RNA, 19 nt, Artificial Sequence
  Description of Artificial Sequence: Synthetic oligonucleotide
  Sense strand starting at position 3912 of SEQ ID NO: 1889020
gaauuaugugucuagacua

SEQ ID NO: 2573765 - RNA, 19 nt, Artificial Sequence
  Description of Artificial Sequence: Synthetic oligonucleotide
  Antisense strand to SEQ ID NO: 2573764
uagucuagacacauaauuc

SEQ ID NO: 2573766 - RNA, 19 nt, Artificial Sequence
  Description of Artificial Sequence: Synthetic oligonucleotide
  Sense strand starting at position 3938 of SEQ ID NO: 1889020
gacguuuggaagcaguaga

SEQ ID NO: 2573767 - RNA, 19 nt, Artificial Sequence
  Description of Artificial Sequence: Synthetic oligonucleotide
  Antisense strand to SEQ ID NO: 2573766
ucuacugcuuccaaacguc

SEQ ID NO: 2573768 - RNA, 19 nt, Artificial Sequence
  Description of Artificial Sequence: Synthetic oligonucleotide
  Sense strand starting at position 3980 of SEQ ID NO: 1889020
ucacuaacuagauggguga

SEQ ID NO: 2573769 - RNA, 19 nt, Artificial Sequence
  Description of Artificial Sequence: Synthetic oligonucleotide
  Antisense strand to SEQ ID NO: 2573768
ucacccaucuaguuaguga

SEQ ID NO: 2573770 - RNA, 19 nt, Artificial Sequence
  Description of Artificial Sequence: Synthetic oligonucleotide
  Sense strand starting at position 118 of SEQ ID NO: 1889021
aguagucauaucuaaggua

SEQ ID NO: 2573771 - RNA, 19 nt, Artificial Sequence
  Description of Artificial Sequence: Synthetic oligonucleotide
  Antisense strand to SEQ ID NO: 2573770
uaccuuagauaugacuacu

SEQ ID NO: 2573772 - RNA, 19 nt, Artificial Sequence
  Description of Artificial Sequence: Synthetic oligonucleotide
  Sense strand starting at position 232 of SEQ ID NO: 1889021
cggagaauuugauagacua

SEQ ID NO: 2573773 - RNA, 19 nt, Artificial Sequence
  Description of Artificial Sequence: Synthetic oligonucleotide
  Antisense strand to SEQ ID NO: 2573772
uagucuaucaaauucuccg

SEQ ID NO: 2573774 - RNA, 19 nt, Artificial Sequence
  Description of Artificial Sequence: Synthetic oligonucleotide
  Sense strand starting at position 283 of SEQ ID NO: 1889021
guuacauugcccuauacua

SEQ ID NO: 2573775 - RNA, 19 nt, Artificial Sequence
  Description of Artificial Sequence: Synthetic oligonucleotide
  Antisense strand to SEQ ID NO: 2573774
uaguauagggcaauguaac

SEQ ID NO: 2573776 - RNA, 19 nt, Artificial Sequence
  Description of Artificial Sequence: Synthetic oligonucleotide
  Sense strand starting at position 449 of SEQ ID NO: 1889021
aaugcacuuuggguauaau

SEQ ID NO: 2573777 - RNA, 19 nt, Artificial Sequence
  Description of Artificial Sequence: Synthetic oligonucleotide
  Antisense strand to SEQ ID NO: 2573776
auuauacccaaagugcauu

SEQ ID NO: 2573778 - RNA, 19 nt, Artificial Sequence
  Description of Artificial Sequence: Synthetic oligonucleotide
  Sense strand starting at position 452 of SEQ ID NO: 1889021
gcacuuuggguauaaucau

SEQ ID NO: 2573779 - RNA, 19 nt, Artificial Sequence
  Description of Artificial Sequence: Synthetic oligonucleotide
  Antisense strand to SEQ ID NO: 2573778
augauuauacccaaagugc

SEQ ID NO: 2573780 - RNA, 19 nt, Artificial Sequence
  Description of Artificial Sequence: Synthetic oligonucleotide
  Sense strand starting at position 458 of SEQ ID NO: 1889021
uggguauaaucauauuuga

SEQ ID NO: 2573781 - RNA, 19 nt, Artificial Sequence
  Description of Artificial Sequence: Synthetic oligonucleotide
  Antisense strand to SEQ ID NO: 2573780
ucaaauaugauuauaccca

SEQ ID NO: 2573782 - RNA, 19 nt, Artificial Sequence
  Description of Artificial Sequence: Synthetic oligonucleotide
  Sense strand starting at position 481 of SEQ ID NO: 1889021
cacagauauucguucuagc

SEQ ID NO: 2573783 - RNA, 19 nt, Artificial Sequence
  Description of Artificial Sequence: Synthetic oligonucleotide
  Antisense strand to SEQ ID NO: 2573782
gcuagaacgaauaucugug

SEQ ID NO: 2573784 - RNA, 19 nt, Artificial Sequence
  Description of Artificial Sequence: Synthetic oligonucleotide
  Sense strand starting at position 617 of SEQ ID NO: 1889021
aucaaaguagugcguuaga

SEQ ID NO: 2573785 - RNA, 19 nt, Artificial Sequence
  Description of Artificial Sequence: Synthetic oligonucleotide
  Antisense strand to SEQ ID NO: 2573784
ucuaacgcacuacuuugau

SEQ ID NO: 2573786 - RNA, 19 nt, Artificial Sequence
  Description of Artificial Sequence: Synthetic oligonucleotide
  Sense strand starting at position 620 of SEQ ID NO: 1889021
aaaguagugcguuagagaa

SEQ ID NO: 2573787 - RNA, 19 nt, Artificial Sequence
  Description of Artificial Sequence: Synthetic oligonucleotide
  Antisense strand to SEQ ID NO: 2573786
uucucuaacgcacuacuuu

SEQ ID NO: 2573788 - RNA, 19 nt, Artificial Sequence
  Description of Artificial Sequence: Synthetic oligonucleotide
  Sense strand starting at position 645 of SEQ ID NO: 1889021
aguacuaaacuguguagua

SEQ ID NO: 2573789 - RNA, 19 nt, Artificial Sequence
  Description of Artificial Sequence: Synthetic oligonucleotide
  Antisense strand to SEQ ID NO: 2573788
uacuacacaguuuaguacu

SEQ ID NO: 2573790 - RNA, 19 nt, Artificial Sequence
  Description of Artificial Sequence: Synthetic oligonucleotide
  Sense strand starting at position 646 of SEQ ID NO: 1889021
guacuaaacuguguaguac

SEQ ID NO: 2573791 - RNA, 19 nt, Artificial Sequence
  Description of Artificial Sequence: Synthetic oligonucleotide
  Antisense strand to SEQ ID NO: 2573790
guacuacacaguuuaguac

SEQ ID NO: 2573792 - RNA, 19 nt, Artificial Sequence
  Description of Artificial Sequence: Synthetic oligonucleotide
  Sense strand starting at position 703 of SEQ ID NO: 1889021
ccagcaugggauugacuaa

SEQ ID NO: 2573793 - RNA, 19 nt, Artificial Sequence
  Description of Artificial Sequence: Synthetic oligonucleotide
  Antisense strand to SEQ ID NO: 2573792
uuagucaaucccaugcugg

SEQ ID NO: 2573794 - RNA, 19 nt, Artificial Sequence
  Description of Artificial Sequence: Synthetic oligonucleotide
  Sense strand starting at position 914 of SEQ ID NO: 1889021
agagaauucccuuguugac

SEQ ID NO: 2573795 - RNA, 19 nt, Artificial Sequence
  Description of Artificial Sequence: Synthetic oligonucleotide
  Antisense strand to SEQ ID NO: 2573794
gucaacaagggaauucucu

SEQ ID NO: 2573796 - RNA, 19 nt, Artificial Sequence
  Description of Artificial Sequence: Synthetic oligonucleotide
  Sense strand starting at position 932 of SEQ ID NO: 1889021
cugaaacaguaucagacaa

SEQ ID NO: 2573797 - RNA, 19 nt, Artificial Sequence
  Description of Artificial Sequence: Synthetic oligonucleotide
  Antisense strand to SEQ ID NO: 2573796
uugucugauacuguuucag

SEQ ID NO: 2573798 - RNA, 19 nt, Artificial Sequence
  Description of Artificial Sequence: Synthetic oligonucleotide
  Sense strand starting at position 934 of SEQ ID NO: 1889021
gaaacaguaucagacaaga

SEQ ID NO: 2573799 - RNA, 19 nt, Artificial Sequence
  Description of Artificial Sequence: Synthetic oligonucleotide
  Antisense strand to SEQ ID NO: 2573798
ucuugucugauacuguuuc

SEQ ID NO: 2573800 - RNA, 19 nt, Artificial Sequence
  Description of Artificial Sequence: Synthetic oligonucleotide
  Sense strand starting at position 943 of SEQ ID NO: 1889021
ucagacaagaagugugaua

SEQ ID NO: 2573801 - RNA, 19 nt, Artificial Sequence
  Description of Artificial Sequence: Synthetic oligonucleotide
  Antisense strand to SEQ ID NO: 2573800
uaucacacuucuugucuga

SEQ ID NO: 2573802 - RNA, 19 nt, Artificial Sequence
  Description of Artificial Sequence: Synthetic oligonucleotide
  Sense strand starting at position 948 of SEQ ID NO: 1889021
caagaagugugauaaggag

SEQ ID NO: 2573803 - RNA, 19 nt, Artificial Sequence
  Description of Artificial Sequence: Synthetic oligonucleotide
  Antisense strand to SEQ ID NO: 2573802
cuccuuaucacacuucuug

SEQ ID NO: 2573804 - RNA, 19 nt, Artificial Sequence
  Description of Artificial Sequence: Synthetic oligonucleotide
  Sense strand starting at position 955 of SEQ ID NO: 1889021
ugugauaaggagcauguua

SEQ ID NO: 2573805 - RNA, 19 nt, Artificial Sequence
  Description of Artificial Sequence: Synthetic oligonucleotide
  Antisense strand to SEQ ID NO: 2573804
uaacaugcuccuuaucaca

SEQ ID NO: 2573806 - RNA, 19 nt, Artificial Sequence
  Description of Artificial Sequence: Synthetic oligonucleotide
  Sense strand starting at position 957 of SEQ ID NO: 1889021
ugauaaggagcauguuaug

SEQ ID NO: 2573807 - RNA, 19 nt, Artificial Sequence
  Description of Artificial Sequence: Synthetic oligonucleotide
  Antisense strand to SEQ ID NO: 2573806
cauaacaugcuccuuauca

SEQ ID NO: 2573808 - RNA, 19 nt, Artificial Sequence
  Description of Artificial Sequence: Synthetic oligonucleotide
  Sense strand starting at position 963 of SEQ ID NO: 1889021
ggagcauguuauguugaaa

SEQ ID NO: 2573809 - RNA, 19 nt, Artificial Sequence
  Description of Artificial Sequence: Synthetic oligonucleotide
  Antisense strand to SEQ ID NO: 2573808
uuucaacauaacaugcucc

SEQ ID NO: 2573810 - RNA, 19 nt, Artificial Sequence
  Description of Artificial Sequence: Synthetic oligonucleotide
  Sense strand starting at position 1043 of SEQ ID NO: 1889021
guguuuaacaacgaaguga

SEQ ID NO: 2573811 - RNA, 19 nt, Artificial Sequence
  Description of Artificial Sequence: Synthetic oligonucleotide
  Antisense strand to SEQ ID NO: 2573810
ucacuucguuguuaaacac

SEQ ID NO: 2573812 - RNA, 19 nt, Artificial Sequence
  Description of Artificial Sequence: Synthetic oligonucleotide
  Sense strand starting at position 1227 of SEQ ID NO: 1889021
caaagaacucgaugaugua

SEQ ID NO: 2573813 - RNA, 19 nt, Artificial Sequence
  Description of Artificial Sequence: Synthetic oligonucleotide
  Antisense strand to SEQ ID NO: 2573812
uacaucaucgaguucuuug

SEQ ID NO: 2573814 - RNA, 19 nt, Artificial Sequence
  Description of Artificial Sequence: Synthetic oligonucleotide
  Sense strand starting at position 1269 of SEQ ID NO: 1889021
ucaugauaacgcuaggcau

SEQ ID NO: 2573815 - RNA, 19 nt, Artificial Sequence
  Description of Artificial Sequence: Synthetic oligonucleotide
  Antisense strand to SEQ ID NO: 2573814
augccuagcguuaucauga

SEQ ID NO: 2573816 - RNA, 19 nt, Artificial Sequence
  Description of Artificial Sequence: Synthetic oligonucleotide
  Sense strand starting at position 1319 of SEQ ID NO: 1889021
aggaaucacugacaggaaa

SEQ ID NO: 2573817 - RNA, 19 nt, Artificial Sequence
  Description of Artificial Sequence: Synthetic oligonucleotide
  Antisense strand to SEQ ID NO: 2573816
uuuccugucagugauuccu

SEQ ID NO: 2573818 - RNA, 19 nt, Artificial Sequence
  Description of Artificial Sequence: Synthetic oligonucleotide
  Sense strand starting at position 1338 of SEQ ID NO: 1889021
ccauaaaugucccugcugu

SEQ ID NO: 2573819 - RNA, 19 nt, Artificial Sequence
  Description of Artificial Sequence: Synthetic oligonucleotide
  Antisense strand to SEQ ID NO: 2573818
acagcagggacauuuaugg

SEQ ID NO: 2573820 - RNA, 19 nt, Artificial Sequence
  Description of Artificial Sequence: Synthetic oligonucleotide
  Sense strand starting at position 1353 of SEQ ID NO: 1889021
cuguuauccugucugagaa

SEQ ID NO: 2573821 - RNA, 19 nt, Artificial Sequence
  Description of Artificial Sequence: Synthetic oligonucleotide
  Antisense strand to SEQ ID NO: 2573820
uucucagacaggauaacag

SEQ ID NO: 2573822 - RNA, 19 nt, Artificial Sequence
  Description of Artificial Sequence: Synthetic oligonucleotide
  Sense strand starting at position 1382 of SEQ ID NO: 1889021
guugauaacagcugucaug

SEQ ID NO: 2573823 - RNA, 19 nt, Artificial Sequence
  Description of Artificial Sequence: Synthetic oligonucleotide
  Antisense strand to SEQ ID NO: 2573822
caugacagcuguuaucaac

SEQ ID NO: 2573824 - RNA, 19 nt, Artificial Sequence
  Description of Artificial Sequence: Synthetic oligonucleotide
  Sense strand starting at position 2187 of SEQ ID NO: 1889021
cagcuaaggcgugagaauu

SEQ ID NO: 2573825 - RNA, 19 nt, Artificial Sequence
  Description of Artificial Sequence: Synthetic oligonucleotide
  Antisense strand to SEQ ID NO: 2573824
aauucucacgccuuagcug

SEQ ID NO: 2573826 - RNA, 19 nt, Artificial Sequence
  Description of Artificial Sequence: Synthetic oligonucleotide
  Sense strand starting at position 2321 of SEQ ID NO: 1889021
guaucagggcuugaggagu

SEQ ID NO: 2573827 - RNA, 19 nt, Artificial Sequence
  Description of Artificial Sequence: Synthetic oligonucleotide
  Antisense strand to SEQ ID NO: 2573826
acuccucaagcccugauac

SEQ ID NO: 2573828 - RNA, 19 nt, Artificial Sequence
  Description of Artificial Sequence: Synthetic oligonucleotide
  Sense strand starting at position 2921 of SEQ ID NO: 1889021
ccuacuggacgucagacau

SEQ ID NO: 2573829 - RNA, 19 nt, Artificial Sequence
  Description of Artificial Sequence: Synthetic oligonucleotide
  Antisense strand to SEQ ID NO: 2573828
augucugacguccaguagg

SEQ ID NO: 2573830 - RNA, 19 nt, Artificial Sequence
  Description of Artificial Sequence: Synthetic oligonucleotide
  Sense strand starting at position 2931 of SEQ ID NO: 1889021
gucagacauuaaccaguga

SEQ ID NO: 2573831 - RNA, 19 nt, Artificial Sequence
  Description of Artificial Sequence: Synthetic oligonucleotide
  Antisense strand to SEQ ID NO: 2573830
ucacugguuaaugucugac

SEQ ID NO: 2573832 - RNA, 19 nt, Artificial Sequence
  Description of Artificial Sequence: Synthetic oligonucleotide
  Sense strand starting at position 3191 of SEQ ID NO: 1889021
gggugauuccauuagccaa

SEQ ID NO: 2573833 - RNA, 19 nt, Artificial Sequence
  Description of Artificial Sequence: Synthetic oligonucleotide
  Antisense strand to SEQ ID NO: 2573832
uuggcuaauggaaucaccc

SEQ ID NO: 2573834 - RNA, 19 nt, Artificial Sequence
  Description of Artificial Sequence: Synthetic oligonucleotide
  Sense strand starting at position 3210 of SEQ ID NO: 1889021
ugugcuaugacguccgauu

SEQ ID NO: 2573835 - RNA, 19 nt, Artificial Sequence
  Description of Artificial Sequence: Synthetic oligonucleotide
  Antisense strand to SEQ ID NO: 2573834
aaucggacgucauagcaca

SEQ ID NO: 2573836 - RNA, 19 nt, Artificial Sequence
  Description of Artificial Sequence: Synthetic oligonucleotide
  Sense strand starting at position 3271 of SEQ ID NO: 1889021
cccuaaucacgcgagagua

SEQ ID NO: 2573837 - RNA, 19 nt, Artificial Sequence
  Description of Artificial Sequence: Synthetic oligonucleotide
  Antisense strand to SEQ ID NO: 2573836
uacucucgcgugauuaggg

SEQ ID NO: 2573838 - RNA, 19 nt, Artificial Sequence
  Description of Artificial Sequence: Synthetic oligonucleotide
  Sense strand starting at position 3300 of SEQ ID NO: 1889021
ggguuuauugcuuaugugu

SEQ ID NO: 2573839 - RNA, 19 nt, Artificial Sequence
  Description of Artificial Sequence: Synthetic oligonucleotide
  Antisense strand to SEQ ID NO: 2573838
acacauaagcaauaaaccc

SEQ ID NO: 2573840 - RNA, 19 nt, Artificial Sequence
  Description of Artificial Sequence: Synthetic oligonucleotide
  Sense strand starting at position 3380 of SEQ ID NO: 1889021
ggaacuauguucuuccaaa

SEQ ID NO: 2573841 - RNA, 19 nt, Artificial Sequence
  Description of Artificial Sequence: Synthetic oligonucleotide
  Antisense strand to SEQ ID NO: 2573840
uuuggaagaacauaguucc

SEQ ID NO: 2573842 - RNA, 19 nt, Artificial Sequence
  Description of Artificial Sequence: Synthetic oligonucleotide
  Sense strand starting at position 3800 of SEQ ID NO: 1889021
acgauaauauuagcugaca

SEQ ID NO: 2573843 - RNA, 19 nt, Artificial Sequence
  Description of Artificial Sequence: Synthetic oligonucleotide
  Antisense strand to SEQ ID NO: 2573842
ugucagcuaauauuaucgu

SEQ ID NO: 2573844 - RNA, 19 nt, Artificial Sequence
  Description of Artificial Sequence: Synthetic oligonucleotide
  Sense strand starting at position 3801 of SEQ ID NO: 1889021
cgauaauauuagcugacau

SEQ ID NO: 2573845 - RNA, 19 nt, Artificial Sequence
  Description of Artificial Sequence: Synthetic oligonucleotide
  Antisense strand to SEQ ID NO: 2573844
augucagcuaauauuaucg

SEQ ID NO: 2573846 - RNA, 19 nt, Artificial Sequence
  Description of Artificial Sequence: Synthetic oligonucleotide
  Sense strand starting at position 3844 of SEQ ID NO: 1889021
gggugaugccaagagcuuu

SEQ ID NO: 2573847 - RNA, 19 nt, Artificial Sequence
  Description of Artificial Sequence: Synthetic oligonucleotide
  Antisense strand to SEQ ID NO: 2573846
aaagcucuuggcaucaccc

SEQ ID NO: 2573848 - RNA, 19 nt, Artificial Sequence
  Description of Artificial Sequence: Synthetic oligonucleotide
  Sense strand starting at position 3906 of SEQ ID NO: 1889021
cccuuugacgguugagaac

SEQ ID NO: 2573849 - RNA, 19 nt, Artificial Sequence
  Description of Artificial Sequence: Synthetic oligonucleotide
  Antisense strand to SEQ ID NO: 2573848
guucucaaccgucaaaggg

SEQ ID NO: 2573850 - RNA, 19 nt, Artificial Sequence
  Description of Artificial Sequence: Synthetic oligonucleotide
  Sense strand starting at position 51 of SEQ ID NO: 1889022
uucugaagucugggcacau

SEQ ID NO: 2573851 - RNA, 19 nt, Artificial Sequence
  Description of Artificial Sequence: Synthetic oligonucleotide
  Antisense strand to SEQ ID NO: 2573850
augugcccagacuucagaa

SEQ ID NO: 2573852 - RNA, 19 nt, Artificial Sequence
  Description of Artificial Sequence: Synthetic oligonucleotide
  Sense strand starting at position 52 of SEQ ID NO: 1889022
ucugaagucugggcacaua

SEQ ID NO: 2573853 - RNA, 19 nt, Artificial Sequence
  Description of Artificial Sequence: Synthetic oligonucleotide
  Antisense strand to SEQ ID NO: 2573852
uaugugcccagacuucaga

SEQ ID NO: 2573854 - RNA, 19 nt, Artificial Sequence
  Description of Artificial Sequence: Synthetic oligonucleotide
  Sense strand starting at position 137 of SEQ ID NO: 1889022
agacacggaacuugugauu

SEQ ID NO: 2573855 - RNA, 19 nt, Artificial Sequence
  Description of Artificial Sequence: Synthetic oligonucleotide
  Antisense strand to SEQ ID NO: 2573854
aaucacaaguuccgugucu

SEQ ID NO: 2573856 - RNA, 19 nt, Artificial Sequence
  Description of Artificial Sequence: Synthetic oligonucleotide
  Sense strand starting at position 142 of SEQ ID NO: 1889022
cggaacuugugauuacacu

SEQ ID NO: 2573857 - RNA, 19 nt, Artificial Sequence
  Description of Artificial Sequence: Synthetic oligonucleotide
  Antisense strand to SEQ ID NO: 2573856
aguguaaucacaaguuccg

SEQ ID NO: 2573858 - RNA, 19 nt, Artificial Sequence
  Description of Artificial Sequence: Synthetic oligonucleotide
  Sense strand starting at position 169 of SEQ ID NO: 1889022
cuguucugaacuugaggga

SEQ ID NO: 2573859 - RNA, 19 nt, Artificial Sequence
  Description of Artificial Sequence: Synthetic oligonucleotide
  Antisense strand to SEQ ID NO: 2573858
ucccucaaguucagaacag

SEQ ID NO: 2573860 - RNA, 19 nt, Artificial Sequence
  Description of Artificial Sequence: Synthetic oligonucleotide
  Sense strand starting at position 215 of SEQ ID NO: 1889022
ugaggacauguguggcaaa

SEQ ID NO: 2573861 - RNA, 19 nt, Artificial Sequence
  Description of Artificial Sequence: Synthetic oligonucleotide
  Antisense strand to SEQ ID NO: 2573860
uuugccacacauguccuca

SEQ ID NO: 2573862 - RNA, 19 nt, Artificial Sequence
  Description of Artificial Sequence: Synthetic oligonucleotide
  Sense strand starting at position 316 of SEQ ID NO: 1889022
cucuaaauguuucuggagu

SEQ ID NO: 2573863 - RNA, 19 nt, Artificial Sequence
  Description of Artificial Sequence: Synthetic oligonucleotide
  Antisense strand to SEQ ID NO: 2573862
acuccagaaacauuuagag

SEQ ID NO: 2573864 - RNA, 19 nt, Artificial Sequence
  Description of Artificial Sequence: Synthetic oligonucleotide
  Sense strand starting at position 375 of SEQ ID NO: 1889022
cugggagccaaauguuaac

SEQ ID NO: 2573865 - RNA, 19 nt, Artificial Sequence
  Description of Artificial Sequence: Synthetic oligonucleotide
  Antisense strand to SEQ ID NO: 2573864
guuaacauuuggcucccag

SEQ ID NO: 2573866 - RNA, 19 nt, Artificial Sequence
  Description of Artificial Sequence: Synthetic oligonucleotide
  Sense strand starting at position 502 of SEQ ID NO: 1889022
aggccaauuccuggcaaga

SEQ ID NO: 2573867 - RNA, 19 nt, Artificial Sequence
  Description of Artificial Sequence: Synthetic oligonucleotide
  Antisense strand to SEQ ID NO: 2573866
ucuugccaggaauuggccu

SEQ ID NO: 2573868 - RNA, 19 nt, Artificial Sequence
  Description of Artificial Sequence: Synthetic oligonucleotide
  Sense strand starting at position 517 of SEQ ID NO: 1889022
aagaucuuugucgaacugu

SEQ ID NO: 2573869 - RNA, 19 nt, Artificial Sequence
  Description of Artificial Sequence: Synthetic oligonucleotide
  Antisense strand to SEQ ID NO: 2573868
acaguucgacaaagaucuu

SEQ ID NO: 2573870 - RNA, 19 nt, Artificial Sequence
  Description of Artificial Sequence: Synthetic oligonucleotide
  Sense strand starting at position 526 of SEQ ID NO: 1889022
gucgaacuguauuugcaaa

SEQ ID NO: 2573871 - RNA, 19 nt, Artificial Sequence
  Description of Artificial Sequence: Synthetic oligonucleotide
  Antisense strand to SEQ ID NO: 2573870
uuugcaaauacaguucgac

SEQ ID NO: 2573872 - RNA, 19 nt, Artificial Sequence
  Description of Artificial Sequence: Synthetic oligonucleotide
  Sense strand starting at position 586 of SEQ ID NO: 1889022
cccuuaauuucgucugguu

SEQ ID NO: 2573873 - RNA, 19 nt, Artificial Sequence
  Description of Artificial Sequence: Synthetic oligonucleotide
  Antisense strand to SEQ ID NO: 2573872
aaccagacgaaauuaaggg

SEQ ID NO: 2573874 - RNA, 19 nt, Artificial Sequence
  Description of Artificial Sequence: Synthetic oligonucleotide
  Sense strand starting at position 910 of SEQ ID NO: 1889022
aaaguaucgcauugacuac

SEQ ID NO: 2573875 - RNA, 19 nt, Artificial Sequence
  Description of Artificial Sequence: Synthetic oligonucleotide
  Antisense strand to SEQ ID NO: 2573874
guagucaaugcgauacuuu

SEQ ID NO: 2573876 - RNA, 19 nt, Artificial Sequence
  Description of Artificial Sequence: Synthetic oligonucleotide
  Sense strand starting at position 923 of SEQ ID NO: 1889022
gacuacuguuuaucucgau

SEQ ID NO: 2573877 - RNA, 19 nt, Artificial Sequence
  Description of Artificial Sequence: Synthetic oligonucleotide
  Antisense strand to SEQ ID NO: 2573876
aucgagauaaacaguaguc

SEQ ID NO: 2573878 - RNA, 19 nt, Artificial Sequence
  Description of Artificial Sequence: Synthetic oligonucleotide
  Sense strand starting at position 927 of SEQ ID NO: 1889022
acuguuuaucucgaugacu

SEQ ID NO: 2573879 - RNA, 19 nt, Artificial Sequence
  Description of Artificial Sequence: Synthetic oligonucleotide
  Antisense strand to SEQ ID NO: 2573878
agucaucgagauaaacagu

SEQ ID NO: 2573880 - RNA, 19 nt, Artificial Sequence
  Description of Artificial Sequence: Synthetic oligonucleotide
  Sense strand starting at position 929 of SEQ ID NO: 1889022
uguuuaucucgaugacuga

SEQ ID NO: 2573881 - RNA, 19 nt, Artificial Sequence
  Description of Artificial Sequence: Synthetic oligonucleotide
  Antisense strand to SEQ ID NO: 2573880
ucagucaucgagauaaaca

SEQ ID NO: 2573882 - RNA, 19 nt, Artificial Sequence
  Description of Artificial Sequence: Synthetic oligonucleotide
  Sense strand starting at position 930 of SEQ ID NO: 1889022
guuuaucucgaugacugaa

SEQ ID NO: 2573883 - RNA, 19 nt, Artificial Sequence
  Description of Artificial Sequence: Synthetic oligonucleotide
  Antisense strand to SEQ ID NO: 2573882
uucagucaucgagauaaac

SEQ ID NO: 2573884 - RNA, 19 nt, Artificial Sequence
  Description of Artificial Sequence: Synthetic oligonucleotide
  Sense strand starting at position 957 of SEQ ID NO: 1889022
uuggcaucccuguagcaaa

SEQ ID NO: 2573885 - RNA, 19 nt, Artificial Sequence
  Description of Artificial Sequence: Synthetic oligonucleotide
  Antisense strand to SEQ ID NO: 2573884
uuugcuacagggaugccaa

SEQ ID NO: 2573886 - RNA, 19 nt, Artificial Sequence
  Description of Artificial Sequence: Synthetic oligonucleotide
  Sense strand starting at position 1688 of SEQ ID NO: 1889022
accugaaguagugagucua

SEQ ID NO: 2573887 - RNA, 19 nt, Artificial Sequence
  Description of Artificial Sequence: Synthetic oligonucleotide
  Antisense strand to SEQ ID NO: 2573886
uagacucacuacuucaggu

SEQ ID NO: 2573888 - RNA, 19 nt, Artificial Sequence
  Description of Artificial Sequence: Synthetic oligonucleotide
  Sense strand starting at position 2253 of SEQ ID NO: 1889022
cuggguuugagguaaugac

SEQ ID NO: 2573889 - RNA, 19 nt, Artificial Sequence
  Description of Artificial Sequence: Synthetic oligonucleotide
  Antisense strand to SEQ ID NO: 2573888
gucauuaccucaaacccag

SEQ ID NO: 2573890 - RNA, 19 nt, Artificial Sequence
  Description of Artificial Sequence: Synthetic oligonucleotide
  Sense strand starting at position 2271 of SEQ ID NO: 1889022
ccuuucuccuaggucugaa

SEQ ID NO: 2573891 - RNA, 19 nt, Artificial Sequence
  Description of Artificial Sequence: Synthetic oligonucleotide
  Antisense strand to SEQ ID NO: 2573890
uucagaccuaggagaaagg

SEQ ID NO: 2573892 - RNA, 19 nt, Artificial Sequence
  Description of Artificial Sequence: Synthetic oligonucleotide
  Sense strand starting at position 2397 of SEQ ID NO: 1889022
ggguccagccaguaugaua

SEQ ID NO: 2573893 - RNA, 19 nt, Artificial Sequence
  Description of Artificial Sequence: Synthetic oligonucleotide
  Antisense strand to SEQ ID NO: 2573892
uaucauacuggcuggaccc

SEQ ID NO: 2573894 - RNA, 19 nt, Artificial Sequence
  Description of Artificial Sequence: Synthetic oligonucleotide
  Sense strand starting at position 2404 of SEQ ID NO: 1889022
gccaguaugauauacgaag
